United States Patent Application Publication US 2008/0276334 A1 - sequence listing, part 8

SEQ ID NO: 48255 - DNA, 459 bp, Glycine max
  unsure (1)..(459): unsure at all n locations
  Clone ID: LIB3107-025-Q1-K1-G5
gaagaaagaccgacccacgccacccgtccgttcctataatactacatacagattttctaacacctgngctactatctcccacgcccggttctttttttactcatcctcaattgcccttcattgtggctgctctctaccttattatctatatgaagcaactggctggggtttggaaatacctgtactcaataaacaattggaggctcccaaatctaatggcatcaattttattgcttaatgtgttatatatcctttctatccaacatgtcatccttttagtgattcatattttttatatatattataattttccatctaaaaaagttttgctcttttaacttcttacttattttataaataaagcttattttcctttacattaaattttaattcttttaaaaaaattttttccttcccttcttattattttaataaattattttcatctttttatttttt

SEQ ID NO: 48256 - DNA, 326 bp, Glycine max
  Clone ID: LIB3107-025-Q1-K1-G6
ggtggacaccatggccaacaacaacgaagaggaggaggaagcagtggcgccaatggtgaagttgggttcttacggtggtgaggttcggttggtggttggtggggaggaatccgctgcggaggagaccatgctgctttggggtattcagcagcccacactttccaaacccaatgccttcgtctctcaagcttctttgcaactctccctcgactcttgtggccactctctctccattcttcaatccccttcctcattgggaacgcctggagtaactggagcagtgatgtgggacagtggagttgtactgggaaagtttctagagcatg

SEQ ID NO: 48257 - DNA, 383 bp, Glycine max
  Clone ID: LIB3107-025-Q1-K1-G7
gaaggtgcaagagtttgttgtgagctataagctagtttatcgtgaggagaatatgaagttgtttgttttctttgttgctgcagtagttttggtagcatggtcatgccatggcgcaggctaccaaaggttccctctccgaatgaaaactggctatggtgagcgttcttcggaggtaaaatgcgcaagttttaggcttgctgtggaagcacacaacatccgagcctttaaaaccattcctgaagagtgcgttgaaccaacaaaggactacattaatggcgaacaatttagatcagactctaaaacagttaaccaacaagctttcttttatgctagtgaacgcgaagtccatcacaacgacatatttatattcggcatagataaca

SEQ ID NO: 48258 - DNA, 409 bp, Glycine max
  Clone ID: LIB3107-025-Q1-K1-G8
gaaagaagggcgggaccacaccttcgtccgggctgcaaaaagacaccaaaaggggcccgggttgtgaacctacttaaccactccaaacccagcacaccaccattattcatatctcattctctaacctttcactctgccttactcactctctactttgctcatcatcgtagatgaaccaacacttctagtctctcttactttataaccatgtaaaaatgagtcacctaatgaaaaattagtagcttcttgttgtgctttttattttgtttgtgttgagataaatttgtttgtttgtttggtattgttttgtgttttatgaattatttgatgggtgaagaaggagaagtggtgagaaagcaaggacaaaggggtgttggtggagataagtggtacttgtatagctgcttac

SEQ ID NO: 48259 - DNA, 395 bp, Glycine max
  Clone ID: LIB3107-025-Q1-K1-G9
tttgactcacacgtaacttcatctgggttgcagggacgaagaataataaaatgggttccgataataccaacttggagttcttgaaggagatcggtttgggctcctccaacattggttcttacattaatggccaatggaaagccactggttcttctgtcacttctgttaatccttctaacaatcagagcatagctcaagtgactgaagcgactttgcaagattatgaggagggattgcaagcttgcagtgaagcagccaagacatggatgactattccggcaccgaagagaagtgagattgtgagacaaattggtgaagcattgagggccaagttggatccttttggtaaactggtgtcttttgaaatgggaaaaattttcccaaaagaattggga

SEQ ID NO: 48260 - DNA, 352 bp, Glycine max
  Clone ID: LIB3107-025-Q1-K1-H1
gactactggttattccacattcgaagaaataaactcacccactaagcactacacaaatcacacagagttgcaagagaaagataaaagaagatggcgactcttgattccgacgtgcctatggttcccgccggcgagccctcgagcagcgccggtccttcttccaagaagcccaagcgcttcgagatcaagaagtggaacgccgtcgctctctgggcttgggacatcgttgtcgataactgtgctatctgccggaaccacatcatggatctctgcatcgagtgccaagccaaccaggctagcgccactagcgaggaatgcactgtggcttggggagtttgtaaccatgcttttc

SEQ ID NO: 48261 - DNA, 351 bp, Glycine max
  Clone ID: LIB3107-025-Q1-K1-H10
ggtgtgagttcattaacatatgcaaattctctgtgttgtgttgtgtacttgtgttaattgtgttgttgttgtaggaaatttaagtgaagagagaatgatgatgaagtctgctatgtgtgcattggtgcttgtggcactggttgtggttgaagtggggcccatggctgaggctgcggtggcttgcaacccaacacagttgactccttgtcttccggcaattaattcaggttctgcaccttcgagtgcttgttgccagaagctgaaggagcaaaagccatgcttctgtggctacctcaaaaaccctagcttgaagcagtatgttaactcttctaatgccaaaaaaaaccgtag

SEQ ID NO: 48262 - DNA, 77 bp, Glycine max
  Clone ID: LIB3107-025-Q1-K1-H11
ccgaaaccccaaaatttcagtatctagtcatcaatcatcaacacatatctcagcgtgtttttatgtgaatccacctt

SEQ ID NO: 48263 - DNA, 176 bp, Glycine max
  Clone ID: LIB3107-025-Q1-K1-H2
ctcacacatacaccacataagagaacactatttaaaaagaaagaacatgttcaagaagcagtgtgagccatggagaaaagaaaaaaaaaaagaactgaactccttcaattagatcattccttcttttcttcaaatggtagcatgaatacattgttaatttctgagatggcgagtta

SEQ ID NO: 48264 - DNA, 153 bp, Glycine max
  Clone ID: LIB3107-025-Q1-K1-H4
agcgtttaatgaagaaacaaccacttctgactattggtcgctcactgtgaccggcttgatgcagcaaatatatgcaaccagagatctatccgattacttgtgggactccacagatgttgcgaacaatatcaatgacagattatagacgaatgc

SEQ ID NO: 48265 - DNA, 233 bp, Glycine max
  Clone ID: LIB3107-025-Q1-K1-H7
tggaaggaccgacccgagcgacgcgtaccgctgacaaaaaaccaccaaaagggactcgatttatgaaattaaaacaaagctttaaacgcacgtgactttcgagtttcaaaattccttaaacacccacccactttaggtcactcaatctgttctaccatcaaaaccttctttacaccaaacctacatgtagctctttctatataaccatacaacactgcctgatcttattataa

SEQ ID NO: 48266 - DNA, 315 bp, Glycine max
  Clone ID: LIB3107-025-Q1-K1-H8
ataagacaacaacagaaagcacgtctaacagccggaaactctgtcttttctgttcggtctttctccgatcgcatcactcccaacccccatcacgccttcccgaagaagaactcttttgaaggtcatcattctcggtgacaacattgtggagaagacagattcgatgaaccaggctgtcaataaacattttagttattaatgcagagcaaccattggagcggattgttctaccccagaagtgcaatttggaaataagcttttcaccttacacatttgggatacagcttgccaacaaagatttcaataccttggagt

SEQ ID NO: 48267 - DNA, 177 bp, Glycine max
  Clone ID: LIB3107-025-Q1-K1-H9
ggtgtcagatgagaacatcatgatgttacatggggggaataatttgctcacagagttagcaatacacattttactcttatttcttatatctcttcctaagaagaatctaattctaaacttcattacacatatatctacagatttcttactttctatctcaatcttttcttctttctt

SEQ ID NO: 48268 - DNA, 443 bp, Glycine max
  Clone ID: LIB3107-026-Q1-K1-A10
cgcttgtttacgcaacgcaagcgattgttagttgtattcgatggactacgatttcagaaggaggtcgggcccacaacctccgatgtaccgtccgccaccgccaccgtcaccgatgtaccgtccatcaccgtatcaacagaatcctactccttcttcaggacttggcgttagggttggtataaagccggaatataggatcacaccgtcgcctcatttatcatcacttgctggagataatccacggagcaacttccaatttgattttggattggagagaaaaattttagctgaagcagagaaggataacccaaattggagcaaatttggatcagaaaatattccaactaaagtttctgattcatcaacagcaaaggttactgctttggatcccattgtgagcaaatttatggccatggggcttagccgagaggctgttctcattg

SEQ ID NO: 48269 - DNA, 446 bp, Glycine max
  unsure (1)..(446): unsure at all n locations
  Clone ID: LIB3107-026-Q1-K1-A11
cacacactctcttcaatttctagggttttgctattgctttgcctccgttccccctttctcgcaaaaacaacgccttttctcttctccttcgtatctattctttgcgtttggtttttggttgattgaaggcattcacagcgtaattcgttgctgcattttaatcgatttatctaaccaggactgaatgacctaatggagtctaaaggtgggaaaaagaagtctagtagtagtagtagtaaatcaattttttacgaagctcccctcggatacagcattgaagacgttagaccaaacggtggaatcaagaaattcagatctgctgcttactctaactgttctcgcaaaccatcctgatacacatccggattgatagttcgttgcatgcaaccatagttttattaggattttntcttctttgttttcaattangtttttttggtgctctc

SEQ ID NO: 48270 - DNA, 437 bp, Glycine max
  unsure (1)..(437): unsure at all n locations
  Clone ID: LIB3107-026-Q1-K1-A12
agttaactcactaacaatcacatggcttctgaactcaccaaactgatccttccatggaaagttcgctgactcatttccctcctttccaccctcgccgacacctctcgccgctccaacgccaccatcaaccgccgcctctttaacctcgctgaccgccagtcactgccaaaccccacccccgtcgacggcgtttcctcctccgacgtcaccgtcgatcccgcccgcaacctctggttccgcctcttcgtcccctcctcttcctccgccaccaccctcccggtcttcgtctacttccatggcggcgccttcgctttcttctccgcagcttcaaccccttacgacgccgtttgtcgtctctactgtcgctcccttaacgccgtcgttatctccgtcaactaccgnctcgcccctgaacaccgctaccccttccaatacga

SEQ ID NO: 48271 - DNA, 436 bp, Glycine max
  unsure (1)..(436): unsure at all n locations
  Clone ID: LIB3107-026-Q1-K1-A9
cccacgcgtccgtccaactcatttcttcactctgattcttgccccaagctgtaactgtaactgatccgcggaccgtaaaccacaagagagaaatgggatctgctggagcccttaggaacattgttcgctctctctcagtcgcatcatcaagagctttattgcctcgaatctccaccaatgcttcgatggctccaatttgttttgctctgccatctccctgcaaacctcctcaacggcttcttcccctttggagtcacttccacagcttgacagacactcgcttccccaagagacgcccctctgaaagacctcgtcgaaagagggccagcttgagaccctctgggccttatgcttgggttcaatatacacctggccaaccgatacttncaaacaagcctaatgaaaggagtgtcaaaaggagaaatgagaagaaacg

SEQ ID NO: 48272 - DNA, 442 bp, Glycine max
  unsure (1)..(442): unsure at all n locations
  Clone ID: LIB3107-026-Q1-K1-B10
ctcgtgaggctgctatggcagttcaaggaaagatggtagattctcagcgtaagaagagcagggcaagtttgcggaagcttgagaaacaacctgaatggttgaagggtggagagctccgtgattatcaacttgagggtctgaattttcttgttaacagttggagaaatgatacaaatgtcattttagctgatgaaatgggccttggaaaaactgttcagtcagtatcgatgcttggttttctacagaatgcccagcaaatccatggtccttttcttgtagttgttccattgtccactttatcaaattgggccaaagaattcaggaagtggcttcctgatatgaatattatcatatatgtaggtactcgtgcaagtcgagaggtttgtcaacaatatgaattttataatgagaaaaaacctgngaagccaataaaaatcaatgc

SEQ ID NO: 48273 - DNA, 446 bp, Glycine max
  Clone ID: LIB3107-026-Q1-K1-B11
ggaagactccagtccaagtgtaccagagtttctgtgagagcttcaagtcttcattctctccgttcatgggctctacgatcatgagcatttccatgggtttaggaccggatggtgagctacgttatccatctcacccccagctgccgagtaatggaaaaactcaaggtgctggggaattccagtgttatgaccaaaacatgctcagctttctcaagcaacatgctgaagcatctggaaatcctctgtgggggcttggtggtcctcatgatgcacctacctatgaccagcccccatacaatggcttcttcaatgatggggcttcttgggagtccacatatggggacttcttcctctcttggtattccaatcagctcatagctcatggagattgcctcctttcattggcatcttcaacttttggtgactctggggtgacaatctatgga

SEQ ID NO: 48274 - DNA, 412 bp, Glycine max
  unsure (1)..(412): unsure at all n locations
  Clone ID: LIB3107-026-Q1-K1-B12
cggacgcgtgggtgagaggccaagcccaagtcctccagaggccgcctcctcgcggtgtccggacagtgtacccacttgcccttgttctctcacctactagggagctatccatgcagatacatgaagaggctaggaaattttcttaccagactggggttagggtcgttgttgcttatggtggagctccgataaaccaacagcttcgggaacttgagagaggggtggatatccttgttgcaactccgggaagactggtagatttactggagagagctagagtttcattgcaaatgattaggtatttggccttagacgaggcagatagaatgctggatatgggttttgagccacaaataaggaagattgtagaacaaatggacatgcctncaacagctgccagacagactatgct

SEQ ID NO: 48275 - DNA, 449 bp, Glycine max
  Clone ID: LIB3107-026-Q1-K1-B9
gttctacacaaggccaaataggagtgacatccacctctcagcagaggaagaagccaccatggaggcaaagaccagagactactttgatggggttgcaccacaacgccacacaaagcctcaacgaagtgagtattcagctcaatatgtggatgctttctccaatgcccatcactcttcttcttcttcttctataccagaattcatgcaattccaacgcctcgagaatgatccccaagagaagaaattggagtacaatggaagtcaagtaccggaagaatttgtggaaacagagtattaccaagatctcaacagcgtggacaaacaccaccatacgacgggaacaggatttatcaaagtagagaaaaatggaaatgactttcacatagaaccagataatgacactggttgccatcactcttgcaagtgcaatccagcaaccaatgattggg

SEQ ID NO: 48276 - DNA, 177 bp, Glycine max
  Clone ID: LIB3107-026-Q1-K1-C10
cccacgcatccgatattgtccaatcaatgcatcgtctatatgtaaccatttttcctttcagtaaatgtgctaaaatcataatccagtttgttaaccttgtcttctttaaatattttgttctattaaccctttttccatattaaacctgcattttctttcaaacctttttttaacttt

SEQ ID NO: 48277 - DNA, 328 bp, Glycine max
  unsure (1)..(328): unsure at all n locations
  Clone ID: LIB3107-026-Q1-K1-C11
ggcagataactcaattagcttattttctccatacaacaagatgggcaaattcaacctctctgatanggtggtattggctcccatgaccagatgcagagcgctcaatgggactccactggcagcacatgctgaatactacgctcagagatcaacaccgggtggatttctcatcactgaaggcaccttgatctctccaacttcttctgggtttcctcatgttcctggaatatactcagatgaacaggtagaggcatggagaaatgtagtggacgccgtgcatgccaacggcagctttatcttctgtcaactcttgcatgtttgccgtgca

SEQ ID NO: 48278 - DNA, 435 bp, Glycine max
  Clone ID: LIB3107-026-Q1-K1-C12
cccacgcgtccgccgagcttgcagcagcgatttctcatttcatttttcacacttcaacaatggcgaaaaccttcaaatacatcatcctcggtggaggagtttccgctggttatgcggcgagggagtttgccaaacagggcgttaagccaggggagttggctatcatttcgaaagaagcggtagcaccttatgaacgtcctgctctgagcaaggcttacctttttccagagtcccctgctagacttcctgggttccatgtctgtgttggaagtggaggagaaaggttgcttcctgagtggtacacagagaaagggatagagttaattcttagcacagaaatagtaaaggtagaccttgctgcaaaatctctgatcagtgctggaggagaaacattcagttatcagattttgattgttgcaacttgctcaacagtta

SEQ ID NO: 48279 - DNA, 449 bp, Glycine max
  Clone ID: LIB3107-026-Q1-K1-C9
cccacgcgtccgatattgtccaatcaatgcagcggctatatgtgaccatgtttccctgcagtgaatgtgctaagatcataatccaggttggtaaccttgttctgcttcaagtatatgttttgatgaaccattttgcagatgagatctgcattttcttaacaaagcatcatataacttttatgagagtagtacactagcacctgccttccttactctgtgaattaaatatagttgataaattgcttcatctgtcttagttccttctcctgtgaggtctgttatgtatgctgaattggtatcatttacaactgttacattgtcattatgctcaatactacagtaggcggccttatgaggggggaaacttaggttgtaatgtgaataactgctttttagtgttaagttgataaaaattgccataatttatgatttttgtattagctgataat

SEQ ID NO: 48280 - DNA, 441 bp, Glycine max
  Clone ID: LIB3107-026-Q1-K1-D10
gggttatggggtttgctttccatgtattaagttttctgatatgacgattatgatctgtttgagacctatagcaaataaggttactaatataaccgatggagtgaatttggggggaagttttcctgtgatttcactttttttcttagggttgaccaatatggcattaaaattgaagtttcaatgaataacttggttacaaagaaaattgcttctatgtggctcaaatttcagtacccttcacgattggttgctttgagctttcttttattcttgattgggattccaatccatcctttgttgtttccttgcccaattttgttatattgttaaaactcaaatatattgtattgcttgccacaagatcagtgcacattgttgatctattgaagaatattttataatataggcattctttatggactataatggcatatgacttaa

SEQ ID NO: 48281 - DNA, 455 bp, Glycine max
  Clone ID: LIB3107-026-Q1-K1-E10
cccacgcgtccgctccaactcctcctcctactttgcagactgctgatacttcaaaagtacgggggcatcaaatgcctattgtcacaactttgacaaggcttttcaatgagacatcagacgcccttggaggttcacgtgcaaatccagctaggaagcgggagatagaagacaactcgaagagacttggtggattgtttgccaagttaaatagtggagacatatcaaaaaatgcttctgataagctccttcagctttgtcaggcattagacaatggtgattttggtactgccctacaaattcaggttcttcttactactaccgagtgggacgaatgccagtcctggttaggttcactcaagcggatgatcaagacaagacagagcgtgagactaagttaaaaaagttacagatatctttttgctgattttggaaatttttcatgtgattagcatctt

SEQ ID NO: 48282 - DNA, 448 bp, Glycine max
  Clone ID: LIB3107-026-Q1-K1-E9
cccacgcgtccggtcattgatacttgttgtgctacttttgctgaaatacaaaagagaggcaaagatttttgggccgaatttgagttgtatcttgcagatcttctcgttgggcttgttgttaatgttgctttggtaggtatgttggcaccctatgctcgattagggaaaccatcaatatctagtggattccttggtagaatgcagaaagcttatgcagccttgcctagcagtgtatttgaagcagaaaggccaggatgtaggttttctgtacaacagagacttggaacatacttctacaagggtataatgtatggtgctgttggatttgcatgtggtattataggccaaggcattgcaaatatgatcatgactgcaaagcggagcataaagaaatcagaagaggacatacctgtgccacctcttgtgaagagtgctgctctttggggcg

SEQ ID NO: 48283 - DNA, 84 bp, Glycine max
  Clone ID: LIB3107-026-Q1-K1-F11
attccctagtcgacccactcttcctaaaaaaaaatacaatatttaaaaaataaaaataaaaaaaaaaacacaatcactctataa

SEQ ID NO: 48284 - DNA, 451 bp, Glycine max
  Clone ID: LIB3107-026-Q1-K1-F12
ccgggcaatgcgcgtggccattccaccaaccgatttacgggccccagacgccgccgttaggttctcctaacggcgacgccggggttgacggaatggttattaacttggccacgcttctcgctggcacagttaccaaccctttcaacaacggttacttccagggtcccccaacggcgccgttagaggccgtttcggcttgcactggtgttttcggaagtgggtcgtacccgggttatccgggtcgggttctcgtggataaggcaaccggggcgagttacaatgcgcatggtgcgaatggaaggaggtatctcgtgccagcgatgtgggacccgcagacttcgacatgcaagaccctcgtctgaagactgccacgtggcgaggttgtgtaatggttgtagatattggtcgatgggaacggaagcagggaatggataatagagggggtgatgga

SEQ ID NO: 48285 - DNA, 447 bp, Glycine max
  Clone ID: LIB3107-026-Q1-K1-F9
attggataccaggaattaaggaaattcggttgaaggatcttcccagcttcattagaaccagcggatccagatgagttcatgcttgatttcatacagtgggagtgtgggaggactcgaagagcttctgcaataattttgaacacctttgatgccttagagcacgacgttttggaagcgttctcgtccattttgcctccggtttattccattggtcctttgaatttactcgtgaaacatgttgatgacaaagacttaaacgcaattgggtccaatctttggaaggaggagtctgagtgcgtggagtggcttgacacaaaagagcccaacagtgtcgtttacgtgaattttggtagcatcgcggttatgacaagtgagcaattgattgagtttgcatggggtcttgctaatagcaacaaaacctttttatgggtcataagaccagatctt

SEQ ID NO: 48286 - DNA, 334 bp, Glycine max
  Clone ID: LIB3107-026-Q1-K1-G12
aattctcggatcggccgactcgtacgcccagaatcccccttttcacctcttttaatgtctgatcctaaaaatgaacgctcccattcgcaaacttttaacagacctgggggtcattctgatgatctttcacttaaaatgagtgaaacaaatgatgctaggcatctaaaacaaccctcagttcggatgctatcatatcttaattttacaaagtggctttatgctttgttatgaagcatatgtgctgctatctttggttctttcaatcccctatttgcttatgttattggcctctttgtgacatattactatagaattagataatctcatcacttac

SEQ ID NO: 48287 - DNA, 420 bp, Glycine max
  Clone ID: LIB3107-026-Q1-K1-H10
ggtgtgtatactaaagaatataagatagaagattggggttagggtttgatcggacgcaatggctggcaccggcatccacccataccaccagcaatgggctccggcggctgccgctcctcctcctcctccggcagccgcgggcggtcctcctcctcaccctggggaggaggttcgaacgatattcataactggtcttccggaagacgtgaaagagagagagctgcagaatctgctgagatggctgcccggtttcgaagcatctcaactgaatttcaaagctgagaagccaatgggttttgctctcttctccgcaccacaccaagcactcgccgccaaagacattcttcaggacatgctcttcgatccagacaccaagtccgtccttcacactgagatggcaaagaaaaatctattcgcaaa

SEQ ID NO: 48288 - DNA, 444 bp, Glycine max
  Clone ID: LIB3107-026-Q1-K1-H11
gcggaggatcggcagggaacaagttccgcatgtcactgggtctgccggtggcggcgacggggaactgcgccgacaacaccggcgcgaagaatctctacatcatatcagtgaaggggatcaagggaaggctgaaccggttgccgtcagcttgcgtgggtgacatggttatggccaccgtcaagaagggaaagcctgatctccgtaaaaaggtgctccccgccgtcatcgtccgtcagcgcaagccgtggcgccgaaaggacggtgtttacatgtacttcgaagataatgctggggtcatagtgaatcccaagggtgaaatgaaaggttctgctatcactggtcctattgggaaggagtgtgctgatctgtggcccaagattgcaagtgctgcaaatgctattgtttaagctgggtttttagtttatgtaatggttctgcttcttg

SEQ ID NO: 48289 - DNA, 99 bp, Glycine max
  Clone ID: LIB3107-026-Q1-K1-H12
aatggataattttttttacctcttgttagatattgtatgctagttggagatcatccgctgggttctgtgatcaatgcaactgcgcaaaaattttataca

SEQ ID NO: 48290 - DNA, 348 bp, Glycine max
  Clone ID: LIB3107-026-Q1-K1-H9
aaattgtaccaagatatggaaagccgaatataaaatgcagctaatgtggttcaagtacccggagaatttcaaacaaagggtaaagcattttatcagtactattcatatacttctcgacgtaaccattacacaattcttcaaatattacttcatgtaaaggactctattactcaaaatgtatatagaaatgatattcccatattgttatattttcctctctaaaatataccccaaattgcacataacttcaaaacttggatcaataaattcattgtcaatggtgtaatcaattattatcaatgtataaaatatccttaaattaaaattgatacatttacttaaacaatt

SEQ ID NO: 48291 - DNA, 365 bp, Glycine max
  Clone ID: LIB3107-027-Q1-K1-A4
agcggttttatattagtctgttatgcagttggaatgcgggcacggtaccttaccagtatcctcacgttatttcattcattttttatgtgatggatgatcagtgaaactataagtaaaatactagaacactaatcatacttattttctggactaattaagatgatgatgatgataaaagaaaacgagtgtgtattggtaaaacaaatgctcatttaatttttctattttcagaaccataaatttacttaatgcagcgatatcttttaagtattattatatcacatattgaagtaaagcatcaaccatttaacatgttttttaagtgtagattaaagttagcattattaacatgtctggggtgcaat

SEQ ID NO: 48292 - DNA, 336 bp, Glycine max
  Clone ID: LIB3107-027-Q1-K1-B1
gagtctagggtctgagtgaggtgcttgttgcgtgggtgtggagacctctattcatttcgtaatcgcagaacattcgaaccagataagagaacgattactatatggaactacgtcgtcacagctcacaaactcaccaacgtcacccactcctgcgtcggcaatttcaccagtccttgagacctctatctcatcatcgcgaaatgcacgctcatctagattcacctgctttctccccaaggcttgcaggttattttgcataccttctgagcatttattgtatcattgtttggattatgataactacaattgcatatggcatttttctgtgctagttat

SEQ ID NO: 48293 - DNA, 378 bp, Glycine max
  Clone ID: LIB3107-027-Q1-K1-B3
tatctaatcagtttcttggaacaaatatagaaccagaatggatggttttatgtcttttaccagttctttctccctaattgagaccgattattcaaatcgatgggtgtaaactaatgagctctgatattaatgaactatatataagagatatttatctgaattatacttctatcgaattattaacaacaagtatatctacttccatgttaattagtaatgtgtcatgataaattggtttcatagtatccttgtatacacttctttgtttatggaatcctctgacaacctattatgtactgacattttaattgtttacaaatcattttttgatataaatttaatcaaaaaatgtaatatttctcgatactttactttttt

SEQ ID NO: 48294 - DNA, 329 bp, Glycine max
  Clone ID: LIB3107-027-Q1-K1-B4
actgtattgattgtccaagactgcctgactcttgggtgcgtggggggatgattattgattcagatctgcaacaagactcaactacaactgagaaggaattactatgctcggttaccaccacattcaaccaattatccgatctagtgctttcctctaaacttatagaacttggattgtctggtgttggagtaaaaggtctttttcaatttcaaatcatagaacatgggatcaacacagaacttgctcctttaaacttggatctaacttatgctgacttgtgggatctacctgatcttgagttcatatttaatggccccatcaatttttta

SEQ ID NO: 48295 - DNA, 407 bp, Glycine max
  Clone ID: LIB3107-027-Q1-K1-C12
tgaggtttgaagattcacacattgaattgaggtttgggaattttacacctggcccacaccatcatggcctgcatcgacaaattttggtttttcgccctctctcttctcctcctcgcttaccctctcctccaagttgctaggtgccagtcatactctgatgatgtattggatgctgctgaataatcatgtgatattgtcattgttggtgatgatgtccaagactttgttgatgggactttcccttctgctccatgaattgaaacaataagtgtattttccgaaaaatagtgcaagatttataacagctggataagagtcatagctgcttgttgttgttaaaaatgatgtggattcaatctttaatgttatttgctatcaatgctattgttcaccttcctttttaccac

SEQ ID NO: 48296 - DNA, 387 bp, Glycine max
  Clone ID: LIB3107-027-Q1-K1-C5
tgtgcggcgacaacatgaagttggggaaatattgagaacaaaaataagttgtctcatgatgtatgtaagatgcacaaatgcatccttcaacgttggccttatttttcactactcatttagaatcacccatgaatctacaaattttaatcaaaaccaagtcatcattgattagcattaaacaaatgaattttatagtgaaccatccaccaattgagcatcttccttatctgcatgctccatcatagaaagataaggaaagacaatacaagcgtgttatagatatttttaaacaactgcagattaacattcctttttctgaagcattagagcaaatgccaacatatgctaaattcatgaaggattttcttatgaagatgaaaaaaatta

SEQ ID NO: 48297 - DNA, 389 bp, Glycine max
  Clone ID: LIB3107-027-Q1-K1-C6
ccgcccaggcgttctcccacgcgtccttactgctttaagactacagaaggggtattagttatctgtaattgtaaacaactgatcccttcaaaattccctctatgcaaatccattggatagtgatattttttatgtacttgacggtagaacttatcttaatcgttaaaagatctattagtatattatactcctttctccgtatttattaatttatacatttttttgttgtatttatgaaaaacaatgttacttctacgtttaattttttatttctagaagtaaactgtttttttttatatatttactttacactttttcttcaacctaataaataaagttttttttatattttttactatcactcgctttcatatttttcaaacttacca

SEQ ID NO: 48298 - DNA, 432 bp, Glycine max
  Clone ID: LIB3107-027-Q1-K1-C7
ttttgactttatatcaactaaagaaaaccattggtggctctccctcactccatctctgccttagccaccacactcacactctccttcccaataaccaaaccccataaagttaacccctttcccttttcctcgaaccgaaattcacaatttttaacgaaacaaacgcgacccataagcagaataaacctctccctaacccctgcacgctttgcatcgccaccctcaacggttgaagccgatcgattatacccagatgccgaaaataactaaactgacgaagagtttagcgactagagctctttctctaaattcactttgatggatcactggtaccctttctcgttaactgaaaaacttaaccctttctttcccacacctatttaaacttttggttctataaatccgatctctggtactacaagttcattttcc

SEQ ID NO: 48299 - DNA, 96 bp, Glycine max
  Clone ID: LIB3107-027-Q1-K1-D10
ctacataattttacttttcaaaatcaagaaaacaacattgggcatcgtttatatttaaacagactataaccaaattatctaatacaatactcatta

SEQ ID NO: 48300 - DNA, 88 bp, Glycine max
  unsure (1)..(88): unsure at all n locations
  Clone ID: LIB3107-027-Q1-K1-D2
agccnagcggagngcgagcaacaaaanagagccaaccaaaaaaaaaaaaaaaaaaaaaaaaaaaaaagcggccgcacaagaggaccca

SEQ ID NO: 48301 - DNA, 420 bp, Glycine max
  Clone ID: LIB3107-027-Q1-K1-D3
ggcacttctagatcagacttaacaacagcacaaagcgtgttagtgtctgttcaagctaccatctctctctctctttcttagtgcctccttgccagaagttaaaatggcccaagaaactttcctattcacatctgaatcagtgaacgaggggcaccctgacaagctctgtgaccagatctccgatgctgtgctcgatgcatgcttggagcatgaccctgacagctaggttgcctgtgaaaccttcaccaagaccaacatggtgattggtttcggagagatcacaacctatgccaacgtttactatgataagattgttccttacacatgcatgaacatttttttttgcctctgatgatgtatggtcttgatgctgacaacttcaaggtccttgccaacattttatcaacatattcctgatat

SEQ ID NO: 48302 - DNA, 440 bp, Glycine max
  unsure (1)..(440): unsure at all n locations
  Clone ID: LIB3107-027-Q1-K1-D4
aaagcaaaaatgatgaagcaaagttagcatgtgaaacatagattgaaaaagttatgatggaggaagaaggtgacccattgataaagagggagacagcctacgaaaatacagtgaagaatgtgagctgcgaagacaattttcttgataacccaataacggagttgatcaagaaggaagttgaaggtggagatgcaaccaagcctcattgtcttcaagattcagattttcataaaaagatcggtatgatgaaacagaaatcattgctggacccagatatgatcatgaaggtggttggaaaatcaatggtgctggaatcttggaatttcaactngctaagtgagcctcttgcattaaactttgttgcatctatggctgacagcttaacaatggagcttaagcagaaggaatgtactgaggcagcatggtgattaaaagtatat

SEQ ID NO: 48303 - DNA, 209 bp, Glycine max
  Clone ID: LIB3107-027-Q1-K1-D6
tgttatggttattactgctattcatgcatccggcttgagcctgcctagtcccgtttgatgaacaccagttctgtttttgtgaatcagcttttagtgtcaaacgatgacaataatcaaattattctccatgccttcaactatgtgccctatttaagctcccaaactaatttgacagtgtcaaattacttccttgttgaatcttataaata

SEQ ID NO: 48304 - DNA, 274 bp, Glycine max
  Clone ID: LIB3107-027-Q1-K1-E1
atgattttacacattcacttcagtcagtgtttactgtttaactttgtacctctgctctcacttccttccttccttccttcaatcgttctaactcttatcatccatggctagcaccaaagttcatagggttatgactcaacccattaacttgtattttagtgttcttcatagcaaagcacgcattcatatttggctattttagcaaaatgattttatgattgatttcataatcattgtttttgattaatacattaatttttatcttgtatattct

SEQ ID NO: 48305 - DNA, 318 bp, Glycine max
  Clone ID: LIB3107-027-Q1-K1-E4
cggacgcgtgtgcggactcgtgggaagacttctagaatgtggtggtcttctacgagctgataggttacaagtcaacaacataccaaggatgccaaagctcgtgatcgatggtccttatggagctccagcacaagactacaaaaactactaagtaatccttctcgtgggactaggaattggtgccacccctttgattagtattctcaaagatgttgctaaacaacatgaaacaacagaatgacatataagaagggatggtagaaagtgtagtcaagaacaagaggaaaccttttgccaccaaccgcgcctatttctact

SEQ ID NO: 48306 - DNA, 184 bp, Glycine max
  Clone ID: LIB3107-027-Q1-K1-E8
actatggattctaacaatctatcaaatgtattaaataaataccgatgctttacttaccaaacattataaaatacttattatactacacatgaccattataacattattttcataattaacataattaatgaataaatatatactaacatttaacctattattagaaatgaaataattactataa

SEQ ID NO: 48307 - DNA, 354 bp, Glycine max
  Clone ID: LIB3107-027-Q1-K1-F1
cttttaccttcttcatgtgtaaacaactcccgaagccttatgttcaaaatccatagacccctttttggtttttctaatgttttcctcaaataaacgttggtggcgactcccgcgcatcttcttcatgagaagatgcactttcctattttgccttgccctcctatcgaatggtatgtttgcgacacacacaatatgcaacaacttctctgttggagtctttgtgagcttatcccaaattaatgctcatcggtaacatgcaaaaatgtcttccttattgtgtgcattttaagttttgctatgtgcaatttttcttaattctatatttttgtattactcttattgaaaattttatta

SEQ ID NO: 48308 - DNA, 215 bp, Glycine max
  Clone ID: LIB3107-027-Q1-K1-F2
ggttctagtgtatgtgattgttgtgactcgttcgtcttcttgtttatcttcttcttttgttgtttgtgtttttgttttttctctcacctgaaaatgtcttgcttctgtggtaactgttgttgcttaagctcctgctagtgcttcaactgcttctgaggctgcaagatgtaccctgacttgatctacacctagtcaaccaccatctagaccttttt

SEQ ID NO: 48309 - DNA, 241 bp, Glycine max
  Clone ID: LIB3107-027-Q1-K1-F4
ccttgtattaaaaactcaatatcaaattctttgtcccacaaaagatggtgttcactcccacaagtactgcaacatgctttctcataatatcacctctggttttgctatggtgtttcaagctactaaagtgtgtgtgtctgatgccaaatagattgtatagagcattaatgtcacatgtccttcatgttaatccctacatcctctagattgtttacacttatgaaatgtactcagttcttat

SEQ ID NO: 48310 - DNA, 247 bp, Glycine max
  Clone ID: LIB3107-027-Q1-K1-F5
ttatgacttttgaaggggctctctccagttcgggcttccgtgggactaatataattgcaggagtcagtttgagtctggaatctactgctcttcctgtccttgtcatcagtgtgacaattatctcatctttctggctgggccacacctgtgtactagtacattaaacaggatacccaactggtggcctgtttggcactgctgtttcaacaatgtgaattcttattactgctgcctatattcttaccat

SEQ ID NO: 48311 - DNA, 286 bp, Glycine max
  Clone ID: LIB3107-027-Q1-K1-F7
tttaacatcacttcatcaattccgaacttagttctcctgacatggagacctgaactattattatccgatattatattgcataaagcatcttcttcctctcaactacatcaagacacagcattataacttggcactctaactggcatcttcagagttattacttgcacgttttgcaaatgcatagtacctaacagaccatagtactgaaatacttgacaactgtccaaagaacattcagcttaatattacaatattgaattatcaagcctaaatttatgtactataa

SEQ ID NO: 48312 - DNA, 301 bp, Glycine max
  Clone ID: LIB3107-027-Q1-K1-G10
tgtggtgttcagtcattcgccaagccaatttagctttgctctatatatacaagtctatacttcctttaattgtaataaaaccctaaaaggctttggccttgcctgttaaatgtggtctccaatcccctcctaattgttgagtgtagtgaagcaattaatgaatgtcttgttcattacaagcacttattgttcaagtgtttcattaacactgaagatgcttttatgttctatggaagcacttatgtccctctaataaagatgcattttattttaatcattgttttatgcctaattttcaagc

SEQ ID NO: 48313 - DNA, 189 bp, Glycine max
  Clone ID: LIB3107-027-Q1-K1-H11
tttcagttattacaactcacaattccataaaggcaccagtctatatttaaacggatacattccaacacctcaactatacacgacccaaacttacatacacttacatccaactacaaatctctactatcaccaaacctaacatcaattcactgaccgtcattatacaccctatcatacttctaaaaccct

SEQ ID NO: 48314 - DNA, 266 bp, Glycine max
  Clone ID: LIB3107-028-Q1-K1-A3
cctatattcaaactcataatatcccatattcactatatcccacttacaaacctaccttcataaccatactatatttcccatacataattccaaatacaactctaaaaattatcttatcatacaacatttatcatatcttcaaaatcacattaatttccacactaaaattaatacacactaacttcatatttaaaaacatattaaactatcaactcatccaaatcttatacttcttcaaaaaacacttcacaaatcttaattattat

SEQ ID NO: 48315 - DNA, 297 bp, Glycine max
  Clone ID: LIB3107-028-Q1-K1-A5
tgctgcattaaactacagatttacaggttttcatcctatggactcaaacatcatattttgtaagttttataaggtgatctccaatgagatgaataccactccttcaagaatattccttttataactaatgacattcaatttaataatgttttgacaaactttctttaaatttacttcacaacttacaattttatatttttttctactaaaatttcaatactttaattaaatcttatttttattttatatcctcttataatttatacatttttaaatttctctttatttacttttact

SEQ ID NO: 48316 - DNA, 324 bp, Glycine max
  Clone ID: LIB3107-028-Q1-K1-B11
aaatttggttttcagagatcgtcaaaactgtcaagcgatcgggattcctattgagcatggctattccttgccttatattttctaacactgctctatttactgcttatacttgccacaagctaaagatccttactctcctgacaccatttattacataaaatctctgtattctgcataagatataaagcttttcatatttcatggatgttaccttcctcctaaatgtgcccatatccttcatatatcaaccatgcttcttctgaaaggtacatatataggactcactcctttactcttatgaagcattatcttgtatagaaacac

SEQ ID NO: 48317 - DNA, 283 bp, Glycine max
  Clone ID: LIB3107-028-Q1-K1-B4
ccactcttccttactactgctttaatacattttaaaagaaagctttctaattgtcctatttgccaatgtttatagggagctcctgctccttttcttccataatctttaaataaaaacaaataaattatacttatatttacttcttttatattcatcctattcaccctaattttctttttaattctacaacacattatatctttaaatatatctacaacatcttctaattaaattcaacttatataaatattctattattttcaaaaactatcaacatattatc

SEQ ID NO: 48318 - DNA, 328 bp, Glycine max
  Clone ID: LIB3107-028-Q1-K1-B9
aatttcgatttccagagatcgtgaaaacggtcaaagtatcggtattccaattgatcatggctattcctagcctgatatttttgaatactgctctttctactgcttatactgtccacatgctaaagagccttactctcctgacaccattgattacataaaatctcttgatgcttcagaagatataaagctcttgaagtttcatggatggtaccttccttctaaatgtgcccatatccttcgtatatcaaccatgctttttctgaaaggtacatatagaggactcactcctttcatcttatgaagcatcatgtgtatagaaacactgaat

SEQ ID NO: 48319 - DNA, 329 bp, Glycine max
  Clone ID: LIB3107-028-Q1-K1-C8
gcacttgatccaaacttcaataagctctcaatggatcacatattttcagcttacaagcttacggcaactatagcaatccttcttgactatgatggtacactaatgcctcaatcatccaccattgataatattccaagcattaaatccattgaaattcttaatagtttgtgtatagataagaacatcatagttttccttgttagtgctataaacccaaagattcttttccaatggtttttcttccttgttaaaatcttgttaatttcatcttatcatttttactttcttaataattaaactaaaattaatatattttaaacacatttttt

SEQ ID NO: 48320 - DNA, 119 bp, Glycine max
  Clone ID: LIB3107-028-Q1-K1-C9
tattgactttctctaataataataacaaaattgggctctggttttcattcaaatggactacaaccaaatcattacatactattatcattcatactataatttattacttaataacaata

SEQ ID NO: 48321 - DNA, 148 bp, Glycine max
  Clone ID: LIB3107-028-Q1-K1-D11
ctcatacataatctcactcctctactactcataatcaatacaccaaatcccttactacccctcaacctccaaactatcattaaatattataatatatcctacatttaaccataaatatattatcatacctaaattcactatacctcac

SEQ ID NO: 48322 - DNA, 192 bp, Glycine max
  Clone ID: LIB3107-028-Q1-K1-E3
aaacagaacaggaactgactcttggaaaagggctctcgggctctataatctttcttttttcatttaacaataattacacattaaataacaaaatccacaattataattattcttatccaacttaattttattaatcattcttacatacaattttttatctttaaaataccaactattaactttaaatttatc

SEQ ID NO: 48323 - DNA, 254 bp, Glycine max
  Clone ID: LIB3107-028-Q1-K1-E6
tattcattctctattgtcactttgctaccggttctttcaagattcatatcttcttcaagaccctcaccgtaaagaccattacccttgacgtggaaagctctgacaccatctacaacctcaattccaatatccatcacaattaatgaattcccctctatcatcaacctctcatctttttctaaaatcatctctattactttcgtaccctctcctactacaacatccataatgattcaacccttcaccttttcctt

SEQ ID NO: 48324 - DNA, 348 bp, Glycine max
  Clone ID: LIB3107-028-Q1-K1-E7
ttcaactctgtcacttataaaggatcttttgctactgtttatcggcataaaacccttctctctgttattaatataatttcttcatatcttaaacttcacacttttgaagaagtggcaaatcacaaccataccaatgattgctgtctcatcatttctttcaatgtgtattatgtcacccctttcatgtatgatcatcccttatgtgatgaagttttgttatctgcaacatttaaatattcatccaattacttttaatattttattcacatttattctgctataaatattatttaaaaatactacattttttaatatttattccataaccctttccactaaaacgtacct

SEQ ID NO: 48325 - DNA, 246 bp, Glycine max
  Clone ID: LIB3107-028-Q1-K1-F12
actttctctttctaccaaattgtacttgataaagtttgttattcatacccacacttcacctttcattcaaataacatgtgatcaatcatcattttaattattaatctacttttaattgataccctatttataatagtcttcttataatctaaagttttctctaaaattttccacttattttcatatctaatatttttcttttcttttttactcttgtaatcatttttttaaactttattattattt

SEQ ID NO: 48326 - DNA, 317 bp, Glycine max
  Clone ID: LIB3107-028-Q1-K1-F5
tgctctttaaatgttccgtaaatatgctgcacactaggtcttttagtgcatggtcgtatttctcttcctccattcaaccatcctgctcctattccaatcaagcgcgagggaggatatgaaagactaagggttggttatattagtagtgactttggtaatcatcccttgtcacatctcatgggatctgtttttggtatgcacaacaggaagaatgtttatgtgttctgctatgccttgagtgttaatgattgtactgaatggatgcaacgtattcagtcttaaacatatcactttgtatatgtatctgccatgttatt

SEQ ID NO: 48327 - DNA, 329 bp, Glycine max
  Clone ID: LIB3107-028-Q1-K1-F6
ctgcagagacacagaagggactttttcaatttctgtcatgcgatcatccttgcctccttgcaactgtatttcgggcgaaatgattcaatcatatttcctaatcttcatccacccataataaaaagaaagatagatcaaagaaacaagataatctacagaaaaaagccattcacaaaaagttgtacataatattgtatgcatgataattgaatgaaggtgttgaagactctttatcatcatccatcgtgtacagcatggattcatcatcttcaggatctcaattattttaacacccacaactcccaccttgttttctatttctaccccac

SEQ ID NO: 48328 - DNA, 191 bp, Glycine max
  Clone ID: LIB3107-028-Q1-K1-F7
atgtgtttctgatttcatgtaaatgtttgatgttggtgtaccagctatggtgagaaaggtgtttcatgaagcaaggcattgttcacctagtatagtatttattgatgagattgatgcaatttgtctagcaaggctgtttagtttttctggttcaaatgattaacgtgtatgtactttaattcaattgtttt

SEQ ID NO: 48329 - DNA, 318 bp, Glycine max
  Clone ID: LIB3107-028-Q1-K1-F8
aatgtgggtttttccgtttttactctactccctatttctcggtgacttgctatctttatatagctcttctactaatcaaacacatatttacatactcacctatctttcaattctatttattcaatttttataatctctaattatatacccactctttttatcactctatattaaaaccttctaactaaatattacttctcacatatacccttctacattctcttattcattattccatatttatttatataattctattaatctcttaacttattgctaaaaatatttaatcctacataccttaacttttataaaata

SEQ ID NO: 48330 - DNA, 402 bp, Glycine max
  Clone ID: LIB3107-028-Q1-K1-G3
gtacgcccacgcgtcctactgctgcttttacggctttatgggatcataatgaagaaatgtgatctttgaaaaagtacgtatggttagagtgacaatgttcatgtgctttttgcatggatctcaaattcttttttctattgcctgcatcctttttttaagacattattgtcaatatgtaattattacctatcatgggaaacttatatctcactgttctatgttgtattggttatcactctttactttgaatccatcgacctgttttcgacttcctgtatgaccttttccttacttttgttaaggttttttcttgttttactttctaagtaatttatgctaatttttgaaaattatatcttaataatctctattacataattctaattactaacttactaaatt

SEQ ID NO: 48331 - DNA, 251 bp, Glycine max
  Clone ID: LIB3107-028-Q1-K1-G4
tttaagaggtttgaaggggccagtgacaatggttgtgaatttacaaagttgagtgagccacggagaatgataagatcctttatgatggagaggtgggggtttgagaagactaatatcatgaaagaggattggcttattgtttatagtgatcaaagttttgtcatgctcataactagacctaaaggtggaattaggtctctttgcatttacttggatgaagttaatgcttgtatagatcttttattttattt

SEQ ID NO: 48332 - DNA, 321 bp, Glycine max
  Clone ID: LIB3107-028-Q1-K1-G6
ttataaggcttgcggtaaccatgacagttggtgccttcttgatcagggcctacagggttctcaactcctccaactttctgcttctctgcactctcagtggtggtggtgtagtggcatactcagaatcacaatcaggacctgaacgtcctattattgaagctaatgagcctgccaaaaagaaagtggcggttcttgtaacaggatgggctgctcccagtttccttaaggatctggatgcttcattatatgatgttcaagttgcttcaccttgtaactactttgcatttactcccttattacccattgtcacttgtggtacaa

SEQ ID NO: 48333 - DNA, 428 bp, Glycine max
  Clone ID: LIB3107-028-Q1-K1-G7
tcgaccgcgcgtccggccacgcgtccgcgacagaaggggacttgggttatacaagataaaaaccatacaccaaactcagccacaatggaaaagttttttataaaaaaaaaataagaggtacaaaagttggaaggaattgggataattaagttccatggttatgtcatggtgtcatttcacaccaaaataaaactaacttacaataagttaattatataaattctatcacaatcttatattaatttaccttaaaattaggatcaagatgttgaacccttgtcctttaaagcattacctccactttaagagaaatttgaactcatgataagaggatgggttattttacttgatatgttatttgaaatggaaactataaacaaaaaataattggagattattaatgaacaaagtcaccaccccttaaaaac

SEQ ID NO: 48334 - DNA, 211 bp, Glycine max
  Clone ID: LIB3107-028-Q1-K1-H4
cccaataggaaaacaacactgagaaatctgggaagttttaaaggcagttcctcctccttcaccttcttcttccatggactttaactttgatatcaactgttcctctccttacatcactgcaccttctaaccctcaacgctttatcaacttctactatattactcccactatccctactctcatacacttctcttctttcactcctaacacc

SEQ ID NO: 48335 - DNA, 299 bp, Glycine max
  Clone ID: LIB3107-028-Q1-K1-H6
ctacggcacgcatacgcccactcttcctcccacgctttcatagcttttctataagacgacagaaggggataacttgaccggttaaatagagactttatgagccctaaaaaaacaataacaaaacataacgtgtaggataaaaaagatagaatgatcgcttaaacttctctctctttctttgatgcttctttccctatattcatcccttgctctgagtcgccttaacacaaaaatggattataaataaataaccaccctacccaacaacaacttttgttctttacaagacataacattct

SEQ ID NO: 48336 - DNA, 177 bp, Glycine max
  Clone ID: LIB3107-029-Q1-K1-A1
attcacaggaccactctacatgaatatgaggttctgataaagggtattatctcctatgccactcttatccctcatctcatactttatcaaaaactcataaagatggatcacatcatattgtgatgttcacatccgcaaagctatgttaaactaaattataattactcgaacacaatc

SEQ ID NO: 48337 - DNA, 382 bp, Glycine max
  unsure (1)..(382): unsure at all n locations
  Clone ID: LIB3107-029-Q1-K1-A11
ttggtttttcacaaagctctggcanaactgagagccgtgagctagctatctaagatttaacacacgaaaattgaagcaaaactacacaagatatttatttcttgttgaattcaccaatattctttatgcaatttcaccctctaccgagtaggtcacgcgtgcagcatggaagctgaaaccaattctccagaagatgcatctgctatggtatgtctttctaccaaagtttttaatgactggattcatgcagacttcgcttgctattacatgtatttagctgaagtaaatactttgattagttatctctgtccaaagtcttatgtatgtttctgctagatgctccttgtatatttggttatgctgtaatatttcttccggtcta

SEQ ID NO: 48338 - DNA, 371 bp, Glycine max
  Clone ID: LIB3107-029-Q1-K1-A2
tgcacagtagtctctcatcttcggcctgctccacgatcctatctgcgacgccgctaatatcaaagtggggagattcgtatttcgtaacgctatccaccttctctttcggtcattcaattttatctctgtaagaacttatgccttcaaaactgctgggcagacgggctcaaggaaatgctagaggatgagactggttatggatttatatctatcactccattctttgtcaggtgctgattacacttcccttgcacactacccaaaatagtgtctaatctcctacattccctccttggtttcttaatgtgtgctatcatgacaccgctaagttgggagatgagctagtgcagatcatccttggtccaggtctg

SEQ ID NO: 48339 - DNA, 194 bp, Glycine max
  Clone ID: LIB3107-029-Q1-K1-A5
tgttatttaattctccttgtgggagcgagaccttgtttgggggggatgttgttttcaaagttaaatcactccaggtaagatttatttgttaacttaaatcttatctttgattgatggattgaggtaaagccacgtgtgtgttgcttaaagctatgatagcacccaaaaaattacaaattctaacctggttacgt

SEQ ID NO: 48340 - DNA, 345 bp, Glycine max
  Clone ID: LIB3107-029-Q1-K1-A6
cacccgcccaccttaaattcactcttacattttttatatctaattaaaaataacttaacatacatataaacatttttatcgttatttctactcaaccaaatcttactcttattcccactatcaaagacctaattgaaaacactctctcttctcaccataacaaactcatttctctcctctccacgtatttatctcaacacaaaacatttttcaaccccataatttcattaatcaacttgacaacatccttttcgatgatcaatcaatatttgatcttaaaaatattctcttttcttaaatctttaatttcttaaactaaaccatacttttacctcctttttttac

SEQ ID NO: 48341 - DNA, 374 bp, Glycine max
  Clone ID: LIB3107-029-Q1-K1-A7
gaaaatctgattcaagctgaggatgttcaactgtcaaaatctgaggattcacagggaccactctacatgaataaggatggctctgataaaggggtattatctcctaatgccagctcttatgccccttcatctcatacttcatcaaaaactcatgagaagatgggatcacatggagatttggtcgatggttcagcatcgggcaaagctaatggggaaacgaaatctgtaaattcacggggaacacaatctgggtcagatttggttggaagcattccagcatcttctgctcttggtttatctccaagttcatcagttggttcactgtcttctgaaaaatcaactctgaatcccaatgcaaaagaattcaagcttaa

SEQ ID NO: 48342 - DNA, 387 bp, Glycine max
  Clone ID: LIB3107-029-Q1-K1-A8
gaatgcacagtagtctctcatcttcgtcactgctccacgatcctatctgcgacgccgctaatatcaaagtggggagattcgtatttcgtagcgctatccacctcctctttcgttcattcaatttcatctctgtaagaacttatgccttcaagaaagctggacagacaaacaaaaggaaatgctagaggatgagactggttatggatttatatctatcactccattctttgtcaggtgctgattacacttcccttgcacactacccaaaatagtgtctaatctcctacattccctccttggtttcttaatgtgtgctatcatgacaccgctaagttgggagatgagctagtgcagatcatccttggtccaggtctggaacctggaatt

SEQ ID NO: 48343 - DNA, 347 bp, Glycine max
  Clone ID: LIB3107-029-Q1-K1-A9
ggtggcagagagcgaacccaaaactagagctgccttcccttcaaaccttccactcttctctccttttccaatcaagggaataatatttcttagagatattccgaaaccatggctcacgccaatcctatgatttttgttgttggaattctaagtaaccttgtctccttctgttgctttctagcaccagtaccaacattctatcgagtttgtaagaagaaaaccacggaaggtttccaatcacttccttacgtggctgcactcttcacttcaatgctttggatattttatgcttacataaagacgggcgaaatacttctcatcaccattaacgcattcggttgtttcat

SEQ ID NO: 48344 - DNA, 439 bp, Glycine max
  Clone ID: LIB3107-029-Q1-K1-B1
acggattcggaattccgagccacgacccacgcgtacgcgcgggtgcttgcaaaaaagacgacagaagggaaccatgaagagatatttgaagttctggcagcagtggctgcatctttgggggatgtaatagatgatgtgaacactttgcaggtaacacctttaaagggggcaatgaccaatgaggtttttgaggtaaattggccaaccaaaagtgatggtcatcaaagaagggttcttgttcgattatatggtgaaggtgttgaggttttcttcaacagggtggatgaaatccaaacctttgagtgcatgtcaaagcatggacagggtccacgccttcttgggaggttcaccactggcagagttgaggagttcattcatgccaaaacactctcagctgcggaccttcgtgaccctgaaatatctgctttgatagcatcta

SEQ ID NO: 48345 - DNA, 387 bp, Glycine max
  unsure (1)..(387): unsure at all n locations
  Clone ID: LIB3107-029-Q1-K1-B10
gaagaaatacaagcacataggcctacaagcaggaaagagttggactcgcctaatcttacagggtcttgtttatctacatgaacatgatcctccagtaattcatagggacctcaaatgtgataacatttttgtcaatggccatcttggacaagtgaaaattggtgacctgggtctagcagcaattctccatggttcccaaccagctcacagtgttataggcaccccagagttcatggcaccagaattatatgaagaagaatacaatgaacttgttgatgtgtactcatttggcatgtgtgttctggaaatgcttacatctgattatccatatagtgaatgtgctaaccctgcacagatatacaagaaagtgacatcggngaagctacc

SEQ ID NO: 48346 - DNA, 65 bp, Glycine max
  Clone ID: LIB3107-029-Q1-K1-B12
gaaagttttttttttaatttgttaaaaaaaatatgtgttacggattaatttaaaattaattattt

SEQ ID NO: 48347 - DNA, 386 bp, Glycine max
  unsure (1)..(386): unsure at all n locations
  Clone ID: LIB3107-029-Q1-K1-B2
gaaataccactacttttaacgttattttactgattccgtgaatcggaagcggggcactgcccctctttttggacccaaggtcggcttcggccggtcgatccgggcggaagacattgtcaggaggggcttttcaggtcaaagaagtgcaacagagtgagatctgactcataatttggcgacactcttgaaaaaagaggttacttggattttgtgaggttgtcttgtagttggagtcatggcgggtgaggttgtgggatttgagatggttcaaggaccagtggagaatggtactgagggaggaaaacctgttttgaatgagaaggagaatggcaagcttgaaaaagatgtgngagctgctgcggatgccatcaatttggacacatgga

SEQ ID NO: 48348 - DNA, 393 bp, Glycine max
  Clone ID: LIB3107-029-Q1-K1-B4
gagaccaaacaatactcagaacctgattaaggagagcgtggcacagtttagtggcaaaactttggtgcagtggttggtagcaacactgctgattgccttgttgggtggtgcacaagctgttgtgttatgtaacatcgactcaagtcaactaaacttgtgtcgtgctgcagttactggtcaaaaccctccaccaccagatgagaaatgttgtgcagttattcgccaagccaatttaccttgcctctgcagatacaagtctattcttcctttaattggaataaaacccgaaaaggctttggccttgcctggtaaatgtggtctccaatcccctcctaattgttgagtgtagtgaagcaattaatgaaggtcttgttcattacaagcacttagtgt

SEQ ID NO: 48349 - DNA, 330 bp, Glycine max
  unsure (1)..(330): unsure at all n locations
  Clone ID: LIB3107-029-Q1-K1-B5
atcacaattgaactataaccattaaagtttcttacaatatataacattacaattcatattttagtaaaatgtcattgcttcaatttcaaaactctatctctgtatctcacatattatgggagttactccattcaatgggttgatcgcttaatccatatatacataattttgataatttatctaaaaagcctattatcttttgctatgtcaatagttctattaacttccttaantaaaaatcaaatattgaatgactactaatttatcttaataactactaatccaatccaattctctactaaatgcattcttgatcaataaatgactata

SEQ ID NO: 48350 - DNA, 279 bp, Glycine max
  Clone ID: LIB3107-029-Q1-K1-B6
cagctggctactttaaaaatcaagaaaaaactaacgaactgttcaaagtttatgagaaaagtatgcgctcgttttatactggtgatattgggcaattccaccctgatggatgtcttgaaatcatatataggaagaaagatattgtcaaacttcaacatggagaatatatctctctccgaaaagttgaagcatcactatcatcatgtgattatgtggacaatataatggtttatgcagacccctttcacaattactgtgtggctctaattgttgcttcac

SEQ ID NO: 48351 - DNA, 358 bp, Glycine max
  Clone ID: LIB3107-029-Q1-K1-B7
aggggcactacagatggaggaccgtattggacggagatggcgtattcatctttggatggagatacacgtatggattagaccattgatatttgtctaactgcaatgattgattgatcgatgccattcatgggtctactggaattaccatctccaacaattacatgactcaccatgacaaggtcatgcttttgggccacagtgattcctacactcaagacaagagcatgcacgtcactattgctattaaccactattgtgaaggcctagctcaaagaatgccaatgcgtacgcatggatattttaatgtggtgaacaatgactatacccactgggaaatgtatgccatacagggaagtgc

SEQ ID NO: 48352 - DNA, 374 bp, Glycine max
  Clone ID: LIB3107-029-Q1-K1-B8
aatgatgccaatgaaaatcatgctgtcaaaccacccatgttgcagaggggggtgctcaggaccaactgcatagactgcttggatcgcactaatgttgcacaatatgcatatgggttggctgctcttggccaccagctccatgctctgggagttattgaccacccaaaaattgatcttgatgaccctgtagcagatgatttgatggggttttatgagcggatgggtgatacactcgcacatcagtatggtggttctgctgctcacaacaagattttctctgagaggaggggccagtggagagctgcaacacagtctcaggagttttttaggactcttcaacgctattatagcaatgcatacatggatgctatgaa

SEQ ID NO: 48353 - DNA, 335 bp, Glycine max
  Clone ID: LIB3107-029-Q1-K1-B9
ttagttcaacgagatggagcaaatagggcacgcaacagttgaagtgaatggcataaaaatgcatgttgcagagaaaggagagggtccagtggtgttgttcctccacggcttccctgagctctggtactcatggcgccatcagattctctctctcagctccctcggctaccgcgccgtcgctcccgatctccgtggctacggtgacaccgaaacaccaccttcaatcagcagctacaactgcttccacatattgggtgatctcgttgcgcttattgactctgtgggtgtccaacacgtgttccttgtggctcatgactggggagccatcataggtt

SEQ ID NO: 48354 - DNA, 319 bp, Glycine max
  Clone ID: LIB3107-029-Q1-K1-C1
atcactgagtttcagaccaaccttgtgccataccccaggatccacttcatgctttcttcttatgctccggttatctctgccgccaaggcctaccacgagcagttgtcggtgccagagatcacgaatgccgtgtttgagcccgcgagcatgatggccaagtgtgatcccaggcatggcaagtacatggcttgctgcttggtgtaccgtggtgatgttgttcctaaggacgtgaatgctgctgttgccaccatcaggactaagaggactgttcagtttgttgattggtgtccaactggattcaagtgtggtatcaactacc

SEQ ID NO: 48355 - DNA, 387 bp, Glycine max
  Clone ID: LIB3107-029-Q1-K1-C11
gatgtaatagaaggtgtcaaaacacttggacggtaggctccatctcaaaaaaatgggtggtttagctagcaatcttcctctaattgttatggtgggtctgcaaattcattatgcagcacttgctatattcacaagagccgctttgttagatggattgagtacgacggtctttgtagtgtacaggcaaggcatagccactttggctttggcgcctatgtttttctctcctaagcggagacaatcagtgaaagattctttgggattcaggagcttctttttgatgtttgtgaccgctcttgttggagtcacagcaaatcagaatgcatactttaaaggtttattttatgcatcctctactgcagctaccgctatgagtaatctgatacc

SEQ ID NO: 48356 - DNA, 362 bp, Glycine max
  Clone ID: LIB3107-029-Q1-K1-C2
gcacaagtgagtttgttgatcgagataactaggaacagggtgatgaaaatgaaagtccttgttttcttcgttgctacaattttggtagcatggcaatgccatgcgtacgatatgttccctctccgaatgaacactggctatggtgcccgtactccggaggtgaaatgcgcaagttggaggcttgctgtggaagcacacaacatctttggctttgagaccattcctgaagagtgcgttgaagcaacaaaggaatacatccatggcgaacaatatagatcagactccaaaacagttaaccaacaagcttacttttatgccagagacctcgaagtccatcccaaggacacatttgtgttcagtat

SEQ ID NO: 48357 - DNA, 380 bp, Glycine max
  Clone ID: LIB3107-029-Q1-K1-C3
ttctttcctttgttcttccggtttcgctttcctttcttgttcttgccactatcattagaatttcctccatatgtctaagcttctagggcttgatcaaaggatctcatgagtttctttcattgagcctgaattcttgtacctcaagtatcccttgcaactcttccaccttcatccctttgagatttgtgccttattttattgcaaccttctcttgatcttgtcaatgatcatcacatcatatactttcttctttaatttgggtttgcaatttcagtttctttaatttgtcagcacccccataagactcatcaagaatttccctttcctcctttatagtattagcatacattactttatcaaagttatctacatctacactt

SEQ ID NO: 48358 - DNA, 381 bp, Glycine max
  Clone ID: LIB3107-029-Q1-K1-C4
gggagtgaccaatctaccgtggatgacggggggtcaggggatgcagaaaataagcgagccaaaaccactgagcttgcacagttgcaggtggagcttcaacgcatgaactctgagaacaagaagctgaaagagatgctcagccatgtgaccggtaactacaccgccttgcagatgcatcttgtcacattaatgcaacagaaccagcagcgaacagaaagcacggaaaatgaggttgttcagggaaaggtagaggataaaaacgttggtgttggtggagggaaggtaccaagacagttccttgatataggtcccagtggcacagcagaagtagatgatcaagtttcggattcttcttctgatgaaagaacacgatcgagcaca

SEQ ID NO: 48359 - DNA, 356 bp, Glycine max
  unsure (1)..(356): unsure at all n locations
  Clone ID: LIB3107-029-Q1-K1-C7
gagagcttaaagcttagccgatctcgtggttctttgtacccctcaaagcaacatgggggttgccaatttctctgtcttcctacttattatttctctaagtttcttccagttgctgagaatttctgaatcaaaattacccaaagaagaagttgatgctcttaaagaaattgtgagcacaatgggtgcgacatattggaagtttgatgctgattcctgcaatattgaaatggttggagtaacactagaaccaccagatgaatcagagagaagaattggttgtgattgcagttttgaagacggcactgtctgtcatgttgtgaacatgactctcaagcgccttagtctnaccggcatac

SEQ ID NO: 48360 - DNA, 385 bp, Glycine max
  Clone ID: LIB3107-029-Q1-K1-C8
ggatttctattgttgcagttgcattgcagccggagccaagtgatccctcattgatcttccctttcctcaaagtaagttaagttgcctttcgtcttctcctttttccatgcatactttttttctgtctttaattccgtacttctggtagtcactgtttttttccttaagaatcttgtttacagatactattttataggcttagcgtagaagttccgttaataattacaatgattttttattgcacgggaagaatttatttacttttttttcgcatccagttattttctttcaggtaatcatacaaacagtaaggtaaacaattgttgaagtgtttttctgtgaattgtaataacaagagtattgttaatatttttttaataagtat

SEQ ID NO: 48361 - DNA, 374 bp, Glycine max
  Clone ID: LIB3107-029-Q1-K1-C9
gaagtggaagaagagaaacgcgcatcgcttaggtacagatacagatacagacacaacctggaaaaaattccgaccccagcccttcactcttctctctgcagcggaggttagggtttctttctttttttcgttttctcaatcttcacttcgcttgcgctatttattgctaattttttcgttctttgtgtgtccgacccaatccaccttcaatttctcgcttcgttttgtctttgacttgctttgacttttttcttcttctcacctccgagcatctgaaaccgttgtacatcctctgatttcggtttctttctcttcaataattgctcactttcgctgcaattgctacttttttttaaaaatctttttactatttc

SEQ ID NO: 48362 - DNA, 375 bp, Glycine max
  Clone ID: LIB3107-029-Q1-K1-D1
catgctctgcatcagtctgctgacttgaaacagctgcgggaacttgaagagcttatagcgactgcaaaacaaggcaacaatacactgtgtgaaagtgaaacccataggtcgttgccacaaaccaaatcagtttctctgagtaatgggagctctagtgaaacttgtaagatccaagatacattgggcactcgggctgaattatgtggtgatgctactggtgataaatcagagacatgcctaaagtctgctgataattccaacttaaagcatgaatcacatgatgaatatagagagtctaataaatctgatggccaagtgaatggaagccctgatgttcttgatacacttagttacaattctgaatcatgtaatgac

SEQ ID NO: 48363 - DNA, 385 bp, Glycine max
  Clone ID: LIB3107-029-Q1-K1-D10
ttcgagtggccgctttttttttttttttttttttttttttttgcaacctcagggtggggaaaacctaaacccccaactctttaaagggccaccaaccgccgcccgaataactggagtgtaagaaaccctccctttactcaatggatagcgcttatcctctttcaatcaaccaaatgaaaaatggagtggaggaaaaagaggtctttattgattgaagaggctttgcacctaggactaataaagatccagaagaatgggtctaggctttcgaaaagatgaagatgcaaagggtaaagagaaaagaaatgtcttttgaacaaccaacctggcataaggattctagctcgcccaattagagcagatggatattctccgacggggaaaa

SEQ ID NO: 48364 - DNA, 347 bp, Glycine max
  Clone ID: LIB3107-029-Q1-K1-D11
ggttctagtgtgtgggggcgtgttgttgtaactcgttcttcttcttttgttgttctgtgtttgtgtttgttttttctctcacctgaaaatgtcttgctgcggtggtaactgtggttgcggaagctcctgcaagtgcggcaacggctgcggaggctgcaagatgtacccagacttgagctacactgagtcaaccaccaccgagaccttggtcatgggagtggcacctgttaaggctcaatttgagggtgctgaaatgggtgtgcccgctgagaacgatggctgcaaatgtggaccaaactgctcctgcaacccctgcacttgcaagtgaggtgttgggagagcaagct

SEQ ID NO: 48365 - DNA, 387 bp, Glycine max
  Clone ID: LIB3107-029-Q1-K1-D12
ataatatgaaagactttatggtatttgtttggggtgggagtctagtatatgatttcccacaggctgttgtcatcaagtataatgtaattaattttgcatggtttcaggtcaccttaggaatttcaacgcttctttcatatgtacctgtttcactgggcactgcacatcaggctggagccttgacacttctgacatttatgttacttcttaatcacacggttcgaagaccgtctttgtcccttctcaaatctctgcctcaagttggaaaagcacactaattgtttcccgatattatattgcatcaaggcttaggccttttaagttgacaaaatctgtggctattattttttccatgctaaattttgcgttgagctccttctccaattt

SEQ ID NO: 48366 - DNA, 388 bp, Glycine max
  Clone ID: LIB3107-029-Q1-K1-D4
attttaatatatcggatttttcgatatttaaatcgcggatctccatcacttgtagtgatttatcattcaatgaatgattgactgacaaaatgattcacttatcaaattttaatttaaagttttttagctaaaaagaaaataactttgctttttcccttctttttaacccccttaaatgaaaaaaagggttcccccacttggatagggaactatgcgagtgacctacctaatcttattgtagaaattttcaggatcaatgattagaccatgcaaactagaaatgctttttcttgtataaaggaagggattactcgatccatttccatatcgatcatgatatatataataattcgagcacccatttcaaacgcatatccaatttttgcac

SEQ ID NO: 48367 - DNA, 383 bp, Glycine max
  Clone ID: LIB3107-029-Q1-K1-D6
ggagtgagtagtgagaatggagtttcaagggttaccgggaggtggcattgctagtatactctctcgcactacgccggcggacgtgtgtaggttttccgtcgtatcaaagattttccgttcggccgctgaatcggacgctgtgtggaaacgttttctcccttccgattaccattccatcatttcccagtctccttcgcctctcaactatccttccaagaaggagctctatctcgctctctcggatcgccctatcatcatcgatcagggtaaaaagagctttcaattggagaaaaagagtgggaagaagtgttacatgcttgctgctagagctctcagcattatttggggtgacactgagcaatactggaactggacaaccgata

SEQ ID NO: 48368 - DNA, 328 bp, Glycine max
  unsure (1)..(328): unsure at all n locations
  Clone ID: LIB3107-029-Q1-K1-D7
attttaaaannaaaaacccgcccccccatttttaaaacacccatacacattcatacacaatctttaaaaaatttctaccccaatccttcactcttctcactccatacatatattacaaattctaatctcctttactcaatactcaaacttcacttctcttcaacaatctattactaatattctcactcattaactaacctaccaaatccaccttaaaattcccactaaattttatctcacactaactatcaatttattctttttttcaccccccagcatctctaacctttaaacataccttcaattccctaaactattctcttcaata

SEQ ID NO: 48369 - DNA, 388 bp, Glycine max
  Clone ID: LIB3107-029-Q1-K1-D9
attggttctttaagtagacatggaagggggcgatgctctcctagaacttaagtgtttgaatctaagaaaaaccatgattttcttgttaactcgaccacgttacaagcttaataaagtccttagtgatccatatcgtgtgtgtgattgcattgaataagatgatgtgcagagttggggattataacttcagtcgacttaaatgaaatacaaataactgaaacacttgtgtgcttgagagaaacactagcctcgtgagagtgaaacatagttgatctttctgtgatacttatcgtacttgctaacctacttcaatctctaagtgcattctttgcatgattccatcatgaaaaccatggcaattgtgaaattgagggttggaagctgaaat

SEQ ID NO: 48370 - DNA, 392 bp, Glycine max
  Clone ID: LIB3107-029-Q1-K1-E1
gactcaatcagacatccgagtaaaaagttatgggcgggggaatttgctcagagcttgagtaatccatttcgagcgtctcgatatattacaggactcaatcagacatccgagtaaaaattttctgtcgtttgaatttgctcagagctacaacattcaatttcaagcgttccgatatattacgggactcaatcagacatccgagtaaaaagttattgtcgcttgaatttgctcagagcttcaacattcaatttcgatcttttcgatatattacgggactcaatcagacatccgagtaaaaagctattgtcgtttgaatttgctcagagcttcagtaatccatttcgagcgtctcgatatattacaggactcaatcagacatccgagtaaaaatt

SEQ ID NO: 48371 - DNA, 86 bp, Glycine max
  Clone ID: LIB3107-029-Q1-K1-E12
ccggtgaagtgttcggattgcggcgacgtgagcggggcgctgcccgcgacgttgtgagaagtccactgaaccttatcatttagagg

SEQ ID NO: 48372 - DNA, 314 bp, Glycine max
  unsure (1)..(314): unsure at all n locations
  Clone ID: LIB3107-029-Q1-K1-E3
cccacaccttcntctgctgctataaactacataaggggcagttcaattccaatacagcccgcnttttctttttatttccctacctttctcttcaagattcanatcttcttcaagaccctcacccgcatgaccatcacccttgatgtgcaaagctttaacaccatctacatccttatatccaacatccattacttttaatgattttcccctgaccatcttccttttatttttttccttattagcaatttttatggacctctcctaattcttttctttatctacattcatttcatttatttatattttactttttt

SEQ ID NO: 48373 - DNA, 380 bp, Glycine max
  Clone ID: LIB3107-029-Q1-K1-E4
gatcactcgggtggcgtgctttggcttcccttgccccgtcttttagcaaatgtttcaatattccaaggccatgttgcttaatttagttcttgtttcctttgtcctcttgagttctatcagagatgggagtgcagggatcaccagctctttcgttcggccacagtggccaggagttgacattcccgtggatcatgaagtatttgcagttccaaagggttataatgcacctcaacaagtgcacatcacgcaaggtgactatgatggaaaagcagtaatagtctcatgggtgaccccagatgaaccagggactcgccatgtgcaatatggcacatcaaaggataagtttaaaactagtgcagaaggcacagttgcaaactaca

SEQ ID NO: 48374 - DNA, 333 bp, Glycine max
  Clone ID: LIB3107-029-Q1-K1-E5
actctttctttggaccatccttctctcagattggtctgtacggttttcagcttcaacacagttttgcaccacccaaccttggtgctccacaattttttggcaacatgcagcaaccacactttgctaatggcactactcccactccctggatgccatacttacctagtccacactttcagaacccagcgcctccttttggttatcaacccactatcccacccaatgatggcaccaccctccagtagcaacaaattccacctactgctaacatttcccaggcttagtttccaaattcaggtgcttcacaccatgcaaccaatgatccatataatc

SEQ ID NO: 48375 - DNA, 376 bp, Glycine max
  Clone ID: LIB3107-029-Q1-K1-E6
gttcgttcaaaagaaataataaaattagttaagcaccgtcaccatgtgtaatcattttatgatctagtttctgctttaagaaaaatgaaggaaacccaactattgtgggatgtaagaagacgatctccactcgccctagacggagaccaaacgaaacacaatgggaactacaaaataggatattgtttcataagattaagttaaccatggggcttcatgagtggtgagcccgaaattataagctcccattggtgtttgacataagaatgtatacaatacaaaaagcacggatggaagcaaagaatgttggtcatcaagtttggcaagggacaaagtcatgttaaaaatagacgagttgatttcatctacatataac

SEQ ID NO: 48376 - DNA, 52 bp, Glycine max
  Clone ID: LIB3107-029-Q1-K1-E8
gagacctcaggtcaggcggggctacccgctcggtttaagcatatcaatgagc

SEQ ID NO: 48377 - DNA, 370 bp, Glycine max
  Clone ID: LIB3107-029-Q1-K1-E9
gatctcagggaggcaagaaacaaggcattatggagaaacttgatttagcgacagaatcatcatcatcgtatcctagtaatttgtgggactgtggcagcacgctatatgactcgttcgagctcaactccttcaaacgccaactcgactcagccatagctaattcccctataataagtagaaccctttccatgcctcatttaccggaacgttcacttcacgcgccgccggagcaacctcccacggtcatgtcccgaaagtccttcaaattttctcgctcctttcacaaactccttcgctccgttttcaagtccaacagtaaatccagcaccactaccaccagtttgagtttccaagtgccagagaaatactc

SEQ ID NO: 48378 - DNA, 373 bp, Glycine max
  Clone ID: LIB3107-029-Q1-K1-F1
gggcagcaacaaaatcaccgtccttcttctgcaccgcaatgctcttcctcttccctccgtcattagtttgttagttagattacccttttcccttccatgcttacgtcaccaccgctcaccattcactctctttttacccctaaaccattgaatcgatctaaatctctcccaaatcgcaaaccccttttgctcaattgagtcaattctctccctaagttcctctgtcggcgtctgggtgggtaaaagttgttgttttgtcttctgggttttggagcaaagacaaaagatgggtgagggagaacgtttccagcttgggactgtgggtgcgttgactctttctgtggtctcatctgtgtccattgtgatttgcaat

SEQ ID NO: 48379 - DNA, 386 bp, Glycine max
  Clone ID: LIB3107-029-Q1-K1-F10
gggctattttcctgggtgaatttatgcaggcggagtgggatatgtttcatagcttacatccaatggctgaatatcatggtgcggcacgagctgtaggaggatgtccaatttatgtcagtgacaagcccggacaccatgactttgatcttttgaagaagcttgcactacctgatggttctatattaagggctaaacttccaggaagaccaacaaaggattgcttatttaccgatcctgccagagatggaaagagtcttctgaagatttggaacatgaatgatttttctggagttattgcggtattcaattgccaaggagctgggtggtgcaaagttgacaagaagaaccttatccacgatgagaatccgggcactgtcacaggtttc

SEQ ID NO: 48380 - DNA, 386 bp, Glycine max
  Clone ID: LIB3107-029-Q1-K1-F12
ctgtatgaagaaaagacatgcattaggggcacgcaacgacctcctttctttattagacgaaagataaaagcaacacctactcgtcatgagacaacatatctctaaagtcgaaggcttatataaaccataagtttttgaagattgatagagtttatcttctacgcataattttctcttactcttcttcttcaacaagtctttctgaatattttcttataaaattataaaactctcaaaacaccttgaacatcttgagagaaaaaggttatatgcttagataatttatgtgtttgtaagacaattgagtgttagtctttgagtcatctttcatcataaatttcgtctaatggcttgatagaagaaagaatactggatgttgatcaaac

SEQ ID NO: 48381 - DNA, 240 bp, Glycine max
  Clone ID: LIB3107-029-Q1-K1-F2
aaaatataaaaatccattatcttttgtttatttataatcataataattatctattacaattgaatcaaaccttttttttctagagccataccactttttagatcttattctctcaaaaattcaaaatctaactctcaatttctcaaaatctcaccgctaaccgtataaccccctcctctttactatcgattaaataacgccatcactctccttaacaactacaacaaactctcttaccct

SEQ ID NO: 48382 - DNA, 244 bp, Glycine max
  unsure (1)..(244): unsure at all n locations
  Clone ID: LIB3107-029-Q1-K1-F3
tactgctggganagtacgatataagggggtggcatacatctaatctaaaactaaaactacctttcctttataccttacacttttctttacttttcctattattggaataatattttttatatatattttttatctataatttatctcttttcattactatttattgttttttaaattatatttataatatctttataaatttctttattttttatatttttttctttacttttaattttttttt

SEQ ID NO: 48383 - DNA, 387 bp, Glycine max
  unsure (1)..(387): unsure at all n locations
  Clone ID: LIB3107-029-Q1-K1-F4
ggggttttccttattccaatancgaggcgagacatcgattccaaaggtgcgtttctgctgtgctagggtttctgcatcttccacctccgtcgcgatgaaaccaggcttcatctgattccgatttcccttcgctccttctcctccttaacattcatcttcttcgattcctctacaaattatgattattattatgatgaactccatcttcgcctcgcataaccttcgcgtcttcggtcccggcttgaatcccttcgcaccttattgcatcgccaatcactcccttttcctttccctttcctctcgctaaattacaattccctttctttttcctctacaacttctccttctccagttctccgaacatgtaaattcggaggacaccgtctt

SEQ ID NO: 48384 - DNA, 395 bp, Glycine max
  unsure (1)..(395): unsure at all n locations
  Clone ID: LIB3107-029-Q1-K1-F6
ggattaaatcaattaataaaatcacacttggttttgtgttgaaaaccttgagatttgagaaccaaacacgacgctgcgccttgtgtagttgcccaacgccgcgccaccagatagttacacttttttcttcaactcaagagaagagcttccatggagaatgcagacatccctgagaatgccaacgagcattgcccaggtcctcagtctgaatctgctggaaaatctgatgcatgtgaagggtgcccgaatcaacaaatttgtgccactgcccccaaaggacctgaccctgatctggttgccattgcagaaagaatggctactgtgaaacatangatattggtcttgtcaggaaagggaggagttggcaagagcacgttctcttgccaactggcgtt

SEQ ID NO: 48385 - DNA, 385 bp, Glycine max
  unsure (1)..(385): unsure at all n locations
  Clone ID: LIB3107-029-Q1-K1-F7
nnggggggcgctaggagaagggaaagggagaagtagaattatgtgagatagtgaataataataataataataataataataataanntagtagtgtggaattggatcagacctgtttgttagagagagatgtcacgggggagatctgattcgggagggtggttgaggggctgtctggtggttttcgcagtggtctcagcgttgggcgtgtgtggccctgctctttactggcgattcaagaacgccatcactctccgcaacaacaacaacaaactctcttgcccttcctgcctctgtgactgccctccccctctctcgctcttccaacttgctcctgggctggcgaatctctctgtctcagattgtggaagtaatgacccggatct

SEQ ID NO: 48386 - DNA, 385 bp, Glycine max
  Clone ID: LIB3107-029-Q1-K1-F8
caagcagattattaacacttgtatgaatgatcagaaggggaggctgtggcctatgctgcaaaagcttggggtcaccatgaaatctgaggagaaggacctaatgggcaaagcattgatgaagcgtgtcatgcaaacctggcttccagcaagtagtgcattactggaaatgatgatatttcatctaccctctccatcaacagcccagaagtatcgtgtggagaatttgtatgagggtccccttgatgatcaatatgcttcggctatcagaaactgtgatcctgagggtcctctgatgctctatgtctcaaagatgattccagcatctgacaagggcagattttttgcttttggtcgtgtattctctggcagagtttcaactggtttg

SEQ ID NO: 48387 - DNA, 390 bp, Glycine max
  Clone ID: LIB3107-029-Q1-K1-G1
ggttctagtgtatgtgattgttgtgactcgtgcttcttcgtcgttatcttcttcttttgttgtttgtgtgtttgttttttctctcacctgaaaatgtcttgctgcggtggtaactgtggttgcggaagcgcctgcaagtgcggcaacggctgcggaggctgcaagatgtacccagacttgagctacaccgagtcaaccaccaccgagaccttggtcatgggagtggcaccagttaaggctcaattcgagagtgctgaaatgggtgttcccgctgagaacgatggctgcaaatgtggagctaactgcacctgcaacccctgcacttgcaagtgaggtgttggagagctaaagcttcaagcagaaatggcccttagaaataatgataaaaac

SEQ ID NO: 48388 - DNA, 365 bp, Glycine max
  unsure (1)..(365): unsure at all n locations
  Clone ID: LIB3107-029-Q1-K1-G11
tactacaaaatgtggctttttttcttttctactcattatccgggcctcgttgttctttcgtgttaganaaacttaaacaatggtaaattgccaagccgttgacactgcaactctagtgattcatcaacccaatgccaaagtataaaggttatattggcctgttagtcctaatgaagtgatcaagaccaaccctgatcactatattgctcttcttatcttcaccacattgttctcatccacagacaatgaaaatcgctcaaataagagtgacaacaccaacaccaccaaccctgttcgccttacccgcattaagcttcttaatccaacagatacccttgtgcttgtccaactttatagactaatct

SEQ ID NO: 48389 - DNA, 384 bp, Glycine max
  Clone ID: LIB3107-029-Q1-K1-G12
ggatgctgtcaaggcaatcaagccaagcgttgggattggatcatctggagcagggaaaacatttactaaggaggtggttgaaaccatggcatccttgaatgagaaaccacttattcttgctctctccaacccaacttcacaatctgagtgcacagctgaagaagcttatacatggagcaagggtaaagcaatctttgctagtggaagcccatttgatcctgttgaatatgaaggaaaactttttgttcctggacaggctaacaatgcttacatatttcctggttttggcttgggtttgatcatctctggtgcaattcgtgtgcgtgatgagatgctcttggcagcctctgaagctttggctgcacaagtatcacaggaaaacta

SEQ ID NO: 48390 - DNA, 390 bp, Glycine max
  unsure (1)..(390): unsure at all n locations
  Clone ID: LIB3107-029-Q1-K1-G2
ctctattctttaactactacatttttataatcgggaggtgtagtgactttttcttatcctcaagtaaaataatacgatgaaggtgacgggattattcataaataaaacaaaatccgcaaaggttttgagttttaaaaataaatttgggaataaatatcaataaattattattaaataaacaaatttaaataaagaataaagaagcaactttatgtaaagatgtttgtgccgncgtatgttagtatataatttaattttaatatacttattagtctaagttttattatcaattaattaaaaaatttcctgaatataatttcaatatattattacaaaaataatattatgaattgccgntgttaactcttaaataacaattcaaagtagatc

SEQ ID NO: 48391 - DNA, 116 bp, Glycine max
  Clone ID: LIB3107-029-Q1-K1-G3
ttcatttccttccttaaatataccgcaccgacttttctcaaagtaaataacataaaataaaaaaaccccctacctaaaaccctaatctctcaaaaccctacatattccgtcaactt

SEQ ID NO: 48392 - DNA, 316 bp, Glycine max
  unsure (1)..(316): unsure at all n locations
  Clone ID: LIB3107-029-Q1-K1-G4
gagaaataatctgtgctgtggtagtggaagcggcgcgggcatcccagcgatggcgagagtgggtaaaatgaagttgggttcacaaggcatggaggtgtctttgcagggacttgggtgcatgggcatgtctgcgttctatggtcctcccaagcctgaccccgatatgattgctctcatccaccacgctgttcaaactggtgtcacttttcttgacacttctgacgtctatggtcctcacaccaacgaactccttctatgaaaggctctgaanggaggggtgagagatgacgttgaattggctacaaagtttggaatc

SEQ ID NO: 48393 - DNA, 255 bp, Glycine max
  unsure (1)..(255): unsure at all n locations
  Clone ID: LIB3107-029-Q1-K1-G5
aaaataaacttaaattcacaatgcatatgacccttcttcccttcaacttgnntacattggcatatctgcgttctatggtcctcccaaacctgacccccatatgattgctctcatccaccaccctgttcaaactggtgtcacttttctttacacttttcacgtctatggtcctcacaccaacgaactccttctataaaaacctcttaaggcacgcgtgagagatgacctttaattctctacaaaattttgaatcaa

SEQ ID NO: 48394 - DNA, 357 bp, Glycine max
  unsure (1)..(357): unsure at all n locations
  Clone ID: LIB3107-029-Q1-K1-G9
gcgggggaaagttaacgaagaaccattcngtggaaatcggcgacgaacgaagatcatcatcaacaacctcacaccctcatcaattcaattcaattcttcgccctataaaatcaaaatccgttacatcacttttcacatccattcctaacctccccaacctgacaattacacgtttctttcagagaagctgacatgccttcagtttacatgggagataggatggataattctaactcgagcttgagttctaattctaaagaaagcagcgttgttgttaatgggaaagaaacgtacaaaaaacttctggttgcatcacggcctaaaggctttgcacagagaaattatgaacaccttgtg

SEQ ID NO: 48395 - DNA, 377 bp, Glycine max
  unsure (1)..(377): unsure at all n locations
  Clone ID: LIB3107-029-Q1-K1-H4
ggtggcagagagcgaacccaaaactagagctacgttccgcttcaaaccttccactcttctctccttttccaatcaagggaataatatttcttagagatattccgaaaccatggctcacgccaatcctatgatttttgttgttggaattctaggtaaccttgtctccttctgttgctttctagcaccagtaccaacattctatcgagtttgtaagaagaaaaccacggaaggtttccaatcacttccttacgtggctgcactcttcacttcaatgctttggatattttatgcttacataaagacgggcgaaatacttctcatcaccattaacgcattcggttgtttcatagagacaagttacctngtcatctatatca

SEQ ID NO: 48396 - DNA, 413 bp, Glycine max
  Clone ID: LIB3107-029-Q1-K1-H6
acccacgcgtcacggactgctacaagaatacaaaaaaaggcttttaattatcagaccaaaaaacaacacaaacgttcccgctaaattttcaacctaccatttctttttcaattaattaaataatatttcttagaaataaaaataaaccatgaatcactcctatccaaatatttatcattttacaattctaactaacataatctccttctcttaatttctaacaccagtaccaacattttatcgaatttttaacaaaaaaaccacgtaacgtttccaatcactttcttacataacttcactctttacttcaatgctttggatattttatgcttacataaagactcgcgaaatacttctcatcaccattaacgcattttgtttttttataaaaacaatttaccttttcatctata

SEQ ID NO: 48397 - DNA, 389 bp, Glycine max
  Clone ID: LIB3107-029-Q1-K1-H7
gaaaaacaagtgtttcgaatagattatcctagggctttgggaatagtgctgcaatggcttcaagtcaggaggaggtgacccttttgggagctactggaagcccatttgtgtgcagggttcatattgccctcaagttgaagggagttcaatacaaatatgtcgaagaaaatttgaggaacaagagtgaactgcttctcaaatccaacccagttcacaagaaggttccagtgtttattcacaatgagaagcccatagcagagtctcttgtgattgttgaatacattgatgagacatggaagaacaaccccatcttgccttctgatccttaccaaagagccttggctcgtttctggtccaaattcattgatgataaggtttttggtgctgca

SEQ ID NO: 48398 - DNA, 387 bp, Glycine max
  Clone ID: LIB3107-029-Q1-K1-H9
gagaccaaacaatacttataacctgggtgaggggagtatggcacagtttagtggcaaaactttggtgcagtggttggtagcaacactgctgattgccttgttgggtggtgcacaagctgttgtgttatgtaacatcgactcaagtcaactaaacttgtgtcgtgctgcagttactggtcaaaacccttcaccaccagatgagaaatgttgtgcagttattcgccaagccaatttaccttgcctatgcagatacaagtctattcttcctttaattggaataaaacctgaataggctttggccttgcctggtaaatgtggtctccaatcccctgctaattgttgagtgtagtgaagcaattaatgaatgtcttgttcattacaagcact

SEQ ID NO: 48399 - DNA, 420 bp, Glycine max
  Clone ID: LIB3107-030-Q1-K1-A11
gagaggaagaagtagcaaagcatggcgagcaaggctatggactcaaggcccgtaactaaggcccataagatgtcatccaccaacgacaagttccactgaataacactctctacgttccaactcgggttcaaatacgaaaagtccaacgccggccaccggaacaccggccacggcaccgttagatgcaactccggccaccggaaacttgacgtgtaccaccacctccaggacatcctcgtttgtttgttcctctattctttttcaacctttcttttaatttttcttttttcttttctcttagctgtttttcctttgattttgcctttggaatttcactttcaattgtgatggtgaagcatttattagtcttctttagaaatgagggtcatggaaatgggcatatcaatatctgtgaatgtg

SEQ ID NO: 48400 - DNA, 378 bp, Glycine max
  unsure (1)..(378): unsure at all n locations
  Clone ID: LIB3107-030-Q1-K1-A12
aatgcagttttttatgccaagtcatttgctgacaaaggtggggctaaactatatgttccatctggcaagtggctcactggaagttttaaccttaccagccacctcactctctttcttgaaagaggcgcaaccatcatcgcatcacaggattatgcacactggactgcaatggatcccctaccctcctatggtcgaggtattgatgttcctgttgggagataccgcagtttgatttatggacagaacttaagtgatgtggtgattacagggttctgtttggtgggacctaatcagtactcattccttaaattatagccgaccacatattatagaactngttggttctgataatatcataatctcaaatttgacattttt

SEQ ID NO: 48401 - DNA, 219 bp, Glycine max
  Clone ID: LIB3107-030-Q1-K1-A2
atcattattcactggttttagtcaaacttttaactctcgctttctttcttcaaattcaactctcaattccaattcctatttaattatttccattttcccactaaccatctcaaatccaccttcacataatttaactttatactaatgctatatttaactctttttctatttatatccatattcattgatatttactttatcatttaataccaaaaccat

SEQ ID NO: 48402 - DNA, 226 bp, Glycine max
  Clone ID: LIB3107-030-Q1-K1-A3
gtcttgctattttattaagtaattatttcatgcggatgtgtggggccttgataatagtgcataatatacaagaatgcgataaatggtgcatcaagaagtgcaatcagaaaattccataagaagattatgttgggaagtttattttttgtacaacttgctaaaatttgattaaattctttatttggtaaaatgtttttttactcaaggttataaatttatcatacaa

SEQ ID NO: 48403 - DNA, 233 bp, Glycine max
  Clone ID: LIB3107-030-Q1-K1-A5
tcgaatatacgctcctactgcctgactatttctctgcagattcttgccattcgatggagaccacggtgctctagaaatgactcagtataacatcgagcctattgcccatgtccactctgttaagttctacgaaaactggtcatcctatctacaagcttgtacgtatagactagcttgctattgaaatatactcgaatgttgccgctttaatcaacaacaggtcatttattttt

SEQ ID NO: 48404 - DNA, 414 bp, Glycine max
  Clone ID: LIB3107-030-Q1-K1-A6
ttttgggattgatactctgaatcattattcactgatttcatgtcaaaccttgatctctcgctttctttcttcaaattcaacttgcaattccaattcctggggagttggttccattttccgacgaaccatctcaaatccaccgccacataatgtaactgtatgcgaatgcgaatgtgaacgcggtttctatttatatccagattcatggggatttgctttagcattgaataccaaaaccacctttccatctccgattccaacgcgaatcctaaacctgcaatatgtcatgaatctggcgctccattggcttccatgaacatcaaatatcttctttaatgttcttgatacatcaatgttgatatttttacctactatgagcttaagcttgctaccaatcactttctgccccatttc

SEQ ID NO: 48405 - DNA, 392 bp, Glycine max
  unsure (1)..(392): unsure at all n locations
  Clone ID: LIB3107-030-Q1-K1-A9
tagctgagggagtgtcatctatggtcctcataaagatgcgggagattgcagaggcatatttggaaacacccgtagagaatgcagtggttactgtgcctgcttatttcaatgactctcaacgtaaagccaccatagatgctggtgctattgcaggcctcaatgttatgcggataatcaatgaacccactgctgcagctattgcatatggccttgacaagagaactgattgtgttgaggagcgaaacattttcatctttgaccttggtggtggtacttttgatgtatctctcctcacaattaaggataaggtctttcaagttaaggctactgcangaaacactcacctttgaggggaggactttgacacccgaatgtgaactactttgtacagg

SEQ ID NO: 48406 - DNA, 404 bp, Glycine max
  Clone ID: LIB3107-030-Q1-K1-B1
gcagccacacttgcaatgatcaaagccaaaagcacaacaaaacaaattattctataaataaggagccatgaaggatcaattcctttaagacaggtgttccatgcttcatcctcatatagcaatccagcttcttcctccccctgattttctccactattcgatcttgatttgttgaatccttcatatttgaatattaaaaaagatgctagagccatggaggctaaaatccatagtgcacagaagaagaacctccaattcaaccaataacttagggtagtagagtctgaagttatggttggttgccatgtatggctagaggactctgtgaagaaactcatgagttatgtgtgctagctttagaattttatgtttcttcttgatgtgtttcttgaaacactatgcac

SEQ ID NO: 48407 - DNA, 288 bp, Glycine max
  Clone ID: LIB3107-030-Q1-K1-B10
ggttctagtgtgtgattgtttgttgttgtaactcgttcttcttcttttgttgttctgtgtttgtgtttgttttttctctcacctgaaaatgtcttgctgcggtggtaactgtggttgcggaagctcctgcaagtgcggcaactgctgcggaggctgcaagatgtacccagacttgagctacactgagtcaaccaccaccgagaccttggtcatgggagtggcacctgttaaagctcaatttgagggtgctgaaatgggtgtgcccgcttagaacgatggctgcaaatg

SEQ ID NO: 48408 - DNA, 427 bp, Glycine max
  unsure (1)..(427): unsure at all n locations
  Clone ID: LIB3107-030-Q1-K1-B11
ggaagagaagagagtatccaacatagatggaaacactacaacaaaaaacgttaacacttaaaacacaaacttgtttaggggccacccctctctggggcgccattctcttttttcctttcaaaaagcaaagctaccatctttcttaccatattctctctctctctctctctctctttctcattgctaccctgttggtggataacaaaacttcagcaacccctttgcatctgatctaagaatcccaacttcaagtacccattttttgtcatttcatgatctaggtgatagatcgtgaaaatgacaaggatgacccatgattttggngatactatgcagaaagatgcagttgccgtggtgtcggccgatgtaatatttgcttctcttncgtttcctaattacannaatcgagtaaataatcagatcatgg

SEQ ID NO: 48409 - DNA, 341 bp, Glycine max
  Clone ID: LIB3107-030-Q1-K1-B12
gacaacaagttcaagtattcactacatgttattgtccaccacctcaatacgaataccttcgccgaatcggaatttcgaagcaattaaagtgtgctactattccttcactatcagtttccgcctcttctgttcttcgtaacgcgtcgttttgctgcacctcttctgtccactgcaatttaccttcttcacccaaaatcttcgtcaaagggcttcctctctcaacctctgaaggacgtctgatgaaggtgttttcagagtttggtgacgttactctaggtaataataaattctttttgggttggtgttttcagagtttggtgaagttactctaggtaatacta

SEQ ID NO: 48410 - DNA, 327 bp, Glycine max
  Clone ID: LIB3107-030-Q1-K1-B3
gaaggtgcaagagtttgttgtgagctataagctagtttatcgtgaggggaatattaagttgtttgttttctttgttgctgcagtatttttgttagcatgtccattccatgtctcattctattaaaggtttcttttttcttatgtaattctttctctattttgctttcttttgtttgtttttttctcttgttttatttctttatgtttaatcactcaacatttttttcctttttaaacttttctcattatttttcttttgtaattttttttcttattttttattttttttttattttattttttttcttttatttttttttttttttt

SEQ ID NO: 48411 - DNA, 373 bp, Glycine max
  Clone ID: LIB3107-030-Q1-K1-B5
tatcatctgtagaagatgcccaaagtcatgctgtggaggaaccacttgctgaaacagtccagcaacaaatcactggtaatagtatttcttcctcaatggaaaagccaatgtctattgttgtagaaaacataagttcttcgggggatctcatcagcagtataagccacaaaagtaataaaaagagtatacttcaaccaagtgaagaatctgcagatagtccaggaaatgatgatataatacatgatcttggtcaaaatggaaatcctgcatcactggagaaccaggaaaagacaattgtggaaagcagcttatttgatcttgaataaagtcctgttcttgtacctggcttaccaataccatcaactgaaccaac

SEQ ID NO: 48412 - DNA, 360 bp, Glycine max
  Clone ID: LIB3107-030-Q1-K1-B6
gggagcaataaattttttcttcagggcaggttcagatttggaccagatgcaggatcattggccctgacaatttttcttattgctgctcctgttgcagttttctgtgtctatgttgccagaaaactaatagatgatttttctgatcacttggggataaccataatggccattgctgttatattcacaatttatgtgttagttcttctcttgttaacatctggccgagaccctggcataattccacgcaatgcacatcctccagaaccagaaggttttgaaggtagtctagatgttggggctggtcaaactcctcaattgcggttgcctcgaattaaagaagttgaagtcaatggaattact

SEQ ID NO: 48413 - DNA, 361 bp, Glycine max
  Clone ID: LIB3107-030-Q1-K1-B7
tactcaattgtcgatattgagagaaaagcaaagcttctaggctgtgcctagtatcgtcctatctatgtgcgattgcaaactccataacaattcctaaaatatatattctaaactttaagggcttaaagaggctcaagttcaacacacaatgactcacctaccttatacgatataaaatcagcttaattgttagggtgagagatttaagaattaaaagtcaagaaagggaattagaggtagtagatctaaattattactaacattctaataaaaattaatacttattaactattaaaataattattttataattatttaaatagcgattttgtaataaatcacaattataattgtattacaa

SEQ ID NO: 48414 - DNA, 375 bp, Glycine max
  Clone ID: LIB3107-030-Q1-K1-B8
catcctttgacacactctcactctttccgcgagaggtttgatgaaactctcactggtcacaggaacgaaattttggcccttctgtcaaggcttgaagccaagggcaagggaatcctgcaacatcaccaagtggttgcagagtttgaagaaatccctgaggagagcagaaagaaactccaagatggtgtctttggagaagttttgagatccacacaggaagccatagtgctgccaccatttgtagctcttgctgttcgaccaaggcctggtgtatggaaatatctgcgtgtgaatgtgcacatgcttgttgttgatgagcttcgtcctgctgagtatctgcgtttcaaggaagagcttgttgaaggaagttcaaac

SEQ ID NO: 48415 - DNA, 403 bp, Glycine max
  unsure (1)..(403): unsure at all n locations
  Clone ID: LIB3107-030-Q1-K1-B9
tcagtcagaagctatgtctaggaatactagacaatccacactgccaaggaggttgactttacgaatcttggatcagccaagaccaactataaacatcgatgtcgcaactggctgaggattgggcccatacagagaaattccacaactatctaggggtcgtagttagagaaaaaattccaattctacataatagttggaaagatgtaccggactcgctaaaggacctagtatgggataacattttggcaaaatttgatatccctgaagcggcgaatgcaaagataaaggtgatgtccaccgtggccactagatnggaggcaattaaatcaaccatgaccactaaanttgtctatgctgactctgagaggcangatanacatgatcattcngtaaaacatggcct

SEQ ID NO: 48416 - DNA, 317 bp, Glycine max
  Clone ID: LIB3107-030-Q1-K1-C10
ggtaagtttccaaatcgagcttttcaattcattctatgtacccgtggtggtccccatttgtttttacgtgcttttcattttatttactttctgtacccccttttggcgtgctttagtcattttctcatctaatcaaaaaatgaaataaatttcgaccgatcatttgaattgtaatatccgttagtttctgttaaaatgaaatccgaccgttcggtcacgccgtaactacgttggaagccaaaaaaaagggtaaaataataatataataatcaaaaatatcttttaataaaataaatcaaaaataatcaatcgaacac

SEQ ID NO: 48417 - DNA, 275 bp, Glycine max
  Clone ID: LIB3107-030-Q1-K1-C11
aagagaaaaggcttcctgcaccgtgcacaccaacttgatacctgtgattctttctttgcttagaattccacagaatatggagactgttcttttcaatcactccccacctttggaattcaagggtttgagcatggaggaggaagactcattgctagggcaagtggaaatatggatgtacatgacatgcttcacggactccgtggccttgaaagctgtcataaaggctcgtatagcggacatactagaccgttatggtaaaccactatgcttgtcgc

SEQ ID NO: 48418 - DNA, 322 bp, Glycine max
  Clone ID: LIB3107-030-Q1-K1-C3
gacacgcaactatttctgactacgttttgcgctacgcctctgcctctctctcaaaaatcgttctcttcgattttagggttttgttttgctgctgcctccgttccccccttctcataaacaacgcgttttctcttctgcttcgtatctattctttgcttttggttttggctgattcaaggccttcacagcattcgttgcggcattttaatcgatttatccaagcaggactgaatgaacttatggagtctaacggtgggaatatgacgtctagtaatggtattcgtctatcattggtctactaagctccccttggatacggcat

SEQ ID NO: 48419 - DNA, 405 bp, Glycine max
  Clone ID: LIB3107-030-Q1-K1-C4
gacgccttctcagactcagaaaagagaagaaacagaacaaagaagagcagagagagagaggaaccatcaccaaccctaatttcttagctaaaccctattcgtttagcatttcctctcttttctcccactcgtaaatcctctcccaaacttttcagatccaaataaatcatggttttctgggtttttggctacggttcactggtgtggaaccctggattcgattacaatgagaagattataggtttcattaaggactacagacgcgtgtttgatttagcgtgcattgatcaccggggaacacctgaaaacccagcaagaacttgcacgttggaggagaaggaaggtgctatttgctggggagctgcttattgtgttcgaggaggccctgaaaagggaaaactggct

SEQ ID NO: 48420 - DNA, 414 bp, Glycine max
  Clone ID: LIB3107-030-Q1-K1-C5
ggcaccgcttcatcactatcaccatcccaaaaactgcatgtgcttctgttcgttttccaaatctcctctttgtttctgaatcttcccttcgctgttgcagagatggcttcgcggtgctggccttctgatgctgagctaaatgaattgagagagagagtttcgaaaatagtggatctgaataaagaggaagttcgagttgtggtatctccctatcgaatatgtcctttgggggcacacattgatcatcagggtgggaccgttgcagctatgacaatcaataagggaatacttctggggtttgctccttctggcagtaatcaggttgtaattcgttctggacagtttgagggagaagttaagttcagagttgatgagattcagcagccaaaagataagactttggacaaagattca

SEQ ID NO: 48421 - DNA, 420 bp, Glycine max
  Clone ID: LIB3107-030-Q1-K1-C6
gttgatggactagagatatggagtgctatccagacatgggttaaggactacgtctccttgtactatgccacggatgatgcagttaagaaagactcagaactccaagcttggtggaaggaagctgttgagaagggtcacggtgacttgaaagacaagccatggtggcctaagttgaacactcttcaagatctgattcacatttgctgcattattatatggactgcttcagcactccatgcagctgtgaatttcggacaatacccttatggcggtttcatcctaaatcgtccaactctaaccagaagattgctcccaaagccaggaaccaaagaatatggtgaacttaccagtaatcatcaaaggcctatttgagaacaattacaggaaagactgaggcccttgtggacctaacagtgatag

SEQ ID NO: 48422 - DNA, 422 bp, Glycine max
  Clone ID: LIB3107-030-Q1-K1-C7
gaaggtgcaagagtttgttgtgagctataagctaggttatcgtgaggagaatatgaagttgtttgttttctttgttgctgcagtagttttggtagcatggccatgccatggcgcaggctaccaaaggttccctctccgaatgaaaactggctatggtgagcgttcttcggaggtaaaatgcgcaagttttaggcttgctgtggaagcacacaacatccgagcctttaaaaccattcctgaagagtgcgttgaaccaacaaaggactacattaatggcgaacaatttagatcagactctaaaacagttaaccaacaagctttcttttatgctagtgaacgcgaagttcatcacaacgacatatttatattcggcatagattacaccgtactctttaatatcccatactatgaaaaacatggat

SEQ ID NO: 48423 - DNA, 298 bp, Glycine max
  Clone ID: LIB3107-030-Q1-K1-C9
atggtacactgtcactggaaaattgggttaaatcatagaagagggattggtcaatgaccatctttatcccacagacctcaaaaatcaaggtactttcttgaatttcaaggttagaataaaagacttgtaccaattcaaaatacacgtgcagttttgaagacataaagggaatgagatttgagttatgaaatgcttgaatgcatttgaaactctcatcagaaaagaaatccatatctatgaacttagggtcaatgatagaacatgacgagaagaggtttgtgtaccatgtatgtttgtc

SEQ ID NO: 48424 - DNA, 347 bp, Glycine max
  Clone ID: LIB3107-030-Q1-K1-D10
agaagggccttattgagagtcagattttctgtttgcatggaggtctctcaccatctttggatacacttgataatatccgtgccttggatcgcatacaggaggttccacacgaaggaccaatgtgtgacctcttgtggtctgatccagatgatcgctgtggttggggaatatctccacgtggtgctggatatacatttggacaggatatagctgctcagttcaatcataccaatggtctatccttgatatctagagctcaccagcttgtcgtggaaggattcaattggtgccaggacaagaatgtggtgactggttttagtgcacccaattactggtaccgatgtggg

SEQ ID NO: 48425 - DNA, 420 bp, Glycine max
  Clone ID: LIB3107-030-Q1-K1-D11
gggggtatccattaaccaagcaatgtgtatgttcggtttttttacaatgttataaatgcgaagtatttattgactttgtgaatcaatgactatctaaaatttattatattacctttaagggaatctttctttacaattacgtttttttcttatctacaaaacttgaatgtgagattttatcggagtccaattccacttacactaaggtaatgttgctaaggaatgctttatgttctaaatactaattattcactctctcccttgtacaatacttaaccaactaacaccactacagcaccaaacgactcctttgttgctctggcctttcccttaaagaaacagaaagccaatgcaataatgtcaggtaaaagagcacactaaattggtgctgaggactggcttataaaggttatatccctc

SEQ ID NO: 48426 - DNA, 358 bp, Glycine max
  Clone ID: LIB3107-030-Q1-K1-D2
gacttcgctgcacgccaaacattgcactgcgcgaaaaggttttctccctctgcttctatcatttccttcatgttgggtatttcattcactttttttccccatcttttttcgaatccctttctctaaaaatttttaaatgatacagtctggcttggtaggtcacacaagtttaaacattacattccgtaagcgccttttctaaaatcttcgattacattctttagttttcttttgagtatttaaagcccttaattcaaccgcgacgaattatgatgcttacgaggcaaatcggtttgtgctaacgtgtttgtatttatagatagtgtctctctttgagtctctgtaatgaatgtaattc

SEQ ID NO: 48427 - DNA, 363 bp, Glycine max
  Clone ID: LIB3107-030-Q1-K1-D3
ggaaaaaaaaaagagtagagtggataatggcttcgttatcgctttgcatagccatgagagcacccactccctcagcttctctcattctcactaccccaaaaccatcttcactctctttgaaccttacccgcacttgctccagcgctcgctctccgctcctccattgctccttcctctcttctccttcccatctctcttccccttcctccgtttcaggcttgtcacttggattggatttgacatctaatgttgggaccagaagaggaaaaggttctggcctagttgtgagggcaggcaaggctgctctttgtctgacttagagaagcagatcaagaaaattattggcacgcacttatgggtttc

SEQ ID NO: 48428 - DNA, 406 bp, Glycine max
  Clone ID: LIB3107-030-Q1-K1-D4
gatattgatcaatccatcatttccaattaggtaaagtgaaacagtaaaagagcaatggaggaggaggaggaggcggagaaacagaagaagcacttagcaatgctggaacgcctttccaaacgcacccaaagccgttcgcaaaaccccgattcctcatcatcagaatcctccacttcctccatcctttcacgcttcacccacttaaaatcctcgattgagtcccaactcgcccaatcccaatccatttcctccgaccccttcaacctcaaactccacttcaatcaaatctccgaatcaatctccgatttagaaaaattcgtcgccgaaaactcctacttcctacccttctacgacgttcgaaccttcctcaaaaccggcttcgacttaaagcacttccttgacgacc

SEQ ID NO: 48429 - DNA, 386 bp, Glycine max
  Clone ID: LIB3107-030-Q1-K1-D5
ggtgaactgtatgcatcaaaaggtgcatgtacggctcttaaggaaaaagatggaatcctaatcaatcgactttatcgagaaagattactttttttaggtcaagaggttgatagtgaaatatcgaatcaactaattagtcttatggtatatcttagtatagaagaagagaataaagatttgtatctgtttataaattctccgggggggtgggtaatacccggaatagctatttatgatactatgcaatttgtacaaccagatgtacagacagtatgtatgggattagccgcttcaatgggatcctttcttttggcaagaggagaaattaccaaacgtttagcatttccttacgcttggcgccaatgattcttttatttgagaatata

SEQ ID NO: 48430 - DNA, 427 bp, Glycine max
  Clone ID: LIB3107-030-Q1-K1-D6
aagaagaactagtctaagcagaaatggcctcttcagtgatggcatctgtggccctcaaacctgcccctttcactgttgagaagtcctcagttagaggccttccctccctctcaaggaactcctcttcattcagagttgtggccagtggtggcaagaagatcaagactgacaagccttatggaattaatggtggcatggctttgagggaaggagttgatgcatctggcaggaaaggaaagggaaagggcgtttaccagtttgtagacaaatacggtgctaatgtcgatggttacagtcctatctacgacaccaaggactggtcttcaaccggtgatgtctacgctggcggtacgactggcttggctatctgggctgtgactctacttggtcttcttgcttgtggtgcactttttgtctacaacacaag

SEQ ID NO: 48431 - DNA, 231 bp, Glycine max
  Clone ID: LIB3107-030-Q1-K1-D7
tgtgaatattaactagtctaagcataaatggggtcttcgttgatttcaggtgtggcgcttaaacctgcccctttcactgttgagaagtcctcatttatatgccttccctccctctcaaggaactcctcttcattcatagttttttccagtgttttctataatatcaatactgactatccttatttaattaattgtttcttttcttttttgtatggattttattcttctttc

SEQ ID NO: 48432 - DNA, 386 bp, Glycine max
  Clone ID: LIB3107-030-Q1-K1-D8
ggtacaagatatatgatgctaataacaatggatggatgttacttgattgatagaagttttaattttcgaagggtccaaatgagatttccttgcagaagtacaaatgatggtttgggcgagaagacccaccacttcacattacttgatggtgagatggttattgatacattgccagattcacagaagcaggagagaagataccttatatatgatatgatggcaatcaaccaagtatcaataatagagcgtcccttctatgaacggtggaagatgcttgagaaagaagtgattgaacctaggaatcacgagcgacataatatatatcaaagcagaaatccttactatagatatgacctggaaccgttcatggtgaggaggaaagactt

SEQ ID NO: 48433 - DNA, 438 bp, Glycine max
  unsure (1)..(438): unsure at all n locations
  Clone ID: LIB3107-030-Q1-K1-E10
ggagggtgtgaattctaaaaggaaagaacagctgagctggtcagaaaatcaatggcatcatccttgggttttgagttcctgacgaagaagccttacagtcctccatcctgggcatcccatctccaccctttaccttcccacttcttctctcttgcccatcttcccactccaattcacagatggaaccttcccaatctgcccaccaataccgagctgtggatcaagcgagacgacctttccggaatgcagctgagtggtaacaaagtgaggaaattggagttcctgatggccgatgccattgcgcaaggcgccgactctatcatcacaatcggaggcattcagagcaaccactgtcgcgccaccgccgttgccgccaagtatttaaaccttgactgttttctcatccttcgcacctctgacctnctcgtcgatcaagat

SEQ ID NO: 48434 - DNA, 445 bp, Glycine max
  Clone ID: LIB3107-030-Q1-K1-E12
agtctcttgttttgttggaaacaatgtgtttaaggaaaaagctgatcaaccagtgatattctcttaacaaatattctaaggccttatctttttcttgatcttgtttgcttgacctttaatcaatctttaatcaatttctgtttgtttaaccttaaatgtttgttgaaacaatcttatttgattatacttttggcatcatcaaaacctgtattcatacatttacagaaataatcttacctggaaaagagagtacaactctagtgagctgtttataattatttttttttctggaatatagcatatcccaaacatattgtcccccttttcttattatatctttggtcagtataatgtcattactgatttattatcattttttaatcatttgaaattctttgctttgcaggatgagagtgttataactttgcgggacctgaaaggtggt

SEQ ID NO: 48435 - DNA, 336 bp, Glycine max
  Clone ID: LIB3107-030-Q1-K1-E2
gggagggagaaaagaaaagggtggtgaatgtgaaaatagagggagcatgtggaatggttgtggtcactattatatatgttgtctcttacgctttgcatgtgactttctttctttctttatatcctttatatattaagtatatgctgcaatatatttaattaaagagagaagtaacatcaaggtgcagagagaggaattgaagcatgggaagagggaaggtggttctggagagaatacagaacaagatcaatcgccaagtaaccttctcaaagcgcataaatggtttgctcaagaaagctttcgagctatctgttctatgcgatgctgaaatcgctc

SEQ ID NO: 48436 - DNA, 339 bp, Glycine max
  Clone ID: LIB3107-030-Q1-K1-E4
ctttaatctacctatttttatactatatctcagtataaatttttatttttttacttcttttattgttattaatatcttctattttattttattatattcttttatttcttatttatttattcttttttatttttaatactttttattattattctttttttatttcttttttttttttttatattttttttttttatttttttttttttttatttaattattttttttttttttttatttttttttttttttttattattctattatttattattattttttttttttatttattatttttttttaatttttatttcattatttattatattttttttt

SEQ ID NO: 48437 - DNA, 337 bp, Glycine max
  Clone ID: LIB3107-030-Q1-K1-E5
gaacgttgaggattattgggtgcacgggggattgggatgagactctggttagggttgggtgtttcaacaatgggttggttgaggttcacttggagaagcttcaggttaccgatgtgggacttgttgccgtgtctaaatgttttggtttggacactttgcacgttgtgaaaaccgctgagtgctccgatgtggggctttgtgcggttgctgataggtgtaggttgttgaggaaggttcacattgatgggtggaggactaataggattggtgatgatgggttgcatgcgattgccaaacactgtcttaatttgcaagaactcgtgttgattggtgttta

SEQ ID NO: 48438 - DNA, 361 bp, Glycine max
  Clone ID: LIB3107-030-Q1-K1-E6
ggatgaggagtacgatgtgatcgtgttgggcacgggtctcaaggagtgcattctcagcggtcttctctccgtcgatggcctcaaggttctgcacatggacaggaatgactattacggaggagaatccacttcgctcaatcttattcagctttggaagagattcaggggagatgacaagcctcctccacatttgggagctagcagggactataacatcgatatgaaccctaagtttattatggctaatggcaatttggtgcgggttctcatacatactgatgttactaagtatctctctttcaaagctgtggatgggagctttgtgtttaataaaggaaaggttcataaggtgcccgcaaat

SEQ ID NO: 48439 - DNA, 423 bp, Glycine max
  Clone ID: LIB3107-030-Q1-K1-E7
ggcaagagtttgttgtgagctataagctagtttagcgtgaggagaatatgaagttgtttgttttctttgttgctgcagtagttttggtagcatggccatgccatggcgcaggctaccaaaggttccctctccgaatgaaaactggctatggtgagcgttcttcggaggtaaaatgcgcaagttttaggcttgctgtggaagcacacaacatccgagcctttaaaaccattcctgaagagtgcgttgaaccaacaaaggactacattaatggcgaacaatttagatcagactctaaaacagtttaccaacaagctttcttttatgctagtgaacgctaagttcattacaacgacctatttatattcggcatatataacaccgtactttttaatatcccatactttgtaaaacattgattttggg

SEQ ID NO: 48440 - DNA, 145 bp, Glycine max
  Clone ID: LIB3107-030-Q1-K1-E8
gtttgttgtgagctataagctattttggcgatattagaatattaggttgcttgttttctttttttctgcagtatttttggtatcatgaccatgccatttctcatgctaccataagttccctcttttaattaaaactgtctatttt

SEQ ID NO: 48441 - DNA, 421 bp, Glycine max
  unsure (1)..(421): unsure at all n locations
  Clone ID: LIB3107-030-Q1-K1-E9
agacgacagaagggatctataacttgaagtaacaactgcttcaactgtgggatccaagccatcataaaaagtttccaaatattcatctgactatctgagggtatagataaaaaattgaaacttggtaaaccttcttttggcatgcttgtatatgccttatcatgtatgaaaattagaaaaacttaattacatgaagcacagtgacatttatacagatttcatcctcacaatacatttcttcgagattcctagttgaatgtgccttcatcattcataaaaagttacatggtactactgngttgtaatcaaatgactcgcggtaaaacttgtgaggagtttatgaagataaagcttctaaggatcatgaacatgtgtagttctcagagcactgtgttgttcatcagaaggatatcttactttt

SEQ ID NO: 48442 - DNA, 345 bp, Glycine max
  Clone ID: LIB3107-030-Q1-K1-F1
gctccgccgccgcggttgcaagcagagcacaccagtggaaatgggcgaagcgaaggcgttggttccggaatcggtggtgaagaaggagaagaggaacgaggagtgggctttggagaagaagcaggaactcgatgccgcaaagaaaaagaggttcgaaacgcggaagctgatttttaacagagccaaacagtactcaaaggaatacgacgagcagcaaaaggagttgattaggttgaagcgtgaagccaagcttaaaggagggttttatgttgaacctgaagctaagctcttgttcatcatcaggatccgtggtatcaatgccatggatcctaaaacaaggaagat

SEQ ID NO: 48443 - DNA, 432 bp, Glycine max
  Clone ID: LIB3107-030-Q1-K1-F10
tgaccgaggatgaaagaaggcaattggaagatgcactaaggttggagtcgacagacttgaacaatgagagtgatgaggtgatcattgggcatcgtcacagctgttatgaagaaagagaaattcctattgaagatggaaattgtaacaaaagtggagaaaataagcaagaaaagaaaggatggtttggtggatggaggaaaaaggattctaaacctgaagcatcaaagaagattgctccaccgagaagttctctctgcgtagaagaaaaggtgagtgatttattgggggattctccttcaagaaatcagagtaagccaggaagacattctgttgagatagctgtgaggggtgatgagtcacggaggagaaaagatgccaaagcttcttctgcaaatcctgatagcagaagtcgtcaaaaggatggaaatcgtg

SEQ ID NO: 48444 - DNA, 363 bp, Glycine max
  Clone ID: LIB3107-030-Q1-K1-F11
cttctttaccaagtaagccttcgttgtccagtgggttatctaatggcggaagtgtctcaagagactttgacttaaataatggaccgggccttgatgaagttgggagtgaagtcccaacacgtagtcagccaatgaaaagtactgtaccatttccaactgctgttcatggcacgagagcaaacaatgctgaatttgggaattattctgcatggtttcctcctggcaatacttattctgcaattactgttccaccacttctgtccggcagaggagagcagagttatgttgctggtgctggggcgcatcgtataatgagtcctacaggtagtgctcattttgtcctgaatctacaggggaccagtg

SEQ ID NO: 48445 - DNA, 384 bp, Glycine max
  Clone ID: LIB3107-030-Q1-K1-F12
gagtgaaggatgaggagctacagaatgtgtctcgagaccttcgggcacgtgattcaactataaaagatatagcagataaactctctgagactgctgaagctgctgaggctgcatcatctgctgcttatactatggatgagcatcggagaattgcttgtgcagaaattgagcgtttgaataaagattctgagaagcagcaagagctgtttacacagaagctgaaggagtctgaagaaaagattgggggcttaagcaaagaatgagagcaattaatcaggcatagagatgctgctattcatgaagcaaatatgtggcgttctgaactggcataagctagagagcatgatgtgatcctagaagcatctgtagttagagcagaagaaa

SEQ ID NO: 48446 - DNA, 346 bp, Glycine max
  Clone ID: LIB3107-030-Q1-K1-F3
ggtgtgagagagcgagcgagcgagcagtttcaaagagaggatttgggattgggaaggcgagggattgcgctgcgtctcttcctcttctctttcgattcatccctcattcataatcttccaatccaacaacctcagcctcacactcacacatacacacatctgaacgcgtatcgtccctcccatggcttcaaagcgcatcctcaaggagctcaaggacttgcagaaagacccaccaacttcttgcagcgctggtccagtagctgaggacatgttccattggcaagcaacgattatgggtcctgctgatagtccttatgctggaggtgtattcctagtcactattcac

SEQ ID NO: 48447 - DNA, 224 bp, Glycine max
  Clone ID: LIB3107-030-Q1-K1-F4
tactccttagttcatcacaaccctacttcatctatgtttaacatatctatcatattcctcggattttttttccttccttcaatctactgctccaattaaatgttcctacttcactcacgctttcattttacaccactaaatttcactcttgcatacccacatcctttctcttaccattccttgtcatttttttcatctatataatctttttctctattcttttt

SEQ ID NO: 48448 - DNA, 54 bp, Glycine max; identical to SEQ ID NO: 15991
  Clone ID: LIB3107-030-Q1-K1-F5

SEQ ID NO: 48449 - DNA, 430 bp, Glycine max
  Clone ID: LIB3107-030-Q1-K1-F6
aagacgacagaagggggcgtgttcttctttcaaaacccggttcatctttcttttttgttgctgccatattcctcccattttttttccttccttcaatctgctgcttcaatggaaggtttggcttctctcagggttccctttcagaccacccaattccactcttccagacccagaacctctattcttccatcccaagccatttttttccacaaaagaagctccttttcatccttttctgctagtgcccaggtggagtctaatgatggttcagctacagtagccacacctggtgaatctgtgacagaggctctgaaaactaaggagtgggaagtgggaatgttccaaaacgaggttgcagctagccaaggtataagaataaggagaagaccaccatctggaccccctttgcattatgtaagaccctttcaat

SEQ ID NO: 48450 - DNA, 292 bp, Glycine max
  Clone ID: LIB3107-030-Q1-K1-F9
gcagttctcaccagcagggcagttttgggaaggatgaagaattatactatctatgctgtgtcaatcaccattcgtatagtgtttggtttcatgtttattgcattgatttggaaatttgattttgcactcttcatgctgttgattattgccatactaaacgatggtaccatcatgacaatatccacggatcgagtgaaaccatctccaatgccagacagctggaagctgagggagatatttgccactggtgtagtgctaggagcttacatggcactaatgacagtagtatttt

SEQ ID NO: 48451 - DNA, 442 bp, Glycine max
  Clone ID: LIB3107-030-Q1-K1-G10
ggcccacccccttgtgtctgcctcttctgaaacgccactatttctgctttctctctcattaataataatattattgccttacactttttccacaatggagttgggaagcatactccattttcttcaggacaagaacattttgatcactggagccactggctttcttgccaaagttttgttggagaagatattgagggtccaaccaaatgttaagaagctttaccttcttctaagagctgcagatgccaaatctgccactcatcgcttgaacaatgagatcatagggaaggatttgtttagggtactaaaggagaaattgggtgcaaattttaattcctttgtctcgaaaaagttgactctggtacccggggacatctctcgtgaagacttgggattggaggattccattctaagggaagagatttatgatcaaacagatgtc

SEQ ID NO: 48452 - DNA, 286 bp, Glycine max
  Clone ID: LIB3107-030-Q1-K1-G11
tggggcctacccacttgtgtctgcctcttaggaaactccgctatttctgctttctgtgtcattaataataatattattgccttacactttttccacaatggactctttaagcatactccattttcttcatgacaagaacattttgatcactggagccactggctttcttgccaaagctttgttggagaatatattgagggtccaaccaaatgttaagaagctttaccttcttctaatagctgctgatgcacaatctgccacttcatcgcttgaacaatgatatcat

SEQ ID NO: 48453 - DNA, 406 bp, Glycine max
  Clone ID: LIB3107-030-Q1-K1-G3
gggggcttatcgattggccgattttagtttttaagatcttgagagagaaaaacatagtactgaagacaagtctcatgttagagatgtacaaacgagaggatacaattatacaaataactgtattaaaaaaataacaaataagctgagttagagattttagaaaggtggacacgattttcattattgatgtgtggtccagtccgtcggaagaaacatgttgtcgatgctatgtcctattactctggaccatagatgttggaaagttttggtggacccatttgcattctgggataaaaagaatttaggttaaattcggagggtcttaactctttaagtcttatatatactaatatacttatgaaatgatcgaggattacttattctgaatcctgtcgtatttcgtacg

SEQ ID NO: 48454 - DNA, 391 bp, Glycine max
  Clone ID: LIB3107-030-Q1-K1-G6
gattcacatactataatactacgatagcgtagactcttcccagttctgttgtgtgagtctgtgagtctttcttagctgatatggcggttgatcgctcccttacgaggtgctgtagcctcgtactgtggtcgtggatgttgctgaggatgatgatggcgcagggtgcagccgcgagggccaaccggaaggagtgggactcggtcataaagttaccggctgaaccggtcgatgctgactcggatcatgaagtgggaacacgatgggcggttcttgtggctggttcaaacggctatggaaactacaggcatcaagcagatgtgtgccatgcgtaccagttgctgataaaaggtgggctaaaagaagagaacataatggtggttatgtacgatga

SEQ ID NO: 48455 - DNA, 325 bp, Glycine max
  Clone ID: LIB3107-030-Q1-K1-G7
aaagttacaggctaagattttatatcatgaacttctgagaggtattttgctccatccttagtttgaatgagcaaaatgtgatgaatttatttggtgagtcatgtcaatgaaagtcaagaaatttgtaatgccacatttaccatggtacttgtctgctgctctttctgcatatggatatccatggcctttttcagtgacaacatggagcagcacaggaccagttgttttagtacttttaacttcatttagaatggacacaatatcatctatattatgaccatcaacaggacctatttagtaaagtccaagctcttcaaataatgtt

SEQ ID NO: 48456 - DNA, 381 bp, Glycine max
  Clone ID: LIB3107-030-Q1-K1-G8
aaagatagagcatgactattatcaagatataccgatgtgtgtgtctgagttctattttttaataataataatttgttgtctgtgtgcttgctcagtcagggtttgtgcctcttagcacaacataatatcgcattcacaactttaccaatagatttattggacctttgatgtaatagcttccatcctatacataaataattaatatcagggtttgatgctttgtctataatttgtagttttagtttgaaattcttcagtcaaggttaggctgttattggattgcaagtggtgtttttcatgcttgtgatctgacaatagaaatgtatttggtgcataatattactgatctaggatcattacgagttccatgtccctaactag

SEQ ID NO: 48457 - DNA, 240 bp, Glycine max
  Clone ID: LIB3107-030-Q1-K1-G9
gaacacactgcagcgagaaccaaagagagatataagcttcttccagtttccgaaatcgaagcattagggttagggttttttccgatctgagaaattcgcggtccaatggctgtggaacctgagagcaccgtcaccaccggctccgccgacgaatctctgctcgatgagatcaccgataagctacacggccacgattcttcggcctcttcatcttccgactgcgactcctactccgaaaaa

SEQ ID NO: 48458 - DNA, 411 bp, Glycine max
  Clone ID: LIB3107-030-Q1-K1-H1
gaaaaccattcggcacaacatcgaaatttccccattgtccgggtccgcaacgaaataactctaccgtgccctacgataaggggtttctcagagcaggagcaatgtcttccccttatctacctgccacaactgactcacttgctctcgcaactgaggccaaagacccatctgaggccatctccattctttatcgggtgcttgatgatccttcttcttcaccagatgctctgcgtatgaaagagcaagcaatcacaaaccccactaagcttctcactgatgagaataggggagaggatctgcgcagccttcttactcagttgaggccattcttcttcttggtacctaaagcaaaaactggcaaaattgttaggggaaatattgactcggttgctaaaatttcaggggcatttg

SEQ ID NO: 48459 - DNA, 461 bp, Glycine max
  Clone ID: LIB3107-030-Q1-K1-H10
agacgacagaaggggacagacacaaatcacataccccatttccaaccccacattgaacctaggaaagcaatgtcacctcgaccattttccccccctctctctatttcccttctctttgtcttcctgttagcaccattactcttagctcaatctccaccttctccttctccttcttcttcttcttcttcttctgttgcctgcaaaggcacactatatccaaaactctgccgttccattctctcagccattcgttcatccccttcagacccttatggctatggcaagttctccataaaacaaagcctcaaacaggcaagaaaactagccaaagtctttgaggactttctccaacgccaccaaaaatcaccttccctcaaccatgctgagactgcatcacttggtgactgcagagacctaaaccagctcaatgtggactacttggcgtccatatccgaggagct

SEQ ID NO: 48460 - DNA, 432 bp, Glycine max
  Clone ID: LIB3107-030-Q1-K1-H12
ggggaattgggagtttcattttcattaatttttatgtctccccttttctcaatgcttttcttaatgttgaatccttcacaaatcgtcaagagttagcccacccagaacaacaacgcgtttcagctggccacacacattcttaatttttttggctggcctatagtaaaaactcatatcaatgtcctcaagaacgttgaggagaagactccatcatggggatgttgatggcaaaaggcaggagcatttggagacttcgggattagattcgttgagtgagcccttgctggcagatgatgattatattgagaataagaagatatgtactcttgaagatctatgggatgatgagaggaagaaggcccagtttcattggacattcatattctcaaacctcattgcacaatgggcacagtggttagcaaatgttgtact

SEQ ID NO: 48461 - DNA, 368 bp, Glycine max
  Clone ID: LIB3107-030-Q1-K1-H2
ggagaaagaaagaaggaaagcaaagtagacgagtgattgcgtggcgattgacgacgacgaggaatcatgtcttccggcggcggtggtaagccgttcttctgccacgtgtgcagtcagaggattacgtgctccgatgagtcggaaccattctgcccgatgtgtatggaaagtttcgtagaagaatgcaaccctaacaatcccaaccctaatctcttccccgacagtgatgaatcttcggatcccgaactccccttccaccgcttctcacttctccctctcttgctctcatcagtctctaggtcccgatccgaacccgacgtgttcgacccgattgtcttccttcagaaccaccttcatgacctttgcgc

SEQ ID NO: 48462 - DNA, 386 bp, Glycine max
  unsure (1)..(386): unsure at all n locations
  Clone ID: LIB3107-030-Q1-K1-H4
acaggagacgagttgcttcttcaagaaggccatggtagaagtgtatatggtttggctttccacaatgatggatcattggctgcatcttgtggactagactccctggctcgtgtttgggacctccgaactggaagaagtatccttgcactggaaggtcatgtcaaaccggttctcggcatcagtttttcacccaatggatatcatctagccacgggtggtgaagacaacacttgtcggatttgggatttgaggaagaagaaatccttttatactattcctgctcactctaatttaatttcacaagttaaatttgagccacaagaaggttactttttggtaactgcctcgtatgatatgacggctaangtttggtcaagccgtgactt

SEQ ID NO: 48463 - DNA, 354 bp, Glycine max
  Clone ID: LIB3107-030-Q1-K1-H5
gatactcaggaaataatggactgtccgggaaagtgtctgaggattcgggtttgacggttgttgcgtttgaggtcaacccggattttgatcttcaatctacagttgtttctttctctgatcccaaggagaataatttgaaccgctttgagtttctttgtaccaagaaacatccagatttctctgtcaacaagtctgtagttgatcttttttctaaaaatctttcgaggcttgatgagttgaagtccaagattgatagcttccctcgattgattgttactggacgttgtcttggaagaccaattgcttttcttttcactttatcggtattaggtaaccagaatttctcttagaaaa

SEQ ID NO: 48464 - DNA, 297 bp, Glycine max
  Clone ID: LIB3107-030-Q1-K1-H6
ccggaatgaccgaatcgatccatacgttcgtataacactacttaatgggccatgtaccaatttctttttcaaaaaatccctgggttaagggtatatggggtggcttttcacaatgatgtatcatttgcttcattttggggactaaactccctggctcgtgttttggaccctctaacttttataaattttccttttatttaaagttatttttaaacctttttttgtttaatatttttaccccaatgattatttttaaaccctgtttgttaatactacatttttttgatttttgatttt

SEQ ID NO: 48465 - DNA, 311 bp, Glycine max
  Clone ID: LIB3107-030-Q1-K1-H8
acaggagacgagttgcttcttcaagaacgccatggtataaggggatatcggttggctttccacaatgatggatcattggctgcatcttgtggactagacttactggctcgtgtttggggcctcagaactggaataagtattcttacactttaaggtgatgttaaacctgttctgggaatatattttttacccaatggatattatttaaccactagtggtgaaaacaacacttgtagtatttttgatttgatgtataataaatcctattatactatacttgattactctaatattattttacatgtttaatt

SEQ ID NO: 48466 - DNA, 361 bp, Glycine max
  Clone ID: LIB3107-030-Q1-K1-H9
gggctcaagctttatttcacgtagctgactttacggtcagctcaattggaatagtttttcgctatgttcgcaggcaagtgagacgatccatcaatgcccttatctgcttcgaaagaaccggtgtcatccaaacatggtgaagaggtggcaactggatcaataatagctgaaacttctactgtacagggttcggcttgcccaactgtccaagcttgagatctattttagaatatgcttaacacaacacatgcaattcgaacgttgttttcttggaaagatttgaaagtaactccgttgggttcaatgcccgctagtcccatgcatcctttctgttggtcaacaaccaaccacaagtcaatcg

SEQ ID NO: 48467 - DNA, 415 bp, Glycine max
  Clone ID: LIB3107-031-Q1-K1-A1
atgttccggttatagatgggaaaatagttggtatgattgccattgtagatgtggttcgagcagtgatggagcagcagagtggagaattgaagcgactcaatgactacatcagaggacaatactattagcaaaagaattcaagcatggatacggatttgatgacacgaacgaaattcatgtaccaaaacagaatacacctttatatttcataatagattgaatttgattatattttataaattgctagtaacaggtgaataagtttccttttatttttttagaagaaaatcttttccgaaaacgtaaattataaattataaagttgataatctccattcacaccaaaacatgtaacattcgagctgtgacactaagtcagttgaaaaatgatattcaatattctcttttccccttt

SEQ ID NO: 48468 - DNA, 351 bp, Glycine max
  Clone ID: LIB3107-031-Q1-K1-A10
gtacgtcgagtggtacaattcgcgtggcattagcgcacttaccttcgtcgtcgacgtcaaggagcttcttcgattcgacctcggccacgtgctcgagacccgaatctctctcctcgccgaccacctcgattcttgggtgtctcgcgaggagcacgatgggagggaacgctgtctggtttttcacactttcagcaacacggattggtctgtttatggttacattcttgcccgaatgctgggtagcgaggaactcatggagaagattaagggatgcattgctgattcgggaggaggagaacctatcaatcctaacgtatgggctgctggtttttctgcagctatattaaagaa

SEQ ID NO: 48469 - DNA, 410 bp, Glycine max
  Clone ID: LIB3107-031-Q1-K1-A11
ttcgttcatcaatcagttagttgttattttagagttttaaattcgctcgatgcacccttaggggtcccttttgttgctttacacatctttatcttcattcttctaccatcaatgatctcatttccttgtgtaaagcgagtttcgaccaatcgtttgtgccgtaatctcattttatcattgtaaaataaagttttgatagatcgttcgtgccataatctcattttatcattgtaaaataaagtttcaaccgatcatctacttcacaagttgtcttttaatgagattgaaagtaaataagtgaaaccaaagttaaaatcaacatgtaatcgagcttttatccacaaaagtcgcttgaatctgtttaaggtctaacgccttatcggtctcttttacttgtatttgttaaatga

SEQ ID NO: 48470 - DNA, 362 bp, Glycine max
  Clone ID: LIB3107-031-Q1-K1-A12
gacaccctttatagcaatggagttggacctctgatttctctaagtctagctaggattgagaaacaagaacaatatcaacgacaacgagttgaagagagtggttttttcaacttttaataatggcggtggagtatcagtgttgtgaaactcagtttttcttacggttattgataattctgctgcttgtgttgtttgctggattgatgtcagggctcactttaggactcatgtccttgagtcttgttgatcttgaggttctcgctaagtctggcacccctcaggatcgcaaacatgctgcgaagatattacctgttgtcagaaatcaacatttgttgctttgcacccttctaatttgtaatgct

SEQ ID NO: 48471 - DNA, 406 bp, Glycine max
  Clone ID: LIB3107-031-Q1-K1-A3
gggcagacagattcaggcaccttttcaaccgttgactccttcttctgcgtcaccgtcaccatcataatcaccatccctttccttattcttcttctgtttcatccctctccccattttctcgctctcgtttcttgtcctctactcctttctccatggcttctgattcccctttccctgtcaccgctcaaaacatcaaccccaaggtttgtgttgccttcaattctctttttcagacccacccggattgttgttttttggttttttacttctggccgtgctaaagttgcaagctttgaaggcttttttttttttaatctgggcatgtgtgatgttgaattgatgtgtatggttttgctttggtttcttctcttttagtttgtgcatgatgtgtaacgtgtttatttgt

SEQ ID NO: 48472 - DNA, 435 bp, Glycine max
  Clone ID: LIB3107-031-Q1-K1-A4
cccacgcgtccggcgagaagacgacaggagggggactgtcttccccgtattctctctccgagcttcactctcttcgcctctgccaaagggagtaaaatggggttctcctcctttctgggtcgtgttctctttgcctcccttttcatcctcactgcatggcagatgtttaatgaatttgatgccaatggtggacccatctcgaaagagttgattcccaaactcactgtggtgaagaaaaatttgtcctctaaattgggggtagcactaccagatattgatgcccggcaattcattgctactatcatatttcttaagggggtaggagggattttgtttgtgtttggcagcacatttggatctttcttactgcttttgcatctggcaattactactccacttctgtacgatttctataactatagacccggcaagcct

SEQ ID NO: 48473 - DNA, 378 bp, Glycine max
  Clone ID: LIB3107-031-Q1-K1-A5
cagaaaagggtgttgtgaatgttttgtaggtatgggcgtctttgctattgtatcgccaaatattggacgagatagaagctaatgattacaacaatttcactagaagggcttatgtgagcaaagccaagaagttactttctttgccagctgcatatgctagatctatggttcctccatcaaaaaagttatcttctgtaatgaagacataaatcgagcaccttatggcattctgtagaaaaatggataaggaggaccacagaaaatggaaaggcacaatttgtatatgataaaacaaggcatgatattagtcaatattggattttgatattcatatttccccgtatttttttacataaaaaaagtttggactaatatttt

SEQ ID NO: 48474 - DNA, 382 bp, Glycine max
  Clone ID: LIB3107-031-Q1-K1-A6
ggattgagtcagtccaacaataactaaaaacccgtgactcagcccactcttgctttgcttggcctaaccgctaaccaaaccaaagctctctcaatggcttcggagcaacacgacgccgttttccgcgaagaagacatggacgacgacgacgacgagtctcaggaggacgaagagtacgaagaagacgacgacgaagaaaacgtgccctctccctccaccgctctcgctgtcaccgtcgccgtccccggttccgccgtctccaacggcggcggtggctctccaatttcgaagcccaccgccaccgccaccaccgccaccatcgtcctcgccgactcatccgatccgaagcggcgtcgcctggagctaatcgaggagaaaaagc

SEQ ID NO: 48475 - DNA, 389 bp, Glycine max
  Clone ID: LIB3107-031-Q1-K1-A7
gaaacgcagtgtggaggatgccggcacgttgtgaaatatgctgcgagataatgatcgcgatcttgatccctcctctcggagtttgctttcgccacggttgttgcagcgtcgaattcatcatctgcttgctcctcacaattctaggttatattcctggtataatctatgctctctatgctattatcttcgtcgatcgtgaccagtactttgatgaatacaggcggcctctctatgcacaatactgatgataattttagtttgtatgcctatgagtgatgctcatgttgatcgtgtgcttaattactgacaatttaagctcgtgtgcttgttgaaattgatggtttgtagaatttattgtttacgctctcgaagcttcaatgacttttatg

SEQ ID NO: 48476 - DNA, 393 bp, Glycine max
  unsure (1)..(393): unsure at all n locations
  Clone ID: LIB3107-031-Q1-K1-A9
gaccattcttcgcagcanacacgaaaaggttcttgctaacctcctcagtccttattccacttcaatcgcaattatttaatctaacaaataattgaaatcgcgattgattgcagtgatcgagatgctggggaagacgaggaaggtttcggcgcgtggcgaagccgtggtggcgaactacgccttcggtccctccgaagatgacgtaatcatcaaacacaggcttctcacgcgcaccaccaccaccaggggtgaccctcccttgaagaagcttcagaagaagttcaccacgttcgtctccgaagtcgacaaagacgaagacatcaactacaacgactgcgagaagctggctagagcgtttctgcaggagctgacgacatttcgaatccgcttctg

SEQ ID NO: 48477 - DNA, 395 bp, Glycine max
  Clone ID: LIB3107-031-Q1-K1-B1
gtttgtaagctgttggaatgcgactttggcgaaagcaaatgtcattctcccagcagcataatgcagatgtttcaaagctcacttttctgcttgcaaccccagggtgattcgtacacgcgaagatctgcttttgattcaatgttggctggttgtatacctgttttcttccatcctggctcagcatatacacaatatacttggcatcttcccaagaattacactaagtattctgtcttcattccagaggatgatatccgcaagaggaatatcagtatagaggaaaggcttagtcagatacctcctgagcaggtgaagatcatgagagaagaggtcattagtctcattccaagactagtatatgctgatcctcgctccaaattagaaactcttaaaga

SEQ ID NO: 48478 - DNA, 389 bp, Glycine max
  unsure (1)..(389): unsure at all n locations
  Clone ID: LIB3107-031-Q1-K1-B10
gcacaagtgagtttgttgatcgagataactagaaacagtgtgatgaaaatgaaagtccttggtttcttcggtgctacaattttggtagcatggcaatgccatgcgtacgatatgttccctcttcgaatgaacactggctatggtgcccgtactccggaggtgaaatgcgcaagttggaggcttgctgtggaagcacacaacatctttggctttgagaccatttctgaagagtgcgttgaagcaacataggaatacatccatggcgaacaatatagatcagactccanaacagttaaccaacaagcttacttttatgccagagacctcgaagtccatcccaaggacacattttgtgttcagtatagatgggcaccgtactcctctaatat

SEQ ID NO: 48479 - DNA, 357 bp, Glycine max
  Clone ID: LIB3107-031-Q1-K1-B11
gaccacactcttattgacttcttcgtatcttccttgtcactgcccgtgtgtcgccgtcatggccaccgtcaccacccaagcctacggcgcaattttccggccatgtacctcgaaatcgaggtttttgaccggctcttgcggtaaacttaaccggtaagtgactatgcggccaatggggtgccctccttctgcctctttcaaggttgaagccaacaagggagagtggttacctggcttggcctacccaacttacctcaatggcactcttcctggtgacaatggatttgaccctctggagctagctgacgacccagagaacttgatgtggtacgttcaagccgagcttgtgaatggacg

SEQ ID NO: 48480 - DNA, 405 bp, Glycine max
  Clone ID: LIB3107-031-Q1-K1-B2
gtgggtacccaacatttcaacggaatcttcaaatcctaagctcaaaacctatggttcttaaatcctacttcacttaggaaaagtgccagtccttgttgtctcaacagctgaggcagctcgtgaagttttgaaaacacatgaccccgttttctccaacaaaccacatcgtaagatgtttgatatcctcttgtatggttccaaagatgtggcatctgctccatatggcaactactggaggcagacaaggagtatccttgttttgcatcttctcagtgccaaaaaggttcaatccttcgaggcagtgagagaagaggaaatctccataatgatggaaaatattaggaagtgttgtgcatcattgatgcctgtggatttaactggcttattttgtatagtggccaatga

SEQ ID NO: 48481 - DNA, 216 bp, Glycine max
  Clone ID: LIB3107-031-Q1-K1-B3
aaaacttgtggtctttaaaggaacttaaactgatgatgaaggagttaaattttcaatataattgttttgtgaattaatctattgaatctttggggattttacatgtcatcaacaggggaatcttttgctatctatttaattagttgatgtgcaagatgtgtaagaacaagctgtagtaaattgctatcaattttcatttcgggagctttgctgtgc

SEQ ID NO: 48482 - DNA, 414 bp, Glycine max
  unsure (1)..(414): unsure at all n locations
  Clone ID: LIB3107-031-Q1-K1-B4
gaaggtgccagaatttggtgggagctttaagcttggttatcgggaaggggatattgaagttgttggtttccttggtgctgcaatagtttttggtagcatggccatgccatggcgcangctaccaaaggttccctctccgaatgaaaactggctatggtgagcgttcttcggaggtaaaatgcgcaagttttaggcttgctgtggaagcacacaacatccgagcctttaaaaccattcctgaagagtgcgttgaaccaacaaaggactacattaatggcgaacaatttagatcagactctaaaacagttaaccaacaagctttcttttatgctagtgaacgcgaagtccatcacaacgacatatttatattcggcatagataacaccgtactctctaatatcccatactatgaaa

SEQ ID NO: 48483 - DNA, 405 bp, Glycine max
  Clone ID: LIB3107-031-Q1-K1-B5
tccctctcttcgagatcgaacatcgattgcaacgattcgataaacggctcattgggatagagatagataaataatgcaccccccccctagaaacgtataagaagttttatcctcgtacggctcgagaaaataaaaaattataatgtatgtagaaaattatgatgtcaaatagatcaataaaatcatcaaatcaattaaactatgacttaagtatttttctttcgtattttctttttgaaaaaaaactcctcatatttataactccataactcaaattggataattatcaaataactaaaaagagaacaaagcctttagtagctatttcatttattgagtggtctctactcccctttcttgcccgtgtttcgtttctttataatttattttttataatttttgata

SEQ ID NO: 48484 - DNA, 382 bp, Glycine max
  Clone ID: LIB3107-031-Q1-K1-B6
ggagtttgtctaaaggataagctgaaactgaaactgaaactgaaacatggaagaagaacggtgctagtgtgaggcctctgttctgtgccctcaacaacaataacaacaacactgccttgcagtacagaaccctcggcgactccgacctcaacatcagcgaaatcactcttggtactatgacctttggggagcaaaacactgagaaagaagctcacgacattcttaattatgcattcgaccgtggaattaacgctctcgacactgctgaggcctacccaattccaatgaagaaagagacacaaggaagcactgatctctatattggtagctggctcaagtctcaacctcgtgacaagattattttggctaccaaagtatgtgg

SEQ ID NO: 48485 - DNA, 402 bp, Glycine max
  Clone ID: LIB3107-031-Q1-K1-B7
gacatacacctcaaacaaataccaaagtgccttttcttagaatggagctcttgtggaaagatcacatgagggtacaagtaattagattggtttgtgctgtccttttggtgacactgctgagctcagaggtagctgagagcagaaaagtcaaaactgttggtacttcctttaagtacgaagctataaattgcaggactcatagtgcttcattgactgattttggtggtgttggagatggaaagacatcaaacacaaaggcatttcagtctgcaatcagtcatctgagtcagtatgcttcaaaaggaggggctcaactttatgttcctgctgggaagtggcttacagggagttttagtctaatcagccacttcactttatatctaaacaaagatgctgttcttc

SEQ ID NO: 48486 - DNA, 422 bp, Glycine max
  unsure (1)..(422): unsure at all n locations
  Clone ID: LIB3107-031-Q1-K1-B9
aggcaggcaaaattgaagctattaagccttattgaaatcattgaaaaccattcaagtcaactatattgatatatttatatccaaaacaattatataggttcaatgaggtttgtcatcatggatgcagcattaactattctttatcaatatggacggttttggtatgttcaatgaggtttgtcatgttttacagacaaaataactcaaacaatcaagtagctaacgtgttattttcttcccttgttgcccttgtgtttttcccctaatctttttctctccccttgtgagttacgggataatttgccttctatttctttcttcctcctgcattcaatttttaatttgatgtgtttttaatgcttttttgcatatccctttgtcaatacanattannatatcatgtaactttatcatgactcaat

SEQ ID NO: 48487 - DNA, 396 bp, Glycine max
  unsure (1)..(396): unsure at all n locations
  Clone ID: LIB3107-031-Q1-K1-C1
gtttgtaagcttgtggaatgcgactttggcgaaagcaaatgtcattctcccagcaacataatgcagatgtttcaaagctcacttttctgcttgcaaccccagggtgattcgtacacgcgaagatctgcttttgattcaatgttggctggttgtatacctgttttcttccatcctggctcagcatatacacaatatacttggcatcttcccaagaattacactaagtattctgtcttcattccagaggatgatatccgcaagaggaatatcagtatagaggaaaggcttagtcagatacctnctgagcaggtgaagatcatgagagaagaggtcattagtctcattccaagactagtatatgctgatcctcgctccaaattagaaactcttaaagat

SEQ ID NO: 48488 - DNA, 440 bp, Glycine max
  Clone ID: LIB3107-031-Q1-K1-C11
ggtataatagagagctcctccaattagggtttttgggatctgcggctacgatgggtaagggaacggggagtttcggtaagaggaggaacaagacccacaccctctgtgtgaggtgtggccgccgcagcttccacctccagaagagtcgttgctctgcgtgcgcttaccccgctgcgcgcaccatgaaatataactggagcgtgaaggccattatgagaaagaccaccggaactggaaggatgaggtacttgcgtaacgtgcctcgcagattcaagagcggcttcagagagggtaccgaagctgcacccaggaagagaggagctgctgcctctgcctaagctttgaatgaatgacagcaatttttgcttggtcagtgaaatataagagttaatagttctgtgttgtgccatactctttgaacacatttctttctgtcgttt

SEQ ID NO: 48489 - DNA, 359 bp, Glycine max
  Clone ID: LIB3107-031-Q1-K1-C12
actgattcatccgaagatgagactgagaaggttcagagcccgagaagagttaaaagaaacgtgtctgagatctctcttccccctcttcctccaccattcaccaccactcctgaaaccagctcctgtgaggtgaatagcggcaaaaatgcaacattgaagggtttcattgaaggtcaaccccagagtaagaagagggttttgactcaccccccatcaacaaggaggaacacttctgggaaattcagaggtgttaggcagagaaaatggggtaaatgggctgcagagattcgtgacccctttcagagtactcgtatatggctcggcactttcaacactgcagaagaggcttcccaagccta

SEQ ID NO: 48490 - DNA, 402 bp, Glycine max
  Clone ID: LIB3107-031-Q1-K1-C2
gcttcttttaaacctaattcttgggggttctggttcattcctctgaatggttttggtcaatttattacacaatgggtaaaatactttaaacttaataaattgaattgtgtaagatttcactgatctatagatagagcttagattatatatcaacaacaaatttactggttttgcagaagaaacttaatctaatgagaaaagattttgtgcaaacctcagcaattatctcagcagacactattccagtttcttctcgaagttccctaacggcagcagatttgggctcttcaccatcttcaattcccccctgagaaccccaaaagaacagtcaattttatcagaacaatttaataccataaagagatagaaaataatttacttattacaggcaacaaaaggggg

SEQ ID NO: 48491 - DNA, 410 bp, Glycine max
  unsure (1)..(410): unsure at all n locations
  Clone ID: LIB3107-031-Q1-K1-C3
gaatagaacaaacacaccgcaacaaccaagaagaagaatatatggaaagtttttggcaggagaaaggaaccatgctcgatggcgaaaaagatcattcacgacaccactaggaaaatgtcgcagctgtgccagaaaatcggtaaaggcgacgtccggtggggtgtcctcaaaagggtatctttcgttggacactttttccggttcatttggaacagactttttggttgctccgtcggccgaaggccatctcagtaccggaaactacccgtccgggacccctcttcttcgccgncgtcctacgctgacgacgtcttcttttccgctacaaccaccactggcggctatgactccgattccgatttggtgaacctcaagatcaagcttgtgggtgattgccatattggaaaaac

SEQ ID NO: 48492 - DNA, 421 bp, Glycine max
  unsure (1)..(421): unsure at all n locations
  Clone ID: LIB3107-031-Q1-K1-C4
ggaccctatctggtgagagaggaaagaaggtgtgggatttattaaagggagaaggagaaattcctttatgggggaagtaccagccgaagccaaaccaaacattcttgaccggccccaacaattatcttttcaactggttggctctgncttctgcacaggagaaatgggtgttgggaggggaaaacagacatgatctatctgtggtcacagcaccactgtttccctgcctcacacccttatctagaagaacangaatcagcacatacacccgncacaacgccatagtcatcatcacttagaagaacttcacaatttttattttcttggatatggcgagtcttgctcttgaaaccgaggatgtaatctcagatatatacctttcactgngacttaaggaatcagacaaaggagtaggagttcc

SEQ ID NO: 48493 - DNA, 389 bp, Glycine max
  Clone ID: LIB3107-031-Q1-K1-C5
gacacaccaaacgagccatttgggagttaggttctgcacgctctgcttccagcgagtgttctttcttcgtttcaacaccttaatttgcacacgctgcttcttcagcttgagaaatggcacaagaaacctttctattcacatctgaatctgtaaacgagggtcaccccgacaagctgtgcgaccagatctctgatgcagtgctcgatgcgtgccttgaacaggaccctgacagcaaggttgcctgtgagacatgcaccaagaccaacatggtcatggtctttggagagatcacaaccaaggccaacgtagactatgagaagattgtccgtgacacatgccgcgaaattggattcatctctgatgatgttggtcttgatgctgacaaatgc

SEQ ID NO: 48494 - DNA, 434 bp, Glycine max
  Clone ID: LIB3107-031-Q1-K1-C6
cgacagaagggaggattgtcatggaggtgtgtctgacaagtttgatggtactgtgaatcaggccttgaatgttatgggctctgaaaccgtggctagtgctggtgaatctaatgatatggaaattgatggatctcttgagcataaagcaactgtcaatgaaggaagttcaccaagcactagtgttcctgtgttggaggagcccctgaattttgatgcctttaattcagctgccgaacttgaggttcttggcttggaaaggttgaagtctgaactgcagtcacgtgggttaaaatgtggaggtactttgatggagcgtgctgccaggctttttctcttaaaatcaactcccctggatgaacttccaaagaagctgattgcgaagaagtaaggagatttttgagaaggcagttatttctctgtacagtatttcttaa

SEQ ID NO: 48495 - DNA, 252 bp, Glycine max
  Clone ID: LIB3107-031-Q1-K1-C7
gtcttgaattcccgattcgaccgactcgtacacacaagaatacatactcctcatataacactatctaacaagacacaccatactatcaattatggattttttatataaacgcgctgatatcatccattgttctctattatcttcaactactaaacttctacactctttttattattattccaaaataactcaaaaaacttctttatgcacattttaatctgaatactatcttcaccttaacactctttccta

SEQ ID NO: 48496 - DNA, 405 bp, Glycine max
  Clone ID: LIB3107-031-Q1-K1-C8
ggttctagtgtgtgattgtttgttgttgtaactcgttcttcttcttttgttgttctgtgtttgtgtttgttttttctctcacctgaaaatgtcttgctgcggtggtaactgtggttgcggaagctcctgcaagtgcggcaacggctgcggaggctgcaagatgtacccagacttgagctacactgagtcaaccaccaccgagaccttggtcatgggagtggcacctgttaaggctcaatttgagggtgctgaaatgggtgtgcccgctgagaacgatggctgcaaatgtggaccaaactgctcctgcaacccctgcacttgcaagtgaggtgttgggagagcaagcttcaagcagagatagcccttaattaggaataatgataaactattaatgtgtagctaaaa

SEQ ID NO: 48497 - DNA, 429 bp, Glycine max
  unsure (1)..(429): unsure at all n locations
  Clone ID: LIB3107-031-Q1-K1-C9
attcttctcaaatttgaagttggattttgagtttcagggtttcaaatatttcagacaatggctgtccgaattttaaacagtttcattatttaaaatatcatattaatccatattaaatatacttattttttcgtgaaatttgttaacttaaatttgattaatgtgttcccatcataacttttattaaaaaaattatttattaatttttaattattatatggagaacaattattttatttttctaaatttaataggcatgcataaatttttcattgtaacctatcagaaataatgacttttaaaaattttaattacattcttttgtattttttcttactcccttaaaaaatattaaataaaagattaaaaaaatttaatgcttgaaaatataaaataaatntaatgcttatacatnnatatataaaaatg

SEQ ID NO: 48498 - DNA, 406 bp, Glycine max
  unsure (1)..(406): unsure at all n locations
  Clone ID: LIB3107-031-Q1-K1-D1
gactctcaattctgttctcacatttcctatatatatttgccactctntctgtgagcttctcaacagaaagacacaatgggcaaagaaagtagtacttgtgttcttctatcccttctcattctttcactctttgtggctgaaatatatggaaatagacaagttcaagctcttaacaaactgcacaagtccaccaagttcagaggaaattcacaaattgataggagtgagtttgaggtagaggagcttgcttatgatggcattgttcactctcaagagggtctcaaagagaaagatagaattgagagtcttccaggacaaccccctgtgagtttttctcactatggagggtatgtcactgtggataaagaagcaggtcgtgccttctattattacttcgttgaagctc

SEQ ID NO: 48499 - DNA, 399 bp, Glycine max
  Clone ID: LIB3107-031-Q1-K1-D10
gtggtaaaaaatgctgatgacacgtatcatatgcagtggaaatgtagattatggtatcaaagaagataaaattcccaacatcaaagtagcagccctagcagcacaaggaatctccgagcttatgcctcctgatgttgctaatgcattttggagttctgacaaagtctcttctaaggtctccaaaagcatgcgtgatattgtcagagttgctatgagtcaagcacagaaaagaacaagattatctggggatacaaattttagccggattatctgttcaagaggggattctgatccttttgatggactctatgttggtgcatttggtccttatggcatggaaatagtgcatttgaggcgaaaatttggacattggaatgaagtgaacaatgaaacaacact

SEQ ID NO: 48500 - DNA, 342 bp, Glycine max
  Clone ID: LIB3107-031-Q1-K1-D11
gtggtaaaaaatgctgacgacacgtatcatatgcattgtaagtgtaaattatggcatcaaagaagataaaattcccaacatcaaactatcatccctagcagcacaaggaatctccgagcttatgcctcctgatgttgctaatgcattttggagttctgacaaagtctcttctaaggtctccaaaagcatgcgtgatattgtcagagttgctatgagtcaagcacagaaaagaacaagattatctgtggatacaaattttagccggattatctgttcaagacgggattctgatccttttgatggactctatgttggtgcatttggtccttatggcatggaaat

SEQ ID NO: 48501 - DNA, 335 bp, Glycine max
  Clone ID: LIB3107-031-Q1-K1-D12
acggttaatggaattgaaattccagagtatacagcgataatctgtaatacgaggttgcttgcaactgatgagcttgattctgtatctaccgccaatgttactttagctgaaacacaagtccgaaaaattcccaatgaaactgctaatcatgcatatggtgaacatcatgcagaagacaatagtaatgacctcatatgggctcatccaggttcatgctgttatgcactgcatgcacagttgaaccctgatacagttctctagcatcaatcacctttggcccttgcgaaagctttaaagaactcagtggaattgtacggcttaaagaaagcacatat

SEQ ID NO: 48502 - DNA, 411 bp, Glycine max
  unsure (1)..(411): unsure at all n locations
  Clone ID: LIB3107-031-Q1-K1-D2
gaacctcaaaagagttctttcaaaatgcanacagccttaaccttcgctgcccccaacgttgtgccattggcacccacaaagagtgtctcccatattaccatctttcctaccaaattgaaagccccgcgctcctcacctcgttactctccgattagggttgcaaccgtggagcccgacacttcaactgtcgactacaactctgcgttctcagtgtttcctgcagaagcatgcgaaactgtaggaggggaagcctgcatggcggagatgtaccctgaaacgaagctacagccagaggctaagactccacgagtcgttacagagaacgttgagagagagtatcttgaatacgatgatcctaaaacggtatttcgaggagaggcttgtgatgatcttggaggaactttctgtgag

SEQ ID NO: 48503 - DNA, 416 bp, Glycine max
  unsure (1)..(416): unsure at all n locations
  Clone ID: LIB3107-031-Q1-K1-D3
tgcaaaaggccaccgaagggcctcttttaaaatttggactctggcctaaggtttgggcccccatactaagtgcttaatgcaattacaatttgggacatgctacattttactaagggagtatgaaaaaagttgcctcaatgagattgcaattcttgcagcagaaaacgtcgccctgatcaatttacggtagaagttgattttctccattttaatgaggagtttttctatgtaatacttctttgntgtatattgtgcctgttttatctaccgcactcattttttatcagtttttggcagctttgagatgaagcgatgaaacttgatgttttgtttcttgtgttaaaggtggtacgctacttggtcatttttctaggcagaccttgatcgtatatatcatgattttctgtacttaacaa

SEQ ID NO: 48504 - DNA, 421 bp, Glycine max
  Clone ID: LIB3107-031-Q1-K1-D4
ggaggaggaaggaggagggagaccaaagcacttagtgctattcaataattgcgaaaaaccaacagcgagtgttgtttttgtttggtccaggctggaccagggaatgaatagagatgagaggctttcggttgaagagaactgagttaagcggcgaagccaaacgcagaatcggcggcagaaattgccaccggaagcacgtcgaagacgggtgaaccaaacacaaaattccatccaccacttctcttttcaatccccaactcaaatctgtgaagaaaatctcaatttctaaattgtaattcttagcactactgctagtagtagtaaaaaaaaacaattagaaagtagtagagtgtttttttttctttttttcgtttgttttacttttaagatgggtgagaagagcaacgttggcggcgacgcg

SEQ ID NO: 48505 - DNA, 402 bp, Glycine max
  unsure (1)..(402): unsure at all n locations
  Clone ID: LIB3107-031-Q1-K1-D5
caattacagtggtaaacttcatgactttttcttttaatttgtatatatttgattgatatctgttcttgaatttcagtttctgattgctctcttggtctgcatgttctgattgaatttatatataggctttgaggtttgtgatatgagtgaataggaaaatacccaaaacaaccaattagtattttttcaatggatatggttgtgtggtatgcttaggaaccattttcttagagcttgatttgatctactacttataagaatgactttattaccgaaaacatttttttcctctaaagaaaagatttttccttgttttgctttggtggaatgagcatgcgtgaggaagtcttattctgttgaaagtttaaatcttgcttgngtgatatgagatgaatgttgagt

SEQ ID NO: 48506 - DNA, 397 bp, Glycine max
  Clone ID: LIB3107-031-Q1-K1-D6
acttcactactgcctaacctcaacaacagtggaccttctgtcaagttcaatttctggagtgtcgattttctttgcaatatcaatcgcttctgattcatcattgtgcagtgtttgttgctgcggtatttgatcagtatcgccttggacaaaggcagcagtgggcaatgttatcttgacttcttcctctgggaactgtggttctgttgcttctttaatccctttttcttcttcttgatataattgtccctcatcctcaatccctagtttctccttggcgtgtgatgcttgatcctcttcctgtttctcagtatcattggtgtttatttctccagtctcctcggtatcattttgtggaatcttcacctcttcatttaacttttctgtgaattcctcttct

SEQ ID NO: 48507 - DNA, 392 bp, Glycine max
  Clone ID: LIB3107-031-Q1-K1-D7
agaaggggattcatagcaacacattcttacaatcttacatgtcaaaactaaacaaaagtgagagaaacatcggaacatggcaacccaattaaacaatgtgttcagaacttcaattctgaagcacaagatccaatcagagacccctttgaaaaccacaataagaaccacaagatttcaagtgatcaatgctaccagcagtgcaaggcagctcatagagtctggcacagtgaggccaatattgccaaaagatgcttccacagccataaactcagagggatttgttctccttgatgttagaccaacttgggagagagaaaaggcccgtgtggcagggtctttgcacgtgccaatgtttgtggaggacacggataacagtcccataactctgctta

SEQ ID NO: 48508 - DNA, 407 bp, Glycine max
  Clone ID: LIB3107-031-Q1-K1-D8
gaacaattaattttcaaacacaagatctctctccagcttccccgtcctcttctacctacttctccttttgtgcaacttgccttgtacaacaacacttccatatcctttgtgttgtgttgcccactctaaaaaagtgagagagagagagagagagagagagagaggacaacatcccaccatttgtggctgccctctattttagtccctagccttaatcatgccatcaggtgctaagaagaggaaagctgccaagaaaaagaaggaaaaggaaactgaaattaacaccaaccacccttcaaccaccaaccctcaaggcaatgatgaggtgaagtctcaagatgagaaagggagtgatggtggttcaccaacacatggtgaacatgatcttgcattcaatgaagaggagg

SEQ ID NO: 48509 - DNA, 404 bp, Glycine max
  Clone ID: LIB3107-031-Q1-K1-D9
cctataccaataattaaggaactgtttcgaactgatggcgaacagttcctcaagtatccaccacctaaagtgatgcaggtcgacaagtctgcatggatgactgatgaagaatttgcaagagaaacaattgctggtttgaatccaaatgtcatcaagattattgaggagttcccactaagtagcaagctagatactcaagcctatggtgatcatacctgtataataacaaaagagcatttggagcctaacttaggtggtctcactgttgagcaggctatccaaaacaagaagttgttcatcttagatcaccatgactatctcattccatatttgaggaaaataaatgcatataccacaaagacttatgctacaagaaccatatgtttcttgaaaatgatgaactt

SEQ ID NO: 48510 - DNA, 414 bp, Glycine max
  Clone ID: LIB3107-031-Q1-K1-E1
gtgaagctgcttcttccatggcttattccttaatggatggcgcctgctctcacctcttttcctttgtcttccgctgcatctccatggtggaaaatcactattaaaggaccccattgaagctcaaagatccagcctccatagaagccccacaagcaaacttccatcaccattagctattttcaaacgaataccattagctatttgacaaaccttaaagtgttcttgtacctctataactgcaggtagcaaatcatcttaaccatatggtatcaacccttggaagaaatcctctaatgattttggtgcaagtaaatacgagtggaagaaatcctctgagtttctctaactccttaatagtggtcatcacaccattcctgctaatattttttcttgtgaggttgttttcttggtccc

SEQ ID NO: 48511 - DNA, 404 bp, Glycine max
  Clone ID: LIB3107-031-Q1-K1-E10
gtctcgcttaaattgaagacatttattattgtttatatgataagatttgaaatgatatgaaatccacttcttgaaatccaatccattacccactctattctatagattattgcttgagctgtgaaaatttgatttttgtgcagaacgtttacttgaagctgcatcaatcgaggagggattcttcttcatctttggattcgcttttgatgcctcggagtcagagctgggatgaaagctgaattttggggaaaatggcaactctagttgaacctcccaacagaattaagccaaagggcaagcattattatacaatatggcaaacattgtttgagattgatacgaagtatgttccaattaaacctataggccgaagaacgtatggcgtggtgtgctcttcgatcaac

SEQ ID NO: 48512 - DNA, 350 bp, Glycine max
  Clone ID: LIB3107-031-Q1-K1-E11
cattttcccaaaatcaccatctagagttttcgcttttccactgaaaatcaaattagggtttggatttcggaattgccacagaatcatggccactctgaaagagcttcttcctcctgcaaaatcctcctccaccgcctactacgaccacaccaacgatccatggttcaagcagcgtttctcctcagaagaggaggagaaatccgccgccgccgccgccgtcaagcagaagcccgttcccccctacctgaagcgcgccggcttcgttcctcggaaaatcgaggacttcggagacggcggcgccttccctgagatccacgttgcacagtatcctctcgacatgggaagagaaa

SEQ ID NO: 48513 - DNA, 429 bp, Glycine max
  Clone ID: LIB3107-031-Q1-K1-E12
gtggagaatggaattgaaattcgagagtatacagctgtaagctctgatacgacattgcttgcaactgatgagcttgattctgtatctaccgccaaggttgctttagctgaaacagaggtccgaaaaattcccaatgaaactgctaagcatgcaaatggtgaacatcaagcagaagaaaatagtaatgacctcatatgggctgatccaggttcatgctgttatgcactgtatgcaaagttgaaccctgatacagttctcttgcatcaatcacctttggcccttgcgaaagctttaaagaactcggtggaattggacgggttaaagaaggcacatattcgggatggtgcagcggtcgtgcagtatcttgtctggctggataagaagatgcaagatattttgggagcttctggttactttttggagaacgat

SEQ ID NO: 48514 - DNA, 406 bp, Glycine max
  Clone ID: LIB3107-031-Q1-K1-E2
tttaccccaaactggtattttgctcagttcctcattagcaaaatcgaagaaaagaggcataactttcagcaaaatgggcctttggaagatgaagtaggggcctgtagatagcacatgagtcatatcatcttttgaatcaaatttgaatacaagtcaaccgctttcatgggtagaatatgagaactttacgccccatttctgaaagcattccagtagggctttttttcctaggaaacggcctgctacatagcctataaggttgtgtccccacacctcttccaggggctgaaaatcatcttcatcaagcaatactatatcttcagaagatggaggggaaaatttcaggccaaatcccttggaaggctttttgttgtccttgaacagattaattcaaggcatggaagcc

SEQ ID NO: 48515 - DNA, 416 bp, Glycine max
  unsure (1)..(416): unsure at all n locations
  Clone ID: LIB3107-031-Q1-K1-E3
agagggggatccaatatcactggcattaacttaggtcaaaaccgaccttacatcctaaagcctttgaacatcgtttggcagccatggaaacaggcatagcatgctacactcgcgggcctttcctgctagtgtttcttccagcactcttcaccctncatctctctatctnttggctcgaggagtctgaaatcgagctctntatttggagaatctctaagagtggcatccaaatcaacactaaaggtttcaaagacaaagaatacttcactcgtgaccagatgttgaaatggtgacagtctggaagaattcctcacanaagcaacaccagataggggttgatcaggttgttggtgtccatgggagaagcattaagaacaatttccttcaaagtgaagacggcttcttgtggtggaaca

SEQ ID NO: 48516 - DNA, 413 bp, Glycine max
  Clone ID: LIB3107-031-Q1-K1-E4
gaccaccaattagacaataaacagcgacaatgaaagcaatgacagcaacgacaacgtttgatgtctctgccgcttgcttccgtgcccctccttcttgttcaccgaatccatgccacaccagtttttcagttataaactccctgaatcctcacaagggacgacggataagcgttgctgttccacctaagtttccaagcttccggagggaagcagctctgcaggggaatttggaggctgttagagtcccaacttcggtgcctgtgcgtgtagcatacgaacttcttctagctggtcatcgatatttggatgtaaggactccagaagagttcaatgctggacacgctcctggcgcaattaacataccttatatgttcagagttggatcaaggatgacaaagaatagcaactttatt

SEQ ID NO: 48517 - DNA, 411 bp, Glycine max
  Clone ID: LIB3107-031-Q1-K1-E6
gatcttcttcaatttattagccgaagatgtggtgcatgagaccttagtctttgtcatagtttcttccacaacaacttggtccaaactttccaaaaattcacataagagcaatagttctctccctagaaactgatatgctatataagccgtcctttggagcaatatatccatcctcttcagtttagcagaaggtgtcgtgtattagaccatagtctttgtcattgttgtttcgcaacatcaaagtttagcctttgagcatcagcaatcacatggtgatcagaatatcattcagcaattgaagatcagaggcaagcatagactagcaatgatatggctttcttcccagcaaatttcatgctacaaacacctcaccaagatgaccatcaacctccaccttcactcaactcaatt

SEQ ID NO: 48518 - DNA, 402 bp, Glycine max
  Clone ID: LIB3107-031-Q1-K1-E7
cctctacatgctaacatgtggcaaagcttgcagctgtatgacaatgaatatctttgggaaggcaccaatcccacaatatatacatttctcttaaacctataaatagaatatcaagtgttgaaaatctgttgaaatccctggaggatcgcacactaagttaaaagagcaaacctttgccttgcaaagttatttttgttgtattcaagcttattgtgtatcctctctatgagagctttgaatattgtattcaattcaaactattgcttagaaagctaggaatggcttttgtgataaaaatacttgggttttgtttaatctcaggggagattaaggatgtgttaggagtggcctagaaaatactgtgtatccagaagtgaaagagtaaaatacttgtttgtaata

SEQ ID NO: 48519 - DNA, 397 bp, Glycine max
  Clone ID: LIB3107-031-Q1-K1-E8
ggagcctgaggcgacggttctggcagttgccctcgtctcagcctcgcgtatgtttccttgctctttcatcttttcctctttctctatgcaaataaccgattgatcaatcgaatttttttgtgattcaatttcgctcttttttctcggcgcgagaaatcatggctttgggaacggtgactcgacggttggggaataaactcttgccggcgttatctccttctcccaggcttctacattctcacgccaccagtttcgggttcaaacaagtaaacgaagaagaaaaggctcgcatggttggtgacgtattcacgagcgttgcttcaagctacgatctcatgaatgacctaatgagtgctggtttgcatagattgtggaaggataggttagtttccaagct

SEQ ID NO: 48520 - DNA, 358 bp, Glycine max
  Clone ID: LIB3107-031-Q1-K1-E9
ggttcaatgcagatgatgggaaatgtagtgagatgcctgggtctacacctgctgcaagattggtcagtcctgttccattttctgcttcatccatgtcttttggtattctctcgatcacagtagctgctgctgcaaagagcccctttgtggcacctgaagatttattgaaaagtaaaaaggagcttggttggaagggatctgctgctactagtgcatttcggccagctgagcccaggaaagttatggaaattcctcttgatatgtcaactacccctattcctaatgatgaagctagaaagcagagccgggcaccattggattttgacttgaatggttccgatgaaataatacttgatga

SEQ ID NO: 48521 - DNA, 418 bp, Glycine max
  Clone ID: LIB3107-031-Q1-K1-F10
gaggtttccttagttattgttaccatttgctcccagcactgagcttaaccgagcttcacaaagatgaatcgggaaaaattgatgaagatggccggttcggttagaactgggggaaagggcaccgtgagaagaaagaagaaggctgtccacaagacaacaaccacagatgacaaaaggcttcagagcaccctgaagagaataggggtgaatgccatcccggctattgaggaggtcaatatctttaaggatgacgtagttatccagtttctaaatcccaaagttcaagcatccattgctgctaatacttgggttgtcagtggttctccacaaacaaagaagttgcaggatatactccctagcattatccaccaattaggaccagataacttggaaaacctgaagaagctggccgagcaat

SEQ ID NO: 48522 - DNA, 345 bp, Glycine max
  Clone ID: LIB3107-031-Q1-K1-F12
ggaacacaagcggcatcgtcttggtttgtgagagagacagaggctcagagagaaaatggtttcagggtcaggaatctgtgcgatgagggtagtcgtggacgcgcggcaccacatgctggtgaggctggcatcgatcgtggcgaaggaacttctgaatgggcagaacgtggtagtggtgcgctgagaggagatttgcatctactgtgggctcgtcaggcagaagatgaagtacttgcgtttccttcgcatgcgcatgatcaccaagccctgtcactgtcccatccatttgcgtgcactcgtgaagatcttatggcgcaccgttcgtgggatgataccacacatgac

SEQ ID NO: 48523 - DNA, 419 bp, Glycine max
  Clone ID: LIB3107-031-Q1-K1-F2
aaaaggccaccaaaagggggcctcgttttacctcggtgaagggtccaaaagttgtcattgataggctaactggccggaccaagggatatggctttgtaaggttttcagatgagagtgagcaagtgagggctatgactgagatgcaaggggttctttgctcaacaagacccatgaggattggacccgcctctaataaaacccccaccactcagtcccagcccaaagcttcatatcagaattctcaacctcaaggttcacagaatgagaatgatccaaataatacaactatttttgttggtaatttggatcctaatgtcactgatgatcatctgaggcaagttttcagccagtatggagaattagtgcatgtgaagattccagcaggcaagcgatgtgggtttgtccaattcgcagacagg

SEQ ID NO: 48524 - DNA, 395 bp, Glycine max
  Clone ID: LIB3107-031-Q1-K1-F3
gactgcgaagacgacgtcgtggaaggcaaacaggcaaagagaacttggcttgttggagactgagctgtgtattgtgtgggttcccctggccgatagtacctaaatctcaatcgcgctttagcgacagcagagatccgatctgctctgcacctgtctctcaccacagtgtcgccagagaaaggaggatatcacatcaataacacgatgatgatgatggatccgccgatgacgccgctgaggcaaatgctattggaggagatcactcccgtcgtcatgctcctctcaactccttacgtcgaacaagattccctcaagaacggtctctacttcctccagacgctaacgccgttctgctccttcaacaacatcgacgttactgttaggaccgccagtga

SEQ ID NO: 48525 - DNA, 389 bp, Glycine max
  Clone ID: LIB3107-031-Q1-K1-F4
gaaggtgcaggagtttgttgtgagctataagctagtttatcgtgaggagaatatgaagttgtttgttttctttgttgctgcagtagttttggtagcatggccatgccatggcgcaggctaccaaaggttccctctccgaatgaaaactggctatggtgagcgttcttcggaggtaaaatgcgcaagttttaggcttgctgtggaagcacacaacatccgagcctttaaaaccattcctgaagagtgcgttgaaccaacaaaggactacattaatggcgaacaatttagatcagactctaaaacagttaaccaacaagctttcttttatgctagtgaacgcgaagtccatcacaacgacatatttatattcggcatagataacaccgtac

SEQ ID NO: 48526 - DNA, 405 bp, Glycine max
  Clone ID: LIB3107-031-Q1-K1-F5
gaagttgaagttgtggctcaaactcacagatagattagcacttagcatttactaagaaaggataaaggaaggaacactttcgttacatttctccgcccattcctaccttgttcctgcttttctccttttctttttcgtattcggggttgctgctttctttcgactctattgtcttcttaataaatacagaaagaaacagataagaaaaaagtttataggtgcctagaagaaaagacaatatagtgtggagcaattacgtttgatcacaagggaaattaaaggtgcaacggttttgcaagatagcatagaagattttgaagaatcttagttgcaatatagttgtgcagttgttgaaatgggggctcctttatcagcatggcctttggagagctttggaacatacaa

SEQ ID NO: 48527 - DNA, 207 bp, Glycine max
  Clone ID: LIB3107-031-Q1-K1-F6
gaacgatgtaaaattccaatacattcacgtgtgaaaataatatataatatatttagtaaaaaaatttgtatttaattattattgtgtaatatttcttttgatcaacaataattacatcccacaaacaagattaatctttcacataatcaatttgaaaaaaattaatttttgacataagaaattaaagaactttcataatatttcagc

SEQ ID NO: 48528 - DNA, 414 bp, Glycine max
  Clone ID: LIB3107-031-Q1-K1-F8
gcagtgctcaccagcagggcaattttccaaaggatgaagaattatactatctatgctgtgtcaatcaccattcgtatagtgtttggtttcatgtttattgcattgatttggaaatttgattttgcacccttcatggtgttgattattgccatactaaacgatggtaccatcatgacaatatccaaggatcgagtgaaaccatctccaatgccagacagctggaagctgagggagatatttgccactggtgttgtgctaggagcttacatggcactaatgacagtagtatttttctggctcatgaaggataccgacttcttctcggacaagttcggtgtgaggtctataaggaacagccccggagaaatgatggcagccctgtacctacaagtcagtattataagtcaagcacta

SEQ ID NO: 48529 - DNA, 326 bp, Glycine max
  Clone ID: LIB3107-031-Q1-K1-F9
gaccgtcagttgcaggaaaaatggtttcgctgaaactgcagaagcggctcgccgcgagcgtgctcaagtgtggcagaggaaaggtttggcttgaccccaatgaagtcaacgaaatctccatggccaattctcgccaaaacataaggaagctggctaaggatgggtttatcatcaggaagcccaccaagattcactctcgctcacgtgctcgtcgaatgaaggaagccaagaggaaaggacgtcactctggatacggtaagcgtaagggtacaagggaggcaaggctttccactaaaattctatggatgaggagaatgcgtgtgctc

SEQ ID NO: 48530 - DNA, 410 bp, Glycine max
  Clone ID: LIB3107-031-Q1-K1-G1
gggtgactggtgagtgcggggacgctggcctgcagtggtgcgacttttcaccgacgacgctcgttgtgcaagcagctaagtaccacgacgctcttgtgcgagcagcttctattcgctggacggatggtggttctacgattaagtactagggttcagacttcatgagttttaaacaccgtgtataattgattttggtggtgattccaattcggaagtgcaaccgcagaaagaagaatgagcaactccatgccttttgttctgctaatattattactttcggttttacgttactcaagcgccgaagaagctttccatgttcgcatacatctctccactgtctctagatatggtgctgcgaaagacattgctgacaataacttcgtaccttccaaaatccccaagggatgtgt

SEQ ID NO: 48531 - DNA, 416 bp, Glycine max
  Clone ID: LIB3107-031-Q1-K1-G10
gaccactacatcccatctctcaaagctttacacgcttttaacactctctagaaaagtggtgttcttttttctttctctgaggactcgttgcttttcctttttcccattctcttcttaaatccatggacacggctcagtgggcacagggtattggagtggttaaacaatcgatggaaggttcaaagcctcctcctcctcctcctcctcctatgttggagagaagggcaaggcctcaaaaggatcaagctttgaactgcccaaggtgcaattcaacaaacaccaaattctgctactacaacaactatagcctctctcagccaaggtacttttgcaagacatgtagaaggtattggactgagggtggttctctcagaaatgttcctgtgggtggtggctctagaaagaacaagagatca

SEQ ID NO: 48532 - DNA, 386 bp, Glycine max
  unsure (1)..(386): unsure at all n locations
  Clone ID: LIB3107-031-Q1-K1-G11
cgacagaagggggcagtgaatacaagccaaaagaacaacatggacattgggctttctcctcagttgcccaagaaagtttacggtgccaatggtggctcctactacgcatggtccccctccgaccttcccatgctccaccaaggcaacattggtgccgctaagcttgctctcaacaaaaacgcctttgctcttcctcgttactctgactcttccaaagtcgcttatgttcttcaaggtagtggagtggctggaatagtgttgcctgaatcagaagagaaggttgttgcaataaagaagggtgatgccttggcactcccctttggtgttgtgacctgntggtataacaaggaagatactgagttggttgttctgttccttggggacac

SEQ ID NO: 48533 - DNA, 435 bp, Glycine max
  Clone ID: LIB3107-031-Q1-K1-G2
tgcaaaaggccaccgaagggggttaccttggggattgagttgtttgtacttaaaatctttgtgccaatagcatgtctggcatgggcagttctggttcctgtcaacgccacacgttccgggctagaaagtgctggtctggacaacataacttctagtgacattgataaactctcaatttcaaatgtccatagtacatctgaaaggttttgggcacacatactagttgcttatgcatttacattttggacatgctacattttactatacgagtatgaaaaagttgcctcaatgagattgcaatttcttgcatcagaaaaacgtcgccctgatcaatttacggtgctcgctagaaacattgcaccagatcctgatgagtctgtcagtgagcttgtggagcactattttctggtcaatcatccagataactatgtttct

SEQ ID NO: 48534 - DNA, 54 bp, Glycine max; identical to SEQ ID NO: 15991
  Clone ID: LIB3107-031-Q1-K1-G3

SEQ ID NO: 48535 - DNA, 389 bp, Glycine max
  Clone ID: LIB3107-031-Q1-K1-G7
gaaacaaacctcagtaccaagaaccctatgccttgacaaaccctaacgttgatttaaatcgtttgttcgcacttcaatctccaagtcataaatacactcttctctccccattcactcgcattggcttttggtagttgaagtctttcattgttgtcaaattcagatcaggactactcaggcaagtgatagcagctctgggcttcgagggctagaatcctccgaagaattcaagagaagagggaaacaattgagagaaaagaaaggaatctacggcactaatggcagacaaagctaagggaatggccagctcagcgcatcacacgaaatcctttagtccatctgcagtttagtttgttcccggtggggcaattcacacgctacccatgaat

SEQ ID NO: 48536 - DNA, 372 bp, Glycine max
  Clone ID: LIB3107-031-Q1-K1-G8
ggagcctgaggcgacggttctggcagttgccctcgtctcagcctcgcgtatgtttccttgctctttcatcttttcctctttctctatgcaaataaccgattgatcaatcgaatttttttgtgattcaatttcgctcttttttctcggcgcgagaaatcatggctttgggaacggtgactcgacggttggggaataaactcttgccggcgttatctccttctcccaggcttctacattctcacgccaccagtttcgggttcaaacaagtaaacgaagaagaaaaggctcgcatggttggtgacgtattcacgagcgttgcttcaagctacgatctcatgaatgacctaatgagtgcctgtttgcatagattgt

SEQ ID NO: 48537 - DNA, 401 bp, Glycine max
  unsure (1)..(401): unsure at all n locations
  Clone ID: LIB3107-031-Q1-K1-H1
tccagttaaacacgctgactcattttcagtcaaactcttaacccagtggctgacttttcctttcttttttcttttgagttttttcttgctttatcttggtgcttaatttggttgacatttaatcagagttttactcacaactaagaaaatggttaggcaccacaccattttagaaagcctgaaaggcttatctgtgtctatcattatgctttcaagtttcagcatgatttatattattgctttttatactagaattataatcacggagctgatttagtttcaaaatttcactaatgatcaactgacagaccctctagaggatgaaggatccaactatccacaaggccttgttctggtccctcgaggtggngatgatgatagtgttgttgtagggtcacaca

SEQ ID NO: 48538 - DNA, 424 bp, Glycine max
  Clone ID: LIB3107-031-Q1-K1-H10
ggtcgcttgaggagaacaggaacattttggatggcaactgctcatatcatcactgctgtgataggctcaggagtcctttcactagcatgggcggttgctcagcttggttgggttgctggacctattgtcatgtttctctttgccgtcgtcaatctctacacttccaacctattaacacagtgttacaggaccggtgactccgttactggacacagaaattacacctacatggaggcagtcaactccatcttgggaggaaaaaaggtcaagttatgtggcctcatccaatatatcaatctgtttggagttgcaattggatacaccattgctgcctctgtcagtatgatggccataaaaaggtcgaattgttatcacagcaatcatggaaaagatccctgccacatgtcaagcaatgggtatatga

SEQ ID NO: 48539 - DNA, 211 bp, Glycine max
  Clone ID: LIB3107-031-Q1-K1-H12
ttaatgctgggtttaaatatacatcccttttttcatgcatattccatgctttatatattatcatgtcttgtacttcattaataaattcacttctttcatcataatatgtcttcactatcaaatcatgcctttttatgaacattataactttcatactatatacttcatttattctttatagaacttatacatatcccataaaaatttttta

SEQ ID NO: 48540 - DNA, 400 bp, Glycine max
  Clone ID: LIB3107-031-Q1-K1-H2
ggttacctgaaggtttacctgggtggcctaaaatcttggtccatacattctgcatggcagtctggtcctggaacgcccagtaccggctagaaagtgctggtctggacaacataacttcgagtgacattgataaactctcaatttcaaatgtccatagtacatctgaaaggttttgggcacacatactagttgcttatgcatttacattttggacatgctacattttactaaaggagtatgaaaaagttgcctcaatgagattgcaatttcttgcagcagaaaaacgtcgccctgatcaatttacggtgctcgttagaaacattccaccagatcctgatgagtctgtcagtgagcttgtggagcacttttttctggtcaatcattcagataactatctttc

SEQ ID NO: 48541 - DNA, 403 bp, Glycine max
  Clone ID: LIB3107-031-Q1-K1-H3
ggcaacccctggattggaggccagcaaagcccaactcaaccaccaaacctctcctcgttcacgctacccctttctgctcttcttctacctttcaagttttaaaagtataaagatggcagagacattcctatttacctcagagtcggtgaacgagggacaccctgacaagctctgcgaccaaatctccgatgctgtcctcgacgcttgcctcgagcaggacccatacagcaaagttgcctgcgaaacatgcaccaaaaccaacttggtcatggtcttcggagaaatcacgaccaaggccaacgttgacctacgagaagatagtgcgtgacacctgcaggaacatcggcttcgtctcaaatgatgtgggactggatgccgacaactgcaaggtcctcgtcaacat

SEQ ID NO: 48542 - DNA, 394 bp, Glycine max
  Clone ID: LIB3107-031-Q1-K1-H5
ggaacgacagaaacttgagacttaccatccccctggttatacagaattgtttggatcaactaaatgcttcatcgcgcttcgaaaataatgtcaagaaaattgtcttgagaagggaaattttacactgatttagctaatttttgaagccatttcagcagacagcaagtgaaatttggctgacaacaactaaaatttgcctgaccggtgaaaattgtaactgcttctataactggatcggatcaggatttaaaatactggaaattactatttacatcattttagcaaatgagattcattagaaaacttcttatatataggcttgagtcttcttgaatccatttcattcagcatgcttatatgaatttcgctagtgtataattgtattctactagtg

SEQ ID NO: 48543 - DNA, 410 bp, Glycine max
  Clone ID: LIB3107-031-Q1-K1-H6
ggtggccaattaaaggtgagtgtggatgatgttaaagatgcagatgctccagttcctgtacccactgatgaggttcccttagtggggcagacacttcacaccttccttgcttggccaacacatctggtcaagtctttatcacaccaggtacttattgttcttactatatgtttcttctttttaaattaattcattaagcgtgcctcaaatttggctatttaactttgtttcatgaacaggtagttgtgtctccgccaaaaccaccttcgaagcccgatccggaggtcgatgatccgctgtatctgatgacattgaccatcccagagcttttcttgaagccttatcaagttagatgggatgccaccgtgtttggggtcgttaatctagatttccccctgtacataaagcac

SEQ ID NO: 48544 - DNA, 408 bp, Glycine max
  Clone ID: LIB3107-031-Q1-K1-H7
gatctcaagcaagaaaatgtgcttggatgagaagcttgaaaggaaaatagctgaaatgagaagatataaatttggacaaagcaaattgaaatcagttgatagtgtagttatgctgttccctatgttcaaggagagactgaaaacattaagaggaatgtttgaacagtatgatgaggattctaacggatctatagaacccaacgaactaaaaaagttcttagaacatcttgaacttcatcttaaagagcaagagattgagcatctttttcagtactgtgatcttgatggaagcaagggcatacagttcaatgagtttatagttcttctatgcctcatgcatctcctagcagaaccttcatcctctgatatttcatccaaagctgagttagcacaggttggagaaatttt

SEQ ID NO: 48545 - DNA, 400 bp, Glycine max
  Clone ID: LIB3107-032-Q1-K1-A1
tttgtgcttcaaatatgcgttcattaaaagaaaaatgtactttgcatagctcaatgtgtagctttaagtggcgttaggagtgaggaatctttcattctcaattaagacttcattcgtgcaagggtcaaaatcaattttgaccaaaagctaagaaaaaaaagtgtatctggttaggagcgagtgaggaatctttcattctcaattaaggcttcattcgtgcaagggtcaaaatcaattttgaccaaaagctaagaaaaaaattaattattttttgacgcaacaaataataactttagtagcgaattcataatgatactatattcaacatgattttctaacacaaattcaaacatgcttaagaattattggcatttaatgtctttcgtaattatgacactac

SEQ ID NO: 48546 - DNA, 386 bp, Glycine max
  Clone ID: LIB3107-032-Q1-K1-A10
ctattaatatttgatatcagactattagagtggtgacttcatttgtggaactgaagacatagagagtagataaatatttaatggttgtttatgattattaagtagcttattatgcattgtttctgcttaaaatgtctttaacgtgttgaattaccagatgagttgagaacatgggtttcaagtatttgctggttgtgacgtgtgtgtgtgcttggtttggatccttggttgttacaacttcttctggtgatgggttaatgagggttagtctaaaaaggacgagtttagatattagcaagcttaattctgcaaagatcaatgaggttgttaatcatttaaaagcaaatggagtgtatctgaagaaatatcttgatgcacaagaattt

SEQ ID NO: 48547 - DNA, 322 bp, Glycine max
  Clone ID: LIB3107-032-Q1-K1-A2
ggagtgaggaagagcgaagagtgaagagaatggctcccaagggtttaacctttctggctgtgttaatatgcgtttcagcactgtcactgagtccttctgttgcgggggaagggcaaaataatggccttgttatgaacttctacaaggaatcatgccctcaggctgaagacatcatcacagaacaagtcaagcttctctacaagcgccacaagaacactgctttctcctggctcaagaacatcttccatgactgtgctgttcagagttgtgatgcttcactgttgctggactccacaagaaagagcttgtctgagaaggaaac

SEQ ID NO: 48548 - DNA, 260 bp, Glycine max
  Clone ID: LIB3107-032-Q1-K1-A3
gggccaaggattgacatttatttgagtttgcctcgttgattgcacaaccagctgggcatcaagaaaacccagccaacaaccacaaccaaacagggtggatagggatgtcgcagcagggcacaggttcagtggtggatttcgacctccccgacgagattctgtcggtgataccaacggacccataccagcagctggatctggctcgcaagataacctccatggccattgcctcccgtgtctcttctctcgaatacgatgca

SEQ ID NO: 48549 - DNA, 169 bp, Glycine max
  Clone ID: LIB3107-032-Q1-K1-A8
acagaaggtgactcacttaacaatcaatcaacacttccaggtgcgggtatacacatcttggttgagccataactctctctaaacttatacttgcttcccttcttgcctcgcttatccttcttcatcttgctgatgctgaacaatcaccacatgtacaaactcaaggctc

SEQ ID NO: 48550 - DNA, 318 bp, Glycine max; identical to SEQ ID NO: 12670
  Clone ID: LIB3107-032-Q1-K1-A9

SEQ ID NO: 48551 - DNA, 383 bp, Glycine max
  Clone ID: LIB3107-032-Q1-K1-B1
gacctcacccagttgcagaaagaaaagaccatcaaagtttcacttcagccttatccggtttagggtttcggtttttgacccaacctttgacgtatcgaaaccttaagtttcggatcaggtctgagcaatctggttggtagaacctttggtcttagagagtcaagttttatgtctgaattagacgatcaaattcctactgccttcgatccttttgctgatgcaaatgctgatgactcgggtgctgggtcaaaagagtatgtgcatattcgcgtacagcagcgaaatggaaggaaaagcctgacaaccgttcaaggattgaaaaaagaattcagctataacaagatacttaaagatgttaagaaagagttctgttgcaatggaac

SEQ ID NO: 48552 - DNA, 410 bp, Glycine max
  Clone ID: LIB3107-032-Q1-K1-B3
gacttctcttcacacctttgttcactcttcttctctggcggctagggttttagcgcagcttcttctagatttaaggaagatgggtaaggaaaaggttcacatcagtattgtggtcattggccatgtcgactctgggaaatccactaccactggtcacctgatttacaagcttggaggcattgacaagcgtgttattgagaggtttgagaaggaagctgctgagatgaacaagaggtctttcaagtatgcctgggtgctggacaaacttaaggctgagcgtgaaagaggaatcaccattgatattgctttgtggaagtttgaaacaacaaagtattattgcacagttattgatgcccctggacataaggatttcattaagaatatgattactgggacatcccaagctgact

SEQ ID NO: 48553 - DNA, 421 bp, Glycine max
  unsure (1)..(421): unsure at all n locations
  Clone ID: LIB3107-032-Q1-K1-B4
tggacaattgagtgcaattaaagaggtcagggttgtctgtgatgaccaatcatcaaaggagtgcctcaaacaacttaatcaggagatccatttgctcagtcagctttcacatccaaacatcgttcaatactatgggagtgatttgggggaagaaacactttccgtttatttggaatatgtctctggtggttctattcataaattacttcaggaatatggggccttcaaggagcctgttattcaaaattataccangcagattgtctctggactttcctatcttcatgggagaaatacagtacatagggatatcaaaggggctaacatactagttgatcctaatggtgaaatcaagctggcagactttggaatggctaaacatataaattcttcttcctccatgctatctttcaaagggagt

SEQ ID NO: 48554 - DNA, 394 bp, Glycine max
  Clone ID: LIB3107-032-Q1-K1-C1
tgtggatactctagtaagtctcatgccaacagacaagggctcttccattccattgacgatttttgtttggcatgttaaagatggctatcatgttgggtgccactatcccctgtaggcttgagcttgaaaggaggatcgcgttacggttggaaatggtcttactagattatctgtttatactcatcttttcatatgtgttgtcaccttattttatgttgtcaccagtttcattttttctgtatttttatccttttattgtttttaattttattatttttatttttaatttctttcactcttctgtgtaatttttatattttattattatataatttatactcttttttttatattttcttattcttattatacttttttcttttatattattttt

SEQ ID NO: 48555 - DNA, 403 bp, Glycine max
  Clone ID: LIB3107-032-Q1-K1-C10
ggaggaagctattgaattgggtcctgtacgagggttgggggaaaagcttaggtggttattgatgcctgcctttcacaatatgatgaggaggcaatcttctttgatgaagctgtgagaaatgcaaaacgaaagcaattggaatcaaaggctttggatcttgtgtaccctgcttatacaacattgttagggcatatacgctctaaagctctagatgattttaagactaagctggaacaatcactaaacaatggagaagggtttgcttcatctgttcgcacttggactcaatctattatgcttcaatttgacaaagcatctgctgatgctgctgtaagacaagctaattggggtgcttcaaaagggcgagacaaaccttaccgtgatattgattcacatacttcat

SEQ ID NO: 48556 - DNA, 352 bp, Glycine max
  Clone ID: LIB3107-032-Q1-K1-C2
aggtttggccaagtgatttaaattaaaaaagtgtttgtcaatggttttactctctggtaatcgattaccagaggatgtaatcgattaccagtggccaaatacgttttataacagctacaaaaatttgaattcgaaattttagactgtgtaatcgattacacaattttggtaatcgattaccagcagttagtaaacgttttaattcaaattttaaaagctgtaatcgattacacaattactgtaatcgattaccagacaggattttcagaaaaataatttcaagagtcacaacttttcaaagtctttattcatgaccaccaatggtctatatatatgtgacttaaacacgaaa

SEQ ID NO: 48557 - DNA, 471 bp, Glycine max
  unsure (1)..(471): unsure at all n locations
  Clone ID: LIB3107-032-Q1-K1-C5
agaaaacgacagangggggacagaattgagcagaatgatagcgaaaaccaaaaaacaagtgtcggcaccttcttcttcttctgtccctgattctgttggttccatctcttcattcataccttgatccgtgatctcccaatttctcacttgtatgaagaaagaatagataagtaatggcaggagcagaagcaagggctctgtggcagagaactgctaatcgttgctttgtccaagaagatgcaaaaagagctcccaagttggcttgttgccaatcttcatgtgcaacatcaaaatcagttgatactggacctgccagtacagcagatgaatctgatcataatacagttaatgttacccattttaacaggaaatcgtcaatttctaatctatcatcagactgtaggtggtggttgcattcacaacctaattatgggtatcaaaagggtttaacatatgaacaagtaaatgcat

SEQ ID NO: 48558 - DNA, 373 bp, Glycine max
  Clone ID: LIB3107-032-Q1-K1-D1
ggacgccataagaaagagcacgtcgaaaagttcatctctccctctctctcacacatcccagccatgagcctcttcggtataggcagaaaccagagaacattccgcccgaaaaaaagtactccttctggaagtaagggagctcaacttagaaaacatattgatgccacgttgggtagtggaaatctgagggaagcagtaaagctacctcctggggaggatttaaatgagtggctagctgtcaacactgttgatttcttcaaccaggtgaatctgctttatggtacccttacagagttctgtactcctgagaattgtcggacgatgtctgcaggacccaagtatgaatatagatgggcagatggtgtacaaatta

SEQ ID NO: 48559 - DNA, 484 bp, Glycine max
  Clone ID: LIB3107-032-Q1-K1-D12
aaaaaaaaaacggacgggaaaaaaaaaaaacaaaataacatttattacaaaaactttttttttataaaaaataataaattaaataaaggggcaataaaaaaaaaaaacgggtggggaaaaaaaataaataaaaaataataaatataaaataaaataaaaaaaataataaaaataaacaataaaaataaaataaaaaaaaaaatttaaaatatttaaaataattaaataaaattaaaaattaataaaaattaaaaataaatataaaaacaaaaatattaaactattaaaaaaaaaataaaaaaaatatataattaaataatacatcatataaaaatctttaaaaaaaaaaataaacaatttgtaaaaaaattaaataaaaaaataaaaaaaacaatacaatataaaataaaattaaaaaataaataattaataaataattaaaaaactacaaatttataataaatataaaaaaaaaaatatatat

SEQ ID NO: 48560 - DNA, 415 bp, Glycine max
  Clone ID: LIB3107-032-Q1-K1-D2
ggcaagttgtaagtggtaactctttcaactcagccgtgcaagttttgttggcagcgcacgaaggaaccatcttctcttcgttttcctttttttctcaatcacacccaaatcccttccttccttcttcgctattggcttctctttcaggtgcaccttccagtaaagcaggagtaggataattgttgaacatagatgaaaaggtgattgttatgtctggactgattgaaggacttcctgatgctgttgcaatcaggtgccttgcatgggttcccttctacctccatccaaagttagagcttgtctctcgtgcttggcgagcagttgtccgtggccctgaactatttaaagctcgacaggagcttggttcgtcagaagatttgttatgtgtctgtgcttttgaaccagagaacttatg

SEQ ID NO: 48561 - DNA, 436 bp, Glycine max
  Clone ID: LIB3107-032-Q1-K1-D3
gattgtgtctcactcacatcacacacactctcatagctgtagcggcgacactaagatcggagaaagaatggcgaaaacgacgtcgttgctgctctttacactgctcctcttcggaaccctagctctcatccaggcgaagagatcgaaggaggatttgaaggaggtgacccacaaggtttactttgatgttgagattaatggaaaagaagcaggtcgtattgtaatgggtctttatgggaaggctgttccaaaaactgcagaaaacttccgagcactttgcacaggggaaaagggaactggtaaaagtggaaagcctctccattacaaaggtagctcattccatagaattattcctagctttatgcttcaaggaggtgattttacacaaggaaatggaatgggtggagaatcaatttacggagagaagtttgctgat

SEQ ID NO: 48562 - DNA, 439 bp, Glycine max
  unsure (1)..(439): unsure at all n locations
  Clone ID: LIB3107-032-Q1-K1-E1
gagaatcaattgagtggcgaggatggcaaacacaaacagcgacaccaaagaagaaagcaaaaaaatggatgaaagagagacaatacctctcctcacctcatacaagatgggaaattttaatctatcccacaggattgtgttggcaccgttaacacgatcaaggtcttacaacttcgttcctcagccgcatgctgctctgtattattctcaaagagctactaagggtggcttcttgatcggggaagctactggtgtatctgatacggcaaaagatgggtaccctaatacacctggcatttggacaagagaacaggtggaagcttggaaaccaattgtgagcactgttcatgagaagggaggtattttcttttgtcaactntggcatgctgggaaagtctccaactatgatgaattccaaccacatggtgaagccccaata

SEQ ID NO: 48563 - DNA, 401 bp, Glycine max
  Clone ID: LIB3107-032-Q1-K1-E2
ggaggcggaacctggagtggaagtgcgatcccagtgggagtgtgtatttcctctctgctcactccgggatcgatattttcaagaacagatcgaaaagccgttcatcgatttgttggatctgtgagtgagaagatggttactaagacagaggagactcaattgaacaggctcgaaaaccatgtcgataaccgcggcggcggcgcgtgggagtacctatgcctcgtgcggaagctcaaagttcggcggtcggagaaagttctgaagcacggtctctccatcttgaacgacctcaaacaacgatcctctctcggctccgatgaatggaccttgtatgagcacgttgctgatgctgctatggactgccaatgtctcgacgttgccaatgactgtacaaaggttct

SEQ ID NO: 48564 - DNA, 432 bp, Glycine max
  unsure (1)..(432): unsure at all n locations
  Clone ID: LIB3107-032-Q1-K1-E3
gatcaccgcgttgtgttgtgattgaaaatggagagcgatgtcgaagaatctctgcggaagaggcccagaaaataccctttctccgccgattcatcttctcgcaagcaatttgaacaatattctggacggacatttgcatttacgggggaagtgaattttatgcaagatgatgataatcgtctggagattacccgaactaaatttggaagtttgcttaaaagacacggagatttgacagagcgtcttgctagggattctgacaagataatatttgagcgtctacagaaggagtttgaagctgcacgagcttctcaaactgaagagatatgtttagacggcgaagagtggaatgatggactactagctacaataagagagcgggtgcatatggaggcagacagaaaagcaatgcatggngatgctgacatatta

SEQ ID NO: 48565 - DNA, 318 bp, Glycine max
  Clone ID: LIB3107-032-Q1-K1-E4
ggaggctggataaactaaggcttgatgtcgtcaatgggggtttatgattatgccccggatttttagttgttgtggtttgagttcgagtttctttatggtttcgagttaccgtggttcttgtttttgaccaatatatctggttgtttatagttgatttagtgaaatgataatcagtaattggagtgaaaaaaaaaaattaatttataaattaagctaatttacacggttatttgcttgaatattcttatttagtgtattatgacatgattttatttaaaaactataaaaaaaatttgttagtggttctacattattttt

SEQ ID NO: 48566 - DNA, 391 bp, Glycine max
  unsure (1)..(391): unsure at all n locations
  Clone ID: LIB3107-032-Q1-K1-F1
gatagcagcatcatacaaagcattgaattcaaaaactaagttcatttcttgtgctttgctttattcctcaaaaccaaacatgtcgaacacatgcggcaactgtgactgcgctgacaagactaactgcaccaagggaaacagctatggtgttatagtagagactgagaagagctacatcgagactgttgacatggatgttccagcagctgagcatgatgggaagtgcaagtgtggcactaactgcacttgcacggactgcacttgtggccattaaggaatatgtatgaaaatgtaattgccatgtgtttggcaatacaaatctccaaataatgtaatcttcgtatgaataaatgtgtgctgttatcctaaaananaaaaannnannnaaaaa

SEQ ID NO: 48567 - DNA, 458 bp, Glycine max
  Clone ID: LIB3107-032-Q1-K1-F2
gaagacgacagaagggggatgttttgcattggatttaccaagagaagagctaaccaagtgaagagaacctgctatgcacaatcaagccagattagacagattcgtaggaagatgagggagatcatgaccaaccaggcaacatcctgtgatttgaaggagttggtccgcaagtttattcctgagattattggaaaagagattgagaaggcgacatctagtatttaccctctgcagaatgtgtttgttcgtaaagtcaagatcctgaaagcccctaagtttgatcttgggaaactgatggaggttcatggagattactcaaaggatgttggtgccaaggtagacagacctgctgatgaaatagtggcagaggaacccactgaaattgttggagcttgatttcatgatgcattcagtttgttctagggtttctttttcttacgttatcattgaaaattaag

SEQ ID NO: 48568 - DNA, 381 bp, Glycine max
  Clone ID: LIB3107-032-Q1-K1-F3
ggagacagagagaatgagtacggtgggagaagggaaggtgagtagtaatggtcatggatgttgcaaatcagggccaggctatgcttccccactggaagccatttctggtcccagagagtctctcatttatgtaacctctgtctacacagggaccggaatagagaagccagactatttggcgacagtggatgtggatccaaactctccaacttattccaaagtcatccataggcttcctgttccttatttaggtgacgaattgcatcacacaggctggaattcatgcagctcttgccatggagacccctcagcagaccgacgatttctcatcgtacctgcactcgtatcaagtcgagtatatgtggttgatgtgaaaacaaa

SEQ ID NO: 48569 - DNA, 316 bp, Glycine max
  Clone ID: LIB3107-032-Q1-K1-F4
aaaaatatcatctacggataagagccccgaactatatacgaccttttgtgctaaaaaaggctttctcggatggagcactcttactcatgaacatggatgatgaaaagctgccttcccctatgaattttgatgttgtcaaacaatactatgcatgttactgggggcagtttgaacgttcactgtttggctgccccaaagactcattacgatctttatgttttaagctttaattgtaaacaataattccaatgttaataaatatcgattgatgttttgtatctctccttctcatgtgtgtcttttgcattttttttat

SEQ ID NO: 48570 - DNA, 378 bp, Glycine max
  Clone ID: LIB3107-032-Q1-K1-F5
gcttccctaaaaattttggcctgttaaatcccttgagttgaaaattctttttttttttggttctctatgaacatttctaaatatttagtattttacttttttcttaattattataaatttctgttattttttaataatatggttactttttaggatttactcttttaatattttataactaatttatcaatatcttaattaataagtgaatgcttcatttagttttctaagttttttagtagtttcattttttgaaacactacttttttaaatgcaagtttctattttctaactttatgtttctttcattttgatcttcaatatatttatctaatttcatgattatctttttaaataaatcatgatttattatttttt

SEQ ID NO: 48571 - DNA, 131 bp, Glycine max
  Clone ID: LIB3107-032-Q1-K1-F7
aataaaatcgggttggtaaaataacatcgtggccttgccttcatattaaattagtaaaattatcctctctcacataaatcaatataataccttagcaacaactgtcaattctatcaccttacttctattat

SEQ ID NO: 48572 - DNA, 414 bp, Glycine max
  unsure (1)..(414): unsure at all n locations
  Clone ID: LIB3107-032-Q1-K1-F8
gtaggtattatttttttcttctaaaaaaatagggtggggaaattttgatggtggcggtgggtgcanatgaaattagtaaaattatccgtgaacgcattgagcaatataatacggaagtaaaaattgtaaatacgggtaccgtacttcaagtaggcgacggtattgctcgtatttatggtcttgatgaagtaatggcgggtgaattagtggaatttgaagagggtactataggcattgctttgaatttggaatccaaaaatgttggtgttgtattaatgggtgatggtttgatgatacaagatggaagtttagtaaaagcaacaggaagaattgctcagataccttgaagtgaggcttatttgggtcgtgttataaatgccctggctaaaccaattgatggtcgaggagaaattt

SEQ ID NO: 48573 - DNA, 420 bp, Glycine max
  unsure (1)..(420): unsure at all n locations
  Clone ID: LIB3107-032-Q1-K1-G1
tattaagcacatgttgtcaaaaccgattttacacagtagaattggaaagtgggctttagcattaacagaatattctttaacgtacaagcctttgaaatctgttaagggtcagattgtggctgattttattgtagatcattcattgatcgagatgctgcaagattatgtcgatacagagccttggattttgtatttcgatggatcgaaacacaaacatggaactggaattggagttttaataatatcccccaataaagttccaactaagttcaaatataaaatcaaagggctttgttctaataatgaggctgagtatgaagctctaattacaggccttgaaattntaattagcctgggggcaagaaatgttaatataagaggtgattcagaattagtggtgaggcaattaacacaagaata

SEQ ID NO: 48574 - DNA, 383 bp, Glycine max
  unsure (1)..(383): unsure at all n locations
  Clone ID: LIB3107-032-Q1-K1-G12
ggtgtgtccccttagccaagctcgcgtctcacttctcggtcttatattaatcactcgcgcacacagagcataattcacctttcttttccgaccaaaggttcgccagaaaatgcttctatcctcctcctgctccgccgccggctccgccgtctccggcgagatcatgctgttcggcgtgagagtcgtagtggactccatgaggaagagcgtgagtatgaacaacctctcgcagtacgagctccctcgcgacgccgccaacgccaaagacgacgtcgctgccggctacgcctncgctgacgatgccgctccgataaactccggcaagaaccgcgaccgcaagcgagggattccatggacggaggaagagcacaagctattcttgg

SEQ ID NO: 48575 - DNA, 378 bp, Glycine max
  Clone ID: LIB3107-032-Q1-K1-G2
gaatgtggagaaacatgggatcaatgacaagaaaagttaaaaaaagggaataacctaaacttcaattactttactgagtgaggtcacatctaatatcactcatatctacaatgcaagaatagtaagtagtatttggtataagtgttaatttagttcgattaatgtaaaggtgtggatttaatttgcctgttcgggtagatgtaactgttggccacaacacttaatctctcttaatttggcccatatcactctcatattgtactactacgtgtaacgtactatattctcttctctcggtgtatcccccagtcaaactcatttcaattcactgttcccttgtattcggaattaatgttcgggtaatgaaaatgaattact

SEQ ID NO: 48576 - DNA, 292 bp, Glycine max
  Clone ID: LIB3107-032-Q1-K1-G7
attaagcacatgttatcaaaaccgggttggacaataaaataggaaagtgggctttatcattaacataatattctttaacatacaatccttttaaatcttttaagtttcatattgtcgctcattttatttgaaatcattcatttatctaaattcttctacattatttctatacaaacccttttattttttatttttattcatctaaacacaaacatataactgtaattgtaaatttaaatatttcccccaattaatttccaactaatattaaatataaaattaaaatgctttt

SEQ ID NO: 48577 - DNA, 205 bp, Glycine max
  Clone ID: LIB3107-032-Q1-K1-G8
aaaaaaaccggccggcccacacataccatctattaaataatacaatataatggttttttttcaatcacaatatctacaaacaacgcggcgtgttaaaaaaaagcggcggcacctcaaaaaaaatttcatattatttaatataaaaacctacaactcttaccctaccatattatctaccttttttcttcttacttaattttatcta

SEQ ID NO: 48578 - DNA, 354 bp, Glycine max
  Clone ID: LIB3107-032-Q1-K1-G9
tagattcaattacatatttctgtagggtagtaagcttctgggcggtggttcttctaacaacatgtgacttgttttcaccaaatgcaatcctgcatgtaattttgagaaatgaaaaggagagacaagttaagataagaacttcccctgatgaagttagtgattctgaggtattttccccctttaaatgtataaataaatgtgctatacatgacatattctgtaactgataatgaaatttctgtcatatccaattgtttgatttatgtatgttattgcacttccagctagattgatgtttttcctaaattgtttttagtaattcttaataaacatattcaactctattaatcattg

SEQ ID NO: 48579 - DNA, 193 bp, Glycine max
  Clone ID: LIB3107-032-Q1-K1-H10
aaattaccacttttctctaccaagtcccacaaaagcttatatcctctctgctcccgcgctccgcgttccgcagacatctgttcggtagatcgactgactccatgagaaacggagtataacaacttccatacagctccctccgacccgccacccaaaacacctcctgcggtaccctcctgacatgccctccata

SEQ ID NO: 48580 - DNA, 437 bp, Glycine max
  Clone ID: LIB3107-032-Q1-K1-H3
tatgggggtagtacaccatagccatatcctcgggaattaagtttagcttaccgatgtcaacacatatatctcagctttcttccatagcattttctccttagctttcagcacattcagtttattccttactgtttggaataatattcgagttttgatcatccaatttgaagaaccaaaggatcacaaacagtcaacacaggaaggatcagttttgtttatatttcctcgttactttcgtgatggtctcagtattctttgcttctttactcggtgttggttttcttcaaactagtagcatgccatccatatccttaaatcatgtttagcatgccaacaaatctcagctttcttccttaattaacattttctcttttctcacattcaagttaatgcttaccatttggaatagtgacaagacaaatcacaactcacagtca

SEQ ID NO: 48581 - DNA, 265 bp, Glycine max
  Clone ID: LIB3107-032-Q1-K1-H4
ggtgtgttcccttagccaagctcgcgtctcacttctctgtcttatattaatcactcgcgcacacagagcataattcacctttcttttccgaccaaaggttcgccagaaaatgcttctatcctcctcctgctccgccgccggcttccgcctttccggcagatcatgctgttcggcgtgagagtcttaatggactccatgaggaaaagcgtgagtatgaacaacctctcgcagtacgagctccctcgcgacgccgccaacgccaaaa

SEQ ID NO: 48582 - DNA, 237 bp, Glycine max
  Clone ID: LIB3107-032-Q1-K1-H5
ggccgcgctgccacaccaaataaacacaaacatggacgcatcaaaactcaatcaattgaagcatttcatcgaacagtgcaagtccaacccttccctcctcgctgatccttcactctccttcttccgcgactatcttcaaagtctcggcgcgaaacttcctgagtctgcttattccgaatcgacgggcgtggagagggatgaggacatagaggatcttacggatgagcacgagaaggt

SEQ ID NO: 48583 - DNA, 354 bp, Glycine max
  Clone ID: LIB3107-032-Q1-K1-H9
ggttccatttctcaacaacttctgctacttccggctggaaccgcacttctggtgggcaattatcatgggcaaggtcaagatcggaatcaacggatttggaagaattggccgtttggtagccagagtggctctgcagagagacgatgttgaactcgttgccgttaacgaccctttcatcaccaccgattacatgacatacatgtgtaaatacgacagtgttcatggacactggaagcatcacgatgtcaccgttaatgacgagaagacccttcttttctgtgacaagccagtcactatttttggacacagaaacccttaagagatcccatgggggtctactggagctgacattat

SEQ ID NO: 48584 - DNA, 404 bp, Glycine max
  Clone ID: LIB3107-033-Q1-K1-A1
ggttcccctcatttctttaattactacttccccggtcgagttcacccactcacccaaacacgccactttccagttatcatcatcatgctttcgatttccactctcagaagatcctcacccttcctcgcccgacgcttctcaacccaacggtcccagatccgccacgcgtcaacctcctcctactcctgctcctcactccacaacaccgcgaacccggttcgaacctggttcggtcgaaacgcactctcgaccgtcctcgccggcgcgagcgtatcagggcttcttctctacggctactcttcttcgcacaattccgagttcgactcgtctctgctgaagagctcaatttcttctctcgttgaccggtcaacgccgatttccgaggaccaagaacggcgtcgttc

SEQ ID NO: 48585 - DNA, 375 bp, Glycine max
  Clone ID: LIB3107-033-Q1-K1-A11
gtagtcaagacacacggatacgttcacacaatttctcgtttttctccctatgagagcagttagcatgatggtgaaatgtggttaaaagtcacagatggtaccggtatcactggaactgattgtatcttagaactggccataagtattcagtttctttcttgtttctgttttgccttccctagaacagtgcctctgcttttggttaatttgttggtgagcctgtcaatttgatttatttgtatttggtatattttgttttcagtttggagaagctttacttaaacaggaattgtttgagttctctcctttatcctgataacggtgggcggtatgaatcagaagttacgtgctataaacccttttaaaacttacact

SEQ ID NO: 48586 - DNA, 360 bp, Glycine max
  Clone ID: LIB3107-033-Q1-K1-A12
taaacacagacttacatgcaggaaatcttctggtcagaaagcttgaagggtttggaaggtttgatcaagtggagctttttcccattgatcatggtctttgtctccctgaaactttggaagatccttattttgaatggatctattggcctcaggcatcaattcctttctcagatgatgagctcgactatatatatcacctagacccatttcgtgattcagaaatgcttagaatggagcttcccatgattcgagaagcatgcttgcgggttttggttctctgtactatcttcctcaaggaagcagcagcttttggtctttgtctagcagagattggtgacatgatgagtagggaatttcaag

SEQ ID NO: 48587 - DNA, 417 bp, Glycine max
  Clone ID: LIB3107-033-Q1-K1-A3
ggtggcagagagcgaacccaaaactagagctaccttcccttcaaaccttccactcttctctccttttccaatcaagggaataatatttcttagagatattccgaaaccatggctcacgccaatcctatgatttttgttgttggaattctaggtaaccttgtctccttctgttgctttctagcaccagtaccaacattctatcgagtttgtaagaagaaaaccacggaaggtttccaatcacttccttacgtggctgcactcttcgcttcaatgctttggatattttatgcttacataaagacgggcgaaatacttctcatcaccattaacgcattcggttgtttcatagagacagtttaccttgtcatctatatcacttattgccccaagaaagctaggttctttaccttcaagatg

SEQ ID NO: 48588 - DNA, 403 bp, Glycine max
  Clone ID: LIB3107-033-Q1-K1-A5
gatcggacaaaaacctaaacctaaaccttaccctgcaaagtgttgaatttacagtgtagtagtaaagtgagtagagaaatcgaagttgaaaagataatagatagtaacagcatcattcatcactcatcagagatggctaccgttgaaagtagaagcaaatcagtggtattggctctctccaagtacctatcattggatcctagtgttgttccagccgatacttcagacagtgatattaagagtctttacctgaacatcatagcggtatcaggacatggggttaatcactctgatgaggtgttgaagtgggtagcatttgcagaagccttccctgtggcccttgatgcatgctttgagaatctcaatagattaaatgatgaactgtctgaaaagtctgtgcttc

SEQ ID NO: 48589 - DNA, 414 bp, Glycine max
  Clone ID: LIB3107-033-Q1-K1-A6
gacttattaattgtgttaagaaatttaagtgaggagctagagaatgatgatgaagtctgctatgtgtgcagtggtggttgtagcacttcttcttctggcggaggtggggcccatggctgaggctgtgacatgcaccccaacagagttgagtccgtgtcttccagcaatcacttccggtgctaaaccttccaatgcttgttgcacgaagctgaagcagcaaaaaccatgcttatgtggctacctcaaaaacgctagcttgaagcagtatgttaactctcctaatgcccgaaaaaccgttgcttcttgtgggattccctttccaacttgttaattaattaagccttcttataattaaagtgtgggatatatatatatatatagataaacagtttaatttatacacactttgatcct

SEQ ID NO: 48590 - DNA, 413 bp, Glycine max
  Clone ID: LIB3107-033-Q1-K1-A7
gccgtacctttgtgtacaatcttatcacgccaatcataaatcagtacgtttctgatcttgacgagggcaaggcaatgtatctgtactttgtaaaagcagaaatgtgcactccatgtggcctaccagccagaacagtgttaacaagctactacaagagcaagcacttcaagtgccgcacacacgatccttggaacgactacacaagccctgaccaaaccattctatgcaatgacagcaaccaaagcatgcattgccagcttctctcaggtttggtccaccgccgccacgtcctacgcctcggtgccgtcttcgcctccgcacttctgagagccatttccttcctggaacgaaactggaggcacctttgtgaggacattcgaactggccaactcagttccttcataacagaccct

SEQ ID NO: 48591 - DNA, 411 bp, Glycine max
  Clone ID: LIB3107-033-Q1-K1-A8
tttattactgatacattgaactttaagaaagttatgggaaccatatttgacaagtaacttgtgatttcaaattttcaatacattttttaattaaaaaaaagggggaaatcatcaatgcatttgtgaactgtgatcccccaagctgttatgcacattttttgtattaaaataaataattgaaacaaggcacaatcactgcaatgtcataacattaacaggtattaccaccaatcagcttagtagttattgttgtgctataatctgaatttttattattaatttgtatcaggtggatgttcggaaggaactcatacgaaattctgcaagcctgattgatcttcatcagctagatatttgatggtgcagctggatgtggagaaatggaattccttccatgttaaccatatacac

SEQ ID NO: 48592 - DNA, 400 bp, Glycine max
  unsure (1)..(400): unsure at all n locations
  Clone ID: LIB3107-033-Q1-K1-A9
atagatgtttttttgtttggagttatcaaaaaggaaatgaatcattggtacttcaaacttcttatattacttttgttctcattaatttttattaacaacaaaatgaggagtttggatatcatgttgagtttgtagttttcttaagactttattaagtgctaatttatgatctaacaatatgttgactaatacaataacttgttaggttactgaaggatttgataaaataattatatgtgattttttatataaattatttttaaatttttatttatttaaaacagttgacataccggtgagagatttaaaaatatgatttataaaaaaattattggtgattatcttgntaaatttcttgatgaagacaaagtcaatgagttattaagatagttgntatgtc

SEQ ID NO: 48593 - DNA, 418 bp, Glycine max
  unsure (1)..(418): unsure at all n locations
  Clone ID: LIB3107-033-Q1-K1-B1
ccagcacgaaggtaatgtataaaccccagatgctgaacttgctcagagtgtcaccaataatgccctctaaaaagcagcaaggagattggtattagtgaaggtattgataaaatctctggggaaataatcttctgatcgacttctgcctctaaaaagcagcaaggagattggtattagtgaaggtattgataaaatctctggggaaataatcttctgatcgacttctgcctctaaaaagcagcaataagtgtgtgttggacaaaagtttgcaaaattgattttgagttgaagtaatttatgtttaaatgtttttattctgaaaagtaacttaccagtaaaactgactgcaaaaatttatcgaacacaaaatttacttatagttagtttaacttaatcaattntagattcaaaatcaatt

SEQ ID NO: 48594 - DNA, 323 bp, Glycine max
  Clone ID: LIB3107-033-Q1-K1-B10
ttgtgaaatggatgatgagtggaggtttcagattttcgatgatgagatgctgccggaaaatggaatacgatcttctgcttcccttcaggccagggatcatattgcgcactatttgttgcaccatgggagggctgggactggctttttctagtcttctaggttcttcttttcgggttttcttgctttttttagaactttactactatctcattctttttcgctatgtcacgttgaataactagagattaactggattgcatagattgaaatatggtcatttgtatacaacaactattgattgtatagagaatttttgtctgatc

SEQ ID NO: 48595 - DNA, 404 bp, Glycine max
  Clone ID: LIB3107-033-Q1-K1-B11
gaagagtgaaactgccaaaaagtgaggccaccccaaaaacaaagtgagattataggaaacaaaaatttctttgcttaatactagttcctcctttctcctagcctggtagtcttttgaaaattctttatcttgatcacataattttcattttgaacttgaagaaagttttagtgtatttttttttccttaaagaaacagaacatatcctgttctttctttctctgtttgcatttttgttcacttctttctttctttcttattatctagttaagcatgacaacatttatggacatgtacaacactactagtagcatcatgacaccggatttcttagaccagtgtagtgatcaagagctgatgaaagcacttgagccttttatgaaaagtgattcatctagcactac

SEQ ID NO: 48596 - DNA, 372 bp, Glycine max
  Clone ID: LIB3107-033-Q1-K1-B12
gacattttctacgtattgaatctcaagattctaagagagattttgctgctctttgaagaagggtgtttgcttgattttggagatgtcgctgctctcagatctcatcaaccttaacctctcagacactactgagaaggtgatcgcagagtacatatggatcggtggatcaggaatggacctgaggagcaaagcaaggactctcccaggaccagttagcgacccttcaaagcttcccaagtggaactatgatggttccagcacaggccaagctcctggagaagacagtgaagtgattatatacccacaagccattttcagggatccattcagaaggggcaacaatatcttgggtatctgtgatacttacacttc

SEQ ID NO: 48597 - DNA, 445 bp, Glycine max
  Clone ID: LIB3107-033-Q1-K1-B2
agaagacgacagaagggggcagcgcttgatttgaggccaggcaagccccactcaaccaccacacctctcctcgttcacgctacccctttctgctcttcttctacctttcaagttttaaaagtataaagatggcagagacattcctatttacctcagagtcggtgaacgagggacaccctgacaagctctgcgaccaaatctccgatgctgtcctcgacgcttgcctcgagcaggacccagacagcaaagttgcctgcgaaacatgcaccaaaaccaacttggtcatggtcttcggagaaatcacgaccaaggccaacgttgactacgagaagatagtgcgtgacacctgcaggaacatcggcttcgtctcaaatgatgtgggactggatgccgacaactgcaagggtcctcgtcaacattgagcagcagagccctgatattgctc

SEQ ID NO: 48598 - DNA, 418 bp, Glycine max
  Clone ID: LIB3107-033-Q1-K1-B3
ccagcacgaaggtaatgtataaaccccagatgctgaacttgctcagagtgtcaccaataatgccctctaaaaagcagcaaggagattggtattagtgaaggtattgataaaatctctggggaaataatcttctgatcgacttctgcctctaaaaagcagcaaggagattggtattagtgaaggtattgataaaatctctggggaaataatcttctgatcgacttctgcctctaaaaagcagcaataagtgtgtgttggacaaaagtttgcaaaattgattttgagttgaagtaatttatgtttaaatgtttttattctgaaaagtaacttaccagtaaaactgactgcaaaaatttatcgaacacaaaatttacttatagttagtttaacttaatcaattttagattcaaaatcaatt

SEQ ID NO: 48599 - DNA, 370 bp, Glycine max
  Clone ID: LIB3107-033-Q1-K1-B4
tgttctgatcttctcatcaggacgtgccacaggcgcggcgtgcatgctatgggaggaatggcagcgcagattccaatcaaagaagatccagtggctaacgaggtagcactggaacttgtaaggaaggacaagcttagagaagtgaaggcagggcacgatggaacttgggctgcgcaccctggtctcattccagcctgcatggagattttcaacaacaacatgggcaatgcttccaaccagatagacacagtgaaacgcgaagatggggcaaacatcaccgagcaagacctcttgcagataccaagaggagcccgcaccatggaaggtctcagattggacacaagggtgggaattcagtacgtggcggcgt

SEQ ID NO: 48600 - DNA, 413 bp, Glycine max
  unsure (1)..(413): unsure at all n locations
  Clone ID: LIB3107-033-Q1-K1-B5
gactagatgtgaatgtgattcatattcatagagagagaaagggaaagggagaagagcttgaggaagtgatgggagatgggagggtcggtaaagaatatatctgagactcgactcaatctcgatctctctcagtgttgtgttgttttgtttatccttttgccgattccgcccattcctatgatttccttcggttcctctctttccactctcctctccgctctttcctcttgttatggtaagcacctttcttcttcagatctgctctttataccatacacttattatagatctaagtttttatggaccttaactatcttccttgatctcttattaattttaaccgctctctctttgntgctggacatgttacttcaagataacaaattgcttttttatatttcatcttttctctc

SEQ ID NO: 48601 - DNA, 390 bp, Glycine max
  Clone ID: LIB3107-033-Q1-K1-B6
gaagtcactacacaccaaatattcttcgtcctcccgctcgctcttctcactcgtcatcttcgaattcgtctgcgccctaacaaaattcatttcaattccaactcctctgatcaaaatcctaggctcgttcttgaatccctaattcgatctcctcctcctcctccgaagaataaaaggaggatcgatgtgggcagcatcttgcctggcgtcgtgctgcgcggcctgcgcatgcgacgcctgcaggaccgtcgtttcgggaatcagccgtcgttccgcccggatcgcctactgcggcctcttcgccttctcccttgtcgtcgcctggatcctccgcgaggtcgccgctcctctcatggaatcactttcctggatcaatcacttcaaacacac

SEQ ID NO: 48602 - DNA, 409 bp, Glycine max
  Clone ID: LIB3107-033-Q1-K1-B7
cagccttaggttgtcatgaccaatgcccacaaattgttaaaagcctgtttagattatcattatgaaatacccctctggttatttcttcttttatctatccttctataactttcaattcattttgtaagtttatttttgcttaattggcaggttttctggggtttggacaaaaagcttgctcagaggaagcactttccttctgtaaactggcttatttcttattcaaaatactcaacggtatgtcctaaagttggttactttgtaactcatcctccagctttctacatttgtatgcatagtgttttggttccatgactttccccgaatttttaatattttctttttggtatctttaagcacttgaaaccttttatgagcaatttgatccagattttatcaacattaggac

SEQ ID NO: 48603 - DNA, 413 bp, Glycine max
  Clone ID: LIB3107-033-Q1-K1-B8
cagccttaggttgtcatgaccaatgcccacaaattgttaaaagcctgtttagattatcattatgaaatacccctctggttatttcttcttttatctatccttctataactttcaattcattttgtaagtttatttttgcttaattggcaggttttctggggtttggacaaaaagcttgctcagaggaagcactttccttctgtaaactggcttatttcttattcaaaatactcaacggtatgtcctaaagttggttactttgtaactcatcctccagctttctacatttgtatgcatagtgttttggttccatgactttccccgaatttttaatattttctttttggtatctttaagcacttgaaaccttttatgagcaatttgatccagattttatcaacattaggacaaag

SEQ ID NO: 48604 - DNA, 318 bp, Glycine max
  Clone ID: LIB3107-033-Q1-K1-B9
gatactaagaccattctattagcctagctaatatgatttgtgagagaaagggagaaagggtgtgagaatggagagcaaagatgaagatgtaaaggttggagcaactgagttctcagaaaggcaaccaattggtacagcaactcacggtgacaaggactacaaagaaccactgcacagcaccttatgttgatcctggtgaactaaagtcatggtccttctacagagctggaattgctaagtttgtggccactttcttgatactgtacattaccatgttaactgtcatggctgtgaacatgtcactctacaagtgtgcct

SEQ ID NO: 48605 - DNA, 423 bp, Glycine max
  Clone ID: LIB3107-033-Q1-K1-C1
gacaccacaacttgcatctcatttctcatttctcacattgttattcacatctccatctagatctctctctctctctctcccaagaaattcatcaacagacttgtgattaatttgcaattgttcaagtgatctatcaagaaattgataattcaatgggaaagtacgaaaaagagcttaatctcgaggctacagagttgagattggggttgcctggaagcgatgagcctgggaaacgttctattgttagaagcaataagagatcttcaacagaagcaagcgaggaagagtgcataagcaagggcaacatgaattctaatggttctgatatcacaagtgatgaccaagacaaccttgtgccacctgcaaaagcacaagtagtgggatggccaccggttcgatcatataggaagaatactctacaac

SEQ ID NO: 48606 - DNA, 119 bp, Glycine max
  Clone ID: LIB3107-033-Q1-K1-C10
atactactcaaaacttcttttttgtggaacctggacctctttttccgaaggggcaaacccttggtggttacaataactcctgttttttctatacattgtatcttctttctattattaat

SEQ ID NO: 48607 - DNA, 369 bp, Glycine max
  Clone ID: LIB3107-033-Q1-K1-C12
ggcttttggaggaacaaaaccctctctccccaaaaacccaaacccttggcggctgcgagacccgttgtgttctctcttctctctctcttctttttttttttctctttccctctcttcttcgctccttttagggttttctcaactcttcgatttggggcttaaaccctctccgattcagattcggatttagggcttccctttctctattccgcctccaaagaaaaacagatctcgtggttggttcgtcatggccaccgttgctaatcccgcggatcaagcaactgatttgctacagaagctatcgttagaaactcagcccaagcccttggagattcctgagcctaccaaaaaggccactgggaatcagta

SEQ ID NO: 48608 - DNA, 405 bp, Glycine max
  Clone ID: LIB3107-033-Q1-K1-C4
ggaacctgatctcttgctggttgccacactacaccgatatttccaccaaacccgtttgcgttgttgtttgcgaataaatggcaactaagaggagcgtgggaacgttgaaggagggtgatttgaaggggaagagggtattcgtgagggtcgatctgaacgtgcctttggatgacaaccttaacatcaccgatgacactagagtccgtgctgctgttcccaccatcaagtacttgactggttatggtgctaaagtgatcctttctagccatttgggacgtccaaaaggtgtaacacctaaatacagtttgaagcctcttgtgccaaggctgtctcaacttcttggaattgaagttacgatggccaatgactctattggggaggaagttgaaaagttggttacacaac

SEQ ID NO: 48609 - DNA, 399 bp, Glycine max
  unsure (1)..(399): unsure at all n locations
  Clone ID: LIB3107-033-Q1-K1-C5
gattgtagaactgaacaagggtttctctttctctttctctgtctgcttcttcactttctctcgtttcaatcgaaaaaaatcatgggcagaaaattcttcgtcggtggcaactggaaatgcaatgggaccactgaggaggtgaagaagattgttactactttaaatgaagctaaagtccctggagaagatgttgtagaagttgttgtgagccctccttttgtgttccttccttttgtaaaaagtttgctgcgccctgatttccatgtctcggcccaaaattgttgggttcgcaaaggtggtgcttatactggagaggttagtgctgaaatgcttgttaatttgggaattccttgggttattattggtcactctgaacggaagcagctnttgaatgaatca

SEQ ID NO: 48610 - DNA, 364 bp, Glycine max
  Clone ID: LIB3107-033-Q1-K1-C6
gatgccaaacaaaatggagtgaggagcaaatgcgaagtatccaaagttgactctggaaacattcaaaagagtttcttctcctttcttccatcgtgccacggcgaagatgaagatagcgtggcttctgctgctcctcctggtatcagtgtccgttcaagtttgggccctgaaatcgccgtttcacccgcgagacgtacttcctctgcttcccaaacagttgtcgtggcccatcctcaatcgcctccacagcgcggtggatctcctccccgtcttcgtcggcgccgcctcttctccggacgacaatctcaagtggaaaggtgcatgcttctacgagaacaaagcctggatggtgtttcacaacaag

SEQ ID NO: 48611 - DNA, 426 bp, Glycine max
  Clone ID: LIB3107-033-Q1-K1-C7
agaagggaatcagaaaaaatatgttgaaagagatgaaagaaaatagtgaaagattgattgaaagagatgattggaatgaatgaatatgtttcatgccaaggtcacatatttataatttcttgatgactcaagtcaaaacttgtaactcttggcagttcctttaaaactaattacttaaaaagttatgacttttgaaagaacctttagaaacaagtcacttgaagaattgtggcttttggaaatgaatatgggtaatcgattacatgtttatggtaatcgattacagctttgtaaatcagtttgaaatacaatgctggctactggtaatcgactaccagagagtaaaactctttggtaaaagattttgtgaaaatttcatgtgctacccaatgttttgaaaaacctttttaatacttatcttgattg

SEQ ID NO: 48612 - DNA, 414 bp, Glycine max
  Clone ID: LIB3107-033-Q1-K1-C8
gatcgattctcgtaacaaaccctacccttttgagtcttccaagttttcaccatcgtaatgggttccgaaggatccagcgtcgtggttcctaggaatttcagattattggaagagcttgagagaggtgagaagggaattggggatggaactgttagctatggaatggatgatgctgatgacatatacatgcaatcttggactgggactatcattggtccccctagtactgttcatgaagggcgtatctaccagttgaaattgttttgcagcagggattatccagacaatcctccatctgttagatttcaaacaaggattaacatgacatgtgtcaatcaagaaactggagtggttgagccacatttgtttcctatgcttgctaattggaaacgtgagcgtacaatggaagacatt

SEQ ID NO: 48613 - DNA, 365 bp, Glycine max
  Clone ID: LIB3107-033-Q1-K1-C9
gaagggattgtcttctggaattccggcaattgctgcttttggtctttcaaaataaaaatgctaacagttttatcattcaaaaggaaatatgttcaagcgtcttttaatatgaaatttagaagacgattttacgttattataaaactaacaatttttatccttaaaaaaaactaaattttaatttatttatagttaaaatcactcaaactttaaactcgtttttttttttactccgcttggatgattgaagccacattatttagtcttggttttttttctagaagcaatgagactaaccattaaagtatagaaattatcaagataggttttgtcttttctaacaaaatcttatatataatatataa

SEQ ID NO: 48614 - DNA, 374 bp, Glycine max
  Clone ID: LIB3107-033-Q1-K1-D1
ggatatggcctacatagtgtatttcaccctgggcctcgggtaccttctcccatggaacgctttcatcactgccggtgattacttgtcctatctctaccccgatgccagcgttgaccgcatcttcgccgtcgtttacatgttgatcggcctcgtggggatctccctcataatcttctacagccacaagtccaacgcctatgtgaggatcaacgttggcctcgccctcttcgtcgcttctctcctcatcatcccccttctcgacgccttttatctcaagggtagggtcggcttgtatagcggcttctacgtcaccgccggcgccgttggactttccgccgtgggcgatgcgttggtgcatggctccattgtgggct

SEQ ID NO: 48615 - DNA, 400 bp, Glycine max
  Clone ID: LIB3107-033-Q1-K1-D10
gagtgcacaagtgagtttgttgatcgagataactagaaacagtgtgatgaaaatgaaggtccttgttttcttcgttgctacaattttggtagcatggcaatgccatgcgtacgatatgttccctctccgaatgaacactggctatggtgcccgtactccggaggtgaaatgcgcaagttggaggcttgctgtggaagcacacaacatctttggctttgagaccattcctgaagagtgcgttgaagcaacaaaggaatacatccatggcgaacaatatagatcagactccaaaacagttaaccaacaagcttacttttatgccagagacctcgaagtccattccaaggacacatttgtgttcagtatagatggcaccgtactctctaatattccatactac

SEQ ID NO: 48616 - DNA, 413 bp, Glycine max
  Clone ID: LIB3107-033-Q1-K1-D11
attggacagaaggagggtctctgagaaacgttcccgttggaggtggctctaggaaaaacaagagggtcacctcatcaaaggttcctgacttgaatccaccaattagcctctcatcagtctcagccatttcttcccaaaaccctaaaatgcaaggagtccatgaccttaatctggcttttcctgcagctatggacaagtatcatcatggcacgtctccgtatgttgagatgccaaaacttgaaattggtggtgatcacagtactagtcatcatagtcaccaccatagccatagcccttcttctgcagttgagctactacggtctggcatggattctaggggtttgaatccttatgctcctaattccttgatgtcaggctcagatcattccctttatacacctggctatcccatg

SEQ ID NO: 48617 - DNA, 407 bp, Glycine max
  Clone ID: LIB3107-033-Q1-K1-D12
gacacaccaaaccaaagtaagagtgagcaacttccaacaccatagtgaaatggcttccaaggctgcacttctcttgtgtttcaatgttctcttcttcaccgtggttagctccacatatgtgccatgcaacccaccccccaaaactccaaaacacccacctgtcccaaagccaccttccccaaagcaagcaagttgccccaaagacactattaagtttggtgtgtgtgctgatgtgttaggtttgatcaacgtgcaacttgggaagccaccaaagaccccatgctacaacctcattgagggtctcgctgatcttgaagctgcagtgtgcctctgcactgctctcaaagctaatgtgttgggcatcaacctcaatgttccagtgaacttgagcttgctactcaactact

SEQ ID NO: 48618 - DNA, 385 bp, Glycine max
  Clone ID: LIB3107-033-Q1-K1-D2
ggagagagaggggacatttaatattttctttctgaaaaacaaaatgggtcatatcagcaaatttgcgagaagatgatggtcactgtgatattgttccactcttgatgcttcttttgggtgttcaggttagtgaggcagaaacaacctgttatagaaaaagaacaaattttcccatctcattcacagctcctctcagtgggtttgatttggtgtgattattaccccatgctcctcttcctcctcctcttgttatgttatctcttcaacttcaacctacacggatatccacaaaaaaacgaactttttggttggaccactccagttcaagcataatggagctcctttcttgagatatatcaactgggttttgtgcaacttttctctt

SEQ ID NO: 48619 - DNA, 400 bp, Glycine max
  Clone ID: LIB3107-033-Q1-K1-D4
gatttacaaagttgtaatcgattaccatgagcatgtaatcgattaccaatgttttaaaatgttagatttcaaatttcatgagttacaactagtgataaaacattttcaaatcattttaaacttgtgtaatcgattacacaatacttgtaatcaattatcagagtttctaaacgttttgattttcaaattttaacatgaagagtcacatttgttgatgtgtaattgcttacaccttgatggtaatcgattatcagtaactgatttcaaaaaataaattatcaaaagtcacaattcttaaagtgacttatttctgaagagttttttaaaagtcataacttttaaagtaactagttttcaaaaagagtcacaacttttaaaaggtgactagttttaaagaaat

SEQ ID NO: 48620 - DNA, 391 bp, Glycine max
  Clone ID: LIB3107-033-Q1-K1-D5
gaagggattgtcttctggaattccggcaattgctgcttttggtctttcaaaataaaaatgctaacagttttatcattcaaaaggaaatatgttcaagcgtcttttaatatgaaatttagaagacgattttacgttattataaaactaacaatttttatccttaaaaaaaactaaattttaatttatttatagttaaaatcactcaaactttaaactcgtttttttttttactccgcttggatgattgaagccacattatttagtcttggttttttttctagaagcaatgagactaaccattaaagtatagaaattatcaagataggttttgtcttttctaacaaaatcttatatataatatataattgtgttggtgagatgattaattaaa

SEQ ID NO: 48621 - DNA, 390 bp, Glycine max
  Clone ID: LIB3107-033-Q1-K1-D6
atactccaaaaactgcagtattttagaattagtgagaattaggaaaaatcgattttgaatcagtctttttaaaaagtaaattgttttttatttaatctaaaatattttaaatataaataaaaatacataaatattttacataattatcaattattctgttaacggttattaatctttatcttgtgaaccatataattaaattatttatacaaattttataatttttcagaccctaatcttactattttattacttaaaatattatataatattaaaatatataaaattaattcaacatgattcaacacgtattgaatcattaaagcttaaaccagtgtcttcatcaatttactcatcagttcaaatttaaacatattggattatatatta

SEQ ID NO: 48622 - DNA, 404 bp, Glycine max
  Clone ID: LIB3107-033-Q1-K1-D7
tcatagtataaaccaacattagaattttcagctcaatgaggcaagattaattattttcaaaataaaataattgtctttacatgaaattgatgcaaagtatgttgttatgcctttttatgtgtcctaaacattaataaggccaattatgttgaaagcaactatagaaatattgcatgtatagaaagtaggaaaaaaaacagaatgatggtacacatatccaataggttggtaattcagatatgcttatactttctttctaaaattgcatttctttgaatttcctaaaattgcattttttttctttcccttgaacagtcactattaccaatgggtaaactataaaattaaatgtatagtataattgtatacatttaatgataaatatgtaaaacttattaaatgat

SEQ ID NO: 48623 - DNA, 402 bp, Glycine max
  Clone ID: LIB3107-033-Q1-K1-D8
ggacgcaccttgttttctctgcattgtttcgaattccatggaggagtcttcgtacaccggtcttcccactagccacttgctcggttcagttcctgctgtcataactgaagaaaataatgccacgaaacatgtggccaccggtgcaaatatgcaaacattccctcccaacaatggaggagacagaggaccaggacatcaaactcttggcagtcctactgaagcttttgaacaacagccagcaaacaactggaggggaatctttagcatgtcatcatattcagagtatttcaatgtagacacagatgttgtcttaatcagattgataagttccttgaatccagttgctgcagactttttcagcaagatagatgctaaccctgatttatatgggcttatatggat

SEQ ID NO: 48624 - DNA, 410 bp, Glycine max
  unsure (1)..(410): unsure at all n locations
  Clone ID: LIB3107-033-Q1-K1-E1
gcttttggaaagccacagggtacttgtgctagagtggctattggacaggtccttctttctgtccgctgcaaggacagcaacagccatcatgcccaggaggcccttcgccgtgccaagttcaagttccctggtcgtcaaaagattattgttagcaggaaatggggcttcaccaagtttagtcgttctgattatctcaagttcaagtcagagaatagaattgtgcccgatggtgtgaatgctaagcttcttggttgccatggaccattggccaaccgtgaacccggaagggcctttttggatactgctactggttcttagtctgtttgttaatttggaaatactagactttggattactttagttttgcaagagtgaatttgagttattgtcagaacatttncaattactta

SEQ ID NO: 48625 - DNA, 361 bp, Glycine max
  Clone ID: LIB3107-033-Q1-K1-E12
aatgatgaggctgcagaaacaaaggcagttgagccagaacccccagtttatgcaaataagatggaggctaaagatgcattcaaagcactcttggagtctgtaaatgttggatctgactggacttgggatcggtccatgcgtttaataattaatgataagaggtatggtgccttaaaaacacttggtgaaaggaagcaagctttcaatgagtacttaaatcagaggaaaaaacaagaagctgaagaaaagcgtatgaaacagaaaaaagcccgggaggattttaaaaaaatgttagaagaatccacggacttgacttcatccgctagatggagcaaagcagtgtccatatttgaaaatgatg

SEQ ID NO: 48626 - DNA, 385 bp, Glycine max
  Clone ID: LIB3107-033-Q1-K1-E2
ggagagaaagagtgaggagagaattacagagcattttccaacacgattacacgaccgaatcaaaccctctctttctctccgaagctgcgtttaatatcttactcgccttagattgttcttctctttcattatactgttctcttttcgatttgagggaacagtacaagagtgtgaggatcggttaacccaactgcacaggtagtcactaaaataatggagtctcacgatgagactggatgccaggctcctgaacgccccattctttgcattaataattgtggcttctttggaagagcagctaccatgaacatgtgttccaagtgttacaaggacatgctgttgaaacaggagcaggacaattttgcaacatcgtcgggtgaaaaca

SEQ ID NO: 48627 - DNA, 394 bp, Glycine max
  Clone ID: LIB3107-033-Q1-K1-E3
gaagggattgtcttctggaattccggcaattgctgcttttggtctttcaaaataaaaatgctaacagttttatcattcaaaaggaaatatgttcaagcgtcttttaatatgaaatttagaagacgattttacgttattataaaactaacaatttttatccttaaaaaaaactaaattttaatttatttatagttaaaatcactcaaactttaaactcgtttttttttttactccgcttggatgattgaagccacattatttagtcttggttttttttctagaagcaatgagactaaccattaaagtatagaaattatcaagataggttttgtcttttctaacaaaatcttatatataatatataattgtgttggtgagatgattaattaaatgt

SEQ ID NO: 48628 - DNA, 393 bp, Glycine max
  Clone ID: LIB3107-033-Q1-K1-E4
gatccacatcctccacaacacaactccactcttagctgccattggtttttcttcttccatttctcttcctttctaagcttttttcgattacccatttggagattctgtcctaatggctcttgctccttccaaagtttcctccttttccgggttttctcccaaacccagtgttggggatgctctgaaaaacccaacttgctctgtttctctgagctttgcgaatgtgaaacttggaagcagaaaccttagggtttgtgcctcaactgtgcctctctcaggggtgattttcgaaccctttgaggaggttaagaagggtgaacttgcttgtccaacggcttcccaagtctcgcttgctcgtcagaactactctgatgagtgtgaatctgcctttat

SEQ ID NO: 48629 - DNA, 401 bp, Glycine max
  Clone ID: LIB3107-033-Q1-K1-E5
gggggccaagactgttgtcacggatgaagccacacacactgagagaaggcttcaccaaatgatgtttgctgatagggattatgaacgagttaatgatgatgatgacttcgctgagaagcaaaggcctaatgtgaatgttgtgaattggtctgataaagattattctgtggttactattcagtgtaaggataggccaaagcttctctttgacacagtttgtactttgacagacatgcagtatgtggtttttcatgcaaacattgatgctgaggggccagaagcatatcaggaatactacatcaagcatatagatgggtcccctgtgaaatcagatgcagaaagacaaagagtgatacaatgtcttgcagctgcaattgaaagaagagtttctgagggtttga

SEQ ID NO: 48630 - DNA, 350 bp, Glycine max
  Clone ID: LIB3107-033-Q1-K1-E6
cttccaagggaccacttaccattggtggttaacccttaaggtccattaggaaagtgattttgggcctaattaaaccccaaaggttagttaaggggttaagagaaggaatattttcttcccctctttatattaacggattagttaggctaaaaatactaatagaatatcgtatcatatattatatcagtctcaatcgatggctttgttatatgttagatattgatacgcttcaagcgctctatagatgtgtgagattaatcttatttgaagatagccttagattagttgagatgggatttggatggatgccgtatacggtggacttttatgctttttgtttgagtgatttg

SEQ ID NO: 48631 - DNA, 423 bp, Glycine max
  Clone ID: LIB3107-033-Q1-K1-E7
gacagagaaaccaaagtttgatgtaagtcctttttcttttcatatttcgtgaatttcgaaattcacgtcaaatttcaattgcgtcatctcatttttccgcccaaaacaaatcctccctccgcgctcgtcaaggggagaaagagaaaagacaaaacgagcagagaaaatgacggaaagtgagggaaagtgtaagaaaatgggcaaagagaagagaggtagaagcttcatcgccttcaccggagctgcggcggtgcttggaattgcggcgaacctagctatcaccgcaatcaagtaccagaaggcaaaaaatgctaagaagaaagatcttgcaggttccaaggtgcgcgttaatctctctgcatctgagattcttaagctggctgagcaaatcattgctaactcaaacaaggcccataattctgt

SEQ ID NO: 48632 - DNA, 406 bp, Glycine max
  unsure (1)..(406): unsure at all n locations
  Clone ID: LIB3107-033-Q1-K1-E8
aagagttactgtaatgtaaggaagggaaattgtgtgcaatctcaagaaactgcaaaggaatgtcaatgcaatttgctctaaaaataaacaaacaaataaacgcttctctaacctctttaataaagcacaaacaagaagtactacaacaagatctcatcagtacacaagtattcgtagcaagggaaaactttatccttcaagcaagttcacacaatataacttggataagttgaagcctaatgtgatttagggataaccaaggtctcccgaagcaccaaataaaaaaggagaaaagaaaaagaaatcatgtatatgaaatatccacaagcatatcaacattgttaacactaataccatggttntaaatngcggtcgcgactgagttgcagtgagctagaaaccttta

SEQ ID NO: 48633 - DNA, 392 bp, Glycine max
  Clone ID: LIB3107-033-Q1-K1-E9
gttatcaagaaggcgaacctcgtcacgtacaggggacccacgatggtcgccaacacgctccacgccgccgcgatcctgcttagggagctcggggattgggactggttcatcaatctcagcgcctccgattacccacttgtcacacaggatgatctgctgcacacgttttcctacttgccgcgggatctgaatttcattgatcatacgagtgacattggatggaaagatcatcatcgtgccaggccgatcatcgttgatccggggttgtatatgaataagaagcaagatgtgttttgggttacgcagaggaggagtaggccaacggctttcaagctttttacaagctcaacttggaggccctgtcaaagcatccccgattactgatattggga

SEQ ID NO: 48634 - DNA, 436 bp, Glycine max
  Clone ID: LIB3107-033-Q1-K1-F1
aagacgacagaaggggaaggtgcaagagtttgttgtgagctataagctagtttatcgtgaggagaatatgaagttgtttgttttctttgttgctgcagtagttttggtagcatggccatgccatggcgcaggctaccaaaggttccctctccgaatgaaaactggctatggtgagcgttcttcggaggtaaaatgcgcaagttttaggcttgctgtggaagcacacaacatccgagcctttaaaaccattcctgaagagtgcgttgaaccaacaaaggactacattaatggcgaacaatttagatcagactctaaaacagttaaccaacaagctttcttttatgctagtgaacgcgaagtccatcacaacgacatatttatattcggcatagattacaccgtactctctaatatcccatactatgaaaaacatgga

SEQ ID NO: 48635 - DNA, 410 bp, Glycine max
  Clone ID: LIB3107-033-Q1-K1-F10
tagcctctgtggttcttccctaggttgggattatcacaaccttggagttctcaacgtggacaaaatgtctttaagtactatactatacttttgtttctctttatatttctacctataatgcatttgttacctccttggataagatattaatgcttataactagctaaagtgttgcaatgcaatgattggtggtgatattcaatatgcagtgccagctatggagggaagtactacaccatcactctcatcacctcaacactctgatttctcaactgggtatctcgaagatgctttgattgaatcatgtgagcgttcaaaacgtagacgtgtgttgccatgtgctactgatgaacatagcaagagtttcattgatgaccttgagcaggtacaattagctatactatatatac

SEQ ID NO: 48636 - DNA, 380 bp, Glycine max
  Clone ID: LIB3107-033-Q1-K1-F11
ggtggcagagagcgaacccaaaactagagctacctgcccttcaaaccttccactcttctctccttttccaatcaagggaataatatttcttagagatattccgaaaccatggctcacgccaatcctatgatttttgttgttggaattctaggtaaccttgtctccttctgttgctttctagcaccagtaccaacattctatcgagtttgtaagaagaaaaccacggaaggtttccaatcacttccttacgtggctgcactcttcacttcaatgctttggatattttatgcttacataaagacgggcgaaatacttctcatcaccattaacgcattcggttgtttcatagagacaagttaccttgtcatctatatcactta

SEQ ID NO: 48637 - DNA, 377 bp, Glycine max
  Clone ID: LIB3107-033-Q1-K1-F12
atgggaaagcttgtgcagttgatggtgcaaaaaaaggcagagtacgtgagcgtgaacgtggtcgggctgttccagcccctgaagccaacgcagagatccaaacaaacttagataggtggagagttgtgacccatgcaaatgcgaaaagcaagagtgagaaattttcaccttctcatcaagatggagctgttggatacccacaagatgcatcaaataaaggacctgtttcatttggcgccccagacactttcttctctttagggatatttaattcaaaaccttctggacatgttaggaatcatgctgctgcagggcttaacagagggaggagaacttagaaagatgagtcccagatggcatcatcatggaaattcatg

SEQ ID NO: 48638 - DNA, 402 bp, Glycine max
  unsure (1)..(402): unsure at all n locations
  Clone ID: LIB3107-033-Q1-K1-F2
gatgagttctaatatatcattcaaaagtttttgaaatgttgtcaccccttcttctatttctatgcctaactcttcctttgtttttgttgtccttcttcaaataccgtaaaaccttcaagaatccaccacttccaccaggtcctagaggccttcccataatagggaatcttcatcaactagatagtccttctcttcatgagcagctatggtatctctcaaagaaatatggtcctttattttcccttcaatttggattaaggccagccatagttgtttcctctccaaaattggccaaagaggtaatgaaagacaatgaccttgagtgctgtggacgacctaaattactaggccaacagaaactaacctataatgggttagacatgggattttnctcatacgata

SEQ ID NO: 48639 - DNA, 382 bp, Glycine max
  Clone ID: LIB3107-033-Q1-K1-F3
ggtgagtgagacaccgatagatagagagcgcggcataacctaaacctatctttcttctctctctgtgtgtgcgcttcaacggcaaccagaagcagccatggccactgcaaggactgtgaaggatgtttcacctcatgagttcgttaaggcgtactcctctcacctcaagcgatccggcaagatggagctgccagagtggactgatattgtgaaaactgcaagatttaaggagttggctccttatgatcctgactggtactatgtcagagctgcttccatggcaagaaagatctacttgagaggaggacttggtgttggtgcctttcagaggatttatggtgggagcaagaggaatggtagtcgccctcctcatttttgcaag

SEQ ID NO: 48640 - DNA, 401 bp, Glycine max
  Clone ID: LIB3107-033-Q1-K1-F4
gattccactgagtgtagtaatcaatcatcttttgtttgttcttcagtactttagtgtgtgatttaattccaagattttgagaatgtctagctgtgggtgtggaagtagctgcaactgtggcagcaactgcggttgcaacaagtactcttttgacttgagctatgttgagaagacaaccacagagactcttgttttgggtgttgggtctgtgaaggcccaattggagggtgctgaaatgggtgttgcagctgagaacggtggctgcaactgtggatcaagctgcacctgcgacccatgcaactgcaagtgaggtcaagatttataaccttgaagcaaagataactgtaatatatgtatcaacaaataataagaattacgtgttgtggttaaataagtgatca

SEQ ID NO: 48641 - DNA, 244 bp, Glycine max
  Clone ID: LIB3107-033-Q1-K1-F5
cgttaatacgacagaacgggatagtgctagagtttctcctgagctataaactagtctggcgagaggagaatatgaagttgtctgttttctttggtgctcctaaaggttacctaaaatggccatggcctcttgcaagctttcaaaggatatctatccttatgaaaactgttaagtcgttatcctttttactaagtcaaatccgcaagtttaagctttcagtggaaacacacatcatacaaccctt

SEQ ID NO: 48642 - DNA, 166 bp, Glycine max
  Clone ID: LIB3107-033-Q1-K1-F6
gagtccttgttccttgtctcaaaaacaaagtttttacatttcatataactctcatcgttaattcataatgacatgcacggtccctagatagtaaaagatgtgctcggtagcgtgccggaaaaattgaattgtcgaaatctttctaatgtattttcactgatggtac

SEQ ID NO: 48643 - DNA, 414 bp, Glycine max
  Clone ID: LIB3107-033-Q1-K1-F7
atgggttgaatttaactgtcatgattgtgtggaatttaactgtcaataaaaggagtgtaaaaatttacttatgaatttatttagtaaaaaagttcataaagttgagatttatggttactcttatggctgcaaaaatttagaaaaaatgtgtgtgtttgttataggagatgttcatgaaatactggtcgagttggaaggaatgggtggtggcggaaaggttcagctggaggtatgtttcttttattagaaaagaagaaacccaagaatacagatttataaaatggggaaaagttattgaccatttgaattttagttgacagcatgatgcctatgcattatatttcgtgtataatatagtggaaaaattatttctctgttgtgctttgttacaacttcatttgccaatatatctgg

SEQ ID NO: 48644 - DNA, 389 bp, Glycine max
  Clone ID: LIB3107-033-Q1-K1-F8
gtcagatttatcttgacgggagcaagagtaataataatgtgtataatgctacagcagcgggtatggtaaaaaaaatcatacgaaaagaaaaagggggatacgaaataactatagtggatgcattggatgggcgtgaagtgattgatattatacctccaggaccagaacttcttgtttcagaaggtgaatctatcaaacttgatcagccattaacaagtaatccaaatgtgggtggatttggtcagggggatgcggaaatagtacttcaagatccgttacgtgtccaaggtctcttgttcttcttcgcatctattattttagcacaaatctttttagttcttaagaagaaacaatttgagaaagttcaattgtccgaaatgaatttctag

SEQ ID NO: 48645 - DNA, 376 bp, Glycine max
  Clone ID: LIB3107-033-Q1-K1-F9
gtgattggagggtatcaattggaggatgtgttggtgcagattgattttgatacttccatggtgggattcagtccttcgcttctgacgaagcatgctacttgctctcatttcaaaccctagttttcggtgaatcgtgatgattatagtttattattatccataccacatagtttttctttagattaagaagagttttgaggagtttaacacgttctgtaataacccttttattttttttttctttcttttttgctctcctgcggtattatctgtataaactgcttaagtggactatgtttaaatgcaattgcatttttgatggcatttttatttgaaattgaaatacttctccagtaaggaaaatttggctgagcat

SEQ ID NO: 48646 - DNA, 393 bp, Glycine max
  Clone ID: LIB3107-033-Q1-K1-G1
tttacaggtggtgacaaaccatatctaatcactggttctgatgatcacactgctaaggtatgggattatcagaccaaaagttgtgtccagaccctagaaggtcacacacacaatgtatctgctgtatgctttcatcctgaacttcctataatcattactggttctgaggatggcacagtacgcatatggcactccacaacttataggcttgagaacacattaaactatggtcttgaaagagtctgggctattggatacttgaagagttctcgtcgggttgtgattggctatgatgaaggaacaattatggtcaaacttggtcgagaagtacctgtggctagcatggacaacagtgggaaaattatttggtctaagcataatgaaattcagact

SEQ ID NO: 48647 - DNA, 397 bp, Glycine max
  Clone ID: LIB3107-033-Q1-K1-G10
gatgaccagaggaaaataatttcttttaataaaaaaaacttagaatcgaaacgaaaaatcgccatgaatcccaaaatcctcttcgtgtttgctctgcttctgaatctcgtatccaattcgttccaaaaccctaaccctaaaacccccaaatcaacgtcatcgcaggctcacgtggagctcatcaaccacggcttacccgccggtcttctccccgccaccaccgtcttgggctacgccgtgaaccgtacctccggtgactttaccgtcaagctcggcggcgcgtgcaagatcacgctcccgccggacaactacgtcgccacctattccgacaccatcacagggaagatcgtgaaggggaaaatcgctgaactcgaggggattaaggttcgcgcgttct

SEQ ID NO: 48648 - DNA, 402 bp, Glycine max
  Clone ID: LIB3107-033-Q1-K1-G12
gggcagtgtatctgagtaatatcactgtccctttccctctccctttcatcagaaacacaaacaaaacaccgattcactatattaccagatcggactcaattcctgaaccgatgaagttgaagccgcggtgaaccaaaccatcatcatcgcgttaccggaataatcgacccatcatcaattagatcgaaatgaaggatgaggacgggcttccgacgacgaccgcggttacaaagaaggaaaacttggattcgagtctgtttggaaaaggcaggtacaaattctgggcgttagcggccatcttgcttctggcgttctggtccatgttcaccggtaccgtctcgctccgctggtccggcactctcaattccctttccaacgacatcgacactcccatccacgacg

SEQ ID NO: 48649 - DNA, 406 bp, Glycine max
  Clone ID: LIB3107-033-Q1-K1-G2
catgtataccttacatcacattgtcttctttaagtaacgactttttttttatgtgcttattttctcccttaatgatgacctaattatatctaacttatgtttttaattttcttttaaaatctaatataagtagtgtcatgtatagtggaacgaagtacctatattgttaaacaaaatgtttatgcaaataatatttggatattgataaagtgtaaatgaattaaattatttacaaattagttgaacttgcatgcatggttcgttcattcttaattaagtccattttaattagctcaacaaatgatatcgatcttaaagttggactcaattatttaacaagttatgctttagttttatagggtttcacattaataactggttcgtacctatatatatatttgatagc

SEQ ID NO: 48650 - DNA, 248 bp, Glycine max
  Clone ID: LIB3107-033-Q1-K1-G3
tgtaagcataccctagtctttgatgaaagcctttggcaacaagcctgtctatatattcgataactcgtccatctgggtataaattaacccttaaaacccatttgctaccaatgggaaacttttgtgagaggtataactatccagagtcctagttcttattgttcatagaagcttcatattctgctctcattgctgcaatgtcacatatgatatgcaatagcttgactttgttgatttggtcaatttga

SEQ ID NO: 48651 - DNA, 390 bp, Glycine max
  Clone ID: LIB3107-033-Q1-K1-G5
aattcgagcggccccttttttttttgtttttttttttttttttttttctctattcttcttttgtgttggtcaccttgatcttattttaatggttttgatttgagattgaaaattgttggagtggaattttgatttttccatgcgaagatctgattaaagcagttaagttcatttagtaattaaattaattaaactcacatttcttaagaatttggataaaattgctgaaaggcataactttgcatgcatgtctgcatttctttgtttttattgggcatggttcttctagttttaagtttattatttttctaggcttcacaaaaattgagtatcaaggagttaaagaatttaagacaaaataccaaattaaagtagatcaatttttttcat

SEQ ID NO: 48652 - DNA, 343 bp, Glycine max
  Clone ID: LIB3107-033-Q1-K1-G6
aaacggacctcggccgtgaacaagagggctttaagagaagacggcggcggtggtggcggcggcggagcgatgaggtaccgcggcgtgaggcgcaggccgtgggggcgttacgcggcggagataagggaccctcaatcgaaggagcggcgatggctgggaaccttcgacacggcggaggaagccgcttgcgcctacgactgcgctgctagagccatgaggggtctcaaagctcgcaccaactttgtttacccaactgctccgcaaccttcttccgccaccaccgaacacttgttccctaacttcaacatcaacaacgactttcacaaactctcacttttaaatt

SEQ ID NO: 48653 - DNA, 405 bp, Glycine max
  Clone ID: LIB3107-033-Q1-K1-G7
catcaagctgctggagtttccatttatgagtaatagcaagagtcaaacgaattttgacagtaacaagtttgattacaggtgtgaaagtctcattgtaatcatacccaagtctttgatgaaagcctttggcaacaagcctggctttatatttgctaactgtaccatctgggttttttttaacccttaaaacccatttgcaaccaatgggagactcttgagagaggtaaatcaacaagtgtccaagtctgattgttaagaagagcatcatattctgctctcattgctgcatgccagatgggacatgcaagagctgactttgttgatttggtcagcatgagtaaggagtgtaggttgaattctgggtttgacaatcccagctttagctcttgtgcacatagagtgaat

SEQ ID NO: 48654 - DNA, 392 bp, Glycine max
  unsure (1)..(392): unsure at all n locations
  Clone ID: LIB3107-033-Q1-K1-G8
ggggttccatgttcgcacggagcaaaaccaaaaacacggtgtggcgctgcggatctctctctcggtcgttgctctccgccgcgagaaccactccaaatcgttcctccatttctctccttcactgtccttcttcgccttccctacgctctcatcttctccaccctcgccgtcccctcattacactccttaggactgtgggaattctcgggtgcacgtagtcgctgattcctctacacagcgctgacgcctncgctcgtctcacttctcacatttccatcgaatcgcgcgcttgctgcaaattctcgcagggtacttgttccttctaaatntctatctctcttgccctaattaggcatgctttctgtcattatgatgtattttcattattatat

SEQ ID NO: 48655 - DNA, 380 bp, Glycine max
  Clone ID: LIB3107-033-Q1-K1-G9
ggtggcagagagcgaacccaaaactagagctaccttcccttcaaaccttccactcttctctccttttccaatcaagggaataatatttcttagagatattccgaaaccatggctcacgccaatcctatgatttttgttgttggaattctaggtaaccttgtctccttctgttgctttctagcaccagtaccaacattctatcgagtttgtaagaagaaaaccacggaaggtttccaatcacttccttacgtggctgcactcttcacttcaatgctttggatattttatgcttacataaagacgggcgaaatacttctcatcaccattaacgcattcggttgtttcatagagacagtttaccttgtcatctatatcactta

SEQ ID NO: 48656 - DNA, 403 bp, Glycine max
  Clone ID: LIB3107-033-Q1-K1-H1
gatagcagcatcatacaaagcattgaattcaaaaactaagttcatttcttgtgctttgctttattcctcaaaaccaaacatgtcgaacacatgcggcaactgtgactgcgctgacaagactaactgcaccaagggaaacagctatggtgttatagtagagactgagaagagctacatcgagactgttgacatggatgttccagcagctgagcatgatgggaagtgcaagtgtggcactaactgcacttgcacggactgcacttgtggccattaaggaatatgtatgaaaatgtaattgccatgtgtttggcaatacaaatctccaaataatgtaatcttcgtatgaataaatgtgtgctgatatcctacttcagggtctgtgtagtcatgcaatctgaatcat

SEQ ID NO: 48657 - DNA, 177 bp, Glycine max
  Clone ID: LIB3107-033-Q1-K1-H10
taatatcactgtcccttttccttttccttttatcataaacacaatcgaatacaggggaatcactggattaccatatccgaatcaattactgaaccaattaactttaaacctcggctaaccaaaccatcatcattctcttacccgaataatcgacccatcattaattaaatctaaatt

SEQ ID NO: 48658 - DNA, 332 bp, Glycine max
  Clone ID: LIB3107-033-Q1-K1-H11
gaccacaccatactgtgttttattcttctctccctccttcattttcatttacttctctgggggtatataactattattctttttttttttttaaacataaaaattgtttaaatcttttgccatgggaacccagattttgcggcctcaggactgtttcgtagaacgaatcatgtctcctcccgctgacttttcccggcggaggagttccggtaactactgtaattattattaccacagcaaccatgttgccacttccaggtcgtgccggaagccggttgcccgacccgataaaaagaaacgggttgttccggcttctggcatgccgcttgtgg

SEQ ID NO: 48659 - DNA, 414 bp, Glycine max
  Clone ID: LIB3107-033-Q1-K1-H2
gtgctgaatgcacatagtgacatattctctcctttgcttctcaatatattccagagctgctttgcttaaaatgttttctccctatggaaagataatttctgaggacttcttatggcacacgcgtggcccaaaacgtggggagccacgtggttttgcttttatccagtatagcacaaaagaggtaagttgattgcatacattagttacttcactttctagcaatttctgatttccattgttaaagtgagaatgcaggaagcagaattagccaaggagaaaatgcatgggaggttagcttgcagccggccattggtggttcgtcttgccggtgataagtgcatgttggaaacagttgatagctctacaaaagcagctggtgaagggcacaagatgcatctcactggtggtggtggt

SEQ ID NO: 48660 - DNA, 416 bp, Glycine max
  Clone ID: LIB3107-033-Q1-K1-H3
gtctctatatatataagagacattataactttcagtttcaaaacaaagaaattcattactttgatgattaagtattgttgttggtgctaagggtcgaaggttttaatcttatttatttaacattttgataatttatatgtctattttgcatcacgttacaccagcatcaagtcaatgtcatgcataagaaccaccatgcatttaactcatttttctaaaagtcattttcttaagttgttcatgttctaaacaaattagctatcgtgagtgtaaaataaatacatagttttttaggcaaatgttgggccaaattttcaaggcaatgaacaaaacttgtgactatttaataatttaaacaatcattttaaaacaaaagatgatcataatatgtgaagaccaatataaatgaaagaacg

SEQ ID NO: 48661 - DNA, 403 bp, Glycine max
  Clone ID: LIB3107-033-Q1-K1-H4
gggtgtggcactcaaacattgtttgttgtaggaagaggaatcttgagaaatggcaggggacagcaagagcaagattctgttcatcggagggactggttacatcggaaaattcatcgtggaagccagcgccaaagctggccacccaactttccttttggtgagggagtccactctctccaaccccgcaaaatcacccctcatcgacaatttcaaaggcctcggtgtcaatcttgttttaggagatctatacgatcaccaaagtttggtgagtgctataaagcaggtcgatgtggtaatttctactgtaggacacctgcagctagctgatcaagataagatcatttctgcaattaaagaagcaggaaatgttaagaagttctatccatctgagtttggaaatgat

SEQ ID NO: 48662 - DNA, 402 bp, Glycine max
  Clone ID: LIB3107-033-Q1-K1-H5
ttttcccttatcttctatcctctcctgtcttgctgataattaataatatctggggtcacggtcttgccttgcttcattaacaacttgtgtgtttagattatacttatctcactcaaatcatggttcagagggggcaaatttgattttattttcaattaccatgtttggcataattttatttgggatatgtgctacgagattttggtgtcgaattatgtttaaactgaggtaagaaatagttatgttttagcaccgcattagctttgtaaaggaaatactaatactaataaacaatatgtttccggtgaaagcatttatagtatgctcatgattgtttttcctttttttatagacgcaacactagaaaccaaaacataaagggaaatcatgtacataccattt

SEQ ID NO: 48663 - DNA, 406 bp, Glycine max
  Clone ID: LIB3107-033-Q1-K1-H6
aggggtaaggcatggaattgtgatgttggatcttgagatcctcacacatttccttcatcatcttgttatttaggttggtggcattgatcgcgataatcttcctgggcaacccataccagcagattatctctttcttgatgaacttgaccaccatgcttctcgtcacgctagagtatgaagcagcttcaacccacttggtgaagtagtcgatcacaaccaagatgaagtgatgttccttcgaagccttgggcttgatggctccgattacatctgttccccacatagagaagggccatggcgctgccaatacgttcaaaggcatgggcagagcattgacattgtcagcgaaagcttggcacttgtggcatttccttacacggatgcaacattcgcttttcatggtgag

SEQ ID NO: 48664 - DNA, 410 bp, Glycine max
  Clone ID: LIB3107-033-Q1-K1-H7
ttttcccttatcttctatcctctcctctcttgctaataattaataatatctttggtcacggtcttgccttgcttcattaacaacttgtgtgtttagattatacttatctcactcaaatcatggttcagagggggcaaatttgattttattttcaattaccatgtttggcataattttatttgggatatgtgctacgagattttggtgtcgaattatgtttaaactgaggtaagaaatagttatgttttagcaccgcattagctttgtaaaggaaatactaatactaataaacaatatgtttccggtgaaagcatttatagtatgctcatgattgtttttcctttttttatagacgcaacactagaaaccaaaacataaagggaaatcatgtacataccatttgaattaac

SEQ ID NO: 48665 - DNA, 386 bp, Glycine max
  Clone ID: LIB3107-033-Q1-K1-H9
gaacacaaccacctctcacctcaaatgacttcccattctctcttttgaaatcactacacaacaccaagaaatccaaatctaattcctcatctcgtttgatatcctgattcctactctcttagtttccactctattgtatggatgcatgtgatgaactgatgatatatgcatttgcttttatagtttgcttggccaccaagtaacgacaaagagaaacagtttctaactttttcttggctggttgtaaataatctctcttttctctattggatcatagctttctgcaccctcttcctcttaggttcccatatttttctctcttgtcgtggacctcaactttgtaggctcgccttaaaaaaaaccttcttttctttttggtgggggtg

SEQ ID NO: 48666 - DNA, 311 bp, Glycine max
  Clone ID: LIB3107-034-Q1-K1-A10
aagtctactgtggaggatttaccacctggatgggtgaaagaattaaagattaggaagaacagcaagggcattcggaaagatccgttttatatagatccagcgagtggatatgtattccgttccaagaaggatgtacttcggtatcttgaatctggtgatatacgttcatgtgcatttaagccaagtagaaaacaagtccaagatgaagacaatttaactccaccacctgctgccaagagacagaaactgaagcagtctgcacccgaacaacagctttcttcagccacagaaattcttgataaaagcaactt

SEQ ID NO: 48667 - DNA, 307 bp, Glycine max
  Clone ID: LIB3107-034-Q1-K1-A11
cagataataagtttaagatcgagattatcaatgagttgcctgccgacaaaattatcacagtatacagatgtggtcccttggtggatttgtgtcgggggccccatatacctaatacatcctttgtcaaagcaattgcgtgtttaaaggcttcatcagcatattggaggggggacaaagatcgggaaagtttacaaagagtttatggcatatcttatcctgatcagaaaagtctgaaggaatacttgcatcggctggaggaggctaaaaagtatgatcacaggattttgggtgtgaaacaggagcttat

SEQ ID NO: 48668 - DNA, 218 bp, Glycine max
  Clone ID: LIB3107-034-Q1-K1-A2
gaccgttccatttctcaacaactggggctacttgctactccaaccgcacttctgctccgcaattatcatgggcaaggtcaagatcggaatcaacggatttggaagaattggccgtttggtagccagagtggctctgcagagagacgatgttgaacctcgtgccgctaacgaccctttcatcaccaccgattacatgacatacatgtttaaatacgaca

SEQ ID NO: 48669 - DNA, 415 bp, Glycine max
  Clone ID: LIB3107-034-Q1-K1-A3
gaataggacttggttccatgatgtgattttattgtacgtacatttgttattttcaatgaaactcttattcagttagatattttctcatatggttttgtgcacatatttatttatttcgagaaaaaatcattcggtttagatatagaataaacatatggtttattcattaagttgagagctagtgttgagagacttgatatattgtggtacatggaagatactactcatcatcagaggacctatcgccacgactcatatattatgtttcttgttatggctgatgttgagttaaatggaccaagtgggagaatgttggaagcgcacgttcacttccacgtcctttttttattttattttattattttggaaaatttagttatttctgaatctggtccatttttcatccacattcaac

SEQ ID NO: 48670 - DNA, 56 bp, Glycine max
  unsure (1)..(56): unsure at all n locations
  Clone ID: LIB3107-034-Q1-K1-A4
gagacctcangtcaggcggggctacccgctgagtttaagcatatcaataagcgnng

SEQ ID NO: 48671 - DNA, 358 bp, Glycine max
  Clone ID: LIB3107-034-Q1-K1-A5
gactgtacaaggggaaagaacatgctgaagttgaattcattgttggacctatacccattgatgatggagatggcaaagaaatcgcaactgaaatcaaaacaaatctagcaagcaacaaaaccttctatactgattccaatggacgtgatttcattgaacgtgttcgagactatagaaaagactggcacttggaagtaaatcaacctgtagctggaaattattaccctatcaaccttgggatttacctgaaagataaaagcaaagagttttctatattggtagatagagctgtggggggctccagcatcatagatgggcaattggagctaatggttcataggaggttacttcaggatga

SEQ ID NO: 48672 - DNA, 350 bp, Glycine max
  Clone ID: LIB3107-034-Q1-K1-A9
ggttctagtgtgtgattgtttgttgttgtaactcggtcttcttcttttgctgttctgtgtttgtgtttgttttttctctcacctgaaaatgtcttgctgcggtggtaactgtggttgcggaagctcctgcaagtgcggcaacggctgcggaggctgcaagatgtacccagacttgagctacactgagtcaaccaccaccgagaccttggtcatgggagtggcacctgttaaggctcaatttgagggtgctgaaatgggtgtgcccgctgagaacgatggctgcaaatgtggaccaaactgctcccgcaacccctgcacttgcaagtgaggtgtttggagagcaagcttca

SEQ ID NO: 48673 - DNA, 322 bp, Glycine max
  Clone ID: LIB3107-034-Q1-K1-B10
aaggggtgcacaggtgagtttgttgatcgagataactagaaacagtgtgatgaaaatgaaggtccttgttttcttcgttgctacaattttggtagcatggcaatgccatgcgtacgatatgttccctctccgaatgaacactggctatggtgcccgtactccggaggtgaaatgcgcaagttggaggcttgcttgggaagcacacaacatctttggctttgagaccattcctgaagagtgcgttgaagcaacaaaggaatacatccatggcgaacaatatagatcagactccaaaacagttaaccaacaagcttacttttat

SEQ ID NO: 48674 - DNA, 368 bp, Glycine max
  unsure (1)..(368): unsure at all n locations
  Clone ID: LIB3107-034-Q1-K1-B11
ctctctctaaaaatctctaaacatgcaaaagcggcgagaattgcccaaactccccctccatttctgatttcagacttaaataggtggccttgttggtgcttgtccgcttagcgtgaatctggaccgctaagcgtgcattagtgaattttgacttagcgcgcgtcttctcgctcagtagatggactcaagtggtgcgcttagtgggatgacacctcgctcagtgaacatgcacaactcatccttcttccagattcttnctcgtgctcagccgcaacagtgttgcgctcatttgaaatcgtttcaaggtccaatgccttaacgatcctttttttttttacttttatcggntaaaacgaacccgttaaaaa

SEQ ID NO: 48675 - DNA, 365 bp, Glycine max
  Clone ID: LIB3107-034-Q1-K1-B12
ggattccggcgagaaaaaaacttggacggtgaaattggaaggttttccgggatcccaaggccgaatcttggttcaatttacgaaaagagaagagagaggaacaacaacacccgttgttgaatcttcaagctgaatcaaatcatatagagagagaaagagagagacccggataggaaaatagcgtttaaagagagaaaggtgaagtgaggttgtttaaagtttgggtcttggtgggtgaaagggaaagatgacggatgtggtactgcatatatacgatgtgacgaatagtggatccgagaaaaccaacaacaccattgttcagatcaacaagatcttcaaggatgggattggtctttgtggcattt

SEQ ID NO: 48676 - DNA, 389 bp, Glycine max
  Clone ID: LIB3107-034-Q1-K1-B2
aattcgagcggccgcgtggtttttatatctttttcttttttttttcgaaacgggtctctctggtagaactaattctctccattcagagaagagcgggaaggaatcttcttttctatgaaacctgagcaaagtctcggctaaaatctcaagactagtgaagaagtaaagaagtcccagccacagagggaaagactgaaccgattcttcggagaacattaccccggaaggactagagcaggtacgacagccttaaggaccactcccgtgctaatcaccttggaacttgaggacttcgcgtcacatgctatcaaagggtcttccgatccgctctacttaaccatttaagctaccccccaaatagaattgggattgggatccaacaattaaat

SEQ ID NO: 48677 - DNA, 401 bp, Glycine max
  unsure (1)..(401): unsure at all n locations
  Clone ID: LIB3107-034-Q1-K1-B3
ggagtgatatttgagcttaaaccctaaccgcgggtctcttgattctgcactttggaaacaatcataatggcgttctgtaataaggctggaaatgtcttgaggcagggtgctgctcgcagcacacatgcccctgttgcgtccatgcttaattacatccgctgcatgtcttcaagcaagcttttcattggaggcctttcatatggagttgatgaccagtctcttaaggatgcattttctggctttggagatgtggctgatgcaaaagttataactgatagagacagtggaagatcaaggggatttggatttgtcaacttctccaatgatgagtctgcaagttcggcactctctgncatggacgggaaggatctaaatgggcgaagcattcgggtatcctatgc

SEQ ID NO: 48678 - DNA, 379 bp, Glycine max
  Clone ID: LIB3107-034-Q1-K1-B4
ggagtttaagtattgatgcaagagcgctcaccaaactcttcaatggatcaacgaaattatacacttcctcacgccttactctttcttaatcaatgctcacgtcgttaatttcttcaaggataggctatgggagaatgttgacgccgaatggatcgaatgcctgcgccgagaatctgttcaaaatcttcttctcataccttctggtgcagtacaagatcaatggccaacttctttgaaagagttcatcctaaaaataaggtctatggtattttgtcaagaacaagcagatataaatatggcattacctggcctgcagacaatttcacttaacactgttcttgcccagggcatgaatgtaaagaaaaaacatgaagttgaa

SEQ ID NO: 48679 - DNA, 387 bp, Glycine max
  unsure (1)..(387): unsure at all n locations
  Clone ID: LIB3107-034-Q1-K1-B5
gatggagtgacaatgggaaagcaaaacattcgtcaccgcttgcgattccttcacgtggggaggtcctataaagggcaaactcacttgaattgaatgtagaccccattctgcaccgagaatcattcttcaccaaaacttcgcaaagaaacactacacatccctggcaactgctggcggtgcaagaagntcgggttccccctctaacttccacctctgagccaccttctctctttgacggaaccaccaggttgtacatcagttatatttgtccctatgcgcagcgtgtttggatcactcggaactataagggactacaagacaagatcaaactggttcctattgacctacaaaacaggcctgcttggtataaagagaaagtctaccctg

SEQ ID NO: 48680 - DNA, 406 bp, Glycine max
  Clone ID: LIB3107-034-Q1-K1-B6
ggggagagaatagagaagagagatggatccagacgcgttggcaaaggcattcgtggagcactactacagcaccttcgacaccaacaggaacggcttagcgaatctctaccaggagggttccatgctcactttcgaaaggcagaagatccaaggcgcttccaacatcgttgccaagctcacctccctcccttttcagcagtgccaccactcaatctccaccgtcgactgccagccctccggcgtcaacgccggcatgctcgtcttcgtcagcggaaaccttcagctcgccggcgaacagcacactctcaagttcagccagatgttccatttgataccaacacctcagggaagctattatgtgttgaatgacatattccgtttaaactatgcatgaagatgtcatatg

SEQ ID NO: 48681 - DNA, 394 bp, Glycine max
  Clone ID: LIB3107-034-Q1-K1-B7
ctctctctaaaaatctctaaacatgcaaaagcttcgagaattgcccaaactccccctccatttctgatttcagacttaaataggtggccttgttggtgcttgtccgcttagcgtgaatctggaccgctaagcgtgcattagtgaattttgacttagcgcgcgtcttctcgctcagtagatggactcaagtggtgcgcttagtgggatgacacctcgctcagtgaacatgcacaactcatccttcttccagattcttcctcgtgctcagccgcaacagtgttgcgctcatttgaaatcgtttcaaggtccaatgccttaacgatcctttttttttttacttttatcggttaaaacgaaccgtttaaaaatctaaaatcaacaccccgcataactt

SEQ ID NO: 48682 - DNA, 362 bp, Glycine max
  Clone ID: LIB3107-034-Q1-K1-B8
gaatcatcacaattttccgttgttttttctttggtcttttcgatccacgcacgatttttttttatttggatgcgtgcgtgcgtgcaggtttgggttcgcgaagggttttgatttttcggcggcggaaaatcttggtaaaaattcgtcttcttaaccaaataaaaaagaaaggttttcttctttaaagttggagggttgggtctgatgagaattgttaggggaatgcagagatcgctttgcgaggaatactactgctgctgcaacaaagattcgttcttcccaggggttggcatcactgcgcccaaagccagaacccgcgacaaactaatcatccaaaccctctgaaaattcatccaaaatta

SEQ ID NO: 48683 - DNA, 385 bp, Glycine max
  Clone ID: LIB3107-034-Q1-K1-C1
gtgataaattattttgctctgttcttgaaaacactcctaactctctctctatatagaaaatattataggagatatcctttcatgaaaatttaatctcttatctttcgatttatcattctcgttttattttattaaagaaaattctaatattaaaatgaaaattagtcaatattattaataaaattagtaagaaacaagaatctacttaaatatagcttaatgtaacaacatcccagtgaagtttgttaggatgatggctcatgctattgcaagaacatccattgatcatatcttatgtcttctccttttgttttttttggtggtggtggttttaagtttactttattgtattggtgatttgattatgaatgaagtaatctaagtc

SEQ ID NO: 48684 - DNA, 264 bp, Glycine max
  unsure (1)..(264): unsure at all n locations
  Clone ID: LIB3107-034-Q1-K1-C10
gatttataaacttgaacagagatctcatctcacttgtcagagattctcaccagtgattggtgatggctcanccgcttgtgaagaaagacgatgaccgcgacgacgaaggttgtcgagcagctgactattccccctttcttggaattgaaaaggggtctgttcttcaagaggccagggtttttaatgaccctcaactagatgctaggagatgttcacaggttattacaaaacacctatacctactgaatcagggagagacgttta

SEQ ID NO: 48685 - DNA, 423 bp, Glycine max
  unsure (1)..(423): unsure at all n locations
  Clone ID: LIB3107-034-Q1-K1-C11
ttttccacaaaagtatattcaatattccccaattgttgaatcggaccaatttgatggccctattccaccacttttacgaggtttcatatttcttgatttattcaataacaaaagatgaacatctaagtataaaaaaatgaacaagaataattttattgcatttctgaaatatagattaaattgtttacaaaatattaatttctaattaatagtcaatgatgataggatgcttgaaaataatatatatattcaaggaaagatctccaatctaaatcttactattttcttatctcaaaatgtcttttaaaactacaaatcatttatgattatgttaataacgtaagattatcattttttgataagttatttgtttaaaaagtatataatgtgttgaaagagttttactattattaancttcatta

SEQ ID NO: 48686 - DNA, 305 bp, Glycine max
  unsure (1)..(305): unsure at all n locations
  Clone ID: LIB3107-034-Q1-K1-C12
tggctttgtgacactggatgaaagatttaaaatgcttaggcaaattgactgggaaagcattgtcctaaggacccaacncgttgtcaaagaagaccctgctgcnttcctngttctaaacnttangaaatatcaactatattaagagttttattacaataataattaatgttcttacacatctgtttggagccttctgttttttgtttttttttttttcttgcaaattgactattacaaatctaattttactattatgttagggtggaattttttacacaataatgagttccattttgtttaggcaa

SEQ ID NO: 48687 - DNA, 415 bp, Glycine max
  Clone ID: LIB3107-034-Q1-K1-C2
gtacagcagcactgatattaccggaatcattgagaggtatggccaaggtcgttacagcaagtcacacactggtgattcattggaacacgattcacagagcgcataccatgaattcttgaaattaagagcgaaatatgaatctcttgagcggacacaaaggcattttcaaggagaagaccttgagccacttagctttaaagatttgcagagcctggagaagcaactagacataacgctcgcactaactcgacagcaccaaacgaagaaactcatggcacgagcggatgaattacgcgaaaaggtaagttgttaaatgctaattaacttgtttgattttactccgtgtgaagtttttctgtgaatttctctctaatgttatgttttttcttgtttacaactcggggctgcagaagtt

SEQ ID NO: 48688 - DNA, 291 bp, Glycine max
  Clone ID: LIB3107-034-Q1-K1-C3
gggaggctactgaaatcattacttggactagttgtctacgattattcatagtgaggcaatagtaacagcaattcacactggtctttgcttctcgttactcatttctcacctaactttctattcttctcaggctcagatcagaaccttagccatggcagcgttccaaaagatcaaggtcgccaaccccatcgtcgagatggacggagatgaaatgactagggttatctggaagtcaatcaaggacaagctcattttgcccttcttggagttggacatcaagtattatgactt

SEQ ID NO: 48689 - DNA, 376 bp, Glycine max
  Clone ID: LIB3107-034-Q1-K1-C5
ggtggtagttgtgtgacacagagattaagctagagctacatagtttttttcttttctcaccttccttctctcccttcagacaagggacgaaaaatcagagagagagagagagagagagagagaaattccaaaaccatgtcgtcccacagtcatctaagtttcgcctttggggttctaggtaacatcgcctccttcgtgtgctttctggcaccactaccgacattttatagagtttgtaagaagaaatcaaccgaagggttccaatcaattccatatgtggctgcactcttcagtgcaatgctttggatcttttatgcctatgtgaagaccggagaaatgcttcttatcaccatcaatgcattcggttgcgtgattg

SEQ ID NO: 48690 - DNA, 416 bp, Glycine max
  Clone ID: LIB3107-034-Q1-K1-C6
ggctaccaactccggcttgttcagtctttcttggaactttgttactctcacacatgtctcgctccgtgcctttggtttcaaccatttttgtcttgcttctgcttctggtggccactgaaatgatggggccaacaatggtggcagaagccagaacttgtgaatctcaaaaccaccggttcaaggggcccatgttgagtgacaacaacttgggcctctgtttgccgaaccgaacgtttcactggaggacactgccgtggcttccgtcgcagatgcttctgcaccaaacattgttaattttaaaaaattaattaagagtgctttgatagaagatgatagatctatcatctttctactcgggttgttaattaaccactttgtgtttgagaataagggttacccattctactatgggtttc

SEQ ID NO: 48691 - DNA, 357 bp, Glycine max
  Clone ID: LIB3107-034-Q1-K1-C7
gtgataaattattttgctctgttctgaaaacactgctaactctgtctcgatatagaaaatattataggagatatcctttcatgaaaatttaatctcttatctttcgatttatcattctcgttttattttattaaagaaaattctaatattaaaatgaaaattagtcaatattattaataaaattagtaagaaacaagaatctacttaaatatagcttaatgtaacaacatcccaatgaagtttgttaggatgatggctcatgctattgcaagaacatccattgatcatatcttatgtcttctcctttagggttttttggtggtggtggtttaaagttactttattggattggtgatt

SEQ ID NO: 48692 - DNA, 373 bp, Glycine max
  Clone ID: LIB3107-034-Q1-K1-C8
gtacagcagcactgatattaccaaaatcattgagaggtatcgccaatgtcgttacagcaagtcacacactggtgattcattggaacacgattcacagagcgcataccatgaattcttgaaattaagagcgaaatatgaatctcttgagcggacacaaaggcattttcaaggagaagaccttgagccacttagctttaaagatttgcagagcctggagaagcaactagacataacgctcgcactaactcgacagcaccaaacgaagaaactcatggcacgagcggatgaattacgcgaaaaggtaagttgttaaatgctaattaacttgtttgattttactccgtgtgaagtttttctgggaatttctctctat

SEQ ID NO: 48693 - DNA, 349 bp, Glycine max
  Clone ID: LIB3107-034-Q1-K1-C9
ggtgatttaccatttaccacaccaaaaccaatcggatcgttttgtctggggagtcagaaatccatggatccctacaagaatcggccatcaagcgccttcaattctcccttctggactactaattccggggctcccatctggaacaacaactcatcgctgactgttggatctagaggtccaattctgctggaagattaccatctggtggagaagcttgcaaactttgacagggaacggatccccgaacgtgttgtccatgctcgtggagctagcgcaaagggtttctttgaagtcacgcatgacatttctcacctcacatgtgccgatttcctccgagcccctggagttc

SEQ ID NO: 48694 - DNA, 334 bp, Glycine max
  Clone ID: LIB3107-034-Q1-K1-D1
gggtggcagagagcgaacccaagactagagctaccttcccttcaaaccttccactcttctctccttttccaatcaagggaataatatttcttagagatattccgaaaccatggctcacgccaatcctatgatttttgttgttggaattctaggtaaccttgtctccttctgttgctttctagcaccagtaccaacattctatcgagtttgtaagaagaaaaccacggaaggtttccaatcacttccttacgtggctgcactcttcacttcaatgctttggatattttatgcttacataaagacgggcgaaatacttctcatcaccattaacgca

SEQ ID NO: 48695 - DNA, 383 bp, Glycine max
  Clone ID: LIB3107-034-Q1-K1-D10
ggaggaaagaagagagagaacaaagcacttagtgcgtattcaagaattacgaaaaaccaacagcgagtgttgtttttgtttggtccaggctggaccagggaatgaatagagatgagaggctttcggttgaagagaactgagttaagcggcgaagccaaacgcagaatcggcggcagaaattgccaccggaagcacgtcgaatacgggtgaaccaaacacaaaattccatccaccacttctcttttcaatccccaactcaaatctgtgaagaaaatctcaatttctaaattgtaattcttagcactactgctagtagtagtaaaaaaaaacaattagaaagtagtagagggtttttttttcttttttttcgttggtttactttt

SEQ ID NO: 48696 - DNA, 289 bp, Glycine max
  Clone ID: LIB3107-034-Q1-K1-D11
gtcccgccatggtaatccaggacaaagattcccaccagatctgcctaagtttgtgatagctgaaaaagttaaaattaacttgaacacctcaaatttttaagaggctccctcatttaacttctagacaagcacctataaacttaacaaggcttgacactattgtcttagagaagtctcagtaggttttacaattggaaatcgcccataagctagaaaatagaaattagtccaagctgggccatattctagcatgtcctggacagtgtagtcaaaggaaccaaaacatatg

SEQ ID NO: 48697 - DNA, 377 bp, Glycine max
  Clone ID: LIB3107-034-Q1-K1-D12
gaagacgacagaaggggttgggtgtggcttggggggcaagcttggacatggttcaagaactgatgacgagtaccctctcgtttgatcgaacagttcggactgctgaatctccaacctatggtgcttggcatgctgttgtggtgggacgggatgactgtgtttgcacgtggggatgagggcgatatggttgcttggggcatgggagtgatgaatgtgactcagtacctaaggcggtggaagcattgagcaatgtcaaagctattcatgttgtagcaggagattacacaacctttgtagtgtttgatgatggtgatgtgtattcatttggatgtggacaatccgctagtcttgggcataatgcttgtggaaatgatgag

SEQ ID NO: 48698 - DNA, 346 bp, Glycine max
  Clone ID: LIB3107-034-Q1-K1-D2
ggaagtaaattactctctacttgtggatggcgctgttagtgtcactttcagctgtggttttgttcccaaaattttgattgtttcttattcgaaagaaattttagatgcacgagacttggcttctgaacagttttaagtcttgagtttgtggaaatcggtctccgagcttccagacttgctgtgtttcgatctgtttatccatccaccttcatcgaccttagcatctagagagatagtaaatttccactcgtatggtaggagattttcaagtgactatggagaaacagagcagtttttcggcatctacaatggaaaaacagaagagttttcgtggatttatggaaaa

SEQ ID NO: 48699 - DNA, 373 bp, Glycine max
  Clone ID: LIB3107-034-Q1-K1-D3
gaagatgagagagtacacactacacggcttcacagagtattgatgaaggaaccctcgagctaacccgctgtcactctcggcgcaccccaccatcactcttcgacggaaaatgcagcgtcgcaacggcgcgcgcttcagtgatcagcgcctcagctgcagcagtgcgccttgccaccgtgacctgggttgcaacgccgcgctcgtcagttcgcctctccgcaccaacctgagtccgtgataactgttgccgtcaagggttcgttaggggaaaactataacagcaaggctcttttcatctttgctttgtttgatgttagtatgacaatcctattgatgttggtttgaatatcattttgttatgtgcttcgtttgg

SEQ ID NO: 48700 - DNA, 411 bp, Glycine max
  Clone ID: LIB3107-034-Q1-K1-D4
gttgcattgctctatagagctgggactagcaatgtagtagctcctgaatctggctttgtgacactggatgaaagatttaaaatgcttaggcaaattgactgggaagcattgtccaaggaccaacctgtcaaagagactgctgctcctgtctaacttagaattcactttcaaggtctatcaaataataccatggttttacacatctgtttggagccttctgttttttgtttttttttttttctgcaaatttgactagagaagtctgatttgtaatatttaccgagggatcttttatagtcatataatgagttccattttgtttaggcaagtttttatttcaatgtgactagatatatttcctatttttggaatttggaaacatggatattttggagtgatgtttttttttaa

SEQ ID NO: 48701 - DNA, 378 bp, Glycine max
  unsure (1)..(378): unsure at all n locations
  Clone ID: LIB3107-034-Q1-K1-D5
gaaatctatagcaggaatcccccaaacccttctcatgccccccctttacttccttcgtacaaaattcccattgcaatctgctagtttctagacacaacctgctagtcaatgcacggtgtaggagccacaatctgttagtctatgtgttcctcaatctgcatataatacttcttgcttcttgcttttatatgaagctaagaataagattttaagggaatgagtattacatgactccccggcataaaatgtagcatgcatttctaatgctttgtgagaatactggattggctttggcatcttcagtgtttacctacgttgcagaaattttgcttggggttctttaagtaggtttctgcagntcatttgtctttgcatttt

SEQ ID NO: 48702 - DNA, 341 bp, Glycine max
  Clone ID: LIB3107-034-Q1-K1-D6
gactctgcagctcgcaacttgtaccacgaaaccatggacttgagaaaattccacgaagatgtgaagagcaagccataaacaagcacaaagatgcacacccaggtttttcttttgctcatgatttgaagcagtagcacgtaagaggaaggtgatgtgtgaattggtgaagtgggttgttcctcttcttccacttttgccatggacatgacaacaaaaacaacctcggaaaactagccagtaccaattaccgaacaaaacaccaatctgggtttggtttggtttcttttcacaagtggaaaccttttcatactaattcaatggtctgggccgtttgggtcttt

SEQ ID NO: 48703 - DNA, 388 bp, Glycine max
  unsure (1)..(388): unsure at all n locations
  Clone ID: LIB3107-034-Q1-K1-D9
ctcctaccttgaagctcttatccatggcttcctatggtggtgagtttcttcttgactcatcttcttcttgaagtgatgtctcctctcaactcttcttcttctccattccactgcaattaaaattcaagaagcaaaggactccattgatgaagaagatccaaggcctacatgctccaatggagctacatcatgtggtatcaagagcatcttcatataggtgatgttcttttgcttcctcaatctttttgttcggtcaattcactttaattccttgttattcatcttattatccatgtatatcctccattgtcttggggtttggtgttgttagagtagattaaaaaaaaaccgggtacatcttagatgtacactngntcttgcatttcta

SEQ ID NO: 48704 - DNA, 266 bp, Glycine max
  unsure (1)..(266): unsure at all n locations
  Clone ID: LIB3107-034-Q1-K1-E1
ggaaaacaccgnncgttnctncgcaccgacngcaacctcttcgtcgctgccaaggccttcgccgccggcgtcattctcgccaccggattcgtgcacatgctctncgacgccaccaaggcacttcgccacccgtgcctgccagcgttcccgtggtccaagtttcccttcaccggtttcttcgccatgttggccgcgctcctcacgctcctnctagatttcgtgggaacgcaatactacgagcgcaagcaggggatgaaccgcgcccc

SEQ ID NO: 48705 - DNA, 363 bp, Glycine max
  unsure (1)..(363): unsure at all n locations
  Clone ID: LIB3107-034-Q1-K1-E10
gaaaccaccaaagcctacggctactacattacattgttttttttctttcccaaatgggttccatcttttcacccttaaccactatcttcctcctactcctactcgtactttggggtggcgaggcacgtgacccttttgcttgtgaccctaagaacaccgccacaaaaaacttaccattttgcaaggcttcggtggcaacaggggcaagggtgaaagacctcattggaaggttgacactgcaagaaaaagttaacttgctagtgaacaatgccgcggcagtgccacggcttggtatcaaagggtatgagtggtggtcggaggcactacatggngtctcaaatgtgggccccggaaccaagttcg

SEQ ID NO: 48706 - DNA, 342 bp, Glycine max
  Clone ID: LIB3107-034-Q1-K1-E11
tcctatgagtcaaggaacgtcattgtcgttaacaattcgcccaacgtgtttctcttccttttcctcctcatgtgagatagagataaaaaaccctaacacatcgacataagagaaagaagaaatattaacatcgatttttataaaaaaaatcaatattaacatataaatacaacatcagttttcaaacaataccagttattatgaaaattgatgttaatatcgacacacaacattagttttcaaaagaatcgatatcaacgaactcaacttatttataattatgtcaccgtattttgtaacattgatttttattaaatggatgtaaaaatatcgacattaaat

SEQ ID NO: 48707 - DNA, 390 bp, Glycine max
  Clone ID: LIB3107-034-Q1-K1-E12
gagggaagtgcggtgtccactcatcatctatctttcctcggtcccgaccacacacaataacaatgtcaactctttgttctgcacttcctccatcatcatcatcatcaccctccatagcaaagttcatctccgaccaaccatgcctcaccatgctccaaacccaatgcaccaacatgaaagacctccaaaagatccatgcccacatcatcaaaaccggccttgctcaccacaccgttgctgctagccgcgtcctcactttctgcgcctcttcatctggtgacatcaactatgcctacttgctcttcaccaccattccaagcccaaacctttattgctggaacacaatcatcagaggcttctctcggagctcaacccctcatcttgcaatat

SEQ ID NO: 48708 - DNA, 415 bp, Glycine max
  Clone ID: LIB3107-034-Q1-K1-E2
gacacgcacctctttctgattgccttgaaatcacacactctcttcaatttctagggttttgctattgctttgcctccgttccccctttctcacaaaaacaacgccttttctcttctccttcgtatctattctttgcgtttggtttttggttgattgaaggcattcacagcgtaattcgttgctgcattttaatcgatttatctaaccaggactgaatgacctaatggagtctaaaggtgggaaaaagaagtctagtagtagtagtagtaaatcaattttttacgaagctcccctcggatacagcattgaagacgttagaccaaacggtggaatcaagaaattcagatctgctgcttactctaactgttctcgcaaaccatcctgatacacatccggattgatagttcgttgcatg

SEQ ID NO: 48709 - DNA, 58 bp, Glycine max
  unsure (1)..(58): unsure at all n locations
  Clone ID: LIB3107-034-Q1-K1-E3
aattcgaccggccgctttnattttccgggattttggtttttttccttctttcaaactc

SEQ ID NO: 48710 - DNA, 415 bp, Glycine max
  Clone ID: LIB3107-034-Q1-K1-E4
tttcagccttagttttaataggaaatatccaagggtatctggaaaaagcatcaataaaagatacataatacttgaaaccagaatgagagggtagcctatgagactttcccatgcaacaggaagcataaaagtctgaaaaaaatttattagatgaagaaatattacactggttgaagactagcttcattacttgactattgggatggcctaacctagcatgccaaagactaacagtgctaggaggagaaataacagaactggaagctacactagaatttttattaacagtaggagctgggattgaagtagagatggaggttgacaacaactgaggagagtgatcttgaagcctaatgttatgaaatgaatagaggccatcaacaccaacaacactttgaagaaggatcttattggt

SEQ ID NO: 48711 - DNA, 424 bp, Glycine max
  Clone ID: LIB3107-034-Q1-K1-E5
gtgaactggacagttccaataagatttcattcttgaacaaaaatccattttggggtttatttcatctattccatgaccggaacagtgggagatacacgttacaccacgattttgaatcagaagagatatttcaagaaatggcagatctattcactctatcaataaccgagccggatctggtgtatcataagggatttgctttttctattgattcctccggattgggtcaaaaacatttcttgaatgagttattcaactccagggatgaatcgaaaaatcactctttattggttctacctcctcttttttatgaagagaatgaatctttttatcgaaggatcataaaaaaatgggtccagacctcttgcgggaataatttggaagatccccaaacctaaatagttgtatttactagcaacaacat

SEQ ID NO: 48712 - DNA, 314 bp, Glycine max
  Clone ID: LIB3107-034-Q1-K1-E6
ggggtcgaaaaacatggtcagaatttgagcttttggccactattgacagagatattaactttccatatttggaggagaagcaatcccttttggggttcgctggttccattttcagcttttttcttgggtttgagcatttggatctggacaaaagttcacctttgggtgagtgattcaacaccagctatagctgggggagtgaaggtaaagttgtgagcattaatttgcttgaaggagggtttgtgaattgaattggtaaaaagggtctctgttttatgggaattattaattggtgtttactgggattaatgaaa

SEQ ID NO: 48713 - DNA, 412 bp, Glycine max
  unsure (1)..(412): unsure at all n locations
  Clone ID: LIB3107-034-Q1-K1-E7
gaccgtttgccacgttcgcaaccaaacaccttctctctctctctctctttgactctttaggggaaggccattctcgcaacgtttgagttcagcagatccagaatttttcagaaaacaagtttaggagaatgaagaatacggaacgaattgccaatttggctttagcaggtttaaccttagcgcctcttgttgtgaaagtagatccgaatttaaatgttattttgactgcttccctcactgtgtttgtgggctgttaccgctccgttaaaccaaccccaccaactgagacaatgtccaatgaacatgccatgcgttttccctttgttgggagtgcaatngtattgtcactcttcttactcttcaagnttctatccaagggacttgtgaacactgtattgacaggctacttctt

SEQ ID NO: 48714 - DNA, 407 bp, Glycine max
  Clone ID: LIB3107-034-Q1-K1-E8
ggaagtaagtacgaggtgagaagaggcgacgaggcgagaacattcccatgtagcgtggagaagcaaggccatcgatgggtctataatcaggcacgatgaaagcctcgcgttcctcgcgggccccagcagctctgctttgtccaattccattgaaggttccatacctgaccaacctccccacccaagacttagacttcttattattagtggtgggactttgatgtccggcgttcatcttctggcacaggtactccttcaccgcatgcaacccctgctccaccagctgcggcggcggcgaactcagagggttcccttccacgctaatcttctgcagcttcttcaggcatccgatggagtccggcagggccctgatcttgttgtagcttacgtcgagttccacgagggac

SEQ ID NO: 48715 - DNA, 389 bp, Glycine max
  Clone ID: LIB3107-034-Q1-K1-E9
gagattcagaccacacacacccggttttaactacttacttgccactttacccttctcaactctcttactgttactattactgttactccacctaaatcaaaattcaaacatacctgtgagtttcttttagctctcaaacttgcaaatcagagaccctttatatttaaatgattgccttttttattatgttatggataagaactgtttcatatttcgggtcttattattattattattattatgtaacatggtttgggtgcaactacctgcaataatttactgttcatttcttcgaatttttggactttattttagttcgcaatatgtgtcataattcataataataatagttgcattcaaatgcattccaaaacctcaaaatcgagctc

SEQ ID NO: 48716 - DNA, 415 bp, Glycine max
  unsure (1)..(415): unsure at all n locations
  Clone ID: LIB3107-034-Q1-K1-F10
gatactaaagaatttcgtttcgtttgtacaaaacgaaagctagcaccgttctgcggcggtcccctccggcatcgtctttacagagctttcccggggaccacaatcgccattcgccgccgcagacgacggcgctcatggctcagccgccgttcgatccgttctacctttaccaacatgatgagcagagcaacatcaacacgctatttgtctccggtctaccagacgacgtgaaggcgcgtgagattcacaacctnttncgccgccgccccggcttcgactcctgccaactcaagtacaccggccgcgccaaccaggtcgtagcgtttgccacgtttttcaaccaccaatcgggcatggcaagcgtgcacgccttgaatggtgtgaaattgatcctcanactggatctgtttacata

SEQ ID NO: 48717 - DNA, 357 bp, Glycine max
  Clone ID: LIB3107-034-Q1-K1-F11
gaacctcatccaaatttgttaaggaggaccacaattggaaatggtctactttgtttccctacagcttgggggcttgcaattactcctacagtctatatttaaacctttcctttcttgagatgcaagtcctccggaatcagtttttgactggacacgggaaatagactcagatttgtcaaatcagaatatcaataatcaagcattctcaagaaagcattggcgtcttttacaatgtcaagatggtttgctacatttatttacatgatagagcacattcctattttgattacataaaagaaaagttattctagtgatatattctagatttctagtgtttacatgatttgatatgtagaa

SEQ ID NO: 48718 - DNA, 390 bp, Glycine max
  Clone ID: LIB3107-034-Q1-K1-F12
gacactttcttttctctttcactgtctttggggtgaagatgggtgatccttatgggctaccggaggatctccggcggcttataccagccagaagtacccatttgaacccttcagacacacacctaattgaaccactttgtgttcaccatggtctcagtagtgctgttgctgctgctactgctagtgctactccacccatcacctatgacgccaacatggttggggacgttttcttccctcgtggtttcactcatcactttgctcatcaccatgactattcttcttcctctggcgtaaaccccgttgctactactgctactgctactactactactactgtctcggatcatgcattctgcagcatggaaagtgcagaaaaagggtggtttg

SEQ ID NO: 48719 - DNA, 144 bp, Glycine max
  Clone ID: LIB3107-034-Q1-K1-F2
gagtgcacaagtgagtttgttgatcgagataactggaaacagggtgatgaaaatgaaggtccttggtttcttcgttgctacaattttggtagcatggcaatgccatgcgtacgatatgttccctctccgaatgaacactggcta

SEQ ID NO: 48720 - DNA, 334 bp, Glycine max
  Clone ID: LIB3107-034-Q1-K1-F3
gacgcgtttctttcctttcaagactctctctctcgctctagttttttcggtccgcgactcaacctttcgaatcctctcacccagaaggacgattcgtaccatgtagttgggggatttcggctttggcacttcttgattccaataattttgggttcttttttttccctaatttgatttccccggttagggtttttaactctattcgatcggcgatttcgaatactcggaggctcgaatcgtgttgggggttttccgttttgattaaaaaagtttccggtttttgtgttgggtgatcaaggggttgttgatttttttcttgcgatcgagaatgggt

SEQ ID NO: 48721 - DNA, 421 bp, Glycine max
  Clone ID: LIB3107-034-Q1-K1-F4
gacaccagtggcttcttcattcctttattcattcgtctcactgctgaacacaagagaaacaatggaacttttgcaaaatggccacaaaaatttcgtcagcatcaaaccctccgagttacccctcacgaatggggcagcgttaactctcctcaactcgctctccaaaactcagtacttgggcaacatagatccttccagagtttttgtcaccaaagttaagcgtatcattgtaaaggttggaacagctgttgttactcgaagtgatggaagattagcattgggcagaattggagcactatgtgagcagcttaaagaactaagcagtcaagggtatgaagtcatattggtaacttcaggtgcttgtggtcttggcaggcaaaggcttagatatcgcaaattggccaatagcagcttttctgat

SEQ ID NO: 48722 - DNA, 344 bp, Glycine max
  unsure (1)..(344): unsure at all n locations
  Clone ID: LIB3107-034-Q1-K1-F5
gggagaagaatcagagagagatagagagagcatgagaaatcggggagttgactcagtagagcgaatcgatggaggaggaagaagagattgagtgcttcgagtgcctccaacttcgaataaagtccgatttctcggagcaagtgttcttcaattatgccatctccacttctgcttttcctttcggatcctcggctatcgntaatatttctggtacagctgatggcgaagcttcgggcgctcaatttatattgcagtacatgccgagtcgtgataagaattgtttcatcaattatgtaaatgaatatattttggatagtggtgaaatcactactaggagtagtgat

SEQ ID NO: 48723 - DNA, 413 bp, Glycine max
  Clone ID: LIB3107-034-Q1-K1-F6
gatattttaggattttgagatgtgatgaaatttgtgttaaaaaagtagttgttttaaaatttgattgtatgagattaatttgaagtgagattggcacatggtgagaatagagagaggggaaaggaatccatcgaggtgaagatggtgtggaacagcatggtggtgttgagagtggcacgtgcctcagcggaagcgtggcaatgcattgcggagcctctgaacagtgagcagatattggatctggtttgctgtttccctctccatcaactcgctctctttctctattccttcttctgcactcctcaatccaatttttaccatttcccttctcactccgactctgaccatgacgattcttccgattaccaatcctcttcagactgaaaccaaaccaaactcaatagaataagatg

SEQ ID NO: 48724 - DNA, 397 bp, Glycine max
  unsure (1)..(397): unsure at all n locations
  Clone ID: LIB3107-034-Q1-K1-F7
gacacctttgttcactcttcttctcttgcggctagggttttagcgcagcttcttctagatttaaggaagatgggtaaggaaaaggttcacatcagtattgtggtcattggccatgtcgactctgggaaatccactaccactggtcacttgatttacaagcttggaggcattgacaagcgtgttattgagaggtttgagaaggaagctgctgagatgaacaagaggtctttcaagtatgcctgggtgctggacaaacttaagactgagcgtgaaagaggaatcaccattgatattgctttgtggaagtttgaaacaacaaagtattattgcacagttattgatgcgcctggacatagggatttcattaagaatatgattactgggacatnccaagctg

SEQ ID NO: 48725 - DNA, 344 bp, Glycine max
  Clone ID: LIB3107-034-Q1-K1-F8
ggttcatgccataaactaaaccgtttctacaggtacaaatctatgctactccacaaagactctttttgcatgagacatcctctctcttaaaaaaccccttcttcagtcaaacctccccaatcatacttttaccatttcaccactcacacttttctctccctcttataataacaacaacttcctcatatatacacttactctccttcaataggggaactttttcaatttggttgctacccttttgttctcttttggactatatattgtatattgaagcctaaaaggttttgaagaaaaaaaaaagtgatgagaaactctgaagcaccaacacatggtggcatgat

SEQ ID NO: 48726 - DNA, 344 bp, Glycine max
  Clone ID: LIB3107-034-Q1-K1-F9
tcagaaaaagagagagaggattgagaagcgatttttttatatgaaattttgaagagtgaatgaaaaatctcaatcccatggatgagcaattgaatttgagctgaatcggcgtccgttcgatttctctcagtcacacactactgactcggccagattcaagtaaacgcttcttctaagcaaccctagatattggagattgatgtgatgacatcttcacctacctatctgcatgcagtgctgaattgatacctctggtttttatctcatgctattttagttgtgtaacatgtaacagtgcctgtttaatttgttacaccttgcccgaataataagtaatcaatata

SEQ ID NO: 48727 - DNA, 310 bp, Glycine max
  Clone ID: LIB3107-034-Q1-K1-G1
gagaagaccacagaaagggactggtttttgtttctcgtttaagccatcatatggaggaagggctcttctggttaaacaacgtcaataaatctagatcttagtcttaattagaagtaccatttgaaacatgaagtctttttagcttgaatatactaggttcttcatttggattacttggattctgtgaggtcgctaattagatgcactcagtgcaggttcagaactttattcgatcagcgatcacggatactaggaggctcgaattgcattggaacttttcctttttgattaataaaatttccagttttaa

SEQ ID NO: 48728 - DNA, 394 bp, Glycine max
  Clone ID: LIB3107-034-Q1-K1-G11
attaatattcatgtgttcgattgaacattggtgcgtgtttgggaaacatatatgtgtgtgtgtgtgtgtatttgtgaaattcaaatttaccatgtttttcataagcaaaataatggagttttcataaaagaaaaaaaacgaattaattttccagttattagagtggtgatattgtatcgacgagacgggtcggtacattcttgtgtttgtgtgtgtgtgtgtgtttgtgtgggtcttacaaacactgtcgtagttgagatttttcgcttttcaaacactatggtctttacaaaaaactgtcgttgtccaaaccttcattttctcgctcccttctcattgtctcacttcctcccaattaaaccctcttcctggaaaacccttattcacacccaaa

SEQ ID NO: 48729 - DNA, 385 bp, Glycine max
  Clone ID: LIB3107-034-Q1-K1-G2
gactgcgaaccagtagggactcccatgccgactcttagccgccgatctctcagggcttgcatcttctcagctgtgaagatgtacacatcaaggaagaaaatccacaaggataaggatgctgaaccaactgaatttgaagagtcagttggacaggcattgtttgatctggaaaataccaatcaggagcttaaaagtgatctgaaggatttatacataaactcagccgtgcaagttgatgtttctggaaaccgcaaggctgttgttattcatgtcccttacagattaaggaaaggtttccgtaagattcatgttaagcttgtcagggagcttgagaagaagtttagtggcaaggatgtaatcttggtcggcacccggaggattttga

SEQ ID NO: 48730 - DNA, 382 bp, Glycine max
  Clone ID: LIB3107-034-Q1-K1-G3
gtggatggttccgtggagcgtgcaagtgaagctgatgtaaggattcaggagggagatcagaatggttcgatgaagcctaagagatatctgccgaagaaaaaggagataaacatcgaggggaagatgatggtggctgatggaattgatgcgtcgcacggagaggttgatgatagtgctggtgattggatgccagctgtcagtcggagtactcataggagatatctaagaaggaaagctagacgcgagtatcatgagttgttgtcaagtaatcaagatcagcaacagttggaaggaaatgttgatggtagtgttggtgaagatgctagtgctttaaatcagcctgctcatcacaatgaaaaacaacatattgaaaatgctgtga

SEQ ID NO: 48731 - DNA, 402 bp, Glycine max
  unsure (1)..(402): unsure at all n locations
  Clone ID: LIB3107-034-Q1-K1-G4
cagtatgataacaataatcataatttcaatagttagttaacatatacacgtctagcaccaaaggcttgaaaaacttctctctctaaggccaaagcgaagattaattgatgaggccctacctataacttatgaaataaaataaaaattccacagtctcatatatgtcacaaaatgaacccaacttagaaaaacttggcatcatcaccacaaccaactaatttctcttggcaaccagcctcatcaagaagccatttctcaagcaaagagaatggcataatttctgcaccaataacatcaagcttgctttcatcttgcaaaacagtggcctcaggagacaatgaccgagagaattcatcagangttgaagaactccaagactgatcaaaatcaaaacaatgattc

SEQ ID NO: 48732 - DNA, 376 bp, Glycine max
  Clone ID: LIB3107-034-Q1-K1-G5
cataaatatttctttattgtttgtccaagtaaagagtaaacattgttttcaattatcaatttcttgaacttcttagttctcatcatttatccagtggctcagatttctacatgcatgtgaataagaagatcagatgaagacaatatgaaagaaagactatgagcaaagaaaaataggctctaaacgttacctattgccacctaagacccagctcaacatagaaggcatcatgatgtcaacaaaaaaccttcctccaactcttccaggatgtggtatacgaaacttagtcaaaaactgcagagtaagggaagcaagaatgaatttgtgcatttaattatttcaatttgagtgtcatttcaccatatttttcattctc

SEQ ID NO: 48733 - DNA, 168 bp, Glycine max
  unsure (1)..(168): unsure at all n locations
  Clone ID: LIB3107-034-Q1-K1-G6
gcggcggcttcnaaaaaacaacagaagggcatatacatcgctttattaacacatcaaatccctgctaaacctgcattcctattctggattccttaaacaacataattctcattatttataccccacctcttatttcttcatacctcctcatacctaaaatcaattcaa

SEQ ID NO: 48734 - DNA, 419 bp, Glycine max
  Clone ID: LIB3107-034-Q1-K1-G7
ccgaccggttgcaaaaagacaccaaaagggttggacccacgggtcagcaacacattgtaccccttgttaagcatcatgcatggtcaacttccataacagaggatgatcatcatttatcagaacaaacatattttttcttgtgacgtcaacataccttagagcattcattggtagtacctagattagagatggaagtcagtaaagatcttaaggtcaataaagaggacactggttaattatatgaatggagtcctaccaatggacgaggagctgagatcatagcttcagtaagttctatagtccaaacatgtgttattcgagttgctggaggccttccacatgtttgattatctagtggtggcatgaagtgaagattgaatatccaatctctctctgaagcagcataaatgatgatgata

SEQ ID NO: 48735 - DNA, 285 bp, Glycine max
  Clone ID: LIB3107-034-Q1-K1-G8
catggtcaacttccataacagaggatgatcatcatttatcagaacaaacatattttttcttgtgacgtcaacataccttagagcattcattggtagtacctagattagagatggaagtcagtaaagatcttaaggtcaataaagaggacactggttaattatatgaatggagtcctaccaatggacgaggagctgagatcatagcttcagtaagttctatagtccaaacatgtgttattcgagttgctggaggccttccacatgtttgattatctagtggtggca

SEQ ID NO: 48736 - DNA, 350 bp, Glycine max
  Clone ID: LIB3107-034-Q1-K1-G9
tatgctgttgatggacttgaaatatgggatgctatgaagacatgggttcatgaatatgtctccttgtattacccaacagatgcagcagttcaacaagatactgaactacaagcatggtggaaggaagctgtggagaagggtcatggtgacttaaaagaaaagccttggtggcctaaaatgcagacaactgaagatctcattcaatcatgctctattatcgtttggacagcttcggctctccatgctgctgttaattttggacaatatccttatgggggcttaatcctgaaccgcccaactctagccagaaggtttatcccagctgaaggaaccccaaaatatgatgagat

SEQ ID NO: 48737 - DNA, 295 bp, Glycine max
  Clone ID: LIB3107-034-Q1-K1-H1
ggtgaccagatatttcggaagtagcgggggcatagtaacatgctctgggaaatgattctacccaaaatgcatcatccagctcagttaatggtgatctttggagaaagctatggaaaattcctactgctcccaaatgtttgaatttagcatggagggcttgccaaaacattctttctaacagagtcaatctcaaaaggcgaggtgtggatgtggatattttttgtccgagatgtggccaagaatctgaaactgagttacatgctttattattatgttaagaatcgaacatggcatg

SEQ ID NO: 48738 - DNA, 354 bp, Glycine max
  unsure (1)..(354): unsure at all n locations
  Clone ID: LIB3107-034-Q1-K1-H11
gattctcttacacaacagggacgagggttattctgggcctacggaaccattggcgtggtgggaaggggaaacgatcttgggtggtaaggatgcactgggcggtggaacatggttgggttcgacaagagacggtaggatagcgtttcttacaaattttagggaagttgagatgctttcgaatcccaagaccagaggggacttgccccttcgttttcttcagggcaataagagtcccgaggagtttgcggagcaagttgtgaaagaggcagatgagtataatggctttaaccttgtattagctgatatttgcacctncagcatggtttatgtctttaatagaccaaaccaagatca

SEQ ID NO: 48739 - DNA, 359 bp, Glycine max
  unsure (1)..(359): unsure at all n locations
  Clone ID: LIB3107-034-Q1-K1-H2
gagggtgcttgtgttgtgttgtgggcacgccttgttcggtgaagtgagtantgagtgctgaatcgaatcgaatcgattctccgaacatggcggcgagcgatcgcacagtgttgcaattctcttcatcatcttcttcttcttcgcagatcttgtccgcgaaggtccaccctctggtcatcttcaacatctgcgattgctatgttcgacgccctgaccaagccgaccgcgtcatcggaaccctactcggctccgtccttcccgacggaaccgtcgatatccgaaattcctatgctgttcctcacaacgagtctatcgaacaagttgcattggatatagagtaccaccacaatatgttaata

SEQ ID NO: 48740 - DNA, 357 bp, Glycine max
  Clone ID: LIB3107-034-Q1-K1-H3
gatccaaaatcgaatctttgttggaaacatggcttcctgctccttcctctgccccgcagcatttaccttctcacagaagccacttcaatccacttttcttcattcctcctctcttctcactctaagcattcttcctaagaaattgagaaaaccccaccaactgagaagcctcatagtggccaaatccattccctcatatttaacttcctcctttgatgaattcctgtgtccaatccatctctgttctctgatgtggcattaattacttctagagtagttttgtctttggtttcagtatccactttaaaaagcaattgggatttcatatttgcattggtatactctcttcattattta

SEQ ID NO: 48741 - DNA, 391 bp, Glycine max
  Clone ID: LIB3107-034-Q1-K1-H5
gatactcttacacatcatgcgactagggttttagcgcagcttcttctagatttaaggaagatgggtaaagaaaaggttcacatcagtattgtggtcattggccatgtcaactctgggaaatccactaccactggtcacttgatttacaagcttggaggcattgacaagcgtgttattgagaggtttgagaaggaagctgctgagatgaacaagaggtctttcaagtatgcctgggtgctggacaaacttaagactgagcgtgaaagaggaatcaccattgatattgctttgtggaagtttgaaacaacaaagtattattgcacagttattgatgcgcctggacatagggatttcattaagaatatgattactgggacatcccaagctgact

SEQ ID NO: 48742 - DNA, 340 bp, Glycine max
  Clone ID: LIB3107-034-Q1-K1-H7
gctccatcgtgattagggttttgggattttgattttatcctcagtgcttccaccctcgtcacctgcaattgattctttcttccaatcgataattgaagaacacaacatttcaattcctctctcgatttgttttgcaagttcgataatcgaaagtgcctggtgattcggagttgtttgtgaaaatgagaaggcaggggcactatggggatccatctgccaacacttgtgttggtggtagccagatgcatcatatggctggtcaaaggggggaggccaagtcgggtaattttgaaggacggctagaggcctttactccacagagagagaatccgtatgcaaa

SEQ ID NO: 48743 - DNA, 317 bp, Glycine max
  Clone ID: LIB3107-034-Q1-K1-H8
cacttttgtaacactttatcttctctcttctatattttgcttggcaactgcctccccctatcaacctaaggttttaggttgaactggttgttagactttagagttttcaacatgaaatatgttattgttctcacttctgctagatttctagttcttgatgaccaacctgctaggttttgtgtgtgttttttttatcagagaggtctttgcaaatgcacctttttttatttcagcataggttgctggtgcattggaagcaaggtaaatattaaatcttgctttattgcatgattttctctattttcaagtaatttttg

SEQ ID NO: 48744 - DNA, 251 bp, Glycine max
  Clone ID: LIB3107-034-Q1-K1-H9
agcacagaacagttgaagtgaatggcataaaaatgcatgttgcaaagaaaggagagggtccagtggtgttgttcctccacggcttccctgagctctggtactcatggcgccaccagattctctctctcagctccctcggctaccgcgccgtcgcttccgatctccgtggctacggtgacaccgaagcaccaccttcaatctgcagctacaactgcttccacatagtgggtgatctcgttgcgcttattgac

SEQ ID NO: 48745 - DNA, 250 bp, Glycine max
  Clone ID: LIB3107-035-Q1-K1-A1
tattaagcacatgttgtcaaaaccgattttacacagtagaattggaaagtgggctttagcattaacagaatattctttaacgtacaagcctttgaaatctgttaagggtcagattgtggctgattttattgtagatcattcattgatcgagatgctgcaagattatgtcgatacagagccttggattttgtatttcgatggatcgaaacacaaacatggaactggaattggagttttaataatatccccc

SEQ ID NO: 48746 - DNA, 374 bp, Glycine max
  unsure (1)..(374): unsure at all n locations
  Clone ID: LIB3107-035-Q1-K1-A10
gctagcagccagagagaggatacctcaggtcactttaatatttttgtcggtgaccttagtcctgaggttacagatgccacattgtatgcttgcttctctgtatatcctagttgttctgatgcaagggtaatgtgggatcagaagacaggccgttccaggggatttgggtttgtttcttttcggaatcagcaggatgctcaaagtgctataaatgatttgactggaaaatggcttggaagtagacagattcgttgtaattgggcaaccaaaggggccagtgccagtgatgaaaagcanacttcagattcgagaagtgtcgtggagttgaccaatggatcatctgaagatggccaaaaaacaaccaatgatgacac

SEQ ID NO: 48747 - DNA, 314 bp, Glycine max
  unsure (1)..(314): unsure at all n locations
  Clone ID: LIB3107-035-Q1-K1-A12
acacgacanaaaggtgctcactttacctgtggcagtactttgagaattcttgaaattaattgcttgggaaaaaggattatggcaggcacaacttagaaatgttgtttcaactcaaaaaccaccgattgagttatgtcttgaaaatcattctgggttgaatatggatgagaactctgagagctcatctgcattcagaagcaacatccattattatcgcctgcataattctgttgattttagcgcttacctgagttcttgattctgctcacatacctcatgtcaatgctgcttgtggtgctgcattgttgccatac

SEQ ID NO: 48748 - DNA, 220 bp, Glycine max
  Clone ID: LIB3107-035-Q1-K1-A2
caacgggggaaagagaagtctagtagtagtaggggtaaatcaatgttttacgaagctcgcgtcggatacagcattcaatacgttagaccaaacggtggaatcaagaaattcatatctgctgcttactctaactgttctcgcaaaccatgctgatacacatccggattgatagttcgttgcatgcaaccatagttttattaggattttttcttctttggtt

SEQ ID NO: 48749 - DNA, 413 bp, Glycine max
  Clone ID: LIB3107-035-Q1-K1-A4
caagtaagtaaaattgatccaacacaactccaggctattcagagaactgctccagggcaaacttcaccttctttgcaaacccctgctccacaggttggtaatcgacctggtagtgggtctcaagcttcatctccccccaaaacatccaacacgattagttcattggattctggagaaattgatgcagcttcagataccagtaaattgaagggtgcattggttgggaagggaaggggagctccccagggtagtagtggaaggggctcttttgtttatggtggagctatggggactgctggaaatatcagtggtagtcatggagatctgaacttcccaaccttcttgccagttatgcaatttggtgggcagcatcctcgtggcataagagttcctgctgttggcatggcgttccc

SEQ ID NO: 48750 - DNA, 291 bp, Glycine max
  Clone ID: LIB3107-035-Q1-K1-A5
ggtaacaaccaagtgatatgcaaggttgatgctgcaagtgaatcctcaattcttgacactgatttgacagttttagctagcatgcttgtggatcaaggtgtggatgagaggaagcaaattgaggaagcagttgagagagaccaacgtgtgagtgatttcttcgtctatggtgtcaacttgacatttctagacttacaagaaaccaatgtgtatgacttgcaattgaagggacacacaccaaagtttgtttactacacccttcaaggtgttggagatgaaggggttgttttg

SEQ ID NO: 48751 - DNA, 427 bp, Glycine max
  unsure (1)..(427): unsure at all n locations
  Clone ID: LIB3107-035-Q1-K1-A6
cgagaagacgacagagggggtgtgattgtttgttgttgtaactcgntcttcttcttttgttgttctgggtttgtgtttgttttttctctcacctgaaaatgtcttgctgcggtggtaactgtggttgcggaagctcctgcaagtgcggcaacggctgcggaggctgcaagatgtacccagacttgagctacactgagtcaaccaccaccgagaccttggtcatgggagtggcacctgttaaagctcaatttgagggtgctgaaatgggtgtgcccgctgagaacgatggctgcaaatgtggaccaaactgcttctgcaacccctgcacttgcaagtgaagtgttgggagagcaagcttcaagcatagatagcccttaattaggaataatgataaactattaatgtgtcgctaaaaacttatgtatta

SEQ ID NO: 48752 - DNA, 366 bp, Glycine max
  Clone ID: LIB3107-035-Q1-K1-A7
ggaaaaagaaaaaaagagaagggggaaatctcttcttcaatggcggcagagtcatctcgcagtagcgctaaacgcccctttatggaagaagacgacaatgaattctccaaaaagccaccgtaatttcttttcccttcttcccgctcacaaaccctaatttcattcattcttattgagaaaattccagtaatcggtagaaatgatttttagacttagtttattgcatattggcttctgttattttgattcggggactattatcttgtggatcacctccaacgcctatcaagttctaatttctggcccttaaaattggcattcttcgaaagctagttactttaaattcattatgcttgtgtatgaata

SEQ ID NO: 48753 - DNA, 302 bp, Glycine max
  unsure (1)..(302): unsure at all n locations
  Clone ID: LIB3107-035-Q1-K1-A8
gggctagtgcatgacaagagggttcatggaggcatctcactgggatctgttgttcaggatcctcattccagtaaagcagatgaactaaagcaggtactcattgacaaaaacatggatgtaaatatgatgaaaatagggagtagcctaggcgctgctgcaacctgttctgacttcgagcagttggaagctgcaactgctcatgtctcggttaaggaaggtggtcacttgccaatgtcagttgttgttcctgaaggcagggtgcatggtggtagtctgatggcaatgctaacggngagttctag

SEQ ID NO: 48754 - DNA, 367 bp, Glycine max
  Clone ID: LIB3107-035-Q1-K1-B1
gagtatgtgtaagtgtaaatattatccctatacgcggattaaatatgcgcaggaagcaccaccagcactacttcttcgctttttgctagtgtgcacccttgttgccttgcgtgcgcccggtgcgcagccccctatcgtgcgcatcccccccaatcacctcaccgaaactactaacaccgtgatcacaatcgttcaccagcgccacagaacccaaatctcgggttccacccgcccagccatgttcaaagcgcgtgtctacaccgatgtcaacgttcttcgccccaaaaagtactgggattaccagttttttaccggtcaatggggtgatcaaaaagattattaagttgtgcgccaagtgggaaaggga

SEQ ID NO: 48755 - DNA, 395 bp, Glycine max
  Clone ID: LIB3107-035-Q1-K1-B11
ggacctagtgtgtgattggatggtgttgtaactcgaccttcttcttttgttgtgctgtgcttgggtttggtttttctctcacctgaaaatgtcttgctgcggtggtaactgtacttgcggaagctcctgcaagtgcagcaacggctgcggtggctgcgcgatgtacccaaacttgagctacactgaatcaaccaccaccgcgaccttagtcatgggagtggcacctgttaaggctcaatttgagggtgctgaaatgggtgtgcccgctgcgaacgatagctgcaaatgtggaccaaactgatcctgcaacccctgcacttgcaagtgaagtgttgggagagcaaactctaatcagagatagcccttaatttggaataatgataaactattcatgt

SEQ ID NO: 48756 - DNA, 356 bp, Glycine max
  Clone ID: LIB3107-035-Q1-K1-B12
tgccagataaaaaagattttggttatagttttccttgcgatggcccgggacgaggcggtacttgcgatatttcggcttgggacgcattttatttggcagttttctggatgttaaataccattgggtgggttactttttattggcattggaaacacattacactatggcagggtaatgtttcacagtttaatgaatcttctacctatttgatgggatggttaagagattatctatggttgaactcttcacaacttatcaacggatataacccttttggtatgaatagtttatcagtctgggcatggatgttcttgtttggacatcttgtttgggctactggatttatgttcttaatt

SEQ ID NO: 48757 - DNA, 423 bp, Glycine max
  unsure (1)..(423): unsure at all n locations
  Clone ID: LIB3107-035-Q1-K1-B2
gtcagggatcattcacaagattggggagacccttcatgtgggagggcacaagaaggaggaggagcataagggtgagcaccatgctggagaatacaaaggggagcaccatggtgaacacagtagtgagtacaaaggagagcatcatggtgaacacaaagctggagagtaccatggtgagcacaagccagagcacaaagaggggttcctagacaaagtcaaggacaagatccatggtgagggcggcgccgccgagggcgagaagaagaagaaggagaagaagaagaaggagcatggccatgagcatggccatgacagcagcagcagcagtgacagtgattaaactgctgcatcacctatatatttaaaagggttatgggaccatagtagcgagggctgtgccntaanttctctctctctctctct

SEQ ID NO: 48758 - DNA, 431 bp, Glycine max
  Clone ID: LIB3107-035-Q1-K1-B4
acgacagaagggtgctcactttacctgtggcagtactgagagaattcttgaaattaattgcttggaaaaagggattatcgcaagcacaagttggagatgttgtttcagctcaaaagccacggattgagttatgtcttgaaaatcattctgggttgaatatggatgagaactctgagagctcatctgcattcagaagcaacatccattatgatcgcctgcataattctgttgattttgcgcttactgttgttcttgattctgctcacatccctcatgtcaatgctgctggtggtgctgcatggttgccatactgtgtttcggtaagattgagatattcatttggtgaaagtcccaatgtatcatttattggcatgaatggtagccatggtggtagggcatgttggttacgtgttgatgattgggaaaaatgc

SEQ ID NO: 48759 - DNA, 357 bp, Glycine max
  Clone ID: LIB3107-035-Q1-K1-B7
gagtatgtgtaagtgtaaatattatcgctatacgcgcattaaatatgcgcaggaagcaccaccagcactacttctgcgcttcttgctagtgtgcacccttgttgccttgcgtgcgccggttgcgcagccccctatcgagcgcatcccccccaatcacctcaccgaaactactaacaccgtcatcacaatcgttcaccagcgccacagaacccagatctcgggttccacccgcccagccatgtccaaggcgcgtgtctacaccgatgtcaacgttctccgccccaaagagtactgggattacgagtctctcaccgttcaatggggtgatcaagatgattatgacgttgtgcgcaaagt

SEQ ID NO: 48760 - DNA, 420 bp, Glycine max
  Clone ID: LIB3107-035-Q1-K1-B8
aggaagacgtggaaatgattctagagaatcttccagctcaaaggcagagcatgcttttctctgctaccatgcccagttgggtgaagaagttggcgagaaaatatttgaacaatccactcacaattgatttggttggtgatgaagaggaaaagcttgctgaagggataaaactttatgctatagcagccactgccacttcaaagcggacaattctttctgatcttgtaactgtttacgcaaagggtgggaagactatagtttttacacagacaaaaagagatgctgatgaagtatcattgtcattaacaaatagtataatgtctgaagcactgcatggtgatatatctcagcatcagagagagagaacactgaatggtttccgtcaaggaaaattcacagtgctttgtgccactgatgttg

SEQ ID NO: 48761 - DNA, 332 bp, Glycine max
  Clone ID: LIB3107-035-Q1-K1-B9
gaagcatcaactaacgtaaaatcttctgccccaccctgcatttcagcagagtgattctgttcactacaatgccatcatcactatcctctttcctccatatggttcctattctctcccttcttgtactctcatgtgtgatttgttctagtagtgctcagggaccaccttcacctggctactaccccagttccaaaattagtcctgttagtttttatcaagggtttagaaacctatggggacctcagcatcagaggctagaccaaggctcattgacaatctggcttgactctaactcaggaagtggattcaagtcacttcactcttatcgatct

SEQ ID NO: 48762 - DNA, 216 bp, Glycine max
  unsure (1)..(216): unsure at all n locations
  Clone ID: LIB3107-035-Q1-K1-C1
ggggtgatgaangatggacccagttgtgctgttgataatggtactactgcaaattctacacctacttgcttatcaagatcgtgattatcttctctctcaactggtgcttatgtgaaagttctgatcttattggagagtagctgtctattattcctactaattgcaccacccatgccctggttttacccatattctaaaactaatctactatgagct

SEQ ID NO: 48763 - DNA, 418 bp, Glycine max
  Clone ID: LIB3107-035-Q1-K1-C11
ctcacttgtcatgcactgttctctaatgcatttattctcctgctgagattatggcggtttgatcgtccacctgttgaacatgtgatggggggtgcagcaaccccagcattaggatcacaattaggtcctgagtaccttttattggttcggaattgtatgttagcatcctatgggaaatctccgagagatcgagtaagaagtagaagattttcaaaaatgataagtttttctctcgagcccttatttatggattcctttccaaaattgaacatttggtatcggcaacatcaagaatgtattgcttccacctgcaatactcttgcacctggagggccagtttctcagatcgttgaagcactacttagcatgatgtgcaagaaaataaatagaagtgctcagtcattgacgcctacaactt

SEQ ID NO: 48764 - DNA, 414 bp, Glycine max
  Clone ID: LIB3107-035-Q1-K1-C12
ggggaagaagttgagtctgatcgactcaacctcaaccttctcctggttcctgcattgcgttgctctctctataccttctaattcccaaatttctagggtttggtacagagagaaaaaggaacataagatgtctcaaaacgggaagctgatgccaaatctagaccagcatagcaccaagcttctcaatctcactgttcttcaacgaatcgacccttttgtcgaggaaattctcatcaccgctgcgcatgtcaccttctacgagttcaacatcgacctcagccaatggagccgcaaggacgttgaaggatctctcttcgttgtcaagaggaacacgcaaccgcgatttcagtttattgtgatgaaccgtcgcaatactgaaaatttggtggagaatctcttgggcgatttcgagta

SEQ ID NO: 48765 - DNA, 400 bp, Glycine max
  Clone ID: LIB3107-035-Q1-K1-C2
ggtaggcaaagagagagagagaaaagcgtgaatcatgtcggacgaagagcatcacttcgattctcaggcggatgcgggagcgtccaagacgtatcctcagcaggctggtaccattcgcaagaatggctacatcgtcatcaaatccaggccttgcaaggttgtagaggtctctacgtcaaagacaggcaagcatggacatgcaaagtgtcactttgttgcaattgatatttttaatgggaaaaagcttgaagatattgttccatcatcccacaactgtgatgttccacatgtgaatcgcactgactatcagcttattgatatctctgaagacggctttgtgagtctgttgactgataatggaaataccaaagatgatctgaagcttcctactgatggggca

SEQ ID NO: 48766 - DNA, 443 bp, Glycine max
  Clone ID: LIB3107-035-Q1-K1-C3
cgaaagacgacagaaaggtgctcacttgctgggatatttgtgacttcatgtccaatattattggtgactctttccatttgtcgattgattaactcattgggaaccacagataaaagctccaagtcttgggcttccaattggatcactttgttgttcatctcttatgaaactacgcttcatgaaacaaacattaataattcttatttatgtttttatatcaaaaaaagaaggggatcttaatatacttcatcctttattcaataccccgaatgaccttgtaataacatatcttgcacttgcatgacgaaaattaaataactccttgtagttatgaggagtgtttccaatccatccattaagatgatatctaggccctcgatcaggagctaaaaattcaggccatttgtataccccacatgcacaagaatatatttacctacgat

SEQ ID NO: 48767 - DNA, 309 bp, Glycine max
  Clone ID: LIB3107-035-Q1-K1-C4
gctcaaaaacagagtaccctacacctatcagatagagaaggttttctgtcgtgcgggtgcagaaaatagctcggagctccacatgaatgaaatgggtctctatcttgacactcttattactttcccactcgcccctcacaatattcgcaaaagatgggctagtggcaaacggagattttgaggctaccccaataaacggggtcccacactacgctattgtggagggccccatcacagtcccaaactggaagtcacactgcaacggtgagcttgaggaatcatggcaaaaacaggctgggatgatcctta

SEQ ID NO: 48768 - DNA, 403 bp, Glycine max
  unsure (1)..(403): unsure at all n locations
  Clone ID: LIB3107-035-Q1-K1-C5
gatgcttcgttattctctatatttctctccctctttctcttcacactctggctttcattcatttgcattgcgagaaaacgaaaaactctgaaaaccgcaacaaactcacacacactcacaagagagtaacaaccaaacaaacaacaaatctctcatcatggcagttgaggctcctccgcacaacatgaatctcttcccctcgcagttactaaccgccagagaaatgacgaaaccgaatcttggcttctacaccgcacagcaaacggaagctgctgctgctgctgctacgcctcttcttcagtcaacggcgttaccttttctccaccaatccgatagtggcctcacctgccacgtnaccaccaccgctccgacgagaaaacgctccagagactccatcaccact

SEQ ID NO: 48769 - DNA, 317 bp, Glycine max
  Clone ID: LIB3107-035-Q1-K1-C6
tggaacataacatatagaaattgatgtcttttttgtaagagaacaaaggttggccaaacagatctcagttgagcatctttctgccttagatcaatgggtagatgtcttaaccaagccacttttctcaacatgatctgaagatctgagggacaaactcaatgcgaagtatttttctttagaaaaaccttgcccttgcgtttccgggggttttagaatgcatgtctaaaaataactgttacaaatagttattgtgggactgtcaggacagctctgttaagctaactacttttttttgactaacagaattctgttagtta

SEQ ID NO: 48770 - DNA, 397 bp, Glycine max
  Clone ID: LIB3107-035-Q1-K1-C7
ctctccttcagttcgctccacacccgaatcccattctctcaatcaaatcaaaactggggctttccaaaaaccaaaggcaataacagctcggacgcttgtaatactttctgctcttgctatgatcttaatccaaccagctattgcaccagcagcttttgctacctttcaaactgctgccaagaccggtggtcctgctgctgcagttggtagaaaactaatccatactgagctcctaagtagtgcttggactggtttcttagctggctgcttgcacaccttatcagggcctgaccacctagctgcctaggctccattgtcaatcggtcgaacacgaatggagagtgctgctgttggggccctttggggttgtggccatgatgctggtcaagttcttttt

SEQ ID NO: 48771 - DNA, 397 bp, Glycine max
  unsure (1)..(397): unsure at all n locations
  Clone ID: LIB3107-035-Q1-K1-C9
caacgccgatgccgatggagctggagctaggttcaacaactatccagcgatccttcaacacgcgctacacgcgccacgcgcgcgactcgctcgacgaattgcctgacagcttcaccatcaccgacccctccatccctggccaccccatcgtcttcgccagcccgggcttcctcaagctcacgggctacgcggcccgtgaagtcctgggccgacccgccgccatctttcagggcccgcgaacttcgagaaaatccgtcattgaaattcgcgaggccgttagagaggagcgaaacgcgcaggtcgttctgctcaactaccgcaaagacggcacgnccgtttggatgctttttcgtgtttgccccgttttcagcagcgacggtggcgccgtcgtgcactt

SEQ ID NO: 48772 - DNA, 364 bp, Glycine max
  Clone ID: LIB3107-035-Q1-K1-D1
ccgccatcccaaatatccccaaaagaccgcgcaccattctcaccatcttccacaccccaacattgcccaccaaactccccatcaagcaaaagaacccgctgaaccacattgtcgccaccgtcaacggctttcgtccgaaccggtccagaagcaccggcgatatcgtaaaggccggcatctccggcaccgagttcagcatcacgttcaagtagaggctggttacgaggttcatgacgtctagactaagcccatagtcgaccacataacctagaaaatctatagccaccgcaatgaacaacctgatacgagtgatgggggaacgcaccacgtctatgatggagccaacgagggcatccttgttttc

SEQ ID NO: 48773 - DNA, 411 bp, Glycine max
  Clone ID: LIB3107-035-Q1-K1-D10
ggttcacatccgaatccacaacacactgttaataattattctgattcacgaaaaacaggaaaaccccaaaactctctttgttcacaatgggcacagagacctcatcggtagatatttcggaacccctgctcttggatcctcacgggaacgaggaaaaggaagagtatttgcgcgaagaggttccggagtggaaggagcagataacgataagagggttggtggtgagtgctgtgttggggagcttgttctgcatcatcacccacaagctaaatctcaccgttgggatcatcccttctcttaatgttgctgctggcttggtggggttcttctttgtgaggacctggactgggttgttgaccaagatgggatttttcaccaagccctttactaggcaagagaacactgttattc

SEQ ID NO: 48774 - DNA, 413 bp, Glycine max
  unsure (1)..(413): unsure at all n locations
  Clone ID: LIB3107-035-Q1-K1-D11
gagcgttaagaacagaacgaagccacgcatgataataacaatacccttcttcgtttcttccctctccactcggcactcacaattctcaacccaaccaccccctattaaccctcaccgcaatctctgattcgatcttcttcaatttcggggtttcccatataccacaaggcataggcctgtgtgaatttgcgatatgctgggtaattgtcgccaagacccaatctcttgggtactcctttaccaacccccaccgccgcattaattgtttttctattggaatcggacaaaggttccactgcgactgaaactttcaaaggccaaaaaaaatgctcgattcggtccttctggcgcttttcttgccgtgccttggcatgagcggngtttttatcgtctacatgtgccttctttggtac

SEQ ID NO: 48775 - DNA, 351 bp, Glycine max
  Clone ID: LIB3107-035-Q1-K1-D12
caccactcagggtctagatggccttggtcagcgttgtgccaagtactacgaagctggtgcacgttttgccaaatggcgtgcagtgctgaagattggtcccaacgagccatctgagctgtctatccatgagaacgcctatggcttggctagatacgctgtcatatgccaggagaatggcctggttcccattgttgagcctgagatccttgttgatggacctcatgacattcacaagtgtgccgccgtcaccgagcgtgtccttgcagcatgctacaaggctttgaatgatcaccatgtccttcttgagggtaccctattgaagccaaacatggtcacccctggatcccaatc

SEQ ID NO: 48776 - DNA, 342 bp, Glycine max
  Clone ID: LIB3107-035-Q1-K1-D3
caacgggggggcggagaacggacccaaaactagaggctccgtcccgtcaaaccttccacgctgctctgcgtttccaatcaagggaataatatttcttaaagatattgcgaaaccatggatcacgccaatcctatgatttttgtgggcggaattcgtaggaaccgtgtctccttctgttgctttctagcaccagctccaacattctatcgcgtttgctagaagaaaaccacggaaggtgtacaagcactttcttacgtggctgcactctttacttcaatgcttagcgatatgttatgcttacatacagacgggcgaaatacttctcatcaccattaacgcatt

SEQ ID NO: 48777 - DNA, 316 bp, Glycine max
  Clone ID: LIB3107-035-Q1-K1-D4
gagggagatttcatgggaatccgatcggtattcgatgggggcgatcttagaaggggagtggagaaaactggaattgacccacaattcattccaaagatatggaagcatatcctcatctttgccaaacatcaaaattgggattgggagaaacacgtgcccttcttgccctcttcagcctactctctccttcggtccaacttcaaaacccctctctcttcccctattcactccgttttccactctgtcgacaacctcaccaccaagctcctaattcagctccaccacaatcatggacctttcgtcgaggctgtcatta

SEQ ID NO: 48778 - DNA, 258 bp, Glycine max
  Clone ID: LIB3107-035-Q1-K1-D6
aggagtgtgagcgtcaacaatggcttcttcaccttcaaaaggggcggtgtcttatcgagaaggaatacctgtggttcaaatcgccatagatggccaaacttacctcactcaatcccatctagatgttttttcacgcctaactgttttgcaagagagactatcgcaaggcaagggcggagaaacgaactttatcgctcatcgaagcgagcttcacgcgctgttatccaatattctatagtgcttcaacagtctttctac

SEQ ID NO: 48779 - DNA, 286 bp, Glycine max
  Clone ID: LIB3107-035-Q1-K1-D7
ttaacaaaacagaacgaatcagcacaggaaagagagagagaaaaacatatggtgaaggctttgtggaagaaggcgaattgaacacactgcctaaatacttcactctcaaatagaggcaaaatgggcggtatcttcggacattaacgacgataagaccatgcatgggtttctcaaggtctctggaactcatgtcgcgagcccattcgctaagtttggggttgcaaaagcttaagagaaatataacaaccgtgcttgagcatgtcagatgtggtgacaacaacatata

SEQ ID NO: 48780 - DNA, 393 bp, Glycine max
  Clone ID: LIB3107-035-Q1-K1-D8
ggttctagtgtgtgattgtttgttgttgtaactcgttcttcttcttttgttgttctgtgtttgtgtttgttttttctctcacctgaaaatgtcttgctgcggcggtaactgtggttgcggaagctcctgcaagtgcggcaacggctgcggaggctgcaagatgtacccagacttgagctacactgagtcaaccaccaccgagaccttggtcatgggagtggcacctgttaaggctcaatttgagggtgctgaaatgggtgtgcccgctgagaacgatggctgcaaatgtggaccaaactgctcctgcaacccctgcacttgcaagtgacgtgttgggagagcaagcttcaagcagagatagcccttaattaggaataatgataaactattaat

SEQ ID NO: 48781 - DNA, 137 bp, Glycine max
  Clone ID: LIB3107-035-Q1-K1-D9
caactttctgttgtgtgtgtgtgtgtgtgtgttcgagtctgtgtatgtgtgtgtgcgtgtgtgggtgtgtggctgtctgtgtttgtggttgtgtgtgtgtgtgtgtgcgtgtgtgtgtgggtatgtaagtgtgtgtg

SEQ ID NO: 48782 - DNA, 357 bp, Glycine max
  unsure (1)..(357): unsure at all n locations
  Clone ID: LIB3107-035-Q1-K1-E10
gaagtaagtgaatcgatcaagtacccaaactctaaagaaagatcattatttatggtccaagaccatacatattgataaaaagaactattattgatttgatgaatagacaaatcaagcgaaaacatcataactatagttaacaataaaatactaggaaaagcccacatacggcgaagatatttggttgctgtcggaaaaagtagaagtcccactcctattaacataggaactggaaatggaataaaaagtatgatccatgaatattgatgtgtatattccatacaataaacaaaaaaattatgattctaatgaattttgtttcttattcgtcggnttttattttatcttttttggaaa

SEQ ID NO: 48783 - DNA, 372 bp, Glycine max
  Clone ID: LIB3107-035-Q1-K1-E11
ggggttgcattttcgcacggagcaaaaccaaaaacacggtgtggcgctgcggatctctctctcggtcgttgctcttcgccgcgagaaccactccaaatcgttcctgcatttctctccttcactgtgcttcttagccttccctacgctctcatgttctccaccctcgccgtcccctcattacactccttacgactgtgggaattctcgggtgcacgtagtcgctgattcctgtacacagcgctgacgcctgcgctcgtctcacttatcacatttccatcgaatcgcgcgcttgctgcaaattctcgcagggtacttgttccttctaaatttctatctctcttgccctaattaggcatgcttgctgtcattatg

SEQ ID NO: 48784 - DNA, 389 bp, Glycine max
  Clone ID: LIB3107-035-Q1-K1-E12
gataccaaaaacaaaacacaagccaagtgaaagtgagaaaaaataaaaatcaaagagcataatgtcagggatcattcacaagattggggagacccttcatgtgggagggcacaagaaggaggaggagcataagggtgagcaccatgctggagaatacaaaggggagcaccatggtgaacacagtagtgagtacaaaggagagcatcatggtgaacacaaagctggagagtaccatggtgagcacaagccagagcacaaagaggggttcctagacaaagtcaaagacgagatccatggtgagggcggcgccgccgagggcgagaagaagatgagggagagaagaagaggagcatggccatgagcatggccatgacagcagcagcagcagt

SEQ ID NO: 48785 - DNA, 301 bp, Glycine max
  Clone ID: LIB3107-035-Q1-K1-E4
acgaaggtcggctggagaagacaagaaggtcggctgcggaagacaagaggggaacgcaccaaaaagaaatctcaatttttgagcagcaacactttctctgttctcgaaaattctcagttgagagaaaatctgatatgtcgggcaagcgtatgtcgacatcacctttggtgacatcgaagtaccacctactacgctgtatatcggcaaacggagcgttggctcaagaccgacttcctcagtaaacctgagagataactgcatatgaatgacttatgagcctggacacttgctcaactggatt

SEQ ID NO: 48786 - DNA, 327 bp, Glycine max
  Clone ID: LIB3107-035-Q1-K1-E7
ggttctagtgtgtgattgtttgttgttgtaactcgttcttcttcttttgttgttctgtgtttgtgtttgttttttctctcacctgaaaatgtcttgctgcggtggtaactgtggttgcggaagctcctgcaagtgcggcaacggctgcggaggctgcaagatgtacccagacttgagctacactgagtcaaccaccaccgagaccttggtcatgggagtggcacctgttaaagctcaatttgagggtgctgaaatgggtgtgcccgctgagaacgatggctgcaaatgtggaccaaactgctcctgcaacccctgcacttgcaagtg

SEQ ID NO: 48787 - DNA, 418 bp, Glycine max
  Clone ID: LIB3107-035-Q1-K1-E8
ggcagaggaaccgtgttctctaatcttgtaattttctgtgtcgcttcgtggttcattcttctcgttcttgtgatctgttctattttggagtacttacaacactcctttgcaagtttaattaattaaagaggctaatcaattttcaattggactgcagcagatggctgaggagggttgcagggttactctaaatgtttatgacttgagccaaggactagcacggcagctttcaatgtcctttttggggaaagctattgaaggcatatggcacacaggagttgtggtttatggtaatgagtattactttggtggtggcatacaacattctcctgctggattaacaccatatggaactccacttagagtggtagacttaggtgtgacacatgttcccaaggatgttttcgaaatgtattta

SEQ ID NO: 48788 - DNA, 386 bp, Glycine max
  Clone ID: LIB3107-035-Q1-K1-E9
tatcttggttgggatgcttgacacatacttaaatgtcttggctttgtggcttctgtttcttctttttgctagttgggtggcatatgtgttttttgaggatacaatacaggggaaaacagtattcacttcctatggtactacgttgtatcagccatttcttttatttaccacatccaataatccagatgtttgggttcctgcatacaagtcgtcacgttggtattgcctgtttttcgtactctttgtgctggtgggagtttactttgttacaaacttgatccttgctgttgtttatgacagtttcaagagtgagcttgtaaaacatgtttttgagaaggatcgtttgagaagaactatgttggacaaaagctttgatctcttggata

SEQ ID NO: 48789 - DNA, 397 bp, Glycine max
  Clone ID: LIB3107-035-Q1-K1-F11
ggtgagcgtcaacaatggcttcttcgtcttgagagtcggcggtgtcggagcgaagaggaataccaggggctcagttcgtagaggatgtccaaacttacctcactcagtcgggtctcgatgttggttcagccctggcttttctccaagagagacttcagcagtacaaggtagtagaaatgaagcttcttgctcagcaaagggatcttcaggcaaagataccagatattgaaaagtgcttagacgttgttgctacattgaaagctaagaagggtactggtgaggaacttattgctgattttgaggtatcagaaggcatctattcacgagcacgcatagaagaaaccaattccgtgtgtttatggctgggagctaatgttatgctggaatattcattaga

SEQ ID NO: 48790 - DNA, 418 bp, Glycine max
  Clone ID: LIB3107-035-Q1-K1-F12
ggactctccgctggagttggagttggcaacgccttggtgttggagatcgtgatgaccttcggtctggtgtacacggtctacgcaactgccattgaccccaagaagggtaatttgggaattattgctcccatcgccattggtttcattgtcggcgctaacattttgttgggtggggccttctctggagcggccatgaaccccgctgtgacatttgggcctgctgtcgtgagctggacctggaccaaccactggatctactgggccgggcctctcatcggtggtggaatcgctggccttgtttacgaggttgtctttatcagccacacccacgagcagcttcccaccactgactactagagggggggaaatgaaaataaaaaaaaaaatgtgtattattgaaattctctggaatcttctt

SEQ ID NO: 48791 - DNA, 393 bp, Glycine max
  Clone ID: LIB3107-035-Q1-K1-F2
tgcattatgttagtttaatctatttatgtatttagtccataatggtgggtaatgtcacatgagtcaagtgcgagaatgctagaattaatgtctcatgtgagagacatgtgacttatatataaactaataaataaataaataaataaataaataaagactaaattgtaattggattaaatatgagaagtttctaaagataactgctacttaataggagtggtgattataaaggggttaatactcactaacgtgaaacaagtccccttcttgacagaaaggattctctctaatctatagtcatcacaaatgttgacaagaaagaatatttaagaaagcaaaatcttgtttctctcctcttccaaggaatcaaagtgtaccaaagagaagtctcac

SEQ ID NO: 48792 - DNA, 146 bp, Glycine max
  Clone ID: LIB3107-035-Q1-K1-F3
accactgaacgggatacatagtccagatttcaaaaggataatgtcggtgacaaccatgggtaacgcattttttttttccaaaccatattattaccgcaatttccattatcagacatcaaacatgcttcacgatcaacactccaaaa

SEQ ID NO: 48793 - DNA, 397 bp, Glycine max
  Clone ID: LIB3107-035-Q1-K1-F4
caaacattggtgataagtcctgtcaagttatctttggacactccattgctcacatggacaacttaatataacgattactctggttaaataatgattgctttttaacatttcattattcacatgaaaattaatctgataataattcctgtcaaataatgattgtctttggacatttcattattcacatgaataatcacactatttatcatcaccacatgtttatcatcacaaacatgtaattatgctgccaaattgtgtctttctttgggccgagcacaattcatatgaataatttcatgcaacatctatgtaaattcaatcaaatcaacttatgcaacagaggttacttgggcaacatgttgtttcaatcaatttaacaaaaaatacaagataattt

SEQ ID NO: 48794 - DNA, 423 bp, Glycine max
  Clone ID: LIB3107-035-Q1-K1-F5
aggcctacaaagcacccataggaatgtctccttatcgggttgtctttggaaaggtatgtcatcttccagtggagattgagcataaagcatattgggcagtgaagacctgcaacttctctatggatcaagctggtgaggaaagaaagttgcaactgagtgagttagatgagatccgcctagaagcgtatgagaatgccaagttctacaaagaaaagaccaagaagttccatgatagcatggtaattaagaaggacttcatggttgggcaaaaagtgttattgtataattctaggcttggactcatgagtggtaagttgaggtctaagtggattggtccttttgttgttactaacatttttccttatggtacagttgagataaaaagcgactccacaaataagagcttaaggtcaatggacaccg

SEQ ID NO: 48795 - DNA, 380 bp, Glycine max
  Clone ID: LIB3107-035-Q1-K1-F6
ttacaaacttctgtgggctcactatcgtgacaccatgaacattaattcacttgcccgcaaatccttggtcaatgccgacggtattatagagaaaacattcttgtggggtaggtactctttggaaatgtctgctgttatttacaaggattgggttttcaccgatcaagcattgcctaatgatcttgtcaagagaggagttgctgttaaggatccatctgctccccatggagttcgacttttgatcgaggactatccttatgcttctgatgggctagagatatgggatgctatcaagtcttgggtggaagaatatgtctcattctactacaagtcagatgaggaacttcaaaaagaccccgagctccaagcttggtggaaag

SEQ ID NO: 48796 - DNA, 406 bp, Glycine max
  Clone ID: LIB3107-035-Q1-K1-F8
gatccacacgctcacaataacacactgtcaccgttccgttccgttttcctctgttttttttttctttctttcaaatccccgcttcgtggaaatcccgaaccagaaaccatgcttctccgaaccgctgctgcttctgcttcgtccctctccctcttcagcccgaacgccgaacctccccgttcggttcccgctcgtggattggtggttcgcgcagcgaaaggatccacgaaccaccgcgccctgaccggagtgatttttgaaccgttcgaagaggtgaagaaggagctcgatctcgttcccaccgttccgcaagcttctctcgcgcgccaaaaatacgttgacgaatctgagtccgccgttaacgaacaaatcaatgtggagtataacgtttcgtacgtttaccatg

SEQ ID NO: 48797 - DNA, 384 bp, Glycine max
  unsure (1)..(384): unsure at all n locations
  Clone ID: LIB3107-035-Q1-K1-F9
gaaacagagtagagatagcaaagggataatgtgggtgacaaccatggctaacacatctcttcttcccaaaccatattattaccgtaatttccattatcaacatcaaagatgcttcaagatcaacctcccaaaatggacaactagagcttcctctgctgcccctggggtcgacctcaacactctcgaatctgccatttccaagaaagacagtgatgctgttaaagaggcacttaatcagcttagtgaagttggttgggccaagaaatggagttctcagccatatgtttcacgtcgtacggtcagtctccaattacaaatgtggcaaagtgacaactaaacattaagctctcatcaaccattcttggacatggcatncatcataca

SEQ ID NO: 48798 - DNA, 92 bp, Glycine max
  Clone ID: LIB3107-035-Q1-K1-G10
gaatggtccggtgaagtgttcggattgcggcgacgtgagcggttcgctgcccgcgacgttgtgagaagtccactgaaccttatcatttagag

SEQ ID NO: 48799 - DNA, 397 bp, Glycine max
  Clone ID: LIB3107-035-Q1-K1-G11
gagacatatctctaattaacactaataacagcaaactaaaggtgaagtttgccagaaacaagatgggaaggaaccattttcagcagcaacactgtgctgatgggagcatgtggatggagagtcagggtcagcaacagagctatgccttccaagaagagtcttggagccctgataacaactatggccacaaccacaagcaattcccaggcatgcacatgaacatgaacaacaacaacaacaacaaaaggcttggtgcttttgctgctgtggactctgacttctcaatgcaaaaacatcatcatgggcatggcaacggcgtaggagccatgcacatgaacatgaacaggcatggtggcaagttaggaggcatgtttcaagaaggcatgcacagtgacca

SEQ ID NO: 48800 - DNA, 346 bp, Glycine max
  unsure (1)..(346): unsure at all n locations
  Clone ID: LIB3107-035-Q1-K1-G12
agctttttcccattgatcatggtctttgtctccctggaactttggaagatccttattttgaatggatctattggcctcaagcatcaattcctttctcagatgatgagctcgactatatatatcacctagacccatttcgtgattcagaaatgcttagaatggagcttcccatgattcgagaagcatgcttgcgggttttggttctctgtactatcttcctcaaagaagcagcagcttttggtctttgtctagcagagattggtgacatgatgagtagggaatttcagggtctccatgaagagccaagtgagcttgagcttatctgtattgaagcanagaaactttt

SEQ ID NO: 48801 - DNA, 374 bp, Glycine max
  Clone ID: LIB3107-035-Q1-K1-G3
acagaaccaatcttacaccagacattacttattttatctttgacacttcaacaatgtttaaaaccttcaaatacatcatactctttggtagagattccgctggttattcggcgaggcagtttgccaaacaaggcgttaaaccatggtagttggctatcatttctaaagaagcggtagcaccttatgaacaaccttctctcaacaatgcttacctttttccacagtcccctgctaaactttctcttttccatgtctgtctttcaaattgatgacaaaggtttcttcctcattcgtacacacagaaaaggatagtattaattcttatcacacaaatagttaatgtataccttcctgcaaaatctcttatcattgct

SEQ ID NO: 48802 - DNA, 409 bp, Glycine max
  Clone ID: LIB3107-035-Q1-K1-G4
gaattcgtgatttttatatggagataagttttcattttgagagctctgttattccttttattgggcgtatagctccttcagatacttatcggatttggaagcgtgggtctaatcttcgtgctgatatgacccttgctggttttgatggcttacgcatccagcgatcggaccaaacatttttgttccttggagagggctatgttgcagaggaaggtaatttaactctgccacctggttctttgattgctctttctcataaggagaaggaaatcacaaatgctttggaaggagctggtacacaaccaacagagtctgaagttgcttatgaagtttccttgatgtctcagacaaatatgtatagaccaggtattgatgttactcaggctgagcttgttccccatttaaattg

SEQ ID NO: 48803 - DNA, 455 bp, Glycine max
  unsure (1)..(455): unsure at all n locations
  Clone ID: LIB3107-035-Q1-K1-G5
aactcctatgtggtcctttcattttacaggagtttggtggaacaagttcctcggatggacgaagcctatanggtnntttcttatttgatgatagtgaccgatattnnngatgatagttaccgaaatagtgagcgatatcgaccccgtcgaccttgatatggagcgtnnngagcttctatactatgtatgaataccgctatactanntggatatgatgcgcacgaaatagaaccgacttttattatcanncctttcaattcgannattagcaaaagccaatgtgcttccttgcatttaatatggatgtccaaacatccanntgatctggagtgtgaatgagtcgaattacttatnccctcggtcttttagtgaactatctctccacggattgtgaaagatgttctactagaaatattcttgttattgcttcgactcatattccccaaaaagtagat

SEQ ID NO: 48804 - DNA, 403 bp, Glycine max
  Clone ID: LIB3107-035-Q1-K1-G6
gcctcatcataagattctctctttcatctccccattgaaaaccctcgccaaagttattgacttttctggttcaacagcaatgggtttgcttcaatttcttcttctgatctctctaggggtgaggagttagccagttttttattctttttctgagattcccacatggatcgggggtttagatttctgtgtcaggcaggaactacgagattagtttcatttgtaggaataacagtggctatagttttcatggttcagtattctgaacttcctagtagtaaattcttatcttctgttactaccaagtttactagtttcacaatggatacatcatcttcagttaattctaaagtggagggtaataatttgcacctaaatggttcaaattcaaactctactcatgcat

SEQ ID NO: 48805 - DNA, 416 bp, Glycine max
  Clone ID: LIB3107-035-Q1-K1-G7
gattcataaatcttagttactttatcagtatcattcattatcactacgattgttctaaaagcaattattactcttgagaagaattaaaagatcatcatcacaataacaagatgagttcaggaattagagcatggagtgtggcagctagtgttggagttgtggaggccttgaaagaccaaggcatatgcaggtggaatcatgctttaagatcagctcaacaccatctcaaaaaccatgttggctcattctctcaggctaacaagctttcttcttctgctatgatctccacaacactaaaacatgagaaggcaaagcaatcagaggagtccttcagaactgtcatgtacttaagctgctggggccccaactagatatcataagtccaataagaaaatattctttctcttttaatttct

SEQ ID NO: 48806 - DNA, 181 bp, Glycine max
  Clone ID: LIB3107-035-Q1-K1-G8
ccttcctaccggtgggaaaaaaacacaaaaagggatttggttttatgggtgaaggtctcttgggaaagggttggcttgccaaatattaaacacaatgggcccccatggatttggtaataatctttgggccctttcagatttggtttgggaaccctccaggctttttgggaccagggattta

SEQ ID NO: 48807 - DNA, 406 bp, Glycine max
  Clone ID: LIB3107-035-Q1-K1-G9
ggtggcagagagcgaacccaaaactagagctaccttcccttcaaaccttccactcttctctccttttccaatcaagggaataatatttcttagagatattccgaaaccatggctcacgccaatcctatgatttttgttgttagaattctaggtaaccttgtctccttctgttgctttctagcaccagtaccaacattctatcgagtttgtaagaagaaaaccacggaaggtttccaatcacttccttacgtggctgcactcttcacttcaatgctttggatattttatgcttacataaagacgggcgaaatacttctcatcaccattaacgcattcggttgtttcatagagacagtttaccttgtcatctatatcacttattgccccaagaaagctaggttcttta

SEQ ID NO: 48808 - DNA, 310 bp, Glycine max
  unsure (1)..(310): unsure at all n locations
  Clone ID: LIB3107-035-Q1-K1-H1
aagtgagtgtgttgatcnanataactagaaacagtgtgatgaaaatgaaggtccttgttttcttcgttgctacaattttggtagcatggcaatgccatgcgtacgatatgttccctctccgaatgaacactggctatggtgcccgtactccggaggtgaaatgcgcaagttggaggcttgctgtggaagcacacaacatctttggctttgagaccattcctgaagagtgcgttgaagcaacaaaggaatacatccatggcgaacaatatagatcagacttcaaaacaatttaccaacaagcttactttta

SEQ ID NO: 48809 - DNA, 391 bp, Glycine max
  Clone ID: LIB3107-035-Q1-K1-H10
ctccacctagagggaaatggctcccaaaccgcctagtacgggtctgtttgttggactgaacaagggtcacgtcgtcaccaagaaggaattgcctccacgcccctcagatcgtaaggggaaaacaagcaagagggtgcactttgtgaggaacctcataagagaggtagccggttttgcaccctatgaaaagcgtataactgagttgctgaaggttgggaaggataagagggcactgaaagttgcaaagagaaagctcggaacacacaaacgcgcaaagaagaagcgtgaggaaatgtccagtgttctcaggaagatgagggctggtggtgctggagacaagaagaaataagtcttatttactgttttccagattcactagatggacctgtgt

SEQ ID NO: 48810 - DNA, 351 bp, Glycine max
  Clone ID: LIB3107-035-Q1-K1-H11
ctttgacagtcgtggcaatccaaccgtcgaggtggatttgacatgctccgatggtacttttgctagagctgctgttccaagtggtgcatccactgggatttatgaggcccttgaattgagagatggaggatctgactaccttggaaagggtgtatcaaaggctgttgacaatgtgaacaccattattgcccctgctttggttggcaaggacccaactcagcagactgctattgacaacttaatggttcaacaacttgatggaactgttaacgaatggggttggtgcaagcaaaagcttggagcaaatgccatattggcagtgtctcttgcagtctgcaaagctggtgctac

SEQ ID NO: 48811 - DNA, 408 bp, Glycine max
  Clone ID: LIB3107-035-Q1-K1-H2
ttgcactagcgggtaagtacataataacgttagttgtgaattgtaccctaaggtgtaataaattatgggtagagaggtataactgttggcttggtttgaactttgaagggttagtgccttgcatttgcttgctgattggtttgtgctttatccctgagtcccccagatggctggtatgcattattaagctagaatcattatctaaggaccaaatgctcctttattttattatatataaatataacaggaatagcaatgaaaattaacatgtatgtatgtattttttgtaggctaaagttggccgtgaaaaagaatttcaactagctttaaggagacttcggggtaaagatgttgatatttctgatgaagctgctgaaattctggtactttccaagctctctttactga

SEQ ID NO: 48812 - DNA, 407 bp, Glycine max
  Clone ID: LIB3107-035-Q1-K1-H4
gatggcagaggctgcgcacagtttgaactttgaacgttgaaggaacatagaggcagaggtttttcttctctcaccgtagaatcgaatcgagttcactttgatcgtgtgtgtctccgatcttcaaatccgcaacaaccatggtgaggggattgctcaacaagctcgtctctcgctccctctccgtcgccggaaaatggcagcacaaccaactccgccgcctcaacatccacgagtaccagggcgctgaattgatgagcaaacacggagttaatgttccgagaggcgtggctgtttcctctgttgaagaggtcagaaaggccatcagggaccttttccctaatgaaaatgagttggtggttaagagtcaaattttagccggtggaagaggtttgggaactttcaaaagc

SEQ ID NO: 48813 - DNA, 349 bp, Glycine max
  unsure (1)..(349): unsure at all n locations
  Clone ID: LIB3107-035-Q1-K1-H5
aggggtgtgagagagcgagcgagcgagcagtttcaaagagaggatttgggattgggaaagcgagggattgcgctgcgtctcttcctcttctctttcgattcatccctcattcataatcttncaatccaacaacctcagcctcacactcacacatacacacatctgaacgcgtatcgtccctcccatggcttcaaagcgcatcctcaaggagctcaaggacttgcagaaagacccaccaacttcttgcagcgctggtccagtagctgaggacatgttccattggcaagcaacgattatgggtcctgctgatagtccttatgctggaggtgtattcctagtcactattcac

SEQ ID NO: 48814 - DNA, 335 bp, Glycine max
  unsure (1)..(335): unsure at all n locations
  Clone ID: LIB3107-035-Q1-K1-H6
ctttgacagtcgtggcaatccaaccgtcnaggtggatttgacatgctccnatcgtacttttgctagagctgctgttccaagtggtgcatccactgggatttatgaggcccttgaattgagagatggaggatctgactaccttggaaagggtgtatcaaaagctgttgacaatgtgaacaccattattgcccctgctttggttggcaaggacccaactcaacagactgctattgacaacttaatggttcaacaacttgatggaactgttaacgaatggggttggtgcaagcaaaagcttggagcaaatgccatattggcagtgtctcttgcagtct

SEQ ID NO: 48815 - DNA, 421 bp, Glycine max
  Clone ID: LIB3107-035-Q1-K1-H8
ggcacaaaaaatggagttctacacaaggccaaataggagtgacatccacctctcagcagaggaagaagccaccatagaggcaaagaccagagactactttgatggggttgcaccacaacgccacacaaagcctcaacgaagtgagtattcagctcaatatgtggatgctttctccaatgcccatcactcttcttcttcttcttctataccagaattcatgcaattccaacgcctcgagaatgatccccaagagaagaaattggagtacaatggaagtcaagtaccggaagaatttgtggaaacagagtattaccaagatctcaacagcgtggacaaacaccaccatacgacgggaacaggatttatcaaagtagagaaaaatggaaatgactttcacatagaaccagataatgacactggg

SEQ ID NO: 48816 - DNA, 383 bp, Glycine max
  Clone ID: LIB3107-036-Q1-K1-A1
gaatgtttcatttattaggagtttttcactcttagttatatcatttgatttttctgtcacttctcttatttgattatttcatgttgctatctagtgaagttttcccgatcctggtcttgtatttgtcttcctcagaaataaatacctcatgtttaacttattttcaggggacaagctgagaaagaatttaaagtagaggtagaagcaattggtcgagtgcgacacaaaaatcttgttaggttgcttggatactgtgtcgagggagcctacaggatgcttgtgtatgagtatgtagacaatggcaatctagaacaatggctgcatggggatgttggagctgtaagccctttgacatggaacatacggatgaacattatattggg

SEQ ID NO: 48817 - DNA, 410 bp, Glycine max
  Clone ID: LIB3107-036-Q1-K1-A11
atgactatggcttttgacaatatcattgagagatggatcaataattactacttcagcataatatactgaaaaattatggtagttatgactgtgtcattgaggtattgatagacaattgctactttaatatgatctcattaaattagaacatgattacgaaagtgctcaatctttctttttctggttaacctgactagtatttaatcccaaatcaagcagtcctataagggacttggtgacatgtagtcaggggttgaacccaaattagtttctgcttagaggattataagttatataggagccacacagagctaactttcctacaaatcagaaaacagcatgtggagatttatgaatgcttgttgcttcaaactaaaatcagatattcaatgtctatcaattagaaagat

SEQ ID NO: 48818 - DNA, 55 bp, Glycine max
  Clone ID: LIB3107-036-Q1-K1-A12
cgtagtgtggggattgtgggatagtctcttacgagcctgacaggggcatttacat

SEQ ID NO: 48819 - DNA, 245 bp, Glycine max
  Clone ID: LIB3107-036-Q1-K1-A2
aataacccatatacatatgcataatcattccaatcatcatcatccatcttaacactattattaataataatactctatccttctttactttatttcttgtttccatcctttttatgctcattctcctcttctttcataacttatctcaacctctcttattcccccttattctccacccccttcaccaatcttcctcatatcttcaatatttacttatcttaaacactcatctctttcaccctatt

SEQ ID NO: 48820 - DNA, 382 bp, Glycine max
  Clone ID: LIB3107-036-Q1-K1-A3
ttgtttgctcgattgaaaaatttcctctttttctttgtgattttaactggtggtctttaaattggtgagtgagacatgtggggatgggttctctttgagtaggatttaggctgatacctcacataaaggccaagtggcatccaagttggacttcatgataagctacttgatggttggtcgactctggtagcgatttgaggctcttatacccccatgctgctatagatatctttatactttccccaaaaatccagatccaatctttgcatctaatatctgggatatcaatcttcatatattgtcttttgagtacgatcttgattatgagagctcggtgttttttgtatattattattgggggcgtgagaaactcttttttgga

SEQ ID NO: 48821 - DNA, 410 bp, Glycine max
  Clone ID: LIB3107-036-Q1-K1-A4
gtatcccaaatggatgattctttgcttgagagtcatgcatctggtgggcatggggagagcaagtttgatgaatttccagatatgttgaatgatttggaaaggctttctgtctctgattacaacaatgttaatggttttctatcatatactggttcaaattcaacatctgatgctcagcggtcattttttgactttgaggattcccaggatcaagtcttctcaccacctttgctaatggactcatcacttttgacagatccatttgaagacttgctggcccctctctccgagactgaaacggccttgatagaccattgaaaattttctgggcaacctgcaagacttcattgaagaatcagcattactgatgtggtggattgctattcttttggtgagatatatactccatt

SEQ ID NO: 48822 - DNA, 414 bp, Glycine max
  Clone ID: LIB3107-036-Q1-K1-A6
ggaagcagaaccaccgcaatagaagttcgttttggtcctcttccgaaaaacccagaggcagaggcagaggcaagcgaagcagcagctccgatctgaagacgatgatgaagaagaaggtgcaatggttctggacttgggttcttggttccgtcgttttgaggctcattctcctcttcttccccaaaaatctcaacctctcttctcgccccgaagtctccacccccctcaccagcctccgtcgtctggccgagggttactggctgaagcagtcatcgctgtcaccctatgctggatcaatgtaccatggttcccctttgttattgacgcttctcggcccgctcacagttagaagaattgaaggacaacccgatcatcttttatgcagatgtggtcagtgcaatgcttatttgtgct

SEQ ID NO: 48823 - DNA, 421 bp, Glycine max
  Clone ID: LIB3107-036-Q1-K1-A7
cactaaaccttcaccaactgaggaattgagtgctaccctggcctctaaattaacctgataatgatgttttcatgagcatttagactttagtagctagcatgttgtagtctaaccgttgtctgagaatataaaaaaaaaaaaattgctgcttttatagatagggacattttataatcttatatttaatcctggtgaattacctgcttagaccaacagcattgtacaaattctccaagcacagatataacataagcttttgcctgcctaagttgtgattgccttcttctgaccgagacacgcttcttcttgtccgcaacaactgtaatttaaaaaacttgcaggccattacaacactaaccgttcacagtatgaacagatagatggtttaatctatgtcaaattgtcaatcattaatattaga

SEQ ID NO: 48824 - DNA, 399 bp, Glycine max
  Clone ID: LIB3107-036-Q1-K1-A8
gcttcgagttatattgcccaaaaagtagatgcgggtgtaatagctacgagttggtcaaatacatgcattaagatacgaaggcttattatttcacaacagcgaaaacactatgtcactatttcatatactaggggatttcacttggaaaagaaaatgttccatactaatggattcgggtccacaacgatgggttcaaatgtacgagatcttgtagcacttaccaacgaggacctatcgactagtattatacatcaaaaatccatcatagacactaatataatgagatctgttcttcatagacaaacttgggatttccgatctcaagtaagatcggttcaagatcatgggatccttttatatcaaataagaaaggctgtttcacaggatgtacttctaagt

SEQ ID NO: 48825 - DNA, 350 bp, Glycine max
  Clone ID: LIB3107-036-Q1-K1-A9
gaagagagagaagaagaagttgttgggttgagttgggtttggattggatttctaatctaatctatacctttctttttcctatgcttttaaggcacaaatccttctcccttctctcttctttcttcttcttctcctgacccttattattattccttgcccttaccctttaggcaagggaaggaagaaagaataactatattattatctttattgtaatctatctttttattataattataattataattattgttgttattattccttaaatatggattcgccgtgtctccccaacgattcggtttctggattcaaagacaaggagtcaatggttgacccctttttggtcg

SEQ ID NO: 48826 - DNA, 406 bp, Glycine max
  Clone ID: LIB3107-036-Q1-K1-B1
gcaaggtgagattttgatgcgtgttgaggagcttgggggaagaataatggaggacgtgggtgagttgaacgagttggtggggtatttggggagattggaggagactcgtgaaaagttggtgcttttgtttgtgaataggggaaagaacaatgagttctgggattcggttaagaagaccgaggagaagggtgtggcgaggaagaaggagattgaaaggaagtggctcgcggcggtggtggtggcagggaacgccgccgagtttactcggtccaccaacccgtttcttgacccggggcaactcagtccggtcccacggttaagttttgcaacggtaaggtgacatatggccaacggtcatttttcgggacaatttgggaaaaatcaacatacacattctttttctttt

SEQ ID NO: 48827 - DNA, 352 bp, Glycine max
  Clone ID: LIB3107-036-Q1-K1-B10
ggtgctctgctcgtgcctctagggatatcggtcctggatttacatttgggctgggactttacaagaatcgtaagctatgggaaagtcttacccaactgtgagtgctgattaccagaaggccgttgagaaggcgaagaagaagctcagaggcttcatcgctgagaagagatgcgctcctctaatgctccgtttgtcatggcactctgctggaacctttgacaagggcacgaagaccggtggacccttcggaaccatcaagcaccctgccgaactggctcacagcgctaacatcggacttgacatcgctgctaagattttggagccaactaatgcctaattccctattttgagc

SEQ ID NO: 48828 - DNA, 328 bp, Glycine max
  Clone ID: LIB3107-036-Q1-K1-B11
gatctacactcataaatcattacatggtcatagtctacacctaattagccaaacacaccacagcaccaaactagttggctcaattctctttgaatggctttggaggctttgaattcaccaacagcagccaccactcccttccgtggttaccaagaagaggaggaggaggttgaccttcacctacgcgagccttgggccaagagaaaacgctccaaacgacctcgttttgagtcggaggaagagtacttggctctttgcctcatcatgcttgcacaaagcggtaacaacaacaacacccaattaccgtcttcgtcacagtcacacaaag

SEQ ID NO: 48829 - DNA, 357 bp, Glycine max
  Clone ID: LIB3107-036-Q1-K1-B12
gaagtgtggaggtgcgtgcttttgtgggggcaaagggtagatagtcgatctgtcgcagagcaaagaatcgtcggcgactgcgaagctgcactataaccgcgattaactatgattagccttcgccggagcgtaaacaagatcccggcgaaatcgaagcgattcaaatgccgattggtgaagttcgaggagctgccggagtacttaaaggacatcgagttcatattggactattaccgctctgaatggcccgtgaaggaagccttgtggagcatcttcgcgtggcacaacgaaaccctaaacatttggacgcatataggaggatttctcatattcgccgtgttggcgtcgatgagcacc

SEQ ID NO: 48830 - DNA, 267 bp, Glycine max
  Clone ID: LIB3107-036-Q1-K1-B2
ggtatattaaatatttaactagagattagagaaacttggcagttgatatttggtggctcatctgatcctggttggagggtttgatcagcatggccattgtaggcggaaccatgatggctgcgtatctgcgtgtattcatgcccacttacccacagtgccgcaccactacgaaggggagatgcataaatctgaaaactatctgctgcgattaccgacccaaaattacaatgccgcccctcaaccctaaagacccctttctcttcaagc

SEQ ID NO: 48831 - DNA, 358 bp, Glycine max
  Clone ID: LIB3107-036-Q1-K1-B3
cgcgtccggcgagcagacggctgacagaagactactgaatgggaagagagaaacagaggaatcaagataggtcctctggattttctatcagaatctgaggacccaaaatctatggttctctgttcttctctggggatctgaagacatgcagtccaagtctgaaactgcaaatcggctgaggtcagatcctcattcctttcaacctggcggtgtatattctgagcgttggtggcgtggtattgggtacaatcccatggcccaaacaatggctggggcatatgcgtccaattcgacatctcttgaatgccctaaacgcgattctgaatacaatgaagatggccagtctttgaccaatagc

SEQ ID NO: 48832 - DNA, 414 bp, Glycine max
  Clone ID: LIB3107-036-Q1-K1-B4
gcttttcaatatcaatatcttgattttaattcatgtcatgcaagatcaccaattgattcgttcttaaattactggtattgcagcaaagccagcacctatggcatcatctagcaatgtttttccgtgatgagctactgtcttggtcttggagaagaccgcttgggatgcccattgcctctatggctgcaggtggtactatgagccctgttgacttcaaacagaaagttatcacaaatgtggaacatgttattacaagggttaagggaattgctcctcagaatttttctgaagaggtgagcaactaacaaaattgcgtgcccttatcaattttctgaaattatttatcctttgctttaatttatttggaaaatctacaatcaggtttcctttctaatagtatttgatagatgaaat

SEQ ID NO: 48833 - DNA, 344 bp, Glycine max
  Clone ID: LIB3107-036-Q1-K1-B5
gccagaagacaacagacgggtgcctggtggctaaaaaattagccacatgttatgatagcttaccaactggaattactagactgctaaatgctctctgagtatattcaactggcagcatgaatagcatcagcagactattcatattatgaacttctgtcttcttcatatcgaacgtacggatagaactcttgctctcactggtgattatgcatggagtagctcgcgccaacatgaatgtcttgactatgcattgagtgtcgatgggttgcagagctagcatggtatgccatgaattctgtaaacacactgctaagattaggagaactctctttatcactatattg

SEQ ID NO: 48834 - DNA, 418 bp, Glycine max
  Clone ID: LIB3107-036-Q1-K1-B6
gaagagagaaaaagaggaatcaagatagctcctttgaattttctatcagaatctgaggacccaaaatctagggttttctgttcttctctggggatctgaagacatgcagtccaagtctgaaactgcaaatcggctgaggtcagatcctcattcctttcaacctggcggtgtttattctgagccttggtggcgtggtattgggtacaatcccatggcccaaacaatggctggggcaaatgcgtccaattcgtcatctcttgaatgccctaatggtgattctgaatccaatgaagagggccagtctttgtccaatagcgggatgaatgaggaagatgatgatgccactaaggattcgaagcctgctgctcctaatgaaacaggaaattatgagcaagaacagcaagggatgcagcatact

SEQ ID NO: 48835 - DNA, 409 bp, Glycine max
  Clone ID: LIB3107-036-Q1-K1-B7
gaagagagaaaaagaggaatcaagatagctcctgggaattttctatcagaatctgaggacccaaaatctagggttctctgttcttctctggggatctgaagacatgcagtccaagtctgaaactgcaaatcggctgaggtcagatcctcattcctttcaacctggcggtgtttattctgagccttggtggcgtggtattgggtacaatcccatggcccaaacaatggctggggcaaatgcgtccaattcgacatctcttgaatgccctaatggcgattctgaatccaatgaacacggccagtctttgtccaatagcgggatgaatgaagaagatgatgatgccactaaggattcgaagcctgatgatactaatgaaacaggaaattatgagcaagaacaatatgggatg

SEQ ID NO: 48836 - DNA, 394 bp, Glycine max
  unsure (1)..(394): unsure at all n locations
  Clone ID: LIB3107-036-Q1-K1-B8
gaagcatagcagcatcatacaaagcattgaattcaaaaacttaagttcattccttgggttttgctttcttcctcaaaaccaaacatgtcgaacacatgccgcaactgggactgggcttacaagactagctgcaccaagggaaacagctatggtgttattgtagagactgagaagagttacatcgagactgttgtcatggatgttccagcagctgagcatgatgggaagtgcaagtgtggcactaactgcacttgcacggactggacctgtggccattaaggaatatgtatgaaaatgtaattgccatgtgtttggcaatacaaatatccaaataatgtaatcttcgtatgaataaatgtgtgtgctgttatccgaaaaaaaaaaaangtgancc

SEQ ID NO: 48837 - DNA, 361 bp, Glycine max
  Clone ID: LIB3107-036-Q1-K1-B9
caaggtcattcctggtgctgctgacaagccaatgatcgtggttaactacaagggtgaagagaagcaatttgccgcagaagaaatctcttccacggtgctcatcaagatgcgtgagattgctgaggcttacctaggctccacagtgaagaatgctgttgtcaccgtccctgcttacttcaatgattctcagcgtcaagctaccaaagacgctggtgtcattgctggtctaaatgtgatgcgaattatcaatgagcctactgcagctgccattgcatatggtcttgataagaaagccacgaatgttggtgagaaagaatgtgttgatttttgaccttggtggtggacatttgatgtgctttac

SEQ ID NO: 48838 - DNA, 376 bp, Glycine max
  Clone ID: LIB3107-036-Q1-K1-C1
gatcttaatgcttccagcgacttaactgattctacacctgtggaagatattcctgttactagtcctccattatttcagaatgcaacatatgaagagtgacaagaagctcccaatggatttccttagataagtcattgcacaaaatgcggaaaggcctctaagaaactttgatcgaagaatgagccatctacagcatcaggaatctgtacctctcaatttaccatcaacagggagtgctatgcatcataatcagttcttctctgcatgaagcacctggctctgactcaatcaacgattcaccggacttgaagatcacagctggacggacatgatctgctaatgctggcgctactatgaaccatacacctgtcttgcg

SEQ ID NO: 48839 - DNA, 356 bp, Glycine max
  Clone ID: LIB3107-036-Q1-K1-C11
gaacccaatccactattataattttttttatctcttctcttctctttcccctcaccaacacgtcatttcatttctttcaaagtcttcccttctctcctcttcctcttcacttcttaaaccgtcgccccttaacgacgccgtttcctgttctctcatgtaagcgcggttcgagaaaaaaaaaaagaaaatccgttattggcgttgttttatttttgtttccggttcggattatttgaatggatcgggcggcgttgacggtcggaccgggcatggacatgccgataatgcacgacagcgaccgttacgatctggtccgcgacatcgggtccggaaatttcggcgtggcgaggctgatg

SEQ ID NO: 48840 - DNA, 303 bp, Glycine max
  Clone ID: LIB3107-036-Q1-K1-C12
agaataatatgactatgtaaactactctgccatgggactcttgttctgaacgacttttcaagagaatcaaaccatggcagtcaaagtatacggtcctcactgtgcttccaccaagcggttgctgatttgtctggtttacaaagaagtctaatttgaagttgtccctgttgatgtcactaacggggagcagaacgatcctgagtacctcaaactacacccatttgcagttgatcctgtcatcaaatatcgagattataccttatatgaatctcgtgctataatgatgtattatgcattaaaata

SEQ ID NO: 48841 - DNA, 384 bp, Glycine max
  Clone ID: LIB3107-036-Q1-K1-C2
gacccaacgaatttgcaaaactcaaacgaatacgtgttctctttctcttcaatttcacccttattagcatagcatattcatttccctttcttgaatcgttgtaagcgcattgcgattttgcccttatctttatttcaattttttgttctgtttttgttattcatttgggttaatttcgattcgaagcttaactgcgagaggggatatcagagaagttgattggcctcccattaataacagatctgaatgatctgatggagtctaaaggtgggaagaagaagtcgtctagtagtaagtcctttttgtacgaagctcctctcgattacatcattgaagacgttcgaccacacggtggaatcaagaagttcagatctgctgcttact

SEQ ID NO: 48842 - DNA, 375 bp, Glycine max
  Clone ID: LIB3107-036-Q1-K1-C3
gacccaacgaatttgcaaaactcaaacgaatacgtgttctgtttctcttcaatttcacccttattagcatagcatattcatttccctttcttgaatcgttgtaagcgcattgcgattttgcccttatctttatttcaattttttgttctgtttttgttattcatttgggttaatttcgattcgaagcttaactgcgagaggggatatcagagaagttgattggcctcccattaataacagatctgaatgatctgatggagtctaaaggtgggaagaagaagtcgtctagtagtaagtcctttttgtacgaagctcctctcgattacatcattgaagacgttcgaccacacggtggaatcaagaagttcagatctg

SEQ ID NO: 48843 - DNA, 345 bp, Glycine max
  Clone ID: LIB3107-036-Q1-K1-C4
gccgctcttctatcgctactggctcgacttccggaaggtccttcacgactggttccggaagcgacgattccaacccggtatcatgtccgagttgactcggtcaattaagcttccaattgattcacacaacaacaacaaactacaaaccaataacacaaataaaaacaaatactcttcttgtgccgtagttggaaacagtggaattttgctgaatagaaactacggtagtgaaattgattcccatgaggttgtgataaggttaaacaacgctagggttgatcactttgaaaccaacgttgggaaaaaaactagcatttcattcatgaatagtaacatcatgcattt

SEQ ID NO: 48844 - DNA, 378 bp, Glycine max
  Clone ID: LIB3107-036-Q1-K1-C5
ggagtttcaacattcaacaatggtacctcaagctttgtcagtgcctgcgagtgccagcttcactatcgcttctcgcaccagaagtccctcccacctcgtattttctcacagaaacccgtgctcgatagcttcttccttaccaaacccatatggccattcatcaggagttgggttatcaagtaaaagccgtggttttcctttaaaacttgatgagaaaaatatccatggtgcgagtacaagttatggtgcaattgaagccaagggaaatccaccaataacacccgcagtgatgactcctggaggacctcttgatctctcatctgttttgtttaggaatcgtataatattcataggacaaccagtcaattcacaagtggc

SEQ ID NO: 48845 - DNA, 264 bp, Glycine max
  Clone ID: LIB3107-036-Q1-K1-C6
gggttctagtgtgtgattgtttcgtgctgtaactcgttcttcttcttttggtggtccggggttggggttggtttttctcttaacttgaaatggcttggttccggggtaacttggggttccggaacttcttgcagtgccggaaccgcttgcgaagcttcaagatgtacccagactttagcttcacttagtcaaccaccaccgagacctttgtcatgggagtggcacctgtttaaggttaatttgagggtgcttaaatgggtgtgc

SEQ ID NO: 48846 - DNA, 360 bp, Glycine max
  Clone ID: LIB3107-036-Q1-K1-C7
gggttctagtgtgtgattgtttgttgttgtaactggttcttcttcttttgttgttctgtgtttgtgtttgttttttctctcacctgaaaatgtcttgctgcggtggtaactgtggttgcggaagctcctgcaagtgcggcaacggctgcggaggctgcaagatgtacccagacttgagctacactgagtcaaccaccaccgagaccttggtcatgggagtggcacctgttaaggctcaatttgagggtgctgaaatgggtgtgcccgctgagaacgatggctgcaaatgtggaccaaactgctcctgcaacccctgcacttgcatgtgaagtgttgggagagcaagcttcaagcagagat

SEQ ID NO: 48847 - DNA, 344 bp, Glycine max
  Clone ID: LIB3107-036-Q1-K1-C8
gaacaaacacaaattttatgtgattagtcgcggtattcagaataaaaaatgaaagtagacaaataaaaaaggaaaggagatgtttgaataaaaataattccccttcaagttcttattttttgagaggacaggacaatctgaatgttctattatgctctatcaacacattaaaaagattatatgatatatctgctgtggaagtaggtcaacatttctatcgtcaaataggcagctgccaagtacatgcccaagtactcattacttcttgggttgtcattgccctattattgcattcagccatcctacttattctaaatctgcagaccttgcccgttatcggtcac

SEQ ID NO: 48848 - DNA, 411 bp, Glycine max
  Clone ID: LIB3107-036-Q1-K1-C9
ggaaacgaagaagccctaactccgcacgcattcgggagaaaactcaatattcgtcgctcatggcactctcttctcgtctcttttccaaatccaaattgatctatggcagtcaaatacttctacaaaaggagcatgctattccagttcgtcactttgctaaagagtctgcccctcctgcccttaagggagacgagatgctgaagaacatttttgtggaggtgaagaacaaatttgagaccgccataggaatattaaagaaggagaaaatcaccattgacccagaagatccagctgctgtttctcattatgcaaaggtcatgaaaacaattagagagaaggcaagcttattgtcggagtcccaagacatactatccaccattgaaattgagacacaggatattccagatgctc

SEQ ID NO: 48849 - DNA, 394 bp, Glycine max
  Clone ID: LIB3107-036-Q1-K1-D10
acaagggtcctactctgctagatggacttgaccagatctctgagcccaagaggccttctgacaagcccctcaggctaccccttcaggatgtgtacaagattggaggaattggaactgtgcctgtgggacgggttgagactggtgtcttgaagcctggaatggtggtgacttttgcaccaactggactgacaaccgaagttaagtctgtggaaatgcaccatgaagctctcacagaggctcttcccggtgataatgttggattcaatgttaagaatgttgctgttaaggatctcaagcgtggttatgttgcctcgaactcaaaggatgatcctgccaaagaggctgctaacttcactgcccaggttatcattcatgaaccatcctggtcagattg

SEQ ID NO: 48850 - DNA, 373 bp, Glycine max
  unsure (1)..(373): unsure at all n locations
  Clone ID: LIB3107-036-Q1-K1-D11
ggacccaggatgaggatcgcgtgagcactcctcttcagatccgcacaagcattgcatatcaaatcaagcatcctgttccttatctctgtctctgcatttcccttccttcttcttctctctctctctctaaaaccctaattctatacatggaagggaaatctcaaatctaatgactaattaattaatccatcgatcaagcatggagtccgaactcaaagacctcaattcgaagccgccgaacggcaacggcaacagcgttcgcgatgaccgtcctctgctgaagccggagcctncggtctccgccgacagcatcgccgatatggagaagaagttcgccgcttacgtccgncgcgacgtgtacggcaccatggga

SEQ ID NO: 48851 - DNA, 262 bp, Glycine max
  Clone ID: LIB3107-036-Q1-K1-D2
gctgagggggctataggcagataggtcttgatcggtgttcgagcatcgggtgtaatcatttaactgcatatattgcatgtccactattccagcatctctgaaaatagttggagccatctaatgaatcctggttgatgagaacgcctactgcatgtgcatcttagatactgtattgatctcatggtgatcaccgtctatcatgcattcaattaaactattgatccatgagatagatctatcatgtcatgtacagcacccacat

SEQ ID NO: 48852 - DNA, 393 bp, Glycine max
  Clone ID: LIB3107-036-Q1-K1-D3
gctcacaaagcattctactatcattattagtcattcctgtttcatatacttcattacattggtcactagtaatcacttgctgcattttctttcctactcttcacccttgagaatttgtcattccgacatggaacttagttttaagcaccattttggccttgcttgtgtcttactactttgagctgctctgtgtagctcacaggactctttcactgactcgagagcaacatattatggtagccctgattgctatgggaatccaaggggagcttgtggctttggcgaatatggaagaactgtgaatgatggaagtgtggcaagagtgtctaggctatggaggaatggaagtggctgcggtgcatgctatcaagcaaggtgcataataccacaata

SEQ ID NO: 48853 - DNA, 373 bp, Glycine max
  Clone ID: LIB3107-036-Q1-K1-D4
acgcgtgcgaacacgacaagacgagcgtttgctgtcactgagcatgctactattactaagacacatttctgggtcatatacgttattacattggacagtagtaatatactaggcggaatttgtttgctactctgcaccgatgcgagaattagcaattgccacatgcaacttagtggcatgcatcatgattggccatgcttgagagttactccgttgtagctgctgtgaggcattcacaggactcttcaactgactctggatcgacttgttatgctataccaagtggatctggcaatccagggtgagcttgtggctctagcgatattggaagaactgcgcatgattgaagtgtgggccgaatgtctacgctatg

SEQ ID NO: 48854 - DNA, 348 bp, Glycine max
  Clone ID: LIB3107-036-Q1-K1-D6
gacacaccatttgcattattcttctcttctgtttcttttcatatctgatctacatttatctatattctcttctcttctctctcaaccttctcaacagtcttattagcagagagcacaagagaggacagggaaaacagaaaaaaaaaaattcggcttctgcatcttcagataagaagggggaacttctctattttttgcggcatatcgtggtttgtaaagactgtttctaggtggagattcattaattgacactgaagtgcaagagaaaagtgagtctaaagatgggttatatatgtgatttttgtggagaccagagatccatggtgtactgccgctctgacgctgcat

SEQ ID NO: 48855 - DNA, 403 bp, Glycine max
  Clone ID: LIB3107-036-Q1-K1-D7
gactctgcgaaggtgcaacctgacagcctccaaatccaatggcttcagagaagaaactttcgaacccaatgagggagataaaagtgcagaagctcgtcctcaatatctctgttggcgagagtggagatcgtctcaccagagccgccaaggtgttggaacaactgtatggccaaaccccagtgttgtccaaaggtatgatccgttaactggcatttatggaatggactgctttgatgttctggagcgttctggctatcgagtctgacgccgacgtatgtgcaagtcccgtgttggaattcagcaccgtgtcacaaacgaggatgctatgaagtgtgtccatgtgaaacatgatgcagagatccgtaacgagatccaggcgatcgttcagctagagcgagttcac

SEQ ID NO: 48856 - DNA, 231 bp, Glycine max
  Clone ID: LIB3107-036-Q1-K1-D8
gactttgtattagtgttgcatgacacaatcaggggcctgtgtgcttagaagagagacattgagtcataatgagggagatgaagaagcagaatttggagcgcgatacatgagtaagagaaagtggagatcgaataacaagaatcgacaagatggtgcatcatgtaactgagctgacgctagggctgagcctatgtatgattggtaatgtagcctcggtagcaagtaatgctg

SEQ ID NO: 48857 - DNA, 375 bp, Glycine max
  Clone ID: LIB3107-036-Q1-K1-D9
gaacacaagttcgtcaacgttggtgctctcaagcgccacgtcgcagaaaccggaaccggtccaaacgccgtcgtattcctgcacggcttcccggagatatggtactcgtggcggcaccagatgatagctctcgccggtgccggattcagagcggtttccttcgattacagaggttacggtctctccgacccgccacccgaacccgataagacctcttggtccgatcttctcagtgatctccttcatattcttgatgctcttgctctttctaaggtgtttcttgttgggaaagactttggagctcgtcctgcatatctattttcaattcttcaccctgaaagggtcttgggagttgtcacgttgggagttccatat

SEQ ID NO: 48858 - DNA, 192 bp, Glycine max
  Clone ID: LIB3107-036-Q1-K1-E10
ctgagtatactgagagctgactttcctaagtcattcgagacgggctataactaaaggatatgagccaatacataagactcttctgaaaatacacggtatatttcatctggggaagaggcttctaagagatgttagaaccgattaatccaagatgacataagatgtgttaatatccattactgatcaaaacac

SEQ ID NO: 48859 - DNA, 383 bp, Glycine max
  Clone ID: LIB3107-036-Q1-K1-E11
gtacattgtctattccaaccatgttattcccatgtttagcttatctactggtttaactccaaataggaattaatcattatatgttctaaagttgatatatcattagtagggttgatgattcatatactctagtacgctattgatacagtagatctttgtatcattcttcacagtatttttgataacttgagaagcatgttattttttcaggctttgactccctacatgcagtctccagttgggaactcttcaaataaatccattgggaagctgatgggacctgctcttggtgatcacaatcaaggaaacttttccatcaatctctggagaaatgctttccaagatgcttttcaacgactctgtcctgttcgagcaagaaggca

SEQ ID NO: 48860 - DNA, 123 bp, Glycine max
  Clone ID: LIB3107-036-Q1-K1-E12
ggctgcgttgctgatggatatattgtgaactggctacattcaaggagcgttcatattactaatgacactggattacacttcactcagcaaagctgctttcttatagttagccaagaatgataa

SEQ ID NO: 48861 - DNA, 443 bp, Glycine max
  Clone ID: LIB3107-036-Q1-K1-E2
cgtgtaacaataatagtctatacacacaaacatatgcatcttagtaactctatcagtagaaactaccataattcaggacatgcaacagtcatcggatttgacaatttatctcagcaataatatagctaactaatcaacaattcctgaaaataatcctaagctatctttatccagatacactgttaacacgttggcaagtgtaccaaattgtcacaagtagtaaagtaagcgaaagtccaagtgtcgaatccacatgaactttgtttgtacttagattaatgcaaacccaattttgaagcaatagacaaagaatttaaaataaagataggaaaatagatgagataaagatttaaagatcaaaatagaagattaagaaaattaaaaaattaaagtaaaagattaaaaaattaaagattaaaaaaagaaaatcagagcgtgataat

SEQ ID NO: 48862 - DNA, 393 bp, Glycine max
  Clone ID: LIB3107-036-Q1-K1-E3
caactaggaagggaagacactaaggttgtgccacgcttttggatcgctattgatagcttgcttgcaagtaggaagcaacaaatgatgaagggtggtgatcaaggggtgcaagactttgcaacaagagagataaagaggctgctcttcctcaaacaagaccctaagggatgggtcattcttagcaaagggtacaatgtaaagctccttggtcaaggtgaggccatgtgtcgctcggttagagattttggtatatggtatgggaagttgcatgaagaagtgagctttgatgttgccttcaaagagtactatgaaagcatcaaggttaaggattgtcctaaaaaatgtgaacatagtgaaatttctaactacccaacggatatattggcccacata

SEQ ID NO: 48863 - DNA, 440 bp, Glycine max
  Clone ID: LIB3107-036-Q1-K1-E4
gaaacccttgcagattattcagcctgaaggtccaagttttcgtgttaatgggcacttcattgaatggcagaagtggaattttcgtattggattcactcctagggagggtttggttattcattcagtagcctatattgatggaagtcggggacggagaccagtggcccatagattgagctttgttgagatggtggtcccatatggagatcctaatgatcctcactataggaaaaatgcttttgatgctggggaagatgtcttgggtaaaaattctcattctctgaagaagggctgtgattgtttaggctatatcaaatactttgatgcgcatttcacaaacttctatggaagtgttgaaacaattgaaaactgtgtttgtttgcacgaagaagatcatggtattttatggaagcatcaagattggagaacaggtttggctt

SEQ ID NO: 48864 - DNA, 417 bp, Glycine max
  unsure (1)..(417): unsure at all n locations
  Clone ID: LIB3107-036-Q1-K1-E6
gcttttcaatatcaatatcttgattttaattcatgtcatgcaagatcaccaattgattcgttcttaaattactggtattgcagcaaagccagcacctatggcatcatctagcaatgtttttccgtgatgagctactgtcttggtcttggagaagaccgcttgggatgcccattgcctctatggctgcaggtggtactatgagccctgttgacttcaaacagaaagttatcacaaatgtggaacatgttattacaagggttaagggaattgctcctcagaatttttctgaagaggtgagcaactaacaaaattgcgtgcccttatcaattntctgaaattatttatcctttgctttaatttatttggaaattctacaatcaggttttcctttctaatagtatttgatagatgaaatgt

SEQ ID NO: 48865 - DNA, 392 bp, Glycine max
  Clone ID: LIB3107-036-Q1-K1-E7
ggagtacaacttcacattttagaagaataccccctcttttgctgcatcagaggagttgtaaattaagagcatggctgcacaagctcttgtatcatcatcttctcttaccttctcagcggaggctgcaagacaaagtcttggaccaagatcactccaatctccatttggcttctccagaaaagcctgctttcttgttaaggcagctgctaccccccctgtcaagcaaggatcagacagacctttgtggtttgcatcaaagcaaagtctttcttacttggatggcagccttacgggtgactatggatttgaccctctgggactttcagaccctgaaggaacaggagggttcattgagccgaaatggctagcatatggtgagataatcaatggtc

SEQ ID NO: 48866 - DNA, 334 bp, Glycine max
  Clone ID: LIB3107-036-Q1-K1-E8
gacgaatgaattgggaatttggaattgtgtctgtgactgagactaagctctcaacttaaaacccttgctgatgttcactgtcgccgtcgaaacggggttcctctgtggtagttggaaggtcgcaccgtgccactattgcaccaggctgcctcgtcatcggagggggtcacggtgaagtgtattctgcttttgtgttataatttcaataggaattcagatcttataatcctcagtctgatcctattaaggacagacacttgaagaaaagaatcaatagattgaaagacatggttgagccagataaaaattgcgagactatggctgaagatgttgc

SEQ ID NO: 48867 - DNA, 369 bp, Glycine max
  Clone ID: LIB3107-036-Q1-K1-E9
acagctagttaaaacaagattcctaattgattgctgcacatgcaacatttaatactactgggctcttttgctttactgttgagtcatcaagggactcttgttgtcagagtcttttgtttttgttatcctgactcacagagatatcaaaacaagtacatgaaagaatgccatgtaattctttgtcctctattgatttcagattggttttggtatgggtcattttcagtcaaatgctggtttcctcctcttattctttgcttttccccctctcgagagtgtggggaattttcgtgatacaaggaaagacatcaagatgccttgtcccttgaaatacaatgagaatctaaataaagaaaagtagcatatgcc

SEQ ID NO: 48868 - DNA, 314 bp, Glycine max
  Clone ID: LIB3107-036-Q1-K1-F1
acggtgcaacttgtcattccacatgactaccctggcttatattccatgatatggggattgaattaatatcataacttcacaaatgctcgtgtgttaatcttttctgacctcctcaacgaagactgagttactgattattggaccagaatcacttctgtaagaattaagctattactcaacagacttcaatcttgataatgcaaatgatgacatcactgtaaagatacgttcatgcatgacctatttagttagaaaaatgctaaaatgtatcttatttgatcgcattctaacgattgactatagaattgaccctc

SEQ ID NO: 48869 - DNA, 180 bp, Glycine max
  Clone ID: LIB3107-036-Q1-K1-F10
tatagagaccgaaaggctcgctgggttccctccgacaattaatcaagcagagggtttccaaggggttactggcatttacttggtggtcaatcagaagcttcaagaagaagcactgcttgcaaaatgccttggtagaagaatttgttatcaatgtggaagaaaatttaatattgccttcat

SEQ ID NO: 48870 - DNA, 300 bp, Glycine max
  Clone ID: LIB3107-036-Q1-K1-F11
tcgaccacgcgtccgcgaacacccggcacgggacacacagatgtgataccaaataataactgatgagctttacagcgaagaggaagacagctatgcgagcattgaagagaagatgcacaacaactatagcctgacgcgaggcacagggcatacgctgtgacactctctcaaccaatgatgaatccctattaccatgctttcacttactaggctgaaccttacactgattgtagcactaatcttacccctctgaaaccacgcttatgaagctacctcaataacactagcataaagcagtat

SEQ ID NO: 48871 - DNA, 215 bp, Glycine max
  Clone ID: LIB3107-036-Q1-K1-F12
tgaatgctcttgctactgttaatcgatcttcttcagggaataggtccaatccaaggataggtataatgccttgaagttctttgtaacgttctaaaattagctcaactttttaaacagcctcataatattacttaccaacaattcgaggtaagagcataattgacgtcgattctaaaggatctactaattgatagatacctattgccactaattct

SEQ ID NO: 48872 - DNA, 345 bp, Glycine max
  Clone ID: LIB3107-036-Q1-K1-F2
ggaaccgattgtatcattaactcttattctcttccgctacggctaacaatctctatctatctacaaagtgtgttgtgtactgtacacaaaaaaaccaggattctctgttggagtctgactgacgcacctggccaacagagtaccatgcagcctctgcatcgcctggaatcacagggaagcgtatactcataaagcgttataaataatcattgaacacagattcacatgtcacgagctcgagactatgatggacatacatgcttagaagggaactatgggaatgatggacataggtaaaccacatcagaattgcaagactcggaatacagatggcgatcgaggatt

SEQ ID NO: 48873 - DNA, 403 bp, Glycine max
  unsure (1)..(403): unsure at all n locations
  Clone ID: LIB3107-036-Q1-K1-F4
ggtgaatagagagagtgatgggtgagaggggggacgaagctgtaaccccggcggngaggctgttcctgcaggcagaaatgaaacaagtaatccactgcgtcatanggctgaagaaccccatcgacgcggagctagtgaaatcacaagtccggaactctactatgctacaacacccacgcttcacgagtctgatggtaagaggcgaaggaggagtggagcactggcggcccaccgaaatcgacatcgatcggcacgtgcttataatagaggaagcagtgggcgagagggaggcggaggatgaatcggccatcaacaagtacctggccgaattatccatagacagcgatgggcttagcatggagaagcccctgtgggaaatccatcttcttaaggcccacaagtg

SEQ ID NO: 48874 - DNA, 398 bp, Glycine max
  Clone ID: LIB3107-036-Q1-K1-F5
acgaaaaaaaaagtgatcccccttttcttgtttgtcttatatccatatttatggagatagaattcatgtcataatttaaaaaatgaacatgtataattctttttcgtaatcgaaaatgatgagggagttattgataatttgaaaagagtattttatggaagaattaagttattactcaacaaatttgaatttgaattttttaaaggatgagatcaattcagaagtactttttgtattttttatttatttaaagaaatgttaaaatgtattttattttttctttattaaatgtatttattttaaaatttgtttttttagaacagacagaattcaataggtctaattcagaaccgtccgataaaatcgaatattatctaccttagagatgtatcaaggga

SEQ ID NO: 48875 - DNA, 424 bp, Glycine max
  Clone ID: LIB3107-036-Q1-K1-F6
tccgaggggacgacagaagggacgctccttgactacgggattgtcacatcaaactgtcaatagtggagtattcactatcattttggtctacatgaacgaattatatcttgcacagtggattaaagttctgacgccgttattgatctcaactactcttgagtgattacaatctctatgagcttagttacactttttctcagtgatgatagtgaatgaatgatgatatataggatgtcttaaatgactgatcactgagcctatccagatgaacctactcataaggactactatcaacaacatcactgctagccagttatcactgagaaactgatgcaagagttttcaactagggtagcagaaatttacggttacctgcacttgaggctacatatgaaacttgttgacttatccaattaactgacac

SEQ ID NO: 48876 - DNA, 369 bp, Glycine max
  Clone ID: LIB3107-036-Q1-K1-F8
gacaaggcacaggcttccctccctgctttgaagaaacaaattagaagagtgtgttgcgttgtgttgaagtagcaagctagcaaagatgtttggcatcttaggaggcaataaggggcacaagatcaagggtactgaggtgttgatgagcaagaatgtgttggaacttaacgaaatagtgtccactactcagggtggtttggttggtgctgccaccggcatcttcggtgctgccaccggtattgttggtggagttgtcgatggtgctactgccatcttcaagtacaacattggcattcagttgatcagtgccaccaagactgatggacttggaaatgggaaagttggcaagcaaacctatgtggagaaaca

SEQ ID NO: 48877 - DNA, 426 bp, Glycine max
  unsure (1)..(426): unsure at all n locations
  Clone ID: LIB3107-036-Q1-K1-F9
ggattcatattttccttgcgttgccctttcattttccctcactttctcgctcgccaaacgcccctctctctcctccaatggccgaccagctcaccgacgaccagatcgccgagttcaaggaggccttcagcctcttcgacaaggacggcgatggttgtattactactaaggaacttgggactgtgatgcggtcactagggcaaaacccaactgaggcagaactgcaggatatgattaatgaggttgatgctgatggcaatggaaccatcgacttcccagagttcctcaacctgatggctcgcaagatgaaagacaccgactccgaggaggagcttaaggaggctttccgtgtgttcgacaaggatcagaatggtttcatctctgcagctgagctccgncatgtcatgacaaatcttggggagaagc

SEQ ID NO: 48878 - DNA, 455 bp, Glycine max
  Clone ID: LIB3107-036-Q1-K1-G1
agacgacagaagggcaccaaaataacattgctggtttgattgagatgaattaaggaagacttaactcatgatatagtgagtctcagcttcttttaacaagtcacctaagcaattaagattacaatggattgactcttctatccttttgaggattgttgttggtcatgaaccttatcccaataccccgaattgtacgctcgtatttttccagggtgaataagtaatttaatatgttatcattctatttttattttatttctcacctaattttttcaatcaagaaatccaacatttaattttatttctactatatttctcttttttaaaattatctctctttcatttttatatactttatttctttcctctctaccaaagcatttaggcttaaggcactcgtgtacaagtttaagttctttagcttattttgatttaagtttcttgacttatttaaa

SEQ ID NO: 48879 - DNA, 436 bp, Glycine max
  Clone ID: LIB3107-036-Q1-K1-G10
gtttcagatgatggagctgccatgcttacatttgaagcactttccgagacttctgagtttgcaaggaaatgggttccattctgcaagaagttctgcattgaaccacgggctcctgaatggtattttgctcagaaggttgactacttgaaggataaagtggatgcaacatttataagagaacgtcgtgccattaagagggagtatgaagagttcaaagtgaggattaatgcattggtggctttggcacaaaaggttcctgaggatggttggacaatgcaggatggtactccatggcctgggaacaatgtcagagatcatcccggaatgatacaagttttccttggtcaaaatggtgttcgtgacatcgaaagaaatgaattacctcgtctggtctatgtgtctcgtgagataagacctggatatgatcaccacaaaa

SEQ ID NO: 48880 - DNA, 390 bp, Glycine max
  Clone ID: LIB3107-036-Q1-K1-G11
gggttatatccgaagacatggaaagggatgtttttatgtcagcagcagaagcccaagctcacggaattgtagatcttgtagccgttgaataaaaaataagtggcaaggattattctaaaaaaatacaggatttgaaatttcatttttgaatcttcttactttgattctaatataatatctctattagttaatctattaatatctattagttaatctattaatagaatataagtaatatagaatctaagtaattcacggataggatagatctaaaccagctcattatatatatattacaacttactatgccaactatgaaacaacttattagaaacacatgacagccaatccgaaacgtcacaaaatgcccagctcttcggggatgccctc

SEQ ID NO: 48881 - DNA, 332 bp, Glycine max
  Clone ID: LIB3107-036-Q1-K1-G12
gcacacaacaaccttcttcttcttctcttaaaagttattaagagcttttgcttttctttctgcgcgcttttcccaattaagtagttcttccttttctcaaagcaaaaaaaatgttcatcgagagtttcaaggttgagagtcctaacgtgaagtacacagagactgagattcagtccgtgtacaactatgaaaccactgaacttggtcacgagaacaataatggcacttatcagagggttgtcaagcccaaaactgtcaaatatgaatttaaaaccaacacccatgtccctaaactaggggtaatgcttgcagagtggaggggaaacaatggc

SEQ ID NO: 48882 - DNA, 409 bp, Glycine max
  unsure (1)..(409): unsure at all n locations
  Clone ID: LIB3107-036-Q1-K1-G2
ttgaaggggttgaatgatgattgcgaacattttgagtcttttccacctggtcacttgtattctagcaaagagagagcgttccgcagatggtacaatcctccatggttctctgaggctattccatctgccccttatgatcctcttgctttgaggcatgcctttgagaaggctgtggtaaaaaggttgatgactgatgtgccctttggtgttttgctctctggaggtttggactcttcattggttgcagccgtcacggctcgctacctggcaggcacaaaagctgcgaagcaatggggaactaaattacactctntctgtgtaggccttgaaggtgcacccgacctaaaggcttgcaaggaagtagcagagcacataagaactgtccatcatgaatttcactacactgttc

SEQ ID NO: 48883 - DNA, 418 bp, Glycine max
  Clone ID: LIB3107-036-Q1-K1-G3
ggttctagtgtgtgattgtttgttgttgtaactcgttcttcttcttttgttgatctgtgtttgtgtttgttctttctctcacctgaaaatgtcttgctgcggtggtaactgcggttgcggaagctcctgcaagtgcagcatcggctgcagaggctgcaagatgtacccagacttgagctacactgagtcaaccaccaccgagaccttggtcatggtagtggcacctgttaaagctcaatttgagggtgctgaaatgggtgtgcccactgagaacgatggctgcaaatgtggaccaaactgctcctgcaacccctgcacttgcaagtgacgtgtttggagagcaagcttcaagcacagatagcccttaattacgaataatgatgaactattaatgtgtagcttaaaacttatgcattat

SEQ ID NO: 48884 - DNA, 433 bp, Glycine max
  Clone ID: LIB3107-036-Q1-K1-G4
gattcttttttcgtaaagttacggaaacttacgaatttcgtaacgatacttgttttctttccgtaatgttacggaaccttgcggactacataatcatcccctttttgacttacggaatgttacggaacctcacttaattatgcaacgatgcttccatttgatttccgatgtgtcacggaaacttacggattgtgcatcaatatttttttggtttttttcggcatgtcctggaatttcacaaattgcctaatgatgggtgccaagcacctcacgaggaccaaagaatggtcgcacgtcatcgagcaaaggtccccggacgaaattagggtatgacaactggtaatcgattactgataacaggtaatcgattaccagagagtaatcactctggtaacttaaaaaatttgagaaaaatcttttgtataacaaaact

SEQ ID NO: 48885 - DNA, 438 bp, Glycine max
  Clone ID: LIB3107-036-Q1-K1-G5
gggaggaaatcaccctgttcgtaaccttcgaagtggccatgttgaaattagtgcccagaaccacaactatgctgttgaccctgccacactgccggaaggagtggaggttactcatatcaatctaaatgatggaagttgtgctggtcttgctttccccgctcaacaacttatgtctcttcaataccaccctgaagcatcccctggacctcatgattctgactatgcttttagggagtttgtagagctaatgaagcaaggaaaaaacagaacacaagaaagtctacaccaactatcagcagcacaggctttggatgcataagtggttgaagggagctgctcttgttcgttcggcgcaaaaagaataatgcatctgctgaaaaattacgaagttatgagtccatttctatgattttgtagatgagtttattaaagttttct

SEQ ID NO: 48886 - DNA, 353 bp, Glycine max
  Clone ID: LIB3107-036-Q1-K1-G6
gacccacaaactccacaagtgtcacaagtcataactcgttagagagagtttgtgtgtgtttttgtgtgtcaccttggtgcatacaacacaagatggaggaccaaaatggtagtggtaagttgagccaagggcttcgcaaggtgaagccttaccttgctatattgtcccttcagtttggctactcagggatgtatatcatcactatggtttctttcaagcatggcatgagtcattggatactctcagtgtaccgtcatgtagttgctgctattataatagtcccttttgcacttgtccttgaaagaaaaattagaccaaagatgactcttcccatcttcctgaggatagtggca

SEQ ID NO: 48887 - DNA, 308 bp, Glycine max
  Clone ID: LIB3107-036-Q1-K1-G7
ggagcagagtatcggcatagcgtagccatggccatgggattgacctcacaactcctcctttctttgttcatcagtacccttcttcttcttcttccctcttccctttcacaatctaaccagttttgtgacgctggaacttcatccaagctgttgatcaagggcggcaccgttgtgaatgctcaccaccaacaggttgccgatgtctatgtcgaagatggtatcattgttgccatcaatcccactattacggctggagatgaagtgacggtcatagatgccacttgcaaagttgtcatgcccaggggcat

SEQ ID NO: 48888 - DNA, 262 bp, Glycine max
  unsure (1)..(262): unsure at all n locations
  Clone ID: LIB3107-036-Q1-K1-G8
ggtggcagagagcgaacccaaaactagagctaccttcccttcaaaccttccactcttctctccttttccaatcaagggaataatatttcttagagatattccgaaaccatggctcacgccaatcctatgatttttgctgttggaattctaggtaaccttgtctccttctgttgctttctagcaccagtaccaacattctatcgagtttgtaagaagaaaaccacggaaggtttccaatcacttncttacgtggctgcactct

SEQ ID NO: 48889 - DNA, 394 bp, Glycine max
  Clone ID: LIB3107-036-Q1-K1-G9
acgcgacgcgtccgcctacccgtctgtgagaagtaggacgaagacgacagcactgatcaacagcacctggcagatgcacctacgtctttagacatagctgacgcgtggactaagatataaagtctgcgctgtgcaatcggcatacatttgatccttgattgtttctatgcagcgatcaaacaacacagaacactgaacctgttcttatggatttggcgactaagaagacgaagaacaacatgcaagacgtgtaagttgacgatcatgaatagcacactgagaagataagagatgaacgttggccatgctttggtgcagacagtggtagaaactgcatccactggaggtagccgtgaccaaaacgtgatcactcctaaggtgaggatgaacgatg

SEQ ID NO: 48890 - DNA, 365 bp, Glycine max
  Clone ID: LIB3107-036-Q1-K1-H1
agaacacaacatcggcatagcatagccatggacagggtattgacctcacagctgctacttatctgtgttcatcaatacccttcttcttcttcttacctcttccctttcacaatctaaccaggtttgtgacactgaaccttcatccatgctggtgatcaatggcggcccctgtgtgaatgctcaccaccaactggttgccgatgtctatgtcaacgatggtatcattgatgccatcaataccactattacggttggagatgaagtgacggacatagatgccactggcaagtttgtcatgccagggttcattgaccctcacacccacctagagcatgagtctatgcatacggcaactgacgatgact

SEQ ID NO: 48891 - DNA, 356 bp, Glycine max
  Clone ID: LIB3107-036-Q1-K1-H11
gaataccctgatcaacgaaatcttgaatcatctatctcaagaccaaggaccacatcttgatcacgattatgtacgatcagacagtgaagagaatagtgcgggtataaagaaaaagaagagacaagaacaagatggaggcagaacttaatctcttactaagaaattttttgattttacatttaaattggaataatttcttaggtcaaagaatatttaacaatgtcaaagtatattgactactgattagattaaaaaatttaagagaaattacaatagcctctattcaaagaggagaactaggtctagatattatgatgattcaaaatcagaagaatttaattcttctaggcttaatg

SEQ ID NO: 48892 - DNA, 413 bp, Glycine max
  Clone ID: LIB3107-036-Q1-K1-H2
gaatcaatgactattcatgattgcataattgaatcaattacatactggatccaagctaaaggaatgttatggtaaaacttcgtttgaaacgatgtggtaaaaagcaacgtgcgacttgaaagacatgattagattagctgtggattcttacatccgccattttttctagtatatagaaatgaacatgctcttgactcgacatcgtttgttctgttccactagaacttattgttttggggacgggaaagcagttgatgatgtaagttgatgatgtaaatagtacatgatggagctcgagtttattcatttatcaggggcaagtatctaaggttagtaaaaattaataagttagaaaaacttcgtaagtttatttttgatagaaaaatagaaaggatccaatttgagcaagggtc

SEQ ID NO: 48893 - DNA, 423 bp, Glycine max
  Clone ID: LIB3107-036-Q1-K1-H4
cgatgtcaaggagtcgccgaatgtgtgcgacagcgagctcttccgtgtagtcctctgataaaagaaacaccaaaatcagtgagtgagtgagtgagcagtgatcgtctacagaaggttcaggtttagcggtgttcgttaccttggacgatggtcagatggcagggtttcaaggatacgatttccaccgtgtctttcagcctcgtgcctcgcacctgttcaagtcattctgttagccgtttttccgttatttttttttttttgtttaaatgctcattttggtccatcatattttaataagtgacaatttagttcctaaacaaccagcaattctgactcagcctctagatacgtataattatgttttgcccccaaaaactttgggatttaatctggtattaagttataattttacatatttttgaa

SEQ ID NO: 48894 - DNA, 422 bp, Glycine max
  Clone ID: LIB3107-036-Q1-K1-H5
gaaacctctcacactcccaaacgtcttgaggcttagcctctcgtcactgttggcactgtcatcatgtcgaaactactctcaagccctcgcctctcatcatcgttgatgttgagtttccttcagcttggatctctgacaatccacctaaaatggcgatgtatagcgggatctgcaagcatggagggcgagaacgcgagcaaggtgaccgagttggtgaacgagatagccaacatctccgagtacatgcctccaatgaagaagcagcattgcaacttggcgtagaggctgaagcttctgatcccaatgttcaaggagattagggatatgaacaaggatgcacttcctgaggacacttccaactcagtcctcgccttcaaagaagctctccaatctgcgagggaactcctcagattcaaaagcga

SEQ ID NO: 48895 - DNA, 420 bp, Glycine max
  Clone ID: LIB3107-036-Q1-K1-H6
atagaaatttataatttatattttatcttattatgtatatattattctatcaaatatccaatttttattttataagaaaaatgattgattgatatttcaaatttgaaattttatttcaaaaattttattttatattaatcgaactaaaatagaattaatatagaaaaatagaatattaattctagttataaaataattaatttaataaaggatataattaatttaataaaggatcccccttttttgacacgaaatggatatatccataccatatatcttggatttatttttatgaaataattaaatatggcaaaacctatatctaaaaagggttcgcgtaaaaatgtacgtattggttcgcgtaagcatactcgtaaaataccaaaaggagttatttcatgtcaagctagtttcaacaat

SEQ ID NO: 48896 - DNA, 434 bp, Glycine max
  Clone ID: LIB3107-036-Q1-K1-H7
atagcaatttataattcatactctatcttattatgtatatattattctatcaaagatccaattgttattcatataagacaaatgattgatgcgatatttcaaatttgaaattttatttgaaaaatcttattctatattaatcgaactagaatagaattaatatagaaaaatacaatattaattctagttataaaataattaatttaatagaggatataatcaatttaataaaggatcccccttttttgacacgaaatggatatatccataccatatatcttggatgtatttttatgaaatagttgaatatggcaaaacctatatctaacaagggttcgcgtaaaaatgtacgtattggctcgcgtaagcatactcgtaaaataccaaagggagttattcatgttcaagctagtttcaacaatactattgtaact

SEQ ID NO: 48897 - DNA, 420 bp, Glycine max
  Clone ID: LIB3107-036-Q1-K1-H8
atagaaatttataatttatattttatctgattatgtatatattattctatcaaatatccaatttttattttataagaaaaatgattgattgatatttcaaatttgaaattttatttcaaaaattttattttatattaatcgaactaaaatagaattaatatagaaaaatagaatattaattctagttataaaataattaatttaataaaggatataattaatttaataaaggatcccccttttttgacacgaaatggatatatccataccatatatcttggatttatttttatgaaataattaaatatggcaaaacctatatctaaaaagggttcgcgtaaaaatgtacgtattggttcgcgtaagcatactcgtaaaataccaaaaggagttattcatgttcaagctaggtttcaacaa

SEQ ID NO: 48898 - DNA, 434 bp, Glycine max
  unsure (1)..(434): unsure at all n locations
  Clone ID: LIB3107-037-Q1-K1-A1
aaatattgattcaatggttgtctaattgaatatccattaatttgtgtgtataatgcagagtatatgtttcagatagtgacatcttgttttgggaggaaaatgatgtccatccaaaacttactatagatggtgtccgtgacatattgcgtgtattcatcaatggccagcttataggtaatgttgttggtcattggatcaaggtggtccagactcttcaatttctcccaggatacaatgatttaacactgttaactcaaacagtgggtttacagaattatggcgcttttcttgagaaggatggagcagggattagaggtaaaataaagatcactggatttgaaaatggagatatagatctttcaaaatcattatggacctatcangttgggcttcacggtgagtttttaaaattttacagtgaagagaatgaaaat

SEQ ID NO: 48899 - DNA, 379 bp, Glycine max
  Clone ID: LIB3107-037-Q1-K1-A10
gccagtgatgataattactttattgcccatcatgggacgaggtcaaaactgatgggatcgacaattttagaaagcattggaaaactggtgagcccattattgttaagcaagtatttgatgggtcatccatttcaagctgggatccaatggttatatggagagggattctagagacaatatatgataaagcgaaagatgaaaaccggatggttaatgccatagattgcttatatgggtcttagattgatattgagcttgctcatgtcatgaaaggatactttgaagggcttattttcttaaatggctggccactgttattgtaatcgaaagatatgcccttacctagggcttttgaaaaatttgtgctgttccaaagacc

SEQ ID NO: 48900 - DNA, 423 bp, Glycine max
  Clone ID: LIB3107-037-Q1-K1-A11
ggcattatatttgagtcaaacaaatcaaagccatggccacctccaacttctctattgttctctccgtctccctagccttctttttggtgctacttaccaaggcacactcgaccgataccgtttctttcaccttcaacaagttcaacccagtccaaccaaacattatgctccaaaaagatgctagtatttcatcctctggggtgttacaactcaccaaagttggcagcaacggcgtgcccacctcgggatctctcggtcgtgccctttacgctgccccaatccagatttgggacagcgaaaccggcaaggtagccagctgggctacatcctttaaattcaacattttcgcacccaacaaatcaaactcagctgacgggcttgccttcttcttggcacccgtcgggtctcagccccaatccgacg

SEQ ID NO: 48901 - DNA, 395 bp, Glycine max
  Clone ID: LIB3107-037-Q1-K1-A3
gattcatcttcatctcatcaatcttttcaattctctatgcacacatcaaactcgacactaccttgttcttaaactcacaacaaaaactatttgcatcaccaactactttctagcttattatatattcaaaagttgtgaagaatatgagttcaacaagccgtgcttgggcttggaccgtggcagctggtgttggagtggtggaggccatgaaggatcagggtatctgcaggtggaacagtgtgatgagatcagcacaacaacatgctaaacataatatgaggtctttgtctcaaaccaagaagctttattctcaatcatctgttatggcttcagccaaattgaaagatgagaaagctaagcagtcagaagagtctctgagaaccgtcatgtacttg

SEQ ID NO: 48902 - DNA, 429 bp, Glycine max
  Clone ID: LIB3107-037-Q1-K1-A4
ggaaagcatttaggggagattgtttttctgttccgtttctacgaactcagacccttcaatcccaaccgagaaaaaaatcatgaagctgaagacatatgcgggtcttagtatcattgcaactctggctattatatatcatgcatttaacagtaggggccagttttatccggcaatggtgtatctgtcaacttccaagatcggtttggtgcttcttctcaacatgggtttggtctttatgtgtattctatggcaattaaccaagaagttgttcttgggttccctccgagaggcggaggttgagaggcttaacgagcaatcgtggagggaggtcatggaaatcctctttgcaataaccatttttaggcaggacttctcagtcacattccttgcaatggtcgcagcattgttgttgattaacgctttgcattg

SEQ ID NO: 48903 - DNA, 395 bp, Glycine max
  Clone ID: LIB3107-037-Q1-K1-A6
ggttctagtgtgtgattgtttgttgttgtaactcgttcttcttcttttgttgatctgtgtttgtgtttgttttttctctcacctgaaaatgtcttgctgcggtggtaactgtggttgcggaagctcctgcaagtgccgcaaccgctgcggaggctgcaagatgtacccaaacttgagctacactgagtcaaccaccaccgagaccttggtcatgggaattgcacctgttaaggctcaatttgagggtgctgaaatgggtgtgcccgctgagaacgatggctgcaaatgtggaccaaactgctcctgcaacccctgcacttgcaagtgaggtgttgggagagcaagcttcaagcagagatagcccttaattaggaataatgataaactattaatgt

SEQ ID NO: 48904 - DNA, 397 bp, Glycine max
  Clone ID: LIB3107-037-Q1-K1-A8
gtcccataattatatatatatacacacacacatactggtggccttttacttgaaaatcatatgatacacaggttgatatagtggaccaatttgttaagaacattttcactctgttgaccaatttggataccgatgaaccaacctgtcaatcttctcattccttacactaccctacgcctctaatattgctcacacattacaagaattttattacactaaacaaacgtgtagtaaggaagagattgttttttttttaatgaatgaacatcatgttttcttgaaaagaagaaaatacactattgtgattattgagaatgattgtgaatatttttgcagaaattaaaaagtttcatgatgtgtttatcacggattttaattatgtttaatactcattttt

SEQ ID NO: 48905 - DNA, 363 bp, Glycine max
  Clone ID: LIB3107-037-Q1-K1-A9
gccagtgatgataattatcttattgcccagcatccgacgatatcaaaactgatgggattgacaattttagaaagcattggaaaactggtgagcccattattgttaagcaagtatttgatgggtcatccatttcaagctgggatccaatggtcatatggagagggattctagagacaatagatgagaaagcgaaagatgaaaaccggatggttaaggccatagattgcttagatgggtctgagattgatattgagcttgctcagttcatgaaaggatactttgaagggcttattcttgaaaatggttggccacagttattgaaattgaaagattggccttcacctagtgcttctgaagaatttc

SEQ ID NO: 48906 - DNA, 416 bp, Glycine max
  Clone ID: LIB3107-037-Q1-K1-B1
ggattatttctagtcccaaagagctaacaagagattcaagaccggcatggctaatgaagaggaacagaaaaaccacctcttcggcatcaaagatctcggtcacaagactctccttcagagtgatgcactctatcagtatatacttgaaaccagtgtctatccaagagagcacgagtgcttgaaagagatacgcaagatgactgcaaaacacccactgaacatcatggcaacaccagcagacgaaggacaacttctgagcatgcttgttaagctcacgaattcaaagaacgccttggaaattggtgtattcactggttactctctgctctccactgccctggctcttccccctgatggaaagatcttggctttggatgtgaatcgcgaatactatgagttaggattgccaataattc

SEQ ID NO: 48907 - DNA, 433 bp, Glycine max
  Clone ID: LIB3107-037-Q1-K1-B10
gaaggagaaatattgagagcaggaagaagcaagtgatggcgacgaagcagcttccgcagatcgccattctgggagctggtatctttgtgaagactcagtaccttccgagactctccgagatctctcatcttttcattctgaaatccatttggagccgcactcaggaatcagctacagctgccgtagacatagctcgtaagcattttccccaagtagagactaagtggggagataacggttttgatgacatcattcacgatggatcaatcgatgctgttgccgtggtcttggctggacaaaatcaggttgacatctcactcaggttgctaaaggctggtaaacatgtccttcaagaaaaacctgcagcatccggtacaagtgaattggaagctgcattgtctagctacaaatctatttcttctgatgctcccgg

SEQ ID NO: 48908 - DNA, 412 bp, Glycine max
  Clone ID: LIB3107-037-Q1-K1-B11
atgggagcgtttactcactggtgttcctcttcttgctggttttaaggatacaagcaaccccgttttagaagaaagcacattagacgtgataagcccggtatccactgatcccctggtgtttgatgctgagcagagccttgagagtgagttatcttttattcataaggctaaagaatctggtgttgtgtatcttcttggtcatggggatataagagcaaggaaggagtcgtggtttatcaagaagttagttataaactatttttatgcctttttgagaaagaactgcagaagggggatcacaactttaagtgtaccacactcacatttgatgcaagttagcatgacatacatggtttgaaaatcaatcaattttgcagcccaaataaaacgagtggcaattctcttgaaagct

SEQ ID NO: 48909 - DNA, 416 bp, Glycine max
  Clone ID: LIB3107-037-Q1-K1-B12
gaaagtcagtggtgcatgtactaaaagttggattgaaggttggggtggaaattccacttacatggggtaaggaagtggaaattggtgtgcaagtgaagaagaaagatgttgaaagggcaatagcaaagttgatggatgagacaagcgaaagtgaagaaagaagaaaaagggtgagagagcttgctgagatggctaacagagccgtagagaaagggggttcatcatattctaatgtgaccttgcttatccaggatatcatgcaaaaaacctagagagatgtgtgataatctcatttgtcataaaccaatttgaagtaaaaggcaactcatttgtcataagtgtagtagattcgtgtgaatgttggggcagaagttccaatgaattggggagaggaagagaaaactggtgtgttggtg

SEQ ID NO: 48910 - DNA, 434 bp, Glycine max
  Clone ID: LIB3107-037-Q1-K1-B2
aatctgcaaaatgatattgaagagctcataaagtaataaaaaatatcagaagaatttgaaatggcatagtacgtgaaacaaaataagttttaaaaaaataacaattgaagctgacaagtatattattaataccaacagtatggaaatgttctccctgctcaagtatattattaatttcaaagtatattatgttaatcttgatatttaattgtacattaatagagtactgcacaaatcgggattaatggaaaattttatagacatggtatctgtgacaagacttttctatccaacggtggattttgtgataaaatgatccagtaaaaagctacttaatggtataatagtggttttcacttacatcgtgtgtgtgtgtgtgtaaagaataagttgagacatgccttaaccactcctctggatattttacaatgacc

SEQ ID NO: 48911 - DNA, 441 bp, Glycine max
  Clone ID: LIB3107-037-Q1-K1-B3
cccacgcgtccgatgggggtggaaagctttttgtggacaagcaccctaaccttagggtccgagttgttcatgggaacacgttaactgctgctgtcatactcaatgagatccctcaagatgtgaaggaggtgttcctaacaggagccacatccaagcttggaagagcaattgctctctacctttgccaaaagaaagtgaaagttctgatgttaactctctcaacagatagatttcagaggattcaaaaggaagcccctccagaaaatcaaagctatcttgtccaagtgacaaaataccaagctgcacaaaactgcaagacctggatcgttggtaagtggatcacgccaagagagcaatactgggcaccacgtggaacccattttcatcaatttggtgtcccaccaattttatcatttagaaaagattgcacttatggtgacc

SEQ ID NO: 48912 - DNA, 237 bp, Glycine max
  Clone ID: LIB3107-037-Q1-K1-B8
aattcgagccgccgcttttttttttttttttttttttttttttttgggaaaaaacaattagggggggttatttccgcggggccccccacaccaaaccgaaattaaaccccccaaacttctttaaactaaaacgctaccaagccaatttatttaaatttttttaaaagaaaccctttataccccctaccaaaaacttaaaatccgttgcaccttaaacaacccccaaaactctaaaaa

SEQ ID NO: 48913 - DNA, 440 bp, Glycine max
  Clone ID: LIB3107-037-Q1-K1-C1
gaccacattcacacatgacagcacaaacacgaggtctcacataacaccaaatctcatcacgaccatcatcatcataatcaccatagcataaccctccttttctctctctaaatctctctcaattctctctccttagatctgcgaattatcttagattccgatagataaaataaaattcaatcaataatcaatttggatcctcgcggcggggaatggaagcgttgttgttgttgttggtggtggtgggtgaatctagcagactctgaacgcgaaaaatgcctgcgttaccgcacgggaatcaccaattcggtagtagtaatggattctggtcgaagaatcgcgacgatgttggatacaatcagctccacaagttttggtgtgagctgttgccgcaagctcggcaggagctcttgaggatagacaagcaaccctttttgagt

SEQ ID NO: 48914 - DNA, 419 bp, Glycine max
  Clone ID: LIB3107-037-Q1-K1-C10
taagatatttttctcaagtgtgaaaacttgagagattttgcaatggatataagaactggtatctaattcgaataagtatcattcttttagggaatcttccaattgattgaccaatccaaataatatatggatatatatatatagatagatctatctatatatatctaactaatataggaatcttagaaagataattagtctattcataagaggagatgagatcatatgaaaaatataaccgattctttcctttgtttgggctactggccatccgccggaagtttcgggtttaataccgatattttagcaacaaatctaataaatcttagtgtagtgttaggtgtattggttctttttggaaagggagtgttaagtgatttattagataatcgaaaacagaaaatcttgagaactattcg

SEQ ID NO: 48915 - DNA, 216 bp, Glycine max
  Clone ID: LIB3107-037-Q1-K1-C12
ggaggcgaagtgaacggtttgaatgggacaaggaaatgacagcctggaatttcctcaaacagttaacgtgcaccgttggcgctcattctcccaccctctcccgtcgcctcatacactactcattacttgttccctctctctccgctcatcacaaaattgttaggtaccaatggcttccccatttccgtgtcaatctttatgccgcagttccaaatg

SEQ ID NO: 48916 - DNA, 404 bp, Glycine max
  Clone ID: LIB3107-037-Q1-K1-C2
ggtggcagttgtgtgacggagaaattaagctagagcttcatagtttcttcttcttttctcaccttccttctctcccttcagacaaagggacaaaaaatcagtgtgtgagagagagagagagaaattccaaaaccatgtcccacagtcatctaagtttcgcctttgggattctaggtaacattgcctccttcgtgtgctttctggcaccactaccaacattttatagagtttgtaagaagaaatcaaccgaagggttccaatcaattccatatgtggctgcactcttcagtgcaatgctttggatcttttatgcctatgtgaagaccggagaaacgctgtttatcaccatcaatgcattcggttgcgtgattgagacaatttaccttgccgtatttatcacttac

SEQ ID NO: 48917 - DNA, 365 bp, Glycine max
  Clone ID: LIB3107-037-Q1-K1-C3
tattcaactgcctttgggttatctcgtgcattgtgtcgccttcagcagcagcagggtgctgatggtcatggatcaacaaatgaaagagaggtcagggttgggagattgcagcgtcaaaaggttcgtgtctctcgaaatcgcattttggattctgctgctaaggtgatggagttgtattctagtcaaaaggctgtacttgaagtagaatattttggtgaagttggcaccggtctgggtcccactctggagttctacacacttctcagtcatgacttacaaaaagttgtacttcaaatgtggagatcaggttcttcagagaaatatcaaatggaaattgatggagatgaaaagaaaatgaaaaatag

SEQ ID NO: 48918 - DNA, 359 bp, Glycine max
  Clone ID: LIB3107-037-Q1-K1-C5
agaaaatatttaactttctttgggtatcattccaaactgtcgccgtgagcttcaacgggctgcttattaacaaagatcaacaaattaaagatacgtcatggttctaaaattgcaacaacaaaaagttcctttctcttgaaatcacattttgaattcttctgctaaagtgacttaattttattcttatctaaaagctgtacttgaaataaaatatatttttgaaactcccaccggtcttggatccactctctagcactacacacttctcaaacatgacttacaaaaaaatctacttttaataatttgatcacgttcatttgatacatatctaatagaaattgcttcttattaaaatataa

SEQ ID NO: 48919 - DNA, 352 bp, Glycine max
  unsure (1)..(352): unsure at all n locations
  Clone ID: LIB3107-037-Q1-K1-C6
gaccgctttgccttcatacttaactcaattctagttttgtagagagaagaaaaaaaccaaccactctttttctttcatttgcaatttctgtgtcaccaatcatacacacaatgtcggcttacagagacgaggatccccgtcttcatggcatcaaaactaagattcgtgttgtccctaatttccccaaacctggtattatgttccaagacattactactctgttgcttgatcccagggtctttaacgacacgatagatttgttcgttgagcgatacaaaggcaaaaacatttctgttgttgcaggaattgaagctcggggtttcatttttggttctcccatngcactggcaat

SEQ ID NO: 48920 - DNA, 409 bp, Glycine max
  Clone ID: LIB3107-037-Q1-K1-C7
ggttgttctcatttccgaacacaatatcggttgtttaaggtgaaaaggaaaaaaagaaaaaagttgtgcagtgaggaacgcgaagacgcgagatagggaataggcgacagtgcgtttggctgcccccagcaatcgaactccttgtgctcctcgcacctcattctctctctctctcgtatctgcaacttcaactaactaacttttatgaagccgaaggcgtcagtgaatcgacccccaacaccagatgtggtcgaaaatgtccctgaaagagaacccacgcttcaagagctcatcaacatcaagttgatcgagactggagagaaggagcgcctcatggagctgttgaaggaaaggcttgttgattgcggttggaaggatgaaatggaaactctctgcagagctgttgtga

SEQ ID NO: 48921 - DNA, 415 bp, Glycine max
  unsure (1)..(415): unsure at all n locations
  Clone ID: LIB3107-037-Q1-K1-C8
ggtcctggatggtgatgagaatggccgtcgtggacccacagctatgcagacagtgaggagtctggttagggaaggtggttggatggcttgttatagaggattgggacctagatgggcttctatgtcaatgtctgcaacaacaatgatcacaacttatgagctcctcaaacggctctctgcgaagaatcaagaggttttgacatgatgaaggataggtttatgacagcaaaaagaaaaaaataaaggttaaacaaagagaagaggaggttcttctttcctcccttatttgtctgttttttctgttcttttcttcacttgtcaatgttgtttcttcacgtatggcttgctacaatgactgtttgatcaatgtaagtcattgcaggttatttttgnnnaaaaaaaannnnannaaaaa

SEQ ID NO: 48922 - DNA, 432 bp, Glycine max
  unsure (1)..(432): unsure at all n locations
  Clone ID: LIB3107-037-Q1-K1-C9
ggttctagtgtgtgattgttgttgttgtaactcgggtctcttcctttggtggtccggggttggggttggtttttctctcaccctaaaatgtcttgctgcgggggtaactgtggttgccgaagctcctgccagttccgccaccggttccggggcttctagattttccccaacctgagcttcacttagtcaaccaccacccagaccttggtcattggagtggcacccgtttaagctcaatttgagggtgctctaatgggtgtgcccgctgagaaccatagctgcaaatgtggaccaaactgtttctgcgacccctgcactttcaaatgaggtgtttggagagcaaacttcaagcacagatagccctttattatgaataatgatgaactatttatgtgtngctcaaaacttatgtattatgtctgtgatgggttt

SEQ ID NO: 48923 - DNA, 434 bp, Glycine max
  Clone ID: LIB3107-037-Q1-K1-D1
atcggatcctggttttagtttttatgaagtctaggttttaaactttggttgcgtcgatatcaatggaatcatggaaaattagaggccaaagctgctgaggccttcgaaacgttaatgttgttgggtaaaggctgtttccaaggtttgaatctatggcccgagagtgcaaaacagcaaactttctgttgccccaaggctcgctcaccttcaaattgatgatcttagtattgacagatagctaatgctttctgcatgatggactctctgaaattcttcgagctaactaaatttgctaaaagcattcttggatagttgccttaattgcagttacccctagcctgccttaagtgcagtatctttgggctgcctaatttcagtatcgagaggttgtgtttagttccacatcaattagtgatatagtcaatataattctt

SEQ ID NO: 48924 - DNA, 406 bp, Glycine max
  Clone ID: LIB3107-037-Q1-K1-D10
ctgcttggctttgaacacattagctttagatttatttgatgaaaaagattaataaataggctccaataataaagataattaaattgggtttattccattcaaagtatctgataatgatgaatatgatctattttctttttctgtttttgcccctgcattttatgggtagcgcgaaatatactatggtgtaaaattcatcgtagaggtgaatttctggttggaatgggaatcaaatttgcataatgatggatgtaaacttcatattacttgttctcagaggacattgttcgtttttagtaaatggcagtgttatgattgaactgtgattcaactaacaacgattcagtatcatattctaagagttatttttggtagttatttcattcaaaaacacattgtatatatt

SEQ ID NO: 48925 - DNA, 417 bp, Glycine max
  Clone ID: LIB3107-037-Q1-K1-D11
ggttctgtgtatgtgattgttgtgactcgttcttcttcgtcgttatcttcttcttttgttgtttgtgtgtttgttttttctctcacctgaaaatgtcttgctgcggtggtaactgtggttgcggaagcgcctgcaagtgcggcaacggctgcggaggctgcaagatgtacccagacttgagctacaccgagtcaaccaccaccgagaccttggtcatgggagtggcaccagttaaggctcaattcgagagtgctgaaatgggtgttcccgctgagaacgatggctgcaaatgtggagctaactgcacctgcaacccctgcacttgcaagtgaggtgttggagagctaaagcttcaagcagaaatggcccttagaaataatgataaaaactatatgtagtttcaaaacttcaaaatta

SEQ ID NO: 48926 - DNA, 432 bp, Glycine max
  Clone ID: LIB3107-037-Q1-K1-D2
gcggccaaaggtatctatccagcagtagatgctttggattcaacctcaactatgctccaacctcgaatcgttggtgaagaacattatgagactgcgcaaagagttaaacaaactttacaacgttacaaagaacttcaagacattatagctatccttggcttggacgaattatccgaagaagatcgcttaaccgtagcaagagcacgaaaaattgagcgtttcttatcacaaccttttttcgtagcagaagttttaccggttcgccggggaaatatgttagtctagcagaaacaattagagggtttaaattgattctttctggagaattagatggtcttcctgaacaagccttttatttggtaggtaatatcgatgaagctactgcgaaagctacgaacttagaaatggagagcaatttgaagaaatgacttt

SEQ ID NO: 48927 - DNA, 242 bp, Glycine max
  unsure (1)..(242): unsure at all n locations
  Clone ID: LIB3107-037-Q1-K1-D3
aaaaaaaaaacgacgccgccgcacgcctgctacaaaatacaaaaaacaacaaaattttacttcttcaaaaaaacaacaaaatcctctcaacgcttctctcaaccttcctcaanntacacaaaaaacncctatcaagtcccttctttttcataaatttaaaacattttacctaccaattaatatattataccatcattattatccctttaccatttcatccacacaaatattataccccttac

SEQ ID NO: 48928 - DNA, 417 bp, Glycine max
  Clone ID: LIB3107-037-Q1-K1-D4
ctctttaatattaaaaagtataaaaaaatgctagtttggcagaatatttcttccgaaatatttgtcaatccacttaaaacatgacagttatcaatctatttaattataccttctaaaaaaacttcgtttcaaacgcattttttactcttatctttattattttattttaaaattgttcatggaattatttacttatgctatttatataattcaaactaaatttataaaaaaaataatctctaccatttctttttctttttcactcaccttttccatcatattaacgttggactttgtaaggtggacatctaaaatggtgtttgatccatctttacatcaaagttattgcattatatttatgttaggtatcagaaaataaaatatgcacacaaaaggcttcaggacaattaacaatgc

SEQ ID NO: 48929 - DNA, 427 bp, Glycine max
  Clone ID: LIB3107-037-Q1-K1-D7
gacctgtaatgtaacaagtaagctccagcactggcttttattccctttattctctctctctctttccttcctttgatccatggaagcctgtgatctcttgtgatagttggtgtgttgggtagggaagggtttgaaagtgtcgtgtcttctaaggagctttcactgcacgacggtggccgaatcttcttgcttctttctctttccaagatatcctttgattcaactttggatcttcacctctgatttcctttcatttttcggtttatacacacttggggtttcccctcacccaactgtgtgcaacaaccacaaagtacgaaccttttcttttttaatttctatttcttggaaatataaaaggtctttttatttatttctgttttagccctagaggagtaaaatctgttgtaggaaaggaaacgcctga

SEQ ID NO: 48930 - DNA, 422 bp, Glycine max
  Clone ID: LIB3107-037-Q1-K1-D9
caagaaggagaagattaactcgctggacacgatgagtacatggtaaaaggaggcagggatttgtttcacttgttgcccgatgctttcaagggtatcaagcagattggtgttatcggttggggatctcagggacctgctcaggctcagaatctacgggactctcttgctgaagcaaagtctgatattgtggtcaagattggactcaggaaaggttctcgttcctttgccgaagctcgagcagctgggttttctgaggagaatgggactctaggtgacatatgggaaactgtctcgggcagtgatcttgtgatgctgttaatttctgattccgcgcaggctgataactatgagaagatattgtctcacatgaagccaaacagcatacttgggctttcccatggttttcttcttgggcatttaca

SEQ ID NO: 48931 - DNA, 395 bp, Glycine max
  Clone ID: LIB3107-037-Q1-K1-E1
gatcccaaattaaccaataattttttagttaaacaatgtccatggccatcattaacacttttggaaacgttggtgtctactatattgtattattattatcatggtttctcgtatctggtgtgtgtgtttggggacgacccgccacttttctgcaagactttgaaatcacgtggtcagagactcatatcaggcaaattgatcaaggcagagccatccaactcattctagaccaaaactctggttgtggctttgcctccaagagtaagtacatgtttggccgtgttagcatgaagatcaagctcattccgggagactctgctggcactgtcactgcattttatatgaattctgacaccgacactgtacgtgatgagctggattttgagttcttgggg

SEQ ID NO: 48932 - DNA, 427 bp, Glycine max
  unsure (1)..(427): unsure at all n locations
  Clone ID: LIB3107-037-Q1-K1-E10
gccaacaagcaagatcttctaatgcaatgaatgctgcagaaataactgacaagcttggacttcattcactccgtcaacgccactggtatatccagagcacttgtgcaacttctggagagggtctctatgagggtttggactggctttctaacaacattgccagcaaagcatgagacatttgaaaaattttggtcttgtctggtgatttcatgcgagtctggcggttcttggagaaagatgcttatcttttctagcgaatgttgtaatagcagaatgcttgctagaagcattctcttttgcgtaactcgggtttgtatgattgctcaaattagctaatacttttagctataattggaactcttgcaccctcttgtgcgtgcgtgcagngttgcttacatcttgattgtttgatttttgattgaatata

SEQ ID NO: 48933 - DNA, 430 bp, Glycine max
  Clone ID: LIB3107-037-Q1-K1-E12
gacgatcgtgtttttttttttattccatcgtaaaccaaaatttagttctccagttgagcgttcttcccacaaaccctaatgtcgtttcttgaagaatttcatgccaatttggattcactacccgttattcttcggaagaagtatacactgttgcgtgacctagataagagcttacaggatattaaaaggcaaaatgaacagcgttgtgaacaagaaattgaagatattaagcgaggtgttaggtctggaaacatcacgcctgatacttcggcaattagattctctgatgaagcgcttgatgagcaaaagcatagcatcagggttgctgatgaaaaagtagccttggctgtccaggcttatgatttggtagatacaaacatacaacaacttgatcagtatctgaaaaagtttgatgaggagattcggcgtg

SEQ ID NO: 48934 - DNA, 414 bp, Glycine max
  Clone ID: LIB3107-037-Q1-K1-E2
gggaacagagtagaacatgaaacagaagatagttgtggtgtagctttgaagaagctatgagaacaaatggctggagtgacaaaggaggaagagaggggtagtcctagttggggtgcttcattttttacgcagacaacagaggatgtggctagagctgttgccactgctatgaattctcagaggccatctgtggtatattcattgaaaaatgatcatggtggcagccaacttcaaaggctgcagtatcaagttacgaaaatgataaaaggattttctagccctccagaagttaaatatacaaattacaatccggaaatcttgacaactcagaagcgtcaatgggctgcaaactttcagttgcagtacacggaccataagtcttggaaggagccaacaaagctgtttgaaagcatg

SEQ ID NO: 48935 - DNA, 429 bp, Glycine max
  Clone ID: LIB3107-037-Q1-K1-E4
gcaacaacaaactggaaggagtatactagtcctgatggaagaaagtattactacaacaagatcacaaatgaatccaagtggtcaattcccgaggagctgaagttggcccgtgagcaagttgaaaaagcaattgtcagtggatctcgtcctgaagcattgctgaattcccatcctcaaccctctccgacaccttctgcaactgaagcaacacccaacacagataattcaactttacccagtcaaggagaaccatcaagtcctgtttcagttgctccagttgttactacatctataagtaatccacaatctgagatgccttctggaccatctctgtctacttctgcaaatgctataactggagcaaaagtggacgaacttgaggcacctgtaaatactgtcacaccatcagatacttgtgtgggaagtgat

SEQ ID NO: 48936 - DNA, 382 bp, Glycine max
  Clone ID: LIB3107-037-Q1-K1-E5
acgaagacgaccgaatgggggagagctctacaagtgtcgggctgctaggacaaccaacagatactgctgcaccataactggcgagagtccaggactctaaagcatcactagcttacgctctgaccatagttgaatgtggcacgcataatcccgtcgtgaatcacaaaggactacattgcaaggataaatactaccatgtgacctatcgcgaagtagtaccagaagataaggctgaaaaaaacataaatcgaagagtgaaacacaacataaagctgtcatctcccaagcagtactatgaggctcattactcttacctcgttcctgttgaataacaatcctgcgactaatatgcatctgtttgcctaatggaaacacaccacat

SEQ ID NO: 48937 - DNA, 392 bp, Glycine max
  Clone ID: LIB3107-037-Q1-K1-E7
gagggaagaaaaacaatgtaacagagccttttagagctagtacatacaagttctcatttgcaagctcatattttcttttcaataaccctttctcttaaaattagaagcaaaaatggatagggtaagagagttggcatcaaagaaggcagcagttatattcaccaagagttcatgttacatgtgccacagcatcacgcaactgttctatgagcttggagcaagcccagcagtgcatgagctagacaaggatgcatatgggagggaaatggagtgggctttgaggagcatggggtgcaacccttcagtgccagcagtgttcattggtggaaaatttgtaggctcttcaaaagatgtcatatccctccatgttgatggctctctcaaacaaatgc

SEQ ID NO: 48938 - DNA, 439 bp, Glycine max
  unsure (1)..(439): unsure at all n locations
  Clone ID: LIB3107-037-Q1-K1-E8
actatttaaatacaataataacaccaagtgttatttttacccaaggctttgctacttcggggcttttaacgaaaatgcatgaatcgttaatattagtacctgctttacagtcccattggttaatgatgcacgtaagtatgatgatattgggttatgcaactcttttatgcggatcattattatcagtggctattttagtcattacatttcaagaactcatacaaattattggtaaaagcaagaatttctattttttaaatgaatcattttcttttgctgaaatcaaatacatgaatatgactgataaaaataatgttttacaaaaaacttcttttttgtcttatagaaattattatagatctcaatttcttcaacaattggatcgttggggttaccgtactattagtctangttttatctttttaacgataggtattat

SEQ ID NO: 48939 - DNA, 307 bp, Glycine max
  Clone ID: LIB3107-037-Q1-K1-E9
gatcaatttgatctgggacaacactaagcacatggtttcaacgccaagattcaaaggaaaaagcaattgataccaagacagacggtagtcaaagcagtcacaacaaaaacaaaggatggctattgtgaatattcatttaatttacatgttgaaaaaaaatatctatcaataactcaggggtgcccatgtattggtataattcacaaaatagtttatataaagtattatttctactaaacacacacattgttcctaaaataagatattgtactttatgcaacagtaaagaggaaaaattatgtatttc

SEQ ID NO: 48940 - DNA, 423 bp, Glycine max
  Clone ID: LIB3107-037-Q1-K1-F1
gtactggccaatttcgataccgatcttggaattcctttcggttctgtgctcaatgatgctgttcgtataagctatgctgcgcacctgatgcttgtatttccagttgtcttctttccgttgcgtcttaacatagatggtctcctcttctcaaaatcaaggcctctggttctggataacgtcagatttgcatcactcactgttgcccttattggtgttatcttcctgggagcaaatttcatacctagcatttgggatgccttccagtttactggagcaactgccgcagtctgtataggattcatttttccagctgccatcactcttaaggaccgctacaacattgctactaaatcagacaagattttgtctgtcattatgatagtccttgcagtcttctcaaacgttgtggctatatacagtgat

SEQ ID NO: 48941 - DNA, 428 bp, Glycine max
  Clone ID: LIB3107-037-Q1-K1-F11
gtaaaagatgatgttttcatgcattttataagttgtggcccgagaagttccaaaacaaaacaaatggtgtgacaccaaggagatggatcaggttctgcaatccagatctgagtaaaataataaccgagtggataggtactgaggattgggtcctaaatactggaaaattggccgagctacggaagtttgtagacaatgaggatctacaagtgcagtggagggaagcaaagaggagtaacaaagttaaagttgcagcattcatcagagaaaaaacagggtattctgtcagtcctgatgcaatgtttgacatccaggtcaagagaatccatgaatataagcgacaattaatgaacatatttggaattgtttaccgatacaagaagatgaaagaaatgagtgcggcagaaagggaaagcaaatttgctcct

SEQ ID NO: 48942 - DNA, 430 bp, Glycine max
  Clone ID: LIB3107-037-Q1-K1-F12
gtgtttgatctaccacatttgtttctggcttgcaaggaagtgagaaccttaaatttgttggaggggacatgtttgaggcaattcctccagctgatgccattttgttgaaggtaaaacaatttcacaattcatagtacaattttacatttataccattaacacctatttcataattgactgatgtcaaaatttagagaattaaagcaaagaattgatcaattggaaaaaaagtgaacgattttatcagcattgatcacatgaaataacttattataatttttatatgtataggtcactaagctagcactgtctagtagtctaacaacatatctgcaagactgcaactgtcataccaaatcagaccaactaattctaacacaaaatgcaattaattaagttatcatctattgacaagtattcacattcccac

SEQ ID NO: 48943 - DNA, 412 bp, Glycine max
  Clone ID: LIB3107-037-Q1-K1-F2
atcaagcaggtttcttgtcttccggtttctggtagatcaccacttgggttgggagaaaagaacagacaatggaagcgggttgagagctacctcggttgaacatcatcgaatcgaataatcacttttacacatgacttatccttctattccgatttaagcccctaaacgaactatcgaagccacttcaaaaactactcttagattgcttcgatggtcgatcactacaacaagctggttaaactagcggcgagggctttctacgatgatctaacgagtaaaggagagaatcaacccaaatcgggaaggagtgataacagaggaatcgctgtggtgattctcgacgctctcacaaggcgacaatgggtccgagaagaagacttggcaaaagatctcaaattacacacaaaacagc

SEQ ID NO: 48944 - DNA, 432 bp, Glycine max
  Clone ID: LIB3107-037-Q1-K1-F3
ggcacaagtgagtttgttgatcgagataactagaaacagtgtgatgaaaatgaaggtccttgttttcttcgttgctacaattttggtagcatggcaatgccatgcgtacgatatgttccctctccgaatgaacactggctatggtgcccgtactccggaggtgaaatgcgcaagttggaggcttgctgtggaagcacacaacatctttggctttgagaccattcctgaagagtgcgttgaagcaacaaaggaatacatccatggcgaacaatatagatcagactccaaaacagttaaccaacaagcttacttttatgccagagacctcgaagtccatcccaaggacacatttgtgttcagtatagatggcaccgtactctctaatattccatactacaaaaaacatggatatggggtggagaaatttaactc

SEQ ID NO: 48945 - DNA, 419 bp, Glycine max
  Clone ID: LIB3107-037-Q1-K1-F4
cggaccatggaagccaatggaatcactcatgacagtagcctaggagcggggagaagggataagagagaggtgggagacaaaacgatggaagatttaagtaaatacgtacacagccctgctcacttggcagttgccaggcgtgaccatgctgccctaaggcacattgtttctgccttgcctaggcttgctaaggctggtgaggtcaccacagaagtagaatctattgcttctgaacttcaagctgatgaggtctctactgttattgattgccgtgacgttcctggtagggagactcctcttcaccttgctgtgcgtctccgggatccagtctctgctgagattttgatggctgctggtgcggattggagtctgcagaatgaacatggttggagtgctctccaagaagcagtgtgcaccaa

SEQ ID NO: 48946 - DNA, 418 bp, Glycine max
  unsure (1)..(418): unsure at all n locations
  Clone ID: LIB3107-037-Q1-K1-F5
gatgcatagcaattcccaattcctaattgtttaaacctaattctcatttcttcatcgttcgattcttctcctcctaaagatgcagatcttcgtgaaaactttgaccggtaagaccatcacccttgaggtggagtcctccgacaccatcgataacgtgaaagctaagattcaagacaaggaagggatcccacctgaccagcagagacttatctttgcgggtaaacagcttgaggatggtcgaacccttgccgactacaacatccaaaaggaatccactctccacctcgtgcttcgcctcangggtggcatgcaaatctttgtcaagactttgactggcaagaccatcaccctcgaggtcgaatcctcggacaccattgataatgtcaaggccaagatccaggacaaggagggtatccct

SEQ ID NO: 48947 - DNA, 255 bp, Glycine max
  Clone ID: LIB3107-037-Q1-K1-F7
gaccacacaccacacacatagtagctattatactctctagagtaattgcggaatctgctagaattttctaataatggcgaaagacgttgagcaggtcacagagcaaggtgaatactccgcgaaggactaccatgaccctcctccggcaccgttgatcgacccagatgagctcacaaagtggtccttgtacagagccgtcatagctgagttcatagcaacactcctgtttctttacatcaccgtgttgaccattat

SEQ ID NO: 48948 - DNA, 433 bp, Glycine max
  unsure (1)..(433): unsure at all n locations
  Clone ID: LIB3107-037-Q1-K1-F8
tcttgatgaaatgattaaagatgagaagaaccatggaagctatgacttcatctttgttgatgcggacaaggacaactacctcaactaccacaagaggttgatagagcttgtaaaagttgggggcgtgatcgggtacgacaacaccctatggaacggatctgtggtggcaccccctgatgctcctcttaggaagtatgttaggtactacagggacttcgtgctggagctcaacaaagccctcgctgtggaccccaggatcgagatttgcatgctcccggttggtgatggaatcactatctgccgtcggatcaagtgatttctgatcatcataatcgtggaccaccgttgcttcttctgcacaccctatagtgatgactggtcatcattgagtggcacctgctaatgcatntaaaagcaatcaatacttttcttt

SEQ ID NO: 48949 - DNA, 227 bp, Glycine max
  Clone ID: LIB3107-037-Q1-K1-G1
gtactctatggaaatgtccgctgtcatttacaaggactgggttttcactgatcaagcattacctaatgatcttgtaaagagaggagttgctgctaaggacccatctgctccccatggagttcgtcttttgattgaggactatacttatgcttctgatgggctagagatatgggatgccatcaagttctgggtgcaagaatatgtctcattctactacaagtcagatg

SEQ ID NO: 48950 - DNA, 107 bp, Glycine max
  Clone ID: LIB3107-037-Q1-K1-G10
aaggttaaggctcacatcttattgtggtcattgggcgggtgtgctatcggtaatccactaccacgggacacctgttttgcaatctctccagctttggccatcgtgtt

SEQ ID NO: 48951 - DNA, 421 bp, Glycine max
  Clone ID: LIB3107-037-Q1-K1-G11
ggatgttataaaacgtgtctcagggaaatcaaggttggtctcttctggtctgttctgttcttctacgcaaacacataacataacacaacgcacctcttcttcttcttctgtaccttcaaatttcaacttcttcatccattttgtgctccaaacagcacaaacactgcaatcacaccgtcttcgctttctactcatctaaaagatagaggttcatgggttgctttggcttctgcaaaggaaatgatagtgttacaggttctgacagaggacctttcatgcaaagcactcctactgggaaccccagttttcattgaagacacacagcagtaactgctactccgactatataattttaacctattgcttgccctttcatcacactagatgaattgaagtccttgacaaaaaattttggctcaaa

SEQ ID NO: 48952 - DNA, 428 bp, Glycine max
  Clone ID: LIB3107-037-Q1-K1-G12
cagaggagcactgccaatattcttgtaccagattcttcgtgggcttaagtatatacattctgcaaacgtaatccatagagatttaaaaccaagcaacctgctgctaaactcaaactgtgatttaaagattattgattttggtcttgcgagaccgactttggaaagtgacttcatgacagaatatgtagtcacaagatggtatagagctcccgaattgttgttgaactcctctgattacacctctgctatagatgtgtggtctgttggttgcatctttatggagcttatgaataaaaagcctctgtttccgggcaaagaccatgtgcatcatatgcccctattgacagatctttttggcaccccaactgaggctgaccctgggttagtgaaaaatgaagatgcaagaagatatatcagacaaccttctt

SEQ ID NO: 48953 - DNA, 408 bp, Glycine max
  Clone ID: LIB3107-037-Q1-K1-G2
gatatcttactatgatatgcgagctgctcgcactgccatgcgtgctttacaaaacaagcccttgagacgaagaaaacttgatattcatttttcaattcctaaggataacccctcggaaaaagatattaatcaaggaacccttggcgtgttcaatttagatccatcagtatccaatgatgaccttcgtcaaatatttggggcttatggggaggccaaagagatcagggaaacaccgcacaagagacaccataaatttattggattgtatgacgatagagcatcagatgcagctcttaaagcattaaatcgaagtgatattgctgggaaacgcataaaacttgaacccactcgccctggtggagctcgtagaaacttgatgcaacaactgagccaagaactggaacaaga

SEQ ID NO: 48954 - DNA, 428 bp, Glycine max
  unsure (1)..(428): unsure at all n locations
  Clone ID: LIB3107-037-Q1-K1-G3
aagacgacagaaggggaggacgttgttttgttctgccttcttctctccctcaatacaatttccatcctattcctcagataaagaagatgcagaagggtagagaagttcgagacaataacatttttgaaccaagacggtttgaagattttggcgactttggatttcatagaagtaggatgccaagtctttttggtggcagggatccatttgatgatccctttttcacagacccgtttgatagcttgtttggtccaagttctgcatcaagagcaatgcagaagacaaacagagaaaaaggaatagttatagaagaaatagactctgatgatgagggggctgataatggccctgaaactggagagaaagattttgataagaaaaaatctaaatcgaccatggaaccgtcaatngagtatccagatgatgat

SEQ ID NO: 48955 - DNA, 431 bp, Glycine max
  unsure (1)..(431): unsure at all n locations
  Clone ID: LIB3107-037-Q1-K1-G4
caacatagttgttaaagacttaaagtctaaaaagtaaacaaaccttggacttttctaaggcagtgtctcttttggcagcttcacccattaaagccatatgatttaataaatctttttgcaaaggcataacctcataagatctgcaattaattaatttgaaaaatgtcacaatgtgtacttccaaaccaattatgagaaacagaactccagaactttgaaaattacctaaactccttattcttactcaatttatcccacacagacttcgcagatgagtcaggattcttcttcacataactaaggaagtgagtggtgatcaaagtagtccttattatggtatcctcatagctcttacgaggcttctcaagtataatccatcttccatcctttgatagcactgatatctcangcctaacataggaaaaatcaaa

SEQ ID NO: 48956 - DNA, 412 bp, Glycine max
  Clone ID: LIB3107-037-Q1-K1-G5
gaattggagctcgcttctctcaggggaactgtacagagagcagaaatccagcttaatcttcaaaaaagaagaggacatggagtcctgtctgtacttaagccaaaattcagtggcgtgctcggcgaagccctagatgtggcagctaggtggagtggagatgttatcactattgaaaaaacggttttgcaacaaaactacagttgttatgaacttcaaggtgaatatgtgttgcctggcaccagagatcgtaatcctgttgacaaagaaggtggccttataaaaaggcttatgtctggtcatattggtaatgctatatcctcaatgggcaggtggagaatgaaacttgaagttcgtagagcagaggttgctgagatgcttcccctcgctcggcttctttctcgaagtatggatc

SEQ ID NO: 48957 - DNA, 433 bp, Glycine max
  Clone ID: LIB3107-037-Q1-K1-G6
attaacaagggctcccaaacacttggaagggctaataatgggtgtctgttctgcaggaaatttaggaaacttgcctataatcattatcccggctatatgtaaagacaaaggtagtccttttggagactccaatgtctgctatcaatatggaatggcttatgcttcactttctatggcggttggagctgtttatatatggacttatgtctataacataatgagagtttccgcaagtgtagtaccaaaagatgcttatagaactagctccttcacactggaggcttcaggagagttcctagaattcttaccagaggaagaatcctcagaacctgaaaatccatcaaaggacaacatggatgattacacacttctgctttcttcaattgaatctgaggagaatgtgaagttaccagtctcagctaagatcaaacac

SEQ ID NO: 48958 - DNA, 435 bp, Glycine max
  Clone ID: LIB3107-037-Q1-K1-G9
aaggaaaaggttcacatcatattgtggtcattggccatgtcgactctgggaaatccactaccactggtcacctgatttacaagcttggaggcattgacaagcgtgttattgagaggtttgagaaggaagctgctgagatgaacaagaggtctttcaagtatgcctgggtgctggacaaacttaaggctgagcgtgaaagatgaatcaccattgatattgctttgtggaagtttgaaacaacaaagtattattgcacagttattgatgcgcctggacatagggatttcattaagaatatgattactgggacatgccaagctgactgtgctgttcttatcattgattcgaccactggtggttttgaaactggtatttccaaggatggacagactcgtgaacatgctctgctttcattcaccctttgtgtgaaacaat

SEQ ID NO: 48959 - DNA, 403 bp, Glycine max
  Clone ID: LIB3107-037-Q1-K1-H11
ggatgttataagaggtgtctcggtgaagtcaaggttggtctcttctggtctgttctgttcttctacgcagacacataacataacacaacgcacctcttcttcttcttctgtcccttcaaatttcaacttcttcatccattttgtgctccaaacagcacaaacactgcaatcacaccgtcttcgctttctactcatctaaaagatagaggttcatgggttgctttggcttctgcaaaggagatgatagtgttacagttgctgacagaggacctttcatgcaaagcactcctactgggaaccccagttatcatggaagacacacagcagtaactgctcctcggactataaattttcaacctattgctgtcccttccatcacagtagatgaattgaagtctttgac

SEQ ID NO: 48960 - DNA, 413 bp, Glycine max
  Clone ID: LIB3107-037-Q1-K1-H2
gatgtttttgtcgtgtattctattcctattgcattcagctcactgatttcaattacaaagtcaattttgtaaatcagaggcagagagagttgtaaagagcctctgaattttgatcacaccacacccttcttctcatctccaccagaaatggctaccggagctgctgtgccaactacgttttctaccctcaagacatgggattccagtttggggtttgcaaaaaacatagattttgtgagagtttccgatatgaagagcatgaaatcttctgcgaggaaaagggtgtcaattatcaggaactcaaatcctggccaagatattgctgaacttcaacctgcatccccaggaagccctcttttggttcctaggcaaaagtattgtgaatcattgcacaaacccatcaggagaaaaac

SEQ ID NO: 48961 - DNA, 429 bp, Glycine max
  Clone ID: LIB3107-037-Q1-K1-H3
ggagggtgttgttacttcttctctggttgattcggatctagagtcttcagtttctcctcgttgttcttcgctttcctgttttcaatttcgattctttcgttaatttaataagatgtttgggagggcaccgaagaagagcgataatacgaggtactacgaaatcctcggcgtctccaagaacgcttcgcaggatgatctgaagaaggcttacaagaaagccgccattaagaatcaccccgacaagggcggtgatcccgagaagtttaaagagctggcgcaagcttatgaggttctgagtgaccctgagaagcgtgagatatatgatcagtatggtgaagatgcgcttaacgaaggaatgggtggtggcggcggccatgatccatttgatatcttttcatctttctttggcggggggagtccctttggatc

SEQ ID NO: 48962 - DNA, 408 bp, Glycine max
  unsure (1)..(408): unsure at all n locations
  Clone ID: LIB3107-037-Q1-K1-H4
gaacccaggttgtctgttacggattagcatcaaagcaagttaacaaaatttgggtgcgtcctggattgacccttttgccccctctccctcaccctccactaactcctcctttttggtttttataaagcacattcccaatagaggagggtccctacacaacacaacccttcaatgacgtccatggccactttcttcgcccaaacctccttcccctcccactctctctccaaaaccttcgatacccatttcgcccctgccccgaaagtcaacgtctttgtgaacttcanggcgaggaggcacgttggggtgcgagtttcgaacgcgctgatcgaaccagatggagggaagctcgtggagcttgtggtgacggattttgagaaggatttgaggaagggtgaagctctttcg

SEQ ID NO: 48963 - DNA, 395 bp, Glycine max
  Clone ID: LIB3107-037-Q1-K1-H5
gatacaacaccacacacagatcaattgcaacggttgaattttgactgaagacaaagttagaaaaaaaaaacatgtcttgctccgtcgcggtttccaattcgccggtgttctctccttcttcttccctcttctgctcgaagccctccatcatctcttcttcgccggaatccctctccctctctctgtcgcatctcaaaccttcgaactcttctacgtcgtcgtcttgttcttcgccttctgctgctgctgcttcttcttctccttcttctccgattcgacttcgccttcccaagcctcccaccgcgttctccgcgtcttctgctgcttctgcttcgtctacctctccgaactgcaccgttttgaagaagaagcgacccgctaggttggacataccc

SEQ ID NO: 48964 - DNA, 393 bp, Glycine max
  Clone ID: LIB3107-037-Q1-K1-H7
agggaccattgtttgatgacatgcaacctttgtttgaccacttcgaggtacttggcaccctttgttgcacaatatgtgaagtttcgagacatgccagaaatcaaaaggaagcattgttacgccatctgtgaaattccgtaacatgccggaaatcaaaaggaagtattgttacgcaatccgtgagtttccgtaacattccgaaagctaaaaaaggagtaattacatgacccgtaaggttccgtgaccttatggaaagaaaacaagtatcgttacgaaattcgtaaagtttcgtaacgatacggaaaaagaatcacctaaaaaagcaaagggggtgtatttagtaaaaaaaaaggtgcaaatagcaaccaggcccacttgggccttccaggatgt

SEQ ID NO: 48965 - DNA, 432 bp, Glycine max
  Clone ID: LIB3107-037-Q1-K1-H9
tacctacattatggagcctaaatacaaggcccaaaaataatgaaatcctgatctaatatgtacaaagataaatgggttcatacttagcccatgggtccaaaatctatcctgaggctcatgagaaccctagggtcttctcttgccactatggcctaatcttcttggagtcttctatccaatgcccttaggggggtaggattgcatcattccctcccccttgaaagggatttgaccttaaatccagaggttcttgaaactcagggattctttcctcaacacctgtaaaaagaataaaaacatatgtattagtggtgttaggtatgttagagtaaggtaaggactgaaagcccttttccttgccatttcccatgagagaacatggttcttcaccaactcaatgagtggtgctacaagtatagaaaaatatgggat

SEQ ID NO: 48966 - DNA, 436 bp, Glycine max
  Clone ID: LIB3107-038-Q1-K1-A11
gtagctgctgctgctcaaattataaagctacactgaatgtaacaactggattgtctgctccttataacaaccttgccattatctataagcagcagggaaattatgttgatgccatatcatgctacaatgaggtcctccgcattgatcccttggcagctgatgggctagttaatagaggcaatacgtataaggagattggtagagttagtgatgctatccaggattacatacgggcaattgctgtcagacccaccatggctgaagcccatgctaatttggcttcggcttataaagatagtggacatgtagaggctgctgtgaagagctataaacaagcattgattcttcgtccagacttccctgaagcaacttgcaatctccttcatacataccagtgtgtatgctgttgggaggatcgtgataaaatgttcaagga

SEQ ID NO: 48967 - DNA, 258 bp, Glycine max
  Clone ID: LIB3107-038-Q1-K1-A12
gtcgcccacgcccccctactgctttgagaaaacacgagaaagggggaagggaaatttttctgagcctgctataaacacggggtgggggaacaaaccagcttgcccaagatctccattctgggagccggtattttttagaagacacaaaaaccttccagacacttcaagatccttcaaatttttactccgaaaatccactggagccccacttaggaaatatcctcaggtggccgtaacatatgttgtgagcatttttcc

SEQ ID NO: 48968 - DNA, 294 bp, Glycine max
  Clone ID: LIB3107-038-Q1-K1-A2
ggttctagtgtatgtgattgttgtgactcgttcttcttcgtcgttatcttcttcttttgttgtttgtgtgtttgttttttctctcacctgaaaatgtcttgctgcggtggtaactgtggttgcggaagcgcctgcaagtgcggcaacggctgcggaggctgcaagatgtacccagacttgagctacaccgagtcaaccaccaccgagaccttggtcatgggagtggcaccagttaaggctcaattcgagagtgctgaaatgggtgttcccgctgagaacgatggcttgcaatgt

SEQ ID NO: 48969 - DNA, 52 bp, Glycine max
  Clone ID: LIB3107-038-Q1-K1-A5
ttactgatactcacataatagcatcactgtagagggaggaaactacatcaat

SEQ ID NO: 48970 - DNA, 306 bp, Glycine max
  Clone ID: LIB3107-038-Q1-K1-A6
acgacagaagggttatatatagctcggcatccttcaggccaaaacatgcatcatagtcatactctccaatctattctccaacattgaatattatatttccatctgcatcatttttatttaattgcaagggaatcaatcactagtcacgaccgaattttggtgcaaaactaactacttgtttcgaattttcaatctgagaacatgcaaaacaatgacagagcctctgaatcacatgcggcacacactggtgaatatgcagaatcaacttcaactaattggtacaatttcagctccaatattccgtac

SEQ ID NO: 48971 - DNA, 239 bp, Glycine max
  Clone ID: LIB3107-038-Q1-K1-A9
cttttattttgataaacaaatcaaagccatgggcacctccaacttctctattgttctctccatctccctaaccttctttttggtgctacttaccaaagcacactccaccgatacccgttattttaccctcaacaattttaacccattccaaccaaacattattcttcaaaaaaaatactagtatttcatcctctggggggtttcaactcaccaaaatttgcatcaaccgcttgcccacc

SEQ ID NO: 48972 - DNA, 381 bp, Glycine max
  Clone ID: LIB3107-038-Q1-K1-B1
ataacatatgaacagtaaaaactagtattttaattgagactggaactcatagggaagaaaatagatttatgaatggaataaaatatgcagtatttacagacaaaagtattcggttattggggaaaaatcaatatacttttaatgtcgaatcgggattaactaggacagaaatcaagcattgggtcgaactcttctttgatgtcaaagtgatagctatgaatagtcatcgactcccggtaaagggtagaagaggacgacctattatgggacatacaatgcattacagacgtatgattattacgctttaaccatgttattgtattttgattcttagaaagaaaaaaacttaaatcaaaatacttaatagcatggcgatacatt

SEQ ID NO: 48973 - DNA, 419 bp, Glycine max
  Clone ID: LIB3107-038-Q1-K1-B10
atgcgcaataaggcactatattctggcggaagggaactcaacttgtttggattggaggaaacaagtttagtgactctcattcagatgacttagacgttcctgaagatggcgtccctttggagaatgaacttgacattgccgttgacttcacagctcctgcattacctggtcgtgacatatcatattgtaggatgacatctccatctggacataaattgggccaacatgattgggtccttatacaggttgatgcctgtctcatggactcattttatgataactctcaaggactgaacttgaatattaccctccttatgagtggctctgaaggacctcatattattgatataaatgctcagcctactgaggatgatactgttcttcatacccgcaagcctaaagctcccattgagcctttg

SEQ ID NO: 48974 - DNA, 370 bp, Glycine max
  Clone ID: LIB3107-038-Q1-K1-B11
gacaagagtttcatcaatggcaatgggggctacgctacctgctggggacgaacaaacgccacttgtgcccgatgataattcgggcatcgaagctcgcaagagccaccactgcacggatattcacatactgagcttggactttctcttggtctttctcgcctgcggagccgctcagaatttgcagagcactctcaacactgaggatgacttgagtgccaccacactcgggatcttgtatttgtctttcacattcttctccgtggttgcttctttggaggtgcgagttgtcgactccaagaacgatctgctcactctgactactggacatgtgctttatgaccctcacgacttgaaaccaaattggtataca

SEQ ID NO: 48975 - DNA, 284 bp, Glycine max
  Clone ID: LIB3107-038-Q1-K1-B2
cggcataacatatcaacagcaaaaactagtctgttaagggacactagaactcatagggaagataattgatttatgaatggaataaaatatgcagtatttacagacaaaagtattccgttattggggaacaatcaatatactcttaatgtcgaatctggattaactaggacagaaatcaagcattgggtcgaactctcctatgatgtcaaagtaatagctatgaatagtcatcgactcccagctaagggtataaatatacgacctattatgggacaatcaatgca

SEQ ID NO: 48976 - DNA, 223 bp, Glycine max
  Clone ID: LIB3107-038-Q1-K1-B5
catcgattcctagggctaatattttccgactttcatctagtcgattttacactgggtcccgataaaaaagatctctcatctacctagtcccagacaattttctgatgcgcatggtcatttctattctaaatgcatcatgagcgatctcttcattcatgccttcacatgtgttgccttcacgtctttctgcacctcaagcgccgatgtatgtaacagtacacct

SEQ ID NO: 48977 - DNA, 436 bp, Glycine max
  Clone ID: LIB3107-038-Q1-K1-B6
ggcaactgatgatggaaggaagctgaaacagtgagaaacaacaaccaacccctgtctttgttttttgtttgttgaattgaaacttgagagagagaaagtgaatgaatgatggaggcaaagggtgtgcagttcttagcgtaccaatcaatattttcgagcgttggatctggggactttgatggggtgaagaaactggtggagaaagtgaagaatgaagaatggtcatcgctctctgatgtgatgtctcttcagaacgatgctggagagactgcgctatacatcgctgcagagaacaatctgcaagagattttcagcttcttgctcagcatgtgtgacttcgaggtcgtcaagattcgctccaagaaggctgatatgaacgcctttcacgttgcttgcaagcgtggcaatctagatattgtgagggagcttttgaata

SEQ ID NO: 48978 - DNA, 345 bp, Glycine max
  Clone ID: LIB3107-038-Q1-K1-B8
atagatgtgaaagaaaatggttgccatgatgcagagaatgaagttgatcaggagacagatgatgatgctgatcgtgttcagagtggaaaattgagtgagagtagtggttatgctggcagtgatctttatgattacaaggcatttggaggtgatgattctgatgttggatcctccagtagtaaccatgctaagactgaaaatgctaatctgaatgctgttccagataccccagggtctgaggatcaaaacaagcaaagaaaggccagtgaaaacccagttgatgaaaatgatgcttttaatttgttgccttagtctgaatcttatcgatccatgggtgagatttta

SEQ ID NO: 48979 - DNA, 193 bp, Glycine max
  Clone ID: LIB3107-038-Q1-K1-C1
ggctgatcctatatgatatgattgatatgatagagcgactaagaaaaagagagctatatctaacctttccattaacgcgacgtgtcgccatatttaagaaccgttcgttctgcgcacctgctgctgctacaggagtcggaattactctgctttaccgaataccacagcaaagagtggacacctctatctggga

SEQ ID NO: 48980 - DNA, 426 bp, Glycine max
  Clone ID: LIB3107-038-Q1-K1-C10
gaccctgcccacatcaaggttcctctcattcttggtatctggggaggcaaaggtcaaggaaaatccttccaatgcgagcttgtctttgccaagatgggaatcaaccctatcatgatgagtgctggagagttggaaagtggaaatgcaggagagccagcaaaactgatcagacagagataccgtgaagccgcagacatgatcaagaagggaaagatgtgtgctctcttcatcaacgatcttgatgcaggagctggtcgtcttggtggaactacacaatacactgtcaacaaccagatggtgaatgccaccctcatgaacattgctgataaccccaccaatgtgcagcttcctggtatgtacaacaaggaagagaacccccgtgtgcccatcatcgtcaccggtaacgatttctcaacactgtatgct

SEQ ID NO: 48981 - DNA, 259 bp, Glycine max
  Clone ID: LIB3107-038-Q1-K1-C2
cacacgaccacacaactgcgcgaagactacagatggtatctatctgacatatagggcacgctatcatgcatagaatgaagttgatcactagacatatgatgatgctgatcgcgttcagagatcaaaattgactcagagtattgattatgctgacaaatatctttatgattactaagccatcagaggtgatcgattctgatgtaggatcctccagtacataccatgctcagactgcaaatgctaaactaagtgctgtctc

SEQ ID NO: 48982 - DNA, 313 bp, Glycine max
  Clone ID: LIB3107-038-Q1-K1-C3
gagcgcgactcgtcttcgttccttaccctcggggtgatctgtgagaggggcttgatagccctctctctctctgctgctgcaattcagacgatttgtcttcacatggaagcattgcttgcttgagggacgcctttgtctcaaaggagttggaattttcgggttttttgtgggattggagatttagagagtgcccttgcactccctgttttatttcatcaccatgattgccactgaaactatagtaccaagtacaaaattgaagatcaagttctcaaccaaaaggatagagattgattctggcccaaaatgtgag

SEQ ID NO: 48983 - DNA, 405 bp, Glycine max
  Clone ID: LIB3107-038-Q1-K1-C6
gatccccaatcagagagaaaagttagggttcacaacttttccttttccttttgcttgcgaatctgaatcaaataatcaatcatccattcattattcatcatgtcgtcggcgaagaaaatcacgctgaagagttcggacggcgaggctttcgaggtggaggaggcggtggcgctggagtcgcagacgataaagcacatgatcgaggacgactgcgccgacagcggcatccctctgccgaacgtgacgagcaagatcctggcgaaggttatcgagtactgcaagaagcacgtcgaggccgcgaatcccgaatacaaacccttcgatgacgatctcaaggcctgtgacgctgaattcgtcaaggtcgaccaggccacgctcttcgatctcatcctggttgttactact

SEQ ID NO: 48984 - DNA, 207 bp, Glycine max
  Clone ID: LIB3107-038-Q1-K1-C7
gatccccaatcagagtcaaaagtcagggggcacagtgaaatgctgttgcttaagcttgcgaatctgaatcacataatcaatcacccattcattatacatcatgtcttcggtgaccacaatgacgctcaagagttctgacagctaggctttcgaggtacatgaggaggttgcgcacgaatcgcagactcttaagcacatgatcgaaga

SEQ ID NO: 48985 - DNA, 378 bp, Glycine max
  Clone ID: LIB3107-038-Q1-K1-C8
tactcaagaaatatatgaattagactcccaataacagagacattgtgaaacttttcaaaattccaaaacagagcataacataaatggaatatattgatctttagctggttcttatttttggcttgtgtaatatattgatctttcacttatatatgtcaccacattgctttattttttttatataattcctcaaagatttaaaatgttatcatatatgtctcacatctcaaagatataatttttgattcattcctctattttaggcttgacagatatataagtgaacttgaactttgactaatatgatgtaccgcattaattattacaattccttaaaaatttaaaaggttatcatatatggctcttaaacacacatac

SEQ ID NO: 48986 - DNA, 418 bp, Glycine max
  Clone ID: LIB3107-038-Q1-K1-C9
gaccaagcccctttcggctctctgtatcgcttctagctgtagagattactatttttccaaccctctctctttctctcatcatcccccttttccttctttttcttcttcttcttcttcctcctccttgcaccactccttatattatctcataaaaatcactctgaggagaaacactataatcaatcatggaggggtctcacatggggttgttgctcttcttttcttccatgctttttgctgccttcccttctgcctcctccagaaacttgcccgtcataccctttgatgaaggctacgcgcccttgtttggggacagcaacttggtcatccatagggatggcaaatcggtccatctttcactcgatgagagaacaggttcaggatttgtgtcgcatgatctttaccttcacgggtattt

SEQ ID NO: 48987 - DNA, 239 bp, Glycine max
  Clone ID: LIB3107-038-Q1-K1-D1
ggcgaagagtgaagagaatggcttataatggtttaaccttgatggatgtgataatatgcgtctcaatactgtcactgagtccttcagatgcagtggaagggcaaaataatggccttgttatgaacttctacaaggaattatgccctcaggctgaagacatcatcacagaacaagtcaagcttctctacaagcgccacaagaacactgctttctgctggatcatgaacatctttcatgac

SEQ ID NO: 48988 - DNA, 101 bp, Glycine max
  Clone ID: LIB3107-038-Q1-K1-D11
ggttctgtgtatgccattgttagaactcgttcttcttcgtcagtatcttcttcttttgctgtttgtgcgtttgatttttctctcacctgaaaatgtcttgc

SEQ ID NO: 48989 - DNA, 428 bp, Glycine max
  Clone ID: LIB3107-038-Q1-K1-D12
aagaagaaatcgggaagaggcgcattcgggtgtacatggatggctgttttgatctgatgcattatggccatgccaatgcactcaggcaagcaaaggctctaggagatgaactggttgtgggtcttgcgagtgatgaggagatcgtggccaataaagggccacccgttttgtccatggaggagaggctggcccttgtcagtggattgaagtgggtggatgaggtcataactgatgctccttatgcaattaccgagcaattcttgaatcgtctctttcatgaatacaagattgactatgtcatacatggcgatgatccttgcctgcttccagatggaacagatgcatatgctgcagcaaagaaagctggtcgttacaagcaaattaaacgtactgaaggagtgtccagtacagatatcggatgaagaata

SEQ ID NO: 48990 - DNA, 346 bp, Glycine max
  Clone ID: LIB3107-038-Q1-K1-D2
gagcaaccataattatttttttttgacaagcagctcaagagaaatctgcaaagaataaaacaagaggaggaaatgcaacttacttgttgatataaacttcagacagagcgagttgttgtaaagctagccttgttgcagccatggccacccacgcggctctagcttctacaaggatccccactaacaccaagttcccatccaaggcttcacactctttcccaacccaatgcgcctcaaagagacttgaggtgacagaattctctgggctaagatccacttcatgtgtgacatatgctaacgatgctagagaatccttcctttttgatcttgtagctttccaactcac

SEQ ID NO: 48991 - DNA, 291 bp, Glycine max
  Clone ID: LIB3107-038-Q1-K1-D3
ggagcaaagacgaagaagaaacacccagtacccttcttacatcttaatttatttttctgaagactttttttttttttaatttcttcatttccaccattttctgttacgccaagctgcgtcggcgacgcgaattgtgattactgaacggtgaattttgaggatctgctacgtttttcaacattgaataaggtgtatgtatcagacaagtatttgtcagaatcacattgttaattctcttctaaagatttcattcgttcatcttcggtatttaaaggcgctccataatttcta

SEQ ID NO: 48992 - DNA, 423 bp, Glycine max
  unsure (1)..(423): unsure at all n locations
  Clone ID: LIB3107-038-Q1-K1-D4
gtatcacatcaatgaccaaagcgatgaccaaagcgatgacgagggcgttggtggaccaaccatcacctccgttgcaatatcaccaacctaggtgtcaagtgaacatgaaccttgaccacctgtcacactacattaattgtcaccatttcattcatcaacaagataatctacaaccaccaaccgtgcacacgaggttgtcatgaccttcgatgaaaaagcacaatgtattcgagtagtcaaagaatacaacatcaaaaatcattntgattgaagaataatatattccgactagagaaggctaaactctatgtgtgaatgaatntgatagacacaaccacacatttattgtaacatagactcaatccccacttcaaatacccaaaccacttggaatgtttagggttatgttacaatcctaaaagt

SEQ ID NO: 48993 - DNA, 296 bp, Glycine max
  Clone ID: LIB3107-038-Q1-K1-D7
gacaacattccattttcataggaaaagccaaaactggagctcgaggaagataactacgatgaaacaagaggaatggatgattacgacagcgttgctatcgttgctgattgtttcatcttttccgccgttgagttacggagttgttcctcctcgtactctgctcaataagctgtcggagggcaaatatctcaacactcaggagctctggttcgaccaaaccctcgatcacttctctccctatgatcaccgacaattccggcaacgttactatgagttagtagactatttccggattc

SEQ ID NO: 48994 - DNA, 416 bp, Glycine max
  Clone ID: LIB3107-038-Q1-K1-D9
ggctcaagtccagacataagcataacccggaccttgaaaccggcaacttgagttgaatcacagcgcagtatcacgtctccaccgatcatcatcttcttcgttcttctttcgaggagcgaccggttctgatcaaggagtttcaggttatcgtcgaaaatgttgtttcagattcctcgcctcaccaactctctcagagatcccttcgacgtggaccagtactatcttcatcgcaaaaccattctccacaaccaaaaacctagcaattccgcaagttcactcgatgaatcggaactggcgcggaagattgtgcacgggtgggaaaaagcttcgtcggacgtgcggcaggcctacaagcagtttataagagcgggggtggacttggttgacggagaaacgcgctccgaggagttccacga

SEQ ID NO: 48995 - DNA, 191 bp, Glycine max
  Clone ID: LIB3107-038-Q1-K1-E1
taaggaatcaaagtcctgatgaaaaacaatttagtacctgtagatcgtgcaaatttacgttcccgcacacgctacgttataacaattccttaattccacccaatttcagttcacccaacctgcctttacatacgcgaatctggattaccgaacggtgaacccaactgaactgcctacaattacaaccactg

SEQ ID NO: 48996 - DNA, 202 bp, Glycine max
  Clone ID: LIB3107-038-Q1-K1-E11
ttaaaaaaacaccaaaagggattgttttaaaatttaacactcaaccccgatttgcgaagttctaatatttcatttcacacaaaatgtctttgattccaaatttcttttgtggcacaaagaacaatttttttgatccttttcttcctcgatatgtgggaaccttttaaagattttacttttcccacttttctttcttcttaaa

SEQ ID NO: 48997 - DNA, 365 bp, Glycine max
  Clone ID: LIB3107-038-Q1-K1-E2
gatcaccgcgttgtgttgtgattgaaaatggagagcgatgttgaagaatctatgcggaagaggcccagaaaatatcctttctccgccgattcatcctctcgcaagcaatttgaacaatattctggacggacatttgcaattatgggggaagtgaattttatgcaagatgatgataatcgtttggagattacccgaactaaatttggaagtttgcttaaaagacatggagatttgacagagcggcttgctagggattctgacaagataatatttgagcgtctacagaaggagtttgaaactgcacgaagctttcaaactgaagagatatgtttagacggggaaaaatggaatgatggtctactagc

SEQ ID NO: 48998 - DNA, 265 bp, Glycine max
  Clone ID: LIB3107-038-Q1-K1-E3
gataacaatcattattataacggaaacttgtaacttgtaatcaagggagagagaaaatttcaagcacaaaaaatggcggagaagaaagtggtgatcctaggaggtggtgttgccggtgccaaccttgcaaaaactatacaacgtcaagccaacgtcacccttattgatccgaaggaatattttgagattccatgggcaagtttgaggggattggttgagccaacttttgctgaaaggatagtgatcaaccatagagagtacttca

SEQ ID NO: 48999 - DNA, 407 bp, Glycine max
  Clone ID: LIB3107-038-Q1-K1-E7
ggatgttcctcagagcggaaaatgttgtcgtttgctccgaaggtgtctcctgccacattcttcgatcagtcctagattaaaaattctgtctttcttcttctgtgaccgaaacagcaatgaggtagcacaagcaggtttcctcgcttaaccggcgacccaccgttctttatctgctgtgcgccgctgcattcttctccctcctcctcttctacatccaatcctctttcttctcaggcaccgtctcttcggattcgccaacaaaagataccgtctcttcagaccgcgactccgagacaatccgcggtttttctaacgttcagtccattgtgaatcaatgtgtggataacagggggcttggactcactgcacatattattgatcattgcaggttaattcttaaataccct

SEQ ID NO: 49000 - DNA, 292 bp, Glycine max
  Clone ID: LIB3107-038-Q1-K1-E8
tgccacctttgttacaaacaattcctctggcacgcagcaaggacctgttggaggaagtgatgctcaaattaattgttctgacgggggtggattaactgaacttgagaaactattaaagcagaagactttcaccagatctgagattgatcatttgacagcacttatgcgttcaagaactgtcaatgcacctgtcagggaagaggagaaggggacagaaatggtcccctcagaaccaatgctgctgagtggacaaaaggaatatcccaaatcaactgcactagaaaatgggact

SEQ ID NO: 49001 - DNA, 427 bp, Glycine max
  Clone ID: LIB3107-038-Q1-K1-F11
gggtgtgtgtgtgaaatttccttctccctgttgtttaacgtttcttcgtcttttttgtttttgttgataaaaaatggagggtgtgggttgttcggataagggtttcttcaatttgtttttgcgacctcttatttgtcttcaatttttgtaaagagttggtgtagaaggttgttctgtgttctcgtgtgtggctaaattttggagatgagtcatgcaaaagagaatgaggaagcagggcagaatgtacccttggctttggaagaaactcaacagtttgttgaagcacagattcaaccagaagatttggctgctcctgtgtccacagggggtacttcaaatcatgttgaaaacgggaaagtagaggtagaggcacgcgtggaggataaaattgtgaaaccagaagcggattcagagtgcattccactac

SEQ ID NO: 49002 - DNA, 306 bp, Glycine max
  Clone ID: LIB3107-038-Q1-K1-F2
ggttctagtgtgtgattgtttgttgttgtaactcgttcttcttcttttgttgttctgtgtttgtgtttgttttttctctcacctgaaaatgtcttgctgcggtggtaactgtggttgcggaagctcctgcaagtgcggcaacggctgctgaggctgcaagatgtacccagacttgagctacactgagtcaaccaccaccgagaccttggtcatgggagtggcacctgttaaggctcaatttgagggtgctgaaatgggtgtgcccgctgagaacaattgctgcagatgtggaccaaactgatcctg

SEQ ID NO: 49003 - DNA, 334 bp, Glycine max
  Clone ID: LIB3107-038-Q1-K1-F7
gattacctataatttcagagctagctagttcacagcttcagttcgtttttgttgatcctgtgaacttatggctgacggggtggttctgttggatacatgggccagcatgtttgggatgagggttaggattgcattagctgaaaagggtgttgagtatgaatacaaggaagaaaatctcaggaacaagagtcctttgcttttgcaaatgaacccaattcacaagaaaattccagttctgatccataatggcaaaccaatttgtgaatctgcaattatagtgcagtacattggatgaggtctggaatgataaagttccattttggccttttgacct

SEQ ID NO: 49004 - DNA, 254 bp, Glycine max
  Clone ID: LIB3107-038-Q1-K1-F8
ttcctaccaaaactactcttaatgtgcctaattccccgaatatctttcttaatccctcaacaatgaaattagttgaactgcatgattaatggagatgcatcaacaggctacacaacttcgcactatccctatcactgaagcatttagatgctctttctagttctaagggataaaagacatttcccaacgcctaaaccctaaacatagcatatatatgggtgatcagaccaaatacatgggaataagcacaaaaa

SEQ ID NO: 49005 - DNA, 285 bp, Glycine max
  unsure (1)..(285): unsure at all n locations
  Clone ID: LIB3107-038-Q1-K1-F9
gggatgtgaataggagagggataataagaagaaagaggaggaagaaaaggggaaaactcanataaaaaaagaggaagatagatcaagatctcccttgcgtttgtctcagatgaagaaattcaagagcagaacgatactaactcaacggtatcagacgtttcagggtttcagcacttccattttttttttccggatttgacttggaagacaatcaaagaggttcctaattgcttgcattgttcctctgggtggtggatactttgagtattcttaaaatattgacat

SEQ ID NO: 49006 - DNA, 206 bp, Glycine max
  Clone ID: LIB3107-038-Q1-K1-G3
gaggaccccaagtgagtcagatgatcgagataacttcgagcagtgtggtgacaatgaaaggactaggaatgttcgtggctacaatgttggtaccatggcaataccatgcgtacgatatgcgtactatacgaatgatcactggctgtacagtccgtactgcggacgtgatatgcacgagaaatacgcttgctggaggatcactcaac

SEQ ID NO: 49007 - DNA, 361 bp, Glycine max
  Clone ID: LIB3107-038-Q1-K1-G4
ggtgaaaccgtcatcataaattcatatatcatcagcctcagccatgtcttcttcgctcttgcacctcctcttccttccacaactacgatcttcgatagtgctttctcagattcttccttcgtggtaaccggtcgaatcatggagcccatggacattgttggcaagtcaaaggaagacgcttcgcttcctaaagcaacaatgacaaaaattattaaagagatgttacccccagatgtacgtgttgcaagagatgcccaagatctattgattgagtgttgtgtagagtttataaaccttgtctcgtcagaatccaatgaaggtttgaacagagaggataaacggacaattgcacctgagcatg

SEQ ID NO: 49008 - DNA, 287 bp, Glycine max
  unsure (1)..(287): unsure at all n locations
  Clone ID: LIB3107-038-Q1-K1-G6
ggaagccagcgaagctgtctttcgattccttcgtgcgtgcgattctcctgatatccaaggtgaagcaccgacaccggacctatctccggcgaatccccagtccccactttcttccttcgaaatgaatcccgagtatgattatctgttcaagctccttcttattggagactctggtgttggtaaatcatgccttcttctgagattttctgatgattcgtacatcgaaagctacataagcaccattggagttgattntaaaatacgtaccgttgagcaagatggaaaga

SEQ ID NO: 49009 - DNA, 356 bp, Glycine max
  Clone ID: LIB3107-038-Q1-K1-G7
gaatgttgaattatttgactttatttcatgaattttgacttggttgtatgtggttgtgattctttgaatactgagcacattgttttttccttattggctgagatatcaagtcttctttgatatattgctgatttataatttattgacatttgagtttggtttgcattcaatagctattgtaggagatataacaccatctgatggtgtgcccaaggctgaaaagagcagaatggagctggaagctttgaacaaaatgtgtgaacttcttggtggagggatgagagctgaggagatcaaagaactttgggaagagtatgaaaacaattcttctgtagaggcaaatcttgttaaggatt

SEQ ID NO: 49010 - DNA, 422 bp, Glycine max
  Clone ID: LIB3107-038-Q1-K1-G9
ggtttcggtcttctttctcacacaatctgggaacagcacacacaaaccattcccttttctcgctccggcaatgaccacccaagcttccaccttcgccgtcgccgttccctccgtcacaacccccttccgcagccaccggaatcccttcgttgttcgagcccaagcggaaccttcagataaatccgttgaaattatgaggaaattctcagagcaatatgctcgtaaatcaggaacatacttttgtgttgacaaaggagtcacttctgttgttatcaaggggttggctgaccataaagatacgttgggtgcaccactgtgcccttgccggcattatgatgataaagctgctgaggttgcacaaggattttggaattgcccttgtgttcccatgagagagaggaaggaatgccactgcatgctat

SEQ ID NO: 49011 - DNA, 395 bp, Glycine max
  Clone ID: LIB3107-038-Q1-K1-H11
acgcgccaggccacccttccgttccgatacgacagacggcggaaggcggaggtcataatacgagactatgtgaagggatgtatgtctattctggcctgcaaagctcttccacgcaaacacatgacataacacaacgcaccgctatggatcgcgctgtcccttcaaatcacacactcatgattcattgcgcgctaaaaagagcacagacagctgagggacatccgtgttggccccaaagttaactaaaaaatagatgtgcagacaatagctttggactatgcaaaggagatgatcttgatacagttgctgacaaaagaccactcatgctatacactcctaccgggaaccccaaaattgatggcagacacacacgaatgactgctactatggctatt

SEQ ID NO: 49012 - DNA, 302 bp, Glycine max
  Clone ID: LIB3107-038-Q1-K1-H2
gatttgtgagtgtgtgagagagagagcgagcagtttcagacacagagagaggggtttgggattggagggattgacgctgcgtctcttcctcttctctttcgatccatccctcattcctaatcctccaatccaaccacctcagcctcacactcacatatacacatatctgaacgcgtatcgtccctcctatggcttcaaagcgcatcctcaaggagctcaaggacttgcagaaagacccaccaacttcttgcagcgctggtccagtagctgaggacatgttccattggcaagcaacaataatg

SEQ ID NO: 49013 - DNA, 279 bp, Glycine max
  Clone ID: LIB3107-038-Q1-K1-H3
tcttttcttgatagcgggtcacatgtataggactaactggggtataggtcacagtataaaagacattttagaggcacataaaggtccatttacgggccagggtcataaaggtctatatgagatcctaacaacgtcatggcatgctcaattatctattaacctagctatgttaggttctttgaccattgttgtagctcaccatatgtattctatgcccccttatccatacctagctactgactatggtacacaactgtcattgtttacacatcatatgtg

SEQ ID NO: 49014 - DNA, 345 bp, Glycine max
  unsure (1)..(345): unsure at all n locations
  Clone ID: LIB3107-038-Q1-K1-H4
ctattcctccggttagcttggaagaagtattcattcgtcccattttcaacggcggcgcgtgggataatcaatgttcaaaaataaaatttagaaaagaatattcactggaatggaaattaatacctcaagccaaagaacatttggttgagtgtgtgccttgatgaaataatcggttccccacttgatggcctccagagcgtgagcgtactcgccggcagcagcgatttgttcgccgtattctatagcaccccatgagaggaagtgttatggtgaaagccattggcaacccanatttcacattgtcccctgcatcattataccctccaccaagtccactaactgcct

SEQ ID NO: 49015 - DNA, 464 bp, Glycine max
  Clone ID: LIB3107-038-Q1-K1-H5
gaagacgacagaagggggtgtgtgtgcacggcgtcaggtaaggtattacggggtcactcacacatccacatccactctctcttcttcttcttcttcttcttcctctccacgacgattaataataataatggagcagcttcaaacacccaccaccacccataataacacgaatccagaaacctccaactccaacaatggcgatcttttcttcgaagacttcgacagcacttgttccaccccttacgttagcgccccttccagccccggccgtgggcccctcccaggcttcttctacagcgctccggccagtccaatgcacttcgcaatcactgccgcatcgtcttacaagaacaccccttcttccggaccaatgggctacgagttcgaattctccgcccggttcgggtgctctggttcggccgggtccggttcgatgagctcggccgacgaactcttcctgaacg

SEQ ID NO: 49016 - DNA, 186 bp, Glycine max
  Clone ID: LIB3107-038-Q1-K1-H9
gtctcttctggtctgatctgttcttctacgcaaacacataacataacacaacgcaccttttcttctgtttctgtaccttcaaatttcaacttcttcatccattttgtgctccaaacagcacaaacactgcaatcacaccgtcttcgctttctactcatctaaaagatagatgttcatggtttgctt

SEQ ID NO: 49017 - DNA, 153 bp, Glycine max
  Clone ID: LIB3107-039-Q1-K1-A10
agagagaaattaaggcacagccctcgctactatggtcccataaaccttttaaatatataggtgatgcagcagtttaatcactgtcactgctgctgctgctgtcatggccatgctcatggccatgctccttcttcttcttctccttctgtcgtc

SEQ ID NO: 49018 - DNA, 267 bp, Glycine max
  Clone ID: LIB3107-039-Q1-K1-A11
accgctcgtacgagctgttgaaaggggttttctgagggggaaatcttatttgtgactggcggggtaatcctcaggaaccatctatcatacatggtttttataaatatgatgaattgacaccggcttttgctagcacctacttatttttgatgaattaactttttctttatttatcgaacgcccggatagaacaaacaagttttttttgttctttcttcaacaaaatctgatctgatagtatacccctcagtcggataataacttata

SEQ ID NO: 49019 - DNA, 333 bp, Glycine max
  unsure (1)..(333): unsure at all n locations
  Clone ID: LIB3107-039-Q1-K1-A12
catccatgaatggagcccctggccttgacctctcatctattgcacagaacccttcaatcatgccgagtaatcataactatcatataatggcagcagcacaagctgccagtgctcagttgaagaagagttatcatgccgctgaggaagggaaaaatgtagttaattcttctaatctagacgaagatagaaaagcaatatctgctggaaaaattccggcaacaatgggacaatccattgcattcggaaggccagaagtgtctgatccctcattagcgtcgntatcaggtggcaacaatgtgatngatacctcggggtcgtaatctaaaccttggg

SEQ ID NO: 49020 - DNA, 315 bp, Glycine max
  Clone ID: LIB3107-039-Q1-K1-A2
cagtcccgctgcatcggcgagctctccttccgctccgaagttaaaggcgtccgtttccgccgggccggattgtggtcgtcctcgcccacaagatcttcgtctacaacttctccgatctcaaggtgctgcaccaaattgagacgattgtaaaccctaagggcctttggcgacctttccattgtttccgccacgatggtgttggtgtgccccgggttgcagaaggggcagggtagggttgagcactacgcttccaagaggaccaagttcatcatggctcatgattcccgaatcgcgtgttttgcactcacgcacgat

SEQ ID NO: 49021 - DNA, 282 bp, Glycine max
  unsure (1)..(282): unsure at all n locations
  Clone ID: LIB3107-039-Q1-K1-A3
tatgtgttggttcatcactcactcgtgaacacaacatgtgcatataactagctaccttttatttttggtgttcatggctggcaagctagttatagtctnntgggtgctttcattntctactcacttttttctagtttctttgttttgcctctcacatggggggtaataatatgttggaatattcaaatattgcatcatgggtcatgcatgacatgaatcacggcactaatgcaccattttgagggggttcttttttcttttctttattttttgcagagaaat

SEQ ID NO: 49022 - DNA, 379 bp, Glycine max
  Clone ID: LIB3107-039-Q1-K1-A5
gggtcttgggggggaatggttggtggtggaacttcgtcttcttcttttggtggtctgtggttgggtttgttttttctctcacctgaaaatgtcttgctgggggggtaactggggttgcggaagcttctgccagtgcggcaacggcttggggggcttgcagaatgtcccagacttgagctacactgagtcaaccaccaccgagaccttggtcatgggagtggcacctgttaaggctcaatttgagggtgctgaaatgggtgtgcccgctgagaacgatggctgcaaatgtggaccaaactgctcctgcaacccctgcacttgcaagtgaggtgttgggagagcaagcttcaagcagagatagcccttaattaggaataat

SEQ ID NO: 49023 - DNA, 335 bp, Glycine max
  unsure (1)..(335): unsure at all n locations
  Clone ID: LIB3107-039-Q1-K1-A6
tcggccaagccttccgaccggttgcaagaggccaacagagggggaatgaaatcttattggaactgtccagttcacccttgggaaccatatcacatccgggtttgatgaaatgggtgaatgaaacgtttttgtaggacatattatcttggataattcactatntctttattttccgatcgcctggaaagaacaagatgtttcttttgttctttcttcaacaatttctgatctctagtagacctctcagtaggattcgaactcagatgaagttctgaccatctgtcagagaaaaaagaacgagtagctctgtatcaatggaatctcatcatccatac

SEQ ID NO: 49024 - DNA, 329 bp, Glycine max
  unsure (1)..(329): unsure at all n locations
  Clone ID: LIB3107-039-Q1-K1-A7
aggaccacaaagacgacagactggcggnccgggtggatccgcgagctctccttccgctccgagaaaaaagaaaacagaaacaacgcgaccgctttggaggtctactcgtccacaagatcttcgtgtacaacttatcctatcttaaggtgccccaaaaaatagtgacgagtgccaaccctaaaggcctttggcgacctttcacatgtttccgccacgatggtgttggcgtgccccacattgcacattgggcaccttgcggttgagcactacgcttccaagaggaccaagttcatcatggctcatgattcccgaatcgcgtgttttgcact

SEQ ID NO: 49025 - DNA, 224 bp, Glycine max
  Clone ID: LIB3107-039-Q1-K1-A8
gacgacagaagggagtgacaagacagaaaccagttcttcagtagaattgaactctggcaactttgatgaattggtgatcaaaagcaaagaactctggattgtggaatttttcgcaccttggtgtggacattgtgagaaattagctcctgagtggaagaaagcatccaatagtttgagagggaaggttgaactgggccatgttgactgtgatgctcaaaagagtc

SEQ ID NO: 49026 - DNA, 352 bp, Glycine max
  Clone ID: LIB3107-039-Q1-K1-A9
catacacgcaccttagttactcttgaggtcctattgtggaagaataacccaaaattgaggctttaactttttggtttttacttgtattactgtggtaaagttgtgccttggtgacttgttggtcatcggttcgaatccggaaacagcctctttgcatatgcaagggtaagactgcgtacaacatccctccctgataccttcgcatagcgaagagcctctgggcaatgaggtacgaagttacttgtattactgtggtaactggactaaaatctgctggttgggagtggaaagtaactttgagatgctacataaaaccacaattttgctttgcctctcttggatgtgtgaatat

SEQ ID NO: 49027 - DNA, 368 bp, Glycine max
  Clone ID: LIB3107-039-Q1-K1-B2
gggtggaaaaacactcaatcaacacacatgattgaagtgcaagcaaatgccatggagcagagttggtgggccaatatgcctcacgagcttctcagagaggtcctcctccgaattgaatcgtcggagtccacgtggccgctgcggaggagcgtcgtggcttgtggcggagtgtgccgcacctggaggaggctcatcgtcaaggagattgtcaagccacctcaattctcttccaacataaccttccccatctctctcaaacagcctggcccgagggaacatctacttcagtgcttcattaggcgcaacagtgcctcacagacatattatctgtttctcagtttatctagtgccctagtagctgatgatgg

SEQ ID NO: 49028 - DNA, 313 bp, Glycine max
  Clone ID: LIB3107-039-Q1-K1-B3
accacctggaatggcttggtcccaaatttgatcaaattgatcaaaataataataaccttaacgaatgaatctaacataaaaatactagtcttcccaaactattcaaacggattattcaagacttaataccatggcttatggcaaatgtctacaagaatcattggattcagtctcaaacgggaatctaaggttcactcagcatgaacaacagttgtttatattgcaaattacattgatggcgtacaagaacatacaaatatcgacatcaacagttgtgagactagtcataaaaatacacgcaaaagcaagatgc

SEQ ID NO: 49029 - DNA, 247 bp, Glycine max
  Clone ID: LIB3107-039-Q1-K1-B8
gggcggcaaaacactcaatcaacacacatgattgaagtgcaagcgagtgccatggaacaaagttggtgggccaatatgcctcacgagcttctcagagaggtcctcctccgaattgaatcgtcggagttcacgtggccgctgcggaagagcgttctggcttgtggcggagtgtgccgcacctggaggaggctcatcgtcaaggagattgtcaagccacctcaattctttttcaacataacccttccca

SEQ ID NO: 49030 - DNA, 305 bp, Glycine max
  Clone ID: LIB3107-039-Q1-K1-C11
ggggtttcaaagtggacagaagagagcgtcctagtcgcaaccctaataagaagaaccacagcttcaagcgagtgacatccaccagccatgggtcgtatgcacagccgcggtaagggtatatcctcttctgctttgccctacaaaaggacaccccctagctggctcaagatctcttcgcaagatgtggaagaaaatatctgcaagtttgcgaagaagggtttgaccccgtctcagattggtgtcattcttcgagattctcacggtattgctcaggtcaacagcgtcactggcagcaaaatccttcg

SEQ ID NO: 49031 - DNA, 265 bp, Glycine max
  Clone ID: LIB3107-039-Q1-K1-C12
gagggaaagaaacgcactttttggttttggttttggatttcgatctcactgcattgccttctgctactgctagttgcatgatggttgtgcagaactttgtagttgatttgaataaggcccttgttttccaggttgggcatcttggagaagcttatgaagagtgggttcaccagcccattgtcagcaaggaaggcccccgtttctttgaaaatgagattctggagttcttgacgcgcacagtctggtgggcaataccagtcatttg

SEQ ID NO: 49032 - DNA, 414 bp, Glycine max
  Clone ID: LIB3107-039-Q1-K1-C2
gattgattgtctgcttttaaaataaaaaagaaaatgggcgaccaagaagtttattagagacttgtagaagagccatgttaatttcttgaggatcaatatcaagtgaaaaataatgagtatgtatcctctacgtttcctttaagcaggtatctttgagtaggaagtaaaacgaaactttttcagagggagacaattacattaaaagtacaagaaacaataagcaataatcaactcatgaagcttgttgaagagttctcgtattgaaggaaataattgactattggaacattggtaatattaatggtattaagtgttgtcgtggtcatgtttttttcctcaatgaatatagtaaaaactttttattttctataaattaggaatctagatcttttaagtttcattcttattattttg

SEQ ID NO: 49033 - DNA, 390 bp, Glycine max
  unsure (1)..(390): unsure at all n locations
  Clone ID: LIB3107-039-Q1-K1-C4
gtcctacaattttgtttaagagtctactttgtgatcatttagtatataccaatacatgtgtaaaaataatcatgtcattaaactttataagaatcaaaattgacttgtttgtatgatataaatatatttttcaatatttaatatgatattcataataatttatttaacacatattttgcaatagaaattctaaataagacataaatttatctgagttaaacttaattataagctntagcctgattctatatatatatatatagatcaacattaacatatacgcttaacatttaaaaagataaatataagattatattattaatattaataataataacttttggttattatttttaaataaaatggagtggttaggcctaaagaattttt

SEQ ID NO: 49034 - DNA, 307 bp, Glycine max
  Clone ID: LIB3107-039-Q1-K1-C5
caatcctcagctaactcgtgcgctggacattatcttcatcctgcatgcagaacatgaaatgaattgttctacatctgctgttcgacaccttgcatcaagtggcgttgatgtatacactgctattgccggggctgttggagctctttatggaccacttcatggtggagctaatgaggctgtcctcaaaatgctgagtgaaattggaactgttcagaacattccagagttcattgaaagtgtcaaagccaggaaacgaaagctctctggttttggacaccgagtgtacaaaaactatgatcccaggggc

SEQ ID NO: 49035 - DNA, 321 bp, Glycine max
  Clone ID: LIB3107-039-Q1-K1-C7
tgtctcaaagatgattccagcatctgacaagggcagattttttgcttttggtcgtgtattctctggcagagtttcaactggtttgaaggtgaggattatgggaccaaattatgtccctggggagaagaaggatttgtatgttaaaagtgttcaaagaactgtcgtttggatgggaaaaagacaggaaactgtggaagatgtcccctgtggtagcactgttgctatggttggtttggatcagttcataacaaagaatgctactttgactaatgaaaaggaagttgatgcccatcccattcgagctatgaagttttctgtctc

SEQ ID NO: 49036 - DNA, 418 bp, Glycine max
  Clone ID: LIB3107-039-Q1-K1-C8
ggattgattgtctgcttttaaaataagagagaaaatgggcgaccaataagtttattagagacttgtagaagagccatgttaatttcttgaggatcaatatcaagtgaaaaataatgagtatgtatcctctacgtttcctataagcaggtatctttgagtaggaaggaaaacgaaactttttcagagggagacaattacattaaaagtacaagatacaataagcaataatcaactcatgaagcttgttgaagagtcttcgtattgaaggaaataatcgtctattggaacattggtaatattaatggtattagttggtggtgtggtcatgtttttttcctcaatgaatattgtaaaaactttctattttctattaattagggaatcttgaatcttttaattttcaaatcttattattatt

SEQ ID NO: 49037 - DNA, 388 bp, Glycine max
  Clone ID: LIB3107-039-Q1-K1-C9
gactgtcctttgtgtttcgatacgaacaaggcttccttctcagaacctccgccaaacttagcggcgatttttccaacttccatttcccccctcaccttcttcttatacccctcacactctcttcttcctcgtccaccccatttctctctctttctaacaatggctcaggtcgtggcttcacgatccattcaaagcaccccattgtgccccacttctggatctgcacgtgacagaacccaaaacctgttaaagcctccatcttttgcttccaaggtgttccctttgggagagaacaataacaaacgctccaaactcaggctcagaagccttcagatcagtgcagggaaatctgccccttctgaagtcatccccatgtcacccgaagatg

SEQ ID NO: 49038 - DNA, 427 bp, Glycine max
  Clone ID: LIB3107-039-Q1-K1-D10
gaagtgcgttagaacagaaaagaagtgcaaacaaggcgcacataataatagtacccttcttcttcgtttcttagctctccactcgcctattaaccctcaccggaatctctgattcgatcttggttttcccatatagcacaagacatagagccgtgtgaatttgcgatatgctgggtaattgtcgccaatacccaatctcttgggtactcctttaccaacccccaccgccgcattaattatttttctcttggaatcggacaaaggttccactgagactgaaactttttaaggccaaaaaaatgctcgattcggttcttctggcgcttttcttgccgcgccttggcatgagcggcgtttttatcttctacatgtgccttctatggtacgccactacccgcctaaaccaaccccccattgacggtcaacc

SEQ ID NO: 49039 - DNA, 380 bp, Glycine max
  Clone ID: LIB3107-039-Q1-K1-D11
gacccacgcgtacgaccgccagaaaacaacaaaaggggacagatccgaacccaggcacaaaatccacttcagtgcggcataaatcgacaaagacaaccaacggggaaaacactgtatgaactgaccaactatcttcgtctctctctcgattcttccaaacggtgcttcgatcggaaaccctaactatcacttacctccgtcaacggagcttagttctcgtcgacgcctctacaatccttcactatccactaacgagcaaccacctgcggatgatgctgctggcgaagatgaaactactactggcaagggccgtaacaataaatatacaaagcgttgctgtatatcatcaaactcagatatagtttatggccctgattcac

SEQ ID NO: 49040 - DNA, 339 bp, Glycine max
  Clone ID: LIB3107-039-Q1-K1-D12
tactgtgatttcattaagtggatgtgaatcttttaccttttgaattttttaaagtaaatgtgttttaagaaaaattaattaatttcgcatggttttctttccttttattattatgtgtttaaaaacctttaaattaattatgtatgattttatttccttttattatttatttatatttgtgaggggtaggggtggttctggcttccagaacccttcatcttcatcatctatctcgtcgtctgtgtctccatcatgttcatcgcaggaacaatccaaatcacacatttcaggagcaatatcccaaataaagtgtccttccactttattcgtatgtatcac

SEQ ID NO: 49041 - DNA, 423 bp, Glycine max
  Clone ID: LIB3107-039-Q1-K1-D2
ccaccgaaggggagaagggaaatgaagaactactggtagggaggagtctgcttggcgtttgctgatgaagtattatgctggctgtatggaacaatcaaagaaggggaagaatatattttgcaggttgctccacctttcaacccgttaaagcttctgcaagcccagtcttgcccagatgtaattactagtcatctggagcttttctgaaaatttggagaccttaacagttattattatttaaacaattcaatatacgaaggggaatcaaccctggatttttcccctccgctttgatcagtccacgaatttttagtataggggcaccctctgtgagtgctgagaaattgcattgcatctccatagaaattgtggaaatattatggccctacttaagtggaatataagtcctttcaactttattgc

SEQ ID NO: 49042 - DNA, 295 bp, Glycine max
  Clone ID: LIB3107-039-Q1-K1-D5
gggaccttgggggggtggatgcttggtgtgttggatatcatagtgaagcggatgctcctagacgccggcttgctcaaccgctaatcttttggagaactgagagtgactgcccgactggaaatggctatgcacgtccagctggacgaatccatatactcgtagacatgcagaatatggcaattcttgagcttgaacacctgcaactaactccccttccacctgctgatccattgataaattatacttgtggtgaaactaggggaggagttgatcgaagcgatgtgaaaccattaca

SEQ ID NO: 49043 - DNA, 414 bp, Glycine max
  unsure (1)..(414): unsure at all n locations
  Clone ID: LIB3107-039-Q1-K1-D7
gaagagagagagagcgatgggtgtgaactccaacagagtggaacactttgctagccatgatagcgccatcgaggagacaatgcaaatccatgcagtgcagttgccaccacaccagaccacactccacaaactcaggcacagagtctccgaaatcttcttcccagatgaccctctccaccgtttcaagaaccaaactcgctttaaaaagttcctcctcgcacttcagtatctcttccccattttcgactgggccccaaactacaatcttacccttctccgctctgacctcatctctggcctcaccattgccagcctcgccattcctcaggttcacaacatttagccacccaaattgctttttttcttatatagctngcttgatttgcatgtttaaatgtaattttcatgtttttt

SEQ ID NO: 49044 - DNA, 344 bp, Glycine max
  Clone ID: LIB3107-039-Q1-K1-D8
gggtctaaagaacatggtttggagattcctttggcctatttgacaatgttttagcaatttcccatcttttgatactttcaaagactgattcttttggattcaaatcctttcaatttcgttccattgaagaaaaacttaatctggttcgtgcttttcttgcccgagttgacgtttgcaggcaacaagaaaatgagcaaaaactggaaatctagctgctttcgggatcctgggggagttctgttccttcttgtgttgtgtttgttgtttcagaactttagtttgtgctgctctttgaatgaagaaggtaaagctctttttgaagttcaaacagggaatagtaaacg

SEQ ID NO: 49045 - DNA, 372 bp, Glycine max
  Clone ID: LIB3107-039-Q1-K1-E10
aatgcttcaaatccatgcactgattatgtcactcagttacgctagaattgaaatcaagactgcacagtctctagaatcttggagtggtggtgttcttgtgatggtttctggatctgtgcaagttaaggactacagccggaggaggaaatttatgcagacattcttccttgctccccaagagaaaggcttttttgtgctcaatgatatttttcactttgttgaagaggatccagttcaccaacaacaaccagtcttgttacctcagagcaatcttgattcaaaattgaatgcttcaagtgcaaccaataaacctgtgtccaactacctgctgggtggagatatccaagctagggactacgttgctacaaatga

SEQ ID NO: 49046 - DNA, 341 bp, Glycine max
  Clone ID: LIB3107-039-Q1-K1-E11
ctgtccataatcggattttgatgcatttgatatgatatgggtgtggtgtttgaccagtcctaaatgggtagtccccattataataccacatttgttcccattagagtttgggctttatgacaacttgaaaatggatgcacctaccaacaacacttcttttaatacccatgctgctgccaatgtctgtttactgtgtcccaatacagcagcgcaacaagggtagttctgtcattttacactttttgtggagggaggttttgtagtagggtcacatgcccccaaagtgattcacccaaatccaaaaatgagccttaaattctggcctaatttggttaattggt

SEQ ID NO: 49047 - DNA, 294 bp, Glycine max
  Clone ID: LIB3107-039-Q1-K1-E12
tggagccctttgtttcatggaaagcagctggggcgtacttcaaacgctcatgatgctaggaccttttggagtcagattgtgtgggtggtctccaaaaaagcctacacttttggctaaaatggaagcggcattgttgtgcatcgcgatgttatttaggtattacgacctcttaggaagtatcactttgatgatgcttgcgtctactttaccaaagatgttgatagttactccccatattatgtcttctcaagccttctaccatttaatacgagagcacctacaattaggaaaata

SEQ ID NO: 49048 - DNA, 381 bp, Glycine max
  unsure (1)..(381): unsure at all n locations
  Clone ID: LIB3107-039-Q1-K1-E2
tcggccacgcgttcggccacgcgttcggccaagccttcctaccggttgcaaaaaaacaccaaaagggaaggaggtcaacctacatatattctttggatgggttaagaaaactttcccaagcatttgcaccggttaatgcttgttattggggaacatatattttgaataaaccttaatgccaaggaaaatttgattaagaaaggaaagtttgtggtgttacatctgaaagggaaacttgcaaatggaaaaaagttgtttgtgatccatcatatttgcctggcaaggtgaagaaagttggtagggttgcaagggcgatagccatcatgagccacccaatccccagcactgatgattcccattcagtgcanattattttaccac

SEQ ID NO: 49049 - DNA, 190 bp, Glycine max
  Clone ID: LIB3107-039-Q1-K1-E3
gggttctagtgtgtgattgtttgttggtgtaactcgttcttcttcttttggtggtctgtgtttgtgtttgttttttctctcacctgaaaatgtcttgctgcggtggtaactgtggttgcggaagctcctgcaagtgcggcaacggctgcggaggctgcaagatgtacccagacttgagctacactgagtc

SEQ ID NO: 49050 - DNA, 396 bp, Glycine max
  unsure (1)..(396): unsure at all n locations
  Clone ID: LIB3107-039-Q1-K1-E4
gagattgagatggngtcgtttggtcggagaagcatgtccactgtggcgaaagcggtggaggaaatcaccggcactggcaacaccaagatccgcaaatcttccagcgagctctgcaccttcctcggcatccctcgccaatctcgttccgaaatcgctctcattctctccaagttcatcaaactctataatttcaagagtcccggcattaagaaggacaagatttgggagcagaatttgcagacactgttgcgtggcagaaacaatgttggttttcctgagattgcgaagatactgtctccggaattcggtcatggcgcgattaatgtgaaggacagtagtattggggattcttccggggacgccaccaaggggaaaggccctaaaaaaaaagggaag

SEQ ID NO: 49051 - DNA, 369 bp, Glycine max
  Clone ID: LIB3107-039-Q1-K1-E5
cgaccggtggcaaaagaacaacagaagggggaacctttgcattctattcattcaagattcagcaagtgcgttttggaagcagagaccgaaatacttcgagatggcccgtacaaagcaaactgctcgtaagtcaactggaggaaaagctcccaggaagcagcttgcaaccaaggctgcacgtaagtctgcaccaacaactggtggtgtgaagaagcctcatcgttatcgccctggaactgttgctcttcgtgagattaggaaataccagaagagcactgagctcctaatcaggaagcttcctttccagaggttggttcgtgaaattgcccaggatttcaagactgatctgcgtttccagagccatgctgt

SEQ ID NO: 49052 - DNA, 241 bp, Glycine max
  unsure (1)..(241): unsure at all n locations
  Clone ID: LIB3107-039-Q1-K1-E6
tcagacagtatctctcaacagcgtgggatcgttcggtcttaatctaaaaggcaaagcgtgactcgattgtggctctctgagtaatacacttttgcacactgatgttaacgtttcttatcatttttagctattgttattaattgtcacccaccagttcaatgaatttgaacgatcgacccattgaaagagtcttccttacctaattttttaagaantcttcggactctccttgttccactaa

SEQ ID NO: 49053 - DNA, 402 bp, Glycine max
  Clone ID: LIB3107-039-Q1-K1-E7
ggaactctttccataaataggtcatcataggttggatgagacctgttttatattcggttagaccgaatacctagcgtagggatatcaagtagtcagttaggtcgagtgactgatactacaagggtaccatgtattaggttaggttgagtacctgatacaaggatattaggtactaggtttggctaagcaactcaaattatagaagtgtatcaggtattcggctagatcgagtacctgatacgaggcatatcaagtactagacttggttgagtacttaaaactataaaggggtatcaagtattctgttgggctaagtacatgatactagggacatcaggtactaggcttgggcaagtacctgaaactatagaaaggtatcaagtattcagttgggtcgagtac

SEQ ID NO: 49054 - DNA, 365 bp, Glycine max
  Clone ID: LIB3107-039-Q1-K1-E8
gaatccaagaaagacacgattttgagagcagtaggagacacccgataagaatctgattcttggagcattgccattttatcttgtacattcgcttaatttgtaactacaatggctgaaattgtagtggtttttgacttcgacaagaccatcgtcgactgtgacagtgataactgggttgttgacgagttgggtttcaatgaattgttcaatcggctccttcccacaatgccttggaacactctcatggataagatggtgatggagcttcattcccatggaaaaaccattgaggacattgtgtaagttcttcagaggattcctatacaccccagaataatccacgccattaaagcagcacatgcttt

SEQ ID NO: 49055 - DNA, 409 bp, Glycine max
  Clone ID: LIB3107-039-Q1-K1-E9
gattcaactcatgcattgacacatcacaccttatcacgatatcgatcaccttcatcacaaatggagcttctttccttcctcttcctctcccttctcttcttcctctatctctacatccagttcctcgctagaaaaaaaccccgcaacaacaaagccttcaaagactaccctctcatcggaaccctaccggagttcctcaaaaaccgccaccgtttcctcgagtggaccacccaagtcctccgcgactcccccaccaacaccggcgtcttctctcgcccctacaaactccacggcatcttaacggccaaccctgacaacgtggaacacgtgctcaaaaccaaattcgacaactaccccaagggagaacgcttcatccacctcctccaagattttttgggtaacggaattt

SEQ ID NO: 49056 - DNA, 311 bp, Glycine max
  Clone ID: LIB3107-039-Q1-K1-F12
ctattgatgactgctacgaagctccattatttttgctgtctaataagaaatagctggaggaccaatgcttagggtctgttggggaacaccatttacaacttctcattaaacacaaactgacgagtgggagaaataaagcttggcattcccattggtggaaggaccttagaagactgtataatcaggctttttttcacaggatgcaatacaatatggtatggaaggttggttgtggggacataatcaaattatgggaggattcttgactgagtgagggctgtatgcatttataaaaaaaaattttggcattc

SEQ ID NO: 49057 - DNA, 320 bp, Glycine max
  Clone ID: LIB3107-039-Q1-K1-F3
ggccatcacaaaccctacccttcgggtatctaatccaaatccaagacgatgtcgtattgacctttcgccaacgccaggaccgaaggtcgtcggaaccgctaccaaggcgccggggaccccgattaaaggcgccctcccccagaggataccatggtggagatcccaaagaaccctaaggaagagagtttgcaaaaaaaaagacgcgagggtctccaatcgcagcagattccttcgtcacttcactctactgtaatagaagaagaaagtggaacaccttccagccatgggtacaggtgttttcaccgatgacaataacatgc

SEQ ID NO: 49058 - DNA, 183 bp, Glycine max
  Clone ID: LIB3107-039-Q1-K1-F4
gctgcgcaggtaagacagagagaaagaactgacctcagcggcggcggcggcggcaacagaagaacaaccaccaccacacacaatgggtcgcgtgagaacaaaaacggtgaagaaatcctcccgccaggtgattgagcgttactactcgcgcatgaccctcgacttccacacaaacaaaaagct

SEQ ID NO: 49059 - DNA, 418 bp, Glycine max
  Clone ID: LIB3107-039-Q1-K1-F6
gttgcaaggtttggagggagaaatgttgaaaatccttatgtaaagatgaaagatttgaagcaaacagggactattgatgactgtatagaagcttttatattcttgtctttctaataggaaattgctagaggaccaatacttggcttattttgtagaacacttgttacaacttaacattaaacagaaactgcagagtggcagagataaagcttggcattcccattggtggaaggaccttagaagactttataatcagtctgatttccacagtatccagtagaatatggtatggaaggttggttgtggggacaaaatcaaattttggcaagattcttgactgagtgaaggctgtaagcatttcaaaaaaaagattcttggcaatatggaaggaagggtagtttattaataatattcaaag

SEQ ID NO: 49060 - DNA, 320 bp, Glycine max
  Clone ID: LIB3107-039-Q1-K1-F7
aaggaattatcagattttgattctgggtttttgttggggtggtagagaacaaggatttgaaaaacaggatttttgttttttggagtgcctatgactgattgacggtaattgcgaccgcactcggtcacatttgtctgcaattttccttaatatcaaggaataggataaaactgtgatcgcaatttaaaactttgttggagaaagtgggggaaatgagcatgagtgtggcagaagatgaatctagtgaagaggttcatgttccaggtgagattgattggcaaatgcttgataaatccaagtttttcttccttggtgctgct

SEQ ID NO: 49061 - DNA, 337 bp, Glycine max
  Clone ID: LIB3107-039-Q1-K1-F9
acattttgtttgctcacacaatattgggtctatctacactagcccacttttagctcaactcctagctgtccaactcacctgatcataccttctccatcttgtcagatatacatttatttatccaatttatattaactaaactgttttaacccttcaaccaacaatctctattgaaattattattttatagctcccttgataaatgaagttattatcttcagggttattcttcttcatttcttgaacatcggtaccattgtaatccattcaattattttagcgaatatcttttataaagatggccatcattttctcaaccacatgcttcttatttttt

SEQ ID NO: 49062 - DNA, 321 bp, Glycine max
  Clone ID: LIB3107-039-Q1-K1-G11
ggctcctattatcaccgtagacggcggaggtggcggtggtggtgtagacacggcgtgacggcgatctcttgagataaatgttggttgaaagaggaagaagaagaagagttgtattgtagaatgagccaaccaacggtgatacttgccactgcgagctatgatcacactattcgtttttgggaggccaagagtggccgttgctaccgcaccatccaatatcctgattcgcaagtaaaccggctggagataaccccggataaacgcttcctggctgcagctggcaatccacacatacgactgtttgatgttaactcaaatagt

SEQ ID NO: 49063 - DNA, 369 bp, Glycine max
  Clone ID: LIB3107-039-Q1-K1-G4
aaggatggggttgccaatggcgcacaccaacctcatgttaaaggtctctcctcttcttttaagctgctacttgttgttgggttgctactatgttccattgcttttgctgtggctgcaatattcaaggcccggtcactgaagaaggccagtggggctcgtgcatggaagttgactgcgttccaacgtttggacttcactgtcgatgatgttttgcattgcttgaaggaggataatattatagggaaaggaggtgctggcattgtctacaaaggggctatgcctaatggggatcatgttgctgtgaaaaggcttccggctatgagtagaggctcttcacatgatcatggcttcaatgcttagattcaaaca

SEQ ID NO: 49064 - DNA, 322 bp, Glycine max
  Clone ID: LIB3107-039-Q1-K1-G6
gggaaggacaagtggctataacactacttgcatgcagttagactttgatagtttgattagctctaataaggttaaggaccagagagagaaagagaaataagaagaaaaacacaagatgggttattggaagtctaaggttcttcccaagatcaagaaggttttcgagaagaatagcaccaagaaagctgctgctgctgaagccaccaagtcctttgatgagtcaaaggaggaatacaacaaagcctttgaagaaaagaagactgaacttcaaaccaaagttgttgaaatatatgaagcttcatcaactgaaatcaaaagtttg

SEQ ID NO: 49065 - DNA, 371 bp, Glycine max
  Clone ID: LIB3107-039-Q1-K1-G7
agaaggggtgggatttagctgccagtaaaacacacgcggaactcatggtggagaatctaatacttgaagttcttttaggtaatctacttgtttgcaaatcagagcgggttactgaaattagcataggaattattgggaaccttgcctgtcatgaagttccaatgaagcatataatctcgacagaaggactgattgagataattctggacaaattgtttatggatgatcctcaatgcctatgtgaaacatgccgtttgttgaccgtgggtcttcaaagtggtgaatctattgcatgggctgaggcattgcagtctgaacatatactatgtcaaatattatggattgcagaaaatacattgaaccttcagctt

SEQ ID NO: 49066 - DNA, 365 bp, Glycine max
  Clone ID: LIB3107-039-Q1-K1-G8
gacgccgtgtttcgctatctctcccattctctcgcatctcaatacccttttgatttgtgaaaggaaagcaaacatgcttgatcaggtccaacaccctacaatcatggacaaggttgctggccagctccatctccgttctggtgtttctggtattaggagttatgaaggagcctactgccaccccacaatgtaccaaagaccctcttttgggaattactcgaatgctgcattgcagtatcctgtgatgccctcatgcaaagctactatggatttgtctgctgctgcaacaactgcctcccccgtctttgttgctgctccagcagagaaaggccattttcttatagactttctcatgggaggtgttt

SEQ ID NO: 49067 - DNA, 392 bp, Glycine max
  unsure (1)..(392): unsure at all n locations
  Clone ID: LIB3107-039-Q1-K1-G9
ttacttgaaaagaatcttttctatgatcagactcgattatattctacatgaacaggctccgtaagatccagtaaaataagtaatgtagtatagtctgaattatatcatatgtatttcagtaaacttaatagtatgacaacgcattcatttcctatgcattgattcgatttctgatactatcggagtgaaaaaagtagatctaaagaaaaacgcgggttggattatattagtaacaagtaaattctttgtacgtaaaaagttccaagattttgttggacagaataacaattgctaaagttgagatcacccagaaagcattatcaattttaaaagcctactcgggtatngagcggttattataagtttcttaattagaacctaatttttttttt

SEQ ID NO: 49068 - DNA, 433 bp, Glycine max
  Clone ID: LIB3107-039-Q1-K1-H1
ggtcctctttctatctcatttcatttattaaacaaaaccatttttcaacaacataattcggacaccctttatagcaatggagttggacctctgatttctctaactctagctaggattgagaaacaagaacaatatcaacgacaacgagttgaagagagtggttttttcaacttttaataatggcggtggagtatcagtgttgtgaaactcagtttttcttacggttattgataattctgctgcttgtgttgtttgctggattgatgtcagggctcactttaggactcatgtccttgagtcttgttgatcttgaggttctcgctaagtctggcacccctcaggatcgcaaacatgctgcgaagatattacctgttgtcagaaatcaacatttgttgctttgcacccttctaaattgtaatgctgcagccatgga

SEQ ID NO: 49069 - DNA, 200 bp, Glycine max
  Clone ID: LIB3107-039-Q1-K1-H10
gcaacattaatagtgctaaaagcattggtggcaataaccgcaacagtgatagcactaaaagcggcgacaatagcagcaacaaccgcaacagtgataacactaaaagcggtgacaatggaaacaaccaccacaacattgatgttgcttatggcaatggcagcaccaaccgcaacaatgatagttctaaaatcggtgacaat

SEQ ID NO: 49070 - DNA, 372 bp, Glycine max
  Clone ID: LIB3107-039-Q1-K1-H11
gtctgcatggatgactgatgaagaatttgcaagagaaacaattgctggtttgaatccaaatgtcatcaagattattgaggagttcccactaagtagcaagctagatactcaagcctatggtgatcatacctgtataataacaaaagagcatttggagcctaacttaggtggtctcactgttgagcaggctatccaaaacaagaagttgttcatcttaaatcaccatgactatctcattccatatttgaggaaaataaatgcaaataccacaaagacttatgctacaagaaccatatttttcttgaaaaatgatggaactttgaccccattggccattgagttaagtaagccacattctcagggtggagcata

SEQ ID NO: 49071 - DNA, 335 bp, Glycine max
  Clone ID: LIB3107-039-Q1-K1-H12
cccaacacaatggaatcatgattttgttgtatattttttaaccaccctagacataacaatggaaacacgattttcgttttagcattgctacaatgaaatcacgatttcgttgaacataaatttgcgaaaaaaatacaattgtagtggggtaagggggggaaatgaggagaagaaggtccaagaggaagagaagcccaagcccaaccccgaagagaagaaagaagagcctcagattgtgacggttctgaaagttcacatgcattgcgaagcttgctctcaggaaatcaagagacgcatacagagaatgaaaggagtggaatcagcagaacccgatc

SEQ ID NO: 49072 - DNA, 369 bp, Glycine max
  Clone ID: LIB3107-039-Q1-K1-H2
ggagaaaccacaatccccgaaaccttcttctataaagaagaccttcatccaggcaaaacaatgaaagtacaattcagcaagcctccctttcaacgaccatggggtgttggtacatggttaaaggaaattaaagacactactaaagaaggatatagttttgaagagctatgcatcaagaaagaagccattgagggagaagagaagttttgtgcaaaatccttgggaacagtaattggttttgccatttcaaagctgggaaagaacattcaagtactttcaagttcctttgtcaataagcaagaccaatacactgtggaaggagtgcagaatcttggagacaaagcagtgatgtgtcataggctaaatttc

SEQ ID NO: 49073 - DNA, 365 bp, Glycine max
  Clone ID: LIB3107-039-Q1-K1-H3
ggtgaaggggaaaaaaaaaagagtagagtggataatggcttcgttatcgctttgcatagccatgagagcacccactccctcagcttctctcattctcactaccccaaaaccatcttcactctctttgaaccttacccgcacttgctccagcgctcgctctccgctcctccattgctccttcctctcttctccttcccatctctcttccccttcctccgtttcaggcttgtcacttggattggatttgacatctaatgttgggaccagaagaggaaaaggttctggcctagttgtgagggcaggcaaggctgctctttgtctgactaagagaagcagatcaagaaaatcattggcacgcactcatg

SEQ ID NO: 49074 - DNA, 299 bp, Glycine max
  Clone ID: LIB3107-039-Q1-K1-H4
atattccttcaaattgatgagttgtctttacatccatgtgtcacaaactcattctaccaagtgttagccacaaaactatgatgccaaacttaaccaaccctcaaccttttcctcgtgcaactttttccagctagaaactagaatagaaacccaacagaatatttaagagtgatgaatcaattcattacactctctctatatatttttaacacactttctttatatattttaatataagtgaaggtaatgcatgttatctttgtaattattgatgccagaataattaaataacatttttt

SEQ ID NO: 49075 - DNA, 349 bp, Glycine max
  Clone ID: LIB3107-039-Q1-K1-H5
caagtaattgccaaaatttcaaggcttatttttaataaaagaataatatagttgaataaactagttaaattggttaaagatttacaactgcaaaaaacaaaaatatttaatttataggattttgaacatttttaaagtttttattattttgtaattcaagtttgtacttaaaattattgaatttgcatatttaatttctcttgtttcaaattctttagccatccacggaccacggtttctactcatttaaattttctcgtaacacataattctgtcgtagttttggtattagaaaaaagtacaagaatgctgagaaaaggacaagggaaaaaattggtaaggttatatt

SEQ ID NO: 49076 - DNA, 289 bp, Glycine max
  Clone ID: LIB3107-039-Q1-K1-H6
gcgagaagacgacagagggggacacaccgtttgttctatacttaactcaacttctgctaccgactcacttcttccaagtacaaccacgcttttcactacagtgatgggcaacgtcaagatcggaatcaacggatttagaacaattggccgtttggttgccagagtcgctctgcaaagagacgatgtggagctcgttgccgacaacgaccctttcattaccaccgattacatgacatacatgtttaaatacgacagtgttcactgacactggaagcatcacgatgtcacc

SEQ ID NO: 49077 - DNA, 162 bp, Glycine max
  Clone ID: LIB3107-039-Q1-K1-H7
gatcaccgagtcgtgttgcgattgaaaatggggagcgatgttgtagaatctatgcagtagaggcccagataatctcctctctcttccgactaatactcatgggatgctacttgatcaatatactgtactgacatttcttattatggaggaagtgttttttat

SEQ ID NO: 49078 - DNA, 312 bp, Glycine max
  Clone ID: LIB3107-040-Q1-K1-A10
tacgagaatccacgaaaaaaaacatcatctattatctctcacaactagacagagagagataacgactgaggggacatttcaccatgctacttattaatttctctatagaagctccatctctacataatcatatcatttaattttccctaatgataatgcactactactaactcattcataattacctctccacatcaagaactccttctactcttttatcctacacactccttccttcttatactgcgcatattacaccgagatcctccccttcgcatcttcactttccaccatttcacaggaaaacaatca

SEQ ID NO: 49079 - DNA, 246 bp, Glycine max
  Clone ID: LIB3107-040-Q1-K1-A12
gacccaatcttccgttcggctgacacaacactaccgaatgctaccacctgctagaacacctcagataggctgataacattcaccttatctaagcatatataatatatggtaagaagattataatatgcatcctacttagaatttctatcatttgtgtacatgtattcgaatatttcaactgtaatctaagtacatcttacattaattaaatgttccccaatattaaccatacttaatgattaaacc

SEQ ID NO: 49080 - DNA, 437 bp, Glycine max
  Clone ID: LIB3107-040-Q1-K1-A2
ggcacatcaaattctttatttataacatggagtgcgtctgtggaaactttggaaagagatcttaagaacacgaggaaatactacgggagtggaaaaacaaaggaagcaccatggagagaatcacagcttaaagggttgcacaattttctcgtggaaaaagaggaagaaattgtgacggccctcaagcatgatttggggaagcattacgtggaggcttttagagacgagcttggaacattaatgaagaccttaaacttggcaaccaagtctttgaaaaattggatggcggggaaaggggcaaagctgccacgaatagcactgctctcaagtgcagaaatagttcctgagccacttggtcttgttctcataatctcatcatggaactttccctttggactttccttggagccactgatcggagcagtagctgctgggaa

SEQ ID NO: 49081 - DNA, 412 bp, Glycine max
  Clone ID: LIB3107-040-Q1-K1-A3
gaatcccgcaaggtaaacgacggtgacgattggtgggtggcgccgtacgcctcatcccatccatcgccatcggcaccttccttaaacgacatcgcgtccatcaccccttttctcttcctcacagtcacagcagtggtagcttcccaaaaaagagtgccaatggcatcttcttcagactcatgggtgaaggaatataatgaagcactgaaacttgctgatgatatcagtggcatgatttctgagcagagttcatttcctgcatctggaccagaaacccagcatcattcatctgctataaggagaaagattacaatattggggaccaggcttgatagcttgcagtcccttttgtcaaagcttcccggcaagcagcccatatctgagaaggagatgaatcggcgcaaggacatgc

SEQ ID NO: 49082 - DNA, 124 bp, Glycine max
  Clone ID: LIB3107-040-Q1-K1-A5
gaacccactgtaaatgttaatggcactgaagatacattagggaaattgctatctgaccattgctatctcctttcattaccttagatgtaatatttcttaggttagcactgtgccactaacaatt

SEQ ID NO: 49083 - DNA, 408 bp, Glycine max
  unsure (1)..(408): unsure at all n locations
  Clone ID: LIB3107-040-Q1-K1-A6
ggaagagtgaagagaatggctcccaagggtttaacctttctggctgtgttaatatgcgtttcagcactgtcactgagtccttctgttgcgggggaagggcaaaataatggccttgttatgaacttctacaaggaatcatgccctcaggctgaagacatcatcacagaacaagtcaagcttctctacaagcgccacaagaacactgctttctcctggctcaggaacatcttccatgactgtgctgttcagagttgtgatgcttcactgttgctggactccacaagaaggagcttgtctgagaaggaaacagatagaagctttgggttgagaaatttcaggtacattgagaccatcaaagaagctttggaaagagaatgccctggagttgnttcatgtgctgatatcctc

SEQ ID NO: 49084 - DNA, 427 bp, Glycine max
  Clone ID: LIB3107-040-Q1-K1-A7
ggaccggagtagaatgccactataacaggacccgggtccaaagattattcttaacgggtcaaaaacccgaaaccatgttatcgggtaccatctcacccactatctcaaaactcaaactcctcgatggactctacctcataaacctcatcaacatttcgggtcccttcccaaatattcttttccaacttccaaatctccaatttatctatctagaaaacaacaatctctcgggtcgaatacccgataacatcagtaaccttacccgattagatgtactcattataactggtgaccggttcattagacccttacacgagttcaataaccaaggttactcatctcactcaggtcaaactcggtgacaatgttctcaccggaacatttgcccaaggaattgccaagctcgttaatctaacctatttgagtc

SEQ ID NO: 49085 - DNA, 428 bp, Glycine max
  unsure (1)..(428): unsure at all n locations
  Clone ID: LIB3107-040-Q1-K1-A8
ggcacatcaaattctttatttataacatggagtactctgtggaaactttggaaagagatcttaagaacacgaggaaatactacgggagtggaaaaacaaaggaagcaccatggagagaatcacagcttaaagggttgcacaattttctcgtggaaaaagaggaagaaattgtgacggccctcaagcatgatttggggaagcattacgtggaggcttttagagacgagcttggaacattaatgaagaccttaaacttggcaaccaagtctttgaaaaattggatggcggggaaaggggcaaagctgccacgaatagcactgctctcaagtgcagaaatagttcctgagccacttggtcttgntctcataatctcatcatggaactttccctttggactttccttggagccactgatcggagcagtagct

SEQ ID NO: 49086 - DNA, 342 bp, Glycine max
  Clone ID: LIB3107-040-Q1-K1-B1
ggatatggcctacatagtgtatgtcaccctgggcctcggttaccttctcccatggaacgctttcatcactgccgttgattacttctcctatctctaccccgatgccagcgttgaccgcatcttcgccgtcgtttacatgttgatcggcctcgtggggatcttcctcataatcttctacagccacaagtccaacgcctatgtgaggatcaacgttggcctcgccctcttcgtcggttctctcctcatcatccccctcctcgacgccttttatctcaagggtagggtcggcttgtatagcggcttctacgtaaccgccgccgccgttggactttccgccgtggc

SEQ ID NO: 49087 - DNA, 382 bp, Glycine max
  Clone ID: LIB3107-040-Q1-K1-B10
gggagaagacgacagatcgggcttctggttcttgaacctcgaattgataatcctatgaggaatttactatctagctgttcagattgaacgagtgccatacttaattcaatcacgcccatgaaacatcgcttcatcttgctattacttttctgcttagttcaatctctataccttccttgcatagctcctcgctatttccaaataggtgaccccctctttgacaaaaacaacaaggtatcatactccaatacttaacttgcatatgaccactaattcttgaagtattgcacacccaaaacgatattaaacaatgcataaactttgacatagggtcttagaacgaatcgtatcgataattcagaatatacatttcatatgaaga

SEQ ID NO: 49088 - DNA, 324 bp, Glycine max
  Clone ID: LIB3107-040-Q1-K1-B11
ggcattggacagagagtgttagcaccaaaaatagcgaagttaatcttcgtggtgccttgcactaattcctcttctctgcacctacctctcgccagaaaaaccctcagatcagcgcatcctcattttgctcgatgacttcgccatcaaatcctctcactctctcttcttcaactccctcaaatctctcggcttctatctccaattccacctcaacgaccaccccaaaattgcgcttcagagatactgtcagtacctctacgactccctaaatctctttttccccaccattgaacgttttgaaggatccattgacgcgtctgcaat

SEQ ID NO: 49089 - DNA, 156 bp, Glycine max
  Clone ID: LIB3107-040-Q1-K1-B12
gggcactcatcccatcattcttagagattactttacagagtgaggctactctaatccgggcaatcattggccaagctaaatttgccgctacatctgctaaactttaacaaacttttgccactaaccacaacctttattgagcttatttcatttcct

SEQ ID NO: 49090 - DNA, 279 bp, Glycine max
  unsure (1)..(279): unsure at all n locations
  Clone ID: LIB3107-040-Q1-K1-B2
actagaacagatagtgaagatcaacaaattttaagtactcattatagcccaggatcatcttcccatgcaacaaatgggggagctgtatcacctggtaaaagtaagatgagggatattgcaaatgagtttgagccttgctcgaagcttgaggacctaaatttggatgttagaaagaactcaaaggagacagaggaaaaatttctctctgacaattttttccagaggcttgaacattcaagtgtncccgttcatgaaataatattttccactggtgacaag

SEQ ID NO: 49091 - DNA, 284 bp, Glycine max
  Clone ID: LIB3107-040-Q1-K1-B3
attgtgaaactaatggatagacgtactcagtatacatatattgagagtggagggttgtgtgaagaagttgctatgccttgttgggtttgtggtgttagtgagtactattggtggcgtggagagtgctcgtaaatgggggaaatctacaaccactgataatgaggcttataagctcgcaccatgtgcctcatctatgcatgatgagaatgatagtgtttctcagaggtgctgtgctcaagtgaagaatattgtgcagaaccgtagatgcctatgtgcagatcttg

SEQ ID NO: 49092 - DNA, 383 bp, Glycine max
  Clone ID: LIB3107-040-Q1-K1-B4
ggcagcgcttgatttgaggccaggcaagccccacgcaaccagcacacctctcctcggtcacgctacccctttctgctcttcttctacctttcaagttttaaaagtataaagatggcagagacattcctatttacctcagagtcggtgaacgagggacaccctgacaagctctgcgaccaaatctccgatgctgtcctcgacgcttgcctcgagcaggacccatacagcaaagttgcctgcgaaacatgcaccaaaaccaacttggtcatggtcttcggagaaatcacgaccaaggccaacgttgactactagaagatagtgcgtgacacctgcaggaacatcggcttcgtcttaaatgatgtgggacttgaatccgacaactg

SEQ ID NO: 49093 - DNA, 418 bp, Glycine max
  Clone ID: LIB3107-040-Q1-K1-B5
aaccaatgctggaaattggttgattgggggtgacctagaggtcattgaaccaattcagtacaatgatggacttgatcattttcgtctatctccgacacaactccgtgcagagttcacaaggcgcaatgcggatgctgtgtttgccttccagctccggaatcctgttcacaatggccatgctttgctaatgactgacacccgaaagcgccttcttgagatgggctataagaatcctgtcctcttgcttcatccacttggaggctacaccaaagctgatgatgtcccacttgattggcgaatgaagcaacatgagaaggtacttgaggatggtgttcttgatccagagacaactgtggtatccatattcccatctcccatgcactatgctggacccacggaggtgcaatggcatgcaaag

SEQ ID NO: 49094 - DNA, 429 bp, Glycine max
  Clone ID: LIB3107-040-Q1-K1-B7
ggaccggagtagaatgccactataacagcacccgggtccaaagattattcttaacgggtcaaaaacccgaaaccatcttatcgggtaccatctcacccaccctctcaaaactcaaactcctcgatggactctacctcataaacctcatcaacatttcgggtcccttcccaaattttcttttccaacttccaaatctccaatttatctatctagaaaacaacaatctctcgggtcgaatacccgataacatcggtaaccttacccgattagatgtactcagtttaactggtaaccggttcatcggacccgtaccgagttcaataaccaagttgactcagctcactcagctcaaactccgtaacaattttctcaccggaacagttccccaaggaattgccaagctcggtaatttaacctatttgagtctcg

SEQ ID NO: 49095 - DNA, 462 bp, Glycine max
  Clone ID: LIB3107-040-Q1-K1-B8
gaagacgacagaagggggtgtgagttcattaacatatacaaattctctgtgttgtgttgtgtacttgtgttaattgtgttgttgttgtaggaaatttaagtgaagagagaatgatgatgaagtctgctatgtgtgcattggtgcttgtggcactggttgtggttgaagtggggcccatggctgaggctgcggtgacttgcaacccaacacagttgactccttgtcttccggcaattaattcaggttctgcaccttcgagtgcttgttgccagaagctgaaggagcaaaagccatgcttctgtggctacctcaaaaaccctagcttgaagcagtatgttaactctcctaatgccaaaaaaaccgttagttcttgtggtattgcctatccaacttgttaagcacctcttatatatatatataaaatgtgtgaacaatatatatatattgattaaaaaatatagt

SEQ ID NO: 49096 - DNA, 225 bp, Glycine max
  Clone ID: LIB3107-040-Q1-K1-B9
cacctttgtcagctgaattttacaccgggtggcttacacactgaggagagaaaggtgctcagactgatgctgattttacagcagctgctcttgaaaaaattttgcaaaaaaatggttctgcagttctatatatggcccatggtgggacaaactttggattttataatggagcaaatactggtgtagatgaggctgactacaaacctgaatctacttcatacgatt

SEQ ID NO: 49097 - DNA, 302 bp, Glycine max
  Clone ID: LIB3107-040-Q1-K1-C12
tggaatccaattggagtgataagaaccaagagtatacaactagcatatttaagggtccatttgctaagaagaaattacatacgtccaaattacacttcttattattattttgttaatgtaagtttatttttttaattttaacacaaacttatgtaaacaaaaattaaaaaaataaacttggaatgaaaaaaattaaaaaaaaatgctaacttacaaattataaaaatatattaaaccgaaaaaaaaacaatggataaaagtagggaaggggattgaaaatacctaaatggttatctaaaaat

SEQ ID NO: 49098 - DNA, 407 bp, Glycine max
  unsure (1)..(407): unsure at all n locations
  Clone ID: LIB3107-040-Q1-K1-C2
ggacttattacaaataaattacattctcctctctagaagaatggaatggaaacccatagaagaattttgagtttgaaggacagttctggcaggagtgttgaacttacattgcaagagatggtgaatgctagattttttttccttttttttttgtttcccacatgtttccttctttgaaggcaagacaattacactaacagtatgtttggatagagaattttaactgaggaaagtaatttatcaaagaatttaaatttctgtaatctagaattcattgtttggatgttttttttttgaataatttaaaattttttgaattttaaaacagaattttaaacaactaanaatctagaatttcaatttctttctaaaatgtgagaaaatgaagttctcttcttacagttttt

SEQ ID NO: 49099 - DNA, 271 bp, Glycine max
  Clone ID: LIB3107-040-Q1-K1-C3
gaaaagacgatagtgacttatgtacatattcacaatggatcattaacgcaacttacataaggaatggtgagggaatagatactacccatggctctaccggatgctcagacataacagaactaactggaaattctgtaagtgaattaattagtatgcccagaaagataactggtgcacattatgttcaactggtaaccatattgcatgatgtatttgacgctgacttcaatgctggcggagctcagatcataatcgatagcgcatatatatg

SEQ ID NO: 49100 - DNA, 438 bp, Glycine max
  Clone ID: LIB3107-040-Q1-K1-C4
gaggattcatcattttccaaataagtatcttcgtagttgcataagtcaagagaagaagtgaagtggctgcaatggcttcaagtcaggaagaggtgacccttttgggagttgtgggaagcccatttctacacagggttcagattgctctcaagttgaagggagttgaatacaaatatttggaagacgatttgaacaacaagagtgatttgctcctcaagtataacccagtttacaaaatgattccagtgcttgttcacaatgagaagcccatttcagagtcccttgtgattgttgagtacattgatgacacatggaaaaacaatcccatcttgccttctgatccctaccaaagagccttggctcgtttctgggctaagttcattgatgacaagtgtgtggttccagcatggaaatctgcttttatgactgatgagaaag

SEQ ID NO: 49101 - DNA, 426 bp, Glycine max
  Clone ID: LIB3107-040-Q1-K1-C5
gacaccaacacatccattcattgtcttaatgttagcaatgtcttcctctttctccatccatttcttcctcctcctctcaatagcccttttctcagtttgttgcttagcagcatctcaagctcccaccaccaaatcacacccctatatccttcccattaagaaagaccccgcaacaaatttgtactacacttcagttggcattggaactcctaggcacaactttgatttagtcattgatctttctggtgaaaacttatggtacgattgtgacactcattacaactcatcatcctacagacctatagcttgtggctcaaagcaatgccccgaaattggatgtgttggttgcaatggccccttcaaaccaggttgcacaaacaatacacgccctgctaatgtaatcaaccaattagccaaattcattta

SEQ ID NO: 49102 - DNA, 436 bp, Glycine max
  Clone ID: LIB3107-040-Q1-K1-C6
ggccattgttgctgtcatcatccgcagctgctgttattcgcaccgcaaacaaacagtgagccatggccgtcggaaagaacaagcgcatctccaaagggaaaaagggtggcaagaagaaggcagctgatccctttgccaagaaggattggtatgacattaaggccccttctctttttcaagtgaaaaatgttggcaaaaccctcgtctctcgtacgcagggtaccaagattgcttctgaaggacttaaacatagagtgtttgaggtctccttggctgatcttcaaggggatgaggatcatgcattcaagaagattaggttgagagctgaagatgtgcaagggaagaatgtcctgacaaatttctggggaatggatttcacaactgacaagctgaggtcattggtgcgaaaatgggcaactctaatttgagcccatgt

SEQ ID NO: 49103 - DNA, 439 bp, Glycine max
  Clone ID: LIB3107-040-Q1-K1-C7
gggcagagagcgaacccaaaactagagctaccttcccggcaaaccttccactcttgtctccttttccaatcaagggaataatatttcttagagatattccgaaaccatggctcacgccaatcctatgatttttgttgttggaattctaggtaaccttgtctccttctgttgctttctagcaccagtaccaacattctatcgagtttgtaagaagaaaaccacggaaggtttccaatcacttccttacgtggctgcactcttcacttcaatgctttggatattttatgcttacataaagacgggcgaaatacttctcatcaccattaacgcattcggttgtttcatagagacagtttaccttgtcatctatatcacttattgccccaagaaagctaggttctttaccttcaagatgattttcttgttcaacgttggagtg

SEQ ID NO: 49104 - DNA, 310 bp, Glycine max
  Clone ID: LIB3107-040-Q1-K1-C8
gagacaacaaaattcgacgttatctcatatatgatattgggcttttttctcctttttatttgtggcgtttacgtcaagggtgtgaaagaaaatctaacacttttccaaagggacaaaggaacaacataacgttaacaataacatggtttggttttcttccattcctcacatttgagactttcatgctctctcttggtgtctggatttccttgccaaagtttgaacctttttccttagaatttgacacccagataagattttcttcattaccaaattctgggtctttctctctctttctacaacccttttt

SEQ ID NO: 49105 - DNA, 444 bp, Glycine max
  Clone ID: LIB3107-040-Q1-K1-D1
tgcattggtctatgtgattccgtgaattttatgtatcttatctccaacattatctgctgttgaatccattgaacttcaaagaaagttgcaagtaccaaagacaatcaccacaaaacaggcacagaagaacgccacgggaatggacaacccgagaaagaagacaattagaaggaagaaacaccaagtggctccaaactccaaatagatgagtgtcccatatcagatcagaatcattggaacttatcaaacaggccaagatcattattagaatgtcacacgtaattggaaaactaccctataatggataagaaatacggaaaccaaacagcaagaaatcaaccaaaagctagacagaactaccactgctggccagtaagctgttaccaactttctgaagtgacatatcatgccagaaacatctcagatggctttgaaaacttaata

SEQ ID NO: 49106 - DNA, 243 bp, Glycine max
  Clone ID: LIB3107-040-Q1-K1-D10
caatgtccagtgggttagagatccagcgagcgaccagtttcaaagagaggatttcccattgtcaatgcgactgattgcgctgcgtctctacctcttctctctcgattcatccctcattcataatcttccaatccaacaacctcagcctcacactcacacatacacacatctgaacgcgtatcgtccctcccatggcttcaaagcgcatgctcatagagctcaatgactttcataaagacccac

SEQ ID NO: 49107 - DNA, 399 bp, Glycine max
  unsure (1)..(399): unsure at all n locations
  Clone ID: LIB3107-040-Q1-K1-D11
cagctgcgagaacaccaccgaaaggagcatgcaacggaaacatggggggncactgcaagttgcgacagcaaaacaagggagcttgactttaatgaggatggcttcttggaaattaatgatctcattgatactgaacctacattgtcaaatgttgaaaattctgcctagtaccaccattttgaaaatgggttaagtgaacttgatttgttccaaaatgcacagatgtttcttcgtgacttggggccaattattcatgaaacacattcacatgcatatacaaatgcccttgtaatcagcaatattgaatgtcacaattaccaaaaacttccaaaaacataagatgccaatcaaactgctggcgaattctgtattcatagtgaaagcaatcaactatcattc

SEQ ID NO: 49108 - DNA, 168 bp, Glycine max
  Clone ID: LIB3107-040-Q1-K1-D2
gctctctaggggtaccgagcgcacttgctctatagctcttatctacacattcttctttgacacaacatcaatgtctccagactaacttgcaaaactcataattgcttctattgaaaataacgttctagacttggtgacaaaccctttattcgacaaccgtcctaagca

SEQ ID NO: 49109 - DNA, 375 bp, Glycine max
  Clone ID: LIB3107-040-Q1-K1-D3
gtggctgagagcggaccccagactggagctacctggacttgagaccatctaactctgtgctccttttccaatgctggtggatgatatgtcttagagatattcctaaaccatagttaaagccaatactatgaccctagacgtttgaactttaaggtactccaggcttcatcaggagctgtctagcgccagtacctacatatctatcgagcatgttagaagaattccacagtaggtttgctatcacttcaagaccttgcttcacgttctagaataacgcatctgatattgcactcctacattatgtctgtctgcatgcatttgatctgcgttgacgcatacagatgaatcatatatacgatgtaacttagatgctat

SEQ ID NO: 49110 - DNA, 400 bp, Glycine max
  Clone ID: LIB3107-040-Q1-K1-D5
cacaaaactgagacgacaagagcttactctgtgcctttggagggtgctaatggggttagggttaaagcggtagcagtgtgccacactcacacgtcggaatggaaccctaaacatttggcctttcaagtgctcaaagttaagccaggaaccgttcctgtctgccacttcctacctgaggatcatgttgtttgggttcccgagtagatttgctttaatttcaagtccttctttcctgttcttgaataacttagcttcagtagcactacagaactctatatatatgcatgtatttgcactgtgtagttctctagatattaataattttttgctggttatttagatgctatgcgtggcttcttatgtataaactatgatgcattatatgacttattgtgtgttc

SEQ ID NO: 49111 - DNA, 436 bp, Glycine max
  Clone ID: LIB3107-040-Q1-K1-D6
gagagtcaattcatcaattaggagttgggtgagagaatggaagcctcagagcagaacaattcaaaggtagtgttgattgattctttgcagtcatgggagttccacgtcaaccaagcctataatcagaatactcctgttgttgttcacttcactgcttcatggtgcatgccatcggtggctatgactcctgtttttgaagaactggcttcaagctatccggaagttctgtttctcactgttgatgttgatgaagtcaaggaggtagccaccaaaatggatgtaaaggcaatgccaacatttttgctgctgaaggacggtgctgcggtggacaaggtggttggtgccaatccagaagagataaagaaaaggatagatggggttgctgagtccactcgtgtctcactggcatagttaagcatctgtatgatattctact

SEQ ID NO: 49112 - DNA, 313 bp, Glycine max
  Clone ID: LIB3107-040-Q1-K1-D7
gggcagagagcgaacccaaaactagagctacgttccctgtaaaccttccactcttggctccttttccaaatcaaggaataatatttcctaaaaatatttccaaacccttgcttaagcccaatctaagaattttggtggtggaaatctaaggaaccctggcttcttccggtggcttctaacaccaagacccacattctattcaggttggaagaagaaaaccaccggagggttccaatcactttcttacctggctgtactttttaattcaatgccttggataatttaagcgctaccttaagaccggccaaatacc

SEQ ID NO: 49113 - DNA, 420 bp, Glycine max
  unsure (1)..(420): unsure at all n locations
  Clone ID: LIB3107-040-Q1-K1-D8
gattcttcgctcaatcgaggtcggctcgatttccttctctataacacaacgctctcttctcttgcaaccaaagtacttgttccagtgtctactctactcaaaaaggatttgggacatcatgtgcagtgattcgaaaagtaaactttcttccccaaccctcgtcgtcatggagaatagtaacattcagaagcagaatctggatggtctctacaactcggttttgcttgaattgtctgcatctgatgattatgaagctttcaaaagagaggtggaggaaaaaggcttagatgtgaacgaggcaggcttttggtacggtagaagaattgggtcaaagaagatgggatctgaaacgaggacccctctgatgattgcttctttgtttggaagcgccaaggtgctcaattatnatcttcttcagaa

SEQ ID NO: 49114 - DNA, 221 bp, Glycine max
  Clone ID: LIB3107-040-Q1-K1-D9
acaatggtgcattattctcaaacatctgagaacacttctaggtcctacattaaaacatgggagctccactttaatgattataacttcttggacattaattatctcattcatcctgaacctacattgtcaaatgtttaaaactctgtgtattaccaccattcttaacattgcccaagcgaactccatttccaccacaatacacatatccttattcttcacta

SEQ ID NO: 49115 - DNA, 343 bp, Glycine max
  Clone ID: LIB3107-040-Q1-K1-E1
cattacaacaaagatcgagtcattgaaatcagtgcccggatggaccctcattctgtggtggacctgactgaggataaagatgtagatgttgagttcgtgtacactgcaaaatggaaggaaacagagactccttttgagaagagaatggataaatactcccagtcttcttctttgccacatcacttggagattcactggttctcaatcataaattcctgtgtaacagttcttcttttgactgtgtttctggcaaccattctcatgcgtgtattgaagaatgactttatgaagtatgctcaagatgaggaagcttgtgatgatcaagaggagacaggatggaagt

SEQ ID NO: 49116 - DNA, 336 bp, Glycine max
  Clone ID: LIB3107-040-Q1-K1-E3
gaacgaagatcatcatcaacaacctcacaccctgatcacttgaattcaactcttcgccctataaaatcaaaatccgttacatcacttttcacatccattcctaacctccccaacctatacaattacacatttctttcacagaagctgacatgccttcagtttacatggtagatacgatggataattctaactctagctagagctctaactctcaagatagcagcgttgttggtaatgggacacagacgtgcaacaaactcttgcttgcattactgcccaaatgccttgcacacagtaattattatcaccttgcatcattaaccgctgtagactttt

SEQ ID NO: 49117 - DNA, 443 bp, Glycine max
  unsure (1)..(443): unsure at all n locations
  Clone ID: LIB3107-040-Q1-K1-E4
gttgtggtggccttgattaaaatgttcctgttaggttttacattaacttaaggtttgagtggaataagcctctattaaccgtgttaaatttctttcttcatatagatcacaacacattatataggttgtgttgatattgtgctgtagtctacattgagtcactttttttttatcagcacaagtatatatattatatagaccatttaaattagtacaagcggtactgttgtatatacctcctagcatttgcaaggtgcagaactgtggtgacctaatacatgttaaccaacttgaattaggaaaccaaagatcactgtttttttgcttgcaatttttggttcattattaatttgntaaatgttgtgntattagttgttatttgattacttcaggaaccctaatgactagtatacatactgtgtgcataggttttgaaataattt

SEQ ID NO: 49118 - DNA, 423 bp, Glycine max
  Clone ID: LIB3107-040-Q1-K1-E5
atggggttatgtttcaaatgatgatcggcccagggaattcttcttgagtcttctaaagtgtttgcaacccggggaatatagtgatatgtccgagagaagggagagcgacgaagaactgaagatgaaggtgcgagaatgcttgaataaaagcggaaagtacttggtggtggtggacgatgtttgggaaacccaagtgtgggatgagattaaaagcgcttttccagatgccaacaacggaagcagaatattgataacaagtcgttcgacaaaggtggcttcttatgctggaacaaccccttcctactcgcttcccttccttaacaaacaaaaaagttgggagctacttttcaagaagttgtttagggacgaagaaagtgtcccccagaattagtggaactgggaaaatccatagccgaaagatgt

SEQ ID NO: 49119 - DNA, 372 bp, Glycine max
  Clone ID: LIB3107-040-Q1-K1-E6
gatggcaaagggataagcaactgggatggcttcagtcacaaaccaggtagtatatctgacgaaagctacggtgatgttgctgttgatcaataccaccggtatctggaggatattgatctaatggaagctataaaagtcaatagctaccgggtttcaatatcatgggcaagaattctaccaaaaggaagatttggagaagtaaacttggcgggtatcaactactataacagacttatagaagcattgatactcaaagggatccaaccatttgtaacattattccagtttgacatccgtcaagaacttgacgacagataccgatgttgacttaatccccaatcacaggaagattttcaattatttgcagatatc

SEQ ID NO: 49120 - DNA, 380 bp, Glycine max
  Clone ID: LIB3107-040-Q1-K1-E7
ggtggcagagagcgaacccaaagctagagctaccttccctgtaaaccttccactcttctctccttttccaatcaagggaataatatttcttagagatattccgaaaccatggctcacgccaatcctatgatttttgttgttggaattctaggtaaccttgtctccttctgttgctttctagcaccagtaccaacattctatcgagtttgtaagaagaaaaccacggaaggtttccaatcacttccttacgtggctgcactcttcacttcaatgctttggatattttatgcttacataaagacgggcgaaatacttctcatcaccattaacgcattcggttggttcatagagacagtttaccttgtcatctatatcactta

SEQ ID NO: 49121 - DNA, 87 bp, Glycine max
  Clone ID: LIB3107-040-Q1-K1-E9
ctcataacggcgttctaatgtgtgattgtttgttggtgtaactcgttcgtcttcttttgttgttctgtgtttgtgtttgttttttct

SEQ ID NO: 49122 - DNA, 417 bp, Glycine max
  Clone ID: LIB3107-040-Q1-K1-F11
gaccaccaaaaggtggtccacatttaatacactcactctcatgtcaaagatctctatctaatatgagacgtaatcatatatattatcattaataccattaattcttacatttattacaccaataactctttcaccttaaccttctcatttctaacatacctatcatcttaaatattcaaacttcatcacttaccatatgttacaactcataatctaaaatgctcttaaagaaacctactactattaattattcaagaaaacaatgttattaaactaaccttaactatatataatcataaattaatccaatttagaccctacttaacactactatcgtgttatcacattataatccaatctccagactatcactactattcaagcattacaaccacacttaatcaattttactaacac

SEQ ID NO: 49123 - DNA, 418 bp, Glycine max
  Clone ID: LIB3107-040-Q1-K1-F2
ggacatcacagcaagggagtgatttggagtttggagcgactgaactaatcattaatttgcactcgctgtttcagcttcatcacccttcttttgcatcatttatatctcttgagaaatggcacaagaaacctttctattcacatctgaatctgtaaacgagggtcaccccgacaagctgtgcgaccagatctctgatgcagtacttgatgcgtgccttgaacagaaccctgacagcaaggttgcctgtgagacatgcaccaagaccaacatggtcatggtcttcggagagatcacaaccaaggccaacgtagactatgaaaagattgtccgcgacacatgccgcgaaattggattcatctctgatgatgttggtcttgatgctgacaaatgcaaggtgttggtcaacattgagcaacag

SEQ ID NO: 49124 - DNA, 441 bp, Glycine max
  unsure (1)..(441): unsure at all n locations
  Clone ID: LIB3107-040-Q1-K1-F3
gatccagcgacagatcggagcagaccctgtatggagtggcgaatggcgctgtggtctcaaattttatgcatagtcactctgctgttatgcagcgattgtgcagcatcttttgccaaggagcagcaaaaggaccgggttggtaggctcccaggtcaaggcttcaacatcagcttcgcacactatgctgggtacatcaccgtcaatgagaaagctgggagaacactcttctactggttcattgaggcacttgaaggtcctcattctaagccccttgttttgtggctcaatggagggcctggatgttcgtccattgctttcggacagtcagaagaagttgggccttttcatataaattcagatagcaggaccctccatttcaatccctattcttggaaccgagttgccaacattctttttcttgacactcctgtnggggtggga

SEQ ID NO: 49125 - DNA, 326 bp, Glycine max
  Clone ID: LIB3107-040-Q1-K1-F4
gaagaggttgtggaagattatttggaaggagttggtggtagggacaacatcatggaagcgaaatggttgctaaaacctgttttggatgagtcaaatgatgatagttcttccagcagttgctatgacgaggcattggagaagttgagtggctttgtccttcaagaagcctccagggaatatggcatgaagaaagctcaaccatggaagaaacgctctgtaggttctggacctttagctttggaagacctaatgttggaaaaggatccaagatccatctctgctagaaagaagcatgttcctcgattcgcttaatcttgatcttgaca

SEQ ID NO: 49126 - DNA, 430 bp, Glycine max
  Clone ID: LIB3107-040-Q1-K1-F6
ggactgatttgagtgtgggcgttggtgcgcacgctaatgttgggagttatcggagctggaacgtggttgcgatattcaaaggcccttcttcaaccatggaaggtagggttctcctctttgtccgctgtcgacggccggaaacaccaccttctggatttgcaggagatcgagacggttctcaccgacgttaaagctgacaacgttaaggttataccagttcccaagcactgcgattgggctgatttcatggtactcgccactggcaggtccacctggcacgtcaagaacatcgcccaagccctaatttacaaggctaagcagaaacagagaggagttgaacgaatgatgctaccaagtgtggaaggtcaagcaggaggaaagtggatcgtcattgactcttgtaaagtgatagttcatgcacttgatgaaa

SEQ ID NO: 49127 - DNA, 431 bp, Glycine max
  Clone ID: LIB3107-040-Q1-K1-F7
gcaaggtattgaccggattacctgtcctcctcatgctgactattcatactctgttcaagctggtgtcagtgctggaattgatatgattatggttcccttcaactacactgagttcattgatgaactaacccggctagtaaagaataatattatacgaatcagcaggattgatgatgccgtggcaagaatcttaagagtaaaatttgtcatgggcctatttgaaaatccatatgctgatccaagcctcgcagaccaactgggtagcaaggaacatagagaaatagcaagggaagctgcacggaaatccctagcgttgctaaagaataggcaatcttacaagaaaccactgctttctctttccaaaaagtccacataaatactggtagcaggaagtcatgctaacaatatgggttatcaatgtggacgatgga

SEQ ID NO: 49128 - DNA, 425 bp, Glycine max
  Clone ID: LIB3107-040-Q1-K1-F8
tatgcggatcattattatcagtggctattttagtgattacatttcaagaactcatacaaattattggtaaaagcaagaatttctattttttaaatgaatcattttcttttgctgaaatcaaatacatgaatatgactgataaaaataatgttttacaaaaaacttcttttttgtcttatagaaattattatagatctcaatttcttcaacaattggatcgttggggttaccgtactattagtctaggttttatctttttaacgataggtattatttcaggagcagtatgggctaatgaggcatggggatcatattggaattgggatccaaaggaaacttgggcttttattacttggactatattcgcgatttatttacatactagaaaaaataaaaaattggaagatctaaattcttcaatagtc

SEQ ID NO: 49129 - DNA, 221 bp, Glycine max
  Clone ID: LIB3107-040-Q1-K1-G1
tgactatagacaacaagaagacgtttcatacactgggcctcggattgcatttctaatcgggtctatacctttctttcccctaacctcacaaagcacaaatactaactcatcctctctgctatcaaccatatcttcccacccttcttattatatcatgcccttacccttatatcaacagtaaagaatatcgtatacctatattaaaatccctattctgatcc

SEQ ID NO: 49130 - DNA, 361 bp, Glycine max
  Clone ID: LIB3107-040-Q1-K1-G10
gaaacataacctcaaaatctatatattaaattaatggcagaaacttgatatatggttacgcaaccaaactttcacacctttgaattttaattgtcaacaccctctttttaaatctttgaaacatctctgtcttctaattagcttccaataacaaatggtacttttgatagagaaacttacaaaacattactttaagctggagaatcaccaccatgccatcacacaccttcaaccagaagagttatcatcctcactgcttgcatttaaatcccatatgtccaaatcaattgaccaactagcatcggatttgaaacccggatcaaagacccccctgtccttaacatggtttggaaagtgtttc

SEQ ID NO: 49131 - DNA, 335 bp, Glycine max
  Clone ID: LIB3107-040-Q1-K1-G11
accaattcgatcggccgattcttctttttttgtctctatttattttttgggccattattacttgtgacttccattaacttggacacataccttatcattctacagacatttaaattattccttccaactcctttccttcaattttttccacaaactaacccaccctacctttcttacccaaaccccaatgatttaaaacactattcaaacactcttattgataatcccaaaccttctttcacttttacaccaactctttaaaccttccactacccactaagatcttctttccttaaacttcattttcaccacctttccaaacatcttatccacca

SEQ ID NO: 49132 - DNA, 135 bp, Glycine max
  Clone ID: LIB3107-040-Q1-K1-G12
ctaccttacgactcaataattatattaagctccctttcaaacctttgaactctcatctcttattttacaccttttaacattaatttttcacaacctattcatttaattttcaaatttccatttattatctttacc

SEQ ID NO: 49133 - DNA, 370 bp, Glycine max
  Clone ID: LIB3107-040-Q1-K1-G2
ggagaaagagtctaacgagaattttttttctctcggtcataacctagtgagactctgtgtcagagtttgtgaagtgaatcccataatcatgaagaaaggaaacttgggacttggtctcaaactctcagttcctgtgtctgatcaatctaattttgccaggttcctgactgaaagtgggacttttaaggatggggatctgcttgtcaacagggatggagttcgaattgtctctcagaatgatgtcgaagctccaccttcaatcaagcctacagacaaccagttaactttggcagacatagatgtaatcaaagttgttggaaagggaaatggatgggtagttcaattggtgcatcacatatggactaatcag

SEQ ID NO: 49134 - DNA, 377 bp, Glycine max
  Clone ID: LIB3107-040-Q1-K1-G3
agctctggttctaggaaggaggttatcaggtcgaacaagaagaatgttgatgatggttcttctcggtctcgcaccagggaggctgatggttcccgtgggaaaaaggaggtgcctaattttgttaaggttggcaatgttgtttctggtaaattgacctcgaagattgtcaagaagaagaaaattgttaagagagtggtgaagaaaggtactgcaagttccaagtcatctgcgtcaaattcactaccggctaaaacccttcctggaactgtgaaagcggagagtgttgcacgtatttcattgactgcctctggtcctgagaaaattgaagctaatttggatgagaaaagcaacactgtcatccaaagcaacactgttga

SEQ ID NO: 49135 - DNA, 141 bp, Glycine max
  Clone ID: LIB3107-040-Q1-K1-G5
ttggtcatgaagctggagggaatggtgaaaagccgtaggtggaggtgtaactaatctggaacccagggaacattgccttccttgggttaaccgggaattgtgggacctgccttaattgcagtgaaaagaaaaccaccttgt

SEQ ID NO: 49136 - DNA, 388 bp, Glycine max
  Clone ID: LIB3107-040-Q1-K1-G6
ggttgcacatatgacagtggacaacatagttcccatgtgtgatcacatgcctgtaggattcagattccgtcccacagatgaagagctcgtcgactattacctcaaacacaagcttctggctgatgatttgcctgtccacatcatccctgaaatcgacctttgcaaggtggaaccttgggacgtaccaggaagatcagtgatcaaatccgatgacccagaatggtttttcttcagtcctgtggattacaagtacttgaagagtcaaaggtttaacaggacaaccaagcgtggcttctggaaagccactgggaatgaccggacaataacgataccgagcaccagcaatgtcattgggactaagaagactcttgatttgcaccaaagccgt

SEQ ID NO: 49137 - DNA, 272 bp, Glycine max
  Clone ID: LIB3107-040-Q1-K1-G7
ggatatggcctacatagtgtatgtcaccctgggcctcggttaccttctcccatggaacgctttcatcactgccgttgattacttctcctatctctaccccgatgccagcgttgaccgcatcttcgccgtcgtttacatgttgatcggcctcgtggggatctccctcataatcttctacagccacaagtccaacgcctatgtgaggatcaacgttggcctcgccctcttcgtcgtttctctcctcatcatcccccttctcgacgccttttatc

SEQ ID NO: 49138 - DNA, 431 bp, Glycine max
  Clone ID: LIB3107-040-Q1-K1-G8
ggcacaagtgagtttgttgatcgagataactagaaacagtgtgatgaaaatgaaggtccttgttttcttcgttgctacaattttggtagcatggcaatgccatgcgtacgatatgttccctctccgaatgaacactggctatggtgcccgtactccggaggtgaaatgcgcaagtcggaggcttgctgtggaagcacacaacatctttggctttgagaccattcctgaagagtgcgttgaagcaacaaaggaatacatccatggcgaacaatatagatcagactccaaaacagttaaccaacaaacttacttttatgccagagacctcgaagtccatcccaaggacacatttgtgttcagtatagatggcaccgtactctctaatattccatactacaaaaaacatggatatggggtgggagaaattaact

SEQ ID NO: 49139 - DNA, 322 bp, Glycine max
  Clone ID: LIB3107-040-Q1-K1-H11
ctgctgagttaatcgcgtcatggtggtcctactcgttgtttgaaactggagagcctttactcgtcaaaagtcctcatttcatgacctagctccaagcgttgctccacgacgctaaggtgttctctttctcaaagcttctttgttaattcatctctgttaattgaatgtatgaaacaatgcttatcaagagagtatctgttaattgaaattctggcaagactattgctagcttcattgtagtgctgagttttgggttatgctgctaaattaatggagtatctgctaattaaaatctctgatatttgaaaagttgaaacaatgc

SEQ ID NO: 49140 - DNA, 432 bp, Glycine max
  unsure (1)..(432): unsure at all n locations
  Clone ID: LIB3107-040-Q1-K1-H3
gggttggaaagaaggtgagggtctgggtggatccaggaagggtattgcggatcctatcatggccggtaatgttaagaagaataacctgggggttggggctcaggaacctggagaggtgagtgctgaggatgacatatatgagcagtacaaaaagcggatgatgcttggctaccgttacagacccaatcccctgaacaatcctcgcaaggcttattactgaacttgacattgggtgctttgtgcaactcttcaggaaaagttaacttttacaaagtgggatgaactggtgtgttgatagtagggtttttattgtgtgctgcagtgcttgtagtcttttgaaactaagatttgngggagaaaagatggggaaagggtaatggtcacttcaattgcatttttattcgccaagaataatgggtttttgggtatttt

SEQ ID NO: 49141 - DNA, 297 bp, Glycine max
  Clone ID: LIB3107-040-Q1-K1-H8
agggattcttgcttttgtgtttgcaattattgccttacaccctcaggtgaatgggagcttgttgcctgcggctgtggtttctctttactgtgcttatgtgtgctacacagggctttctagcgaacctcatgactatgagtgcaatggtctcaacaagtccagagcggtcagcacaggcacactcgttcttggcatgctaacaacagtgctatcggtgctgtattctgctcttcgggctggatcttcaaccacattcttatctccaccatcttcacctagattgggtgggagcaaacc

SEQ ID NO: 49142 - DNA, 438 bp, Glycine max
  unsure (1)..(438): unsure at all n locations
  Clone ID: LIB3107-041-Q1-K1-A1
ggcagcgcttgatttgaggccaggcaagccccactcagaccaccacacctctcctcgttcacgctacccctttctgctcttcttctacctttcaagttttaaaagtataaagatggcagagacattcctatttacctcagagtcggtgaacgagggacaccctgacaagctctgcgaccaaatctccgatgctgtcctcgacgcttgcctcgagcaggacccagacagcaaagttgcctgcgaaacatgcaccaaaaccaacttggtcatggtcttcggagaaatcacgaccaaggccaacgttgactacgagaagatagtgcgtgacacctgcaggaacatcggcttcgtctcaaatgatgtgggactggatgccgacaactgcaaggtcctcgtcaacattgagcagcagagccctgatattgctcanggtgtaca

SEQ ID NO: 49143 - DNA, 426 bp, Glycine max
  unsure (1)..(426): unsure at all n locations
  Clone ID: LIB3107-041-Q1-K1-A10
gatcccacatatcatcaattaccttgttcctctcaaagtgtgattctttttctcttgaattggattgttataatttttgttcatacttacatgttatgcagttatgaatgattgagagacaacacaaatgtcttctccagtgatctccgagatcctcctctctggcttcaccataaactcttccctaagacgcaggacacacttggtgcaatctttctctgttgttttcctccactggttctacgttttctcatgaactaaataaattaacctcgtacatagtataaacatagtacgtaccagtgttcttttttcaaattcaatcattaaacctagctagcagattagggttattattgttcaaatagcagactactgcatggcttctcctgntggaagtggaacctattcatctggttccagttc

SEQ ID NO: 49144 - DNA, 416 bp, Glycine max
  Clone ID: LIB3107-041-Q1-K1-A11
caattatttaaggcctgatttaaaaagaggaacattcgcacaagaagaagaaaaccttatcattgaacttcatgcagtattagggaacaggtaattgtaattgtaattttaattcagtctctctcatgattgaattaatgaattctctccctttttcttttctactgtggttaacatttatttttctttttcatttgcttgacatgcatattattatcctgtgctgtctcaggtggtctcaaattgcggcacagttgccggggagaacagacaatgaaataaagaatctgtggaactcttgcttgaagaagaaactgaggcataagggaatagaccctgtcacacataaaccactgtctgatgttgagaatggagagaaagcagcagaagtgtctaatgaactgaacctcctgaaa

SEQ ID NO: 49145 - DNA, 433 bp, Glycine max
  Clone ID: LIB3107-041-Q1-K1-A12
ggatttgtagagtgagcttttgagttcatcatcaacaatgggtacattgacatcaaagaagattatccctaccaaggtgttgatgttatatgtgatcataaagtcaattttaacttgattatttgataaattaacaaatgttggtaataatttcgttgtaatgcttatataatttttttttcttctttatataaaaatgctcgaattattacaattgatgattatgatagtcttcatgcctatgatgagttagtcttgtaaaaggcactatcaaatcagttaatgagtgcttgcattgacgcaaactttaagacatatactttaataaatttttaaatcaatttgactttaaaagtaaagttagcatttagcaatgcattagatctaaactaaatctaatgagctgcaagatacattgagaattttgatcaat

SEQ ID NO: 49146 - DNA, 408 bp, Glycine max
  Clone ID: LIB3107-041-Q1-K1-A2
gaagagtgaagagcgaagagaatggctcccaagggtttaatcggtttggctgtgttatgcttctcagcactgtcactgagtcgttgtcttgcggaggataatggacttgttatgaacttctacaaggaatcatgccctcaggctgaagacatcatcaaagaacaagtcaagcttctctacaagcgccacaagaacactgctttctcctggctcagaaacatcttccatgactgtgctgttcagagttgtgatgcttcactgttgctggactccacaagaaggagcttgtctgagaaggaaacagatagaagctttgggttgagaaatttcaggtacattgagaccatcaaagaagctttggaaagggaatgcccaggagttgtttcctgtgctgatatcctcgttctc

SEQ ID NO: 49147 - DNA, 399 bp, Glycine max
  Clone ID: LIB3107-041-Q1-K1-A3
gcacctaccggtccttaacttgccagtctagccacccgttcatacacctgacagaagacgacagaattccatcctattttatactattgcttctattcgttctcatgcgtctctatatacctccggtggcgtttccccctttcatttttctctcaccttaaactgtattactactgtcccaactgatccttaacaaaactcctataactgcagcaccatttctttactacctcataaactccgactttaccaatacaccaattacatctacatcgatattatggacatcataattgcaccatttaatactcaattctctaatgctgacactcccacaatcgcctataacgatttaccccaatgtgttactaactgcacctgcaaccccttcacttacaa

SEQ ID NO: 49148 - DNA, 435 bp, Glycine max
  Clone ID: LIB3107-041-Q1-K1-A4
gcacccaaaggtgcaaaaatattaagatgataaacattggagcacttgttgtactctttgcatttctcttcctcagttgtgcctatgcacaagacacaacaacccttgtgcctgcaatcataacttttggtgactcagccgtggatgtagggaataatgactatcttcccacccttttcaaggctgattaccctccttatgggagggactttgctaaccaccaacctactgggaggttttgcaatggcaaattagctactgattttactgctgacactttgggttttaagacctatgctccagcatatcttagcccacaggcatcagggaaaaacctccttattggagcaaactttgcttctgctgcatctggttatgatgaaaatgctgctactttgaatcatgcgattccgttgtcccaacagttaagttatt

SEQ ID NO: 49149 - DNA, 433 bp, Glycine max
  Clone ID: LIB3107-041-Q1-K1-A5
ggttctagtgtatgtgattgttgtgactggttcttcgtcgtcgttatcttcttcttttgttgtttgtgtgtttgttttttctctcacctgaaaatgtcttgctgcggtggtaactgtggttgcggaagcgcctgcaagtgcggcaacggctgcggaggctgcaagatgtacccagacttgagctacaccgagtcaaccaccaccgagaccttggtcatgggagtggcaccagttaaggctcaattcgagagtgctgaaatgggtgttcccgctgagaacgatggctgcaaatgtggagctaactgcacctgcaacccctgcacttgcaagtgaggtgttggagagctaaagcttcaagcagaaatggcccttagaaataatgataaaaactatatgtagtttcaaaacttcaaaattatgtagtatgtattat

SEQ ID NO: 49150 - DNA, 409 bp, Glycine max
  Clone ID: LIB3107-041-Q1-K1-A6
gaagagtgaagagcgaagagaatggctcccaagggtttaatcggtgtggctgtgttatgctgctgagcactgtcactgagtcgttgtcttgcggaggataatggacttgttaatgaacttctacaaggaatcatgccctcaggctgaagacatcatcaaagaacaagtcaagcttctctacaagcgccacaagaacactgctttctactggctcataaacatcttccatgactgtgctgttcagagttgtgatgcttcactgttgctggactccacaagaaggagcttgtctgagaaggaaacagatagaagctttgggttgagaaatttcaagtacattgagaccatcaaagaagctttggaaagggaatgcccaggagttgtttcctgtgctgatatcctcgttctc

SEQ ID NO: 49151 - DNA, 467 bp, Glycine max
  Clone ID: LIB3107-041-Q1-K1-A7
cccacgcgtccgcggacgcttcaagcccagcaattctcatcgtgggtcgtgtatttgttggcattggtgtcggtatggcttcaatggcatcacccctctacatttcagaggcttctccaacaagagtaagaggggcccttgtgagccttaacagttttctcatcactggaggacagttcctttcctacctcatcaacttggccttcaccaaggcaccagggacatggaggtggatgttaggggtagcagcagtgccagctttgttacaaattgtactaatgttgacactcccagaatcgcctcgttggctttaccgcaagggtaaggaagaggaagcaaaatcgactctgaaaaagatttatccaccacatgaagttgaaggcgaaattcaggccttgaaagaatcagttgacatggaaattaaagaagcagaatcatcagagaagatcaacatagtccaactttta

SEQ ID NO: 49152 - DNA, 474 bp, Glycine max
  Clone ID: LIB3107-041-Q1-K1-A8
gcgcccacgcgtccgcggacgcttcaagcccagcaattctcatcgcgggtcgtgtattgggtggcattggtgtcggtatggcttcaatggcatcacccctctacatttcagaggcttctccaacaagagtaagaggggcccttgtgagccttaacagttttctcatcactggaggacagttcctttcctacctcatcaacttggccttcaccaaggcaccagggacatggaggtggatgttaggggtagcagcagtgccagctttgatacaaattgtactaatgttgacactcccagaatcgcctcgttggctttaccgcaagggtaaggaagaggaagcaaaatcgactctgaaaaagatttatccaccacatgaagttgaaggcgaaattcaggccttgaaagaatcagttgacatggaaattaaggaagcagaatcatcagagaagatcaacatagtcaaacttttaagaa

SEQ ID NO: 49153 - DNA, 427 bp, Glycine max
  unsure (1)..(427): unsure at all n locations
  Clone ID: LIB3107-041-Q1-K1-A9
tgaatcaggtgttgataatcaccagagatatcttttgggtaagcaagatcatgggaagcaacatgctttttcaaagaaatctgaatcagcacacttacaaaattcaagtaagaagagcaggagtgggtcagatctcaacaatccatccttggataggcaggttgagttacaaaaatctactgttccttcgaataactcatatttcaaaggatcgcctacctcccattttagtagaggaggaagtatgccaccccagtaccagcctttagatagtacaaattcatcatttggtaactatggtctgagtggctatgctggaaatccagcattggcatccttgatgactaaccaacttggcactggtaatctgccacccttngttgaaaatgttgctgcagcatcagcaatggcaagccctggaatggac

SEQ ID NO: 49154 - DNA, 418 bp, Glycine max
  Clone ID: LIB3107-041-Q1-K1-B1
cggtggcagagagcgaacccaaaactagagctaccttccggttaaaccttccactcttctctccttttccaatcaagggaataatatttcttagagatattccgaaaccatggctcacgccaatcctatgatttttgttgttggaattctaggtaaccttgtctccttctgttgctttctagcaccagtaccaacattctatcgagtttgtaagaagaaaaccacggaaggtttccaatcacttccttacgtggctgcactcttcacttcaatgctttggatattttatgcttacataaagacgggcgaaatacttctcatcaccattaacgcattcggttgtttcatagagacagtttaccttgtcatctatatcacttattgccccaagaaagctaggttctttaccttcaagatg

SEQ ID NO: 49155 - DNA, 482 bp, Glycine max
  Clone ID: LIB3107-041-Q1-K1-B10
aattcgagcggcgctttttttttttttttttttttttttttttggccttaaatgcacattaatgcacttaactacctacataatttattaaatgtacattaaggccaaagaagaaaaaaaacaaagttaaattataattttgtccctaatttttaaatctatgattttagtctttttgatttttaattgaaatatttggttcctcaattttataaactaacgattttagtacctgatagattattaacaaataattttgattaataaattattaagttaattataaattaattaaaaactattaattattaaaaaattattctaattctctacaaattgtgttttttttttccataaatatctcttaaatattgcaaattttttgaaaaaagaaatcatttaaagattcacctcacaaaaattaaatatttaaaagatcgcaattaaaaaaacattttaaaatatattaattattatatcac

SEQ ID NO: 49156 - DNA, 442 bp, Glycine max
  Clone ID: LIB3107-041-Q1-K1-B2
ggcatacatttgcatttgttgcgtgtgggggtctcagctgcatacgtgagtcgggtcatcaccatttttgggaacaggtgttcggtcctttggttgtctgcatttcatgtcagcaacatggtcatggagtctgctttttcatttttatttttttaaaatttattgttctgcattgctatggaggaagtcggtgggtgatgaccaatctttctgctaacttggcagaaaagatgcggtttcgtacaggaggagaaacagggtgaaatggggggaaggagcaagaaaggagatatcccatgatatctgccaataccgtaactattgggcttgcatgagttattgaatgttttggagtctatggtggtggtccagatattatgtcctttactatttttttttccttttactattggctgtagagtgaaacaatcatcttagtcca

SEQ ID NO: 49157 - DNA, 428 bp, Glycine max
  Clone ID: LIB3107-041-Q1-K1-B5
cctgcataccgctgcgacaagagacaagaagcgacggcagagagcgaacccaaaactagagctaccttccggttaaacggtccactcttgtctgcttttccaatcaagggaataatatttcttagagatattccgaaaccatggctcacgccaatcctatgatttttgttgttcgaattctaggtaaccttgtctccttctgatgctttctagcaccagtaccaacattctatcgagtttgtaacaagaaaaccactgaaggtttccaatcacttccttacgtggctgcactcttcacttcaatgctttggatattttatgcttacataaagacgggcgaaatacttctcatcaccattaacgcattcggttgtttcatagaaacagtttaccttgtcatctatatcacttattgccccaagaaagct

SEQ ID NO: 49158 - DNA, 492 bp, Glycine max
  Clone ID: LIB3107-041-Q1-K1-B6
atacccaggccgagccacgcgtgcgaccacgcgtccgcaagaagacgaccgaaggcgatcccatctgattttagcgaccagactactctgtatttccaagctcccaggtctcttaaaccgtgattcaattcttgtcctctttaaagagttaatgagatttcataagatgggaatgtaaaatactgggatgatgcatcacattcatcatgttcttaattatcttgatttgagtgccttaatttaaaattactctgaaaaccgaagtttctattaatgtgcatgttttggtctttgtaacgaccatttgtgcctataggaagttacttctatgacaaagtctgcacattgcttcttctttctaggacaagtctaatgtttaagtttcaacaagtccattagttaagtgtctatttacaaaccaatctgtaagtttcacccatctacttgttcaagctgacctcagaccattacataactaaacactaaaatatc

SEQ ID NO: 49159 - DNA, 414 bp, Glycine max
  Clone ID: LIB3107-041-Q1-K1-B7
ggaaggagaacgcgatggcttttttgtcttttgttgttccccttcccaatcttcaactttagggttcctttaatctcgttattcctcttcactcccaagctccgttcactccaacaacactccgatttacaaatggatggaccagctggccgaggtggtgctggcctggacatgtttctaccaaattataaattgggaaaaacactcgggattggatcttttggcaaggtgaaaattgcagaacatgtgttgactggccataaggttgcgatcaagatccttaaccgacgcaagataaagaacatggaaatggaagaaaaagtgagaagagaaatcaaaattttaagattggtcatgcatcctcacattattccactttatgaagtcattgaaacttcaactgacatatatgct

SEQ ID NO: 49160 - DNA, 426 bp, Glycine max
  Clone ID: LIB3107-041-Q1-K1-B8
gagaggttgacgcaattcagaataacactggatgctgggtgaggatccagaggttcttggccacactggccataactgtctccatactcttgggaaatggaaaccccgttcagtgcttcgactgcggtagccaccaaaaacagcaacacagtttgtgtgaagagctcattatcccctacggttacccctgctccgagcatactattcaaacgaaggatggcttcttgttatgtcttcaacgtgtctcttcttcttcttctcttcggcttcggaacgatggagaacgaggccctccggatctgcttctgcatggcttattcatggcaggtgatgcatggattctaaatactccggaccaatcacttggcttcatacttgcagatcatggatttgatgtatgggtaggaaatgtgcgtagaacacggt

SEQ ID NO: 49161 - DNA, 318 bp, Glycine max
  Clone ID: LIB3107-041-Q1-K1-B9
ttgttctagtgtgtgattgtttgttgttgtagcgtcgtgcgtcttctttagtggtggtgtggttgtgtttgttttttctctcacctgaaaatgtcttgctgcggttgtaactgtggttgctgaagctcctgcaagtgctgcaactgctgctgaggctgcaatatgtacccagacttgagctacactgagtcaaccaccaccgagaccttggtcatgggagtcgcacctgttaatgctcaatttgaagatgctgaaattactgtgcccgctgataacgattgctgcacatgtggaccaaactgctcctgcaacccctgc

SEQ ID NO: 49162 - DNA, 425 bp, Glycine max
  Clone ID: LIB3107-041-Q1-K1-C1
acgacataacggtgagaagtcaaaaaatggtcatttgttaatcttgtggatgctaaattttgtgttataaattactgcatatacattccatgtaaagtgtaattcctgctgtgttgaatacttcaatatatatatgtgaataaaagaagctggatgatatgtatagaatcctatttcacggtctactttgctgtgtgattttatatataatctttaaactttcattatcagttctgattttacatatgaacggcacagcacctcaaagaaagcattcatctatcgtgactctaagaataattttcaacatttttggtgttgtcatgcttggaacttttgtgtacactcttattacccattgttcttctttccctatagagcttataacatcctaaattctttatacttttttattttaacattat

SEQ ID NO: 49163 - DNA, 262 bp, Glycine max
  Clone ID: LIB3107-041-Q1-K1-C11
atgtgaaatcaacatcttgaattgggcttgctctgtataacgggtgcgggtgcgagaaagcacttgtgttgtttttcgtacgaaatggacactaaacagagttcggtgacagttacgctcaattactgcgcgtttacgttcaccactgaatttctcgcgactatactagcttatgctgtcatcaaagcctcacttttagcccctgatctctatctgctgctattgatcaacactcctactgccaaaggatacagcaaaattc

SEQ ID NO: 49164 - DNA, 439 bp, Glycine max
  Clone ID: LIB3107-041-Q1-K1-C12
gatgaaaatgctgatgacacgaagtcagttgtgattgaggctggggaaagaagaacagggcggggatgtatcagtttcagatgatgttaatgaacgtgctgatactatgggtagaaaagaggctattggtcagtgttctggctcatcagttcattcagatttaccaacagtgcctagggaagagaatgatgcatttaaagcatctgagcgaaagttggatacaaataaatctgaggttgcaggagagaggcatgcatgttctgctgctgggtctgatactgctgtataactcgacttcgatttaaacgaaggctttcctggtgatgatgtaagccaaggggagattgcttgacaggaagatcctaccacatcatctgcagttcatgttccttgcccaatgccttttcctatgacattcatctcttgggtctttcatgct

SEQ ID NO: 49165 - DNA, 441 bp, Glycine max
  unsure (1)..(441): unsure at all n locations
  Clone ID: LIB3107-041-Q1-K1-C2
tagggaaggtgcaagagtttgttgtgagctgtaanctagtttatcgtgaggagaatatgaagttgtttgttttctttgttgctgcagtagttttggtagcatggccatgccatggcgcaggctaccaaaggttccctctccgaatgaaaactggctatggtgagcgttcttcggaggtaaaatgcgcaagttttaggcttgctgtggaagcacacaacattcgagcctttaaaaccattcctgaagagtgcgttgaaccaacaaaggactacattaatggcgaacaatttagatcagactctaaaacagttaaccaacaagctttcttttatgctagtgaacgcgaagtccatcacaacgacatatttatattcggcatagataacaccgtactctctaatatcccatactatgaaaaacatggatatggggtggaggaat

SEQ ID NO: 49166 - DNA, 321 bp, Glycine max
  Clone ID: LIB3107-041-Q1-K1-C3
ggtagttgtatgacacagaaattaagctagagctacagagtttttgtcttttctcaccttccttgtctcccttcagacaagggacgaaaaatcagagagagagagagagagagagagagaaattccaaaaccatgtcgtcccacagtcatctaagtttcgcctttggggttctaggtaacatcgcctccttcgtgtgctatctggcaacactaccgacattttatagagtttgtaagaagaaatcaaccgaaaggttccaatcaattccatatgtggctgcactcttcagtgcaatgctttggatcttttatgcctatgtg

SEQ ID NO: 49167 - DNA, 436 bp, Glycine max
  Clone ID: LIB3107-041-Q1-K1-C4
gtatccactttctgccatgcccaacacgagacatgctcgggtaggcggccggaagatgagtgggagtgcttttaacaagctgcttaatcgacttgcagcagaaagtcatgatctgtcaaaccctgttgacctcaaggaccattgggcaaaacatggaacgaaccgatacatctcagtaaaatagagggcgagacattgtttctggggcagcattacacgaatagaaactgcttttagtgatcaattatggattctcaagtcgaatgagaaaaataatgttaagtgtaaaggccatccgggaaagctaatgatttatagtatgcccttgcttatatgcaggatgcataagcctggtggaagctggctaaatttaagggttgaagaagtgactatatagtcattctctgcatttgtcgcacttaattgtcttaaatag

SEQ ID NO: 49168 - DNA, 427 bp, Glycine max
  Clone ID: LIB3107-041-Q1-K1-C5
tgagaagtcaaaaaatgttacaggtgttcttcttcttgttgctaaattttgtgttataaattactgcatatacatgccatgtaaagtgtaattcctgctgtgttgaatacttcaatatatatatgtgaataaaagaagctggatgatatgtatagaatcctatttcacggtctactttgctgtgtgattttatatataatctttagactttcattatcagttctgattttacataggaacggcacagcacctcaaagaaagcattcatctatcgtgactctaagaataattttcagcattttgggtgttgtcatgcttggaactttggtgtacactcttatcaccgatggttctcctttccgtatagagcttataactccgtaagtgcttcatacttttttatttttagcattatttgacgttatta

SEQ ID NO: 49169 - DNA, 466 bp, Glycine max
  Clone ID: LIB3107-041-Q1-K1-C6
agaagacgacagaaggggtactactcaatctagaagaacttaatatcattttgatagtatagtatattttttttgattcttatgatcgatgattattatgttgttttaattctattaagaaattgtgacaggatatttgaaagatttattttaatttatctggacatttatattatgataactactagtataaaatatttatgattgctttggttttaataaaatcatctttggaattcatatataatgattgttttcataaattaaaaataatagaaataagcttttaaagtaattaaacatttattttaaccaatgacttcgttctttaatatttttaactatattaaccttaatttaattatttaagaaatgaatttttcataaatatttttaaaatatctatttaaataagtttgggtctctgggatgacctatttctaacacttctactgacaactgaaat

SEQ ID NO: 49170 - DNA, 449 bp, Glycine max
  Clone ID: LIB3107-041-Q1-K1-C7
ttagtcgagctatgtataaccattggagttctactcgggtaatttgtgtaattaaataaacaaattcttgacatttgattatttaaatgagtcctaagtttttcaagctcaacattttaccatacaagaaccaaaataaaaaacatgttcattttataggaaaaattaaggaaaaaaaagacaaaaatactctactataacactactagagatgtaatacaatttggtagcgcatttgttttggctacaaaatgtcacgggttcaaattttgtcaatttctccatttgtggcatttttgtaattcttttatcaaattaaattaatattttttatttgtttatttaattaaaaatatcatttttcaataattcttaaataccttcaattacataatgcatatacttgaaaaatgtccaataaataatcttctataaatttcactaaaatt

SEQ ID NO: 49171 - DNA, 435 bp, Glycine max
  Clone ID: LIB3107-041-Q1-K1-C8
ttagaccagctatgtataaccattgacgcgctactcgggtaacaggtagattgaaatactcaaattcttgacatgcgattattcaaacgagtcctaagctttctaagctcaacattttaccatacatgtaaccaaagtcaaaaacatgatcatttgataggaaaaattgagcgcaacaaactacagggttactctactataacactactactcatgtactgcaattcgtgagcgcatatgatctggctacaaaatgtcacggcctcaaaacccgtcaatcatatacatcttgaggcatactctaacgccaccatcatagtagatgaatacctggtgactgctaatacaattgaaaatatcattggtcaataatcattaactacgtcaacttacctaatgcatatacttgaactattacaatactgtaatccccta

SEQ ID NO: 49172 - DNA, 447 bp, Glycine max
  Clone ID: LIB3107-041-Q1-K1-D1
gaaaataattgatctattgcgataaaccgagtataggagtaatggggtagtagtagtggagagaaatcgcgatctggaacagagtttatctgaaagaaaaagaatcgagttgaaatgggtttctttggtaccattttggggtttttgggaattggagttgggatttcaattgggctcgtggctggctacttactctgcatctaattacaacccaccaatgttgaggatcctgaaatcaagccattggcggagcaagagcaagagactctgcaacgaatgtttcccgagattcctctttggataaaaaatcccgattttgatcggcttgactggctgaacaagtttgtagaatatatgtggctcgatcttgacaaggcaatttgcaagactgcgaataacattgcaaaacctataattgctgagcagattcctaaattcaaaattgat

SEQ ID NO: 49173 - DNA, 428 bp, Glycine max
  Clone ID: LIB3107-041-Q1-K1-D10
gacagcggaagaatacaccgtcacgcgctgcatgccctttaccttgtgcttcctgcgttcctgtgagaacccacgttctctaacgcgcttctccttcaaagttcaaattcctatacatttgcgtaatcgcttctcaaatctcaacaaaagtattcccaaaaaaccctaattattattattaaacatgaggccgattctgatgaaaggccacgagaggccactgacgttcctcaagtacaacagggacggcgatctccttttctcctgcgccaaggaccacaaccccaccgtctggttcgccgacaacggcgaacgcctcggcacctaccgcggccacaacggcgccgtttggtgctgcgacgtctcaagagattcgggtcggctcgtaacgggaagtgcggatcagaccggcaagctattgaacgtgc

SEQ ID NO: 49174 - DNA, 354 bp, Glycine max
  Clone ID: LIB3107-041-Q1-K1-D11
ctacatatttgacatggttacatgcaacaaaagatgcatcgatcaggtggaactctgatgaagggtgcagagatctacgcactgcacttagcactgccaaatggcagttagaggaatttgcacgggcggtgaggtcaagttatggcaaaagctcaagtgaggaagcgagaaataggcaccgagattttatcactgcaattgaggataatataatgaaagttgagcattcgttgagtgaatcagttgttcctggaggcaaggcgtctctgccttggttgcgtttagatgaatgagaacaggatgaaccttgctttgttctttcaggaatgccagcagctaacaacaaggacattg

SEQ ID NO: 49175 - DNA, 422 bp, Glycine max
  Clone ID: LIB3107-041-Q1-K1-D12
tatccaggatccagtgaccaaaaactggtggtgaaatatggcaaatataaatattggatattttccagcagccttgttctccaacatgacctcagctgatcaagtggggtggggtgggcgaacaagaactcctcctaatactcctagtcccccaatgggatctggacactttcctgatcatacttttcatcatgcgtgttattttacatttgtctcgtttcaaaatgaagcaacaagaaattatggaattggaccacatggagcacaaacattctctgatagatctgattgttttggtgttcgatacttgggatatattgcagaggaggttggatattctctccaatttggaggacccggtggtagttgtggaaattaattaatttttataagcaagctttgtcagatatttgaaaaaataa

SEQ ID NO: 49176 - DNA, 452 bp, Glycine max
  Clone ID: LIB3107-041-Q1-K1-D2
gaagggagatgttgtcacaaacctagatttcatccgtgagatgttgatatctagtgacttcaacatgatgatggatcagaaaatatacacatgtgagcatccccaatgcccttatagcgaagttcgccttggtttccatgataggtctgctagggacaatcatcaattgaattgtgcatacagaaacagttctgcatattatggttgttgtcccaatttccatgctatttatgataatccactcatattcccatatacaaatttttattctaacactacatcacattttttatgaactgttgcattttaatactattttatcttttcttatatatttttgtactttttcaaatatttcttatattttttattacaatatttttttattatttttttatgtttcattatcttatcttttttatatttttttttttctttttaatattattttt

SEQ ID NO: 49177 - DNA, 203 bp, Glycine max
  Clone ID: LIB3107-041-Q1-K1-D3
gcgaccacgcgttcggaagacgacagaacggtagcttctatagcaagttaaatcagtggaaattctagataatcgggttaacaacattcaacacaagatatgtgaggaaatacatgaataaaaaatgaataagcaacaatggaggtttaaggagcatctacttgaacctctggtgctttaattaccacttggtgggacttgat

SEQ ID NO: 49178 - DNA, 447 bp, Glycine max
  Clone ID: LIB3107-041-Q1-K1-D4
atatgattttagtatatttatattgttcatagttctgatagttctggtattctccttttcatttatcttacccaactttttctaaaggattttctttcccaaattattctctaaagattttatccaaagaaatttatttgttttacgtgtgtgtataaatatatccatgcaaaatgaatgtctaattctacgcaacaattatctatttattttacctggtaaatttacatatttcatacattgatatttatttgtaaatcaatttattaatataaatttatatataatatattaacaaatttaaaggagtttctttaaaatttggagttaatcaaagtcaaactgatgtactcttttgcaatttctctaaagttgttaaatttttaaaatttatttgtcagattttgtagaatgtaacagaacaaatgatcctacagtattatatgt

SEQ ID NO: 49179 - DNA, 438 bp, Glycine max
  Clone ID: LIB3107-041-Q1-K1-D5
acatggagatacaaaaatatatagctaaagttttctcgcccaaacaatacatcgaagttaatcattggaagatgtatcacaggtctgtcactgactgggaatagacaaaataatgagcagctaagaagagcagcaatcaactcctgaaaggccagaatctgataatgttaactataaccatctttagcatgcatcatacaataaaaatggtagtagaagcagcatcaacagttgtgatagcagtagcagtcaagttttactataattgtgtaatttatttagtagttttgatgctgttggagtaaatgcacataaagaagaaagtaacctgggtaaggaagactatccctggttgctgtgaatccaacaagcgaagagcagtagtgagcatagctccggcctctccatctatagccatattatcagtgttttgatagt

SEQ ID NO: 49180 - DNA, 428 bp, Glycine max
  Clone ID: LIB3107-041-Q1-K1-D6
gacttcactcaattaactcttccgttccttgtttctttggcatcaccagtgttccatatttcagagaaaatggctttatcatctccctctctagtgttcaccgtacagaggtgtcaaccggagctggtggctcctgctaaacccactcctcgcgaagttaaacccctctccgacatagatgaccaacagggcttgcgtttccaaattccattcatactattctatggtaatgaaccatcaatggcagggaaagaccctgctaaggtcattagagaggcacttgcgcaaactcttgttttttactacccttttgcgggtaggattagggagggacctggtagaaaattggtggtggattgtactggaaaaggtgtcatgttcattgaggctgatgcagatgcaacacttgatcaattgggtgacacact

SEQ ID NO: 49181 - DNA, 431 bp, Glycine max
  unsure (1)..(431): unsure at all n locations
  Clone ID: LIB3107-041-Q1-K1-D7
tacatgacactcgttgtgggtggcatgtactggagaggtaatggcatattcttgtatacgtgcctcttacaaagtggcacgcactggaaacatagtggtgtgaatcagtaggactcaccaagggcggaccttaggttttacgagccctttggaggatcaactagggaactgtcggacctgggttttaggcatcgtgctcttgcatacatggcacttgtcgtgggtgacatgtactagagatgtaatacctgtgaggataaccaagcacggagcttgggtttttaaaaaagattatggaactcaataaatcaagatgggggtgaattggttttcaaacaaaaaggtactttttaaaaaatgagttacgaaaaaaacttttctaaacgaatctatcacanaacgaatatgaatngaatgtaatcaatacttaa

SEQ ID NO: 49182 - DNA, 445 bp, Glycine max
  Clone ID: LIB3107-041-Q1-K1-D8
gatccaacgataaaacaagatactcaatggtctagtggaagagcttcaaacgaagattcagaacgagaaaaaggggaaatgggttgtgcttatatcaacatgccaggcttcatgagggcaatgtttgttgcgttatgtgcgctgatgatattgccggagctaacacatgcaaagcatgcatgagtcactaggctctacatgtttaatatctggatgcaaaacttcacaaggctttgccaaacaaataacattgtaactgtcaatggacgatttactggtcctagaatcatagcatgataaggcgacagaattatggataaagtggttaaccacgttcaatacaatgttacccttcattggcatggaattcgccaactgaaaagtgcatgggcagatggacctgcctatatcacacagtggccaattcagacaggccaaagttttg

SEQ ID NO: 49183 - DNA, 53 bp, Glycine max; identical to SEQ ID NO: 13458
  Clone ID: LIB3107-041-Q1-K1-D9

SEQ ID NO: 49184 - DNA, 436 bp, Glycine max
  Clone ID: LIB3107-041-Q1-K1-E1
tggtacatgacactcgatgtgggtggcatgtagtggatacggatggcatattcttgtgtacgtgcctcttacaaagtggcacgcactggaaacatagtggtgtgaatcagtaggactcaccaagggcggaccttaggttttacgagccctttggaggatcaactagggaactgtcggacctgtgttttaggcatcgtgctcttgcatacatggcacttgtcgtgggtgacatgtactagagatgtaatacctgtgaagataaccaagcacggagcttgggtttttaaaaaagattatggaactcaataaatcaagatgggggtgaattggttttcaaacaaaaaggtactttttaaaaaatgagttacgaaaaaaacttttctaaacgaatctaatacaaaacgaattttaatttgaatggtaacaattcttaaac

SEQ ID NO: 49185 - DNA, 302 bp, Glycine max
  Clone ID: LIB3107-041-Q1-K1-E10
tactgatcatcttacttcgctcattctcttccaatctcattccattctgcccatttaattcctcttcaagttgcatactttatttctcatcgcatattcttataaaatgtggaacattgtgcgaccttgtccaactcactctgtgcattaatcttcaccttatttgcatggttatcgattctgtcgttgtcttaccccgtttcggtcactatttctaactaaattacacacataacacaccatcctattttaacaaatataatttctttgtcatgaatcaatacacacctatctttttttat

SEQ ID NO: 49186 - DNA, 290 bp, Glycine max
  Clone ID: LIB3107-041-Q1-K1-E11
atattgacaaaccgtacggctgatactcctttataatcacttacattttcatctaggtcaactttcctatgaaaatcgccatccgtgagagcacaaatcccactttatatcatcaagcttgcctatcgtcattgatacatcacattcgctcactgcattgctgaaccttaacaccttaacgttaggatttcttctactatcctcacatgatgaactcataaactactacctatgattctatatcaactgaaatcatcatcattttcacttttatcaattatattcatcac

SEQ ID NO: 49187 - DNA, 450 bp, Glycine max
  Clone ID: LIB3107-041-Q1-K1-E2
gaccacttcccatcttcgcacacaacacagccatccgtgtctctcgcttcttttgctctctgccctaaccagcctcaccagatcttttacctccatttccagtgcatcacaccttagcttcaagccatcacaagttgtagatacagttaatactcaatatggagctgagtactataaaagatgcttttgaccgtgttactaagaagcaaaagttatcttgttccaagactcaagaagcaattgatcagatcagacaggaaattgagagtgttttagacacactgcagtcagcgaataacactgaccatgaacttgattataaaactgtcctgaatgagcttaaggccggttttcttttaattgctccacttagtcaaatggaaggtacacagaaggagctaaatgtagcactcaccaagtatgggaagcttcttgagaaacatttcaacc

SEQ ID NO: 49188 - DNA, 453 bp, Glycine max
  Clone ID: LIB3107-041-Q1-K1-E4
acagcgggatcaaactacagatgttcagaagaggaagtcggtagtagatgtttctgttagtacaaataaatctgtattgagaagatggagtgccggtatgggggaaacctctgttcaagaccaggcagaacatgttcctgaagatcctgttccagtgacttctaatgatgtggtacatgctgaggctcctacaaattcagaagtaggagtggtgtctgattttattaccgaaagtcacaataataatgataacactgatcccgacgtaaaaccagaaagacaggaaaatataggttcttttgctgcagataatccagatgaaaccaacccaacagtgaaaggggaaactaacaaaaagttagcagcatcagcagagtggaatcaacgaaagcaagaagagttcaaccaaattcttaaaaaaatggtcgaaagcaaacctgttttatttgggaa

SEQ ID NO: 49189 - DNA, 394 bp, Glycine max
  Clone ID: LIB3107-041-Q1-K1-E5
gacagatacagatccttagccaccaagtagagaccgagtaacaatgagtattctcttcccaagaagttcctcagcagcaaagaggaaaagggtcattagagaacttgttcagggtcgagactatgctactcagttgaagtttctgcttcagaagcctattggccctgatgggtctgtttctgctaaggaacttgtggccaatgtgctgagatctttcgctgaaactctctctgtgttgacttcttcttccgaggattcaacaagtggtcatgatcatgacgacgaggttattgctcagaatcttgtaatttccggagaagatgcctcgcaagtggcaagcattaatgatccgagttctgaagattcgactgaaagtaagaaaggatcaaaggat

SEQ ID NO: 49190 - DNA, 419 bp, Glycine max
  Clone ID: LIB3107-041-Q1-K1-E6
atggtgaaggtgcatatgcgtcccatgggttttaagaacaaaccttactggatcattaagaattcatggggcgagagctggggagagaatggatattacaagatctgcagaggtcgaaatgtgtgtcggagtagattccatggtctcaactgtagctgctatatatgcatccagccattaaatacaaagatatgcctgattgtggttgtgatgtgatactggactaaggggagtttgtctaaatatttatggtgtgaactttatcatttggtactggtaaaattatctccgtatacgatcaggaaactgctaacaccatgttgtttatgtagtatgtaatttctgtatgtatgcttgacatatacaagtgggaaatccgaggaaatgtgtggtcctaaaaatggtgcaagataagcaac

SEQ ID NO: 49191 - DNA, 360 bp, Glycine max
  Clone ID: LIB3107-041-Q1-K1-E9
gacacacaacacagtttccactttcgactttgactgtaccaaagtcacgcttgctccctctctcaacggcttccctcttcttcctctctctctctctctctctggacacacacatccttggtgttgaacgggtttttgggtgaaggagtagtgttggtggcttcatcttttagtgaataaggatacagcagcatgcggtggtggcttactctctctgttgatgtataccgcaaagtgatttccttgaatctgtattgcaaagttattctgtaactcttaagtcccttttgatcaaaaaaccttttacaatcatctcactcatctcttccttgccttgaatcaatgggatccaaatttttt

SEQ ID NO: 49192 - DNA, 419 bp, Glycine max
  Clone ID: LIB3107-041-Q1-K1-F10
gaaggtgtaagagtttgttgtgagcgataagctagtttatcgtgaggagaatatgaagttgtttgttttctttgttgctgcagtagttttggtagcatggccatgccatggcgcaggctaccaaaggttccctctccgaatgaaaactggctatggtgagcgttcttcggaggtaaaatgcgcaagttttaggcttgctgtggaagcacacaacatccgagcctttaaaaccattcctgaagagtgcgttgaaccaacaaaggactacattaatggcgaacaatttagatcagactctaaaacagttaaccaacaagctttcttttatgctagtgaacgcgaagtccatcacaacgacatatttatattcggcatagataacaccgtactctctaatatcccatactatgaaaaacatg

SEQ ID NO: 49193 - DNA, 331 bp, Glycine max
  Clone ID: LIB3107-041-Q1-K1-F11
taaggtgtaagagtttgttgtgagcgataaggtagtttatcgtgaggagaatgtgaagttgttagttttctttgttgctgcagtagttatggtagcatggccatgccatggcgcatgctaccaaaggttccctctccgaatgaaaactggctatagtgagcgttcttcggaggtaaaatgctcacgttttaggcttgctgtggaagcacacatcatccgaacctttaaaaccattcctgaatagtgcgtttaaccaacaaaggactacattaatgtcgaacaatttagatcagactctaaaacatttaaccaacaagcttttctattatgc

SEQ ID NO: 49194 - DNA, 397 bp, Glycine max
  Clone ID: LIB3107-041-Q1-K1-F12
acgcgacaacactacatcaggttaccgatgccagaacacgacagcaggtggagtgatcatcattcacgatcagcgagaatgtctcccaagggttggatctttttacctgtgttatgcttctcatcactgtcacttagtctttgccttccttaggataatggacttgctatgaacttctacaaggaatcatgccctcaggctgcagacatcatcaatgaacaagtcaagcttctctacaagcgccacaagaacactgctttctactggctcatacacatcttccatgactgtgctgctcaaagtcgtgatgcttcactgatgctagactccacacgaaagagcttcactgagaaagaaacacatagaatcttctggttgacaaatatcacgttcattg

SEQ ID NO: 49195 - DNA, 450 bp, Glycine max
  Clone ID: LIB3107-041-Q1-K1-F2
gagggttgttttttctggtgttagtgttagctctatggatccatgcttcctctgtgtggattttcattttatcttctcctccttaattttccaacaaaatctcaaacataaataaattaaaaaatagcatttttatttacaattaataaagatatcgggattcatcttgttcttattttgccccctttttcttctggtctcccgaatcagaaaccctaatcagtgtttgggatttcagataaagaaatttaaacagatgaagggtctcttcaagtctaagcctcgcgctcctgcagatgtagtgcgccagaccagagatcttctgctctttgttgatcgcagccccgaaacccgcgaaagcaaacgtgaggagaagatgtccgagctatttaaaaatatcagggagctaaagtcaatcctgtatggaaatagtgaatctgaaccagtctc

SEQ ID NO: 49196 - DNA, 449 bp, Glycine max
  Clone ID: LIB3107-041-Q1-K1-F4
gatgttacggttgggccatcttgtccatctatcccacggctaatggttgattttccttgtttatttatcttcttcctcccttgtttgtttgtttctttgtttctttggcttgacaagaagaagatgatgatgatggacaagggggtgttggatgatgtgataagaaggcttctggaagggaaaggagggaaacaggtgcagctctctgagtccgagatccgtcaactctgcgtcaacgccagacaaatcttcctctctcagccaattcttctcgaccttcgtgctcccatccgcgtctgcggtgatatacatggtcagtaccaggacttgctgaggctttttgaatatggtggctaccctcctgcggcaaactacttgtttctgggggattatgtggatagagggaagcaaagtttggagactatatgtttgcttttggcctacaaaat

SEQ ID NO: 49197 - DNA, 367 bp, Glycine max
  Clone ID: LIB3107-041-Q1-K1-F5
aatccagcttaagcggagaagagtatgatcgctattcacaccaatatgaactgatacgaaatcttaatgaagtttacgataatgatcccggaaacttcaacaagattgttgagcttatgcaaaaaatgcaagaatgtggacaaccaccaaatgatatcgtccaggagcttgctcctgattttgatttagccagtcttggccagttgtaagtccccttggaatcttgaatatgcaagcttagggcatgtgctgttgtttattaccctatgtatgtaacattaatctttatttatttatcttgaaataagaccctcattagaaaatatgcattggttatttttagctccctaaatactcaaagtaatga

SEQ ID NO: 49198 - DNA, 427 bp, Glycine max
  Clone ID: LIB3107-041-Q1-K1-F8
gttgcagagctcggatggtgtaaaatgagtgtatgatgtgaagctatgggctggaaaatgtggatgtaggagatttcgggacgaaaggcctcaaaacgcttcgtcgtttgtggttactgagtcctgagtgatcttgtcatccgacctttgccatgacaggtgcgcttgcttggcaggtcaaaatatgttaataaaaaaagttttattggtttagggagagatcgcacgggagttgcccggtgtctctctctcgtgtggcgtgtggtgtttgctgtgctctccttttcgatatgccttttattattacctatctgtcgattcactccgtattacgactctggatcagagggatacatcagaggattcgctccaacttctatcgaataaggtattatctgtcaatttacattgcaaagggttaggatat

SEQ ID NO: 49199 - DNA, 473 bp, Glycine max
  Clone ID: LIB3107-041-Q1-K1-F9
tgtggaagactacagattgtgtgttgtcagattggtgtggcgttgaccgtgaagtgagcaggtttaatatggacaaaggttcacagctgatactcctttatagtcacttccctcttgaggtatgtcaattttctcacgaaaatgggaatccttgagagcataagtacaagtgtctctaatcaatcttgtgtatggagattgatatatctgattgcctctctccatggaagaattctttgatttgaaaatatgcatctttgctaatatccttactgtcttcaagcttaatcttctggttatgactctctggagtttgttaccatcatcacttgcacttttccaattctgttcattacttccataaatagaatcattaaactttcttgttgattttttgccctttacagctgctatacttatttaactttaaaacttcatttccctcttttgatcaattcttcccaataactttt

SEQ ID NO: 49200 - DNA, 443 bp, Glycine max
  unsure (1)..(443): unsure at all n locations
  Clone ID: LIB3107-041-Q1-K1-G1
ttatnggaaccatgctaaactcattcactattgaggtaattgtgatagtacatacatgacagctaatcttactgttttattaatgtcttcagttaatataatgctgatgcttagactaacaagaaatttattggtaatgaattgaatcactgtatatatcttaattactactacaacataacacaatgtgatagaggttagatttttaggtctctatatatatatgaatttttttaatgagtttaatcctttaaataaatagaatacacattctgactaattatgtgtttgagtgttataattgttttttctagaccttttttaattccattagaaaactgataagaagtaattttttttaaaataaactaaatcaaatatgaactagacatattttatagaaaaaggatgaaaggactaaaaatcaaattctggttgtcaat

SEQ ID NO: 49201 - DNA, 330 bp, Glycine max
  Clone ID: LIB3107-041-Q1-K1-G11
aaattcatcaaatccttcttcatttggtttactgccaataattcatggactaggtctcaaatttgaaatgggtcttatatatcaaaacaacacttactatagaatatattaccctccattatatccttcccactaacttttttcatatctttacatatttgtctataaatatcttcttgtaacaatttctactttttacatgattcaacatccatatttcttcattactctttctaattctcatcaaatgattcaacacttgaatctttacctacacatttctttttatatatcaaatttaattaattcaatgatatagtaaaatcattt

SEQ ID NO: 49202 - DNA, 275 bp, Glycine max
  Clone ID: LIB3107-041-Q1-K1-G12
catgcatagtgtgtcagacatatgagatcttttaatgtgcccgttctattgctcgggggaggtggctatacaataagaaatgtggcacgttgttggtgttacgagactagcgttgctcttgggattgaactagatgataagatgcctcaacatgagtattacgaatattttggtcctgactatactcttcatgttgctccaagtaacatggaaaacatgaactcccgacatttattggatgaaataagagcaaaacttcttgataatttatctag

SEQ ID NO: 49203 - DNA, 455 bp, Glycine max
  unsure (1)..(455): unsure at all n locations
  Clone ID: LIB3107-041-Q1-K1-G2
ggatgtcatgtgtgatgctggtaggtcttgtggtgtgcaatcaatctgggtgtatggtggaacctctaaagggccacaaatctcctcactaaaatctggcattgacattatcattggaactcctggtcgtatccaggatctgattgaaatgggtatctgttgcctaaaagaagtatcgtttgtggtacttgatgaagcagatcggatgcttgatatgggttttgaacaaatagttcgctctatactgngtcagacatgttctgatcgtcaaatggttatgttcagtgctacatggcctttgccagttcattacttggcacaggagtttatggatcctaatcctgtaaaagttgttgtaggctcagaagacttagctgccaatcatgatgtcatgcagatagttgaggtcttggatgatcgttctcgtgataagcgcctagctgctttactggaaa

SEQ ID NO: 49204 - DNA, 440 bp, Glycine max
  unsure (1)..(440): unsure at all n locations
  Clone ID: LIB3107-041-Q1-K1-G4
gagggtgttgttacttcttctctggttgattcggatgtagagtctgcagtttctcctcgttgttcttcgctttcctgttttcaatttcgattctttcgttaatttaataagatgtttgggagggcaccgaagaagagcgataatacgaggtactacgaaatcctcggcgtctccaagaacgcttcgcaggatgatctgaagaaggcttacaagaaagccgccattaagaatcaccccgacaagggcggtgatcccgagaagtttaaagagctggcgcaagcttatgaggttctgagtgaccctgagaagcgtgagatatatgatcagtatggtgaagatgcgcttaaggaggaatgggtggtggcggtggccatgatccatttgatatcttttcatctttctttggcggtgggagtccctttggatcangtggaagtagt

SEQ ID NO: 49205 - DNA, 380 bp, Glycine max
  Clone ID: LIB3107-041-Q1-K1-G5
tacttttggaactatgctaaactcattcactattagagtaattgtgatagtacatacatgacatctaatcttactgttttattaatgtcttcagttaatataatgctgatgcttagactatcatgaaatttattggtaatgaattgaatcactgtatatatcttaattactactacaacataacacaatgtgatagaggttatatttttaagtctctatatatatatgaattttattaatgagtttaatcctttatataaatagaatacacattctgactaattatctacactagcgttataattgtttattctagacctttcttaattacatttcaaaactgattataagtaatttattttataatttactacatctac

SEQ ID NO: 49206 - DNA, 413 bp, Glycine max
  Clone ID: LIB3107-041-Q1-K1-G6
catggaagtcgtcacgggagatgtggtgtttgtgggccagttttcatcaacaagctgcatgaggatattgtgcttcgtggactgtaggatcagatctctggtactgcttgatcacatatatgttggacataagtctgctggctaatgtatcatatacatgccaagatcgattggaaaaattatgtgccactggtatggctatgacacttctaatgatgtatcctatttgatgcaccaacatattgcaaagtgagaggtcatacaactacttttgatgggccaaatgatgacatctgacacaaattgctaggtactaaatgtccagaaagttgctaatgctgaggagacttacctggtcatcatgatcaatcacgtttaaagcgacaatctgatcatcaaagtaaacatgagtg

SEQ ID NO: 49207 - DNA, 414 bp, Glycine max
  Clone ID: LIB3107-041-Q1-K1-G7
gtagacgttaccaggacaattgtaccacaaattagaggcttgccttgaggtgaggcactagcttgcactacgttgggcaaacgtgcctattcatgtcatgccccaaggtcaagtttttgaaattggtgactagcaattgaaaggcttcagagccattttttttcattactgtaattccacatttctacctctctcttgcttgccttattttctttgacgctacaatgctagcttatatatatgtctagtaccttttttctacctttgtccatgtaactaaaagtacagagcttgcaatcatacaatggaacacattataaagaacatgaaccaatcttgagaatcactattttagagtatgcaactatttaaaagcttaaaaatgacaaagtttgcacatcagaagtaacatta

SEQ ID NO: 49208 - DNA, 177 bp, Glycine max
  Clone ID: LIB3107-041-Q1-K1-G9
actcttctcaacacaacattaaacgacatcccatgcaactcttactaataaactctgttctctgaaaaccctcatttctcttcttctttcatcatctctttctcttctatcaacttccatctatgcctctcaaaatcatacatttcatttaaacccacatcatccactccattattc

SEQ ID NO: 49209 - DNA, 458 bp, Glycine max
  Clone ID: LIB3107-041-Q1-K1-H1
acagaagggaggttttgatgttgtcatgataaaccctggtacagcattgggccctctgctgcctccaagaatcaattcaagcatggctgtgcttgttagtgttctcaaagggggcaaagagacctacgaggacttctttatgggaacggctcacttcaaagacatagcattggcacatattttggcacttgagaacaagaaagcagcatgaaggcacttgtgtgtggaatctattcgtcactttagtgatcttgtggacaaggttgctgagttataccctgaatacgatgtggctaagttgccaaaggatacccaaccagggttgttgagagcaagtggaaaggatgcatcaaagaagctgattgatttaggtctagaattcactcctgttgagcaaatcatcaaggatgcagtggagagtttgaagagcaagggctatgtctaatatctctgctact

SEQ ID NO: 49210 - DNA, 303 bp, Glycine max
  Clone ID: LIB3107-041-Q1-K1-H12
gatcacagcttgaacaagtgaccattcaaatcttctgtcacagatcccgttctcttctattcagattgaagatcacggttgatgtcttcaatgggtcctcctgctgatgaaaatcttgaaacaaaagagatcgatctcagaagtatgtcatcttcttcacttggtcaggcaccacaagcccacaaagtagcaattcctccaagacagaacctcttcaaggaattccaatccactataaaagaaacattcttttctgatgatcctctaagacccttcaaagatcaacctagatcaaagaagatt

SEQ ID NO: 49211 - DNA, 449 bp, Glycine max
  Clone ID: LIB3107-041-Q1-K1-H2
aaccggacaacgctcatgataaaaaatattcccaatgagtatacttcaaagatgcttcttgttgccatagatgagcaatgtcgaggaacttatgattttctgtatttgccaattgatttcaagaacaaatgtaatgttggctatgcattcatcaatatgattgatcctggacaaattattccattccaccaggcttttcatgggaaaaaatgggagaaattcaacagtgaaaaggtagcggtactcgcctatgcccgaattcaaggaaaatctgctcttattgctcattttcagaattcaagcctaatgaatgaagataaacgttgccgccccattctcttccatacagatggcccaaatgctggtgatccggagcctttccccttgggtaacaatattagagtgaggcctggaaaaattcgcatgaatggtaatgaggagaatggcag

SEQ ID NO: 49212 - DNA, 448 bp, Glycine max
  Clone ID: LIB3107-041-Q1-K1-H3
aggaagaggacatgggttgctgatgctgaggaatgcaagagaagaggttctattgagactgcccgagctatatatgctcatgccttgactgtcttcttaactaagaagagcatatggatcaaagcagcccagctggaaaagagtcatggtaccagggaatctcttgatgcattacttcgtaaagcagttacctacagaccacaggctgaagttctttggcttatgggtgccaaagagaagtggcttgctggagatgtgcctgcagctcgtgctatcctccaagaagcttatgctgccattcccaattctgaggaaatatggcttgctgctttcaagctagaatttgaaaaccatgaacctgagagagctaggatgctgttggctaaagccagagagagaggaagtacagaaagagtctggatgaaatcagcaattgtggagagagaac

SEQ ID NO: 49213 - DNA, 443 bp, Glycine max
  Clone ID: LIB3107-041-Q1-K1-H5
ggtgaagtaaaagctgctaacccaaattcttgtcagtggtaaccatgacagttgggtccttcttcatcaggacctccagggttctcaactcctccaactttctgcttctctgcactctcagtggtggtggtgtagtggcatactcagaatcacaatcaggagctgaacgtcctagtattgaagctaatgagcctgccaaaaagaaagtggtggttcttggaacaggatgggctgctaccagtttccttaaggatctggatgcttcattatatgatgttcaagttgtttcacctcgtaactactttgcatttactcccttattacccagtgtcacttgtgggacagttgaagcacggagcattgtaaagccggtccgaaacatcattaaaaagagaaaaggagaagtgaatttttgggaggcagaatgtgtcaagattgattat

SEQ ID NO: 49214 - DNA, 432 bp, Glycine max
  Clone ID: LIB3107-041-Q1-K1-H6
attaaaactcatggcaataagcaatctatgttctttgttgaatttaaattgaggtcaccctcaggatcatcctggtatgcaccaaaatgtagattgtaagtttatgtattttaggtgaataagaatttgtgcaattttaatatgaaggtggtaatatatgattgggatactaatatgaactttttataggaataattcaagcataaatagcactgtatgttgtgttattttgtttctctctcaaggttgtgagaaaatggaattgttcaattgttctgatattttcttggaactattcttgtaacaggtctctcacaattggtcaaatgcaagggaagtttcaaatggtagttgtaaggcgtacagggcatgctattcaggtttgtactagccatgtctctttctgcattcattataaaaatgaagttacta

SEQ ID NO: 49215 - DNA, 200 bp, Glycine max
  Clone ID: LIB3107-041-Q1-K1-H7
tgcattaaaactcatgtccataagcaatctagggtctatgtggaatttacattgaagtcaccctaatgatcattctgctatccaccaatatgtatattgtaaggaactgtatacaaggatcatacacttagcgcaattacaatatcaaagaacaaatctatcatctgtacactcatctcaacaacactattggaataatg

SEQ ID NO: 49216 - DNA, 393 bp, Glycine max
  Clone ID: LIB3107-041-Q1-K1-H9
gagagacaatcagtgtcccacgttgttgcgattgcggggctctgttcctacgataaccggttcctctcgccggaaaaccgacattgatctctctctccggcgatccccgcccatccctccgccatgagttccggcgagctcctccacatacagccccaggagctgcagtttccctttgaattgaggaagcagatctcgtgctctttgcagttgtctaacaagactgacaactatgtggctttcaaggtcaagacaacaaatcctaagaaatattgtgttagacctaacactggagttgggatgcctaggtctacttgtgatgtcatagtgacaatgcaagcccaaaaagaggcaccttctgacatgcaatgcaaggataagtttcttcttcaa

SEQ ID NO: 49217 - DNA, 263 bp, Glycine max
  Clone ID: LIB3107-042-Q1-K1-A11
tgttggttctagtgtgtgattgtttgttgttgtaggtcggtgctcctcctttggtggtcttgggttgggtttggtttttcttttaacttgaaaatgctttcctccggtggtaccttggtttccgaaacctcttccaattccgccaccgcttccgaagccttcaaaatgtccccaaccttgacctccccttaatcaaccacaaccaaaaccttgtccatggaattgccacctgttaaggctaattttgaggttcctaaaatggt

SEQ ID NO: 49218 - DNA, 414 bp, Glycine max
  Clone ID: LIB3107-042-Q1-K1-A4
agaatacgacagaaggggaagtggatctgaattcagattcacaacaacaaaacgttgctttcccctctctgctattaggagagacagacaactcactccttcgccaatcggagcatggcggagctccggcactcttcctccctcggcagccgagcctccaattctccgatgaagcgcgacgccgtcgccgtcggtagcgattcctcccctctcattcccgacaaccacctcgcccacgacgacgacgagcacgatcgacactcgtccaaggaccgcgaccggcaactctgctccttcttcaccgacgaccctagggtttcgccttacaactccaggatctctatctttttcacattacttcttcttctcgttggtttagtttccctattcagaatctttcataatctcaatgcg

SEQ ID NO: 49219 - DNA, 352 bp, Glycine max
  Clone ID: LIB3107-042-Q1-K1-A6
tggggtggcagatagcgaacccaaaactggaactaccgggcctgcaaaccttccactattctctccttttccaatcaatggaataatatttcttagagatattccgaaaccatggctcacgccaatcctatgattattggtgttggaattctaggtaaccttatctacttctgatgctttctatcaccagtaccaacattctatccagtttgtaataagaaaaccactgatagtttccaatcacttacttacgtagcttcacttttcacttcaatgctttgtatattttatgcttacataaatactggccaaatacttctcatcaccattaacgcaattctttgtttcatat

SEQ ID NO: 49220 - DNA, 422 bp, Glycine max
  Clone ID: LIB3107-042-Q1-K1-A7
acagaacagtttctagggccaacgaatatgcataaatacaacgagaaatgcgaatactgattccagtgagtataccgtaatatagcataatatccatcctggatatttacattatatctatatatctatctatatatagatagatatatagatagatatatacatatattgctaatatatatctaacggacttatttaaaattctttaatataatgtttactaaacaaatattccatttgaactaatcctctgaatctccaccatcgactaaaaattagctatcatgattactagataagccgctatcgtgaaattactacacacgctgctcttaggaagcagtgcatgagcatcttgggtcgagacctagtagcggcatgacatcttatcttctaaaaaataagtcctataatgaacctca

SEQ ID NO: 49221 - DNA, 357 bp, Glycine max
  Clone ID: LIB3107-042-Q1-K1-A8
ggtgcttcagtgaatttctctgtgattggtctcccaaggttttcatctctcgccatcgccgttggagaacgctccaattttctctccaacaattcgttctttcccttctcaatttccggcgagttctccctcttcaatttctcgtaagattcatcgatcacaaacttatattgatttcgtttttctgacactgatcttatttttccaatcggttttcttctccaacatttatcgcttccagaatccagatctggatgcacatgaaccattgtttgcatttggggcaaccttgatttgggtttttaagtgctttatggaaactgtggtctttaaatttttaaacttttgtcgaatgac

SEQ ID NO: 49222 - DNA, 221 bp, Glycine max
  Clone ID: LIB3107-042-Q1-K1-A9
acctattatttaattactgatctaataatattaacattcggacaagattaatataaacttatcattggactttatacagtattattcatcatttaattaacatttcatcttaattcattctctctcatcatttaattaattaatcctatccatttttattttctactttatataacattaattcttctttctcattatctttacatacatatatttattct

SEQ ID NO: 49223 - DNA, 402 bp, Glycine max
  Clone ID: LIB3107-042-Q1-K1-B1
gcccacgaatttgcaaatctcaaacgaagccctgttctcgctctcttgaatttcacccttttagcatttgtacattcctttcccttccttgaatcgttcttaattgcgagaggggatatcggagaagttgattggcctcccattaattgcaggtctgaatgatctgatggagtctaaagttgggaagaagaagtcgtctagtagtaagtcccttttgtacgaagctcctctcgattacaccattgaagacgttcgaccacacggtggaattaagaagttcagatctgctgcttactccaactgcatccgcaagccatcctgagattccctaggttgtgtgacgacatagcccccgtagtcttgcatctgctatattattctagtctcttcttttcccttttc

SEQ ID NO: 49224 - DNA, 399 bp, Glycine max
  Clone ID: LIB3107-042-Q1-K1-B11
gaccacaccgagtcgcagaaaaagaaaaaagcgatcatagtttcacttcggccttatcgagtttagggtttcggttctctaccctatctttcacgtatcgaaaccttaaatttacgatcaggtctgagcaatctggttggtagaacctttggtcttagtgagtcaagttttatgtctgaattagacgatcaaattcctactgccttcgatccttttgctgatgcaaatgctgatgactcgggtgctgggtcaaaggagtatgtgcatattcgtgtacagcatcgaaatggtaggaaaagcctgacaaccgttcatggattgaaaaatgaattcagctttaacaagatacttaaagacgtcaagaaagagttctgttgcaatggaacaatttttcaagac

SEQ ID NO: 49225 - DNA, 339 bp, Glycine max
  Clone ID: LIB3107-042-Q1-K1-B12
acacaacttattttaatcacattactccatttccatctattcacattacttaccattacttctctactctttctatacctttattactcttacattcttgtatataactctatcatacttttactatctttctaaatgtatacattacatatatctctattcatttgattcacattaacaccaactcttctttcattcacccataatttaaaaatacctctatacctcttacctatataacataacattatatatttaaatcttttatcatattaaattttctacattcattattacacttaaaccttatttatacttcttctcttccattatatattt

SEQ ID NO: 49226 - DNA, 324 bp, Glycine max
  Clone ID: LIB3107-042-Q1-K1-B2
aggtgtgcgaacacctgagagaagaccacttaagacgcctatcaatatgcacatctcatacgagtccctacaatatgtatttccaattcctcagtcttaccatttgtacattcatttccattacttgaaacgctctaaattgacagacgacatactagtcaagctgattggtctactattaaacgacatcctaaatgatctgataaacttcaacgttatcaacaagaactcaattaatatatagtccctaatgtactaatctcgaatctaatacacgattgcctacggagaatcacactgagtaaagatgcacatcagatttac

SEQ ID NO: 49227 - DNA, 420 bp, Glycine max
  Clone ID: LIB3107-042-Q1-K1-B4
gccgctgagctccctttctcctcggtccacagagacaaaatggaagacaggtgccaacagttcatcacgaaagaaaggactagctgagccgagatcactaactaaaacgaatttaatactaatcgaaaatactaatagaatagaaatagaactgtcttttcatatagatatcccttcaacacaacataggtcatcgaaaggatctcgaagacccaccaacgcacgaaagccgggatctttcagaaaatggattcctattcgaagggtgcataaccgcatggataagctcacactaacccgtcaatttgggatccaattcggttccttaggaggtatcgggaaggaattttggaatgtaataatatcgattcatacagatacagaagaaagggttctctattgattcaaacgctctaccta

SEQ ID NO: 49228 - DNA, 280 bp, Glycine max
  Clone ID: LIB3107-042-Q1-K1-B5
ctttgactcaccggcgagtccatctatcgccagcggcgacggcgctccggccaccggtccggccaccgcctatggttccctcactttctcgtccttcttcttctcagaaatatgccttctcagaaagttgaaacaggtcatcaagacaccgaccatgatgttgcaatggattactatggtaagaggctggccacggcttcatcatatcacacaattaagatcattggggtcaataatactgtctattaccatcttgcaacatttactgctcaccaaggac

SEQ ID NO: 49229 - DNA, 310 bp, Glycine max
  Clone ID: LIB3107-042-Q1-K1-B6
cccactcgtccaaccccttacaaaagaccacacaatttacttacttctaattacacatactccaaacggcttactggaaactacaggtgagcactaaataaactactatctaatcaataattactaactataactaatataatactaattcttaatactcctagaatacatcttcaactctctattcatatacatatccattcaacccaacatatttcattgactggatctcgatcacccaccaccacactaaaactactatcttttaaaacatctattcctattttaaacatacataactgtatccata

SEQ ID NO: 49230 - DNA, 208 bp, Glycine max
  Clone ID: LIB3107-042-Q1-K1-B8
ccactcctacaaccacacatacggaccctgctaaactaccactcttctgcatccacagtgacacaccagtatactggttccaaccgggcgggacgaaagaaacgactagctgatcctagatcactaactaaaactactttaatactaattcaatatactaatagaatagagataacactgtcattatatatagatatcccttcaacac

SEQ ID NO: 49231 - DNA, 344 bp, Glycine max
  Clone ID: LIB3107-042-Q1-K1-B9
tgttaatattttgaatgtagcttttatgtacaaagtttgggggaaaaatcaaagtgcgggtgggtgaatgatatattataatatatacattatgacattccaaggatttctcaatcaatcctataaaattcctcaccttaaaacatttacgattatatttattatcctgagaaacacattgttaatgtagaactgcatacatttaatgatatagtcaattattacaatgccttgcctagtgatcctgaaactgatataaaaactgtctaataatcttttactactaaatctctatatatttatttttatctttatccttatttaatcaaacaaacttttttaat

SEQ ID NO: 49232 - DNA, 423 bp, Glycine max
  Clone ID: LIB3107-042-Q1-K1-C1
ggcagcgcttgatttgaggccaggcaagccccactcaaccaccgcacctctcctcgttcacgctacccctttctgctcttcttctacctttcaagttttaaaagtataaagatggcagagacattcctatttacctcagagtcggtgaacgagggacaccctgacaagctctgcgaccaaatctccgatgctgtcctcgacgcttgcctcgagcaggacccagacagcaaagttgcctgcgaaacatgcaccaaaaccaacttggccatggtcttcggagaaatcacgaccaaggccaacgttgactacgagaagatagtgcgtgacacctgcaagaacatcggcttcgtctcaaatgatgtgggactggatgccgacaactgcaaggtcctcgtcaacattgagcagcagagccctgatatt

SEQ ID NO: 49233 - DNA, 414 bp, Glycine max
  Clone ID: LIB3107-042-Q1-K1-C2
cagggactcatgccatgcatatgctgatggactatgactctgatcatgtcacatccatggctgcatgctcttgcaattcccaaatgaaatatcccccaaagccactctagatttattcaacatatctacacacattatacaaaattccaacttgtcaatcgtactcaatcttctatccatttgtcaaaccataccattcaacctacctcgatgcttattgagatcactctttgaaccaccctcattgatattgatcagtcttagtcactctctgatgatagctacctagatttcacatgaataggctacgaagcataagccaatgcaaagttcctttcgaaaattggactcaaaaggagtctttaacatgtactacttacgctcatgaccaccaccaacgttgagaactcaact

SEQ ID NO: 49234 - DNA, 407 bp, Glycine max
  Clone ID: LIB3107-042-Q1-K1-C3
attccgcaatgtttaaagatgttctcctgtatcaaggcagggttggccacttaatggagaaaaggagcatattgattaattttagttttaaaaactccaaatctccaatgttaaacacgagtaatacttgatactaatcaagtacctataacgtgtttggtttaggatataatttgaggggaaaagttgtattatattgaatcaataattacatgattaatgaatcgttaattcatgtgatattgaatttaatttttaaaataagatctttaagttttaattttataaataaaaaatgtgaataaaaagaaaatatattatcaaatatcatcggtggaaattttttaataaaaattaatcaataataaaatcgggttgtactctgaattaataatatatatatttat

SEQ ID NO: 49235 - DNA, 166 bp, Glycine max
  Clone ID: LIB3107-042-Q1-K1-C5
ccaaattgcttaactctacaacttcaccgattcataggtaatttaggcactgcttctctactctctttctatctctcaatatttctatcttacactatctttctctcattcttattcttcttaacttctttaaactatttacacattaacatattatcacaccaaa

SEQ ID NO: 49236 - DNA, 410 bp, Glycine max
  Clone ID: LIB3107-042-Q1-K1-C6
gaacacctttcactctcattgacaaccaacggtagttagtatcaccaataccagcaagtcgtgaatcaaagacagatctttgctcgagtggtgattttgttgctcatgttcttagttggagccaggtttgctaaagcaaaagaaggaggataagaatctgctgataggattttgaaacttcctggtcagccaaaagtatcatttaagcaattttctggctatgttactgtcaacaatgttgctggtagagctctcttttactggctcgcttaatctgcccaaaatcctctcaccaaacctttggtcatttggcttaatggaagtccaggatgttcatcagtggcatatggagcatctgaagagattggcccatttagaataaacaaaacagcttctggtctatacaaaaa

SEQ ID NO: 49237 - DNA, 408 bp, Glycine max
  Clone ID: LIB3107-042-Q1-K1-C8
tcttcattagtcattgagtcgcataaaatgtatagaagatgacttgcaaaaaacagagagggccctgctagccactgcttcaaagcaagttgagcttgccgagtcattggaaagcttaaaggagagtaaatttgacggaagaaattcatgttggcctaaaaatagaagttatgccccaggaagatgagcccgtttttcagcatcagtttgcagtccattgtttttgatactttacagctgaatcactaccagagctaaacttctattggcttatataaaagaattactctcattatcatataggcttgaagaatgtgggctatggggagtgcatagccccaatgtatagaacgcaacaagaattttttatgaagattctggactccaaatactccttttaaatgtata

SEQ ID NO: 49238 - DNA, 405 bp, Glycine max
  Clone ID: LIB3107-042-Q1-K1-D12
gacaacacatcacatcacagcacacttacacacgactaagggtgctcagttacgcattgctacgcgatggacaaaatggaactggctgagacacctatacctttgctttcactaaaccacgtttcttttgcatgtaagagtgtgagcgagtcagtgaaattctattaggatgtccttggatataagctcatcaagatgtcatcttctttcaaatttgaaagggcctagttattcaattatgtcatatgcattcacctgttagagtcagaaaaggtttctgagaaaaataagagagatcaacccaaatgataatcatatatcgaattcaatgcttagacatgaaagttatgatgcataaacttgatgcaatgaacattgagtatgtgacagcagttgctgaataaa

SEQ ID NO: 49239 - DNA, 276 bp, Glycine max
  Clone ID: LIB3107-042-Q1-K1-D4
ttaatgctaccgctgctacacgaccacagatgggtactggtgccataagacaacggatggggattcaagcacttgttaacaaagatccatctatacttcatgttttacgtgcaaaaggttcttcaactgcatcaaaggctaacaatcttttaaaacaatgggatatggttttagcaatcaacattgaaccagtcacatgctctcgtgacattgaaaatgcttgccaatctttacacaaattcgactcccatgatggcaaacttcacttgactattt

SEQ ID NO: 49240 - DNA, 148 bp, Glycine max
  Clone ID: LIB3107-042-Q1-K1-D5
tgtgtctaacattatgacaaggcatcatatggggcttcaggtgcacatagcatggtagaatgtccaatcactaatttaaactgatccatccacactttcggttacaatttccaaaacatccttccctaaaatacttgacacataaatc

SEQ ID NO: 49241 - DNA, 392 bp, Glycine max
  Clone ID: LIB3107-042-Q1-K1-D6
gatccttaaaaatgaaaagaagcactcactggtgaacgccacgcattgttcgatgatcagagtcttctttctttttcttccgcagtcccaaccttcatggattctcactcacacatcattgcttggggctctggtgaagatggtcagctaggaatcggaagcaacgaatagaaagaatgggtctgcctcgtcaaatcccttcagccccaccgtattcgctccgtcttcgtctgcatcataaacttcctcgccatctctgactactgcaaattgttcacttggtgtttgaaccaaagggccacacttggtcaccctgctgataccaagtcttataacaatactgataacacttccatccaggtcaaggcttcttttcattgttaaaatttttc

SEQ ID NO: 49242 - DNA, 342 bp, Glycine max
  Clone ID: LIB3107-042-Q1-K1-D7
tccggttattagaatactacataaattttcggctggtgaaaaactacctaaggtgggagacaatcacattcccacgatgcttcgaaatccactctctctttctacaattacctattgctcttgactgatcacccactttgatccttttctacctatatccccgtccattcctccaccattagttacgacgagctccttcacatacagtcccatgagctgcaatatccctttgcattgacgaagcagatcttctgctcttttcatctggttaatatcactcaccactatatgtctctcaatgtcaacacaactaattctctgaaatattgtgatttacctaac

SEQ ID NO: 49243 - DNA, 197 bp, Glycine max
  Clone ID: LIB3107-042-Q1-K1-E1
attcccactcctagccactcctccaaactgctgctacaagactacatacatctccggattcaatactactactcaaatttacgtctacagaaatactacaatacatgccaggcaatatccctacctccttgttccctatcaactctcactcactacaattacctcatcatctttacttatcacctacattcatcttt

SEQ ID NO: 49244 - DNA, 456 bp, Glycine max
  Clone ID: LIB3107-042-Q1-K1-E11
gtggaggcagattggtgtggcgttgaccgtgaagtgagcaggaagaatatggacaaacgttcacagctgatactccttgagagtcacttccctcttgagggaggtcaattttctcaggaaaatgggaatccttgagagcagaagtacaagtggctctaagcaagcttgtgtatggggattgagatatctgattgcctctctccatggaagaattctttgatttgaaagtaggcatctttgctaagatcctcacgggcttcaagcttaatcttctggttatgactctctggagtttgttaccagcatcacttgcacttttccaattctggtcatcacttccataattagattcataaaactttcttgttgatttttggcccttgacagctgcaaacttgattgatcttgaggacttcagttccctctttggttcagtccttccagataactttctgg

SEQ ID NO: 49245 - DNA, 205 bp, Glycine max
  Clone ID: LIB3107-042-Q1-K1-E12
aatccctaattccaggcaggagtcacgccacccttccgttccgataccacaacacaacattaaggttaatgtgtaacagtttgttgttagctgtaagctagcatatcgtgaggagaatatgaaattgactctttactttgctgctgcagttataatactagcattgccatgccatatctcaagctaccaaatgttccctctccaa

SEQ ID NO: 49246 - DNA, 331 bp, Glycine max
  Clone ID: LIB3107-042-Q1-K1-E2
tgggagagcttatagtttaagagcaagagctatggaaagggacaaacgggccttcttagatctcaagggccttaccctcgttctctcctaactctcactttgtcttcttatttgctccttttcttctctcttccctccccaattatttcattccctcatggccaccactctttattcaacgccttgtctttcactggctacttcatcctcctttttctcttcttatcaaccctgtcctctgtcctctaactcttcttactctcaactcattaaccttttacaacgctttttcgccttcatagtctctcttaaatcttataccctcacctta

SEQ ID NO: 49247 - DNA, 420 bp, Glycine max
  Clone ID: LIB3107-042-Q1-K1-E4
ccatggatgactaattaattatttaatataaaaaatgggttcaagccatttaaactgtatttaactattaatgtactagtttaaaaataaaaatattaaatgtgtaaatggtgcatttattactttactaaaattagtatattaaatgaatatatcaattactatttggcaactaatttcccgcatgaccctaattagcacatataccttaaatttgtttttcttattacattttaaaattatcaaaatagataataatttggtaaatatacatgttatcattatctttttgacattttaattttcccacccaattgaaggttagttttatcaatttacttgagaatttctaaagcccattaatgcctaatgcaaatggttttttcctgcaacaatttatgagatttttattctataatt

SEQ ID NO: 49248 - DNA, 149 bp, Glycine max
  Clone ID: LIB3107-042-Q1-K1-E5
tggcgagctagcattttcagacacataaagaggggcttgggatttactatattgactcgtgcggctcttactcttctctttttatccatccctcattcctaatccttcaattcaaccacctcatccttacactcacatactcacatatc

SEQ ID NO: 49249 - DNA, 164 bp, Glycine max
  Clone ID: LIB3107-042-Q1-K1-E7
tttggacagggcattgatcttctttttgaattgtggcctagggattaaagtactgagattggtagagattgcatgtatgggaagcttaaaatgcctttagaagctttttaacttcatattgacccttactggattagccattgtagtctatggaatctataatt

SEQ ID NO: 49250 - DNA, 404 bp, Glycine max
  Clone ID: LIB3107-042-Q1-K1-E8
tttattacgattaaatttccatttttgttcacatgactgtcgtcactatttacttgccctgacgttacaaaactctcaattcactccctgaatttgtaaaatttctattttggtccccatgactgtaagcactatttacttactctgactttataaaactcttaattaagtccttgaatttgttaaatgtttcaaaatttgtttctcttttgtcctttttcgctggcattagggattgaaatgaatgaaattttacagcattttatggagtcatgtaccatattgaaagtttcgtaaagtgatggactaaagtgaataacacttacaatcttaacaaaaaagtgacatgtctactcaattggatatcaccatcatgttgtgatcatattcaatgtattcaaact

SEQ ID NO: 49251 - DNA, 373 bp, Glycine max
  Clone ID: LIB3107-042-Q1-K1-E9
taattcccggctcgagccgctcctaactacactcatacataccacaacgagacatacgactttcacacatcacacttccgacttaagagcacgtcaattatctactgcctgtgggagcttctttgcattaacagccactaactcaccaatcttaatccttgtttttatcattagatccatacataattacttattgacgaacactttttctacacctcataattccaccttcaaattcttttccatcaatttcaccatagtgattgtctaatctcaataatgggattgtcactatagatatgactatgagtccctgaaatgtatatgcctgttgctacctctgtcattcatcaccataagattgcctacttac

SEQ ID NO: 49252 - DNA, 356 bp, Glycine max
  Clone ID: LIB3107-042-Q1-K1-F1
acatattgacagccttatgttaaatggcgcttaggaatttaatttagggttggattaaatggctgaattgataaaggataaattctcgtaacctaggataagagacttgcttgcgaatcaagggggaaacaacgtgttttaattatgatattttctaattaaatttgctcgctatttaatttacaaaaacatacaaccttcctctcctcaattcgttattgtctaattactattatgttatgaacgttttggctaaccattgcttcgtgggagacgacctaagatcactttctaaatactgcattttaaaaattcatttgattcgggtacgacctttatcaaatttggtgcccttt

SEQ ID NO: 49253 - DNA, 451 bp, Glycine max
  Clone ID: LIB3107-042-Q1-K1-F10
ctcagatgcgagtgtcaaatttttcataactcgtcaggcaaaccttgttcttcctgttgaatgatttaaacatggcagcagtgtggttctttttgaacatatatagctcttccctttgtctcatatgaaggcactgaagattctgaaatccaaagtacattagtttaccttcatgggtacttcaacaaaatgtctactcactgtcatgctacgtacctttccttcattagaattacatacaaatgaacagagagagtaaagaatgtaaactaaattatggtatagcaataataacatcatacaatagtcacattaaggaaatatggcacgggaaacagtaaatgattcgtatttcaattaaggataatgcaaatggttcccgtaactgttgtactaactgtgctacattccaatagttttttttgcaaatgtcacacacatgaacatgata

SEQ ID NO: 49254 - DNA, 443 bp, Glycine max
  Clone ID: LIB3107-042-Q1-K1-F11
ggtttgcgtttgtgtttggtcttagacgccgcacgcggccaccgtcactgtttcagatcctcgaactgtgtcttcttcgctttctggtctttttattaggttttgttcatcgatccatcgccaaacatgccttccagtcacttgcttctcgaggaacctattaggatggtctccatccttgagccatccaagcctagttttttctctgcaatgacaaagattgttggtaccctgggacctaaatctagatccgtcgaaaccatttctggttgcctcaaggctggcatgtctgtggctcgttttgacttttcatggcatgaccctgagtaccaccaggagactttggagaatttgaaggctgctatcaagagtactaagaagctctgtgctgttatgctggacacagtgggcgctgaaatgcaagttgttaacaaaagtgagag

SEQ ID NO: 49255 - DNA, 372 bp, Glycine max
  Clone ID: LIB3107-042-Q1-K1-F2
gtccctatctttctcgctcacatgtcactttttatcggtgatgctgttaactctttatctatatatgcctctctgatgccgattggtgcctccaattttccggcaagcttcaaacttaccttcttctgccccttttcttatcactttacctgtattaatcgttttctactccccctatgcttatttataaattctatatctattcgtcttatctcacgttttatccaaaaccatgttccacaatatgtaaataaaccacctacttcattctcataaaccttaattctattttccttccaattttttaacacttattgcaattttcaaatttctacagcttataattttttattcatttcttttttttaattt

SEQ ID NO: 49256 - DNA, 211 bp, Glycine max
  Clone ID: LIB3107-042-Q1-K1-F3
cgtatggcccacctactatacactcagaaaagacaaattggggtatatatgtttgtgaaggagctttatatgatgcaaatccatgacaaaagctacagaaaaccctttatagaaacacctactagctctacatgactatcaatcattgcttcctcaacgcaatcatgaaccactttacaacgatcttactgcttctatgggccttgataac

SEQ ID NO: 49257 - DNA, 423 bp, Glycine max
  Clone ID: LIB3107-042-Q1-K1-F4
ggcagcgcttgatttgaggccaggcaagccccactcaacgcaccagagctctcctcgttcacgctacccctttctgctcttcttctacctttcaagttttaaaagtataaagatggcagatacattcctatttacctcagagtcggtgaacgagggacaccctgacaagctctgcgaccaaatctccgatgctgtcctcgacgcttgcctcgagcaggacccagacagcaaagttgcctgcgaaacatgcaccaaaaccaacttggtcatggtcttcggagaaatcacgaccaaggccaacgttgactactagaagatagtgcgtgacacctgcaagaacatcggcttcgtctcaaatgatgtggtactggatgccgacaactgcaaggtcctcgtcaacattgatcagcacagtcctgatat

SEQ ID NO: 49258 - DNA, 213 bp, Glycine max
  Clone ID: LIB3107-042-Q1-K1-F7
gctatctatatatatatctaactaatataggaatctgggaaagatgattagtctaggcataagaggagatgagatcatatgaaatatttaaccgattctttcctttgtttgggctactggccattcgccggaagttacgggtttaataccgatattttagcaacaaatctaataaatcttagtgttgtgtgaagagtattggttttttttgga

SEQ ID NO: 49259 - DNA, 303 bp, Glycine max
  Clone ID: LIB3107-042-Q1-K1-F8
cgggaggaaaaacagaaaggagggtttctgtcttcaaattttgagggagtgttgtgtaggatataatagctagggaaaacggacaacagtgtggatggttcaggaggcaatggagggtgtaatttcttctaaagggatggtttttggagagaatacatgtagtagtggagtttgaccaatgatgatgatgcctttagtgacttctcatcatgttgatcatcatccattaaatcatgctattcttaataatcccaatcctaatgaacacacagacactatattccttgccatgccttgtactaa

SEQ ID NO: 49260 - DNA, 423 bp, Glycine max
  Clone ID: LIB3107-042-Q1-K1-G10
tactgctgctataagactacagaatggctcattttcatgggggattatctctagtccggaatgcaaagtttatactataagagagaggcattactccaactattgataggattgcaaaataccttaacatgtctcaaaagaaagtcagaaatgctactgatgcaatcagcaaaattatctcgcttgatatataagcatttccctctctgaatggtctacaaggagaaactcatcataattatattgcagataatcttatggagaacatcccatggaatggagtagactagtggacactaaatgatgaagtgaacagactcattaatgttacccttttggaacgagagaaataaatttatcgaccttattattgactggaaaaagaatgtcttacctgggaagacataatcaaactgataagtt

SEQ ID NO: 49261 - DNA, 415 bp, Glycine max
  Clone ID: LIB3107-042-Q1-K1-G11
ggggaagttgtaggggtttcaggtcacgcattctatcgctgggtgtgtcgagtcaacaaaacgccaccgtttcattgatctacttcctccaaggccaggtctccaagaattggtaccaattcaagctgcaaatatacttgaacttcaacttatcccacattctccactctcaatggcttcaactctcaaatctggcggaattcatacaggggcaatcaatgatgatttatacaaggaattgtggcatgcatgtgctggtccccttgtcactctccctcgtgaaggggaacgagtctattactttccacaaggtcacatggaacagcttgaggcatctatgtatgatggattatagcatcagatgccttccttcaacctgccttctaaaatattatgtaaagtggtcaatgttcat

SEQ ID NO: 49262 - DNA, 395 bp, Glycine max
  Clone ID: LIB3107-042-Q1-K1-G2
ggaaaacaccgccggttcctcggcaccgacggcaacctcttcgtcgctgccaaggccttcgccgccggcgtcattctcgccaccggattcgtgcacatgctctccgacgccaccaaggcacttcgccacccgtgcctgccagcgttcccgtggtccaagtttcccttcaccggtttcttcgccatgttggccgcgctcctcacgctcctcctagatttcgtgggaacgcaatactacgagcgcaagcaggggatgaaccgcgccccctccgaagaaccagtacgggtcggctcatccgaacccggtgggaatgggaaggtgtttggggaagaagaaagcggcggaatgcacatcgtggggatgcatgcacatgctgcacatcatagacataacca

SEQ ID NO: 49263 - DNA, 383 bp, Glycine max
  Clone ID: LIB3107-042-Q1-K1-G3
aaggcaaagttagaagagactcagaaaagacagattgaggtatataggtttgagaaggaactttatatgatgcaaagccttgttgatggctacagaaaagccttgaaagaaacacggaaggcttttgctgactatagagcaagttgtcctcaaggtgatgatgaaccactttacaaggatcttcctgggtctgggggccttgttttgactgctgtggaggtggaaagggaacagctgaagaaggaagctgaagaaagggcaaagatgagagattttatgatagattatgaaaagaagactacagattttgaatccacttggtttggtaaatttgaagctcatatgagtacaagtgaatccctaagtcataggttgcaggtttt

SEQ ID NO: 49264 - DNA, 360 bp, Glycine max
  Clone ID: LIB3107-042-Q1-K1-G4
tctgaatgcgggtttattaaatctacattagttggtatactcccaggggtctggctgacgacagaataggattaagagctttgaaattctggcacaaggtcttattgtctaatagaatattatgactgatgggggtattactatgcaattaactcctgaaagcttatgatacttggatttgtatccacaactgaaaatgtccttattcaaaaatccttacattctcttactgactgctgtaatctgcattcttggtctcctaatcatatactacactgttttgatatcacttgctcttttatacaatattgatgattttttagtattttatatacagcattttatttctataaacaattt

SEQ ID NO: 49265 - DNA, 255 bp, Glycine max
  Clone ID: LIB3107-042-Q1-K1-G8
gatgcattgctaacatagactctgcaaaggcaaattgaggcctatagcacactgaagcagccatatatcatgcaacaactgaatcatagcgactgaaaatcatgtgatgaaactcagatagcttgaggtctatatatatcaagctgaacgcaaagggattaagaaccattatacatgtacctcacgtcaaaagtcttactagagaaaacggctcaccacatgtaacggacacagatcattgaccgaacctaaaat

SEQ ID NO: 49266 - DNA, 388 bp, Glycine max
  Clone ID: LIB3107-042-Q1-K1-G9
gaagatggtgtttcatcagtagccacaaactgagagcgtctaaatttacactcaggtgatcaggggacagaaccagaggaggaaaattcttctgtagtaattccaaatcatttacaactccattccgtcgaatgcttaaatctgagctttggaagttttggatctgcaaatgatgcttccctttctggatctggtccgtatgcatctaggcccttgaaaagtaacttggaggatacatctggagctaacgatgtttcaacaattgggtcctcagatgttagaaatcctgactattatgccgatgagcatcttactactacctcggatgggaatttagctcacataactggttgtgattcttggacttatgagcattccttcatttcac

SEQ ID NO: 49267 - DNA, 355 bp, Glycine max
  Clone ID: LIB3107-042-Q1-K1-H11
cagttgagtcctatttatgatgtggctgctatactcgcatggatccagtcatggcgttggtgatcccaacccaaattctcctgcaaactctgaagcagctctaatgtttattgagaacaagcgtgagtacaatcgaagagttagggaaattgttgatcatagttttacagcatattaagttcatccttatatgcatatgatgctttcaaggcatgaatttggtttcattgatggcaactataacaatgattgtgcaaactcatcacatttatattctctgcttatatgaatgatagcatcatcttatctttaacttattatagcttctgcattgcatatttcatctaatgtaaaa

SEQ ID NO: 49268 - DNA, 236 bp, Glycine max
  Clone ID: LIB3107-042-Q1-K1-H6
tactgtccaatggtttctaagtggcgaatcgagtacacatcatatggaatccggtccctctgacactgaatgtttagcatacatctttaaaattaagggacacaactgttcattataaacatctgtataatctatcacactaatactgcaatctaataccaattagtattattaatgaatattgccaacagtcacattttatcattcggatatttaatgtccatcaattgcctata

SEQ ID NO: 49269 - DNA, 326 bp, Glycine max
  Clone ID: LIB3107-042-Q1-K1-H8
ggaaggtgaaggtgatgatggaattggaagtcgacgagaacgacttgaaagccgccggtgctgagctcttcgtcgacggtggtcggcgcggcattcgcatcaatggctgggtgatcgagactcggaggcactccatactcaactcttccacactccaagagtgggaacagaatctcgatacgtctcatttaccagaaatggtttttggggaaaacactttgattctaaaacacttgagcagtggcaccaacattcattttaatgcatttgatgctctacgtggctggaaacaggaagcattgccgccagttgaagttcctgcggcg

SEQ ID NO: 49270 - DNA, 447 bp, Glycine max
  Clone ID: LIB3107-044-Q1-K1-A1
gattgaagccaaagaaaaagagacaagaccaaaggcaggtgtggaaggaagaagaaagctctcatcgatcggtgttcaactttaaacactcaggaagagccacaaaattcttctttctgcagggtgcaaggtacagcttcgatgggaaattgctggggttctccacctcacaacccaaccccaacaactaccggtaaccttagtacaggtacgacggggacatctcaggcgatcagcagcggtagctatactactactactacgacgactactacttcttctggaagtgggagcagctccataaatagcaagttctcagtgtcaagcggtggtcagccttatccaaatggacagatcttacctacctctaatttgaggatcttcacttttgccgagttgaaggctgcgactagaaatttcagagctgatacagtgcttggggaggga

SEQ ID NO: 49271 - DNA, 213 bp, Glycine max
  Clone ID: LIB3107-044-Q1-K1-A10
catatcaccaatcttcaacaaatgtcttggggaacacgggcacatgcgagtacgcatactctctcatttactcagatgaccaaaatttcgctctatctggcatacccaaatcattcttatattcttccttctaacaagaaccctctgtcaattcttcacgacggacatccttgacaatatggacgtactacttttctcaccaaactagtttat

SEQ ID NO: 49272 - DNA, 143 bp, Glycine max
  unsure (1)..(143): unsure at all n locations
  Clone ID: LIB3107-044-Q1-K1-A11
aattgtggcacccctttattccattccanncaaggggcactcagccaccacagggttgcttgttcacactacccctttctgctcttcttttacctttcaagttttaaaagtataaatatggcaaatacatttcctatttaacc

SEQ ID NO: 49273 - DNA, 365 bp, Glycine max
  Clone ID: LIB3107-044-Q1-K1-A12
aaggtgtggctgatccaagggtatctgtgcggaaccatgctgataggcgaccccctgttctacatttaccaaaaagtatatacctcaacttgatttcgtcaccccgtgctgcttttaatcaaggttttgggcatcttccatcttctagatttagtggcagaagtgcttaaggagcctctcctgtatctggaggggcaccaactttatcagagagactcttgatacaccgtcagattcaacaactactttcaataaataggatggcctctacacctggcataaccaatggtatttctgctaccagtttaactagtaactttatatagctctctctttgatcaaaggtggggaaccaccactcttca

SEQ ID NO: 49274 - DNA, 76 bp, Glycine max
  Clone ID: LIB3107-044-Q1-K1-A2
ggctgctaatactctacataatgatattgcttaacgaggacatctgattactatggctgtactatgactatataag

SEQ ID NO: 49275 - DNA, 421 bp, Glycine max
  Clone ID: LIB3107-044-Q1-K1-A4
gcctacagatactaataatatttacatttacgatcgaatagatctgagtactaatactatactattactaaattaagaatagaatagaaagaatttgtaaatttctatcggaacatattaatattcgatagaataatactaatagtagtatattcagatactagtctaaaaaaacttatactttattatttaaacgttagactaataattaatactaatccggtatattttccacattcagaggagtacgtttatgttttttctttacgaatatgatattttttgggcatttctaataatatcaagttatattcctattttggcatttctaattcctggaattgtagccccggatagcaggggaccagataaactttctagttttgaatagggaatagaaccaataggtgatgcttggtta

SEQ ID NO: 49276 - DNA, 317 bp, Glycine max
  Clone ID: LIB3107-044-Q1-K1-A5
aggactggtgtaatgtgatgtaatcttttggttgttgatgaattctttggtagggtataatagatagggtttactatgcattcgaaccaatagttgacacatgaaaatgataatgaatggacaaatgtgttgtgttaatggtgcccatctaagaattagtcttgttttccaacttttatggggattgaaaaattctttacttacacatttggatccgaatgagatgtcaactattaatatttcagatggaagcacagttggtccatttattgaaaagaagataaaatatagctttcatgagaaagctaatataaact

SEQ ID NO: 49277 - DNA, 424 bp, Glycine max
  Clone ID: LIB3107-044-Q1-K1-A6
ggaatcacagtggtgccttatcgctgtggttttcatcggcttccttctcttatatttcttttttttttttgtcttcgccgcacgccgaaacaatggccggaaaaggagagggtcctgctatcggaatcgatctcggaaccacctactcttgtgtcggtgtgtggcaacatgaccgagttgaaatcatcgccaacgaccaagggaacagaacgacgccgtcttacgtcggcttcactgataccgagcgtctcatcggtgatgcggctaagaaccaagtcgccatgaaccccatcaacaccgtcttcgatgccaagaggttgattggtcgtagattcagtgactcctctgttcagagtgatatcaaattgtggccttttaaggtcattgctggtgctgctgacaagccaatgatcgtggttaacta

SEQ ID NO: 49278 - DNA, 278 bp, Glycine max
  Clone ID: LIB3107-044-Q1-K1-A7
gactgttaaataaacctaatctttgtttaactgggtttgcaccttgatgaggggagcctgcaacctataatagagaggattttgggaagttgcagtacggatgcgagcactataagagacgatgcaaaattcgagcaccatgctgcaatcagattttttcatgttgtcactgccacaacgacgccgcgaactcatctagcaaccccgcagatcgtcatgaacttgttagacgcgatgttaagcaagttatatgctctgtctgtgatgcttaacaagat

SEQ ID NO: 49279 - DNA, 293 bp, Glycine max
  Clone ID: LIB3107-044-Q1-K1-A8
atatgatacactatatccctctttctttctctctgccaaaacgagtatttgggggaggattacattcatattgctaccgttgcaaccaccatccttatctttaaactctaaaaatgcatcatctaaagctacaatactccttcaattataaaccctattcatatgcataaccccaacaccttactctcacctataaccgctttcgcaactcttaatcttcttattatgtagacagataaaaataaggttgaatgataaaacaagtatccaagttcgatatctaaacgtactaa

SEQ ID NO: 49280 - DNA, 454 bp, Glycine max
  Clone ID: LIB3107-044-Q1-K1-A9
aaatgacttatatttgatcaatgttgtggtggacatgctgactgatgttgaggtaatgttttgtaaagcatgttgaaagcattattgctatatctgttaccctcaacttatatcttatgcaggcatgttccaaggtccatcttcctatccttgactacgatgatccttcccaacttgaacctgtaagttgacactgtgacaatgttttccaaatctaatatgtgtcggtagaatctcattgaaaaacttcgctacctctattttcaaaattaagctattgatcgatgtttgagttatgcagcacacttgggacctcacagcagatcaaggttttcttgtggacaccccaataacaccaacaaagcggatgacatctgatgaatgtgatgatgaaccccaaagctctcaaatttcacccgcccaactttcatctaacaaattaacatgacatgat

SEQ ID NO: 49281 - DNA, 430 bp, Glycine max
  Clone ID: LIB3107-044-Q1-K1-B1
gactgtgattattatttgataagtagtattgcttattctcttgtggttttcgtgcggaatggtagcattttcagtagggtcttcaatgattaggatcattgatgagaaatttgaaagcaggtatatacttacacaatgggtttgaagtaacttaaaggcaaactttatcatgattcacaaaaggttgggatcattgttggtatgggatgtcgttatacaatatcctccgaagcatgataaagtatgtctttcggttactttgaacccatattctacaataactatatatctgcttttaaattttcatcaatcactgaagacctcttgaagatgttgtctttctgtgcttaaaccacacgagaataattagtactacatatcaactaatgcaacactcatgatattgaattactaatctatctataatata

SEQ ID NO: 49282 - DNA, 340 bp, Glycine max
  Clone ID: LIB3107-044-Q1-K1-B10
gacaccaacaccaaaacaaacccactaagagggcttcctttgtatccttcctagtgctgcttcttgcagcccttatgctcatgcctcaagggcttgctacttactacaaaccaattaagaagccaccagtgtacaagccttcaatgtacaagccaccagtgtacaaaccaccggtttataagccaaaaccaccggtttacaagccgaaaccaccggtttacaagccaccatataacaagcccccatacacgaaaccaccttatggaaagtacccttcagtagaggacaacacccatgcctaaagcgagcaatgaggtctattatctacttacataataag

SEQ ID NO: 49283 - DNA, 214 bp, Glycine max
  Clone ID: LIB3107-044-Q1-K1-B11
aaatggcaatcagcaaggaccacctttcatggctaagtactcttggataaccgggggtgaattattaccgtcagggaaaggttaaaacaacccctatctgttagtgaaatataacatgaaacctttagctcccaatcaatgtgaggagtctcaaaactattaccgcgtgccctttgaataaataacctacgactcataggcaatggcttggtta

SEQ ID NO: 49284 - DNA, 317 bp, Glycine max
  Clone ID: LIB3107-044-Q1-K1-B12
gaacgcaaaaccggatggcacaacatgcacatccgcattgtaaaactctctatacataccaaggtcccttcctttcctctctgtctcttgagcaatccctttcttcttcgctgctcaggtgcaccttctgtaataacagaaactcagcggtgtaaagttatcagaaatagatgaaacatcggttataaatatataatgtctggactgatcgaaagacttactgatgctgatgcaattaagtgccttgcacgtgtttccttgtactttcacccagtgatagagctagtctctcgatcttggcaagcagctattcgtag

SEQ ID NO: 49285 - DNA, 117 bp, Glycine max
  Clone ID: LIB3107-044-Q1-K1-B2
gccggctgcgggtatacgttgttttgttgcataaaggaggcctttggttaatattgatttaataagtttatttaaggttacagtaaatggatgaactgctaatggattaactgtcat

SEQ ID NO: 49286 - DNA, 442 bp, Glycine max
  Clone ID: LIB3107-044-Q1-K1-B3
ggtggcagttgtgtgacacagaaattaagctagagcgggatagttgcttcttctggtctcaccttccttctctcccttcagacaaagggacaaaaaatcagtgtgtgagagagagagagagaaattccgaaaccatgtcccacagtcatctaagtttcgcctttgggattctaggtaacattgcctccttcgtgtgctttctggcaccactaccaacattttatagagtttgtaagaagaaatcaaccgcagggttccaatcaattccatatgtggctgcactcttcagtgcaatgctttggatcttttatgcctatgtgaagaccggagaaacgctctttatcaccatcaatgcattcgggtgcgtgattgagacaatataccttgccgtatttatcacttactgcccgaagaaagctaggatgacgacattgaggatgat

SEQ ID NO: 49287 - DNA, 428 bp, Glycine max
  Clone ID: LIB3107-044-Q1-K1-B4
gacactaaacacgttaaacgaagagcatcactgaactgacaaagcaaccctatgtcgaaggcggtttgtgtcaccggagccagcggcgccatcggatcatgggtggtcctactcctcctacagcgtggttacaccgtccatgccaccgtccaagatatcacggatgaaaatgagacgaaacatttgtaggaaatggatggagcaaagagtcatctccatttttttgaaatggatcttcttgacatagactccattgccgctgccataaagggttggtccggcgtaatccaccttgcatgtcctaacatcattggtcaagtcgaagatcccgagaaacatatattggaaccggcgataaaaggaacggctaatgtgcttaatgcggctgacgaagcaagggtggcgcgcgtggaggcgacttcatcgat

SEQ ID NO: 49288 - DNA, 403 bp, Glycine max
  Clone ID: LIB3107-044-Q1-K1-B5
ggtccctagtggaagcaagcaagcaacaagataagaaagcaaagaaggagagagagaggatgacaccacatcctctgttttctttcattcccattcttagttttccctgccattcaaattttcacatgacctctcattattattctttttattattattagttcttttttgtttccatcaccaaccaacctctcatctttggatggtgaattccccatctgagttcctttgatctcttcgccttctctcaatttcttcttctctgatcccagcaaagaaaagaaaaaaaaaacaaactaaaaaaaacattagaaacaattgttttttttaaaaaaaaacatagctgcttggttttccctctttgctggattagatattatggctcagttttttttattgatgc

SEQ ID NO: 49289 - DNA, 431 bp, Glycine max
  Clone ID: LIB3107-044-Q1-K1-B7
ggatggcaagcatatgtagcatacatgaatataggatgctactaccttatcgggctcccctcggaattatcatgggctgggtcttcaaaagtggtgtaactgtaagtataatccgctacttaattatcacatctaaacactgattttgggtttgaataattcttaagtggtgtgctgacatgggaatgatatgcatggcagggaatcttgggcgggcatgatcttcggtggcacagcaatccaaacgctgatactgattatagtaacgatacgatgtgattgggaaaaagaggtatagttttactgttacataaataatccggagcttattccaaatccttatcagcatcacttggcatattgacaaacttgaaattaagatctccacataataagttattcatatcaatagcgtaaatatgcatgttcta

SEQ ID NO: 49290 - DNA, 363 bp, Glycine max
  Clone ID: LIB3107-044-Q1-K1-B8
cttcggatcaattctatatactgtgtatgggtatccatgaatgtgcatgagtatgttaatatgaatgcatttaaccaacatacattactttatatacactgttcattttgcaggctcaagataatattattaaccttccattatcaaaaggatggggtgaaaaacatcatctttttgtgaaatggaagtatattgaagcaaatgcttgagttttaactcaccacacatttgcatcttgctatttaattattatgtattagtatatctgaatacaattagagtggaatttgctgaatacaggctgccttttgactattaaacgcagatgaagtataaaatgaatcaaattaatatatggtccac

SEQ ID NO: 49291 - DNA, 435 bp, Glycine max
  Clone ID: LIB3107-044-Q1-K1-C11
ttgggacatataagacaaaattctaaactagaggagtctatgagatgagaggtagaaactgaggacttatctagtagttagagatgcctgagttttgcgtgacaggtggtactgggttcatcgcatcttacctggtcaaggccttactagagaagggtcacacagtgaggaccaccgtgagaaacccaagggatgtggagaaggttggttttctgactgaactaagtggagccaaagagagactgaatattttgaaagcagatctattattggaaagaaactttcatgaggcagtgaaaggagtttattgtgtctttcataatgcgttccctgtgcttatttcttatgatgagaaccgttcaagtattttgccctttataccccacttgtagaatttttgtctttatctcaatgggctttcttacaaaaaaaata

SEQ ID NO: 49292 - DNA, 277 bp, Glycine max
  Clone ID: LIB3107-044-Q1-K1-C12
taaaacacgtgggaccacgaccacaccccgcgcacataggtactattatactctctaaaccaacaaccaaatcttctataattttctaatctttatgacacactgttcacatcctacagagcaaggtccatactttgtgaacgactacactgaaccaactacgctaatctttaccgacctagactttcacacactatataacatgtacagagccgccataacttaattcatagcaacactcctttttctttacatcaccgagttgaccattattggc

SEQ ID NO: 49293 - DNA, 309 bp, Glycine max
  Clone ID: LIB3107-044-Q1-K1-C2
ggcgactgcgcctttacatcttattgcgccacccatgcggactctgctccctatgctgcgagacagtgtgatcaaaataaagagacatggaccccacactcttccactctttgttggacggcaagtgccatgcgctctacactttacctattcatatgtacactctctataaggccccttcactccttgtatcatgatcgggttggaggcatgctattctaacacactatggccaatggttcaacaccattttttgagattgcgtaaaaggcacaagagcttttatacatggattacaacttagatcac

SEQ ID NO: 49294 - DNA, 323 bp, Glycine max
  Clone ID: LIB3107-044-Q1-K1-C3
ggtgactgctgcttgacaccatgatgcaccagcgctagagacactggactctgtggtgcgagagtgtgtgtccgagagcgacagacagccaccccaaccactggctgttttagtttgacgggggtgacatttactatatcttttaccccattactcgttccttctaaaaacttacgttgtagctctaacatgataattgcgtgtgcaacgttctatgctaattcactatggcatatggcgcttgcacgctttgtgatattgaatacagggcaactgaccttaaatacaaagaactcgcctaccctcacgtgtagaggctctta

SEQ ID NO: 49295 - DNA, 334 bp, Glycine max
  Clone ID: LIB3107-044-Q1-K1-C4
ggctgcttttgcttttcactccttggacaacacaacggcagtccttccccctgaggtttgtatctgacaaaccgctgctgacactttcatgaaaaccataggatcccgagagataacaggtgccaatgatgtcaaaaatgatcgaggagtgacacgccctgattggcgatttccacttaaagtttgacgtatttacaacttcatggctgttcgtagagtttgacagatcttcaaggagatgccggactatttctgactcaactgtgtcatacccagggaaaaagcaagtccttggaagattaaaaagagcagccaaacttcttttttaaggaac

SEQ ID NO: 49296 - DNA, 457 bp, Glycine max
  Clone ID: LIB3107-044-Q1-K1-C5
agaaaaggttaataatgatagacattcctcttgatgacgacaaggatgatccagacttcaacaagtatggcaagagagatcacactaggattgataatcatatgcttgagttatgtgaaactgatcagcatgatgttactgaagaaaataaacagaattctgtttcactagaggatgtaattacatgccatgagtcagaaagatgccaaaattactcttcagaattggagacagagaaggaattaggggttgacaagctagagttatggaagactcgaaaagagacaacaagtgaagatagcaagaggaaaattctggagaggcttgcctctgattctcagaggcttgccattcttaaaataacatgaaaactaattttggtaatatagttatttttttaatacatcgctgaaattagtattcctgagatttctgaaaaaagtagaacaaaaatatg

SEQ ID NO: 49297 - DNA, 379 bp, Glycine max
  Clone ID: LIB3107-044-Q1-K1-C6
gacagcggaagaatacaccgccacacgctgcaggccctttaccttgtgcttcctgcgttcctgtgagaacccacgttctctaacgcgcttctccttcaaagttcaaattcctatacatttgcgtaatcgcttctcaaatctcaacaaaagtattcccaaaaaaccctaattattattattaaacatgaggccgattctgatgaaaggccacgagaggccactgacgttcctcaagtacaacagggacggcgatctccttttctcctgcgccaaggaccacaaccccaccgtctggttcgccgacaacggcgaacgcctcggcacctaccgcggccacaacggcgccgtttggtgctgcgacgtctcaagagattcgggt

SEQ ID NO: 49298 - DNA, 458 bp, Glycine max
  Clone ID: LIB3107-044-Q1-K1-C8
gacgacagacgggggctggcataaagtgccctttgttgtgcaaagagttcatcatagatgcatggcaactctactatgctcgaactaaaggtgcagatgcagaccttttaattgctgctgttttgcctgatcttgacatcaaatacatgatcaagatatgcaaattactgggattgactgcacttgttgaggttcatgatgagagggaatttgatcgtgttcttgcaattgaagggattgaacttattggcattaacaaccggaatatcgaaacatttgagctggatatcagcatcacaaagaagcttcttgaaggagagcgaggcaaaataatccgcgagagaggcataactatggttggagaatctggtctgctcacccctgatgatattgcctatgttaaggaagctggtgttaaagctatattggttggagagtctattgtaaaacaaaatgat

SEQ ID NO: 49299 - DNA, 217 bp, Glycine max
  Clone ID: LIB3107-044-Q1-K1-C9
acgcgtgaaaacaacagagaggggtcattgaatggctctttcttttttccagggcctttcatgtataccgggcagcctgataatgataatgataaagaggatcatgctcacctgctctgtgcataaccatgtcttgatcttataacaaaaaactttaactactcaagctatctactacttatgatagtcctagggaagattaatgaacatacccaat

SEQ ID NO: 49300 - DNA, 458 bp, Glycine max
  Clone ID: LIB3107-044-Q1-K1-D1
atcatcataaaaaaaatattttattatgaaacttattcaaacactataaatccttttcatcattaacttgttctgaaaatcaggtccaaaaaggaggggaaacgatcctaaatactgctgcagaaaagaacaatggtggcatggtcacagaaagtatgaaccacaggagtgatgccacaaagaataatgcaacgaacgataacctcaaacgtgtgagaaagctgacaaatatgacagaaaggttaaccaaatctttgcttgatggtgttggaataatgagtggatcagtgatgactcctgtgctgaaatcccaaccaggacaggcattcctaaatatgctccctggagaggtgctgttggcttcccttgatgccgtcagtaagtaacaaccaaagtctaaaatattactactatacggctagcatatatggtcttcatattatgaaaatatcaagaca

SEQ ID NO: 49301 - DNA, 365 bp, Glycine max
  Clone ID: LIB3107-044-Q1-K1-D11
ggatgcaatcaagaatacaatggcgtggcatagagtgagaagttatataataataatgtcaatctacatacttattgaactaatatttataaatagacagtgattagtgcctgttttcaactatctagattaaatgattacacccgctactgatgacgttataatgattaatgaaaactcgtctaatcacactgtctttcttgcggttgatgctgctaaaagagcctttttccataacaaaagcaaagattggtcttcagctcctggctctgttcgagctcgctatctattagccattcattccaagataacagataaaaaagatgaactattaaagcttgaaacaatttattgttgaaaatcac

SEQ ID NO: 49302 - DNA, 455 bp, Glycine max
  Clone ID: LIB3107-044-Q1-K1-D12
tgatataaaattaacattgaattttgacctgttgcataatagtttacgatcagcaatcatggttaatcacctatctttctataaataccacaaaattgaagctgaacgcatgagttctaatatatcattcaaaagtttttgaaatgttgtcaccccttcttctatttctatgcctaactcttcctttgtttttgttgtccttcttcaaataccgcaaaaccttcaagaatccaccacttccaccaggtcctaaaggccttcccataatagggaatcttcattcaactatatagtccttctcttcatgatcagctatggcatctcttaaagaaatatggtcctttattttcccttcaatttggattaaagccaaccatacttttttcctcttcaaaattttccaaataggtaattaaagacaattaccttgaatgcttttggacgacctaaaatac

SEQ ID NO: 49303 - DNA, 428 bp, Glycine max
  Clone ID: LIB3107-044-Q1-K1-D2
gcccgcagttaaaattaggcctgcttgcccaggactgggtcgtgtgcctactccatatcgatcaaagttgaatcgtgatcctattaatggagcacattcaatgaaacaccaactagcaccatagagaagcggacataaactgtataatcttgaccaattcaaaagatcatttaaggcagttgaaataactgaattatcgggtgttagatcaactatgggaaactaaatggaattcataatcgtctccatatttttagatagcggtctaatctaaatgccttaatatgccaggaattcagaccattctaatgccctatattgccatgcataaactgcactaacatgtaggataagcacgcatgttaaagctgttataaacacggtgaccgctaattcatccaaactcattgcccaagaattattaaaat

SEQ ID NO: 49304 - DNA, 456 bp, Glycine max
  Clone ID: LIB3107-044-Q1-K1-D3
ccacaatacaacttcagtttcaacagcgaatctctcttttttccattctcatgcctcttgtcttcttgtaacacacccttttctcttttctctctaactcccctccaagaaattctgagagaatagaatagaaaagagggtgagtggttttttgagttttgatagaatagctgcatggggaagctggttgagattcttgaccaaggggtcaggattgctgcaaggtttcactctaattgcccccaaacaggccgtaagtactaccaccctccatccctctacgacaaccacggccaccactaccatggtggagccaacacaagcagcggcctagtcaaagatgctcgcgcggcgaggagccttgacgtaattctttattctgtttgacagaaccatatttgcttattttttggctgttcgattcaatcattgtaaggcgtttcatacatgtatttt

SEQ ID NO: 49305 - DNA, 392 bp, Glycine max
  Clone ID: LIB3107-044-Q1-K1-D4
gtggtgcatacaggaagacatgtcaatgaggccatctatgaccagagttgtccaaatgttggagggtatttgtattgttcctaacccaccaaccagttcttcgttgggttctcgcctttatgccactgtgttcaaatcctccagtgaaggggccacctcttctggtccctcagactgtaccagtgatgcttatctctccgcggttcgcctttcagggcctagataacaatacctgtctcttttgtttattttctgtgtgttgtattgttgagtaaattagtttgtgtaatacagcagagctactctggattgtgtgggctttgcatgcttccagctcttgtacattttgttcaagttcctcaaattttgtaatataaatagctattcataat

SEQ ID NO: 49306 - DNA, 459 bp, Glycine max
  unsure (1)..(459): unsure at all n locations
  Clone ID: LIB3107-044-Q1-K1-D8
gaagggtttcaagttattgtgagcaaagagagatagtgagtgaagtaactgaagagaagaaaaaatgccgtgcctcaacctcagcaccaacgtgtccctcgaaggcgtcgacacctcttccatcctcgccgaagccacctcctccgtcgccagcataatcggcaaacccgaagcctatgtgatgattgtactgaaaggatcagtacccatagcttttggtgggaatgagcagccagcagcttatggagaattggtttccattggtggtcttaaccctagtgtaaacaaggaacttagtgctgcaattgcttcaattctggaaaccaaattgtcagtgccaaagtcgcggttcttcttgaaattctatgacaccaagggttccaacttcggatggaatggatctacattctgaaatccgaattccatgttacattggntgtggtaccttgaatgttggat

SEQ ID NO: 49307 - DNA, 347 bp, Glycine max
  Clone ID: LIB3107-044-Q1-K1-D9
tctcgcattggatatatagatggtgcaggggatctcttgcatactgggcatgttgagattcttaggattgctggggatcatgtagatcttctttttgttggaatacacactgatcagacagtgaatgcatctagaggatcggatcgttctatcatgaatcttcattaaggaagtataaatgttttaacatgattctatactggattatgtaataaatggggccgaatggtatcatttctcaagatttgcttactacatttaacatgtcattaattgttcatggaaccattgctcttagaaatgattgtctcaaagtaaaatgcaatccatgtgctgatactattagc

SEQ ID NO: 49308 - DNA, 320 bp, Glycine max
  Clone ID: LIB3107-044-Q1-K1-E10
cgaccctctaaaatctaaagttaacacccgctcatctcgttcattacgcgacaaaggcattcactccaattctctcataccttaacaatatacaattgtttaactcataacttccctcgcatgttacttttcacacccttctctcctcggtatacaccctctatatgataaatattacaactctgaagtgatcaagtgcacggatggatcaaaatacttctccagagaccgtctcaatgacaatttctatgattgtcctgatgacacttatgagcctcaaacttcagcttgccccaacggaaaattttattgcaaaaacc

SEQ ID NO: 49309 - DNA, 438 bp, Glycine max
  Clone ID: LIB3107-044-Q1-K1-E3
agccttctaaagtaagaatttgtcaagtcattagacaggagaggacaatgcttaaggagttcattcattgcacatcaaagttattcatttgtatttgagcttaagtgtttatccattacattgactaatttgaatctgtgtattcattcaaatattatttgtttgtgaaagtcgggagtgacttagtattagacaatacttgagtatcttggatttagttagggaaagtctaagggtgtgtcagtagtgacctagagaatactattgtatcatgaagtagtaggacaaaatacttgtttgtaatcaagctttgattagtgaaaccctccacgaatttgtgaaagagaacttgagatagctcttataaattttaaaatcatatgtgaagaaaaactggacatggctttgattagtggaaccctcactttttgaaaagca

SEQ ID NO: 49310 - DNA, 415 bp, Glycine max
  Clone ID: LIB3107-044-Q1-K1-E4
accacttcatattattcttaagtagcgaaggtattgcagactacggaaaagggttttcagttcaatcctttcataacttaaaaaaataagattgtttaatgtataaagtggtatttatcttaccctctgagtttgtctgaattgacaacgactgtgatgctgattgaaatctgttcaaacgttctgctcctctatgtcccatgcctgttacctatcacttgctatgtataattaaacgcaatatcttggcatacatctaataccttcctctgcaattcccaattgcgacaccttcatatctttgctatcctctaaatatgttaaaatctctaatagatctctatcaatcacctaagcagtcaagttatctagctgcattaaaactcttccactttcacaagataaacaaaacttc

SEQ ID NO: 49311 - DNA, 337 bp, Glycine max
  Clone ID: LIB3107-044-Q1-K1-E5
cctcgtacaggtccactccccatatctctctatctgcggtgtccccgcccactccggaactcggtaccctattccgttctctcttatccatcatgaatgggggagagtactggaccgagtctatagatccgctctcaacttgcgtgtaataagaagggcaccgtcatcctgactaggatacccgccagcatggtgatggcatctatagaatctctcatgcctaagaggccttctagggctttattcgcattcatcggggcatacatgaaagtgcttaacatggaacatcccgtcgccacaccatcgtatgctggggacacagctgatgtagcaaaat

SEQ ID NO: 49312 - DNA, 373 bp, Glycine max
  Clone ID: LIB3107-044-Q1-K1-E6
gcagagtggcgagaggtacttgctcacagatatattcgttttttgtctccatcatggtctcgagagctttcagcttctgtggctcatctttcttcttcttaatcatttcccccctctctgtaacatcccggttctctgaatccctttctgctaatcatctgcctttcaagctaatatttactgggctgccttttaattcaccacatagcaaacttctatggatttttcgtaagccaggtgttttcaaagacgagatccggcttatattgtcgacatttcgctagccatattaatattgcaacatttctttttacttcgaaaccaggcaagagggttatatttgatccctctaagctaattgactcattttctt

SEQ ID NO: 49313 - DNA, 364 bp, Glycine max
  Clone ID: LIB3107-044-Q1-K1-E7
gagcgcaacgggatacacgcattgaattcaaactctaagtacattccgtgtgttgcgctttcttactaaaaaccacacatgtagaacacatgcggaatctgacactgctctcacaagactatctgcaccaagggacacatctatggtgttattgtagacactgagaagagacacatcgacactgttgacatggatgttccaacctctgcacattatgaaaagcgcaagtgtggctctaactgctcttgcacagactgcacctgtggccattaaagaatatgtgagaaaatgaaattgccatgtgtttggctatacatatatccaaattgtgttctcttcgtgtgaataaatgtgtgctctgata

SEQ ID NO: 49314 - DNA, 288 bp, Glycine max
  Clone ID: LIB3107-044-Q1-K1-E8
gcttccgctgagtgtcgcaatcaaacatggaatgtttggaataaagggcttgactgtgtgatttaattccaagattttgagactgtctatctgagggagtacaaatatctgcaactgatgcagaaactgctggatgcaacaagtactctatttacttaagctatctctagtagacaatcacagagactcttgattagggagacggttatgggaaagcccaactggagggtgcttaaacgtgttttgcagcatacaactgtggctgcaactgtctatcaagctacacct

SEQ ID NO: 49315 - DNA, 350 bp, Glycine max
  Clone ID: LIB3107-044-Q1-K1-E9
cacaggcgtccgaaggtgacagatgacgacaccacgggacttatttacgtaatagggaataaacggaaaaaactgcaaggggtggtcctatataaattttggattttagcacgtaccttgctacagaggacaaaggggcctatattctcgagatcttgtcagatcggaacgcaaccgttaccgagatcgctttgtttgtgcgctatggcaagggaagctactgtcatacatgttattgaaaagaagccaaatggtgccatatgaacttcaaatggcagtttaagtgatagaatgcgtgtttctatcaaaattgccgcaatggttcaagcaatggatgattggacaaaaga

SEQ ID NO: 49316 - DNA, 413 bp, Glycine max
  Clone ID: LIB3107-044-Q1-K1-F1
taagcagaaatatgcacgttacctacttagatcttatattgaagacaataagaagtccaagtggtgtcctgctccaggttgtgaatatgcagttacttttgatgctggtagtactggaaattatgatgtctcttgcctctgttcatatggcttttgttggaattgcactgaggaggctcatcgcccagtggactgtggcactgtggcaaagtggattttgaagaacagtgcagagtctgaaaacatgaactggatacttgctaactcaaagccatgtcccaagtgtaagcgaccaattgaaaaaaatcatgggtgcatgcacatgacatgcactccaccctgtaaatttgaattttgctggctatgcgttggtgcatggtcagaccatggtgaaagaactggtggtttttatg

SEQ ID NO: 49317 - DNA, 451 bp, Glycine max
  Clone ID: LIB3107-044-Q1-K1-F11
gggcgcaccgccccaaccaaactatagcgctattttctttaaacacgggactcttttctctttttttaaaaaaaagaatattatatcttttagatatattcaaaccatatctcacacccaacctataatatttattgtttaaaaactatataacaccttctcttcctctgactctttataaccccaacccacatattatatagtttttatgaaaaaaacaccacatagttttcaaactctttcttacacgtctgtactctctactctaatactctttatattttatactcacatataaacactcgcaaaacttttcatcacaatttacacacactcttgttttatatagaacacatacactctcatctatataactcatattgcccacaaaacaactttctttacactctaaataatattttttttttcaactttagttatattcttttat

SEQ ID NO: 49318 - DNA, 433 bp, Glycine max
  Clone ID: LIB3107-044-Q1-K1-F12
gatatccatgagttacaagaagctgcctgtccacttgaagcctggaaacaccatattgtgctctgatgggacgattactctcactgtcttatcttgtgatcctgatgctggtactgttagatgtcgttgtgaaaacactgctacgttgggtgagagaaaaaatgttaaccttcctggtgttgttgttgatctccccacacttactgagaaggataaggaagatattcttcaatggggtgtacccaacaagattgacatgattgctctttcatttgttcgcaaaggctcagatcttgttaatgtccgcaaggttctggggccacatgcaaagactattcagttgatgtctaacgtatttttttgttgaacttccttaataactagaggttttattattcatgccggttctcagttgctctggcaatggctgtgt

SEQ ID NO: 49319 - DNA, 450 bp, Glycine max
  Clone ID: LIB3107-044-Q1-K1-F2
ggtggcagagagcgaacccaaaactagagctaccttcccttcaaaccttccactcttctctccttttccaatcaagggaataatatttcttagagatattccgaaaccatggctcacgccaatcctatgatttttgttgttggaattctaggtaaccttgtctccttctgttgctttctagcaccagtaccaacattctatcgagtttgtaagaagaaaaccacggaaggtttccaatcacttccttacgtggctgcactcttcgcttcaatgctttggatattttatgcttacataaagacgggcgaaatacttctcatcaccattaacgcattcggttgtttcatagagacagtttaccttgtcatctatatcacttattgccccaagaaagctaggttctttaccttcaagatgattttcttgttcaacgttggagtgattttcttg

SEQ ID NO: 49320 - DNA, 410 bp, Glycine max
  Clone ID: LIB3107-044-Q1-K1-F3
ggtggcagagagcgttcccaaaactagagctaccttcgcttcaaacgttacactgtggtctccttttccaatcaaaggaataatatttcttagagatattccgaaaccatggctcacgccaatcctatgatttttgttgttggaattctaggtaaccttgtctccttctgttgctttctagcaccagtaccaacattctatcgagtttgtaagaagaaaaccacagaaggtttccaatcacttccttacgtggctgcactcttcgcttcaatgctttggatattttatgcttacataaagacgggcgaaatacttctcatcaccattaacgcattcggttgtttcataaagacagcttaccttgtcatctatatcacttattgccccaagaaagctaagttctttacctt

SEQ ID NO: 49321 - DNA, 386 bp, Glycine max
  Clone ID: LIB3107-044-Q1-K1-F4
gggggagtttcttcttggatcttacggtcttgtttgctaatattctcattcttctgtctctgcttcttctccttctgaactaagagatggggttgtctttcaccaagctttttagccggctctttgctaagaaagagatgcgtattctcatggtaggtcttgatgctgctggtaagactaccatcttgtacaagctcaagctgggagaaattgtcacaaccattcccacaattggattcaatgtggagactgtggaatataagaatattagctttactgtatgggatgtgggtggccaagataagatccgtcctttatggagacactacttccaaaacactcaggggcttatctttgttgtggatagcaatgatcgtgaccgtgta

SEQ ID NO: 49322 - DNA, 395 bp, Glycine max
  Clone ID: LIB3107-044-Q1-K1-F5
ggaaccggcgcaagcaagaacgcgggttggaacttggaaccatgacagagtccagagcaatgtgtaccctcgaacccgacgtcatcggcatccgcggcttcgagctacgcctcattcgctgtaccatcactttctcacagccctcggattcccgccacgaacttgaatcgttggatggccacatcaacgacctcttgaattccatcgagcgcggcaactacgtcgaagcactcacctccgaaccttccttctccctcgtattccgactcgacggccatgaatcgctgccactcgacgcggaccgagtctactccgagttggtccaccgcgctgagtcctttctcagagacgccgccgccgccgaacagcgtcgcagggcaatactcgtcatgtgt

SEQ ID NO: 49323 - DNA, 387 bp, Glycine max
  Clone ID: LIB3107-044-Q1-K1-F7
gggaaggaggatgagcaggaggtgagaaagaatgtgctgcagaagcttgatgcctgctttggtgggtctgtgtcgaaagaggctaattatgcgagattggacagggtttcggatttgctcatgttttacttatcctcaatgtgttatatatttggttttgattcgccatgtggccctggcagttcgttcaagtctggtaaattgatttgggcttacgatgctgctggttgtttaaaccaattagaatctagatcgtttatggggaaattggctggtcttcaaactgttgtgattgttcctcttaagtccggggtgagggagcttggttcgctcgaaatggtgcctgaagagcacggagatgtggagatggtcaggacagcatttggg

SEQ ID NO: 49324 - DNA, 263 bp, Glycine max
  Clone ID: LIB3107-044-Q1-K1-F8
gaacctgtcactctgccttactcactctggactttgctgatcatcgtggatgaaccaacacttctagtctctcttactgtataaccatgtaaaaatgagtcacctaatgaaaaattagtagcttcttgctgagctttatattgtgattgagttgagataaatttgtctggttgtctggtattgttttgcgtgttatgaattatttgatgggcgaagaatgataagtggtgagaaagccaagacaaatgggtgttggtggagat

SEQ ID NO: 49325 - DNA, 365 bp, Glycine max
  Clone ID: LIB3107-044-Q1-K1-G1
cacacagcaagggacggtgcgagtgagtgagtatggcgtctccattgtcagctcaattgggtcaatgtcagaactcacttccacctcttcagggtaattttagccaagatgtgtctaaggttcaaaggtcgcgtgtggtatgttacggtaccagatcaccgcttggttattatgaggaagcattgacatcaagatcacataacgccctgaggttttctgtcacgcgacaatctgaaacacggtccattggatataggagaatgacatgtgtcaatgctgcagacaatgttgtagagcttcaagccaaggtgacaaccaagcgcttctttgatgtagaagttggtggtgaacctgtgggcaggatt

SEQ ID NO: 49326 - DNA, 367 bp, Glycine max
  Clone ID: LIB3107-044-Q1-K1-G10
gggattcataggtcagcaaccttcttgtcttgagtgatggcgaaggacatcaacctcagctctcgaacccctctgctcttgctgttatgtttcaccactctcaccgaggctgtatggttaaccatccccagcaagggaaccaagtgcatgtccgaggaaatccagacacgcgttgtcgttttagcagattactatgttgtagccgatgatgtccagggtcaccaacttcaaactatttccgccaaggtgacatccccttatggaaataatcttcaccagaatgaaaatgttacccacggtcagtttgcatttacaactaccgagtctgggaactacgtggcatgcttttgggtgaataacaaacatc

SEQ ID NO: 49327 - DNA, 318 bp, Glycine max
  Clone ID: LIB3107-044-Q1-K1-G11
ggtggtgaactaatttttggaggtatggatcctaaacactttaaaggagatcatatttatgtcccacttactaaaaagggctactggcagattgaaatggagagatttttttattggaggtctctcaacaagtgtttgtgaaggaggctgcgctgctattggggattcaggaacatttttgcttgctaggccaactactgtggcaactgaaatcaatcatgctcttggagctgaaagagttctacgtgtacaatgtaaggaagttgtatctgaatatagagaatagttatgggatctcttggtatcacgggtacgacc

SEQ ID NO: 49328 - DNA, 333 bp, Glycine max
  Clone ID: LIB3107-044-Q1-K1-G12
acgcgtgcgaacacgtccgagaggactgctgaacgaaaccttaccggtttggagccttcgcactttcacagcgatcttattcattttacggttactaatactgactcttcctttgacgaatcgaaacattatattattgattgggtctgaacaatcttgttggaagaacctttggctttaaataggcaagcattatcattggattttactatcacatctacactggctactaaacttaagcttactcatatacttataactcgtctacttgttcaaaggaatgtattcgtatttgcgtatagcaaatagatgttggagtatatccttacaacc

SEQ ID NO: 49329 - DNA, 466 bp, Glycine max
  Clone ID: LIB3107-044-Q1-K1-G2
gactgaaccagacatccgagtaaaaagatactgtagttggaagttgctcggagcttcaacattcaatatcgagcgtttcgatatattacggaactgaatcggacatcagagtaaaaagttgatgtcgtttgaattatctcagagcttcggtattccatttcgagcgtctccatatattacgggactcagtcagacatccgagtaaaaagttactgtcgtttgaattttctcagagcttcgataatcaatttcgagtgtcttattatattacgcgattcagtcagacaaccgagtaaaaagttattgtcgtttgaattatctcagagcttcggtattccatttcgagcgtctcgatatactacgggactcaatcagacatccgaataaaaagttactgttgtttgaatttgctcagagcttcgataatcaatttcgagtgtctcaatatattacgcgactccgtcag

SEQ ID NO: 49330 - DNA, 339 bp, Glycine max
  Clone ID: LIB3107-044-Q1-K1-G3
gatagcagcatcatacaaagcattgaattcaaaaactgaagttcattccttgtgttttgctttcttcctcaaaaccaaacatgtcgaacacatgcggcaactgcgactgcgctgacaagactagctgcaccaagggaaacagctatggtgttattgtagagactgagaagagttacatcgagactgttgtcatggatgttccagcagctgagcatgatgggaagtgcaagtgtggcactaactgcacttgcacggactgcacctgtggccattaaagaatatgtatgaaaatgtaattgccatgtgtttggcaatacaaatattcaaataatgtaatct

SEQ ID NO: 49331 - DNA, 411 bp, Glycine max
  Clone ID: LIB3107-044-Q1-K1-G4
atacctcctcttcccactgacccagagaaactgtttcgttacttggacctagtactcacccctctccctctttcaaaaaccagccaaggtaatttgagaagatgggttcccctcattctcataacggtttaaatgtttcagcctcagccttcggcaaaaggggataaacttctgcatcaccttctttggtcagtcctgtctcctctaacattgagatttcaaagtagttccagaaggttgtctgaatttctgtcaaagaccttgctgaaaaggcattgagatttgtttgagcgaccttttctctacttctattagcttaccatctaaagtttcctcggcaaaaaacatcactgtaatactgttgcaggacgcagaacacgcgttaagcattaaaatacatgaaagacaaag

SEQ ID NO: 49332 - DNA, 438 bp, Glycine max
  unsure (1)..(438): unsure at all n locations
  Clone ID: LIB3107-044-Q1-K1-G7
gcacttcaattgcaatcaaattagttcattctctttgcgcagttccctacctctcctttcaagatgcanatcttcgtcaagaccctcaccggaaagaccatcacccttgaggtggaaagctctgacaccatcgacaacgtcaaggccaagatccaggacaaggaaggaattcccccggatcagcaacgtctcatcttcgccggaaagcagctcgaggacggccgtaccctcgccgactacaacatccagaaggagtcaacccttcaccttgtccttcgtctccgtggtggcatgcagatcttcgtcaagactctcactggcaaaaccataaccctagaggtcgaaagctctgacaccattgacaacgtcaaggccaagatccaggacaaggagggaatccctccagaccagcaacgtctcatcttcgccggaaagcaa

SEQ ID NO: 49333 - DNA, 78 bp, Glycine max
  Clone ID: LIB3107-044-Q1-K1-G8
tgggcaccttaatctcacccattcaaaaacttgaagttcattgcttgtggtgggctttctttctcaaaaccaaacatt

SEQ ID NO: 49334 - DNA, 397 bp, Glycine max
  unsure (1)..(397): unsure at all n locations
  Clone ID: LIB3107-044-Q1-K1-H1
ggaggatttggatctgttcacagagggcttctgccagatggacaagtcattgctgtcaagcaacataaattggctagttctcagggtgatctagaattctgctcagaggtagaagtcctgagctgtgctcagcaccgaaatgttgttatgttgattgggttctgtatagaggataaaagaaagctattggtatatgagtacatatgtaatggatcattggattctcatttatatgggagacagccagaaccattagaatggtctgcccggcaaaaaatntgctgtggagctgctcgagggttgcgatatcttcatgaagagtgcagagtgggttgcattatccatcgtgacatgcggcctaacaacattcttatcactcatgattttgaaccactgg

SEQ ID NO: 49335 - DNA, 456 bp, Glycine max
  unsure (1)..(456): unsure at all n locations
  Clone ID: LIB3107-044-Q1-K1-H10
ggggatcaaagtgttgttatagcggagcggcaagagatggaggaggcggtcaatgctacaganaatcatgtggaaggaagaccagagataggtgacaatatggttctgcgaaagctgcttcggggtccgaggtattttgatccaccagataatagttggggagcatgttttaattgcggtgaggaaggtcatgctgctgtgaactgttcagcggtgaagcggaagaaaccgtgctatgtttgtggttgtttgggacacaatgcaagacaatgcagtaaggtgcaagattgctttatctgcaagaaaggtggtcaccgggctaaagactgtccggagaagcacacaagtacttctaaaagcattgctatttgcttaaagtggggaaaattcgggcatgatatcttttcctgcacgaatgattattcacaggatgatctcaaggttattctttttctt

SEQ ID NO: 49336 - DNA, 333 bp, Glycine max
  Clone ID: LIB3107-044-Q1-K1-H12
aataatcagaatcagcatcatcttctggcgcagcagcagtaacaaccacaacatctgcagttgcaacatccacaagtggtcgatcatcaacagatttcaagtgttgtctctacaaggtctcagcttagcacagcagctcaatgtcaattaccacccatgcaagctatctctacacttggccatcagcaaagcttttctgattcaaatggaaaccccacgactactgctattgtttctcccctgcataggatataggattcatttcctcttgatgacacatctcacctttttaggctttctagatacacttgttgcgttcctgttcaacattct

SEQ ID NO: 49337 - DNA, 457 bp, Glycine max
  Clone ID: LIB3107-044-Q1-K1-H2
ctatagaggagactcgcaagaagatatggcttgtggactcaaagggtttgattgttggttcaagaaaggcttcacttcaacacttcaagcagccttgggctcatgagcatgagcctgtaggcagtctcttagaagctgttaaggtaatcaagcctacagttttgattgggtcatcaggagtgggaaaaacatttacaaaggaagtaattgaggctgtgacttctataaatgaaaaacctcttgtcctggctctctccaatccaacttcacagtctgagtgtacagctgaagaggcttatcaatggagtgagggtcgtgcaatttttgctagtggaagtccatttgatcctgtagaatacaagggcaaagtgtactattctggccaggccaacaatgcttacattttccccggctttggtctggggttggtaatctcaggagcaatcagagtgcatga

SEQ ID NO: 49338 - DNA, 449 bp, Glycine max
  Clone ID: LIB3107-044-Q1-K1-H3
gatcacagaagcaattaacatattctcctctcatgctcactcaaaacacaaaatcctaactaaggtgaaaatgaaggcatcacgcattgctttgttcactttggtggtgcttctttttgtggctgaagttcaagtgtcaaaggcagtgacctgcagcccagtgcagctgagtgcatgtgtgagtgcaataacctcttcaacccctccatcaaacctatgctgctccaagatcaaggaacagaaaccatgcctttgccaatatctcaagaaccccaatctcaagaagtttgttgactctcctaatgcaaggagagttgctaacacttgtggaactcccttcccaaggtgctaaggtgttactaaatttgaagtggttttaatttctctgcctgattatgcatcttgatatctatccatgtgttctggccagagaccagagagtgaaagaa

SEQ ID NO: 49339 - DNA, 204 bp, Glycine max
  Clone ID: LIB3107-044-Q1-K1-H4
ctactgaactaaaccttaccgatatggagccttcggactttcacggcaatcttattcatttcacagttactaatacttactccacctttaacgtatcgaaacattaaattattgattatctctcaacaatcttttttgatgaacccttggctttaaatagtcattctttatcatcttattttactatcacaaccccacttcctt

SEQ ID NO: 49340 - DNA, 390 bp, Glycine max
  Clone ID: LIB3107-044-Q1-K1-H5
gtgctcaagcctatttctttttttggaatgaatctacaacataacaaataaatgttgatttcaatcccaaatatactccaaatataacttgatcatcaaaattaaataaaattaaaaagtatagttagagttttgtcacaattacttgctcaaacacactccaatttctttcacatcctgaagcactgcaagtcaaactcaaaatcttaatagccagcttctgcaaatttggagtttgtgacccaaacattcgccaccaatatgctgcaataccaattaccaaccaagagcataacttagaattctgaattctaacactaatacataaaaaaaatagtatgataaaagtttcttactaagagaatgggttttcctttgagccattgcaaa

SEQ ID NO: 49341 - DNA, 408 bp, Glycine max
  Clone ID: LIB3107-044-Q1-K1-H6
agaagggggggggatcaatggagaagagaagagaagagaagaggtggatagggttagccacttgttcttgttcccttatctcttatggtgaaatccctgttcctgatttctcgaatcccaatgtcttccaccaccatccaccacaacggctcccacatacccaaaaaacccaaactctcttccttggaaatcgaatcagaattcggccaccacgactcctccgtcgcccgcatcaacaacggcagcttcgggtgctgcccggcctccatcctctccgctcaacgccgctggcagctccagtacctccgccagcccgaccacttctacttcaacgacctcaaatccgccgtcctccaatcccgaaccttaatcaaggacctcgtcaacgccgaccacgtcgacgagatc

SEQ ID NO: 49342 - DNA, 262 bp, Glycine max
  Clone ID: LIB3107-044-Q1-K1-H7
gaaaccaccaaagcctacggctactacattacattcttttttttctttcccaaatgggttccatcttttcacccttaaccactatcttcctcctactcctactcgtactttggggtggcgaggcacgtgacccttttgcttgtgaccctaagaacaccgccacaaaaaacttaccattttgcaaggcttcgttggcaacaggggcaagggtgaaggacctcattggaaggttgacactgcaagaaaaagttaacttgctagt

SEQ ID NO: 49343 - DNA, 339 bp, Glycine max
  unsure (1)..(339): unsure at all n locations
  Clone ID: LIB3107-044-Q1-K1-H8
aaaccaccaaatcctacngctactacatgacattctgtatttttttggccaaatgggttccatcttttcacccttaaccactatcttcctcctactcctactcgtactttgatgtggctaggcacctgaccctttttcttgtgaccctaataacaccgccacaaaaaacttaccattttgcatggcttccttggcaacatttacaatggtcaatgacctcattggaatgttgacactgcaataaaaatttaacttgctatttaacaatttcctctcaattccactccttgttatcaaaagatattatttattctcgtaaacactacataatgtcttaaa

SEQ ID NO: 49344 - DNA, 408 bp, Glycine max
  Clone ID: LIB3107-044-Q1-K1-H9
agaatccagaatccatattaatctatctgtgttggaacatagaggactagtatataagggtaattgggtaaatgaagccattgttgattcttgatgcctttatttttacacactgcacaatcatttatttgagcactctgttttgtcattaatccaacatttgagtagctgaaagtctcatagtaaagttatatgatatgatgtattgttaactttgtgttttgaccttgattgtgaagtttcaggatgcagtttgtgttctaacctctgtttcttaaccaggtaaagttggaagaagaggaaaccaatcatttcaaagatagtcttcttcctactgtaattggattgcttagaactgtaagtaattagttattgtgaaagtttgagtattattttttattgggaaag

SEQ ID NO: 49345 - DNA, 429 bp, Glycine max
  Clone ID: LIB3107-047-Q1-K1-A3
ggttctagtgtatgtgattgttgtggctcgttcttcttcgtcgttatcttcttcttttgttgtttgtgtgtttgttttttctctcacctgaaaatgtcttgctgcggtggtaactgtggttgcggaagcgcctgcaagtgctgcaacggctgcggaggctgcaagatgtacccagacttgagctacaccgagtcaaccaccaccgagaccttggtcatgggagtggcaccagttaaggctcaattcgagagtgctgaaatgggtgttcccgctgagaacgatggctgcaaatgtggagctaactgcacctgcaacccctgcacttgcaagttaggtgttgtagagctaaagcttcaagcagaaatggcccttagaaataatgattaaaactatatgtatgttcaaaacttcaaaattatgtagtatgta

SEQ ID NO: 49346 - DNA, 250 bp, Glycine max
  Clone ID: LIB3107-047-Q1-K1-A5
ggaatctttgaagaagaaagaaagcaaaagaagcgagcaatggccaagtccaagaacaatgccaagaagttgtcctacatctcagttccatcttaggtcatcaacttcatctcatcttcatctcttcaatctctgcttgaatctcccaagacgtgtgcaaggcactccaaattcttcaactttgtcaagtgcgtgaagccaagactcttcttccttttaaccctctttttccttggtttctttgccatgc

SEQ ID NO: 49347 - DNA, 298 bp, Glycine max
  unsure (1)..(298): unsure at all n locations
  Clone ID: LIB3107-047-Q1-K1-A7
gactccgagatctggtcatcgttgggatctccatacgccggatctgctaaaatacgcttgatccatatgggcctnctcgaccacttgtgggacgacaccgtcgccggcccaaggccggaaaacggtctcggcaagctccgaaaacaccacaccttcactttccgacctagctccggcaagggtacgccctgcctcgttaatcatactcatataattcaccaacgattttcgttaactacaagtccacaactacaatcggtaactcaactcttaatataattatcaatcctttaatatc

SEQ ID NO: 49348 - DNA, 429 bp, Glycine max
  Clone ID: LIB3107-047-Q1-K1-B3
ggagcttaaggccgtgtttgtgtgttgcgtttgagttggcgattccgaaatggaggacgacggttccaactcgatccgccgcatgtcaagccgaacgcgaaaagttgcgtccaaaatggccgccgcgcttgccagcgttgacaaccgcactcaggcggcacttgcacgcttggatgcattggagaatgacaatgcgggttttgaaatcgcagatgccaataatgatgacgatgacgcttctctagacgaggaggatcaattttatatgcagaaaaagcagtctaaaggcaccaaaaggaaaactaggcaggcaaaagcacttgaagctagaatggccccaagaacattccttgagctcttacatgaagctaacttagaatcattgcctcctcatgtgccctcctattggaaagccgcagttggaccccc

SEQ ID NO: 49349 - DNA, 412 bp, Glycine max
  Clone ID: LIB3107-047-Q1-K1-B5
aggcctaccagaccaagccgactcaggtccaattagcatactaaataattgcctggattggtcggttattgtgtatttatatgcttctctgctcattatttcctccatttttttaattgttagattttaaaaaaataattatttttatttatctattattcagaaagttcaaaatcatattaattattattttttatttattatacctttatttatcacatggatctatcgtagagtgaaaaaaaatggataaaataagaaattttacaaatattttattaaaatcaagaaaatttattacattttttttagtttctacataaaaatattaatttacgaagatgttaacgttaatggctagctctgtaacatttacatccgcttcggccgccacttgaaaaacattaatttg

SEQ ID NO: 49350 - DNA, 85 bp, Glycine max
  Clone ID: LIB3107-047-Q1-K1-B7
acgacagattggggatcttaatctccgagttgagaagagaatctgggttggcgaatgacacagggacgacaccacctacaaatga

SEQ ID NO: 49351 - DNA, 380 bp, Glycine max
  Clone ID: LIB3107-047-Q1-K1-C1
ggattccagtcatctctataagtaatcgatcagtggacgccgtctcaatctccttttctggctacacactttcttcaacggtaaatccctctctgcacttcgtctctgttagggattaatcattattttccgcgcaccaaacagccaaagtcaattttcttctctcttctaagacacaccaatgccagagaagaagaacaagaaagtttctttcaccgaagaagatgctgttacgctcatgcagaggtacgacgcaactacggtgttcactttacttcaggaagtggcgcattaccctcaccccaagattgattggtgcgagttggtgaagaaaagcgcgactggaaattctaacgccagagaatattaaatgctatggc

SEQ ID NO: 49352 - DNA, 366 bp, Glycine max
  Clone ID: LIB3107-048-Q1-K1-A11
ggcctattgtatcgtgatatacgcgtcaactcaagcaacaaaacaagcattacatatcatatctttgattcagccttcaaacgcgccactcccatttctctctctcattcttcttcagatgccaaacctaacctaacctcccaaacaaactcaaccttatcatcatcatcgtcgtcgtttaaataaattctgatctccacgcacacgctctgagtcagatcatgctgcgtttgtgctacggccctctggattgctgcttccgacgccgacgtgccgacggactcctctggcacaccgacttgaagccccacgcctccggcgacttctgcatcgacgtcgtccaggccaattactgtctcgaggatc

SEQ ID NO: 49353 - DNA, 377 bp, Glycine max
  Clone ID: LIB3107-048-Q1-K1-A9
ggtgtgacaaatggagggtccttagttctgtttctctttcttctctctgtgctttcaaccaagttctcaaatcactcttcttcttcacccttctgatctgctaattctcaaggtattcaaaattgggtggttttcgattgaactgtgatgtccaagccactgctaggcatagcggaagaggaaggtcaaagcaatgtcactttgttggtttcttcctcagccaccatggaaagtgtgtgcctgaatagctcaaaactgaaagagcgcaactacatggggttatctgattgttcatctgtggacagctccgcgccgtccttctcagatgagactaagagcaatttgaacctcaaggctactgagctcaaactggggct

SEQ ID NO: 49354 - DNA, 394 bp, Glycine max
  Clone ID: LIB3107-048-Q1-K1-B11
ggagggttttgacttgtgattttccttcaacacagtcggcaaaatctttcaccaccaacacacagccatggcaggctctcaccttctttctcactcaccctcccttcccaaaacctataactactccttaaaccaaaaccctttatcccaaaatcttttttttccacccctcaaattcaaaagcaccacaaaaccgcgtgttctcagagctgttctctcccaaaacgctgcaaaaaccgcggtagaggacacaaagaacgctcattttcagcattgtttcaccaaatccgaagatgggtatctgtactgtgagggcctcaaggtgcatgacatcatggaatctgttgagagaagacctttctatttgtacagcaagccccagataactaggaac

SEQ ID NO: 49355 - DNA, 433 bp, Glycine max
  Clone ID: LIB3107-048-Q1-K1-B12
tctagcacttttcacatgttgtagaaaaatgtgaagtaccacgaacaatcatgaactttttttggtgtacaaactatatagtatgtccacattgaaatttctacgtaattaatatcacaaaacaagaaggcaggggtattattggcatacatgattacatcattgaacccgaaaaaccagaccaaatatctacagctgatagaatctgacaatttagcaaatttaattatagaatagtaagattagtagtcacaattctacacctataactttcattttatttttcttaaaattgaatcaaatctacgcgtttacattcttaccgactcatattatgccaggttttataatagtaaatcaaactttatcgacaacattgagttatcaaagtatttatgtagaatatgacatggcatccgattgtcggtatact

SEQ ID NO: 49356 - DNA, 415 bp, Glycine max
  Clone ID: LIB3107-048-Q1-K1-B9
gagttttcatgacattaatctggtttgcaaaattaatactttgttgtaggaaaaggagaggtggttacctgctcagggaaccgaaatgctgaccttttttatggcgttcttggagggcttggtcaatttggcatcattacaagggctagaatttctcttgaaccagcacctatgatggtgagtgtacattcaaaactctaatattaagacaaaaaaaaacagttcctaataatatttattgattatgacatgatatgtgcctttttgacaggttaaatggattagggtgctctactcagaattttctacatttactatggatcaagagtatttgatatcacttaacaacacatttgattatattgaagggtttgtgatcataaacagaactggcattcttaacaactggagatca

SEQ ID NO: 49357 - DNA, 439 bp, Glycine max
  unsure (1)..(439): unsure at all n locations
  Clone ID: LIB3107-048-Q1-K1-C10
gtgttctttgatgaactctatgcatgttttgtagggattggattttgtaattgcagaagcaggaaaaaatggggtacgactgatactaagtctagtaaataactggaatgattatggtggaaagagtcagtatgttcaatgggcaagagaacgtggtcaatatgtaaacaacgacgatgacttcttctcacaccccattgttaaggaatactacaaaaatcacgtcaaggtaaaaattaattatatgagttgagaatatttaattataactattagattaaaattaattatttacattacgtatttaattataaaatttacatgttttttccttaaagattacatgagatctgtaattaaatacgtaatatcaattgttaattaatataataattgtgattgaatgtttntatttacataataaccaaaaactctgaac

SEQ ID NO: 49358 - DNA, 416 bp, Glycine max
  Clone ID: LIB3107-048-Q1-K1-C11
gacgtcaacaacattcatcaatgtgttgtgtacacactgcacaccaccccatcccatgtgactctctgccccttccttcatcaatcatagtttctctgtgttttgttccgctaaatctccaaagcaatcaagcagagttctttaattagatgcaacctcagcacgagggttaacagattccgaccgtctcaatgaatgttgtgatttgtggtactgttgactccttctttttggttggacttagagtccaaaatggcggtgctggggtgagttgagttgaagtgaggcacctactttgcagtctgagtttgtgttgtctagtctttttttttctttttcaaacatacaataatgaaggccttttccttcagtggggtttggattttattggttctgagctcggtttcagctttttc

SEQ ID NO: 49359 - DNA, 424 bp, Glycine max
  Clone ID: LIB3107-048-Q1-K1-C12
ggagctgcaggcattcgatccactaaaatgctgcacgcacacgaggactgtacacgaaccattatgactcctgtcgacatcgtctcgtcccttagcttcgatcacatcatatgactctctgtgctttgaacacaatccagcattcaaaggggatcgatacatgacatttgatagcatatagtgcgacggaaaaaacgacgctaacggaatccgagcggcttaagagaggtggggagtggactttcagatgacaaatatgctgtggtgaacttaaactcggactggatttaaagctgtgagtccagatctggtcagacgaaaagttggcctacatagtgcataatccctacatttgtttgatggtcttgaatcggacagtgctgaatgacatatcaatgcttcaggtaactggcttaatgcaaat

SEQ ID NO: 49360 - DNA, 390 bp, Glycine max
  Clone ID: LIB3107-048-Q1-K1-C9
gaataacataaaggttgaagggttatagattcctgcacccacctaccaccgaagaacggatattacaagagagatagatgttttgcttcctctaatctggcgaatcattcgttctagcaaattttgccgaaaactccaaaacccccccttttagaaaactcgattaacaacaatctcaatcttctacagcttatcctctctctctctcttcttcgcttcccccaacagcaatttcattcaaaactctctctcaggtgattaagagaatcagagtttgcttatccatataacagatcatttgaacagaagaaggatggtactggtttgcggaggcaattggacttctgcgagcttagaatcctctctgctttatttattaatgaaatcata

SEQ ID NO: 49361 - DNA, 426 bp, Glycine max
  Clone ID: LIB3107-048-Q1-K1-D11
gacacatgctttttcttttagagaaattacatatgcttatttataaccaataatgttgggaaaggaacatacacaatttggagaaaagaagaagataagctagctaaggcagcaatgggtaatccttctaagcttttcccatttttctttgcattcattgtgtttctgatgcccttagtttccttatcccacaatgacttctctacctttgccataaaaaccgtttcatacctagtttcctttagtgaaaatccaaaccataatggccacatcaccacaagctccaatgaaagagacaaatcacgtctttggaggaaagccttcattggcttaaaaaatactcacgagccatcttcgaatatttctcgagcaatatcccttaatgcaagagagtgtttttctgtggaagtaccttctgatgcaata

SEQ ID NO: 49362 - DNA, 430 bp, Glycine max
  Clone ID: LIB3107-048-Q1-K1-D12
ggttgcggattgctcccaaattcttcaccacggtgcctcttcggaccatttcacccttcgcatgtcgcttctcagtccgttccatcgctgactcttctcctttcaacaaaatccgcattcaaagggatgatactgcatttgatgcatatgtcgttggaaaaaacgacgctcctggaatcgttgtgcttcaggagtggtggggtgtggactttgaaattaaaaatcatgctgtgatgatttctcaacttggtcgtggatttaaagctcttattccagatctgtacagaggaaaggttggtctagatgttgcagaagcccaacatttgtttgatggtcttgattggcaaggtgctgtaaaagatatcaatgcttcagttaactggcttaaggcaaatggttcaaaaaaggctggtgttactggattttgtat

SEQ ID NO: 49363 - DNA, 421 bp, Glycine max
  Clone ID: LIB3107-048-Q1-K1-E10
agagatacatgcttgttttgtacgtgtacgtgtatgtttctgagttcatatgtaatataggcatggtttatatcttttatcttttattttataacctttttcttccaatgttgcatacgattgggtgatttacttaaccttgtgttatatgacttatctcatatttcatttctatattgtgtagatgagccgggcaaacaggttaagagtgccatcacgattaaaaacaccagtaaatctaatgtagctttcaaggtatggtgaaacatgtacaccattgattttggtcctgatttttatatttctcttttccttatttgcaatttttgtcatttaagtacttccattgagtcttgaactgaactctatattcttgctgctactatgtcacaattttgcaggagaataattaattgatttc

SEQ ID NO: 49364 - DNA, 364 bp, Glycine max
  Clone ID: LIB3107-048-Q1-K1-E11
gccagacgaccacagaagggcatatgcgaacaatccattgcatagattgtgaaccgtgacggctgggcgtaacatgatcagttctcaagcggatgacttgtcaccacattgcctgagttgttatcataccttcgccagagagtttgctgggacccggaactgtgacacccaagacgcttctggatcaattctgctatttggttagatcatactatctgctgaaagtgatttgcatgatggtgattgcatggatcgtgattgcagccagggcagtattaaacttaagacagttggggcatgctattatttatagtatttatgcagcataatgcacttaaatacttgttcatggatgcttatatat

SEQ ID NO: 49365 - DNA, 430 bp, Glycine max
  Clone ID: LIB3107-048-Q1-K1-E9
cccagatgtgactccaccaacaccaaattctgctactacaataattacagcctctcccaaccaaggtatttctgcaagtcctgcaggagatattggaccaaaggaggtacacttaggaatgtccctgtgggaggagggtgcaggaagaacaaaaggtcatcatcatcatcatcttcaacatcaaagagagttcaagaccaagcattcacaccaaatcctaactctctcattggccttccttcattgtcctatgactcaagtgacctcactcttgcattggcaaggcttcaaaagcagtcatgtgggcaattggggtatgatgagcatgatctttcaatgttggggaaccaccacccaagcaccccatgtgataatatccttggcatgcatcatcactcatcatcatccacaaacccagggttcttggatg

SEQ ID NO: 49366 - DNA, 430 bp, Glycine max
  unsure (1)..(430): unsure at all n locations
  Clone ID: LIB3107-048-Q1-K1-F10
gaaccaattccaaattctcaacgtttcctaactttagcaaccatccaagaagttgatcagttccttgtctctccttgaattataaaaccattcacagtcttgaacccaatttcactctttgcacctcaaacaccttataagcctcaatttcacaaccaaaaatgcaaagttcaatctcacaatctgagatttgcatcactgattaccttctaccccaagaagttccatctcaatttcaatttccagatatgagcaacaataacataccaatgaaccataccaaccttcaaatgcctcaaatcacatctttctccaagccttcaaggtcctcatcaaatctaagcaaccgcaaaccgtccttgagaaacatcacaatcccttccataacctcaggtcttacaacaactatgtcacanacaacaacaacaac

SEQ ID NO: 49367 - DNA, 427 bp, Glycine max
  Clone ID: LIB3107-048-Q1-K1-F11
gagggatagggatagggatggagaaagtgaaggtgcttcggcgactcctcgagacaccaggggttcaccaggggccagcctgtttcgacgctctgggtgcgaagctcatagaatccgctggcttcccctactgcatcaccagtggcttctccatcgccgcttccaggttggctctgcccgacaccggcttcatctcctacggcgaaatgctggagcagggccaactcatcacccaagccgtttccattcccgtcattggcgacgccgacaacggctacggcaatgccatgaacctcaagcgaaccgtcaagggtttcattgccgccggtttcgcaggaatcattctggaagaccagattgcgccgaaagcgtgtgggcacacgcgcgggaggaaagtgataccgagagaggatggcgttatgaagat

SEQ ID NO: 49368 - DNA, 366 bp, Glycine max
  Clone ID: LIB3107-048-Q1-K1-G10
ttccttacatcatgtaggagcttttgaaacaaggaagatagaataggttcaggtatccttctatgcatttgctagtgatcctccatccatgtactccaaagctctgctcatctgtccatttagaagcagacattaccaataagtcctataacaaagtgtctagtattgccaaattaaatcttcaaaaacaaaacagataaatagtgtattaccctgcataaaaaaaataccacatttagacagccggataacatgtctcttgtactattattcatgctcagccatgatgatgatgatgatgatgatgatgatgatgatgatgatgatgatgatgatgatgatgatgatgatgatgatgatgatgca

SEQ ID NO: 49369 - DNA, 457 bp, Glycine max
  Clone ID: LIB3107-048-Q1-K1-G12
aattcgagcggccgctttttttttatgactactttttgtttctaaacgggacctaaatgcggtggattcaacattttcaaaccatttcctttcctaaaaaccaaaaccaatgtttatgccctttcattctagcttcttctatcacatttttcatgagtgccaagccaggggtaatactctgcaccaaaagctggaaaaaagcattgttgctaaacttaggctattgactgtttctaaaaaccaatttatcttggtaaactgatgcaacaataatgagatatatagaacccatcaattgatttctccttcttctacatcatttggttctcttgtagtactctgaggcatttcttcttcttcttcctcctcatgagccttcatgtacaagcctagttgttctaacggattacaacttccctgtagtttgaaacttccccacccattttcaagatgatca

SEQ ID NO: 49370 - DNA, 384 bp, Glycine max
  Clone ID: LIB3107-048-Q1-K1-G9
tctgctggttgttcagcttcaacaagtgttaaaaggggtggagattcactgcggaaattcgatggtgctatcactttcacaaggtttgctgagaagcatcgccgactgtcaaatgctttcattaggcagaatccaggtttgttggagaaatcactttccatgatgctcaaggcaccaaggctgatagacttcgataacaagagagcctatttccgctcaagaataaggcaacaacatgaccaacacttgtctgggccattgcgtataagtgtaaggcgggcttacattttggaggactcttataatcagctaaggatgcgttctactcaggatctgaaggggccattaaatgtgcaaattcaaagtgaagagggtattgatgct

SEQ ID NO: 49371 - DNA, 434 bp, Glycine max
  unsure (1)..(434): unsure at all n locations
  Clone ID: LIB3107-048-Q1-K1-H10
ggttcatatctctctgttctctgctacctctcaagttttggaagtatagagatggcagagacattcctatttacctcagagtcagtgaacgagggacaccctgacaagctctgtgaccaaatctctgatgctgtcctcgacgcttgcctcgaacaggacccagacagcaaggttgcctgcgaaacatgcaccaaaaccaacttggtcatggtcttcggagaaatcacgaccaaggccaatgttgactacgagaagatagtgcgtgacacctgcaggaacatcggctttgtctcaaacgatgtgggactggatgccgacaactgcaaggtcctcgtcaacattgagcagcagagccctgatattgctcaaggtgtacacggncacctnaccaaaaaacctgaagaaattggggcttgtgaccagngtcacatgtt

SEQ ID NO: 49372 - DNA, 302 bp, Glycine max
  Clone ID: LIB3107-048-Q1-K1-H11
ggttcatatctctctgttctctgctacgtttcaagtttaggaagtgtagagatcgcatagacattcctatttacctcatagtcagtgaactagggacaccctgacaagctctgtgaccaaatctctgatgctgtcctctacgcttgcctctaacaggacccatacagcaaggttgcctgctaaacatgcaccaaaaccaacttggtcattgtcttttgagaaattacgaccaaagccaatgttgactactataagatagttcgtgacaccttcatgaacattttcttttgtctcaaaccatg

SEQ ID NO: 49373 - DNA, 325 bp, Glycine max
  Clone ID: LIB3107-048-Q1-K1-H12
cggttcatatctgtctgtactctgctagctatcaattctgtggagtgtagacatcgcatagacatttctatttacctaatagtcagtgaactagctacaccctgacaagctctgtgaccaaatctctgatgctgttctctacacttgactataacatgacccagacagcaactgtgcctgcgaaacatgcaccaaaaccaacttcgtcatggtcttctgacaaattaccaccaaagtcaatgttcgactacgagaagatagtgcgtgacacctgcaataacatcggcattgtctcaaactatatttgactgtattccaacaactg

SEQ ID NO: 49374 - DNA, 405 bp, Glycine max
  Clone ID: LIB3107-049-Q1-K1-A10
gaaccacacaagtcatgagctggaatagtgaggctatcttttcttggtgttttcttgcatgtggcaattggggttacagtgttcatgactagtgggagtctcaggggcactaccacttttaggcctgtatatgctgcgtactttacaatggtaactctgtgcactataggatatggagatattgttcctgactccacgtttaccaagatctttacatgtggtttcattttggtgggttaatggatttcttggacttttgctcaatggattggtagcatacatttgtgatacacactaggcattcttgttgggcatgatggatgagaatagatattagataattctcaggacttatatggtagatgaatagtatggaagtttgagaatatgaaccaaagtttgtct

SEQ ID NO: 49375 - DNA, 391 bp, Glycine max
  Clone ID: LIB3107-049-Q1-K1-A11
gggtggtggcggcgggagagagagagagagagagatggggagattgcgaagactgagccaagcttcagttgatgctactaagaaagttatatccggtgatcttgatgatttgatgcctccaccggagtgacccatctgcagcttcaattccaagcaagagttaagcatgtggcatttgtattctgattctgaattttgaggtttgtactctgcgtctttgcaaataactgagtcggaaaatggagcaacttctggaatcttgtccgggaacctatctctggatgtctttgaaggctctaaatggaacattagtggaagtgacttttgtggaatgcgcttaaaaaagtttgatggctttattgatttgggttcatattatactattgctatg

SEQ ID NO: 49376 - DNA, 428 bp, Glycine max
  Clone ID: LIB3107-049-Q1-K1-A12
gggtggtggctgtgggagagagagagagagagaggggtggatattgcgaaaactgaggcatgcttcaattgatgctactaacaaagttatatccggtaatcttgatgatttgatgccaccacctgagagacccatcttcagcttcaattccaagcaagagttaagcaagtggcatttgtattctgattctgaatttggaggtttgtcctctgcttctttgcagatatctttgtcctaaaatggatcatcttctggaatcttctcctgaaacctttctctgtatgtcttctgaatgctctaactggaacattactcgtagcggcttttgtggaatgcgctcaaaaaaagtagatggctttattgatttggattcatatgatactattgctatgaatcttaatggatatttatgattttatatatctact

SEQ ID NO: 49377 - DNA, 216 bp, Glycine max
  Clone ID: LIB3107-049-Q1-K1-A3
tgggaacctaaagatgctaaaatataattaatacctagttaacatccaattcttctgttgcgtatatattttacaactacaaagctccgatctaattcattgacaacataaccgatagaataattaacctcatctcacagtctttcgtagcggctaactcttcatacttcaatatctccgtcaaagccgataaccctaacgacaagatcgggatcc

SEQ ID NO: 49378 - DNA, 387 bp, Glycine max
  Clone ID: LIB3107-049-Q1-K1-A4
tgaaaccaagacatagcaaacgatgcaaacgctttattcatttgcagcatcaaaatgagtggtagcaacgatggtagcggcagctggagctctaggtttttgaaggtggctagtgcagctgccgctacagccgccgttgccggcggtttatatgccattctttcatcctcaacctctgctagctctgagatggaagtgccgtttggcagcgcacggcgtgagagcaaagaacgtgactatggtggctccgggtctcatcctcgcgagggtgccaccacggtcagtcgttggaagaaacctgagattggttgggtgaagctgaacgtggatggtttacgcgacccatacaaaagttccttcgctggttgtggtggggttcttagggac

SEQ ID NO: 49379 - DNA, 429 bp, Glycine max
  Clone ID: LIB3107-049-Q1-K1-A5
gaaccgaaagaggggaaaatataattaataccgagttcgcaaccaattcttctcttgcgttgaattgggacaacgagaaattttggatctcagattttggcaggaaaaaaaattgcatttgagtcaaaataacagagtgtattgtagggtcttagttcttgatactgtgctaaatttgatggatggcggagaaatcatgcatcaagcgccttcagaaggaatatagagccctttgtaaagagccagtttctcatgttgtggctcgtgcttcaccgagtgatattcttgagtggcattatgtgttggagggaagtgaaggaacaccttttgcaggtggatattactatggaaaaatcaagtttcctcctgaatatccatataaacctactggaatcagcatgactacacctaatggacggttcatgacac

SEQ ID NO: 49380 - DNA, 234 bp, Glycine max
  Clone ID: LIB3107-049-Q1-K1-A6
gaactttaagaggtgacaatataattaataccattgtcgcatccaacagttgtgttgcgttcaataagtacaactagagattacggatctcagatgatggcattaaaaaaaattgcatttagagtaaaaataacagattgtactgtacttgactagtatttgatactgtgctaaatgtgatctatgacgctaaaattatacattaagcaccttcatatagaatatatagacctt

SEQ ID NO: 49381 - DNA, 417 bp, Glycine max
  Clone ID: LIB3107-049-Q1-K1-B10
ctacagaaggacgacagggaagagggactgctatgaatctctcttatcttactcgggggcccgagcgtaacgatgctcctctttatgccacacttcccactacagctactactattggaaataggcctgagaattttgcgattgcagggcgtcatttgaaatactgattcacgacgaggcatacacaggacgtaccggctcttacggattgctccattcgcattaattgcacacagtttcggatgctacttggacccaatgggagtagaaaatctaccctcttgaatataatggctaggtctcttgacttcaacttcaggaacagtgtacgcgaatacacctaacagtctcgtattacacaatgcagatcatcaggtggtaatgcctactgtacatcctgatgttgcataaggactt

SEQ ID NO: 49382 - DNA, 299 bp, Glycine max
  Clone ID: LIB3107-049-Q1-K1-B11
cgtcttgtctatttaatctacattacatggtagatgcaacatttcgtcgaagggttttcatctatactagtctatagaatttcttctatgttaaacgacccttaatattatctttgcgtaatcaatactattaatttctcattctttaagacactaattatcaaactatatcgagaatactacttgtgtataacaatttctgtgacccagaatgagctattagctacacctatacctcacaaggatatcactgtcattgatgattttcacttaattatcgtctccaactactgttactt

SEQ ID NO: 49383 - DNA, 453 bp, Glycine max
  Clone ID: LIB3107-049-Q1-K1-B12
accgaacttcaatttcggcctagacctacgcacccgtgctacaagacgacacaacatatagcacttttcacatgtatgcataaaaatgtgaattaccgcgaacaatcaggaactttttttggtgtacaaactatatagtatgtccacattgaaatatctacgcaattaatatcacataacaagacagcattgttattatctgcatacatgattacatcatataacccgaaaaaccataccaaatatctacagctgatagaatctgacaatttagcatatttaattatagaataataagattagtagtcacaattctacacctataactatcattttatttttcttaaaattgaatcacatctacacgtttacattcttaccgacttatattatgccatgttttataatagtaaatcaaactttatctacaacattgaattatcaaagtattta

SEQ ID NO: 49384 - DNA, 384 bp, Glycine max
  unsure (1)..(384): unsure at all n locations
  Clone ID: LIB3107-049-Q1-K1-B3
acctgtgcatgctgctgctggaggtatttttcgtagtcatcttggtggcgtgttggcatgcttctcttattatgttggtattcaataagctttttttgttgagatttttggggctattattgctcttgaaatgactaaggagaagggttggaaccgcacctggcttgagtgtgattttactttggtgattcatgctttcaaaaaaccttctattgttccttggcaggttagatatagatggaaaaattgtttgtctttttgtaaacatatagttntttttttctctctcatatctttagagaagctaattcttatgcatacaaacttgtttcttttggtgtttcatctaggactacaactttttgggttgactccatacttttc

SEQ ID NO: 49385 - DNA, 400 bp, Glycine max
  Clone ID: LIB3107-049-Q1-K1-B5
cacctccgatagggattataattggcatgtcttgtgttggagcaatggacggtgttgtattcgatcacactggtcaattggttaaatgtaatggcatctcattcgctataggtgactatggatattactttgcacgacattccgtgttcccaaatatttaccagtctatggctgacaggacacaatttaccacaacactactaatatgtaatggcttgtgtgtcaagatatatgcaggcactgcaataatgggatatctacatgtttggtgatggcactctgacatagataacattgtatatgccaccagactcatttgcttccaaagctgcattgaggacaacaactattaacccgccgtctaaatctgctcagttgatgaacaaactgtcatctagtt

SEQ ID NO: 49386 - DNA, 361 bp, Glycine max
  Clone ID: LIB3107-049-Q1-K1-B6
ttagaacacctcagattgggaacataatgtgcatgtataacgtttaaggaatagatagatatttattaggtcacagtgctcaattcattaaatctaatatacttccattcgatattgctgtctaaggattttaattttcaactcattttaatcttatacatataaaccaactctatagcttacacacatcaatttacaaaaggactaacaatatttaatcatactatatatcatttatatatatacactcataaacatttatatctcatatttgattatagcacttatactaatatgacaatgtatataacattaatcacatttgcttttatacttatcatttaaacaactataattaaca

SEQ ID NO: 49387 - DNA, 423 bp, Glycine max
  Clone ID: LIB3107-049-Q1-K1-B8
ttaaggaggaagagtgaagagaatggctccgaagggtttaacctttctggctgtgttaatatgcgtttcagcactgtcactgagtccttctgttgcgggggaagggcaaaataatggccttgttatgaacttctacaaggaatcatgccctcaggctgaagacatcatcacagaacaagtcaagcttctctacaagcgccacaagaacactgctttctcctggctcaggaacatcttccatgactgtgctgttcagagttgtgatgcttcactgttgctggactccacaagaaggagcttgtctgagaaggaaacagatagaagctttgggttgagaaatttcaggtacattgagaccatcaaagaagctttggaaagagaatgccctggagttgtttcatgtgctgatatcctcggtctctc

SEQ ID NO: 49388 - DNA, 249 bp, Glycine max
  Clone ID: LIB3107-049-Q1-K1-B9
tactggtccacgaagacgacagatggctggggatgccaaatgacgaccgaggggtacagttgctagaagactacatagggctactgttgcgaaaagacaacctacggttacgattattagatgactacagatagttactggtttgaaaagacgtcataatggttctgcagctagaatacaacagaatgatacatgcatgtgagaagagacatacttatcaactagacatacatagatcacatgaaggta

SEQ ID NO: 49389 - DNA, 364 bp, Glycine max
  Clone ID: LIB3107-049-Q1-K1-C10
aaccattctcatacgcctgataaaaacaatatggggatgcgccccatacatgtgtaggtagaactttaatgtgagaggagtggttcatttctataaattatgtttttctcgagggatttttccttgattattatattattgaatttaatacaaagatataattattgtctacatcttaatgatttactaagagacgtgttttaatgaattcaattcacattaaatgttgcttgataaaattatttgattagtcaagaatggataataactataattagaaattgaatatagcaaatgagttctattcatatcattcataagcttgcattgttttggagtgcacatccacctgttaagtattcgt

SEQ ID NO: 49390 - DNA, 401 bp, Glycine max
  Clone ID: LIB3107-049-Q1-K1-C12
aaccattctcatacgcctgatataaacaatattggtatgcgccccatacatgtgttggtagaactctaatgtgagaggagtggttcatttctataaattatgttgttctcgagggatttttccttcattattatattatttaatttaatacacaaatataattaatgtatatattttaatgatttactaattgacttgttttaattaattatattcacattaaatgttgtcttgattaaatatataaataaatcaagtctggataataattataattagaaattgaatatagcagatgagctcgattcatatcattcataagcttgcattgattgggagtgtacatacaccttttaagtatttgacgaatagttatattgcttactttatgcatacttatt

SEQ ID NO: 49391 - DNA, 366 bp, Glycine max
  Clone ID: LIB3107-049-Q1-K1-C5
gacggacgagggtttggtttcgggtatgactttgttcacagtcactttctgcgcttcactcactcccttcgtgcgtgcttctttctttgtctaactcttgcgaaaatgcgtgagattctttacatacagggagggcaattctgaaaccagatctgagcgaatttcttggacgtggtgtgcgctgagcacgggatcgattccactgtgaggtaccagggggacaacgagttgcaactcgagcgagtcaacgtctattacaatgaatcgagtttgctgaaggttcgtgccgaaggcggtgctcatggatctagagccagggaccatggacagcgtcagatcttgtccctactgtcagattttcctacc

SEQ ID NO: 49392 - DNA, 183 bp, Glycine max
  Clone ID: LIB3107-049-Q1-K1-C6
gactcacgagggtttggtgaccgggatgactataaacacagtcacttacttcacttcactcactcccttcgtgcctacaactttcttatgtataactctgccaaaaatgcgagatattctctatatacatgaacatcaattcttaaaccagaactgagcaaatttcatgcacatgttgtacgc

SEQ ID NO: 49393 - DNA, 405 bp, Glycine max
  Clone ID: LIB3107-049-Q1-K1-C8
ggtgtgagagagcgagcgagcgagcggtttcaaagagaggatttgggattgggaaggcgagggattgcgctgcgtctcttcctcttctctttcgattcatccctcattcataatcttccaatccaacaacctcagcctcacactcacacatacacacatctgaacgcgtatcgtccctcccatggcttcaaagcgcatcctcaaggagctcaaggacttgcataaagacccaccaacttcttgcagcgctggtccagtagctgatgacatgttccattggcaagcaacgattattggtcctgctgatagtccttatgctggaagtgtattcctagtcactattcactttccttcggattattctttcaaaccttccaaggttgcctttaagacttaagtgtttca

SEQ ID NO: 49394 - DNA, 404 bp, Glycine max
  Clone ID: LIB3107-049-Q1-K1-C9
aaccattctcatacgcctgataaaaacaatatttgtatacgccccatacatgtgttggtagaactttaatgtgagaggagtggttcatttctataaattatgtttttctcgagggatttttccttcattattatattatttaatttaatacaaaaatataattaatgtataaattttaatgatttactaagtgacgtgttttaattaattaaattcacattaaatgtttcttgataaaataaataaataaataaagtatggataataattataattagaaattgaatatagcaaatgagttcgattcatatcattcataagcttgcattgtgttggagtgtacatccaccttttaagtatttgacgaatagaaatattgtcaaatagaaacatacttatacaaa

SEQ ID NO: 49395 - DNA, 115 bp, Glycine max
  Clone ID: LIB3107-049-Q1-K1-D1
ctacacgtatttcttgtggggctcaggggcagttttaaaaaaccttgggaattaactctgattactgttgtagtttttgctttattgacagcatcttttggtgtatccttgtata

SEQ ID NO: 49396 - DNA, 385 bp, Glycine max
  Clone ID: LIB3107-049-Q1-K1-D10
ggttgcggattgctcccaaattcttcaccacggggcctcttcggaccatttgacccttcgcatgtcgcttctcagtccgttccatcgctgactcttctcctttcaacaaaatccgcattcaaagggatgatactgcatttgatgcatatgtcgttggaaaaaacgacgctcctggaatcgttgtgcttcaggagtggtggggtgtggactttgaaattaaaaatcatgctgtgatgatttctcaacttggtcgtggatttaaagctcttattccagatctgtacagaggaaaggttggtctagatgttgcagaagcccaacatttgtttgatggtcttgattggcaaggtgctgtaaaagatatcaatgcttcaagtaactggct

SEQ ID NO: 49397 - DNA, 268 bp, Glycine max
  Clone ID: LIB3107-049-Q1-K1-D11
gacacctaaggtcaaactgcgatacccggtgagggtaagcatatcaataagcggagaagttacaacacatacattaactaaaaatgactctatatacaggatatatgcgttcttacactatcatacaacgtcattaaatgtctatacttgcatatatatgaaattcattgtaactatcgataaactaaacgcactgtgcacccttagccattaatgatcttattaatcttgcctgacattcacatattgatagcttaactcatacctt

SEQ ID NO: 49398 - DNA, 419 bp, Glycine max
  Clone ID: LIB3107-049-Q1-K1-D4
agaaggggatccccaatcagagagaaaagttagggttcacaacttttccttttccttttgcttgcgaatctgaatcaaataatcaatcatccattcattattcatcatgtcgtcggcgaagaaaatcacgctgaagagttcggacggcgaggctttcgaggtggaggaggcggtggcgctggagtcgcagacgataaagcacatgatcgaggacgactgcgccgacagcggcatccctctgccgaacgtgacgagcaagatcctggcgaaggttatcgagtactgcaagaagcacgtcgaggccgcgaattccgaagacaaacccttcgaggacgatctcaaggcctgggacgctgaattcgtcaaggtcgaccaggccacgctctttgaactcattctggctgctaactacttgaaca

SEQ ID NO: 49399 - DNA, 400 bp, Glycine max
  Clone ID: LIB3107-049-Q1-K1-D5
acaatatgaaaaagaggaaaaagattctaacgaaatataactaatgttctttagaataatcaaaaagaatattatactcaaataaattttagatagaaaaaagacttaaaatggaggatctgaaatgcgagatctaaaaacatatctttacgttgcaccagtagtacgtactctatggttcggggctatggcgggtctcttgatagagatcaatcgttattttccagatgcatcagatataccctttattttcattctagttattgacacagaaaggggtcaagactattatagatccagtttagtatttactctatcgagttaatatgtcatgaatcttctgatctttattttgtcagatatctcttcttggttttacaattctaatagcatctgtttt

SEQ ID NO: 49400 - DNA, 263 bp, Glycine max
  Clone ID: LIB3107-049-Q1-K1-D6
acactatgaacaacagctaaacggttctaaccaaatatcactaatatctctttataataatcaacaataatattaaattcaaatcacttttatatagaataatgacttaaccaacacaattcgaaatgctacatctaaaaacatatcttttcgcgttaccacgagtaactactctatggaccgaagccttgtctgcactcttgatagagatcaatcatttctttccaaattcattcatattcccatttttttcattctattta

SEQ ID NO: 49401 - DNA, 315 bp, Glycine max
  Clone ID: LIB3107-049-Q1-K1-D8
gttatggtttataggtttcatgaggatgagcatggggaggttgttgctgagactaagaggcctgatttggagccttacattggattgcattatcccgctactgatattcctcaggcttctaggtttttgtttaagcagaatatggttaggatgattgtggattgtcatgcttctgctgctagggtggtgcatgatgaggctcttgtgcaatctctgtgtttggttgggtccacgctcagggcgccttacggttgccatgctcagtatatggctaacatgggctctactgcgtcgttggtgatggctgttattatc

SEQ ID NO: 49402 - DNA, 328 bp, Glycine max
  Clone ID: LIB3107-049-Q1-K1-E11
tggggttctagtgtgtgattgtttggggatgtaactcgttcttcttctgatgctgttctgtgtttgaactagttctttctctcaccctaaaatgtcttactgcagtggtaactgtggttgcataagctcctgcaagtgctcaaacactctgacagatgctgcactatgtacccacacttgatctacactgattcaaccaccaccgataccttgctcatggtagtgtcacctgttaatgctcaatttgacggtactgaaatgagtgttctctataagaactatcgctacaaatgtggaccaaactgctcctgcaacttttgcactttca

SEQ ID NO: 49403 - DNA, 338 bp, Glycine max
  Clone ID: LIB3107-049-Q1-K1-E12
ggtgctagcgtgtgattggtaggggatgtaactcgatctggttcttatgctgatctgcgttcgctctagatgattctatcttacgaaaacgtcttgctacgatattaactgtctatactgtaactccaattaaattcaacgtccgctgctttagaagctagatactcggcaaaaccgtgctacacatcaaacttatacgaccgtcaccacattcatcttactgccacttgctaaagatcaattagaggctgcccaaatgtgttttccaacagataaccaatcctaatgatgaataccacactgcttgtattgccgcattaattgcgcgtgatgtgttg

SEQ ID NO: 49404 - DNA, 410 bp, Glycine max
  Clone ID: LIB3107-049-Q1-K1-E3
gtgacttggaataagtggaaacaaaatgtattctgttttttgccctccctgtttttttgccataatgtcaactactttccccacatagtcagtgagatttttaagttctgcatgcttattgttctattgcagtgaatagttcagaatttggcctagacgttgaagattacttaataggtgagtcttctaaacatgtacttgcattaattgtttatgtgtaatgatcattaatggagatgaatatgattctattgcatgttttcttaggctagcttccttcaagaagtgttgactaatttaaatatgattgtcattttgaagaacatgggtgtggcagttagaatcagtagggtttccaaggcaaaggagctcaataaccaaatgcgttatggtatactgttagttatatt

SEQ ID NO: 49405 - DNA, 444 bp, Glycine max
  Clone ID: LIB3107-049-Q1-K1-E5
agttcaactatgaaacatgttcatatggttgatcactaatgatactaacaaatatctctccatccctagatgagatattcattagatgctctattcaaaactcatttttcaagcatttttcaatgacaataaaaacaaagaattgaagctaaggtaatcaaaccataaaacaagcaatcaaaatggaaagaagcaataacataggaaatgacattgaataaatataaagattaattacatgagagtagcttagtacaccaatcccccaacaatagatgaattagtctttcattgtcataaaaggcctcaaaattacaaaatgaaaaggagaaaatgaaagaaaatggaagatggagatagatgagagcttcaatcgtcgcacacaaccctaggtttatgctttcactttcatgtccaagagaatgtcctttatattggacctaa

SEQ ID NO: 49406 - DNA, 274 bp, Glycine max
  Clone ID: LIB3107-049-Q1-K1-E8
attgcttatgattttggtcatggggttaatgtggcgctgccattggtgttctggtggtggtgttcaccggcttatcattgattgtggaatgcacatacttctctgctgtactcttcaaagttgatcaatgttgatgggctccccttgcaattgctggagcatttcttctcattatgtatgtctggcattacatcacggtgaaacgctacgagttttaaatgcatagtaaggtctcaatggcatggattctcagacttggacccagtttatgact

SEQ ID NO: 49407 - DNA, 392 bp, Glycine max
  Clone ID: LIB3107-049-Q1-K1-E9
ggttctagtgtgtgattgtttggtgttgtaactcgttcttcttcttttgttgttctgagtttgcgtttgttttttctctcacctgaaaatgtcttgctgccgtggtaactgtggttgcggaagctcctgcatgttcggcatcggctgcagaggctgcaagatgtacccagacttgagctacactgagtcaaccaccaccgagaccttggtcatgggagtggcacctgttaaggctcaatttgagggtgctgaaatgggtgtgcccgctgagaacgattgctgcaaatgtggaccaaactgctcctgcaacctctgcacttgcaagtgaagtgttgggagagcatgcttcaagcagagatagcccttattaggaatcatgataaactattaat

SEQ ID NO: 49408 - DNA, 176 bp, Glycine max
  Clone ID: LIB3107-049-Q1-K1-F12
ttccggcgtggtccctcgcctacgcactctctcgagcactcaaactcacttacacgtgcactctacttaataactatcggatagaatcacctagattgaattcactcacctatacttttcaacattttgactagaacatccctacctttactccaaatctttgctcatcagcacat

SEQ ID NO: 49409 - DNA, 347 bp, Glycine max
  unsure (1)..(347): unsure at all n locations
  Clone ID: LIB3107-049-Q1-K1-F3
ttacatatatgcgttataggaaggttgactccaaaactttgtgcttaatttgtgcacaccttaattctatgctcaaggcttctatatgcagagttagccagatactgaccatggggttgtagttgtgttgtgatgccctttatgctggaaagggagaaattaggaaactcgaaggaaagatgatttccctcgaggtgaatgatgaaaaggaaaagaaaaatggggaaaagtaatgggagtaacatagaggctgtggagcatcgagaggacagcatggtagttcatagattgaatgaagatttntctcatcaaaagccatgatngatttataacctataatatttaac

SEQ ID NO: 49410 - DNA, 371 bp, Glycine max
  Clone ID: LIB3107-049-Q1-K1-F4
gaatcacgcactatcagtacaacaactcactcacgaagctaaacaatttcatgaagcctgccatggcttcctcgtgtgcttcctctgccattgcagctgttgccatctccacaccaagttcccagaagaatggatcactcttgggaagcacaaaagcttcttttcttagtgggaggaaactgaaggtgaacagttttacagcaccagttggagcacgatccagcactacagtgtgtgcagttgctgagcctgataagcctctgtggttccaggcagcaccccttctccatggctagatggcagtttgccaggagattttggctttgatcccctaggtcttggatctgatcctgagagcctgagatggaatg

SEQ ID NO: 49411 - DNA, 376 bp, Glycine max
  Clone ID: LIB3107-049-Q1-K1-F5
cccaacagtgagaagccgagcgattttggttaccggccaagatatgaagcatttgggcacttgaagtcatcagattttctcgcttatggaatcaaatctgtatcccaagatgtctcgcctgacttgactgatgcattcgatggaaatattctgagccttgagtatgataatttagctgaagtgcacagactctatgaagggggagttacactacctacaaactttcttagcaagatcgcccctataccaatgatcacggaaatttttcgaactgatcgctaacagttcctacagtatccaccatgtaaagtgatacaggtggataagtctgcatggatgactgatgaagaatttgcaagagaaacaattgctggtt

SEQ ID NO: 49412 - DNA, 431 bp, Glycine max
  Clone ID: LIB3107-049-Q1-K1-F6
tgaatcaggtgttgataatcaccagaggtatcttgttggtaagcaagatcatgggaagcatcatgctttttcaaagaaatctgaatcagcacacttacaaaattcaagtaagaagagcaggaatgggtcagatctcaacaatccatccttggataggcatgttgagttacaaaaatctactgttccttctaataactcatatttcaaaggatcgcctacctcccattttagtagaggtggaagtatgccaccccagtaccagcctttagatagtacaaattcatcatttggtaactatggtctgagtggctatgcttgaaatccagcattggcatgcttgattactaaccaacttggcactggtaatctagcacacttggttgaaaatgttgctgcagcattagcaattgcagccccttgaatggactcta

SEQ ID NO: 49413 - DNA, 252 bp, Glycine max
  Clone ID: LIB3107-049-Q1-K1-F8
gggaacagacctgccgcgcaatgatgaagtgtttctcggtgtccttagcctctttatgggttctccttgctctcttttctctgagtgtgtcatctcaaaatatatctgagagtgggctacagcaagctagcctaccaccaagaggttggaattcctatgattccttttgctggacaatttctgaagacgaatttttacaaagtgctgaaatggtttctcaacgtctcaaggctcacggatatcagtttgtcg

SEQ ID NO: 49414 - DNA, 412 bp, Glycine max
  Clone ID: LIB3107-049-Q1-K1-F9
aattcaagcggccgctctatggggtgtgttagatcatttacctttgcaaagggacggggaagggatttattacatgatcgaaaacagaaaatgttgagaactattcaaaactcataagaattaccggaaggggccattgaacagcttgaaaaagtgccaagcccggttaatgaaagtcgaaaccgaatcagttcggtttcaggtgaatggctattctgagatccaactacataaatttaatttaattaattcaatttataccactttggatcaatgtgaaaattacctaaacgaagccattcatttttaacaataataactgattaatcaagatcggcaacaggttttacaacatgccttacagggagctttaggaactctttggagttgctggaacaacgagttacattta

SEQ ID NO: 49415 - DNA, 454 bp, Glycine max
  Clone ID: LIB3107-049-Q1-K1-G10
actcgaatttcaattcccggcgcgacccactcttcacgccttccttcagatgcgataacactacacatcaattcctctacctcatgtaatatctgtttagtcaattaagactgaatatgaccctattttcttttatacatctgctatcgatcctccatacatgtacttccaaaactatgctcatatgtccatttataaacatacatttccaataagtcctataacacactgtatagaattgtccaattaaatcttcaaaaacaaaacatataaatactcgtttaccctgcatataaaaaataccacatttttacactcccataacatgtttcttctactacttatttattctcatacatcatgattatgatgattctgattattattatcaatattattatcattcattattcttattattattaccttttttcattaacattttaatttccac

SEQ ID NO: 49416 - DNA, 375 bp, Glycine max
  Clone ID: LIB3107-049-Q1-K1-G3
tggacttacagggccatgggaaatgctccgatgcctaaaactgaaatgaatgcttacagagctgcaactgcaggcacccctcaacttgttcaagttcctacgagccaacatcagctgcagtatgtcacatactcacagacttaccattcttctcagtccatggctcccaattctgctgcccctgccaattatgcttttgattattcagatcctgctcatgctcaaatatactactcttaacctatggcacccacaatgccttcacagtaccagactatgatgatgcatgaaggctcaacttatcattccttatacagctttaatcaacatcatattataacctcacaaccattttaagccatttcttaataaaaa

SEQ ID NO: 49417 - DNA, 381 bp, Glycine max
  Clone ID: LIB3107-049-Q1-K1-G4
ctctagaatagatagtcaatctagagtccttagagcgactcactgagacattaaattttattcctttaagcttaatgtttttacaagttaagtatttgggcatggagttgtttgcatgtaaaaagattaatatagtttgtatctcccaatgtatgagaattagtttatgttttatgtaccttggtgatcatgttttgtaaggcacataagtgtcaaaggctttgtataagttttgttcttatgacgtatgtgtaagttttagtttacatgcagttaattatggtattcttctattctaagttttcaaaatttagtaatataagcgtgcaaaaagtaaattctttgggctctaacattgttttgatagccaaatcaatagaa

SEQ ID NO: 49418 - DNA, 456 bp, Glycine max
  Clone ID: LIB3107-049-Q1-K1-G5
aattcgagcggccgctttttttattgtatattaaatatatttattggatcgctataattacggatattgttataatatgagaaggataaaataaaagctgatataataaattagcactagaaaaatactaaatatatactaactttttctttcatatcattttttatctctatttttatttttcatcgtattatttgttacatttataatttttatcttctttatctagtttttctttttgttcatacgtcccaaaaatagaattgtgtatatcattactcttaatactttataaaactgtgaaggatttttttttcagacatacttttaataaaaataattcatttatttaaaatacatatgtacgaatctataattctacataatagctaaactcgtcttacatataataacttaaaattatgcaaattcataacttaatcttatatacctact

SEQ ID NO: 49419 - DNA, 246 bp, Glycine max
  Clone ID: LIB3107-049-Q1-K1-G7
actcgctagaacacttcagatttgatattaaatagatatacttcactatcatggttactgataaatctttaatattcaaattatcttataatttcttttttaatttaaaaactctattcatatacatatatttttactaactttttcacttctattatttattatatttattttcatatatcattttattatatgtttcatatttaataattttcattcttaaataccttttatttatattttata

SEQ ID NO: 49420 - DNA, 350 bp, Glycine max
  Clone ID: LIB3107-049-Q1-K1-G8
gaccttcacagaagcaattaatcatatggctctctggttctcactataaacacaaaacccttcccatcctaattaaggtgaaaatgaaggcatcacccattgcttggttcactttggtggttgtgtttcttgtggctgaagttcaagtttcaatggcagtgacatgcagcccagtgcagctgattgcatgtgtaagtgcaataacctcttcaacccctccatcaaacctatgctgctccaagatcaaagaacataaaccatgcctttgccaatacctcaagaaccccaatctcaagaagtttgttgactctcctaatgcaaggagagttgctagcacttgtggaactccc

SEQ ID NO: 49421 - DNA, 379 bp, Glycine max
  Clone ID: LIB3107-049-Q1-K1-G9
tctgctggttgttcagcttcaacaagtgttaaaaggggtggagattcactgcggaaattcgatggtgctatcactttcacaaggtttgctgagaagcatcgccgactgtcaaatgctttcattaggcagaatccaggtttgttggagaaatcactttccatgatgctcaaggcaccaaggctgatagacttcgataacaagagagcctatttccgctcaagaataaggcaacaacatgaccaacacttgtctgggccattgcgtataagtgtaaggcgggcttacattttggaggactcttataatcagctaaggatgcgttctactcatgatctgaatgggcgattaaatgtgcaatttcaaagtgaaaagggtattg

SEQ ID NO: 49422 - DNA, 311 bp, Glycine max
  Clone ID: LIB3107-049-Q1-K1-H10
cgtctgcgcctgatctctgagggctctcacacactggttcggtgctcctaatctcaaattctatgattaccgttcccaatttctccaccgatcacaacatgaattcaactggacctactaccaaaggctgaacgttcaagctcactgcctccagatccattccacgatcgcagctagctaatctgcaattccacctactaagacatggtcgattccttaatgctgaccaatacccctagcgtcttcgtgctgatactcctgtgcacctgtctgcacaactcgattatctcactccttatgttactgaattc

SEQ ID NO: 49423 - DNA, 235 bp, Glycine max
  Clone ID: LIB3107-049-Q1-K1-H12
aagacatcatattagacatttctatttacctaatattcattgatctaactacaccctgacaagctctgttaccaaatctctgatgctgttctctacacttgcctaaacattacccatacagtaacttttcctgcgaaacatgcaccaaaaccaacttcgtcatgctcttctgataaatcaccaccaaagttcatgttcactacgacaatatatatcgtgacacctgcaataacat

SEQ ID NO: 49424 - DNA, 431 bp, Glycine max
  Clone ID: LIB3107-049-Q1-K1-H3
gaaatcaatcaaaactcttattagaagtaggtattttacaattttgtaagactaattgcagtgcatgatgattgggatgaccaagtctatcatgccaaagagaggtgatcctattacatggatttacaatgggcttgtcaggcttattacatggattaacagagggtttttcagaactagaaatacaaggaaaactagaagaagcagaaactggatgttggagaagctgtagagaccatcaggaccaacattacctttaagttagacttcattggtaacctgcgattttacagcacaataattagagtgaaattcaaagaaaacacctttgtcccttgcaaattgattaacattaataagatttttagtaatgttaggaacatgtaagagatgtttaagagacaaagagattttggtattgaaaggagaaa

SEQ ID NO: 49425 - DNA, 263 bp, Glycine max
  Clone ID: LIB3107-049-Q1-K1-H4
agaatgggcaagagagagaagaagaagttgttgggttgagtggggtttggattggatttctaatctaatctatacctttctttttcctatgcttttaaggcacaaattcttctaccttctctcttctttcttcttcttctcctgacccttattattattccttgcccttaccctttatgcaatggaaggaataaagaataactatattattatctttattgtaatctatctctttattataatattaattataattattgttg

SEQ ID NO: 49426 - DNA, 420 bp, Glycine max
  Clone ID: LIB3107-049-Q1-K1-H5
gatgcacatcacatgccggagacctgaggctacctctctctttcacattccctcagcgcttaatttctgtattcaaaacttttggcattaattgttttccaataccctttgagactacaatattaaatttgtggtttttacatatatatatatatataatggatagggtgacacagatggcatcagagagaccagtggtgatattcagccggagttcctgctgcatgtgccacaccatcaaaaccctcttcagtgactttggagtgcatccaaatgttcatgaacttgatgagataccaagagggaatgacattgagcaagctctttcaaggctagggtgcagcccctctgtgcctgttgtgttcattggcggtgagcttgttggtggagccaatgaagtcatgagccttcaccttaacc

SEQ ID NO: 49427 - DNA, 368 bp, Glycine max
  Clone ID: LIB3107-049-Q1-K1-H6
aggctcatgtaaaaagtttgctgcgccctgatttccgggtgctggcacaaaactggtgggttcgcaaaggtggtgcttataccggtgaggttagtgcttaaatgcttgttaatttgggaattccttgggttattattggtcactcttaacggatgcagcttttaaattaatcaaacgagtttgtgggatataaagttgcctatgcacttcaacaaggtctaaaagttattgcatgcattggggagactctcgaacagcgtgaagctagtacaacaacggctgttgattctgatcaaacaaaagcaattgcagctgaaatatcaaattgggacactgttgatttggtctactagccactttgtgccatt

SEQ ID NO: 49428 - DNA, 355 bp, Glycine max
  Clone ID: LIB3107-049-Q1-K1-H8
aattcctggtcgaccactcgtacgatacgcctccgactgctgctagaagacttaaggggcaagagagagaataagaagttgttgggttgagggtagttttgattggatttctaatctaatctatacctttctttttcctatgcttttaaggcacaaatccttctatcttctctcttccttcttcatcttcttctgacccttattattattccttgcccttaccctttacgcaagggaaggaataaagaataactttattattatctttattgtaaatctattcttatattataattataattattattattgacgtttattattccctcaatattgattcttcgtgtcttttcaa

SEQ ID NO: 49429 - DNA, 423 bp, Glycine max
  Clone ID: LIB3107-049-Q1-K1-H9
ggtctgcgcctgatttctgagttctctcacacactcattcggtgctccgaatctcacattctacggttagggttcccaatttctccaccgatcagaaaatgagttcaactggtggttctaccaatggcggaaggggcaagcccaaagcctccaaattcggttcaagatcgcagaaagctggtctccaattccccgttggaagaatcgctcgattccttaaagctgggaaatacgccgagcgtgttggtgctggtgctactgtgtacctctctgcagtgctcgaatatctcgctgctgaggttttggaattggctgagaatgctgctagggataacaagaagaatcgcattgttcctacgcacattcagcttgctgtgaggaacgatgaggaactgaacaagcttttggtgtctggtaccattg

SEQ ID NO: 49430 - DNA, 448 bp, Glycine max
  Clone ID: LIB3107-050-Q1-K1-A10
gaaagacgtaacaatgggtggatgtaagggacctatcaccacatttattgtggaacccttcatgccgcaccaggaaaaatgctatttcaatattggcttaaaaagacttgggtgcgcaattaacttcttcgaagtgtggaggaatggaaatcgaagagaatggggataaggttaaaaccatatttatccccacacgagtgtccctcacttcagaaacatgcgccgagctggtggcaacccttcctttggagatcaaaggagaaatcgcggcgtttatcaaggcaggtgataccctattccaagatctggactttactttcttggaaatgaatccttttgcgcttgttgatgggaaaccctatcctttggatatgacgggtgaactagatgatactgctgctgtcaagaacttcaagaagtggggaagtattgaatttccaatgccatt

SEQ ID NO: 49431 - DNA, 77 bp, Glycine max
  Clone ID: LIB3107-050-Q1-K1-A11
gaaagaggtaacaatgggtggatgtaagggacctatcaccacatttattgtggagcccttgggaccgtacaaggaag

SEQ ID NO: 49432 - DNA, 395 bp, Glycine max
  unsure (1)..(395): unsure at all n locations
  Clone ID: LIB3107-050-Q1-K1-A2
ttaaagatgaaattgtcccagttgccactaagattgtggacccaaaaactggtgaggagaaatctgtcaccatttctgttgatgatggaattcgacctggcacaacagtgtctgatctaggaaggctcaaacctgtgttcaagaaagacggaagcactactgctggtaattctagtcaggtgagtgatggtgctgcagctgttctgctgatgaaaagaagtgttgcgttgcaaaaggggctacccattcttggtgtattcaggactttcgcagcagttggtgttgatcctgccataatgggtgttggtcctgctgctgcaattcctgttgctgttaaggctgcangtctagagcttgatgatattgatctttttgaaataaatgaggcatttgct

SEQ ID NO: 49433 - DNA, 339 bp, Glycine max
  Clone ID: LIB3107-050-Q1-K1-A3
agactcaattgcatcagcataagaagcataagctgtatagagacacatgaggacccaaaaactgggaattgaagatggattgcagtaacagggactcaatcacagagaatcacacttcatcatcattattatcatcatgttcttattcgtcttcttcatcttcttcgtgtgactcactcagcgaagccttgcttttcaccaccatgtgcatcgttggccactccgtcaatgttcacgttaaggatggctctgtctattcctgaatcttccacactgcttttgttcacgcctattacgggtcattgcctcttttttctctcgttgatttctttacacttt

SEQ ID NO: 49434 - DNA, 396 bp, Glycine max
  Clone ID: LIB3107-050-Q1-K1-A4
ctgctttaagtttgaggctttctactttctatttgtagagtaggactaagctcatacactgatcatgggagtggatttaagacaagtggtggcggatgtactcaccctgacaaagttcgtcatgcttatacacatgatcaaaagagaccattttgatgctgttgatgataaacttgctggaacggaggatgtcagctttgaaagtacaaactttgatactactcatggtagaaagaacatccggatttggaagggagatggtgatgagttaaaaccatgttggcttaagccatctgaagataacgtggatcagactgaagcgtatgctaccttttctttaaccaatgggcctgagtaccatatatttgagatagcagatgcaatggttgttgctcg

SEQ ID NO: 49435 - DNA, 392 bp, Glycine max
  Clone ID: LIB3107-050-Q1-K1-A5
ggcatccgaatgtttcggtcctcgtatcctcctcatccttttatgcgtgtcttcccccaacgaaaccagcgagaccaaacgtggtaacgctttgaatctttgaattcattcaaagatcccccttctgtctccctctctacgcatatcagggcactatggctgccacggtgaaacaaatgtctttgatcgtgtcactgttcggcgtggtgtccttcattttgggtgttgttgctgaaaacaagaagcctgcggcaggaacacccgtgcctggtttggatggtgtctctgtcacctgcaagtacccagctgatccaactgttgcattggggtatccttctacagcatttcttgttgcatccactgtgactggatatctgcctttgtttaccctt

SEQ ID NO: 49436 - DNA, 357 bp, Glycine max
  Clone ID: LIB3107-050-Q1-K1-A6
ttaaagatgaaattgccccaggggcgcactaagattgtggacgctaaaactggtgaggagaaatctgtcaccatttctgttgatgatggaattcgacctggcacaacagtgtctgatctaggaaggctcaaacctgtgttcaagaaagacggaagcactactgctggtaattctagtcaggtgagtgatggagctgcagctgttctgctgatgaaaagaagtgttgcgttgcaaaaggggctacccattcttggtgtattcaggactttcgcaacagttggtgttgatcctgccataatgggtgtaggtcctgctgctgcaattcctggtgctgttaatgctgcatgtctagagctt

SEQ ID NO: 49437 - DNA, 337 bp, Glycine max
  Clone ID: LIB3107-050-Q1-K1-A9
caggaaccgatacgtgctttggaggatgatggcttgtgcttcacagacgctgattgctgcggattcatgctcgtttccgagccatagagccatgagaaagtcgcagagactcttcagtcaaaatacttccaatctagttttaacggtcagagcttcgtctgaagattccgactgcaatgtcgacgaatgtgccccagataaagaggtcgggaaaataagtatggaatggctagctggggagaaaactaaagtggttgggacatacccaccgcggagaaaaggatggacttgctatgtagaaaaggacactgctgggacaacaacatatattcattga

SEQ ID NO: 49438 - DNA, 52 bp, Glycine max
  Clone ID: LIB3107-050-Q1-K1-B1
gagacctcaggtcaggcggggctacccgctgagtttaagcatatcaataagc

SEQ ID NO: 49439 - DNA, 449 bp, Glycine max
  Clone ID: LIB3107-050-Q1-K1-B10
aactgaacagccttttgggtctgccgaaaacccattcttgttttttaaatccgacttaatagagttaagagagttcataaaaaaaaaaaaaacaacaattaaaaaaatggagaacgaagtattttcgaatatttttacgtttaagaaaaaaggtttttagaaaaattaatattgcaaaagaaaaatgggtcatcaaacccattttatttataaaaaaaagaataagagaattctggcaaagaaacccaattctattattgcaattgaaagaaatatacaagttgactgaagctaaaaaagaaaacaattcaataataagtaatggaatgatccaaagctcgtctgggtctatagattcgataattttgtcattgagagaacgaaagatgaaagagttgactgatagaataaacaccatgctaaaaataattgaaaaaatgaaaaaagac

SEQ ID NO: 49440 - DNA, 292 bp, Glycine max
  Clone ID: LIB3107-050-Q1-K1-B11
gggatttcgagttcaaaagagaagtggaaagttgaaattgattcaagagataagaagtcaaaaaagcctaagtaatctatcatttgtagcagaagtctttgagatacgcccactgcttcatgtagttgaactgaaaaaatcttttggagactcatcagcttacagacaggtacaagataggacaaggctagttcaatgtctgtctattttaagtgcttaaaactacgtcttttactctaaaaaaaatacattttcatcacttggaacatcattcccatcctttgcaagtact

SEQ ID NO: 49441 - DNA, 415 bp, Glycine max
  Clone ID: LIB3107-050-Q1-K1-B2
acgacagaaggggattcataagtaagataaaaacctgggtctctgtcaaacacaccaatttctctctctctctctctctctttttcctttctggggttttaaggttgtttgcttttgtatctcaatctccaggttcagtttgatcttatgtcaatgaaggatttttagacaaaacccagattcacaggaaaaacccttaaagcggagaataaaaggcaacgacttttcatctctacgcaagtgattatggcggttgttgagaatgttggggccaaaatcggttcttcgagccagagtttggagaacggtgtagtgtcagcggattcgggtgaagttgagaaatcgaaaaccagaggcgatcaggatatgaacaacggcgttttcaaccatcaacagcaccaagagacagtttccg

SEQ ID NO: 49442 - DNA, 400 bp, Glycine max
  Clone ID: LIB3107-050-Q1-K1-B3
gagccattagtctttcaattttattctccttcatttccaattggggccttacagggaagattgacaatggatgttggtaggatgtggaagcagtggagattattgacgtactcactgtgaagccttaggttttattatccttacgttatctttgttttcttaattgttgtttctaacaggaaccataaagagagagtaatagggagccaagggaatttgtatattactttgtttcttctacaggaggaatatgggtagcgttaatttcttcatagatgaacaccaagtttcctggaactgacctacccaattatatcagcaagaattgaggaacatttgatatatcatctcacatgagtttgttttcttgtttcttagatgaaggttgctggtttgtctt

SEQ ID NO: 49443 - DNA, 411 bp, Glycine max
  unsure (1)..(411): unsure at all n locations
  Clone ID: LIB3107-050-Q1-K1-B4
agggttatagatcaagaggtgaggatttataattcagcttattcaaagatttaataatgatatgatactttacaaaaaaaacattcttctaacttaagtacctataaatggttctactagtaaaaaccatcggagtacaaacgatctcaactaagggtgagttgaaatctaataattaatatattgacaatatcatttttgttagcatatgatatagcttgtagtgtatccgtactattaatgtatgtagtaagttgacatttaatgattaatatgttgacaactagaggtgattatttataatatcattgattcttctattaatccaattcacaaactcatagcttttatgtttatccttttatatgacagaagtncaatctagtgtttatagcccaatctagtcaaatg

SEQ ID NO: 49444 - DNA, 376 bp, Glycine max
  Clone ID: LIB3107-050-Q1-K1-B5
aacgcttataactcttggagttacattccgtactctacaggttcactcaatgatcttagccaatctaattaaattagatcatatatcagtttactttattgactcgcttcactttaaacccaaacataattagttacaactagatcaatgttaactaatttgcttactaaatcaacatctatttatctttaaacatttaaattcatatattttagacttagaatctaaacatttcctctattggatcttttgatcatttattttgacttttattcactgcctttagtgatattcacttgaaattaaaccaatcttaattggattaattcgatttaaaattaattattaatgatataaaaatcaaagcaaacctatt

SEQ ID NO: 49445 - DNA, 411 bp, Glycine max
  Clone ID: LIB3107-050-Q1-K1-B8
ggcagcgcttgatttgaggccaggcatgcggcactcaaccaccacacggtgtgctcgttcacgctacccctttctgctcttcttctaccttgcaagttttaaaagtataaagatggcagagacattcctatttacctcagagtcggtgaacgagggacaccctgacaagctctgcgaccaaatctccgatgctgtcctcgacgcttgcctcgatcaggacccagacagcaaagttgcctgcgaaacatgcaccaaaaccaacttggtcatggtcttcccagaaatcacgaccaatgccaacgatgactacgagaagatagtgcgtgacacctgcatgaacatcggattcgtctcaaatgatgtgggactggatgcctacaactgcaaggtcctcgtcaacattgatcagca

SEQ ID NO: 49446 - DNA, 449 bp, Glycine max
  Clone ID: LIB3107-050-Q1-K1-B9
cattatcaaatccaatggaagtgataaagggctagcatacatgtgttcaaaagaagaaaatggtagcagattattgggcattgctgatacaccaccacaaaaattcgacccaacaaacatttaccaagaattcgagatcagtaacgatatgtattatggcaaacccaacggttttaatttcaagtctgtggcttccaatggagtaactccatatgccatgacacacaagaattggagagcttattgcaagactctcaagactttccaacccaccaaagaagcgcttggtctcgacgtcacgcttcgagctcgtctccctccgctcacattctccctgccatgtaatttctccagccctattgttgtaaggaaatggtactgccctttcattttcgttcgagaaggcgatgtggattctcaaatcaagaactctccatattacgaaatga

SEQ ID NO: 49447 - DNA, 401 bp, Glycine max
  Clone ID: LIB3107-050-Q1-K1-C1
ggcgtagtatataatcacagtagccgcgagctcgtgaaacacactctgttgttttccaaaaccctaatttatcgaaaggtagggttttgcagagcctcctcctccgttaccagtttcttcttctttatcctctctcctttcttcttccattcctctaacctaagatgggcaagtcaagcaagaaatcagctatcaaggttgacgctgctccagctgtggttccgccatccaagtctgccaagaagggaggcaagcgacaagctcaagatgaaattgagaagcaagtgagtgccaaaaaacagaagatagaggagtgtgctcagaagcataagaaggaggccaaggtgcaatagaaggaggccaaggtgcataagatgaaggaatgtagttcagatgattct

SEQ ID NO: 49448 - DNA, 289 bp, Glycine max
  Clone ID: LIB3107-050-Q1-K1-C12
gtttatctttacttgtgaacggaaggacatatcagtaattctataccacccacttctcaatgatcatcttcttcagattcaattccgatgccctttttggaatcttcaagattccggcaagtaatgggactaatgattacctcattcaacgcaatttcacttctctttttttcacctcgtacgccacgcttccttcttacctttcgacaccaatacttaactgttatttatacttcatgctcgacgcatcacgaatctaacgaattcgaaaaattcgccaaagtgacaa

SEQ ID NO: 49449 - DNA, 409 bp, Glycine max
  Clone ID: LIB3107-050-Q1-K1-C2
gcagaagtgattgaggaaatgggtgatagtttaggggagcctcctgaggttcaggaattgctagatgaaatgggccatcctagtataccactaagtgttatatcaaaagctgcagagctccagtttcagtatactgttgataaagtatttctgggtaataggtggttgcggaaagcaacaggcattcaaccaatatttccatatatggttgactcatttgagagaagaagtgaagcttctctactgagagctacagagtcaagcagctcccttgagaactctaaagtggaagatgataggaaaaatgctgaatgcatagactcttctaagtgcagtttggatggtaataccgaagcaatcaaacaatctagtccaagactaagtctaccatttggtaattggtttcatc

SEQ ID NO: 49450 - DNA, 383 bp, Glycine max
  Clone ID: LIB3107-050-Q1-K1-C3
ggagattgaatttgtaaattcaccttagaaccctaatcccctttttctcaatagactaaatcattccatcattcggtgcaagagggactgacaatagaggcacgcggcaccagattatttccaaattgaagcgtccaagagtccaaattcctcatgttagaatctcttttgtgctcttcaaacgccagtttctctttaattttctcaaattctggtgtttctttaattctctgtttcttttttctaaatgggcattcgagttttccttctggtgcagatttttttttcttttttgtgttttttcttgatggcttgggtagattcagggattttcctttcttttggttgttgcccatcaccctttttgcatgttcttcacatgt

SEQ ID NO: 49451 - DNA, 414 bp, Glycine max
  Clone ID: LIB3107-050-Q1-K1-C4
gaaggcagagaagagaaggagagaggcttgcacctggagagaaaagaggagacaataatacatggggaagctgggtctaaacacggtggagcaacaatctgtggcaccgacagcatccaagtttccgttgagcttttgggaagccacagtggctataacggtggcgctggtttctgcggaggatcttctcggctgtgtacctcaccatgcccgattccgattacagattccttaaactccctcgtaccctcgaagaccttcaactcctacgagatgaccttgagagctatacaagtgactacactgcacaagtcttggtggggtactgcgtggtttatattttcatgcagactgtcatgattccagggactgtgttcatgtcattgcttgctggagcactctttggagtcttta

SEQ ID NO: 49452 - DNA, 394 bp, Glycine max
  Clone ID: LIB3107-050-Q1-K1-C5
tattggatcatcttgtatttcattcctcctttacaatttcctttcaaaaaaaattttaaaaaatattaaaaagtgctcttttttgtgaattttgacccatttggccaccgacagatttcgatcttctccgtgccaaagttgtaatcttttcgacttttggcgaggtgggtcgatccgatttcgctcgaatgattgttggtttgatctgaaaaaggaaaaggaaaaaaaaattgggttatttcggattcaagattttgtccttttttgaaatggtctatttccatagctcaatctctctctgcaagtccgttgatcaatcatcttccatggcgaattcaatatgttctgctgatttcggttcgaaatcgaggcaaatcaatcaccttcagaagaa

SEQ ID NO: 49453 - DNA, 411 bp, Glycine max
  Clone ID: LIB3107-050-Q1-K1-C6
gaatcacattaagtagcgccattctgttgctactattgttcccacaaaaccaaaagccatcttcttcttccatgtcgagggcgcgaagctttgttctgtggcttcacggcctgggtgactctggtcccgccaacgaacccatcaaaaccttattcacttcttcccaattcagagacaccaaatggtccttcccttctgccccttccgcccctgtcacttgcaactatggttctgtaatgccttcatggtttgacattcttgagattcccgtggcagttgattctccaaatgacgagagtagtttacttaaagctgttcgaaatgtgcatgctactatagacaaggaaatagctgctggcataaaccctaacaacatatttatctgtggattcagtcaaggaggtgccttga

SEQ ID NO: 49454 - DNA, 308 bp, Glycine max
  Clone ID: LIB3107-050-Q1-K1-C7
atgagacaaccgaaaggaggggaatcacattgaatattcacattataaccgctagtattctttttatgaagggactaaacaatttcatcattcatgacaagagcgacttactatttaatctcgcttcactcacttatttacaattttaagcgttccaaagtcctaattccttatgtcaaaatctcctatgtgctcttcaaacgctcattctctcttaattcatcttaaattcctgcgtatctccaattctatgtctctcttttctaaatgggcattcaaagttttacattttgttcacaattatatta

SEQ ID NO: 49455 - DNA, 399 bp, Glycine max
  unsure (1)..(399): unsure at all n locations
  Clone ID: LIB3107-050-Q1-K1-C8
ggcaccgcttgagcagacttaacaacagcacaaagcgggttactgtctgttcaagctaccatctctctctctctttcttagtgcctccttgccagaagttaaaatggcccaagaaactttcctattcacatctgaatcagtgaacgaggggcaccctgacaagctctgtgaccagatctccgatgctgtgctcgatgcatgcttggagcaggaccctgacagcaaggttgcctgtgaaacctgcaccaagaccaacatggtgatggttttcggagagatcacaaccaaggccaacgtggactatgagaagattgtgcgtgacacatgcaggaacattggttttgtctctgatgatgttggtcttgatgctgacaanctgcaggtcctcgtcaacattga

SEQ ID NO: 49456 - DNA, 394 bp, Glycine max
  Clone ID: LIB3107-050-Q1-K1-D1
gggagaagaagtagaaaaaggaagaaatatagtgataatttgattcttcgtcgtcgtactaaatagtagagaaaatagaaattgtttcttcgtctttacaagaaaaaggagtaattaactgtgacacgttcactaaaaaaaaatccttttgtagcgaatcatttattaagaaaaataaataaacttaacacaaaagcggaaaaagatataataataacttggtccagagcatctaccattatacctacaatgattggccataccattgctatccacaacggaaaagagcatttacctatttatataacagatcgtatggtaggccataaattaagagaattttcacctactctaaatttccgaggacatgcgaaaaatgataatagatctcgtc

SEQ ID NO: 49457 - DNA, 324 bp, Glycine max
  unsure (1)..(324): unsure at all n locations
  Clone ID: LIB3107-050-Q1-K1-D10
gngatggcgattgacagaggctatatttctcctcagtttgtcacaaaccctgaaaagttaattgctgaattggagaatgcacgcgtgttgattacagatcagaaaatttcagctataaaggatataatccctatattggaaaaaaccacacaattgagagctcctttgcttatcattgcagaggatgttactggtgaggctttggctactcttgtcgtaaacaagttgcggngtattctaaatgttgctgccattaaagctccaagctttggggaaaggaggaaggccatgctacaagacattgccattttgacaggtgctgag

SEQ ID NO: 49458 - DNA, 364 bp, Glycine max
  Clone ID: LIB3107-050-Q1-K1-D11
ataaaatagtggtgtcaactttacacactaaactcatcacccgaatctcttcaacaatgtccaattccttccctctctaccaaaaattggccatcaaaaaacccatacaaagatctgttgaacttctcattttgattctcgccatttcccttcttctttaccgtctcctttacctccaatcccatgccctcctttcgcttctcgccttcttctccgaactctgtttcaccttcgactggtttctctaccttcttttaaattggaatcccgtcgactacaaaacataccctcaacacttcaaacaagttcatgaggttcctgcggtggacgtgttggtgacgactgcggattggaagcttgagcc

SEQ ID NO: 49459 - DNA, 278 bp, Glycine max
  Clone ID: LIB3107-050-Q1-K1-D2
gggataatttatagaaaaaggaagaaatatagcggtaatgcgattctacggggacgtactaaatagcatagaaaatagaaattgtttcttccacattacaagaataacgagtaatttactgttacacgaacactaaataaaaatccttttgttgcaaaacattcattaagaataatacataaacgtaacacatattcggactaagatataaccataacttggtccaaaacttctaccattatacctacacataatcgcccataccatgtctatccaca

SEQ ID NO: 49460 - DNA, 370 bp, Glycine max
  Clone ID: LIB3107-050-Q1-K1-D3
atatttggtggagtgggccactcaggaatgacctttattctcttagggtccgtgggaaccccttgatcactatttacaaaattaaggaaagtaatgcaataaagtatacctttttctatattttaatgttgattactcctaccaaaaagtatgacaaacctaaagtgtcctatatgagcaactaggttagtattaaaacccaaaataagaacaaacctacctaatgagtccctatgtatgtgaatcatgaagatgatggatgcatgggtgattttacaaaagagggttgaacctctcaacacattcatcataccacttatcatagggatttggtgccttacaatacctattttgggcacctataaacaac

SEQ ID NO: 49461 - DNA, 392 bp, Glycine max
  Clone ID: LIB3107-050-Q1-K1-D4
ctgtcacaatatgtgaagccacttactgacttccttgaaaaacttccggaaggcaaaaaggttatcttggttgggcatgattttggaggggcatgtatatcatatgcaatggagatgtttcctcttaagatttccaaggctgtctttgttgctgcagcaatgttgactagtggtcaaagtactcttgatattatttctcaacaggcaggttcaaatgatcttatgcaacaagctcagacttttatatatgctaatgggaatgatcaccctcccacttcttttgatatggacaagtcattattgagggatttgttattcaaccaaagtcccaccaaagatattgcactagcatctgtctcaatgaggtctgtaccatttgcaccagttttaga

SEQ ID NO: 49462 - DNA, 391 bp, Glycine max
  Clone ID: LIB3107-050-Q1-K1-D6
ttaagggtcatgcccaactcttacaccaagaccccaactcaacccgaatttccgtatccccttttctcccaaaccatctaaaaacaagagcgtctctttggcactgagctccaggtcgaatgaagggtcatcaaggggttatggcttttacaacgagcttgagtttgaggacagaaaggacaagacttttgggttggagatgaaccctgttgttggtgaagattcccagagtgaaactgggtcaatcccctttgatggggtggagggtggtgatgataagggagaggatgatttggttcgggctcagggggatgcagatggggatggggatggtttgaagaaaggttatgatgatgaagaacgtgagaatgagaaatttggaggtaaactt

SEQ ID NO: 49463 - DNA, 363 bp, Glycine max
  Clone ID: LIB3107-050-Q1-K1-D7
agtcctgccgtcagacctcctgacagggggccattagacgacagactggatatttggcggagcgggccactgacgaggtgaccctgattcccctatggttcgtgggaaccgcctgatcactatttacaaaaatgacggaagtaacgcacctatgcatacctgtatctatgttctaagggcgactacgcctaccataaagcctgactaacctaacggggcctatatcatcatctaagccagtctttgaaccaaaagttagatctgacacacctaatgagtccctctgtatgagaattatgaagatgatcgctgcctgggtcattttacactataaggttgaacctcttaacacattcatgatac

SEQ ID NO: 49464 - DNA, 170 bp, Glycine max
  Clone ID: LIB3107-050-Q1-K1-D8
ggagaggactttatggtcaagcccctttctgactcgcgggcgaaacctcaagcggggcaaacgggtctcctggtctagcaatccatctaatagccctacctgatatttgccactgagctctatctctcaatgaaaggtcataagcgggttatggctttcacaacaagctg

SEQ ID NO: 49465 - DNA, 408 bp, Glycine max
  Clone ID: LIB3107-050-Q1-K1-D9
caatcctgcagttctcgtttctccctccgagcatcatcactcatgggaaagagcattctggggactggtggagctggatacatcggcagccacaccgttcttcaacttcttctcggagggtacaacgccgttatcgtcgataacttggataactcctctgagatcgctattcgcacagtcagagatctcgctggagatttagggaagaatctcacatttcacaagcttgatttgagggataaaccggctcttgagaaggtttttgcttcgacgaaattcgatgctgtcatccactttgctggacttaaagcagttggcgagagtgtccaaacaccactgctctactacgacaacaacttaattgggacaattgttctgtttgaagacatggcttcccatggatgcaaa

SEQ ID NO: 49466 - DNA, 403 bp, Glycine max
  Clone ID: LIB3107-050-Q1-K1-E1
gacccagagaggaggaagctttgagagagagagagggaggagggagagtgttgacgctccatcaagatgggtatttctagggattccatgcacaataggcgtgccactggtggcaagaagaaggcatggagaaagaagagaaagtatgagcttgggcgtcaggccgcaaacaccaagttatcaagcaacaaaactatccggaggattcgtgttcgaggtggcaatgttaaatggagggcattgaagttggataccggcaattactcatggggtagtgaagcagttactcgcaagactcgtattctagatgttgtttacaatgcctcaaacaatgagcttgtgcgaactcagaccctggtcaagaatgctattgttcaagttgatgctgctcctttcaagcaat

SEQ ID NO: 49467 - DNA, 427 bp, Glycine max
  Clone ID: LIB3107-050-Q1-K1-E10
caggagcttcaccgccatagcgataccttccagaatctctcctccttctctcttaagaaagcgggccaacattaccattttccgctactttgtagagacgaagcgcatatcctcgggtttctcgtatctcaaaaggttatcatctacccctgtagatggagatgcttactacaaattctggtgcgatgctacctcttctacccccagtgggtcagcattggggaagaatgaaggccaacaacttacctcttagatggtatagttcgcagcatcaaactcctaatagtaggagactatcaatggttgctaaagcaagaccagtatttctcaaaccaattccatctactcggacgaagggaggcgttctatgttcaagtagaaagaacaatgctttcatttgttttgctgctttgaatgctcgatgtgc

SEQ ID NO: 49468 - DNA, 448 bp, Glycine max
  Clone ID: LIB3107-050-Q1-K1-E11
agaagaagagggagagagggagagagggagagagggagagggagaggagtcgaatttctgagggttcatagaacactgaggagagaaagagagaaatactctgaaagaagtttgtaattgaagataaaatttgagtcttttatctttaattctttacccttctgacttcatccgatccgtttccatggatcccttcgatttgtttcgtaaaggttttggttgaggctacaaaagcacgagcttttttctacgagaattttctttttcctttcaaatacatgtgagcattctattttgtgttagctataatgaatgtatccaagaagggaacgcaaaccagcgaggtaaaactaaacattggaagcaaggtgactgctttgaataccaatgctgctgagtttattccctttgccctcagagcatctccagttggaagtagtagtgcacc

SEQ ID NO: 49469 - DNA, 373 bp, Glycine max
  unsure (1)..(373): unsure at all n locations
  Clone ID: LIB3107-050-Q1-K1-E12
ccgaaccgaaattcccggatcggcccgcgcgtaacacacaaacttcaccnccataacaataccttccttaatctctcctacttatctcttaataaagcgttccattattaccattttccgctactttgtanaaaccaaacacatatcctcgggtttatcgtatctcaaaaggttatcatctacccctgtagatagagatgcttactacaaattctggtgcgatgctacctcttctacccccaatgggtcagcattgttgaagaatgaacgccaacaacttacctcttagatggtatagttcgcatcatcaaactcctaatactacgagactatcaatggttgctaaaacaggaccagtatttctcaaaccaat

SEQ ID NO: 49470 - DNA, 389 bp, Glycine max
  Clone ID: LIB3107-050-Q1-K1-E2
ggcttctaacgtgagatctcagattgcaattgcctcttctcttctcccagaatcggtcactaatccgatatcatgaagctcgatacgactagtctcgaatcgtttcccacactgattgcacctcaaaacgacgtcgccggagaactctccgccgctccgttctttgaccttccgaattccaatgacttcgatgggttcttgaaagacgctattcagatggtgaagcccgcgaagggtactacaactcttgcttttatatttaaagagggtgttatggtagctgctgattctcgagctagcatgggaggatatatatcgtcgcagtctgtgaagaaaattatcgaaatcaatccgtatatgcttgggacaatggctggtggtgctgctga

SEQ ID NO: 49471 - DNA, 391 bp, Glycine max
  Clone ID: LIB3107-050-Q1-K1-E4
ggccgcaaagtgactgacataaccttttaaaggttcaaagaacctccctcgccgccgccgcggaactctagcctcagctctctcgccgccgttcgccggagtatcaccccaacgccgtcgtcgctgagaaatcatccaccaaaaggcctaacgctatgaagacgccgcaatctgcctctaaattgaaaaggtaatacaaattgctttgtttgttctaattggagttagtgcgtgttttgctagcttattttgaagaaataatagctttttgagtgaatgttttaaggacaagcaattattcctagaaataatctgttacgatactgcacttattagggtgattattaatagggtcaccttgggaaagctctcttgtttgatattaatgatg

SEQ ID NO: 49472 - DNA, 329 bp, Glycine max
  Clone ID: LIB3107-050-Q1-K1-E5
caaatgggaaggcttagattgattattactggcggtctatctacaaggccaagcttacttacccgttcatacgtagcattatcggtgatacattgtcatctaaagctagtatactgagcacgtcgatatgcatcatccggactagtaaaaccctggactgacgaacacaaatcgccatgctgaacacatacctttttgcaaatggcgcaatcccaaacagggctagagcaaccgacattgcaaacatttacgcattctatatggctaatgaaacgcggcttgatactgatcattaagctcagctgatgtcacaactacccgcagtcaga

SEQ ID NO: 49473 - DNA, 412 bp, Glycine max
  Clone ID: LIB3107-050-Q1-K1-E6
ggtatcctaagagtgcatctattagcttagttgggtattccgattcaaattatgcaggttgtaaagttcataggaagagttctagtggtacttgtcatttgcttgggagtgctttggtttcttggcactcttagaaacaaccaaccaaccaactagctggcatcatttcattagagatcaagtgcttaaaggagatcgtgtattagagtttctagatataaccaaccaactagctgacatctttacaaaacccttgcatagggatagattctacaccattagaaatgaagtagacattttagatgaagattatctagtataacatgcacatgcatttgtgttgtcataccctaatttcgtccggagattattacttgatgacatgcaacctttggttagccgctttgagata

SEQ ID NO: 49474 - DNA, 383 bp, Glycine max
  Clone ID: LIB3107-050-Q1-K1-E7
ggatagcactaagttaaacattacacacaaacttcgtcgtgttactgttagctaacactttctgcaataatggcacgtactagcatccaaacaagctcttcatcacgggcaaaaaaatttgatgtgttttcatcgttgtcttctcaaaggactatgcatcatccacatggtgcatgaaagagctgacaaagatcgttgattgggttcaagaaacaggtccaagtgtgctccctgttttctatgatgtcactccttcggaggttcgaaaacagagtggacagtttggagaggcttttactgaacacgaagaaaggtacacaaatggagggaagctctgaaagcaatcaccaatcgttgtgggtgagatgtactgaataagcctc

SEQ ID NO: 49475 - DNA, 410 bp, Glycine max
  Clone ID: LIB3107-050-Q1-K1-E8
gatagcatcataggccattcaaaccttcagacatagaatggaagaatccaagggttttgttggtggtgagtctcaaaaaccacatccagaaatgccctctatttcttttcaaattcctatgccagggaggaatcgatctggtggtctctacccttggggatggatgcaaagagcaataataccacagcacaccgtgcgaaactctaacggggcaagtgagaacacaaatttgaaggtgtaagtcactcatggagtaataatactatgtatgaaaatgtgaaacgtttgaacagttgttgcggatattatgttgtcttcttcattatcgtatattatcgtgcatgggtgtacgtagctcattacctgctttgaggataaaagctctactaagcttgaatatgaatatcttc

SEQ ID NO: 49476 - DNA, 451 bp, Glycine max
  Clone ID: LIB3107-050-Q1-K1-E9
aacttgcacactgttctggatgtcgcatcgattggcttcaaagagacggaattcttcttcgtggagctagatagattgcttagacctggtggttatttcgcttattcatctcctgaagcttatgcacaggatgaggaggatctgagaatttggagagaaatgagtgaccttgtgggtcgtatgtgttggcgaattgctgccaagagaaaccagactgttatttggcaaaaacccctaacaaatgattgttatctgcaaagagaacctggtacccgccctccactttgccgatctgatgatgatcccgatgctgtttggggtgtgcagatggaagcttgtatctctccttactctgaccgtgatcataaagccaaaggcagtggattagctccttggccagctcggttgacttcacctcctccacgacttcaagattttggctattcaaatg

SEQ ID NO: 49477 - DNA, 391 bp, Glycine max
  unsure (1)..(391): unsure at all n locations
  Clone ID: LIB3107-050-Q1-K1-F1
ggagaaggtcaatttcgaagcctctcgaatccaaactcaacagaacattcatttccctataaattcgacgtcgtttcgttccgctctcactccaagaaaacgttttgcagaagattccaatcggagctcagaaaaaaaagaaacctaatcgccgatcgcgtcgaaagtaacgtagctgtggttccttttttttttataatttttttgccgtttgaagatagtcgtttcggttactgctgcgttttgtgttttctggtgttttaattctgtgcaattttttaattctacatgtttgattgtttatttttggttgtgtgatttgtttgttttctatgacttctgtgttctggagtngaaaatgtgtctaacgagtttagaaagccgtgctttt

SEQ ID NO: 49478 - DNA, 347 bp, Glycine max
  Clone ID: LIB3107-050-Q1-K1-F10
cggacgcgtgggtgctccgaaacccttttcgattaattcgcggcaggaacgtacgaactttgactatttcgtggaatcatgggcaggtctccaccgccgttttcagatattggcaaaaaggccagagacctcttaaccaaagactacaactttgatcacaagtttaccctgttgctgccgaactccgatggaatgggactaactgcaaccggtttgaagcgggatcaaatttttattggtgatatcaagaccctgtacaagagtgggaagacaaccggcgatgtgaaaattgatacggattcaaacgtttctacaaaaatgaccgtgactgatattttaccaactac

SEQ ID NO: 49479 - DNA, 442 bp, Glycine max
  Clone ID: LIB3107-050-Q1-K1-F11
cctatcgtaaatcaactgcaggagttgctgaagagctgtatacatggaggacaagaccagcggatgatatgaggaggtaggtagcagatagtatactattaacctgcacaaacgcctccatggctgcacgtgtaataagaaggctctcaatgccattaatgagatcacgaagtttgctgagaacgccatgagcacaaatgatgcgagagttgatgtgaaactgaacaagcatatatggagcatgggaatcatgagtgtgcccagaagaatcaaagtacgcattgctggcctgagagacgctgatgaagatgccaaggaagagttgtactctgtcgtgacagttgcagaaatcccagcttaaggactgaacggacttgggactaaagtcattgtggaagaggatagatttgtcatctgttctcgagaagaggtggtacgatga

SEQ ID NO: 49480 - DNA, 178 bp, Glycine max
  Clone ID: LIB3107-050-Q1-K1-F12
aggactttcaatccgtttgatcagcagcaaaagatcattcaatctccattcctctgcgagagagagacgaagaagaaggaatcaattccaatatgtctcgtagcatttcatacataactggcactcaacttctctccttcaaacgcccgccaaatgttggcatcatcgacgttaggga

SEQ ID NO: 49481 - DNA, 417 bp, Glycine max
  Clone ID: LIB3107-050-Q1-K1-F2
ggcaccgcttgggcagacttaacatcagcacagagcgggttactgtctgttcaagctaccatctgtctctctctttcttagtgcctccttgccagatgttaaaacggcccaagaaactttcctattcacatctgaatcagtgaacgaggggcaccctgacaagctctgtgaccagatctccgatgctgagctcgacgcatgcttggagcaggaccctgacagcaaggttgcctgtgaaacctgtaccaagaccaacatggtgatggttttctgagagatcacaaccgaagccgacgtggactatgagaagattgtgcgcgacacatgcaagaacattggctatgactctgatgatgatggtcatgatgctgacaactgcgaggtcactggcaacattgagcatcagagacctgatat

SEQ ID NO: 49482 - DNA, 416 bp, Glycine max
  Clone ID: LIB3107-050-Q1-K1-F4
gggtggagagaggggcactgactcacacccacaatagtcgggggcagcttcaaagtacctccacattgtctcctactcttactgttctcttctcttctcatcatttttattttttccaatcaaaccaaacaaaacataagcaccgctcttttctctccgaaatccccatctcccttcacttctgagctctggacgagatcccagatctcaccatctttcacgcactcttccatcagattcaccctttcgtttaacgcaaactcataacttgaaggttaatggctgctccaccggcaagggctcgtgccgattacgattatctcataaagcttctcttgatcggtgacagcggtgttgggaaaagttgcctccttctgcgtttctccgatggttctttcaccactagtttcatcaca

SEQ ID NO: 49483 - DNA, 410 bp, Glycine max
  Clone ID: LIB3107-050-Q1-K1-F6
gctacaaccgatgtggttgaggcatgcactggggtcaatattgcagtgatggttggtggattccctagaaaagaaggtatggagaggaaggatgtgatgactaagaacgtctccatttacaagtcccaggcttctgcccttgaaaagcatgctgctgccaactgcaaggttcttgttgttgctaacccagcaaacaccaatgcattgatcttgaaagaatttgctccatctattcccgagaaaaacatttcttgtttgactagattggaccacaatagggcactgggccaaatttctgagagactgaacattcaggtttctgatgtaaagaatgtcattatctggggcaatcactcatcaacccaatatcctgatgttaaccatgcaactgttggggagaagcccgtccg

SEQ ID NO: 49484 - DNA, 217 bp, Glycine max
  Clone ID: LIB3107-050-Q1-K1-F7
gcttcaacctatgtggttgaggcatgcacggggggcaatattgcagggatggatggtcgattccctacaaaagaacgtatggacaggaacgctgtgatgacttacaacgtctacatttacaaggcctaatctcatgcccttgaaaagcatactgcttgcaactgaaaaggccctgctgtttctaacctaacaaacaccaatgcatttatcttgaaag

SEQ ID NO: 49485 - DNA, 215 bp, Glycine max
  Clone ID: LIB3107-050-Q1-K1-F8
actacaaccgatgcgtatgacgcacacagggtggtatatatagctgggagggtcaccagattgatgagaaaagatagtgtggaacgggaggatgtgattactaataacttcaatatatacacgctacaggctaatgccagtgttttctttttgaaatcaacttatgagttcacttccatgctttctgctaaatcaccaatgtgtccatcttttaa

SEQ ID NO: 49486 - DNA, 447 bp, Glycine max
  Clone ID: LIB3107-050-Q1-K1-F9
aatggttcctttttgtttgagcttttttgaagtgggttttagtcaaaatccttttttgttttgctccttttcgaattcatgatgcagcagagatggaatcgaagaaaaacccatttacatttactaggtttactctttgttttcttcatagttttgacaatcctccatagcgagcatagcattcaacaaatccatgaaaacccagatcctgaagctcaccgacaagatgcttcgctttcatttgtgaaacctaatgttttaatcagtcgaaatggagctcctgaaattttggatagattcagtaagtgtaatggaacgagagagtatagtggccggaaaatctcgtggtctggccggaaaacggaatcaagtcgtcggaaagttaagtcggagaagtgtgatgtgttttcaggaaaatgggtttttgataacacttcgtatccactt

SEQ ID NO: 49487 - DNA, 372 bp, Glycine max
  unsure (1)..(372): unsure at all n locations
  Clone ID: LIB3107-050-Q1-K1-G11
agctgatcagggctcangtggtggttttagaactctgattcaattgcttcctgtgctgttaagtgttgcttttgaacttctgtgcatcctcagaacctatatatgctctttcccgttcctacccttatgaattccagtttaccactcaaaagggtgtcaatttttttgtgaaatcaacaaattttgaggaaaagtatccacctggtagcccggatcgtatagcaattgatcgtcacatagagagggattattttaacattcttgctcagaattgtcgtgttgagatgcaacgtcagcaatggggatttataagagaaactccatattgtgatatgttacagaagtttcagacagctgcttcgtgaatgaact

SEQ ID NO: 49488 - DNA, 346 bp, Glycine max
  Clone ID: LIB3107-050-Q1-K1-G12
ccacacgtaacatgacgcataaacagacgcttaattatacacatacactcccatacaccttgtctaatataataatatcgcccccacacacaaaacctaattaatctctttaccattcattcattcattcatttatccataataatcctcttcctatcactaccaaccaaactaaaccatattttcttaactatggttctctttttattcttaacaaactaaaacatcccactattttgtgttacatatatttactttttttttttcaacaatcatcaattactaactaatttctatccaaataattcttacacgtaacatttttttaatttaaaccacctaaaac

SEQ ID NO: 49489 - DNA, 285 bp, Glycine max
  Clone ID: LIB3107-050-Q1-K1-G2
tattgtttattaattattttattttttaattaaaatataattaataacgcaatattttattttttaaaaaaatatatgaataattaaaaaaaattatattaacatcggtttttcaagcaaccgatgttaatgcatacacgttaacattggttttcaaaaaccaatgttaacgtgtatgctttaacatcgatttctttggacaatagatgttaacatattatacgttaacatcgtgattttaaaaatcgatgttaactaatgatgttaacagtaaggttttgaaaa

SEQ ID NO: 49490 - DNA, 395 bp, Glycine max
  Clone ID: LIB3107-050-Q1-K1-G4
ggtgtcttgtgtggcatgtgaataagcttacgttgtacatatcaatgccctttcagtatgggtatatctatctgtttgtactttttagcatacccccagtttttatgggttatcatgattggggaaacctaaatatggaatttgctttccttaatcatggtgtctgactaggtctgtctttttaaaagtgaattgaattttcttgatcccgtgaaatccctgaggattttatgaaagcattcgcctccaacagagacatccatttatggtattgaattttgtgttgtaattgactacttatgtctgtcacttggaagccgaggggttgtttgcctaggctgcatcgaacatgagcttgcagataagcattttctccccgcttcctacttaattac

SEQ ID NO: 49491 - DNA, 394 bp, Glycine max
  Clone ID: LIB3107-050-Q1-K1-G5
ggacgcacttagcaatcggtcaacacttccaattacaatatacacatcttcaattaagccatgactctctctaagcttatagttgcttcccttcttgcctcgcttctccttcttcatcttgttgatgctgatcaatcggcacatgtacaaacgcaggggtctcttctgcagaagatagattgtaatggagcatgtgctgcgaggtgtcgtttatcatctcggccacgtctctgcaaaagagcctgtggaacttgttgtagacgctgcgactgcgtgccacctggcactgctggaaaccaagaagtgtgtccctgctatgctagtttgactactcatggtggcaaacgcaagtgcccttagacttaaaagttgtgtttggattgctagctgctga

SEQ ID NO: 49492 - DNA, 400 bp, Glycine max
  Clone ID: LIB3107-050-Q1-K1-G6
tcgcgtaacaagttacaatagtcattacacaagcgttatgcaacagatacactaagactcaatcctatatgaaatgtgataccatgttagtgagaaatctcgttgggcgcctaggaatatatgacatgacaaaccacatacttgtaaatcagataactcttactaggtaaaatcataagaaaatcggtcagagtcatgttgttttgcgagaatactccaaccatgtgggatcgatatatacttaaaggaacactcaaaccaggtgtatttattccaaggcctagactctgaagagtttgtcagggtttctcccttctgattcaggtccaacatagaaaacattttagcacgtagactctatctatgaactatacaaaacatacgactcctcaattattct

SEQ ID NO: 49493 - DNA, 300 bp, Glycine max
  Clone ID: LIB3107-050-Q1-K1-G8
ggtgtcttgtgtggcatgtgagaaagcttacgttgtacggattaatgccctttcagtatgggtatatctatctgtttggactttttaacatacccccagtttttatgggtgatcatgattggggaaacctacatattgaatttgcttttcttaatcaaagtgtctgactaagtctgtctttttaaaagtgaattgaaatttcttgataccctgaaaaccctgaggattttatgaaagcatttccctccaacatagacattcatttatggtgttgaaatatgtgttgtaaattactactta

SEQ ID NO: 49494 - DNA, 412 bp, Glycine max
  Clone ID: LIB3107-050-Q1-K1-H1
ggaggaagcgcagcagcagcagctataccacgttgctggaagaaactgataaaaagcgctgccgttgtgtctttcagtcttcgttggatcatcttcacaatcacatcatcagaacacaaagaagagaagagacccttcatcttgttattccactcgggctaggccaattttccctctaacagtcaattttcattcagattcgtaaatttctcgattagatcacgaggtgttggtgtgattgtttgtaccttctggtggtggagcttgttggaaattggagatgagtcagaggggtttaatatatagctttgttgccaaaggaactgttgttttagcagagcacacgcaatatacggtgaatttcagtaccattgctgttcagtgcctgcagaaactgccttcaaatagcagc

SEQ ID NO: 49495 - DNA, 450 bp, Glycine max
  unsure (1)..(450): unsure at all n locations
  Clone ID: LIB3107-050-Q1-K1-H11
ccatttttctcaccatcgattcttagcggtgaaaatggtgaagtgtttctctctcatcgtcgttctctctctcctcgcagcatcggcgatcggcagcgaggtcatttccggagaatcggatggagatttcataatccgtcaggttgtggatgacggaggagtcaacgaaggaagtaacggcgacgatctcctactcggagccgaccatcacttttcggtctttaagcaaaagtttgggaagtcgtatgcttccaaggaggagcatgatcaccgattcagggtattcaaagccaatctgaagcgagctcaacgccaccaggctcttgatccctctgctactcatggcgtcactcagttctctgatttgactccttcggagttccgaagatcgtttctagggcttanaagtcgtcgtcttggactccctgcagatgctaataaggcccctat

SEQ ID NO: 49496 - DNA, 299 bp, Glycine max
  Clone ID: LIB3107-050-Q1-K1-H12
cggacgcgtgggcttcttgttcattcttcatttctctcttcccctctttacgcgttcttctggtctgtttcataatcgagctatcacaacttttatcttgataaatcccaccggcattgccatttacttctcccattccttcaaaatggcaaatcccatttcccccattgctctctttatcctacttctagccccctctgccctacccggccatgattactgacaagctctcaccaagagccttctcttcttcgaagctcacagatccggctacctcccccacaaccagcgcgtcaatt

SEQ ID NO: 49497 - DNA, 412 bp, Glycine max
  Clone ID: LIB3107-050-Q1-K1-H2
gattcttcacttgtgctgagtcttaccgattttgccgatcaaagttcctcactttctctctcttgatcgacacccaccacgcgttagagagagaaaaccacgagagatcggaaaatgggtacgcttcagtcttggagaagagcctacggtgccatcaaggacaccaccaaagtgggtctggcccatgtcaatagcgattacgcggatttggacgttgccattgccaaagccacgaaccacgtcgagtgtccccccaaagagaggcacctcagaaagattctgtttgccacgtctgctgtgaggcctagggctgatgttgcttactgtatccatgcactttcgcggcggttggcgaagacgcggaattggacggtggcattgaaaacactgatagtcatccataggttattga

SEQ ID NO: 49498 - DNA, 409 bp, Glycine max
  Clone ID: LIB3107-050-Q1-K1-H3
gaaggaagaagaaagctctcatcgatcggtgttcgactttaaacactcaggatgagccacaaaattcttctttctgcagggtgcaaggttcagcttcgatgggaaattgctggggttcttcacctcacaacccaacctcaacaactaccggtaaccttagtacaggtactactgggacatctcaagcgatcagcagcggtagctatactactactactacgacgactactacttcttctggaagtgggagcagctccataaatagcaagttctcagtgtcaagcggtggtcagtcttatccaaattgacagatcttacctacctctaatttgaggatcttcacttttgccgagttgaaagctgcgactagaaatatcagagctgattcagtgcttgaggaaggaggttt

SEQ ID NO: 49499 - DNA, 392 bp, Glycine max
  unsure (1)..(392): unsure at all n locations
  Clone ID: LIB3107-050-Q1-K1-H4
gaggagatagacagggtaaatcttgagattcaacaggctgagcgagagtatgatcttaatcgtgctgctgaattgaagtatggtagtctaaactccttgcaacgccaacttgaaagtgcagagaaagaattgcatgaatatatgaactctggtaaatctatgttaagagaggaagttactggaaatgacattgctgaaattgtaagcaagtggactggtatccccatttctaaacttcaacaatcagatagagagaagttgttgtatctagaggaagagctccataaacgtgttgtcggtcaagatcctgctgtcaaggcagtagctgaggctatccaacgttcaagagcaagtctttcagatccccatcngccaatcgctagcttcatgtt

SEQ ID NO: 49500 - DNA, 396 bp, Glycine max
  Clone ID: LIB3107-050-Q1-K1-H5
aaacggacctcggccgtgaacaagagggggttaagagaagacggcggcggtggtggcggcggctgagcgatgaggtaccgcggcgtgaggcgcatgccgtgggggcgttacgcggcggagataagggaccctcaatcgaaggagcggcgatggctgggaaccttcgacacggcggaggaagccgcttgcgcctacgactgcgctgctagagccatgaggggtctcaaagctcgcaccaacttcgtttacccaacttctccgcaaccttcttccgtcaccaccgaacacttgttccctaacttcaacaacaacaacaacttttacaaacactcactcttcaatcaccaccgtaaccgccacataaccggttccaacacttgttttgaccacccttac

SEQ ID NO: 49501 - DNA, 397 bp, Glycine max
  Clone ID: LIB3107-050-Q1-K1-H6
catcatttgagcaagcagggggttatggggcggcaaaatcttacactgcccttgccctaaaaactatctcaaagcaattcaggtgcctgaaagatgcaatctctgcacaaatcaaagccacgagcaagacattgggtgaagatgattgcttaggagttaaagtagaagggtcaaggcttacgtatgttgaccaccatcttcggcaacaaagggcacttcagcaactaggaatgattcagcccaatgcatggaggccccagagaggcttgcctgaacgagctgtttccattcttcgggcttggctttttgagcatttccttcacccatatccaaaggactccgattaagttatgcttgctaaacaaactggactttctaagaaccaggtgtaaaactg

SEQ ID NO: 49502 - DNA, 314 bp, Glycine max
  Clone ID: LIB3107-050-Q1-K1-H7
cgataggttaaagatgaaattgtcccaagtggcacttaaattgtggggccaaaaactggtgaggagaaatctgtcaccatttctgttgatgatggaattcgacctggcacaacagtgtctgatctatgaaagctcaaacctgtgttcaataaatactgaagcactactgctggtaattctagtcaagtgaatgattgtgctgcatctgttctgctgatgaaaagaagtgtttcgttgcaaaaggggcttcccattcttggggtattcaagactttcgcaacaatttgtgttgatcctgccataatgggtgttgg

SEQ ID NO: 49503 - DNA, 200 bp, Glycine max
  Clone ID: LIB3107-050-Q1-K1-H8
cttcgggtgttagaagacgacagaaggggaggagatagacaggggaaatcttgagatttaggaggcttatcgagagtgtgatcttaatcgtgctgctgaattgaagtatggtagtctaaactccttgcaacgccaacttgaaaagtgccagaaagaaatgcatgaatatattaactctggtaaaatctatgtttagagag

SEQ ID NO: 49504 - DNA, 448 bp, Glycine max
  Clone ID: LIB3107-050-Q1-K1-H9
acggaaatccattgaagttttaatttggaaggatggtgagagttagtgttttgaacgatgctcttgagagcatgtacaatgcagagaagaggggaaaacgacaggtcatgatcaggccgtcttctaaagtcatcatcaagtttcttctggttatgcagaagcacggttatattggtgaatttgagtttgtcgatgatcatagatctggaaaaattgttgttgaactcaacggcaggctgaacaaatgtggggttattagtcctcgttttgatgtgggtgttaaggaaattgaaggttggactgctaggttgctcccttccacacagtttggattcattgtgctgacaacatctgctggaattatggatcacgaagaagcaagaaggaagaatgttggaggcaaagttcttggtttcttctactgaacatggttttgagcatccattat

SEQ ID NO: 49505 - DNA, 148 bp, Glycine max
  unsure (1)..(148): unsure at all n locations
  Clone ID: LIB3107-058-Q1-K1-B5
acgggccgacccacgcgtcgccggcnttcnacattttcaagaagacatattttggccgacaggcccaacattcacgcgggtttacatattgacatgccatttccaaagcatcttaatgattaaatatttgatgcacatatatgattga

SEQ ID NO: 49506 - DNA, 428 bp, Glycine max
  Clone ID: LIB3107-058-Q1-K1-C5
ccaacccgtccgaccggatgacagaagcctacaaatgggtatctctctaatcctaacaactgtgtatacggggtgcattcattaatgctttcgattgttaaaaaactttgcatgaaggataacgcaaacgctagcatcaagctgttgagagctgcgtatgtggaccatcaccggatcgcatccaataatcagctgtaaattcctcttgcggtaaaagaagatccaggacacgctttatcacggcctgcacatacattctttttaggtaaccacaatattctgttaccacaataatctggatcctctatctatcagggctttctacgatgatctgacgagtcaaggagagaatcaacccaaatcgtggaggagtgataacagaggaatcgctgcggtgattcttgatgccctcacgaggcgacaatggg

SEQ ID NO: 49507 - DNA, 310 bp, Glycine max
  unsure (1)..(310): unsure at all n locations
  Clone ID: LIB3107-058-Q1-K1-C7
aaaaccggccggcccacgccgtccgncaggcagacgaaaagtgaatggctactttatatcttaaatgacctcaaatttatgcggggcggctaaagcatagacagtgtaaggacaaaaaagagggctctattcttccaaaccacgacataagcagcacgacaatgccactccaaccagatgtacactctcctaatgaacactgcctattgtgcccgtactcccgcagggaaacgcgcaaggtgcacgctatctgagaaagcacacaacatcatatggctatgagaccattcgctgagagtagcgtggaaca

SEQ ID NO: 49508 - DNA, 159 bp, Glycine max
  unsure (1)..(159): unsure at all n locations
  Clone ID: LIB3107-058-Q1-K1-D2
cgggccgacccacgcgaccgcccattcctcccnacggtttcgataagactttataaggggagtgcacaagtgagttagttgatcgatttatctagaaacagggtgattaaaatgaatgtccttgttttcttctttgcttcaattttggtagcatggcaa

SEQ ID NO: 49509 - DNA, 188 bp, Glycine max
  Clone ID: LIB3107-058-Q1-K1-F5
atgtagctgtcgtaacaggtgggagaaacatgcggcgtgttggagtgatcaaaaactctgtacatcattcaggtaactgtaacacagttcacgctcaagattccactggacatgaatttgcttctcacatgggcaatgtgttcactattggcaaaggcacaaagccatggatattacttgcccaaggg

SEQ ID NO: 49510 - DNA, 285 bp, Glycine max
  Clone ID: LIB3107-058-Q1-K1-F7
acgtcttatgggggagagaaaaaggagaacctgggtttctctgtttttttgttgtgtattcttcttccagacctaaagacccaatgcaccgattctgatttcaagaattacatcatcatatcaagaaaaccttggaactacacaaaaatggtgtccgctaacaaggagatggtcttagcactgctttgacaccctcctcgctcactacaacagcacggaagcacctccttctgccttcgatcaggctcaacatccattgtttgttacatggaagaaagtggtgaa

SEQ ID NO: 49511 - DNA, 397 bp, Glycine max
  Clone ID: LIB3107-058-Q1-K1-G2
gtaattgttaggtatggacaatccactaatatggatgacttatctcaccctaggttttgatatttacaaaagtataaattgttgataaactaataacttgatgttaagtgaacatgaccaacttagtaaaagggcctattcgttatctacaaatctcgttcgtgcttgaagtgaaaatggttgtgctaagatataatcagtgttcaacgcattgtaaaaccaatagtgtccactcattaggaaaattggtgtttacacactaagtgttttcgtcacttgcgttcaattggtataagtcacttactatctccttctacttttttatgtgatgtccaatcaagtacgaaaagctaatattagtcgcaaagagcagtgcacaatctctttgttttgaaat

SEQ ID NO: 49512 - DNA, 228 bp, Glycine max
  Clone ID: LIB3107-058-Q1-K1-H5
atgcttctctctccatcgcgaggggggctttcggattttcatgatatcctcaattcattcaccctcgtcacctgcaatagattctttcatgcaatcgagcattgaataacacaccattacaattcctctctcgatttgttttgcacgatcgctaatcacaagcgccctgtgaacacctgtggtatttacataacacttgcttttcaaaatgaaaacgctttgccacta

SEQ ID NO: 49513 - DNA, 349 bp, Glycine max
  Clone ID: LIB3107-082-Q1-K1-A5
tccggtcgacccacccttccgccggttgcaaaagacaacagaggggttgtgttttcattaacttatacaaattctcggcgttgggtcgcgtccttgtgttaatcgtgttgacgttgaaggaaatttaagtgaagagagaatgatgatgaagtctgctatgtgtgcattggtgcttgtggcactggttgtggttgtagtgctgtccatggctgatgctgcggtgacttgcatcccatcacagttgactccttgtcttgcgcgcgttaattcaggttctgcaccttccagtgcttgttgcctgaagctgaaagagcaaaagccatgcttccgtggctacctcaaaaaccct

SEQ ID NO: 49514 - DNA, 349 bp, Glycine max
  unsure (1)..(349): unsure at all n locations
  Clone ID: LIB3107-082-Q1-K1-A7
acacgnnncaggggaaaggttatgcctaagattagctcaagcacacattttaatcacattcaagagttaaaaaaacaattctatgaaaattgaaaacaaaacacatatatactaagtcaaaaaagtagtattaataaataatacataattgctaagaaaatatagatttttaattgatatatgaattgaaacattgcatattaagttgaaataactcaatctaaccagttgattaatttctaaaatccaaacctcttaaaattaaactagttagatagaatgatcttaaacacattgatcccattcatggtgtctatcttaattggttcaatatgacatggtaactact

SEQ ID NO: 49515 - DNA, 226 bp, Glycine max
  Clone ID: LIB3107-082-Q1-K1-D5
ttttcactcagcattaatcgagaatataatcttgtttgtaatggaaacaaaatacatatatatttaattcattctgaggttaacatcatatgatgcacatgttttcactccttaccatcatcatattcattatgaaaagttcatctacatacatcaggcatgggcgagcggcatatatcaagtgctgcttctactttaattttgagtgccttgaggcgaatgaaaa

SEQ ID NO: 49516 - DNA, 336 bp, Glycine max
  Clone ID: LIB3107-082-Q1-K1-F1
ggggttttgttggaatggtaaccaaccaaaaccttaccgggcccggctttcttggtccgggtttggcttcaggatggaatctcaggtggaagcacgcacttgttgtcaaagttatgggtcgtactggatccagaggacaagtgacccaggttagagtgaagtttttggatgatcagaaccgtcacatcatgaggaatgtgaaaggacctgtgagagaaggagacattctcaccctactcgagtctgaaaaggaagcaagaagattgcgctagatggtctcttttttttggcttgcccccaaattcgaacaaaagcaatatttttcttgatatttat

SEQ ID NO: 49517 - DNA, 283 bp, Glycine max
  Clone ID: LIB3107-082-Q1-K1-F5
cctcccttaaggatgaggcaaccctgcactacttgcttcacctttcttcataggaagaccaaatccttccttcataaaccaagaatcaaggacatgatgagtgcatgccgcaagaggagacaatccaacagaaaattcacttcaagttctgacttgtaaacctcttcttttcttcacatggagctctctactcaggttcatcaaagtttcaagcttatcgacactaaagggggagggaagatatcaactactgagctcaatgaagtgctctcatgccctggat

SEQ ID NO: 49518 - DNA, 346 bp, Glycine max
  Clone ID: LIB3107-082-Q1-K1-H3
tcccttcccatcaacagtagaaggtgtcttccatggagacttgggagcaccaatctccttctgatcctcaccaatctcattatcagcagtcaacataactgcttttttttctctctctctctctctctctcacacaaatccacccaactcccaagattttccccctctaaaccccacttgccaataaacacaacactctaaactatcaaccaaatgggtactcagagattcaccaaaaactttaagataccacaaaaagattgaaactttgtacttgccagctgaatcaacgatattgagcacaaaaaccctgagctgaacaggcgataatttcatgtgggggtgc

SEQ ID NO: 49519 - DNA, 216 bp, Glycine max
  Clone ID: LIB3107-001-Q1-K1-A12
taccggtccggattcccgggtcgactccacgcgtccgcttgcatgcttggcggcccatccgtcactaaccggttggcagtatcaacgcacgggggatcactcgtattgaatgctgccaaagctttcaaaccacaaaaggtcacttatatacaattacattaatggtaacaattgaacgaggaactacatcttcgccactgcgaaaaccgctgctgt

SEQ ID NO: 49520 - DNA, 365 bp, Glycine max
  Clone ID: LIB3107-001-Q1-K1-B12
ctctgctgtcagtcctatctgcagccaatttggagatggcatggatatgaaatagttgtgtattatataactgcgaggactcttctttatcatttctcttgtccctttgaagtttttcacttttttctatcggatgagtattgataacagaacttgaacaattatggattatttattggtggacatgatgtgtccccttctgctgtaggaagtccttatatttctagtattaatgtaattgtatcctttaaagtatcttgactgttgtatggggattttaggcaaggtctttgtacgcgacacgtttatgacacttgaattgacttcagatttctgctaaacctattgagaagctgattgtccta

SEQ ID NO: 49521 - DNA, 190 bp, Glycine max
  Clone ID: LIB3107-001-Q1-K1-D3
gacacctcaattcacgcagggctacccgctaaggggaagcatatcaaaaaccggcggactaaaagatccaagcttacatacacaaacctgccactctataggatccaaactttacgtacgctaacatgacaacacatacctcttctatcatctcacctaatttaaataaccttgccgtaacctaacaaaa

SEQ ID NO: 49522 - DNA, 173 bp, Glycine max
  Clone ID: LIB3107-001-Q1-K1-D6
actcattcttctattgaattgttggctcatcaagtatcccaattaatttcatgatgagactctgtgtgcacgtgtgtgcatgttaatttttattttctttatatttgccaatatttctttattatattatttaattacttaagcattactaatatttaccattcttatataaa

SEQ ID NO: 49523 - DNA, 396 bp, Glycine max
  Clone ID: LIB3107-001-Q1-K1-E4
tcctgaattcccgggtcgacccgggcgtccgtccacgcgtccgaagacgacagaagggggtagtgcatgagaacgatgaacattacccccacgttggtgccttagagcaagtggcacacggtgcataagaagaccactttgatcatgagaagaagtctgttctgaataaggtcaaggcaaaggctaagaaaattaaggacacgatttagaagcatggccatcaagtgcttgatcgtggtcatgagtataacaatgaatatcagcatacccttgatgatcatgacttagactaggattatgaaatggctgtagacccacaagttcataaaacaccaattcacgaaagttaagatgttaaaactgcaacacctacatcttagcaagtcgaaaatttgg

SEQ ID NO: 49524 - DNA, 392 bp, Glycine max
  Clone ID: LIB3107-001-Q1-K1-E5
attaccggatcggcccgcgcgtacgcaacaggtcttattgattatgatatgctggttaaaactgctactctgattcgtacaaaacggattgtttctgatgctagtgcgtatcctcggtacattgactatccctctatgagaaaaattgcagatgaagtatgtgcttttcttatgatggatatggctcatataagtggtcttgttgctgcatctgtactttgtaatccctttgagtattgtgatattgtgaccaccacaacccacatgtctttacgaggtccaataggtggtatgatattcttcaagaaagatactgtgcatggtgatgatttgtagcctgctgttaacaatgctgattttcctggtgtacattggggtcctcataaccacac

SEQ ID NO: 49525 - DNA, 266 bp, Glycine max
  Clone ID: LIB3107-001-Q1-K1-F11
ctacgcatacgaccacatacggcgacttattttgaaagaagatagcatgaaacacagtgcgacttgtaacgctgaatggaggacacaaaatgccagttataggcatggtaacttcagtggagaatcgtccatcaaatgcagacccttgcttctatctatgttgaaaacattgactatggttaccgtcattttgacactgcttcagcatattgaacacatgaagccatagccctaaacatggtcaaagccatacacataagccttat

SEQ ID NO: 49526 - DNA, 274 bp, Glycine max
  Clone ID: LIB3107-001-Q1-K1-F7
atatcccatatttagagtcctttttgtatattatatgaatataaataatctcattggaccataatacataacaattttttgaaatatggaaaataatatcttaatattaactagcctctggttatatttgatttgttttaagaatgactttatttattcccgtctctttttttcctgtatgaaagaatctttcctttatactatattttccaagagtctagaaaatattcattagaataatcgttaatagtttcacatataatcacgtaattca

SEQ ID NO: 49527 - DNA, 113 bp, Glycine max
  Clone ID: LIB3107-001-Q1-K1-F9
agggggagaggatcgggatccgtgattttgattcatctgtacttgtagagcctttttctactgcaaagggatggatgacaagtgctaactaagcactttcttcttcttcttct

SEQ ID NO: 49528 - DNA, 291 bp, Glycine max
  Clone ID: LIB3107-001-Q1-K1-G11
ggaaatccccccgaaagctttgctgattttcaatggaagatatagcttgaaatttgagcgctcctttgggtgaagaggggccttatctccctcaacagccacatgatgacatgaagcgtctcagaattgtaattcacgcttctcttttgaagaaagagatagtggcattagccacatgatgacattaaaagtctcagaattgtaattcacgcatctcttttcaagaaagagatagacattattattgtcctgaaatgatcgtaaatcatctttctcatataatatccttaa

SEQ ID NO: 49529 - DNA, 273 bp, Glycine max
  Clone ID: LIB3107-001-Q1-K1-G6
gaattcccgggtcgacccgcgcgtccgacacaacgggacggcataagacaacacgacggtgagatgcttccattgatgctctcaacaaaggcgggaatgataaattggtctgctggttatcaactcgtgctagaggtcttggtattaatcttgctactgctgatgttgtcattctgtccgatagtgactggaaccaacaagttactttcaggcctcagatcctgctcataggatttgtcaaaagaaagaaggtcaaggtttcccgttttggac

SEQ ID NO: 49530 - DNA, 420 bp, Glycine max
  Clone ID: LIB3107-001-Q1-K1-H11
gttgttgtaactcgttcttcttcttttgttgttctgtgtttgtgtttgttttttctgtcacctgaaaatgtcttgctgcggtggtaactgtggttgcggaagctcctgcaagtgcggcaacggctgcggaggctgcaagatgtacccagacttgagctacactgagtcaaccaccaccgagaccttggtcatgggagtggcacctgttaaggctcaatttgagggtgctgaaatgggtgtgcccgctgagaacgatggctgcaaatgtggaccaaactgctcctgcaacccctgcacttgcaagtgaggtgttgggagagcaagcttcaagcagagatagcccttaattaggaataatgataaactattaatgtgtagctaaaaacttatgtattatgtctgtgatggttttcgtgcact

SEQ ID NO: 49531 - DNA, 185 bp, Glycine max
  Clone ID: LIB3107-001-Q1-K1-H2
aactccagcgatcacactacaggatccaatcttacttacgcgtaccttcaacatcatagggctggtcttcctcaacctcagtgcgattcaatgtccatcataatacaacatcgagactctgaaaacccagacgttacacaacttaatctccttgcagaacacactcctttagccatctatcttat

SEQ ID NO: 49532 - DNA, 345 bp, Glycine max
  Clone ID: LIB3107-002-Q1-K1-A6
agatgtcgatacgttctcatattttgatattaacaatgatcgtgtcccatcccaatttccaattcctctttgaaacaattccatttcatacatcatttaacaaattagatggaacacatcctacaccaagccagatacttcaacaaataccccaatttataccattcatcataaaccaccctcaaacttattgttttcttattgactgattaaacgatcattattgattacttagccctcaacaaaagcatactttagaaaccagcttaaccagctcatcttccaaaactataatccaccctatttaatctcacatacccttttagttaccttctataattctaa

SEQ ID NO: 49533 - DNA, 361 bp, Glycine max
  Clone ID: LIB3107-002-Q1-K1-B6
acgcctggtaaggagacttgaaatgggaacaaatggaaatgagttttgtactatcaacactgctccaccttcttctcactcaggaaccacttatgagagcattgatattcaaaacagaaagaggtttgttgctcatcagttattaccagatttcgtggcctaggaagtaagaactgatggctagctagctagctaaaacaatattggataatttatgagagaaatcttagagttctgatgagtgtttctctagacttggctaattaacttcgctagcagcaccaagaaaagaaaaggagaaggtttatgttattttcatttacatatatatacacatgcatgcaatcactaattatgaaat

SEQ ID NO: 49534 - DNA, 364 bp, Glycine max
  unsure (1)..(364): unsure at all n locations
  Clone ID: LIB3107-002-Q1-K1-C1
cggaattcccgggtcgagccacgcgtnncgccacgcgtnccgccacgcgtnccgggcactttaaattgcatcaaaatagttcattcttgtgcgcaattcctacctctgctttcaagatgcagatcttcgtcaagaccctcaccggaaagaccatcacccttgaggtggaaagctctgacaccatcgacaacgtcaaggccaagatccaagacaaggaaggaattcccccggatcagcaacgtctcatcttcgccggaaagcagctcgaggacggncgtaccctcgccgactacaacatccagaaggagtcaacccttcaccttgtccttcgtctccgtggtggcatgcagatcttcgtcaagac

SEQ ID NO: 49535 - DNA, 321 bp, Glycine max
  Clone ID: LIB3107-002-Q1-K1-D11
cggtgttaggaggtgaatacatggaaaaactaataataaaagacaaaaacagatatatttcaagacaatgttttgtgataaaggatcatgtaattacccggaaatgtggaaatgagaagataaacattattcttacctcaacaagctcggacaattttccttctaggcttgatgcattcatgtccaaccccaatctctcaagttcagcttcaagctcagcttcaattttgctcatggactcagaactttgttctaccttttgatgatatgattctttagagtcaattcttggagagttatccaagtgcttttcaggggaaa

SEQ ID NO: 49536 - DNA, 341 bp, Glycine max
  Clone ID: LIB3107-002-Q1-K1-H10
gggagtctaatatttgcagtgctgaaaatgtcgcagttgttggaaaaggccaaaaactatgttgcggagaaagtcaccaacatgcccaagccagaggcgagtgtcaccgacgtggacttcaagcgcgtgagccgcgacagcgtcgagtacttggccaaggtctccgttcagaacccttattccacttccattcccatttgtgagatcaagtactccctcaaaagtgctggcagggagatagcagcaggaacaatacctgacccagggtcattgaaggcaagtgacacaacaatgttggatgtgccagtgaaggtgcctcatagcatattactgaactttgc

SEQ ID NO: 49537 - DNA, 361 bp, Glycine max
  Clone ID: LIB3107-002-Q1-K1-H8
gaagggcagaaattgtagtgaaagcgacaattctagtactagtataataactagtacgaatgatacaaatgatagtgattccactataggagaaagttctaataatctcgatgaaagtcaaaaatataagcatttgtggcttgaatgcgaaaattgttatggattaaattataaaaaattttttaaatcaaaaatgaatatttgtgaatactgtggatatcatttgaaaatgggcagttcagatagaatcgaacttttgattgattcgggtacttggaatcctatggatgaagacatggtttctctggatcctattgaatttcattccgaaagaggaaccttataagatcgtattgattct

SEQ ID NO: 49538 - DNA, 93 bp, Glycine max
  Clone ID: LIB3107-003-Q1-K1-A2
gatgattatcaaatatcaattgaaagaaccaaccttccaacttccaagtgaaaatcaaaatcccctggtaagtcatggaaaccaacacacacc

SEQ ID NO: 49539 - DNA, 318 bp, Glycine max
  Clone ID: LIB3107-003-Q1-K1-C1
gacgacagaagggagagttactgaaattaaaaacacaatctttatatgctttaaccacagtgcacagaggcattcttatccaagaaacaatgcttcaatccataaataatttgtagaccctgaactcttgcaaacaaaaactagattccgcttattagttagaggaaattattataggtggggtaaaccaaaagaactgcagcttcaaagttatggtaaaggtactagacaacagtaaaacgcgtgtttcaagtccgatccaccaaaatttttagtcggaggattcgaacacaaacttttaaaaatttaaaaaagaag

SEQ ID NO: 49540 - DNA, 196 bp, Glycine max
  Clone ID: LIB3107-003-Q1-K1-C6
tcatcctagaacaaccctgcctattcaaaagaagtacctcacctcacttacgaagaagtagtgggagctgggctctagattcagttggatagccagtctacctaagtaagagttacgttgaccctgcaaggtatcctagaggggcacaatgcaagctggagatcatctggttaggataatccccaggctttagata

SEQ ID NO: 49541 - DNA, 53 bp, Glycine max
  Clone ID: LIB3107-003-Q1-K1-D2
gagacctcaggtcatgcggggctacccgctgagtttaagcatatcaataagcg

SEQ ID NO: 49542 - DNA, 54 bp, Glycine max; identical to SEQ ID NO: 15991
  Clone ID: LIB3107-003-Q1-K1-E4

SEQ ID NO: 49543 - DNA, 361 bp, Glycine max
  unsure (1)..(361): unsure at all n locations
  Clone ID: LIB3107-003-Q1-K1-F10
gagtcaacaattgttgactagttgtcgattgtggtctgagttcgcggtttcagtgaaagatccccgctctgttggacctctgattctgattccatgttagggttttaagggatccaattccagcttcctctttcccatggaattgaaaaagggcaagcttgccaggttctacacggatggtaaaaagcataagcaatcgttttggggagcaagagcaactgagcctncagcacttanacctagcaatntgctaccactggggaaaaatagaattgctggaacatttagaattggatgatccgaagtgttcccggaggaccatgagccgtggcgtaaaagaatacttgacccgggtagcgat

SEQ ID NO: 49544 - DNA, 411 bp, Glycine max
  Clone ID: LIB3107-004-Q1-K1-A4
accggtccggaattcccggtcgaccacgcgtccgcctttgttgtcttgggttgggtttgttttttctctcacctgaaaatgtcttgctgcggtggtaactgtggttgcggaagctcctgcaagtgcggcaaccgctgcggaggctgcaagatgtacccagacttgagctacactgagtcaaccaccaccgagaccttggtcatgggagtggcacctgttaaggctcaatttgagggtgctgaaatgggtgtgcccgctgagaacgatggctgcaaatgtggaccaaactgcttctgcaacccctgcacttgcaagtgaagtgttgggagagcaagcttcaagcagagatagcccttaattaggaataatgataaactattaatgtgtagctaaaaacttatgtattatgtc

SEQ ID NO: 49545 - DNA, 193 bp, Glycine max
  Clone ID: LIB3107-004-Q1-K1-A7
cgacccacgcgttcccccaccccttcctaccttggagaagacaactaattggggggccagaaggttataaaaatggggaccgggttggacccaaaggggcttttttttcttgcttggcttcggggggccatttgagaagaaaaaaaagtattagggggggcggcccctgtggttcctgttgtgggaatggaat

SEQ ID NO: 49546 - DNA, 156 bp, Glycine max
  Clone ID: LIB3107-004-Q1-K1-A8
ggtcgacccaccccttcctaccggttggaaaaaaccaccaaaagggggtcttttttttcaaaaaatttatttggggttattaggcccgggaaaaataaaagggttttccaaaaaacaaagccgggttggggtttttgtttccctttccaaatcggg

SEQ ID NO: 49547 - DNA, 262 bp, Glycine max
  Clone ID: LIB3107-004-Q1-K1-B8
cggttgcaaaaaaccaccaaaaggggccggcaaaaaccgaccccaaaattggggttgcgttcctttaaaactttcaatttttttttctttttccaatcaagggaataatttttttaaaaaattttccaaaaccatggttaaccccaatcctatgattttggtggtgggaattttaggtaacctggcctccttctgtggctttttagcaccagtcccaacattctatcgagtttgtaagaaaaaacccacggaaggtttcaat

SEQ ID NO: 49548 - DNA, 451 bp, Glycine max
  Clone ID: LIB3107-004-Q1-K1-C7
accggtccggaattcccgggtcggaccaagccgtccgccaacccttcctaccggttgcaaaaaaactcattagggtggaacagcctaaccggctggatgggatcaaccccatgatcaaggccattatgaaggcgattaaaatggggatggaaccgattcctgtgcatagtgggttgggaggtgcttactatttcaaaaacagtaagggggaaagtgttgcaattgtgaagccaaccgatgaggagcctttggccccaaataacccgaaaggttttgttggcaaggcgcttgggcagcctgggctgaagcgatctgttcgggtcggggagactgggtttagagaggttgctgcttatcttcttgactatgatcattttgccaacgtgcctcctactgcattggtgaagatcacacactctgtgttcaatgtgaatgatggtgtcaatgggaa

SEQ ID NO: 49549 - DNA, 55 bp, Glycine max
  Clone ID: LIB3107-004-Q1-K1-D6
ggagacctcaagtcaagcggagctacccgctgagtttaagcatactaataagcgg

SEQ ID NO: 49550 - DNA, 90 bp, Glycine max
  unsure (1)..(90): unsure at all n locations
  Clone ID: LIB3107-004-Q1-K1-G1
atgccgaagaaaagctattagccaaccatgttgaacgtgaaaactatgagacctcaggtcaggcggggctacccgctgagtttaagcnna

SEQ ID NO: 49551 - DNA, 442 bp, Glycine max
  unsure (1)..(442): unsure at all n locations
  Clone ID: LIB3107-004-Q1-K1-G5
attcccgggtcggacccacgcccgtccgcctcaccgcccgtctcgtacccggctgcngnnagaagaccgatncagaaggtnngatctattattaccaacnnatgagagtgtcctcgtggnnatgtcatcnnctgtaaattgggacgccgccccaagcctnntgtcaagaaggggttgcttcnngagcctattgcnctcaactcnntggtttnntggaagtnngatcaacaacccaacaaccccgaggagaatntgtcaggtgnnatgaagaaaggagnnnatgcaggnntgatgannagttgagaaaccattgtnnacatgtattttcggtctctttgaaatggaccacngnnggatgaaatgctcnncaagaatnnttgttacncattttcctgcnnaatagaaatttttcnttttttaaaattcaagaaagaaattttag

SEQ ID NO: 49552 - DNA, 322 bp, Glycine max
  Clone ID: LIB3107-004-Q1-K1-G6
accgtccgaattcccgggtcgaccacgcgtccgggtgtcaaggtcggctatttttttttcttctgtatttattggacttggttcacccgagtcacagcctagtgttttcttcatatcgataaaactagtatttttgttgtactggaggatacaatcttggccatagatttgtaatttttttttaatctgaggaactaaactaagctagggtgtttttgttttggtttttggttatatatatcaacatctttcacttgctgatactcttttctctcctgcttgggcgagtgaagaggtgaaagcttgagagcatataaagctt

SEQ ID NO: 49553 - DNA, 218 bp, Glycine max
  Clone ID: LIB3107-004-Q1-K1-H11
gactgagttggtcttagaggaaaaaattgaatacaatgatcttgtaaagtcagttcctgatgggaactcttcaaatgatgatgaacacgccaatatccagacagtccagtcagataaacaaaaggatgtggcacccaaaaatgggatcctgattgggctgatgtcaagcttgcacaagctaaatatcttctattccggatagcaaaatttaaaacact

SEQ ID NO: 49554 - DNA, 359 bp, Glycine max
  Clone ID: LIB3107-005-Q1-K1-A9
cggtcttgaattcccgggtcgaccgcacgcataccgtgcgaattacgaatgtctgatgtctatttgttgattgtgttctataatttgagtgggcacggtgtaactcagatgcattgatacaagaacattctgtattttgttgactatgatataaaatttttagtacatgtaatatcaattaaaattattctcaacaagatcactgtccagcctgaaggttacggatttgcgtaatttgtatctcatgctccagcatatataattttgcagacatacaatggaactcagatgcctgtaacataacaaactattagattgaattgggccttctttggaattggagaaatgcgccctgatac

SEQ ID NO: 49555 - DNA, 337 bp, Glycine max
  unsure (1)..(337): unsure at all n locations
  Clone ID: LIB3107-005-Q1-K1-C9
aattccctngtcgacccactctacctttacatcccatattcgatcaaaccttcaatttccttaaatatattctaacacttcagtctagttcaaattacaagcccgctcataagaatccatcttcataccagatcaacacctataaatctccatcttataacaatcctccaccctacaacaatcttcccaaacactcctccattaccatatttaacatatccaataataccattgacacttacaacatctacatattcacatttctcaatcacttacatacctacatcacaatctctatcaaatccatcttcattatcaacatcttcatcaactacat

SEQ ID NO: 49556 - DNA, 192 bp, Glycine max
  Clone ID: LIB3107-005-Q1-K1-F11
gaggacaaccgttgctgtaatggaaatcgtttacataagatgatgatttattctagtttgcactttgccatgccagctatcattgttgaaacatgcgcgagaacacttaacagcaatttattcaaacagaaatttctttattaacacttaacagcaaacacgagaacattcaatcaccccaaattccttact

SEQ ID NO: 49557 - DNA, 350 bp, Glycine max
  Clone ID: LIB3107-006-Q1-K1-A5
gacatttggagggctatgtgactgcattaacccccggtactttgcggatcaatcctgacgagatacaaagccatgctagctgggataaacgacatcaatcattgttataggagataacaacatgttgtgataacggagtagccagccgctaggccttatatgctattattgatacatgttctgcacttgacaacattacacaagctgcttagaaatacagaaacgtattcaatcaggaacatgttgagcctaggataagcagggtagcattatatggatgtgctgcataattgtaacggtacttacgacttattgctgtcgcaccatatcttgcaagttaaggatctgat

SEQ ID NO: 49558 - DNA, 447 bp, Glycine max
  Clone ID: LIB3107-006-Q1-K1-A7
gcgagacgacgacagaagggtttaagtgaaggaggagagggagaagaagaaggagtatggggaagaaaaggggaaaacgcaaagaaaaaaagaggaagatagatcaagatctcccttgcgtttgtctcagttgaagaaattcaagagcagaacgagactaactcaacggtatcagacgtttcagggtttcagcacttccattttttttttccggatttgagttggaagaagatcaaagagatgtctgttgtgtttgacatgagttttgatgtccaattcagttttgttcatgttgatgctatctgtacgtaggttcctagttgcttggattgttcctctgggtggtggagactttgtgtatttttaaaatattgacaattcaaaatgccaaaggagagaagggataggtctttgtcacatgaaagtagcagagccttaccttaccct

SEQ ID NO: 49559 - DNA, 116 bp, Glycine max
  Clone ID: LIB3107-006-Q1-K1-B2
actcgttagaacacctcagagaagactacagaatgttatcactatgtaattatacttgggctatcggcattaattaaatcacgtcgtaactactctacatatgacgaatgcatata

SEQ ID NO: 49560 - DNA, 482 bp, Glycine max
  Clone ID: LIB3107-006-Q1-K1-B5
aattcccggttcgaccgactcgtacgtccacgcgttcgaccacgcgttctgagacgacagaaggggaggcaatagaaaggaaaaccgagtcatgttctcactttgaagagaaaataacaacgtaaagatgtctgcatcaggaggcagatgaagccaagaggaagagaagaagccttctgatcaaggagcacatattaatctcaaagtcaagggccatgatggtaatgaggttttctttaggattaaaagaagcactcaactcaagaaacttatgaatgcgtactgtgatcgtcaatctgtagattttaactcaattgctttcttgtttgatagaaggagactccgagctgaacagacccctgatgagctagagatggaggatggtgatgagatagatgcaatgctgcaccaaaccggatgtggacacaagtttctttaaatgtatgatgatcatcttcatcaaaatgcttgataaaacgcat

SEQ ID NO: 49561 - DNA, 461 bp, Glycine max
  Clone ID: LIB3107-006-Q1-K1-D4
gcgagaagactacagagggggttctagtgtgtgattgtttgttgttgtaactcgttcttcttcttttgttgttctgtgtttgtgtttgttttttctctcacctgaaaatgtcttgctgcggtggtaactgtggttgcggaagctcctgcaagtgcggcaacggctgcggaggctgcaagatgtacccagacttgagctacactgagtcaaccaccaccgagaccttggtcatgggagtggcacctgttaaggctcaatttgagggtgctgaaatgggtgtgcccgctgagaacgatggctgcaaatgtggaccaaactgctcctgcaacccctgcacttgcaagtgaagtgttgggagagcaagcttcaagcagagatagcccttaattaggaataatgataaactattaatgtgtagctaaaaacttatgtattatgtctgtgatggttttcgtgcactc

SEQ ID NO: 49562 - DNA, 421 bp, Glycine max
  Clone ID: LIB3107-006-Q1-K1-D5
gatgagataatggctcgcagtatatcgtacataacggggtgggagcttggctctctcaggcgccatccaagcatcgccgtcgtcgatgtaagggacgatgagaggagctacgacggacacatatcggggtctcttcattacgcaagcgacactttcttcgataacatctcaaatcccattcaggcagttaaaggcaaagacactctcgtcttccactgcgctctaagtcaggttcgtggcccaacttgtgctaggaggcttgtcaattatcttgaggagaacaaggaagatactgggataaagaacattatggtcttggaacgtggcttcaatgggtgggaagcttctggtagacccgtttgccggttgaccaatattccttgcaaaggagaagtggcttcttaatcaaagacgtatttgt

SEQ ID NO: 49563 - DNA, 430 bp, Glycine max
  Clone ID: LIB3107-006-Q1-K1-D7
atcataactcggcacatcatctccataacagactggcagcatggctctcttagactccatccaagcattgccgtctgcaatgtaaaggacgatcagaggagctacgactgacacatatcggggtctcttcattacgcaagcgacactttctccgataacatctcaaatcccattcaggcagttaaaggcaaagacactctcgtcttccactgcgctctaagtcaggttcgtggcccaacttgtgctaggaggcttgtcaattatcttgaggataacaaggaatatactgtgataaagaacattatggtcttggaacgtggctttaatgggtgggaagcttctggtagacccgtttgccgatgcaccaatattccttgcaaaggaaagttgtctccttaatcaaagacgtattttgggttggatggaatta

SEQ ID NO: 49564 - DNA, 250 bp, Glycine max
  Clone ID: LIB3107-006-Q1-K1-E2
tataacaccacctcattagatccaatttttgattgtttgttgatttaactcattcctgtacttttgttgatctttaaaagtgggggatttttctctcaccttaaaatatcttacttctttggtaacttccgttaccgaaactccttcaaatgctgcaacacctgcttatgctgcaagatgtacccagactttatctacactgagtcaaccaccacctatacctttttcattttatattcacctgttaaaa

SEQ ID NO: 49565 - DNA, 180 bp, Glycine max
  Clone ID: LIB3107-006-Q1-K1-F7
acgcgtacgtactgctcccataagacctctcatgcataatctgattacatgggaagaggggcgatcataatccctttgcgcggatccatagacgggcacttctcgttcctgatctcgctgttactacagctccaatagctgatatttaagttttctccttttcctagctcgtatttatac

SEQ ID NO: 49566 - DNA, 425 bp, Glycine max
  Clone ID: LIB3107-006-Q1-K1-H7
tgagaaagctataatcgcaaatccaacatatgcagaagcatacaataacctaggagttctttacagggatgctggtgatatcgctctagcaattaatgcttatgagcaatgtcttaagattgatcctgattctcgaaatgctggccagaaccgtttacttgcgatgaattacatagatgaaggaaatgatgacaaactttttgaggctcacagggactggggtaggcgatttatgagactatattcacagttcacatcatgggacaactcaaaagatcctgaacggcctcttgtgataggatatgtctctcctgattattttacacattctgtgtcatatttcatagaagctccccttctctatcatgactataccaattataaagtggttgtttattcagcagttgtcaaggcagatgcaaaaa

SEQ ID NO: 49567 - DNA, 388 bp, Glycine max
  Clone ID: LIB3107-007-Q1-K1-A7
cagggaattctttttcttcacagcatttatttattatttttttttctgttcttctctttttattttattccgatctatcttttttttttcctgtactttgtttgttttacattctcttttttttctatttttttcttggcccttttttcccttgatcatctccttctgaaaaccgaagccaacttcaaacaccaccacaacaatgtcaatattgacatttttagttttatggcttttatctttcttgttagggttgttatgatatacatatgtgatttttttattacatcttttgttttggataagatatgcatgttattggaagtaaatattgatttatccatgttattacaggttcattagcatcatcaattacaaaattgcattt

SEQ ID NO: 49568 - DNA, 99 bp, Glycine max
  Clone ID: LIB3107-007-Q1-K1-E9
gaatttacatcacatttcgttgtgcctttgatctctgatcccgttgcgtctctcgtaatcatgcctaagcaaatccacgagattaatgatttccttttt

SEQ ID NO: 49569 - DNA, 382 bp, Glycine max; identical to SEQ ID NO: 10602
  Clone ID: LIB3107-007-Q1-K1-G2

SEQ ID NO: 49570 - DNA, 232 bp, Glycine max
  Clone ID: LIB3107-007-Q1-K1-G7
ccacacgtgcgacggggcgagaatgacgacagaagggcaagttttaaaagtatggagatggcggacacattggtatttacctcacaatccgtgaacgagggacaccctgacaagctctgcgaccaaatctacgatgctgtcctcgacgcttgcctcgagcaggacccatacagcaaaattggctgccaaacatgcaccaaaaccaacttggtcatggtctttggagaaatta

SEQ ID NO: 49571 - DNA, 256 bp, Glycine max
  Clone ID: LIB3107-007-Q1-K1-H12
gggccgacctacgcgttcgcccactctttcgttctgttacagtatgggattacaacataataggcgtgtacaggggtccatttcctaacatatcagggcctgtttacataacatgtctagatggtggaaatcaataaggtcttgcttcatggtttttggatccacagccagaatattctgttattcgagaagcatgctactgtcattccacactggagatatataataggacccatgctatctaccactggaatcg

SEQ ID NO: 49572 - DNA, 95 bp, Glycine max
  Clone ID: LIB3107-008-Q1-K1-B1
ggttctagtgtgtgattgtttgttgttgtaactcgttcttcttcttttgctgttctgagtttgcgtttgttttttctctcacctgaaaatgtctt

SEQ ID NO: 49573 - DNA, 222 bp, Glycine max
  Clone ID: LIB3107-008-Q1-K1-B12
cgacatgactactgaagagggatacatctacaatggaaagaatcagatatacagggtgggggatggttaaatgccaggcgaaatgataaatccatatttatctcttcgttcaaacggcagattctatcctccctacattcccatctcattgtttctctcgaggatccattgaaacgacaagtctatgttggaccatcctgtgtatccgattgccgttttgat

SEQ ID NO: 49574 - DNA, 222 bp, Glycine max
  Clone ID: LIB3107-008-Q1-K1-C5
tggccaattcaatataaatggctcctgaattaacacctgctagtagtggtttacttttaacggaggttcataaaactttacatagaaaatgatccctccacacaaattcacataagcgactgctttttaaaggaaaaaaaataaaaattggttttttatcaaagagtcctaactttaggaccttatattacccacccttgctttcttctttttttttttaaa

SEQ ID NO: 49575 - DNA, 283 bp, Glycine max
  Clone ID: LIB3107-008-Q1-K1-D2
caggggttgcacttctgctgcgtgtaagaatccaggaaacggagatatgggattcgctggaacaactcataagtgcatggattgtgacacaacagcatatttggctgattagtcaacagcagataaccgagtgtaccataaggcttgcttcagatgccaccactgcaaaggaacactcaagcttagcaactataactcttttgagggggttctttactgcaggccacacttcgaccaactgttcaaaagaactggtagtctcgacaaaagcttcgaagggaca

SEQ ID NO: 49576 - DNA, 365 bp, Glycine max
  unsure (1)..(365): unsure at all n locations
  Clone ID: LIB3107-008-Q1-K1-E2
aagacgacagaagggatattgaacgaattaattgacttttctttttgaaagtttcgttacctgttangcgtttgatttctgctagtttttgaaatatgcttactatagttacattccaagactttgcatgtgtgtatggtgctactgttacttaactttcttaagcatgcttctttttttttttcatctacttggcttccttttatgttggcagatctaattccaaagctggaaggttgtgccatgtgccatgtgcacttaatacctctggaaggttgtgccatgtgcacttaagcattccaagactttgcagttttgatctgatcctagcatgttatacatggatagggacgattctgcaatac

SEQ ID NO: 49577 - DNA, 366 bp, Glycine max
  Clone ID: LIB3107-008-Q1-K1-E7
taccggatcgacgcacgcgtgcgtccactcgtctgtacggatacgacaaactacacaatgtttgtgcctgcgacaccttattcaggtttcgcggccatcatctgtggatgggaatattctctccccccaccttcatctctgaagaatgacatttatattattgttcatcatatggtcaccaatatacagcgtcctattccgaatacagcagggccctcacttacgaccctataaattcgcttatatgttgtgtcgcctttatacagttccgggctcatttatacactttattgttttgtgtacaatctagacaccttaactattacccattggatgacaagtctattaacagcacactcataaatt

SEQ ID NO: 49578 - DNA, 295 bp, Glycine max
  Clone ID: LIB3107-008-Q1-K1-F2
tgggccaaaggagtgatattgggatggagcaaactaataagaacatgacgcaacggtggagggtcaacgacaacaccttcacgcgttttgctccgaaggcttgcgagcacatcggttccatcccaagtgcttgacccgacagcaccgaataacctgtgatgttcgcgaacgccattcctagggaccctgctggcagttctaactcttccaagtgtgccaagaacagcatcgataccatggaacgcgcgtagaatatcaacgccgttatttctatcggaaacgccagcttcaccac

SEQ ID NO: 49579 - DNA, 392 bp, Glycine max
  Clone ID: LIB3107-008-Q1-K1-F5
attgctgctctccaacaaagatgatccacttgtccaccctccctcaagacataaccgaagaggagattgtgagccttttggaggagcatgtaaccattgtcaacagcaaggtctttgagatgaatggaaaaaagcatgcacttgttcagtttgagactgaggagcacgctactgaagcccttgtgtgcaagcatgcaagcccactttctggatcggttgttcgcatctccttttcccatttgcagaatatatgatccagactttgataagggctgaagggaaacagttttatggttgcaacttgctcggcttattatggacaaagaattctgaattttggaaggataattttatgcaaataatgtcaccttcattgtcattgtaatggtctc

SEQ ID NO: 49580 - DNA, 417 bp, Glycine max
  Clone ID: LIB3107-009-Q1-K1-A10
agaagacgacagaagggggaagagtgaagagaatggctcccaagggtttaacctttgtggctgtgttaatatgcgtttcagcactgtcactgagtccttctgttgcgggggaagggcaaaataatggccttgttatgaacttctacaaggaatcatgccctcaggctgaagacatcatcacagaacaagtcaagcttctctacaagcgccacaagaacactgctttctcctggctcaggaacatcttccatgactgtgctgttcagagttgtgatgcttcactgttgctggactccacaagaaggagcttgtctgagaaggaaacagatagaagctttgggttgagaaatttcaggtacattgagaccatcaaagaagcttggaaagaagatgccctggaagttgttcatgtgctga

SEQ ID NO: 49581 - DNA, 426 bp, Glycine max
  Clone ID: LIB3107-009-Q1-K1-A11
agaagacgacagaagggggaagagtgaagagaatggctcccaagggtttaacctttggggctgtgttgagtatgcgtttcagcactgtcactgagtccttctgttgcgggggaagggcaaaataatggccttgttatgaacttctacaaggaatcatgccctcaggctgaagacatcatcacagaacaagtcaagcttctctacaagcgccacaagaacactgctttctcctggctcaggaacatcttccatgactgtgctgttcagagttgtgatgcttcactgttgctggactccacaagaaggagcttgtctgagaaggaaacagatagaagctttgggttgagaaatttcaagtacattgagaccatcaaagaagctttggaaagagaatgccctggagttgtttcatgtgctgatatcctc

SEQ ID NO: 49582 - DNA, 433 bp, Glycine max
  Clone ID: LIB3107-009-Q1-K1-A3
caacagaacggaatgcaattgaaagagagatttgttagcctcaactcacggtatggttgtcactttgggaaaatcccatcttacaccttttcgtgaccactttgagtgacataagagaaattatgaaacatactcaaattagattcaagagaaatgtccattaaccatgaaactcgcgctttcatttaccatcttctatgcaacgtgatctactttatggctgtactcgctccattaccaactctttaccaaatctacaagataaaatctacggatggtgttcaatcactacctatatattgatgcactattcacgtcaatgctctcgatttattacgcactcagcaaaaatgatgctagcctacttctcattactatgaactcctttctatgagtgatacagacaatctacctagcaatcttactaatttac

SEQ ID NO: 49583 - DNA, 494 bp, Glycine max
  Clone ID: LIB3107-009-Q1-K1-C8
ccggaatcccgggtcgaccgcacgcgtccgccacgcgtccgcccacgcgtccacggacgcgtgggcggctgcaagaacacggcagaagtgtatagcagcatcatacggggcattcaattcaaaaactaagttcatttcttgtgctttgccttattcctcaaaaccaaacatgtcgaacacatgcggcaactgtgactgcgctgacaagactaactgcaccaagggaaacagctatggtgttatagtagagactgagaagagctacatcgagactgttgacatggatgttccaccagctgagcatgatgggaagtgcaagtgtggcactaactgcacttgcacggactgcacttgtggccattaaggaatatgtatgaaaatgtaattgccatgtgtttggcaatacaaatctccaaataatgtaatcttcgcatgaataaatgtgtgctgttatcctacttcagggtctgtgtagtcatgcagtctgaatcatg

SEQ ID NO: 49584 - DNA, 92 bp, Glycine max
  Clone ID: LIB3107-009-Q1-K1-D11
gttgctgagagggttgttgtttctacaaagagcccaagatcagataagcaatatgtgtgggaagcagaagctgacagtagctcttatgtgat

SEQ ID NO: 49585 - DNA, 138 bp, Glycine max
  Clone ID: LIB3107-009-Q1-K1-D4
cacatgtttgttgttttcggtagtaatgatctggtacatagatacaagagatcgttattaattggaggccaaaatcctcttaatatacaaaatatgccattggcttgcacaatggaaaaaccattttaaggattaccc

SEQ ID NO: 49586 - DNA, 410 bp, Glycine max
  unsure (1)..(410): unsure at all n locations
  Clone ID: LIB3107-009-Q1-K1-D5
gacccacgcgtacgaacacccatacaaacggctgcaaaagacctccaaatgctaagcctcaataccgggcacaatgggaaaacttgattagttgcgctctccacanatgaaacaacactaaatcacgtatattcaacactactcatatgtgaaccttttcaaaaaaaaactgtttttttatcactaacacatcaatgaagatgcattccaaatatatgcttccctaaaccaacaacgaacaaacagacacacatctatttccaatattagacaaacatacctgactactctcttgggaccaatatatatcacattccaaaacatttaacaaacaagcttacatatattctaaatgcctcacactcaccacctaatatatttttgtatttgacaatgaaaacactactatc

SEQ ID NO: 49587 - DNA, 402 bp, Glycine max
  Clone ID: LIB3107-009-Q1-K1-E11
acgcgttcgaacacgtctgaaaacacctcttaaaagactacagaaatatctggtagaagtcgaattggagtctcgagcagacattcgaaccattgtaaaaacccaccacacgaacctacttcacttgttattcttctataccaaccgtcctaaatcacttctcacttattaatacatacctaatgcatccctttaaaaccttatcttccgaacttaaagtcataaacctccattgctctatgatagagtacgaatttccctggatatatcaccatggattcttcatctccattaagagtttgacgcaccaatcctatattgtgacataaagcctcataacatttagatggatgaattatagacttcttacatatctcatttctgtctttcaaaactttttat

SEQ ID NO: 49588 - DNA, 52 bp, Glycine max
  Clone ID: LIB3107-009-Q1-K1-E12
taccggtcttgaattacccgttcgacccatgcgttcgaccacacgaccatac

SEQ ID NO: 49589 - DNA, 310 bp, Glycine max
  Clone ID: LIB3107-009-Q1-K1-F11
ttcccgggtcgacccactcgtcacgtacagccgcccgaacacgctccaatatacactatccaatctacttattaacttattaaatagcactaattgagacacttgggctcatcctcttcattattcaaactaacacttccttacatctttcaaaagttttatatccttttctatcattatctacaactccatctatatactccatctatctttcaccagaacctcatttacacctctttttttactcattatcattaccttttctaatttcatcactacacactctacacttaccataactccttaccta

SEQ ID NO: 49590 - DNA, 359 bp, Glycine max
  Clone ID: LIB3107-009-Q1-K1-F12
tactgggtgcataagacgacagaaggggacatacaatcagtgtcccacgttgaagctattgcgactctctcttcctactataaccgttacctctcgcctgaaaaccgacattgatctctgtctgccacgatccccgcccatccctccgacatgagttccattgagctacttcacatacagcccctggagctgcaacatccctttgaattgctgaagcatatctcgtgctatttgcagctgtctaacatgactgtcatctatgtgatttttaaggtcaagacaacaaatcctatgatatattgtgttagacctaacactgcagttttgatgcctacgtctacttgcgatgtcatagtgac

SEQ ID NO: 49591 - DNA, 323 bp, Glycine max
  Clone ID: LIB3107-009-Q1-K1-G2
gccgctgctgcagcttgtctctgtgttcaagtgaagggagcctctcccagcatgcctgataggaaatctgttttggatcttcttaattgtcaatgataatactcgcaaaaggtcacaattcgaactatcaggaatagaataactgtgtatggcagagggaaagacccttgaaaatggcagcaaggaaagcaaaaatccttttacagagtatatctgcaagatggattcttcaacataatagtttgttgtcattgtaataagattaggacaaacactttaccgtttggtaatggaaggaaaatgaaaagaaaaatgtttatatg

SEQ ID NO: 49592 - DNA, 422 bp, Glycine max
  unsure (1)..(422): unsure at all n locations
  Clone ID: LIB3107-009-Q1-K1-H4
ccacgcgtccgcccacgcgtncgaagacgacagaaggggaccgcgcgctcattctgagtattctgatcgctcggtgagagagctcgtcgcggaggttgctgaaaaagattgcatcgatgaagttcaacatcccgaattccaccactggattccaaaagaaagttgaaaaccgccgcgaaccttaactgtgaaccattttggaacaaaagattctcacagaaggacttcgaaaacgcactcggtgaggaattaacggactatgtcttcaaaattaccggaggtggtgacaaacaaggatttccagtgaatcagggagtgctgactcctgatcgtgttagacttttgcttcacaggggaactccttgcttccgtggatatggaaggcgtaatggagagcgtaagaaaaagtctgttcgtgggtg

SEQ ID NO: 49593 - DNA, 224 bp, Glycine max
  Clone ID: LIB3107-009-Q1-K1-H7
cggaattcccggctcgacccacgcctccatatgcatgacaaaaaacgacttactgtcagtgtctatcaaaataaaaccaatgtgaacattgtaatttctgaaataacttaaataatatacatcatactatatcaaaatacctatgatccgcaatttatgaagacttctaattaaagcttataaattatactgccccatctgaccctgtttacaataaatcaaaa

SEQ ID NO: 49594 - DNA, 80 bp, Glycine max
  Clone ID: LIB3107-010-Q1-K1-A1
ttcttctgcaagaagaccacatatgggtacgggtgctattagacgacagggggttactgctgctataagactacataagg

SEQ ID NO: 49595 - DNA, 354 bp, Glycine max
  unsure (1)..(354): unsure at all n locations
  Clone ID: LIB3107-010-Q1-K1-A10
acaatacaccatgatacttattatttgttctagagaagataaataaataaataaacaaatcattgtaagttgtaactaataataatgcactagtagtaactcattcatcattccgtttccagttcaagaacttgttctactcttttatcctacgcactcctaccttcttatcctgcgcatctttcaccgagatcctgcccttcgcatcttcactttccaccatttcagtgggaaagaatcatgagttgtttcagctgttgcgaagaagatgacctncacaaggctgctgaaagtggaagaccatacgtcgtaaaaaattcagcaggaaatgatggaaattatcttgcttctgaa

SEQ ID NO: 49596 - DNA, 329 bp, Glycine max
  Clone ID: LIB3107-010-Q1-K1-A4
tatttgccctctctccatcactcttcctcttagcacttcggtacaactaagacctacggtttctactttttataaacacattttaatctctacaatctatacaccctcctcaccaatcacttcataaattcccaaccttttcatctataaccttatcccctttctctttataaaccctgttacaaccacattatacattactcaacctacctcatacactcacaacacctcttacccatttactattaacatcactcattatcctccccacaaactttaacaactcaacaccttctttcccacaatactcacctattcactacacccac

SEQ ID NO: 49597 - DNA, 368 bp, Glycine max
  unsure (1)..(368): unsure at all n locations
  Clone ID: LIB3107-010-Q1-K1-C2
ttggattctataatagataataataataagggaccgtgtagtttctggggaacagggactattttcntgtttgtagctctttgcttgtttgggatttggatgatgacatcgtcatctgttacgcccgtgcaaaatgtatatgtgtctcaagagaataacaatgaggtgaaggaacagagtgaggcgaatgaacatccaactgacccctctaataacaattctcagcagtttgaagataatcggggtgatctgtctgaggatgcaaccaaaggggatggtagtgtcaccccttctacaaactattacttgacagaaaaacatgacgagaaatcatacgaaaagtctcaagaaaaaccttctgaagattc

SEQ ID NO: 49598 - DNA, 341 bp, Glycine max
  Clone ID: LIB3107-010-Q1-K1-E8
caccttcactgattcatagattatagtcaatagtagttatgaggttatccccatgcatctacaattctaaattgcaccctttttggaaaatggtccataaagttatcggcttctgatgaattttactgttgacctttttatatgttctttgtatatatccaaacttgtttatatttaagagatcaaaccatatctcatgcaattgatcttgtctgctcttgttctgtgcaattgatactctagatttagttctttgcaggaaatgtgcagccatacaagtttatcctccccccgacttggaaacaggctcgtgtagcaaatatattatctggaaattactg

SEQ ID NO: 49599 - DNA, 391 bp, Glycine max
  Clone ID: LIB3107-010-Q1-K1-F8
gagtgggaagggaaaaatcgaagtgactattgcaggaggaagagttgtttgggaaaataatgaactgaaggttgctcctggtactggcagatatataaaaatgccaccctttagttatctgtttaacggaattgacaaaaaggatgccttttatctaaattccctccaagccccagtaaagcgagccaaatctaacacttaaaagtttctgatatcctttggtcaaagttcaacattttaaggagcgggggagacaaagatgtgtgttaatccagttttttgcttaaataaaatagtatatatatatatatacacacacatatgtatattacaatagataataggtatgcttcgtgttaccttttccactcatgtaatgttcattagttac

SEQ ID NO: 49600 - DNA, 480 bp, Glycine max
  Clone ID: LIB3107-010-Q1-K1-G1
ccggtccggaattcccgggtcgaccgactcgtccgtccacacatccttacagatgtgataagcgtcttattgttcgctgataccattcgggtagcgtgatcttcctgtgctgtgaacctttcactctctctctaatttcacattcaaatgaataatattccttagagatattacgaaaccattgctcactccaatcctatgatttttgttgctaagaattctaagaaaccttgtctccattccgttgctttctatcaccaataccaacattctatcgagtatgtctgaagaaaaccaccgaatgttttcaatcacttccttacttggctacactcttaactccattgctctgaatattttatgcttacataaagacgaacgatactcttttaatcaccatttacgcattagatttgtttatagacacagattacctcgtcatctatatcacttattgccacaagaaagctaaattcttta

SEQ ID NO: 49601 - DNA, 301 bp, Glycine max
  Clone ID: LIB3107-010-Q1-K1-G4
ggaattgccgggtcgacccactcgtacttccactcatccgtacgcgagaatactacattatgttgaagattaatctcctgggttgcgagagatacatgggaaggtgcgtaatttaatactatctgctcaagatcctgcaaatactcttgcaattgatgcctattaaaaaataatagattctcgatccgtctttctaagcaatgtagactattcatgcactcctgaagaaattcaacttcattctcagtctactgtaacacgaaacaaactcaccattcaaactgttaagattgtgcaacct

SEQ ID NO: 49602 - DNA, 262 bp, Glycine max
  Clone ID: LIB3107-010-Q1-K1-G8
ggagaaaacgaaagagagaaagaagttgagacagagagagcagaagaaggatccacatcgttctcttcctctcttctgtcttcttctccttcaacattcccaaacccaaaaagccagccacattgcaatcgccgaaatttttccacttcacgaaacggcgagtcgttttggaatcctgagttttggtttttgctttcgtaggttttgattggggttaccgagcgaacaggtgttttaacagctacaaaataagtgatttatg

SEQ ID NO: 49603 - DNA, 394 bp, Glycine max
  Clone ID: LIB3107-010-Q1-K1-H10
gtcctagctaccttaggatcatatgtatgtaagtcacctggtttggacctagtcatacataacttagtggtaacataaataacaaaaagaatactctaccaggacattattcactatattgagtgaaatggtacagaaaatggaaaattgtcccaaatttattttttaaaaaaatcaggaacatcatagcaaatatctaaaaatcattttttattttttgtaatttttggcgacttttaaaaatcatgaaaatagaaaaaaattgaaaaagtggtttaaatcatcgaattttgttgtattaattttttcccacattttgaccaattttcaggccatttgagctagttgtaggtgaaatgaccaaaatatccctgcatctaaaactcctacttat

SEQ ID NO: 49604 - DNA, 402 bp, Glycine max
  Clone ID: LIB3107-010-Q1-K1-H9
gggcaattatgatatgtgattgccattagctttgacacaaggctgatcatcctacagacatttaaattatttttcccgtcgagtagtagtgatgttttacaacaaactagcccaccaaacaatactaaaataaaacaaaatgatttaagaaattattgaagcagtattagtgatgttaccagacctgcattcacaagtacactgacttcttgatccttccactacacgttgtgatcttctggtgtgaagcttgatgttcaccaccttgccagccatctgtagcaccataacatccagaaaacaataaccatgacatccaaaaagaggtcaaggaaacatcacaaaatataagatgcctactgaaccatcttcaaaatagttaagaaatgtcaagagaataaa

SEQ ID NO: 49605 - DNA, 358 bp, Glycine max
  Clone ID: LIB3107-011-Q1-K1-A3
tgcacgtaccggtccgtaattccaggctcgacctacgcataacaccacacatccgcacaatcgttcgtcaattaaccgaacacgacagacttggggtaacatggttcaatgtgtataacactgtatttactatttatatgacatctagctactctataatcttactctcgaactagacattgtgattatcatcctaaactatttgcatcgaataatcactcaatatcataccatatactttgttctaattctccatcactcttcatatatttcacaccatcaattcttatctaaacctttggcttaacatccataatccaacatattctttatctcaatttcgaaatctctcttacta

SEQ ID NO: 49606 - DNA, 161 bp, Glycine max
  Clone ID: LIB3107-011-Q1-K1-C3
cctcacattaccaagttctatcaatgacatcattggatttatgagaacacctcgacccaagggggaagtccctactaacccactaactatataacttgatcatatcgctacagattttaacatccgatgaaccatgatacactcttacaaatgacattcta

SEQ ID NO: 49607 - DNA, 362 bp, Glycine max
  unsure (1)..(362): unsure at all n locations
  Clone ID: LIB3107-011-Q1-K1-C8
agaagacgacagaagggaagccatggtggcaaaagatgcaaactcgtgaagagttggttgaagcttccgctaccctcatatggattgcttcagctcttcatgctgctgttaactttggacagtatccatatggaggtttaatcctgaataggccaactattagcaggagattcatgcctgagaaagggtctcctgaatatgatgcgttagctaagaaccctgagaaggagtttttgaagactattactggcaagaaagagaccctcattgaccttacaattatagaaattntatcaaggcactcatctgatgagttctaccttgggcagagagatggcggtgactactggacttctgatgcc

SEQ ID NO: 49608 - DNA, 358 bp, Glycine max
  Clone ID: LIB3107-011-Q1-K1-D10
tggaacaacataatagagtttagctgaaatcatagtttcattaatattttgtatcatacatgggcaatcttagtaacacccccctttaatttgatgtgtgcctactgtgttttgatgcaattttctatcctttttcttttatctgttgctacactatataagttttccttttctttatccctttaagattatttaattaaaatttaaaaaaaatactgtggtcactgggtatgattccttcgctataaatgcatcggctaattaaattgcttatgctttgatatccttccccattgattgatgtggactggaatttgatagtatgagacctaggttcaaatttctttgtattcataga

SEQ ID NO: 49609 - DNA, 220 bp, Glycine max
  Clone ID: LIB3107-011-Q1-K1-E8
attccacggctcgacccaagccttcggtccggttacaaaagacaacacaacgtggagagcaaacacaccatgattgagacgattaggatccacagacgactactacgtgcattatagaaacatcagaagatacattaagatcacattcatcatcatctactactatcttcaagtattacacttactcagtatcatcgtatgtctctcaatgactctatat

SEQ ID NO: 49610 - DNA, 404 bp, Glycine max
  Clone ID: LIB3107-011-Q1-K1-G10
gactgttttcaatttctgcaaaaacccctcaacagtttctcctcactcgttgcttatcggcacttctccttcttcggaattcaccccttatcgaaataatttgttcttgtttccttccaaaaaaaaccctagctagcttccatggcgtccaagaagaagcactcagagggcatcgccttgttgtccatgtacaacgacgaggaagacgacgaaatggaggacgcagaagacgaagacgacgaagaagaaggtgatgcagggatgcggatggaagaagatgccgccggagatgcgagatttgcagcggaggaagattccgccaatagaacagccatcgttgattcccgcaacgagggcggcgctgatgaggggttcattccggcggagaagagtagggttgggac

SEQ ID NO: 49611 - DNA, 218 bp, Glycine max
  Clone ID: LIB3107-011-Q1-K1-H2
agcagtctctacggtgtctcaacttgtaacagctccgcaacctcaggcaccacctatgcgagggatcttttccatgtgccaacatgcaaaactattctgattcaaacgggaacactgtgactactatagtttctaccctgaacagtatctagcgttcatttacccaggatgaaacatatgacctcctgaaccttcctagaacaagctcttggattcct

SEQ ID NO: 49612 - DNA, 246 bp, Glycine max
  unsure (1)..(246): unsure at all n locations
  Clone ID: LIB3107-012-Q1-K1-A2
accggnccggaattcccggatcgacccacgcgtacgaccgcttctaaaaaaccaccaaaagggatatcttcatcatacaaagcattgcattcaaaggctgaagttcattccttgggggttcctttcttcctcaaaaccaaacatgtcaaacacatgctgcaacttcaactgcacttactagactagctgcaccaaaggaaactgctattgtattattctaaacactgacaacagttacatccatac

SEQ ID NO: 49613 - DNA, 366 bp, Glycine max
  Clone ID: LIB3107-012-Q1-K1-A7
accggaattgaattcccgggccgacccacccatccgttcggtgctacaacacaacagaatatgtatttttatcaaatcttctatttctccagcggggattaaaacactggttggtccctctcatcctcaaaccctaacatttccaacacattccgcaccttcaactgcgcttacttgacttgctgcaccaaaggaaacagctatatttttattgtatagactcacaacacttacatcaatactatcatcatctatgttccaccaactaagcattatttgaacttcaaatgtggcactaactacactttcacaaactttacctgttggcattaatcaatatctattaaaatctaatttacatgtttt

SEQ ID NO: 49614 - DNA, 455 bp, Glycine max
  Clone ID: LIB3107-012-Q1-K1-B3
cggaattcccggctcgaccgacgcatacatacctgtgagaaaacaccacagagggcgcttgattcttttgcgaccactcatctcactggcgggctatacaaaaccggggaggtccttttcatttcttctctcgaatcttgaactcatcttttcttgaatcttgaaatcaaacttctctcgattcttgaatcttcttgatttcttctcatgaagcttgaaattaaactcgatcttgaacttgttgactcaatcttaaaattattctttggagctttttgtcatcatctttgtcatcattaaaactacttgaatcaacttgattcatcatcatgaagcttgcttctacattttcaactaggaaacataccatatcaatttcatgcacaagctcctcaaaaatgataatggacacaagaaatgataaaggaagtaacctccattaattgtatgattca

SEQ ID NO: 49615 - DNA, 202 bp, Glycine max
  Clone ID: LIB3107-012-Q1-K1-C10
tgcttttctcaacacaataccatacccactaatacgaccttttttataaccctgctacctcttatttttacatcctctttcatcattcttaacaatctttcatcatactacataccaatacctaatccacctttctataattcttcactctactagccctacaaatacaatccttccttttattaaccaaaaccacccattt

SEQ ID NO: 49616 - DNA, 419 bp, Glycine max
  unsure (1)..(419): unsure at all n locations
  Clone ID: LIB3107-012-Q1-K1-C11
gaatacccgggcggacccacgcgtccgcccacgcgtccgatgacagaagactacagatcgggcaccaagagggctttttaatggagggtacttttacaagggaagtggccaatatggctntnatagggattataacaaatcaaaaggaaatggtttctatctaccaaatccccaccaagagaggggacattcattgcatcatcaactaccgacaaatgggcacaatcttgcttagtcctgagtcaacaaaaaacataagccagacaatccaattttgggtccagatatttcaactctaaatattcaacttcactagattacaccaaatattgatatttttcatttcctaaattaacctagttcagaaaatattcaacctatattttcgttcctgaaaaattttattcaaccaacctttt

SEQ ID NO: 49617 - DNA, 153 bp, Glycine max
  Clone ID: LIB3107-012-Q1-K1-C3
gaaactacagaagggtgatagagggacaggtcatcgcgtccaccgccttttagtagaagcggcaactccagaatgcaaaagactccaaaaaactgattgtggtggattttactgcttcctggtgtggtccatgccgtgttatggccttttttt

SEQ ID NO: 49618 - DNA, 438 bp, Glycine max
  unsure (1)..(438): unsure at all n locations
  Clone ID: LIB3107-012-Q1-K1-H8
gaatncccgggccgaccgacgcgtacggccagatgacaacagacggcgacgggtgatttttctagctatgggcgaattcaagcactgcggcattgttaagttcgcggagggcttctccttcaacgacctcacaaaatgaatctcaaagttggtcactaacattatctctttctaatcctttgaatgaggacaatacattgatagcctacatatcttcagacactgtttgactcatgcattcttgatcacattcaacacaaaagaacactattttgcatttcagagccaccccaatcatatccagttctcgacatacttttcggcaactattgagaatattgcgctactggatacaccatctactctcgtgacagccccatcctgatcctacacatattcatgcaatacagattacccttttaaatttaaataatgcat

SEQ ID NO: 49619 - DNA, 159 bp, Glycine max
  unsure (1)..(159): unsure at all n locations
  Clone ID: LIB3107-013-Q1-K1-A5
tcctgctgtgacagcagtgagctcgccgccagcgccagttcctgtgagttctccaccagcgcctgttccggtgagctctccccctgcactggcaccgacaactccggcacccgtggtagcacccagcgctgaggttcccgctcccgctcccaagtcgna

SEQ ID NO: 49620 - DNA, 329 bp, Glycine max
  unsure (1)..(329): unsure at all n locations
  Clone ID: LIB3107-013-Q1-K1-A8
ccggnccggaanncccgggtcggcccacgcgtacgcccacgcgtccgaacacctgcgaagacgacccaaggcgactattccctcctacttcctttgggtgtttcgcttacgctttgtagggtcttttttttttctattgctctttccctgtgtcaaaagccgacaaaggaggtcaggtgcttgtgaccacaaaaacctccgcatcgaacaaggacacagacagggataagaaaaggcctacctctcattcatccccagctgcgatccactttccagaatgtcctgaccataaacagtcgaaccaacgggtgcacagcaataaacctttg

SEQ ID NO: 49621 - DNA, 459 bp, Glycine max
  Clone ID: LIB3107-013-Q1-K1-B5
gagattgtcaggagctggagccctctattggagagcagctggtatccttgcttggtcttgagccagatagtgaacttatggtatattctcctttgagtcatcatcttgctttgtgaataaaaactgataagcaataatcatgatgtacaaatgggaaaaaaccaaattgttctgttatgttactgtgagaaattgagtgactctggaatctggattgatatggtaattgttttacttgatataaaatggaactttcttgctaagaaattttatacatgattattggttggtctcaacaaacttatgtagttgaaagtccctgaaaagacacagatatcatcattaagcttggttctaagatgttacaatagtcacatgttgtctgagctgtcaaccttcagtattgaactgagatgttttaagaattggattaatcccaactctcttgtttttacaggc

SEQ ID NO: 49622 - DNA, 290 bp, Glycine max
  unsure (1)..(290): unsure at all n locations
  Clone ID: LIB3107-013-Q1-K1-D1
acttgttcaaacactccanaacctacatttacttacaaattcaataaaactacaaggtcggcattctttataaataaaattttactcttaaaatcttttttttttacacaaaaaaatcattccttctctacatactaataattatattaaattactacaaacaactcacacatttattcaacttcaaacaatcaaccatacatcatttaccacaaacctcttctattccaaacattaatactttcaatataatctaataaatattaaaatgcattttccaaatttctttt

SEQ ID NO: 49623 - DNA, 331 bp, Glycine max
  Clone ID: LIB3107-014-Q1-K1-A1
atattggactttttagaaatagaaaagcattttgcataaatttgaaatccattggcataggattttttcagatttcttttttttttttctaaacttacgatagggatgaaaatatgtaatttagatctttaaaaaaaaatccatatgttcggaatagacctaaaatggaatagatgtatctagggattagtcgtttcaaaaagaattctccctagatacacaatacacatggcattctatttttttttatttcaaaatggaatcaattttataagtttaaaaaagacctaaagttagggatttctcaataggtaatggtgctccaatacct

SEQ ID NO: 49624 - DNA, 268 bp, Glycine max
  Clone ID: LIB3107-014-Q1-K1-A9
ccacgcgtagaagcacacgtacgggcagttgctagaagacgatagatgggtggacgccaggtgccatgtctataccatgctataccagacaattgtactgatgcgagagagatatgtctgtactgacttgttcactgtctagaactttgtggcgttgaacgtttcttaattgccttctggactattcttggactactaatggatatattcattccacatacagttattatgcccacattatagctcagtaccttgctcaagacactgt

SEQ ID NO: 49625 - DNA, 338 bp, Glycine max
  Clone ID: LIB3107-014-Q1-K1-B1
agaagcacaaagagaagcattagcactaggagcagcaacaactagtctcagctgaaatggcctcttcagtgatggcatctgtggccctcaaacctgcccctttcactgttgagaagtcctcagtgagaggccttccctctctctcaaggaactcttcttcattcagagttgtggccagtggcaagaagatcaagactgacaaaccttatggaattaatggtggcatggctttgagggatggaactgatgcatctggcaagaaaggaaagggaaagggtgtttaccagtttgtagacaaatacggtgctaatgtcgatggttacagtcctatctacgac

SEQ ID NO: 49626 - DNA, 306 bp, Glycine max
  Clone ID: LIB3107-014-Q1-K1-B3
gagaggaatcagaatcgcgtttgggagaagaagagcaaaatcgctgtgaaaatgagcggaacggtgaagaaagttagcgatgtagcattcaaggtgggaaggaacatcgattgggatggaatggcgaagcttctggtctccgatgaggctcgcagggagttctccaatctccgtcgcgctttcgacgaggttaactcccaactccaaaccaagtttagccaggaacctgagcccattgattgggattactatagaaagggaattggcactcggttggtggatatgtacacagagcattatgagagc

SEQ ID NO: 49627 - DNA, 383 bp, Glycine max
  Clone ID: LIB3107-014-Q1-K1-D9
aatccggagaccattgagtgcaaaactttcgaaggctgagaaagcgcttcttacgtgcatgatgatctccacatgtctgtctgtcaactaaaacactattgcgtttcatgatatatcaaattgtgaacatgctatgtgttaatgtttctttaaagcataatccatagccccttatgtttaatcaaaccaaaattatgccctagtttttttttttttgtgaatgctaaatcaaattaaggaaacaaatatcgattgcgtgaaagtgtagatctttacaggtgcaccgtgcaccgcgattactgcacttttgcgtgatctgttctttattatgcaaaaaaaaatatatactgtttaaaaaaaaagcggccgctctagaggatcca

SEQ ID NO: 49628 - DNA, 450 bp, Glycine max
  Clone ID: LIB3107-014-Q1-K1-E3
cggtccggaattcccgggtcgacagccagccggcctcgttgccgccgacgatcccgtagacggccagcatcagcgacccggtcacggtgatcgcgcccgcgacgtcgagccgcgcggcgccggccggcgcgcgcatgcgcggcagcagcgcggcgcacatcgcgtagaccgcgatgccgatcggcaggttgacgaggaagatccagtgccacgacagcgagctcgtcagcagcccgccgagcagcacgccgatgctgtcgccgcctgtgcagacgaaaccgtatacgcccatcgcgcgcgcccgttcgccgggttcggtgaacaggttcatgatcagcgacagcgagacggtcgacacgaccgcgccgtcgagcccctgtaccgcgcgcgcggcgatcagcatcgtctgcgattgtgcgaggccgcatgccaacgacacgagcgtgaaca

SEQ ID NO: 49629 - DNA, 340 bp, Glycine max
  Clone ID: LIB3107-014-Q1-K1-E7
tccggaattcccgggtcgacaggcagcctgcctcgttttcgacgacgataccgtagacggccagcattaacgacccggttacggtgatctcgggggggatgtcaatccccgcggggcctgtccgcgcgcgcatttgcagcagcagcgctgcgcacattgcttagaacgcgatgccgatcggcaagttgacgaggaagatccagtgccacaacagctagctcttgaacagccccccaagcagtacgccgatactttcggcgcctgtgcatacgaaaccgtatacgcccatcgggcgcgcccgtttgcccggttttgggaacaagtttatgatcagcgacag

SEQ ID NO: 49630 - DNA, 187 bp, Glycine max
  Clone ID: LIB3107-014-Q1-K1-F11
agatgtcagaacactacataacgacacatctaataacattccacatagcggtatttgggacatagtgcatcaccttcatacttacattcattatcccatgtttaaactaaacaaatatatattattccactaatcattatacctttcctctataatactacatctaattctatttctcactatattt

SEQ ID NO: 49631 - DNA, 348 bp, Glycine max
  Clone ID: LIB3107-014-Q1-K1-G2
gacaagtgagtttgttgatcgagataactagaaacagtgtgatgaaaatgaaggtccttgttttcttcgttgctacaattttggtagcatggcaatgccatgcgtacgatatgttccctctccgaatgaacactggctatggtgcccgtactccggaggtgaaatgcgcaagttggaggcttgctgtggaagcacacaacatctttggctttgagaccattcctgaagagtgcgttgaagcaacaaaggaatacatccatggcgaacaatatagatcagactccaaaacagttaaccaacaagcttacttttatgccagagacctcgaagtccatcccaaggacacat

SEQ ID NO: 49632 - DNA, 418 bp, Glycine max
  Clone ID: LIB3107-015-Q1-K1-A8
agaagacgacagaaggggaaaccaaatcgaatcacttgttagttcaacatggctggcagtggcacctttgcagagatcatagatggtgatgtgttcaagtactatgcacaaggccattggaacaagtcctcttctggaaaattcgttcccatcatcaatccaaccactaggaagacccacttcaaggtccaagcttgtacacagaaagaggttaatagggtcatggaatcagcaaaaacagctcaaaaatcatgggccaagactccactgtggaaaagagcagagttgcttcacaaggctgcagcaatactgaaggagcacaaagcacctattgctgagtgtcttgtaaaggagattgcaaagccagctaaggatgctgtcactgaggtgatcagatcaggggatttggtgtcatatt

SEQ ID NO: 49633 - DNA, 315 bp, Glycine max
  Clone ID: LIB3107-015-Q1-K1-B9
aggcgtgcgatgacagcagacggcggaaggcactagtgcccatcctacactttatacttcaatgtactgcgtggcagcatgtaacatcaacaatcccgagggctcttggacatcatcttctggactaccacacatggatggccataacattaatgcataccatcatcaccccatccacgtggctaaatgtaactagcatgccccttatctagataccgatataacatcgaacattcggaacatgctcaaccggactgaaagcagctcacagcatgccagtccacctagctcgacctgcatctgcatcataacaag

SEQ ID NO: 49634 - DNA, 301 bp, Glycine max
  Clone ID: LIB3107-015-Q1-K1-E1
atcgatttgcattatcgacatatactgatacactcagaggatcatccttccagggtgaaccactaccttctcctatacttatctctccttacttcaacactcattatatacttcactcatgccattcctttcaataaacaattgtacacgctcatctccatcactataacattaatttcaccaacatcacttcctacaactctatataaaccggttattattctctttataacattctccatcttacctaataattgtactttcattaatccaattcttccttatgtcctatcttcttatc

SEQ ID NO: 49635 - DNA, 165 bp, Glycine max
  Clone ID: LIB3107-015-Q1-K1-E12
tgtatacatgattttgatgatgtcaaagaagaatctaacaaggctgcttcaaatgataagcatttgcttcaagaataattcaagattgtttcaacaaacaaagccttgttttaagattcactaaagaccaagccttgccttaaaacaaagtactttcaagacatg

SEQ ID NO: 49636 - DNA, 427 bp, Glycine max
  Clone ID: LIB3107-015-Q1-K1-G6
gaagacgacagaagggggcgctagttctgagtattctgatcgctccctgagagagctcgtcgcggcggttgcagaagaagattgcaagatgaagttcaacatcgcgaatcccaccactggatgccagaagaagctcgagatcgacgacgatctgaaactgcgagcattttgggacaagaggatctcacaggaggtcatcggagatgcactcggcgaggaatttaagggctatgtcttcaaaattaccggaggttgtgacaaacaaggatttccaatgaagcagggagtgctgactcctggtcgtgttagacttttgcttcacaggggaactccttgcttccgtggatatggaaggcgtaatggagagcgtaagagaaagtctgttcgtgggtgcattgtcagcccagacctctctgttttgaacttg

SEQ ID NO: 49637 - DNA, 355 bp, Glycine max
  Clone ID: LIB3107-015-Q1-K1-G7
ggtgctctgctcgtgcctctagggttatcatttctccatttccattttctctctcacttttcaagaatcgtaagctatgggaaagtcttacccaactgtgagtgctgattaccagaaggccgttgagaaggcgaagaagaagctcagaggcttcatcgctgagaagagatgcgctcctctaatgctccgtttggcatggcactctgctggaacctttgacaagggcacgaagaccggtggacccttcggaaccatcaagcaccctgccgaactggctcacagcgctaacaacggtcttgacatcgctgttaggcttttggagccactcaaggcggagttccctattttgagctac

SEQ ID NO: 49638 - DNA, 219 bp, Glycine max
  Clone ID: LIB3107-016-Q1-K1-A10
tgtacacaccctttatctgctcatttaatctctgcttttgttttttttactcgcatctttaccgctacactttccatctccctatcaccctctcctttctctttctttcctttctttctttccacgttctccatcttttcccttcaatctctaaatctgtggcttcctttaaggttcctatttaaagctttactttacctttaccccaaaaaaacttat

SEQ ID NO: 49639 - DNA, 380 bp, Glycine max
  unsure (1)..(380): unsure at all n locations
  Clone ID: LIB3107-016-Q1-K1-C5
cggaanncccggggcgacccacgcgnccgcccacgcgcgcgaacaccacgagaagacgacagagggggcgagacaacanaaagaggcgagacccaaggcgagggcggaggaaacggcccacccaaaccccgaacaagacgacgccgagacccgagacgcgcncagacgaaccacaaaggaggaaagaacgggaccgaaacacacacagccaangccaaacaagccgagagcaccaaggacaccgccaccaagacaacaaaacccgccagaaaggcgaaagccgcgaaagaaccgaacaagccaaaacggcccccaagngcnnacnacaannncagggaagccaagnaaagaagcaacacaacgagncacaagacaaccga

SEQ ID NO: 49640 - DNA, 443 bp, Glycine max
  Clone ID: LIB3107-016-Q1-K1-D10
ttaagacgcataaggagattcttacagataaagcatttatgatcacagagaaactgtttaaaagattgcccgctacttcctcaatcactcttattcttcctcaactacatctacaacaacataatcatgaaccaattcttgttgctaccaactacatcatccctgaatcctatgcaataccagctccaaaaccaatcctcaaaaatgccctcaagcgctacaaccctactcaacccgacacccaatctgcagcacctaacaaaagctagaagttcaaaaccacaactgatgcttctgaagcacaagttattgatgccatgcacaatataactttacacattagaaaccctgcaaaattcatcaaggcttcaaagcttgctatacagctgattcacgcaagaaatgtaaaatcacaaattagtgattaatttttttgccatatt

SEQ ID NO: 49641 - DNA, 373 bp, Glycine max
  Clone ID: LIB3107-016-Q1-K1-E9
ggagtctttatgctttctttcaatatcgagaatccattttgtaagtacaatgtttttcctaatgatatgatcgaggcttcacaccagtaatgtggacttatcatttactaaaagaattaggattccagacaaggagaaattaccaccatatacatcttgtgtaacacccaatttttgcgtaatataaattaaaaaagattctatttaaaaataaatagagttttaggaaaataatgagattttcgtaattaaataaataagaaaaaataattttattaattaaaataatgattttaaagtaaataaaataattatatgttcttataaaataaaatgaatatttaatctattcatttgattgggagtaaaatat

SEQ ID NO: 49642 - DNA, 324 bp, Glycine max
  unsure (1)..(324): unsure at all n locations
  Clone ID: LIB3107-016-Q1-K1-G5
cggaagacccgggncgacccacgcgnccggacgggagaagacaaacgacgggaggcggaaggagggagggaaccaagcagcaggaggggggggcggcgaaggaagagggaagggaccaanagaagacacaggcagggaggaggcacanaggaaaacagacacgaacgagggacanggcgcaagacacaaaggccaggagccaaanacaggcaaggaggaccgacccanagccagggcgaccgaaacaaaagagggggagaaggacacaggaggaaaccagagcagaaaaggagaacgaagacgaccacgcaagcgacaccagag

SEQ ID NO: 49643 - DNA, 128 bp, Glycine max
  Clone ID: LIB3107-017-Q1-K1-A2
aggtctggttctatgttgcataaagggtgcaagaggtacagaatcatggtgagtggaaatggtttggtttaccccgttgtggggtttgcatcgatcgtgttgttcatttacatgtcttttggggatgt

SEQ ID NO: 49644 - DNA, 203 bp, Glycine max
  Clone ID: LIB3107-017-Q1-K1-D11
ggtatgtgattgttgtgactcgttcttcttcgtcgttatcttcttcttttgttgtttgtgtgtttgttttttctctcacctgaaaatgtcttgctgcggtggtaactgtggttgctgaagcgcctgctagtgcggcaacggctgcggaggctgcaagatgtacccagacttgagctacaccgagtcaaccaccaccgagacct

SEQ ID NO: 49645 - DNA, 372 bp, Glycine max
  Clone ID: LIB3107-017-Q1-K1-F10
ggggttatcaccctggggggtctggataggaggaactaaatgggttacaggaaaaagcgtagttagacataacaataagtggggagcatttttttttttctaaaaaactttaagaagaatcttaaaatgtaggtttgacctatctcaacctttaaaaatcagtttgtaaggtgaggattgctcctcacttggatactctattttgacactatctttaaccaatgtgggactttaacacacccactttttgcctatgggtacctgccaatgtgggacttcagcacacccctttttgcccacaggtacctgccacaactaaggtgggctaaggatgaccacaattaaagtggcttttcaacacttcccacatgc

SEQ ID NO: 49646 - DNA, 439 bp, Glycine max
  Clone ID: LIB3107-017-Q1-K1-H11
aattaccgggtcggcccactcgttcttacacgcgttcgaacacctccgacaagactttttaatgtataatagggttcctcctcctttgatgctacccctacatcgggtccttctgaaactttaaattccagcagaatgacactttcacaacatgctctgacattctctccaaatattcgacggcttcagttttaattccaaatactgcaattcttacttctgaatttcaatgatgattaatactgcatacgaacatcctgatggatgaaccaaattcaaaagtttttttgatagattatctctatgctgttggctctacaattattacttccacattaagaacttgacaactctctttagttcatgcatgcaacctttcactatggcatattaactttacaccattctctaatactttaaattactttaaacacttact

SEQ ID NO: 49647 - DNA, 392 bp, Glycine max
  Clone ID: LIB3107-017-Q1-K1-H12
accgttcttgaattcccgggtcgaccgacgcgtccgcggacgcgtgggagacgacagaaggggatgttttgaaggatgaggaaaggcgtcaacggggggatcagcttggtcatgaggcttatgtaaaccatcaaagcactggttttggaggcgagggtggcttcaatccttttgagcagatattccgtgatcatgatttagtcaagagcttcttccatgagaatattgatggagaggatgtcaagacttttattgaactatcttttatggaagcagtacaagggtgcaccaaaactttgacatttcaaacggatgtgctttggaatgctcgtggtggcaatggtgttcctcctggaactatgcctgaaacttgtaagccgtgttaagggttc

SEQ ID NO: 49648 - DNA, 192 bp, Glycine max
  Clone ID: LIB3107-017-Q1-K1-H8
acggttgagacaacacaacgggatgatacattctcactcaaattctctgcatcagggtgggggcaccaatattgctgagaagcgtcttcaataggtgcttctcctaatacaaaaccttagagtccaatttgtcgcttcggctgaaccgataatcttgagtcgaactatgccaaaactccaggaggttccttg

SEQ ID NO: 49649 - DNA, 453 bp, Glycine max
  Clone ID: LIB3107-018-Q1-K1-D5
tccgcccacgcgtccggacagaaggggggtgatgttccttgtttttgtttctggtcagttttgtgatgacatcagctaagtggcggcgaatttttggttgggtgcacaaagagaagaggctggatagtttctctttctctctccatggatcttcaggatttccttatccgtgctcgggtcttgaggctttacagacaagcattgagaattgctggtcgagccccttcttccgctaaaggtgaatattcttaaattatctgggtcattcctttatccaaatcaacagtcttgtgatgctatatacaattatacatttatacatgtatgtaagttttatatatgacattgctcggtgtaatggactgtacagctgaactgaggcagacaattaggcaagagatggaaaataatagaaactgcaatgacaagcaaaggatccgtttcttgattagt

SEQ ID NO: 49650 - DNA, 422 bp, Glycine max
  unsure (1)..(422): unsure at all n locations
  Clone ID: LIB3107-018-Q1-K1-E10
ggcagtgaatacaagccaaaagaacaacatggacattgatgtttctcctcaggggcgcgggaaagtttacngtgccaatggtggctcctactacgcatggtccccctccgaccttcccatgctccaccaaggcaacattggtgccgctaagcttgctctcaacaaaaacgcctttgctcttcctcgttactctgactcttccaaagtcgcttatgttcttcaaggtagtggagtggctggaatagtgttgcctgaatcagaagagaaggttgttgcaataaagaagggtgatgccttggcactcccctttggtgttgtgacctggtggtataacaaggaagaaactgagttggttgttctgttccttggggacacttccaaggctcacaaggctggtgaattcactgacttttttctgactg

SEQ ID NO: 49651 - DNA, 53 bp, Glycine max
  Clone ID: LIB3107-018-Q1-K1-F5
tactgctgcggggggacgacataagggtgcgggtgcgagaaaaccacagaagg

SEQ ID NO: 49652 - DNA, 153 bp, Glycine max
  Clone ID: LIB3107-018-Q1-K1-G3
gtgtgctgatggagcgataggcttttatagaggctttgggatttctatattgacttatgcgccttccaatgcggtttggtggacttcttattccatggttcatagactcatttggggtgcttttggttcttacatgggaaataacaatggtgg

SEQ ID NO: 49653 - DNA, 143 bp, Glycine max
  Clone ID: LIB3107-018-Q1-K1-H2
ttcctaccggttccaaaagacaaccaaaaggttccggttccaaaagaacaccaaaaggttccggtggggaaaaaacaacggaggggtccggttccaaaaaaacaacaaaagggtccggttgcaaaaaaacaacaaaagggact

SEQ ID NO: 49654 - DNA, 206 bp, Glycine max
  Clone ID: LIB3107-019-Q1-K1-D4
tccaatgacaaacaccacctttagcacaaaccaaaaacaccaaccaagaagtgaattttgcagcgagaaagcctgtaaaattcaccccaattccagtgtcctatgctgatttgcttccatatctacttgataattcaatggtagccataaccctagccaaggttcatcaacctccacttttctgaggatacgactcgaacgcaacg

SEQ ID NO: 49655 - DNA, 335 bp, Glycine max
  unsure (1)..(335): unsure at all n locations
  Clone ID: LIB3107-019-Q1-K1-F8
aggggaatcaaacacaacacttcactctcaatcttcgggctttttttcaaattacttcctcctatacncctccatccttttcctctccattaacttctttatccaaacaataattttcaaaaaccttccttcatcaccattttttttttctataatcttaaacctacaccaactcaatcaacctctccacctcacattccataccttatcacaaaaatatgtccctatattcttccttctattctacttcccatttttcctcttcatttcctcttctctctctgttcaataattcttcaccaataacttcattcttttttaccaaccttccttac

SEQ ID NO: 49656 - DNA, 160 bp, Glycine max
  Clone ID: LIB3107-020-Q1-K1-A10
acatactataatgcgctctatctctttctttcgagcgggttactaacccttgccgtgcttataactacatacttcctaagtctcaccattccttttatcatcaataccttcttcttcttcaacttactatcttcaacaaacaccctttttctaccaaaca

SEQ ID NO: 49657 - DNA, 277 bp, Glycine max
  Clone ID: LIB3107-020-Q1-K1-A9
gacgaacacaatgtgcttgatgatttctagaaggtaaaaagaagggtgggggcaaccttaagcaagaagtagcgaatcagattgacatggggtcgtttggtccgacaagcatgtccactgttgctaaagctgtagacgaaatcacctgcactggcaacaccaagatccgcaaatattccagcgagctctgcacctacctcggcatcactcgccaatcttgttccgaaatcgctctcattctctacaagttcatcaaactctataatttcaagagtcc

SEQ ID NO: 49658 - DNA, 282 bp, Glycine max
  Clone ID: LIB3107-020-Q1-K1-C7
tccggtcctgaattcccgggtcgaccgactcgtcctatatgtcgacatgaaggtgtacattaatgcacttgccctcaggtccttggtctatgccgaaggtatgatagagaaggcattcttgtggggtaagttctctttggaaatgtctgctgtcatttacaatgattgggttttcacctatcaagcattgcctaatgatcttgtcaagagaggtgttgcttgttatgatccatcttcttcccatagaattctacttctgatcaagtactatccttattcttc

SEQ ID NO: 49659 - DNA, 397 bp, Glycine max
  Clone ID: LIB3107-020-Q1-K1-C9
gtaccggacctgaattcccggctcgaccgacgcgtccggccacgcgatcgcattagtgtatgcgagctatatgaatacaagtagagctaactagggaagagataatacagacggaggctgcactaagactgactgcacgcacctcgcatgcatcctcactcattgcttcttattcatttcattgatcgtgcttcaaacaaactcactcactcacatgcaaacactcgctatccatttccttctgatggaggaaagaaagaacgtcactcaacatctatcattattcatccaccaagctggctcacatacaaccagctcactgacatacaatataccacagatacgtattccatgaatcatgcacatgccacatactcaattcattcacaagccatct

SEQ ID NO: 49660 - DNA, 494 bp, Glycine max
  unsure (1)..(494): unsure at all n locations
  Clone ID: LIB3107-020-Q1-K1-D11
accggtcctgaattcccgggtcggccgacgcgtacgctcttcttctcttgcggctagggttttagcgcagcttcttctagatttaaggaagatggagaaggaaaaggttcacatgggtattgtggtcattggccatgtcgactctgggaaatccactaccactggtcacctgatttacaagcttggaggcattgacaagcgtgttattgagaggtttgagaaggaagctgctgagatgaacaagaggtctttcaagtatgcctgggtgctggacaaacttaaggctgagcgtgaaagaggaatcaccattgatattgctttgtggaagtttgaaacaacaaagtattattgcacagttattgatgcgcctggacatagggatttcattaagaatatgattactgggacatcccaagctgactgtgctgntcttatcattgattccaccactggtggttttgaagctggtatttccaaggatggacagactcgtg

SEQ ID NO: 49661 - DNA, 419 bp, Glycine max
  Clone ID: LIB3107-020-Q1-K1-E11
aattcccgtgtcgaccgcgcgcgtcgcgtccacgcgtccgcccacgcgtccgaaggtgtcacaaacacttgtgaagtctgcgaacgtaggtctgcttgattctttccggttggggtctcttggttgcaagattgttggaacatctaagaacttccagaagaggaagaaacagtcaatgttaatgtcatcagattctgaggactcatacagcagcaacagcgtccatggccttaagaacaacttcaaagttcagagcttcacaccattcacaccaccctcaacatcagctaattacagaactgccaagagatgaaagggtataccacactcgtcctcaatggttggactaatcatagaatattacatacgttggaattttaggctattggctacaatgcccttaggtataacaataccat

SEQ ID NO: 49662 - DNA, 220 bp, Glycine max
  Clone ID: LIB3107-020-Q1-K1-E12
agttaatcactcccttcagtggatgtcttgctgggtgtggatgaatgatttgcgtgtttcatgactactactactactactccattcaatgtctaatgccatctcatcaatacctaaactgttcgtttttttttttctccctatactcacaatttattgtttggctatgcaatgttactgtgttgatgcaatggaaattttatcagaattttgtcccaaa

SEQ ID NO: 49663 - DNA, 249 bp, Glycine max
  Clone ID: LIB3107-020-Q1-K1-F1
agacggatggagagagagagagtgaaatgttttgcttcctctaatcttgctaatcattcgttctatcaaattttgcctaaaactcctattccctgttttagttaactcgattaacgtcaatctcaatcttctacagcttatcctatatctctcttttttcttctctttcctctactacaatttcaatcataactctctatcatctgataagcatatgatgatccttctgctggtttgatttactatcat

SEQ ID NO: 49664 - DNA, 271 bp, Glycine max
  Clone ID: LIB3107-020-Q1-K1-G10
attcccttgtcgaccgactcgtccggcttgtaaagatatataaactactacctcttctcttaatcctctaattcaaacttacatagatggttttcaaactggggctgtgtacaatcttccacataaatctcatttttataataataaataatctcctattcctatcttaaaatctccaaccctatctccacatttacaattcaatatcctactaattcaatattctatcaaaccctttactgatcttctatattctccttatcctactatt

SEQ ID NO: 49665 - DNA, 436 bp, Glycine max
  Clone ID: LIB3107-020-Q1-K1-G11
accggtccggaattcccggtcgagcccacgcgtccgcccacgcgtccgatttccgttggaaagttggttactttgtttggatcggtctctcacattggcctgctaataacgcctggtattctctccatctctaaacattcgcatcatatcataccataagtgtgttcagtttcttcaaccgtttgccttgaattgttcatatcatcctgggaagaaggtcaaagtttttatctgtttcaactttcagcaatcggtttctccttttgaagctgattgagtttggtggatgatggctaacactaaaatttcatcttctgagtggcgtaagctctctccgagtgttaccacggccttggcgtcggcttttcttgaatggttgctgattcttttcctgtttattgatgcttgcttttcttatgttataacaaagtttgct

SEQ ID NO: 49666 - DNA, 488 bp, Glycine max
  Clone ID: LIB3107-020-Q1-K1-G9
gtcctgaattcccgggtcggccgacgcgtccgcccacgcgtccgatttccgttggaaagttggttactttgtttggatcggtctctcacattgtcgggctaataacgcctgatagtctctccatctctaaacattcgcatcatatcataccataagtgtgttcagtttcttcaaccgtttgccttgaattgttcatatcatcctgggaagaaggtcaaagtttttatctgtttcaactttcagcaatcggtttctccttttgaagctgattgagtttggtggatgatggctaacactaaaatttcatcttctgagtggcgtaagctctctccgagtgttaccacggccttggcgtcggcttttcttgaatggttgctgattcttttcctgtttattgatgctgatttttcttatgttataacaaagtttgctggttactgcaaattgcaaataccgtgcctgttatgctcaaagcttgatcatgtgtt

SEQ ID NO: 49667 - DNA, 285 bp, Glycine max
  Clone ID: LIB3107-021-Q1-K1-C1
ggggtgcgataacgagcgcggtgatagcagttgtaggagttcttctaggttggatcacaatagagatcgcatgtaaaccttgtcttgaaaagggtcgcgaagccatcgatcgaagtctcgatccagattacgatcccgacgacaccgtcattcgcgccccactcaaccccaccggcgtctccgacaccgtcaaagccgtttgagaaattgatgtgccatcttctcacgtttccgcctggtattcaattcggtgtctaaatcaaaaggctatttgttttctttttt

SEQ ID NO: 49668 - DNA, 88 bp, Glycine max
  Clone ID: LIB3107-021-Q1-K1-C2
gacaacaacaaagggcttctgaattatcgtgttttgatcagaatctgaggagaaaatcacataatttcgaatttgagttttcgtgtag

SEQ ID NO: 49669 - DNA, 245 bp, Glycine max
  Clone ID: LIB3107-021-Q1-K1-C5
ggggtgcgataactagcgcggtgatagcaattgcaagaattcttactaggctgaatcacagtctacatcgcatgttaaccttgtcttgaaaaaggtctcgaaaccatcgatcgacaacttcatccagattacgatccctacgacaccgccattcgtgccccacttaaccaaaccggcgtcttcgtcaccgtcaaagccgttcgagaaattgacgtcccatcttttcacgtttacgactggtattc

SEQ ID NO: 49670 - DNA, 157 bp, Glycine max
  Clone ID: LIB3107-021-Q1-K1-E8
gagacctcaggtcaggcggggctacccgctgagtttaagcataccaaaaaaaaaaaaaaaaaaaaaaaaaaacaagcggtctatataaacgatccaagcttacgcacgcatgcaagcgacgacatatcttatatatagagctacctaaaatcaattg

SEQ ID NO: 49671 - DNA, 550 bp, Glycine max
  unsure (1)..(550): unsure at all n locations
  Clone ID: LIB3107-021-Q1-K1-F4
gtaccgcgtccggaattctccgtggtcgactccacgtcgtctcgtaccggtctgtcgagaaagaccgaccagaaggggacctgtcatcatcggacatatctcgctctccatcttgtagagcattcgcacttggtcggatggaaggtgcgaaggggacgccccatttatctagcagccatcttcatgatagttcgtgtgtctcttattatggactcctgtgcattcctgggcatattcccacacttctgtttttacctgcatctatataacanatctctgcatatcttaaaatcacactcacatggaagaatatcagcaccacgttcatcgctcatcaccttagaatcacaaccaggaattgcacatgaagatccttttgcaccagccatctgtggatgatttgcttcagattcaatcaccttatccatgagatgggctcgagtgacactgttgaatccacctgtgaaaagtgaatttgacacatattgttcctcaactttctgtgagattgatggatccatacgttggttatcaggggtaggtggtatat

SEQ ID NO: 49672 - DNA, 443 bp, Glycine max
  Clone ID: LIB3107-021-Q1-K1-F8
gcgagaagacgaccgacgggagctctcggctggtagaagcctatatcacacatggattagggttatgaaaagatgaagcatgatggccctcatccagacatatctacatacaatattttgatctccagctttggcagggctgtacgagtagacattgctgttcaaaattctgaagaactagagaatagcgactgtaagcctgacattatttcctatataactctatgatcaatcgccttggaaagaatggggatgttgatgaaactcacatgagatctaaagagatgcactagataggattaattccggatgtcgtgacttatagtacacttattgagtgttttggcaagactgataaagttgagatggcctgtaagttgtttgatgaaatgcttgctgaagaatgcactcctaacttgatcacatataatatcttgcttgac

SEQ ID NO: 49673 - DNA, 72 bp, Glycine max
  Clone ID: LIB3107-021-Q1-K1-H1
gagtctactcaaccacatattttgtcattgactgttgttaacacttaacaggatgcatattattgcttcttc

SEQ ID NO: 49674 - DNA, 436 bp, Glycine max
  Clone ID: LIB3107-021-Q1-N1-C9
ggaatcgccgggtcgacaccacgcgtccgggggagttttgcggggcggtttattgtcaaatggccgccagtataaacacggctgctttgacaaaatacttgggagggcgcgtcgacgctcttacccgcaacactcccttaaccctggcttccaactttatgattcgccgcttatgtgaacacgttacgggttgatgcctggacaaggatgaagtcacagatcgcgtcatttgctgcgtcaaaaacttacagaaaggtgctccttcaaagggtaaccctactgctcacttccagaatgaccttggattggagagtttaaaatcggcagagaacgtcatggctcttgacgaggagtttgtgttcgacattactgataatgacgcagacaagatcaactgcattaaacttgcagtggacttcattgcatcttatcctca

SEQ ID NO: 49675 - DNA, 286 bp, Glycine max
  Clone ID: LIB3107-022-Q1-K1-A12
acgtgtgagaacaaatcagaaaaggcttctttttttcttttataaaccccgccttctttgacattctctttcatcttcaacccatcatccatcccattctaaaactgattcctgcctatgcttttgtctataccttcatttacattgctacctactattcctttctatccaaaaattcctgaacctagaacccccaaaaccaccctcccctcaaaaaatgatacctgttactacgcacacccactcaactcccccatatcaaaataaatctcatgtacacccaatc

SEQ ID NO: 49676 - DNA, 367 bp, Glycine max
  Clone ID: LIB3107-022-Q1-K1-B7
tacggtgcattggcttaccttttgatacacttcttattgtcaatcaatatgaggtatgggaagtagccttgactgcattggaggcatatcaatcttatgtctgattcatataatatcacacatataatatggaatattatattaatctagtttatctatttatgaactttataatatggatctcatatgaacctaatatttgcatcaaattagatcaaacgctcttcttagaaacctgactgaatgctattatacgttccagcattataaaaacattcatcttttcaagttgatctaacttagattgattcggaacgcaattgatcctatcaaggaaatattcatggttaaacatagtcaacataat

SEQ ID NO: 49677 - DNA, 88 bp, Glycine max
  Clone ID: LIB3107-022-Q1-K1-D6
aactggagcgggcggtctacaggatgcaagcttacgtgctcgtgcatgcgacgtcgtaactggtctatggtgtcacctacattgactt

SEQ ID NO: 49678 - DNA, 298 bp, Glycine max
  Clone ID: LIB3107-022-Q1-K1-F3
acgcgcagacggctgccaagacgacagattgagaggtgctagtgccaatggagctacacgcactatttgacattattatacagcacagaatgaacataatgtcttagtctgaatgatggaccatcgtgaagctatcatattccacttaacttgaactatcctaattatggcgtaccatactctagcactcaatgtccataatgatgacacgcttgattttggcacttccgcgatgcaaatgttgatacagactatatttgcccatttgatacaactcagctcatggtgaaacttacta

SEQ ID NO: 49679 - DNA, 427 bp, Glycine max
  Clone ID: LIB3107-022-Q1-K1-F5
gatgatacaagagggaagttcagtaaaagggacagggagaattgctcagatacctgtaagtgaggcttatttgggtcgtgttataaatgccctggctaaaccaattgatggtcgaggagaaatttcagcttcggaatctcgattaatcgaatctactgctaccggtattattttgagacgttccgtatatgagcctctccaaacaggacttattgctattgattcgatgatccccataggacgtggccaacgagaattaattattggagacagacaaacgggtaaaacagcagtagccacagatactattctcaatcaacatggacaaaatgtaatatgtgtttatgtagctattggtcaaaaagcatcttctgtggctcaagtggtgaataccttacaagaaagatgagcaatggaatacactatt

SEQ ID NO: 49680 - DNA, 294 bp, Glycine max
  unsure (1)..(294): unsure at all n locations
  Clone ID: LIB3107-022-Q1-K1-F8
gaaagggctaagagtaaggaagaggaagatgggttggtcttccgcaacagcatgtgcgtcgctctcctcttcgactccgctgcctcgacttccaccgtctcgcactggcactcccattcctggttcgctttcattttcatggctttcttcatttcccactttaactntaagtgcttctcgttctcgctcctccggaataaaccctgccaatccctcacgttccgatgtaagtgtaactgctntccttcctttatctgtttaattatcgcttctaattcactttagtctgtctga

SEQ ID NO: 49681 - DNA, 335 bp, Glycine max
  Clone ID: LIB3107-022-Q1-K1-G1
actacagaatggcatctccattccttctaatggcttcaatctctcacttcataacctcgtctaagtcctacctctcccaatacgaacctctctctctgcttctcgctcctctcctctctctcctcttcgctcacgctctccgctccttcttccaccttctctcccagaacggactcaaagccactctcctattttttatcattaactccctcaaattagtccctggctttaaaggatacatatatgcctaaaaacaaaatgatgtggataagttgcaatctgatggtaaatctaaaagagaaggttggaaaacttaatttccaagcacaagatta

SEQ ID NO: 49682 - DNA, 340 bp, Glycine max
  Clone ID: LIB3107-022-Q1-K1-H5
cattggtgccacaaattgaggaatttggctcctccctcggtatcattggcttacttgacaaatttgaaagtagagtattgtaaaggattaaggaatttaatggcattctgaacggcaaaaagcttggttcaacttaagtccatgaagataagctaatgtaatgaattagaggaaatagtaaccaataagggaaatgaagaagcagagcaaatagtgtttggcttattgattactatagaacttgaggggctaaaaaagctgaaaagttgttgcagttacaagaagtgtgaattcaaattcccgtcattggaagtattgattgtgagagaatgcccatgga

SEQ ID NO: 49683 - DNA, 293 bp, Glycine max
  Clone ID: LIB3107-022-Q1-K1-H6
acaagacgacagaagggggcactcactgggttttcaaccatgggtgcgatacggacgcagctcgatgtgttgatgggagccaaccgtaacggtgacgtccgtgaagtcaatcgcaagtactacgatcgcgacgtctgtcgtctctacctcgtcggtctctgccctgacgaactcttgcagttaacgaaaatggatatgggcccttgccctaaggtccactccttgcagctccggaaagaatacgaggaggcgaaagcaaaggagaccgatcattatgacagggagttggagga

SEQ ID NO: 49684 - DNA, 470 bp, Glycine max
  Clone ID: LIB3107-023-Q1-K1-D12
attcccggttcggcccacgcgtacgcccacgcgttcgcttctccgatttttatgaccgatccaaaaccgcattctccttctactactgtcccatttacttcaccgtcctttccatgccttctcgtgttatcacaatcgactactctcttcttctcaaaaccactccctctacatatttcctctatctatttcataaactacttctactgcacttgttttatataaaaccacccaacactcttactcgactcaccttcttcgtcttagagtttttgcccttcctaacccttacgccgattaacccaccaacgacttatctttagcgtctcattctcatgaaaatttaagccattctgagactgacagtttctaatatgatcaagaatcttcaccacaaatggtcaatgtttggtcaacgattacatcctcaactttaagttgatcccgtggttgcatcaaagctttacttt

SEQ ID NO: 49685 - DNA, 134 bp, Glycine max
  Clone ID: LIB3107-023-Q1-K1-G3
attgcatgtgttctttatctgtcttaattgtatcccctagggtaatgtatatagcactgatttcttctacttctacaaaactttcatgtgctacttgacttgtgaagttttggattaaaaactatattgctatt

SEQ ID NO: 49686 - DNA, 235 bp, Glycine max
  Clone ID: LIB3107-023-Q1-K1-G5
taacggttggaaaaaacaacgaaaggaattgattgtttctttaattggcttaaatggattccctaaggtaatgtaaaaaggactggtttcttctaattttacaaaaattttaagtgctaattgacttgtgaaagtttggatgaaaaactatatgctattgggggattaggttcaaatataagttatcattctttggatactttttacaccttttacaaaatggttgacatttcat

SEQ ID NO: 49687 - DNA, 121 bp, Glycine max
  Clone ID: LIB3107-023-Q1-K1-G9
ggcattgtgaaatcaacagagaaacatttcactaatagagagacataagcataatattgagaaataatggagggttgtacttattgtgtgaagtcgctatgccttgttgggtttgtggtgc

SEQ ID NO: 49688 - DNA, 260 bp, Glycine max
  Clone ID: LIB3107-024-Q1-K1-A7
ccagtcgtacgaacagatgcgataggacgactgagctgggagtcaatataaaggtacagtgttaacgttggaactgtggccaccatctgaatgtagcgagtgcactgtgcctatacctctctggacgaagcattccaaatatggaaagacgcttttcatgtgcaacagtacagtcagatttacttcgcgcgccttcattcgatgcgaacacttttatattacctcgttactcattggaaacccaatttttccgtgtgcac

SEQ ID NO: 49689 - DNA, 402 bp, Glycine max
  Clone ID: LIB3107-024-Q1-K1-B9
cgacacatgactacggatgggagatgccctcagaagggactgcttcaagaaattattttagacccaggcgacgacattgaccgcgatgatgatggatcacacagatcaaccaattaacgggaaataagtccacgctatcgatactaacaacatggaagcctaacttaaccgttactagacaattcgatgactggtcctccaactcgctatacttgattacgctagagctgctttagcactgcaccggcatactgtcacttcattagctgagtaattttaacacgaatttcgatcgcatctattgaaagaggacagctacgtttatatcttatcataatttcaattggttcacaaagcatgcttcctcgcttagtgatggcaaccattcctctggtttttaca

SEQ ID NO: 49690 - DNA, 338 bp, Glycine max
  Clone ID: LIB3107-024-Q1-K1-C11
tgacagaggacccaatgaacccctatcatatctctcatcatgtatatacctcaatatttggccatcacaccactctattattatcactatcatcccatccaaaattatctatcaccactaaatactccaactaacctaacctactatcccaactcttcactcatgtaaacacactgcgccaattaaccatagagtacaccagatactcataaacatatatttgcaggctcagaacatattttagaccgccctatgaatattaacgaacgagaccatcactatcgacccaaatatccacctgctcgatctcattatgcacatgtcattaaaacaatatt

SEQ ID NO: 49691 - DNA, 411 bp, Glycine max
  Clone ID: LIB3107-024-Q1-K1-F6
gcacggtacgaaaggacatccgaaccatctaatgacaaaaatattaactatttcaaaaccatctcatctaatgattcaaatttacttttgtactatctaagaaatctttcactttttgtaaaatttattttgttttactatataatcttgcatacttgaaaaatcacattcttgaagatattattttgtttaggaatattattcacatagacatgttttgttggtatttaataattgcataaaaattaaaatttatttaattaaaaaattaaaaaaagtaaaaaaaaaaatatagtagaatatagtaaaaataggtagctattgtagaaaataacttgtattctcatgagaatattatatactcatccttattcatgagtagagcttgtttgaaacatgaagatataacat

SEQ ID NO: 49692 - DNA, 181 bp, Glycine max
  Clone ID: LIB3107-025-Q1-K1-C9
agattggaagaagacaaggaagtgaacagaaaggtcttcagaccagacaatatctgaacaaaatacagaaatgtcacgagcaagaaaggaaagaaaggaaattgtgacttacgacacatgaggcggaccccttcttgattaccaaccagaatctctcgcgttggcgactttttcgccccgc

SEQ ID NO: 49693 - DNA, 416 bp, Glycine max
  Clone ID: LIB3107-025-Q1-K1-D3
agaagacgacagaagggggttctagtgtatgtgattgttgtgactcgttcttcttcggcggtatcttcttcttttgttgtttgtgtgtttgttttttctctcacctgaaaatgtcttgctgcggtggtaactgtggttgcggaagcgcctgcaagtgcggcaacggctgcggaggctgcaagatgtacccagacttgagctacaccgagtcaaccaccaccgagaccttggtcatgggagtggcaccagttaaggctcaattcgagagtgctgaaatgggtgttcccgctgagaacgatggctgcaaatgtggagctaactgcacctgcaacccctgcacttgcaagtgaggtgttggagagctaaagcttcaagcagaaatggcccttagaaataatgataaaaactatatgtag

SEQ ID NO: 49694 - DNA, 322 bp, Glycine max
  Clone ID: LIB3107-026-Q1-K1-D11
aattcccgggtcgaccgactcgtactgcccaacatcattctttccccaatagcaatattgtctacagtctccaatactatattaacgatgttgtgtgtaaattgaagatccactagaaactataccaatgacaaacctccaaataccaaaccctgtgacaaggatgatatttatcaacgacgatccataatcccttcctatgatgacacatataaacccctttataatatacagatctattccaagtctaataaatcctttatattatcaacaaattattcaatactgtgattataaaaaaattcctatactaactccacta

SEQ ID NO: 49695 - DNA, 474 bp, Glycine max
  Clone ID: LIB3107-026-Q1-K1-D12
aattcccgggtcgaccgacgcgtacgctttccaccaccccttttcttcccttcactgcaaaaaatgcttctactagaatccctcctcccacatgattctcttacagcaagcaacgtagtaacagggatcccaggaaggttgtctgcgcctgcatcgctcctcctcaaaacttcaagagccaggactcttccgccattcatttcaatggttcgtccaaatcagagcaattgagcactgcgcgggatcatgaggatgattctgatgttcttattgagtgtagagacgtgtacaagtcttttggggaaaagaaaatcttaaatggtgtcagcttcaagatcaagcatggtgaagctgttggaataattggtccctctgggactggcaaatctacagttttgaagattattgcatgacttcttgctccggacaaaggggaagtttatattcgaggtaaaaagaagagttggtttaata

SEQ ID NO: 49696 - DNA, 440 bp, Glycine max
  Clone ID: LIB3107-026-Q1-K1-E11
gaattcccgggtcggccgacgcgtccgcccacgcgtccggtacttgtgagtgtatacccaacacaaactaagatcaacatggactacggcacccgggtttcagaaggtgagagggaacctatcatggagtattccacaccacgaccaatgatgggcaactaccaccaccctaatgctcaccgtgtcctcaacgagaagattgtttatgaggaggatgtgattggaggatcccgccacaaccacatgcatcaccaccaccctgagactcatgagagagtcaaggtggtggagtatgaacaagttcctgagaggctcgttttctatgaagagaaagttgcttatgacaacgatcggtactactcttcaaagtatttaaattggacaaatggaagaacacctataacgtgttatcatgtggctttttattaagcatgctacct

SEQ ID NO: 49697 - DNA, 354 bp, Glycine max
  Clone ID: LIB3107-026-Q1-K1-E12
gaattcccgggtcggccgacgcgtacggtggccattaaggcaatagtgttctggaagtaacatttttctatagcaaacttatttttgggtggcatctaatgtgggtgtacaaaccgttaattgattttcttgaagcataaaagaaattagttttgccgtatcgggatgaagcaatgctgtttcctgcagaagtaaccattaaatcagagtttgtgctttgtagtgtgatatttgtttatgtaagacgccttggattacatatttctaagagaatgtcattgtcatcagattttgtgccagttatattatttatacaacaattttctattaaaaaaaacataataatcacttatt

SEQ ID NO: 49698 - DNA, 124 bp, Glycine max
  Clone ID: LIB3107-026-Q1-K1-G10
atctacttttttaacaacaaatataaatttatattaggcccttctaacaaactacgccggtgatttacccaattactattaacttttccactacttctccctttcacatttactaactcctttc

SEQ ID NO: 49699 - DNA, 476 bp, Glycine max
  Clone ID: LIB3107-026-Q1-K1-G11
ccgcccctgaattcccgggtcggccgacgcgtacgtttttctcctcttctgccctccacacaacttctctctcctctctctctctctacaaatccggctttctgctattcgctggtcactgtagcgtatccatggctttcagagttggaggagcgggaggaggaaatgcctcttctggcatgggtgttgctgagcatagcgtaagcacgttcctggaattgcagaggaagaaagttcatcgctatgtgatttttaaaattgacgagaaaaagaaagaggttgttgttgaaaaaactggaggccctgctgagagctatgatgatttcactgcatccttgcctgaaaatgattgccgatatgctatctttgactttgattttgtgacatctgaaaactgccaaaagagcaaaatcttttttattgcatggtctccttcggtagccctcattcgccctaagatgctatatgcaacattc

SEQ ID NO: 49700 - DNA, 53 bp, Glycine max
  Clone ID: LIB3107-026-Q1-K1-G9
attcccgaatcgacccactcgtaccgactcaccaaactctatattcaaaatat

SEQ ID NO: 49701 - DNA, 297 bp, Glycine max
  Clone ID: LIB3107-027-Q1-K1-B12
aaattttagtttcagagatcgtgaaaactttcaaagggtccgcattcctattaatcgtggctattccttgccttatatttttgaacactgcactttatactgcttatactgtccacaagctaacgagccttactctcctgacaccatttattacataaaatctctggatgctgcataatatataaagctcttcaagtttcatggatggtaccttcctcctaaatgtgcccatatccttcatatatcaaccatgcttcttctgaaaagttcatatataggactcactcctttcacctt

SEQ ID NO: 49702 - DNA, 303 bp, Glycine max
  Clone ID: LIB3107-027-Q1-K1-B5
ttggtacgggtgcgaggggacgactgaaggggacattactctgctctacttccattccgtcgattcgacgtgtaaccgttgagcgcgttgcgatcatggcgaaagtcacttccagagacgtgcaagagatcgtggaaaaactctcctccgataaagccaaagctcgcgaagtcgttttcttttctcaaactcactgtctctattccttatcgagctcgttaatctgcgattttgaatggatattaaaaacctttgttgtacgtgctaatgatatgcatataacgatggataaattgacgtgat

SEQ ID NO: 49703 - DNA, 102 bp, Glycine max
  Clone ID: LIB3107-027-Q1-K1-C10
taatgttacattctctaatctcaatcacaaaattgagaactgtttacattcttatatactacaaccaaatcattacatacaatcatcattcatactattatt

SEQ ID NO: 49704 - DNA, 377 bp, Glycine max
  Clone ID: LIB3107-027-Q1-K1-E10
attcccgggtcgaccgcacgcgtccgcccactcgtccgcccactcgtccttttacgctttagcggctacaacaacacgacagaggcaggctctctctttacagccatcgatccaaaacttccttccaaaattcttctgctatataatctcatcaatgacattcttactaaccctcaaccttttctctacctcagcaagctcataaaactcaccaccctcaaaactatttatgaataatacattaacaatctgcctaacactttcactatgccttctacacctacaacccctattactcccacaactacaacgacacctatatccatacctaaagctcaccaccttcttatcatccctcttccatcctgttaacaact

SEQ ID NO: 49705 - DNA, 131 bp, Glycine max
  Clone ID: LIB3107-028-Q1-K1-A9
tttcggtttcaaaaagcgtacccaaaactacaagtatctggcctacaaaccagcgactcttctctcctttctcaatcttcggactaatatctctttgttatattcctaaaccatggctcacgccaatccta

SEQ ID NO: 49706 - DNA, 55 bp, Glycine max
  unsure (1)..(55): unsure at all n locations
  Clone ID: LIB3107-029-Q1-K1-A10
gacctcaggtcaggcggggctacccgctgagtttaagcatatcaataagcgnggg

SEQ ID NO: 49707 - DNA, 396 bp, Glycine max
  unsure (1)..(396): unsure at all n locations
  Clone ID: LIB3107-029-Q1-K1-A3
accggttcggaattcccggctcgacccacgcgtggntccggctagacgacagcaagntagaaggagttgatctctatctttaatcaatgagaagagacactaactgacaaacccttttatggggatgacacgtttggctttgttgatctttgtttgatcactttctctagttggttttatacttatgagacatatgggaacttcaaaatggaagaagagtgtcctaaactcatggcttgggtcaagagatgcatggagagagagactgtgtccaatactcttcctgatgctaagaaggtgtatggtcttattgtggaactgcagaagacacttgaatcgaaatagaagatttcaataaatcaacccattaaataatattttcatgttaaatatgtt

SEQ ID NO: 49708 - DNA, 158 bp, Glycine max
  Clone ID: LIB3107-029-Q1-K1-B3
tcaaacgaagaaaagcttatggtggatacctatgcacccaaagacgaagaaaggcgtagtaagcgacgaaatgctttcgggagttgaaaataagcgtagatccggggattcccgatatatgtcaacctttcgaactgctgctgaattcacgggcaggc

SEQ ID NO: 49709 - DNA, 395 bp, Glycine max
  Clone ID: LIB3107-029-Q1-K1-D8
gctatatatgatttgatttaattcatcactggcgaaacgattaagaagaagctaaatggaagcgtccctctaagctgtgctggcatggccaagaatactggaaggatggtgaatagaccaatgcgttctccgtcaacggtgattgagcgtgacactgaaacttgaagtttaatgattggattattattcctgagaccaactagtaacaactatggttggcactaacgaaccggcagcatatatatggaaattgttttctgaaaacactggcggcgcgttacactatacaagactaattattaattttaggataaatggtagtaagtgcaactatcatccaattactaacatggtgtagaaaagttgatacattaaagtacatgatcaatcagaag

SEQ ID NO: 49710 - DNA, 363 bp, Glycine max
  unsure (1)..(363): unsure at all n locations
  Clone ID: LIB3107-029-Q1-K1-E11
cccggctcgacccacgcgtgcttctgctanaagaccacagaagtttacccttgcgttattaactcttttttttcccgcagcgtttatataatggaagagaataacaataatactaataataatccaaaagcaatcccatctgtgtgtttgcacatcataagggagggctatcaaactcaaaggattgctctgaatcggtttagtcttcttcgtttttcttcaaattcctcgtgacagatctaatctaatcacgcttttggcggtgtttcagacattgcatgcatatgggtggttgtgttggatgctataaaaggcctacactgagtgctactgttgatgtgccatcgaaaaggttttcaacac

SEQ ID NO: 49711 - DNA, 379 bp, Glycine max
  unsure (1)..(379): unsure at all n locations
  Clone ID: LIB3107-029-Q1-K1-G10
ggttgcaagtcaactgagtantcctgctatgcgctggtctgctctcccaaacatctctgacacaacacacaccaaaatgcataattgaaatgacccttttgcccttccttccttccctacttctcctttgactctccgcaacgccaccgcccacaatggacggcaccaccaactccggcgaaccccgctccagttcggtgctccaaaatactggggcatccgaggatccgaatcgaagcgggtcgggtcagaattcgatggcgaggtacaagctgatgtcaccggcgaagcttccgatctcgaggtcgccgtgcatcacgattcctccggngctcagtccgacgtcgtttctggaatccccggttcttcttccaacatg

SEQ ID NO: 49712 - DNA, 303 bp, Glycine max
  Clone ID: LIB3107-029-Q1-K1-H1
gactcatcgccagcaaaagaggaaaaaaaaaaaacgaaaatgctgagaatcgccgcaagcgcaaagagaattgttcaaacggcgtcgttggaggcgccaccgttggggattagggttctgccgcgtctctaccacgagagggtggtggaccactacgacaacccccgcaacgttggatccttcgacaagaacgaccccaccgtcggaacgggtcttgttggtgcacccgcgtgtggcgacgtcatgaagctccagattaaggttgacgacaaaacggggaagatcgtcgatgctcgcttcaaa

SEQ ID NO: 49713 - DNA, 312 bp, Glycine max
  Clone ID: LIB3107-029-Q1-K1-H3
gttgcacaatatgtgaagtcccgagacgtgccaaaaatcaaaaggaagcaagcttacgcgatccgtgaaaattccgtgatgtgacggaaatcgaaaggaggtatttttcgcaatccgtgagttttcgtaacttcttcaaaagctaaaaaagagtaaatacataatccgtaaggactcgtaaccttgcggaaggaaaataagtatcgttacgaaattcataaattttcgtaacgttacagaaaaagaattaccaaaaaaggtagagggggtgcatttagaaacagggggtacaaatagcaatcaggcccactt

SEQ ID NO: 49714 - DNA, 205 bp, Glycine max
  Clone ID: LIB3107-030-Q1-K1-A7
catggtgtgaagtcatcatatgtccatggtcatagctaatctttatgtgacacttaatcgagtgtttcaatttacacaaaaaatcttaataaactcagttgcatgttacgtggaaattggctgaaacattgaacatgtgatgatccaagaccatgcaataattttttccttacatgacttgggagaaaatattttttaaattttg

SEQ ID NO: 49715 - DNA, 277 bp, Glycine max
  Clone ID: LIB3107-030-Q1-K1-B2
gactgaaagaaacatatgaggagacaaagagaaaaaaacgtagtgtcccaaatcacccaatattcagagtgcaagaaggttcttcttcctttttttcttcatcgtaagccaacaccgattcgattttctctctctgcgtgaaaattctgaggttgtggaggctccgaaaccatctgggtcgggtgatggaagaagaggtaatttgccaatggatcgtgtttagatctctcttggcaatactttaatggtgggcttttaaatgtaatggcattattat

SEQ ID NO: 49716 - DNA, 62 bp, Glycine max
  Clone ID: LIB3107-030-Q1-K1-B4
gagacctcaggtcaggcggggctacccgctgagtttaagcggagtcagtaaaaaaaaaggga

SEQ ID NO: 49717 - DNA, 505 bp, Glycine max
  unsure (1)..(505): unsure at all n locations
  Clone ID: LIB3107-030-Q1-K1-C1
ggtccgtgaattcctcgggtcgactccacgtcgtctcgtaccggcttgcgtgaccgactagaagggggggattttcaatttgacctgannattgcattaacccatttcccctgcgttgttcgtgttttcttnnctggtcattgggttgatnnatgtgcatttgcnccattgcncnnacccattgaaatnngtgaatcnnattcaatnncccaggccatttagcccattagcacctttagtgagtnngccactttagtttgcttaattnncctcccnttttccannatacttaatnnctcatgccaagcataatnncaaatcaaatcaaaaagtgaaaagggttctgattcttcgtgccctgttgttgcccattataacacactttttcctgcacaaggaaagcatttcgcgtttacccttttcctcatnaatacgtaaaaggcttctattnagaaattgatttttttttttaaaatcttctaaattcaacaatcttattaaatca

SEQ ID NO: 49718 - DNA, 286 bp, Glycine max
  Clone ID: LIB3107-030-Q1-K1-D1
ggttgttacttttgctttaacacattacactcacactctttgtgaaaaaggggagtttcttattctttctagacgcttccattgatcggcgatttcttagacatggcggagcatcacgaacacgaggaagtgaagggtgagtccttgttggagaagatttctgggaagatccacgaccacgattcgtcatcttcgtcggatttcgacaacgagaaaaccagcgcttctgactccttgaagtcaaaggttttcaggcttttcggcagagaaaagcccattcaccatg

SEQ ID NO: 49719 - DNA, 203 bp, Glycine max
  Clone ID: LIB3107-030-Q1-K1-D12
tatgggtatcgttagactatgacaacagacggggacaattggaagactacgcctgaatgctacgggtacgataagacaacagttggagagacctaatgtctgtcgcgtctacccgctgagtttaagcatatcaatagcgcccgttataaaagatccaagcttacatactcatgactgctacatctataactattatatattac

SEQ ID NO: 49720 - DNA, 343 bp, Glycine max
  Clone ID: LIB3107-030-Q1-K1-D9
gcaaaaatcacttctattcatcgtctgtccagttttaacaaatatcaaacgcacgccaggagaggaaaacaacacaaaataacagtgtttggactttggtagctcatgtctctgctgaatttctgactagtcattatctgaattcaaataattttgtactcatactgcgcaaacgcttgagcacatttcatatattttccaccaaaaaatacgaggaaaagtgcaccgtggaacacacatgttctctatttggtatccttgttatccctagcaatagacacgttgaaacatgtcaagtattccatactttcattaagaaacaaaatgccatcaaattactaat

SEQ ID NO: 49721 - DNA, 57 bp, Glycine max; identical to SEQ ID NO: 12752
  Clone ID: LIB3107-030-Q1-K1-G2

SEQ ID NO: 49722 - DNA, 193 bp, Glycine max
  Clone ID: LIB3107-030-Q1-K1-G5
ggaacgtccaccaacctcaatttcaatctcatccacatctcaaaatcttaaatcaaaaatcgaatattcgaatttcaccgcttcgaaaccctatctttatcgccagaaaattttcaaaccctaaaatccgaatttcgctgatgatcttttctaatcgtcatcataccaaacaaattttcttcatatctgtctt

SEQ ID NO: 49723 - DNA, 358 bp, Glycine max
  Clone ID: LIB3107-031-Q1-K1-A2
ggcaccgcttgagcagacttaacaacagcacaaagcgggttactgtctgttcaagctaccatctctctctctctttcttagtgcctccttgccagaagttaaaatggcccaagaaactttcctattcacatctgaatcagtgaacgaggggcaccctgacaagctctgtgaccagatctccgatgctgtgctcgatgcatgcttggagcaggaccctgacagcaaggttgcctgtgaaacctgcaccaagaccaacatggtgatggttttcggagagatcacaaccaaggccaacgtggactatgagaagattgtgcgtgacacatgcaggaacattggttttgtctctgatgatgtt

SEQ ID NO: 49724 - DNA, 349 bp, Glycine max
  Clone ID: LIB3107-031-Q1-K1-E5
agaagaacaaggacgagacgttgagaaaccgcagtgggccggctaaaatgccttacactttgctctatccttctagtgaggagggattgactttcagaggaattcccaacagtatctccatctaggggctctatggttgttgcagtactttccctggttttcaataaaagtgaatagaaggaatatgattccttcatctacctatgtatggttaagttatgtatttggggtgattgaatgttctcgtgtttgctgttaagtgttaatgaagaaattctgtttgtataaattgctgttaagtgttctcgcgcatgtttcaacaatgatagctggcatggcaaagtgcaaa

SEQ ID NO: 49725 - DNA, 359 bp, Glycine max
  Clone ID: LIB3107-031-Q1-K1-F1
gaatgtcaacctcttccataaacgggtggtgcctctcttccatctccccagccaaaacctctctcaggaaggccacattacgcccttccgtcttcgcaacccttaacactccttcttctccttcctcttcatcttccttcccctctctcattcaagacaggcctgtttttgctgcccctgcccccatcatcaccccaactgtgagagaggatatggcaaaggaatacgagaaagctattgaagaacttcagaaattgttgagggagaagagtgaactcaaagcgacagctgctgaaaaagtggagcagataacagcttctctagggacatcatcatctgatggcatcccatcatcagaa

SEQ ID NO: 49726 - DNA, 433 bp, Glycine max
  Clone ID: LIB3107-031-Q1-K1-F11
caacggagcacaagtgagtctgatgatcgagataactagaatcagtgtgatgaacatgaacgtgcttgacttcttcgttgctacaattttggtagcatgtcaatgccatgcgtacgatatgttccctctgcgaatgaacactggctatggtgcccgtactccggacgtgaaatgcgcatgttggaggcttgctgtggaagcacacaacatctttggctttgagaccattcctgaagagtgcgttgaagcatcaaaggaatacatacatggcgaacaatatagatcagactctcaaacagttaaccaacatgcttacttttatgccagagacctcgaagtccatcccaaggacacatttgtgctcaatataaatagcaccgtactctgttatattccatactacaaaaacatggatattgggtggagaaattta

SEQ ID NO: 49727 - DNA, 391 bp, Glycine max
  Clone ID: LIB3107-031-Q1-K1-F7
ccacgcgtccgatgagagaagacgacagaggggtgcatatgtgggggcatggatcataatttaggaaaggaccagactcactcaaaggaacacaaccagctgcaatgttaaggttaccatgctattgctgtgctcaaggatgcaagaacaacatcaatcatccaagggccaagccattgaaggacttcagaaccctccaaacccattacaaaagaaaacatgggacaaagccattcatgtgcagaaaatgtgggaaaacatttgcagtcaaaggggattggaggactcatgagaagaactgtggcaagttgtggtattgcacttgtggctcagacttcaagcacaagagatccctataggatcatattaagtcttttgaaagggacataac

SEQ ID NO: 49728 - DNA, 307 bp, Glycine max
  Clone ID: LIB3107-031-Q1-K1-H11
caacagaacggcattgcaaattacaaacatttccccaaccttctatacgaatgccagttcatcacaccttcaccgaagcataacaatgctcaattcctctttcctatcactttctgaacacaccttttcccacacacaccatcatttcccaacaaggtctgcttctcaaaaccccaaccttcatccaaagtttcaatctttagcctctgtaaaccgtggatgaagtgaatttccatctcggtcttgctccaataccctcagaataaaaggagtgttgcatgtgcagtcaaagtcaacgcttggagta

SEQ ID NO: 49729 - DNA, 432 bp, Glycine max
  Clone ID: LIB3107-031-Q1-K1-H4
ccacgcgtccgagcaagaagacgacagacgggcagtggaaaaattacgccaatccattgagatatggtgtgctacaagtgaatattttcgacaagaaatgaatcctaattttaggatgaccgacccctttaatccagtccatataatgtccttttcgggagctagaggaaatgcgtctcaagtacaccaattagtgggtatgagaggattaatgtcggatccacaaggacaaatgattgatttacctattcaaagcaatttgcgcgaagggctttctttaacagaatatataatttcttgctacggagctcgtaaaggggttgtagatactgttgtacgaacatcagatgctggatatcttacacgcagacttgttgaagtggttcaacacattgtttgacgtcgaacggattgtggtaccattcaaggaat

SEQ ID NO: 49730 - DNA, 225 bp, Glycine max
  unsure (1)..(225): unsure at all n locations
  Clone ID: LIB3107-032-Q1-K1-B9
gaatactacatattggactaacgatttataatagcgatttataagttatagaatcttgcggtttcaatcacgagggtggtcattatnttattttctaataatgaaatgattattctgatttcatatctctattcttctgttaagacaaccatctttaacaaactctatcttttataattcttcaccacttttcccaccatctcattttatcttttatactttttt

SEQ ID NO: 49731 - DNA, 253 bp, Glycine max
  Clone ID: LIB3107-032-Q1-K1-F12
ccgtgggcgatttcgcaaaggttttccaccgttcttcatcgctcttcgttcgttcttcgtcgttctccggtcttcaaccggtaagttccttgaaataaaacttttcaattcattctatgtacccttagaggtccccatttttttcgcatgcttttatattatattattaattttacgtacccccttttgatgtgctttagtcatttaattaagtcgttttctcgtttaattaaaaataaaataaattttcacc

SEQ ID NO: 49732 - DNA, 262 bp, Glycine max
  Clone ID: LIB3107-032-Q1-K1-G4
tgcatctgcgcttatacgacaaaaaggtgcgtggtgtaataaaacaacgtaagggttcttctgtaaaaaaactaaattacgcatgtgtgcaacgtcataaagtttctataccgatacttatatatattttaatgggcttcgttgatcatacgtttttaaaccgaaactttcgttaaataaaactttcaattcttacaaattacctctattggtccacatttttttataattgtttttatttttatttcattttattttcaaa

SEQ ID NO: 49733 - DNA, 326 bp, Glycine max
  Clone ID: LIB3107-033-Q1-K1-C11
gtataatactaatggattcgggtccacaacgatgggttcaaatgtacgagatcttgtagcacttaccaacgaggccctatcgattagtattatacaaaaaaaatccatcatagacactaatataattagatctgttcttcatagacaaacttgggatttccgatctcaggtaagatcggttcaggatcatgggatccttttctatcagataggaagggctgtttcacaaaatgtacttctaagtaattgctccatagatcctatatctatctatatgaagaagaaatcatgtgacgggggggattcttatttgtacaaatggtact

SEQ ID NO: 49734 - DNA, 109 bp, Glycine max
  Clone ID: LIB3107-033-Q1-K1-G11
gaaggtgcaagagtttgttgtgagctataagctagtttatcgtgaggagaatatgaagttgtttgttttctttggtgctgcaagagttttggtagcatgggcatgccat

SEQ ID NO: 49735 - DNA, 69 bp, Glycine max
  Clone ID: LIB3107-033-Q1-K1-H12
gagacctcaggtcaggcggggctacccgctgagtttaagcatatcaataagcggagaaaaaaaaacaaa

SEQ ID NO: 49736 - DNA, 303 bp, Glycine max
  unsure (1)..(303): unsure at all n locations
  Clone ID: LIB3107-033-Q1-K1-H8
ggagccaaagagagagaaagagaagaagaagaagaagaagaagaagctctggattccacctcttcccgtccttcgagacggttgttgtgctgcttgctcttcagacaaatctgacatggatttactaagatttgtccatgttcttgcgttctaggttgacctgggattgaatctaaagaatcttgatttacattttgagatatggagggagtttgtttctggacaaattgctaccagtatcggttntttgcattccaagaagtgcttgattggcgagttttcatccttggagattttcttcgg

SEQ ID NO: 49737 - DNA, 215 bp, Glycine max
  Clone ID: LIB3107-034-Q1-K1-A1
ggtggccttaaggatgaggacaggatatttactaacctatatgggctgcatgatccttttctcaaaggtgccatgaaacgaggggattggcatcgaacgaaagatttggtacttaagggtactgattggattgtgagtgaaatgaagaagtctggcctccgtgggcctgggcgtgcttgttttcctttcggccttaaatgggtatttattgccaa

SEQ ID NO: 49738 - DNA, 275 bp, Glycine max
  Clone ID: LIB3107-034-Q1-K1-A12
gatgcttatacatgttagtcgaattttatcactggattaataattagcacatagttttttggaagagttgtgaaaatgggacttgtggagctttttggagtggcatctatgcccgtgatcaaagtactaataatcactgcagttggcttgcttcttgcactggataacgtaaatttgttgggaaaagatgcaaggatacaagtgaatcatcttgtgcattatgtgttcaatcctgcactggtgggtggcaatttggcggacacgattacttttga

SEQ ID NO: 49739 - DNA, 315 bp, Glycine max
  Clone ID: LIB3107-034-Q1-K1-A7
ggtggccttaatgatgaggacaggatatttactaacctatatgggctgcatgatccttttatcaaaggtgccatgaaacgaggggattggcatcgaacgaaagatttggtacttaagggtactgattggattgtgagtgaaatgaaaaagtctggcctccgtgggcgtcgcagtgctggtttcccttcgggccttaaatggtcattcatgccaagagtatacgatggccgttcttcatatcttgctagtaatgctgatgaacgtgaacctggaacttgcatagacagggaaattatgcggcatgacccacataaa

SEQ ID NO: 49740 - DNA, 309 bp, Glycine max
  Clone ID: LIB3107-034-Q1-K1-A8
caacaaagaaagaaaaaaagctttctccaagaaagcgttctatcacgccagggtccggggtatgcttcttcattgagattgggttggtgttcactgagaatgcatttcccgcgtgattaattatttcgagaaaaaatcattcggtttgcggccgctctaaacgatccaagcttacatacgcgtgcatagcgacgtgataagtgatttatagtgtcacctaacatcaattaacctgccgatcatttacagccctatgactgcgacaaccctgtcgtgacccaacttaatgctgttgcagaacatacccct

SEQ ID NO: 49741 - DNA, 390 bp, Glycine max
  unsure (1)..(390): unsure at all n locations
  Clone ID: LIB3107-034-Q1-K1-B9
gatccgaagtgggaaggcacacgcttgtttacgcaacgcgggcgattgttagttgtattcgatggactacgatttcagaagcaggtcgggcccacaacctccgatgtaccgtccgccaccgccaccgtcaccgatgtaccgtccatcaccgtatcaacagaatcctactccttcttcaggacttggcgttagggttggtataaagccggaatataggatcgcaccgccgcctcatttatcatcacttgctggagataatccacggagcaacttccaatttgattntggattggagagaaaaattttagctgaagcagagaaggataacccaaattggagcaaatttggatcagaaaatattccaactaaagtttctgattcatcaacagc

SEQ ID NO: 49742 - DNA, 355 bp, Glycine max
  Clone ID: LIB3107-034-Q1-K1-D8
aacataccctctaacacaatatttctttaaatatattcttttaatcaattaaaatctattgaaaattatgacatctaataaaaaaaaatcattaaacatgacatgtgatttataaaattgttattttcaattaatttcaacaaatattgtatttttcaataataaatatttatagaaaaatgattaacttttataatcactattttaaaaattaaatttttatgatattacataaaataaatttaatttaatttacttattactactttctagttactaattaatgaattagattattcctaaccctgtttacctacacaggaaggagcaggccctgcctaactcctgatgcatg

SEQ ID NO: 49743 - DNA, 169 bp, Glycine max
  Clone ID: LIB3107-034-Q1-K1-G12
gcgacaggtactgaggagaccttacgtcatgcggggctacccgctgagtttaagcaaaaaaaaaaaaaagcggacgatctaaaaggcggccgctttagaagatccaagtttacctacgcatgcatgcgatggcataactttaatataatgtaacctaaattcaattaaa

SEQ ID NO: 49744 - DNA, 319 bp, Glycine max
  Clone ID: LIB3107-034-Q1-K1-H4
gcaaggtgcaacaactaatcctgatatttattcggttaaagaagcaatatcagactgcggcatcttttctgggatgggaacagaccacctcttggatgccgtggtctccaaagtcaaatctgttgtgaaacaggattctgatgacatgtcttgcaggacaacattgacaaggaatagtacttcctctggtccttctcctgcacggaggacggtagtgtctggtcatttccaagggggattatttgatttgcctaagaatgatggtaaaacaggtgccacagaaactagttttcttatgtctggatgtaacaaggatgat

SEQ ID NO: 49745 - DNA, 383 bp, Glycine max
  Clone ID: LIB3107-034-Q1-K1-H6
accggcccggaattccaggctcgaccgacgcgtgcggaagaccacagacaggggagaaaggatagggtttacggttggcaaaggaaggaagggatggaagcagctgtggtggacgtcagctctaatcttctcaaagcggactctgcgattgctgacccgactcccgggatgatgatgtccactctcatgaaacagttgctcgatgatggatcaaagactgatagttcactggctgacaatgtcaccgatgatcccgtcatgcgaggatttattagagattgggatgccattgaagatttgttgcaccatgttttgtatactggcctcggatgggaaattggcaatgaaggacaaatactatttactgatccactttgtacccc

SEQ ID NO: 49746 - DNA, 382 bp, Glycine max
  Clone ID: LIB3107-035-Q1-K1-C8
aacattcatcaggtaagagtttacttttctaaattagttaaggtgactgtagatttagctcatatcacattttaagtcaatttgggatggttcaattctgcacgatttaagccacgcgtaaccatgcacggggtttcttatgacttttggcgtcaattttgtcttcaagcgtgcaaaatttcagacttctagcatggaaacaatttaatgcagtaatttgtgatgaagcaagacaagaaaatagtgtttttatgtgataattttatgatgataataatcatcataaaattatcaactcaaattgattaacataagtgataatactttaaatttcttattcagattattcaaatttaaaatcgggatacatattaaattagta

SEQ ID NO: 49747 - DNA, 366 bp, Glycine max
  Clone ID: LIB3107-035-Q1-K1-E2
gcctctggtttattctgaggcctgtgctgtgctctgaggggccatagtttgggaccctttgaaccctaatctccacccaaacccattttcccgggaaattgccttggaaaagaaagagcgaagaggaaaatgcagaatcacaggctgaagcagcagcagcagcagcaacaacaagctcttatgcagcaagctcttctccaacaacagtctctctaccaccctggcctccttgctcctcctcagattgaaccatatccaagtggaaatttgcctcctggttttgatccaagtacttgccgcagtgtgtatgttgggaacatccatacacaggtaactgagccgcttttgcaagaagttttctcgggt

SEQ ID NO: 49748 - DNA, 313 bp, Glycine max
  unsure (1)..(313): unsure at all n locations
  Clone ID: LIB3107-035-Q1-K1-E3
ccctgaatacgtaattcattgacaaatgtgtccctgaaaaatgaaaatataaaatttagtccccgaatgtgtaaaaagtgcgacaaatatatccgactgttagctttcgtccttcaccattaataaaatagctaagattcaaagaagtgaaatatggaatatacttatttttttatttatagtagattatgactaattattataatttgaaaaaatttgtaatgattggtacactagtacaatgtttattttggataatttttgttgtgacagacaaattatggttgataattaatattatcgntattattat

SEQ ID NO: 49749 - DNA, 238 bp, Glycine max
  Clone ID: LIB3107-035-Q1-K1-E6
caattattctctaaaacaaaacacaaaccaatctgagggggagaaaaaatacaaagcggagagcattatgtcatggatcattcacaaaaattgctagacccttcatgtcatatggcacacaaaggacgaatagcataacggttagcaccatgcttgagaatacaaatgggagctccattgtgaacacaattatttatgcaaaggatatcatcatggctaacacaaagcttgagaatac

SEQ ID NO: 49750 - DNA, 263 bp, Glycine max
  Clone ID: LIB3107-035-Q1-K1-F7
gagagagagatggtgtagaattgaatgggtggaaagtgaaagagtaagacaccacaaagtgtaacttgagcgattagatctgatgagtgcagaaagaaggaaggattgttggtgatcgatcatcgatcatcgatcatcgatggcgtctgctagccttggaagtggtggggtgggcagttccaggtctgttaatggtggcttcaggggttcttccagttccgtcgattggcttggcagaaagatgcttgagatgtctttgagag

SEQ ID NO: 49751 - DNA, 335 bp, Glycine max
  Clone ID: LIB3107-035-Q1-K1-G1
aacgcagtcctttttctatttgtatgtttgtatgagactgagaaagatagagagatagtgtgtgcagaagatgtggctattcggcagaaaaggggcttctgggttttcatcatcatccactgcagagcaagtcactgaaggaattgatggaactggtttcactgccattgtcacaggggcatccagtggtattggcactgagactacgcgtgttcttgctttgcgtggtgtccatgtgattatgggtgtgagaaatatgcttgctgctaaagatgtcaaagaaacaatactcaaggagattccctccgcttaaagtgatgccatggagttagatc

SEQ ID NO: 49752 - DNA, 253 bp, Glycine max
  Clone ID: LIB3107-035-Q1-K1-H7
gagacctcaggtcaggcggggctacccgctgagtttaagcatatcaataagcggaaaaaaaaaaaaaaaaaaaaaaaagcggccggtgtacaggatacaagattacagactccggcctgcgacatgctacgtcttatatagtgtatcctgaaaccaaaatacaggccactggtcgacaacgtacaaactgggaaatgggtaaaccttgccaacttaaaagtttagcagcttataccacattcccctgttggcg

SEQ ID NO: 49753 - DNA, 203 bp, Glycine max
  unsure (1)..(203): unsure at all n locations
  Clone ID: LIB3107-036-Q1-K1-A5
ggacaatggcaatgcctgtttgattcttctcagcacataatcgatcgcgctctgttgattcgattgaaatcgaagaagaaggaagcaagcttcaaccctagcgtttccacaatcgattctgatgatatatttgcgttggtgtttgcctgaagatttggggcgtttccgggtgatacataacttgacttgattgtggntgatac

SEQ ID NO: 49754 - DNA, 359 bp, Glycine max
  unsure (1)..(359): unsure at all n locations
  Clone ID: LIB3107-036-Q1-K1-D1
ccggaattcctcgggtcgacccacgccgtcccgtagatcgacccagaaggggagggaaatttggtggctttannggtcagggaggggccattagtnnctgtgtnnttgagccttctggtggtgtattttctctttacctgcnagttttcttcnnatttcttctattttccagcnnatctctcgtttttcgtttcggttggagaacctttaattttntnnccttgtangnnaggagaatttcnnctccttnncagttccanttcttatntnnttcagtantnnttatgtnnncattcnnttatcaannnaatctatncnnatgaatnntaaaaaaaattttattggataatngggatttt

SEQ ID NO: 49755 - DNA, 368 bp, Glycine max
  Clone ID: LIB3107-036-Q1-K1-F3
gaaagctagagcaatgcattgctgccatatgggattgaacacaccgaaaaaaaaaaaaaggaacaaaaaaaaagcgggcgctctataggagacccacttacatacacgcgcatgcgacacgatagatcttttatatagtgacctcaaaatacaacacagtgggcggcgttacaaagccttgactggggaaaaactgtggtgacaccaatcaaaagcctctggaaacatatccctttttccacatgtggcgttatcgaaaagaggcccacagatagcgcttttcaaaacatgcgcacactcaaaagggaatgtgacacgcgctgtgaaggggcatataacgcgccgcgtgtgttgggacacgcacagtg

SEQ ID NO: 49756 - DNA, 410 bp, Glycine max
  Clone ID: LIB3107-036-Q1-K1-F7
ggtgcagcagcgaaaatgtcagggaaaggacctggtttcttctctgagatcggcaagagaggcagagatatcctcacgaaggattacaattccgatcaaagattcaccatctcctcctccaccaactccggtctcgacctgaagtcaacactggtgaagagtagaggactttcctctggtgatgtggctgcagaatttaagtataagaacaaggcggttaatgtcaaagttgatactgaatcaaatgtgttgacgacattcactgtctctgatgttgtgccatccgcgaaaaccattgcttctattcgtctgcctgattacagttctggcaaggttgaggttcagtatcttcatgagcatgttgcttttactcttggtgttggtttagaccgctcccctggtattgattt

SEQ ID NO: 49757 - DNA, 226 bp, Glycine max
  Clone ID: LIB3107-036-Q1-K1-H10
tgctgcgagtagacaacacaacggcaagatacgtacacaatacaactacattgactatcgactaggctattacaacagctagggagcctaacacttatatcacagatcatattctttcagtgatgacatagaatacagccgttcttgagcatccaaacttacgtacgcgtacatgccacatctttactgatgtataaaacctcctataatcaattcactaaccgaa

SEQ ID NO: 49758 - DNA, 366 bp, Glycine max
  Clone ID: LIB3107-036-Q1-K1-H3
ccacgcgtcagaacagctgagagaggacatctgatggggactctatgactattcatgatgccatacgtgtatcggttacatactggatccatgctaaaggagtgttatggcaaaacttcgatcgatacgacgcgtaataaaacaacttgcgactagatagacttgaatagaatatctgtggattctgacatactgcatttgttctactttatagagcatgaacatgactcttgactcgacatgcgcatggactcgagcactagaacttattagtctgtggaccggaaaccagcctatgatgtaggaggatgatgtaaactatgacactgatgcagatagagatgatcatttgtcaggggcaattat

SEQ ID NO: 49759 - DNA, 479 bp, Glycine max
  unsure (1)..(479): unsure at all n locations
  Clone ID: LIB3107-037-Q1-K1-B4
accggtccggnnaattcccgggtcgaccccacgcccgtccnnggcgagaagaaacgacagaagggggggcgcacncnnactctctanctttgttcatttctacggtatcaagtgtgctcgtctttttgacggtgcnngtgctgtancagcattgacccctcagctttgagcccagtaaaaccatgcatcagcacctacctanncggtannncatggcttgtgcatgcaatcnntttcgtttcggtcccacccacgatgtctcacttgtccccatacgnagaacctccctttacccggagtcttcannagccccaatccccgctttcgcctccttcnngtcccggcgtcgcccattcggcgaacttcgtacctcgaccctctccagaaatatacttccgcatggtctacttcgacgggtcgctctcctcannaaaacatccgatgcttttcttccacgccctaatactaaatannagttt

SEQ ID NO: 49760 - DNA, 375 bp, Glycine max
  Clone ID: LIB3107-037-Q1-K1-B6
ccggaattcccgggtcgacgaattccggaacgagatagatcttgtagtcgggccccggcgcgatgtcgccttcgaaggcgatcgacgaatcggtgatcgtcagcttgccgttcgcccagtgcagcgcatcgctgcccggcaggttgcgttcgaagcggccggtatggcgcgtgttttcagcggcgacttgcagcgcgaccgcgcttgcgccttccgatgccgtcaggatcggcagcacgtagatgccggcggcgaatgcaacgagcgccgtcgcgagatgcgacgcgatcagtatccagattctggttttcatatcggaccctttgaacgagaacggaaggtggcgccttgccacccatctgtagtcgcgcgagc

SEQ ID NO: 49761 - DNA, 154 bp, Glycine max
  unsure (1)..(154): unsure at all n locations
  Clone ID: LIB3107-037-Q1-K1-C11
cggaatgatgacaagaaatactagtttctgctttgtaattcataatattggtggtctaggtctcttttggatgattctattatgtagctgtcaagtgtgtgtgattgtatgaataattggagtgtgaatggttatggaagtaatttatgcnnaa

SEQ ID NO: 49762 - DNA, 541 bp, Glycine max
  unsure (1)..(541): unsure at all n locations
  Clone ID: LIB3107-037-Q1-K1-C4
accggtccggaanttcccgggnntcgacccacgccgtccccgacgccgagaagaccgactagaaggggggaagggtgccaatgagttttngttgtgagcctataagactgagtttatgcggtgaggagaaaatatgannagttgtttggttttctttcgttggcttcgcagtagnnntttggtagcnnatggcctatgcacatggcgctaggctttaccaaaggttcctctcttaccgaatgaaaactggcttatggtnngagcgttcttcggaggtaanaatgcgcaagnttttaggctttgctgtggaagcacacaacatccgagcctttaaaaccattcctgaagagtgcgttgaaccaacaaaggactacattaatggcgaacaatttagatcagactctaaaacagttaaccaacaagctttcttttatgctagtgaacgcgaagtccatcacaacgacatatttatattcggcatagataacaccgtactctctaatatcccatactatgaaaaacatggatatggggtggagga

SEQ ID NO: 49763 - DNA, 357 bp, Glycine max
  Clone ID: LIB3107-037-Q1-K1-D12
gggccacccactcacatttgttatttccctctttacccccaaatgtcttccagcttctcaccccttgccatcttcctcctcctccttctggtccggtacacgtgcgaggcacgtgagccgttcgcgtgcgacccaaaaaatggcggcacgaagaagatggcgttttgcaaggtttcgctggcgatagcggagagggtgaaggatctgattggaaggttgacgctggaagagaaggtaaggcttctattgaacaatgccgcggcagttccgaggcttgggatgaaagggtacgagtggtggtctgaggcactccatggtgtttcaaatctgggtcccgccgttaagtttaacgcacag

SEQ ID NO: 49764 - DNA, 300 bp, Glycine max
  Clone ID: LIB3107-037-Q1-K1-D5
tctgaaactggctctcaagctggctcaagggacacaaaaaacccctaaccaagtggcttttttttcatgaatttgaaagattggagcttgccattaatatattataggattattaattatacctttagtattgtaggttgcaaatatattatacctttagtattcctcaagatacaatttcacatagaaacttcttagagcaacttaagcttagctcatttgcagcatatataagtcttaaatattgtcatagcgcaccgaatcttgcaatatatttatggagggcatataattcatctg

SEQ ID NO: 49765 - DNA, 401 bp, Glycine max
  Clone ID: LIB3107-037-Q1-K1-E11
gatagttagaagtttaaacattcaacctcaatttgcagagttctaatattacattgcagagaaaatgtctttgattccaagtttctttggtggcagaaggagcaatgttttggatcctttctccctcgatgtgtgggacccttttaaggattttccttttcccacttctctttctgctgaaaattcagcgtttgtgagcacacgagtggattggaaggagacaccagaagcacacgtgttcaaggctgatattccagggctgaagaaggaggaagtgaagctggagattcaagatgacagaattcttcagataagtggagagaggaacgttgagaaggaagacaagaacgacacgtggcaccgcgtggagcgaagcagtggtaagttcatgaggagtttca

SEQ ID NO: 49766 - DNA, 320 bp, Glycine max
  Clone ID: LIB3107-037-Q1-K1-E6
aaggatcgaccacgcgtccgcccacgcatccgcccacgcgtacgtccacgtttgcattccgatacaagaagacgactgaccgtgacggctgaaagaagacgacgcaaccatacaactgaaagaaaacgactgtagggtaccgctgaaaaaagacgactgaatgtgtcaaacggatctacccactgagtgcaagcatttcaataacctaactatgtaaaatactataagaacatttttactggccccttttgatgatacaagattacgtacgcttgactgataaatttaatcttttcactaaaagcacctatttcttgttc

SEQ ID NO: 49767 - DNA, 291 bp, Glycine max
  Clone ID: LIB3107-037-Q1-K1-F6
gaaaagacgacagaaaggggcacatgtgactttcatgatcgatataactcgaaacggtgtggtgaaaatgaaggtgcttgtaaactaccatgctacaattttggtagcatggcaatctcatgcgtacaatatgttatctattcaaatcaacactacctatcttatccttacttcgcaagtgaaatgctcaactaactatcttactgtcttaacacacaacatttttaacttttagaccattcctcactacaacaagcaagctacaatggaatacatccactttttacaata

SEQ ID NO: 49768 - DNA, 181 bp, Glycine max
  Clone ID: LIB3107-037-Q1-K1-G7
tcctgatgacaaattgcggaatacgggggcgccaagggacacacccttgtcttccacaaaaaaaaaaaaaaaaaaaaatcgggcgatgtggacgatctaaaggatccaaccttaccttcccatgcatgcgacgttatatcttttctattaagttaactaaaatcaacttacttgcccaacg

SEQ ID NO: 49769 - DNA, 281 bp, Glycine max
  Clone ID: LIB3107-037-Q1-K1-G8
aaggagaaaacctttttccttggccgagcctcctgaggatttgaagccagatgagcctgtttaccaaattcgatttacaaaagaaatctttcaagattatcatgattatttgaagcgattgaatctataccgccagagggtttggatgtgtaaagtcactggaaaaactggcttgacatatgaagaagctttggtgtctgaacaacttgctaccgagaaagttcaacagtttcctaaagaattaatgactattgctttaaagattattcaatacagtatgc

SEQ ID NO: 49770 - DNA, 463 bp, Glycine max
  Clone ID: LIB3107-037-Q1-K1-H10
ccacgcgtccgaacatgagagaagacgacctacggggacttgattattttgtgagtctatgtctaaataatggctgaacgcttgcgatctgcaattatctgaagctgcgaagcccaactctctcatattatatccatacgcgtgctgaaatcggtagctggaacctatgtcatgcccggctagatttggtggatctttaaccctttgcacaaatgaaaagcactatggaagttacattctttcagttgaatgataagggaccataacttcagatggtgttgcctataaggaaagatgaaactgacgcctaggaaaggatggaaatctattgtaccacttcggttgaaaggaaaatcagcaacccatgtcttgttatttcgcaaagttaactctgctggctgaggacctggcaaaacaccaacttatctgaatgtgtttgacatgacacccatgattggatatg

SEQ ID NO: 49771 - DNA, 379 bp, Glycine max
  Clone ID: LIB3107-037-Q1-K1-H12
aataatgtctatgtgaaaaacttatcagagtcaaccacggatgaagagttgatgaaattttttggaaaatatggtaccattactagtgctgtaataatgagggacgcagacggtaaatcaaggtgttttggctttgtcaattttgaaaacccagatgatgctgccaaagctgttgaaggacttaatgggaagaaagtgatgataaggagtggtatgttggaaaagcccagaaaaaatctgagcgtgaacaagaactgaaaggacggtttgagcagagtataaaggaatctgctgacaaatatcaaggtgtgaacctgtatctcaagaacttggatgatactatcagtgatgaaaaacttaaggaaatgtttgctgaata

SEQ ID NO: 49772 - DNA, 351 bp, Glycine max
  Clone ID: LIB3107-038-Q1-K1-A3
gacacaaaattgcttcgaactaaaaccgaactcataatattcatcactagaagtgttggatgcatttctatttctaactaattattgtgcttattattattgttgagaaagaaaagaatggcaaagttaataaaattctttgagttgaacacaggggccaagattccttctgttgggttaggcacttggcaagctgagcctggtgttgtagccaaagctgtcaccacagccattctggttggatacaggcatattgagtgtgctcaagcgtataacaatcaagcagagattggttctgctcttaagaagctttttgatgatggtgtggtgaaacgtatggacttaatggat

SEQ ID NO: 49773 - DNA, 239 bp, Glycine max
  Clone ID: LIB3107-038-Q1-K1-A4
tgggacacataatagcttccaactgaaaccgaactcataatattcatcactagaagtgttggatccatgtctatatctaactaatcatgggccttattattattgttgacaaagaaaagaacggcaaatttaataaaattctgtgagttgaacacatgggccaagaatccttctgtcgagttaggcacttggcaagcttgacctcatgttgcatccaaaattttcaccacaaccattct

SEQ ID NO: 49774 - DNA, 231 bp, Glycine max
  Clone ID: LIB3107-038-Q1-K1-C11
tgggagaacatatcacccccatgtttacctagagctcctgtaactttgaggtgcattttattaccaacctctgcaactttgcttctcaacatgaaatactatcttcttccctctattacttaactcaatatagcactgaaggtaacacattctgctttactcttgctaaaaaactggaagtttttgcttcctactacgccatcgccaaaagccatcactgattttctttac

SEQ ID NO: 49775 - DNA, 426 bp, Glycine max
  Clone ID: LIB3107-038-Q1-K1-D10
gacacaatattttccttttccctctctcgttccggacttccaaatcgcaattcctcttttctttctccgagtctcagcaatatccatcatccttctctctccgccgcacgcggcggcgactgttgataccctgcttcttatacagatccgccgatccttcttcctgccaacgccgcctcctggttccctctcttccccaacccctaaccacatcttttcacccaattttttctttaattattattattaatttgttaccgttttcactttcattatctaatatttttatttttttaattgcatgctgcaaccctttagttgcggacccggtttatgatgattccttggcaaacaacaaacggatactgaagaaatttgtggtttcgcaattttaccccctcaaaatcaaaagtagctagagtctac

SEQ ID NO: 49776 - DNA, 302 bp, Glycine max
  unsure (1)..(302): unsure at all n locations
  Clone ID: LIB3107-038-Q1-K1-D5
acgggcatgagatcaaatctctcatcatatatttaagagacatgattatttgtcaatcatattacaccatattgatatttgtcatgatttgtgaataagagtcacttgaacacacttaacatttgaatttgaaactgattcaaaagttgggcagcgtgatttccaaacttggtcattggcaaattgttacatgcttcaacaattggaaacataatcttatttatcaggtctaaagggaatgttcttacacgatactcagataatggncaatggaaacaccatttgatttccattttccaaca

SEQ ID NO: 49777 - DNA, 287 bp, Glycine max
  Clone ID: LIB3107-038-Q1-K1-D6
gaaggactcaaaattgataattttcaatgagtgaatgcagcagcagagtatccacagaagtatcatcatattaatgcttataaattaagcatatagttatccaaatacaagtttaaatgagttgtccaaaaaggaaaagaaaggatgagaagaacaggttcatgaaacatatatagaagtgtttcccccattggaaaaagtttttcataatcttggcaaggcgcgggggatagtgcgtggttggtcccaatcagtgacaatgtgatcacgagtgatatccttgaatg

SEQ ID NO: 49778 - DNA, 426 bp, Glycine max
  unsure (1)..(426): unsure at all n locations
  Clone ID: LIB3107-038-Q1-K1-E10
actcaacatcaaattagtttgattatgattcacttgaagaggtgaagagacaatgtttatggtaaagggattaatacaattgatatcacattttgtgagattgtgagagtcagaatgaaaagataaaaatagtatatgataggatcataataatgatatcctttctaaccatcaccataaccaagaaacacacatattgttgaatgagaggacaaccatataatttttgaaatgaagacaaacctgaagtaacagaagatggaattttgttaataacatggacaacagtgaggacttcttccccaaaactcactaggaacataggtccacaataaaagagaataagtngttntagcaatgtggcaatgtttcctttcaacaactccattttgttcaggagtgtcaatataagaagtttgatgaaag

SEQ ID NO: 49779 - DNA, 417 bp, Glycine max
  Clone ID: LIB3107-038-Q1-K1-E12
ccacgcgtccgcccacgcgtgcgtggccgataagacgaataagggggcgagagaagttatgagggtttttgagtgcggcggtccaaacactcttctctgcagcttttgcctacaactcccttcaccatggctgaacaaaccgagaaagcttttctgaagcaaccaaaagtgtttctcagcacaaataagactgggaagggaaagagacctggaaaaggtgggaaccgctttcggaagaccattgggcttggatttaagactcccagggaagccatctaaggaacctatattgacaagaagtgccccttcactggcaatgtttccatccgtggccgcatcttggctggaacatgtcacagtgctaagatgaacaggactattattgttagaaggaattatctccattttatcaagaag

SEQ ID NO: 49780 - DNA, 361 bp, Glycine max
  Clone ID: LIB3107-038-Q1-K1-E9
atccacaggagtgtaagagagtttaaggggacttaacttacgcaccatgtgtttgctcaatcaattgagttagacctccttaactatagagcagtagttcatctatgcatctccacaaaatatgatcatgggcaaaagaagtaacttcactgtaaaatattgatttcaaaatcatcctactagtgttaattgaaaacctggtgtactaaaatttattatttggatattttatttaaaatcattcaaagtttagaaaaatttagtgagaattatcgattagctaaaaatgaagaattcgatattccaacaaaaaggataattcggacattttattctccctgaactctcacacatcttcctc

SEQ ID NO: 49781 - DNA, 209 bp, Glycine max
  Clone ID: LIB3107-038-Q1-K1-F4
ggacgttcacattcaggaatcgttttcttcagaaatttgccatcgttgagagaagcgtgagagccttagtcgttcaagatgagagctaagtggaagaagaagcgcatgaggaggctgaagaggaagcgccgaaagatgagacaaagatctaagtaggtgcttgagcaggagttgagatgagctttccatctgctaccagcctcatgaca

SEQ ID NO: 49782 - DNA, 456 bp, Glycine max
  Clone ID: LIB3107-038-Q1-K1-F6
ttaagcgagacgaagccttttttcgctcgaaggccaaatggaattgcggttggcatatatgtagcgcttgtgggaagggatcgcattatatgtgctatacttgtacctattctttgtgcaagagatgcacaaaaaaatgccgattttgtctctatcagagaaaataaaggtttatgtggaatatgcaagaggactataatgctgatagagaattgtgcccagggtgataaggcggagtgtgaggtggattttgatgacaagagcagctgggagtatcttttcaaggtgtactggatgtatttgaaagagaagctatctttgacatttgatgagatccttcaagctaaaaatccgtgcaaaggtactgcttccataagttttgaggttcaaacttgctcatgacctgtgagccaactgtgaatatatgtataataaagaactaaatttaccctaatg

SEQ ID NO: 49783 - DNA, 447 bp, Glycine max
  Clone ID: LIB3107-038-Q1-K1-G11
taaataaacccatatcctagaacttgatgcatgattaatagtacttgaattcattgatcttgatattgtgagccatgcatgattattaatctaatagggaaacacgaaacataaatgaccgtttctgggtccacatgatcaacacaatgaaatgggatacttgaaagcttgtctactttgagagagaaaaaaagacggcaggtacgtctgtgtggactgatgcataaagtccgaaaagtgaggagcgtgtcggtgcattcttgcctttgcaaaaaatgaaatgaaatggtctcataatatacgataatggaatacaaacatgacgcttgataagatggatcatattatagtttcacttcaagatgaacattacaacaacatgtctcattattgaacaatatcagattgtcttgcatgcatgtaacattgattcaaaacaacttcaat

SEQ ID NO: 49784 - DNA, 51 bp, Glycine max
  unsure (1)..(51): unsure at all n locations
  Clone ID: LIB3107-039-Q1-K1-B10
ccggnnctgaaaaaccgggtcgagacacacgcgtgcgcccacgcgttcgta

SEQ ID NO: 49785 - DNA, 345 bp, Glycine max
  Clone ID: LIB3107-039-Q1-K1-B4
accggagggggaggtcctctaaccaaattgtagtctttttccttatttgtatgtaattaattgggtaaattactctcctctaaaagatgctttgattacactactcccttccccatgttacactttagtgtatattaagttgaatgagcctccttggaatgttctctctctttaagatagaagggtaaaaaagggtattttctcggaagaagatgatagtgaaaatagctaagaattgttatagtaattagttaattagtaagatggttaagttcgatacataaacatgatgatgtgaggggaaagacaacattcaagttaggtttttgtgaaatggaaataatc

SEQ ID NO: 49786 - DNA, 121 bp, Glycine max
  unsure (1)..(121): unsure at all n locations
  Clone ID: LIB3107-039-Q1-K1-B6
ccggnccgaattcccgggtcgacccacgccgtcctaccggttcgggaggacaacagaggggaacacattactcattctattcatctntagcattgtggattgaagataattgcgaatgtgc

SEQ ID NO: 49787 - DNA, 387 bp, Glycine max
  unsure (1)..(387): unsure at all n locations
  Clone ID: LIB3107-039-Q1-K1-C6
cggnccggaattcccgggtcgacccaagccttcctaccggttgcaaaaggacaacagagggggactggaatccttttttttttttccctctcgctctttcttcaattccaggctttattctcatgtctttcaaaagcctcaaccggcccaatgccccatcaagcatgggtgttgctgatcacagcaagaacaccttcatggaattgaagcagaagaaggttcaccgttatctgatctttaaagttgatgagaagaaaagggaagttgtggttgagaagactggtgacccggctgagagctatgaggatttcgctgcatctttgcctgagaatgattgcagatatgctgtctttgactatgatttcgtcacttttgagaactgtcaaa

SEQ ID NO: 49788 - DNA, 383 bp, Glycine max
  unsure (1)..(383): unsure at all n locations
  Clone ID: LIB3107-039-Q1-K1-D4
gacccaagccaggatttagaaaggcctggtttttgttcccaaaaagtgacaaacctccaaatcaccatacaagatttgatgaagaaaggagagataaatggggagagccccaaagggaaaagtgttgagtttggtgaggtgaaagggcagctttgagcagctcaagagaacatcacaaagttgtttgacgcccaccgcaagttgatgaagaatgtggaagaaggtaccgtgtcttctgttgggaaggatgcagcanagttaggtgaaattggaagtgtcagcaagaaggagagtttcagaacaggcacggggagaatcagaaaaatagggacattgcatttggagggcaaggactgcagttttactgcttaactaggtgaggg

SEQ ID NO: 49789 - DNA, 447 bp, Glycine max
  unsure (1)..(447): unsure at all n locations
  Clone ID: LIB3107-039-Q1-K1-D6
cccggnccggaattcccgggtcgacccacgcctccctaccggttgcaaaaaccgccaaaggggggttggaaccagccaaaggtgaacctcagcctcaggatggagaagcaaaccctccaacccttcccaacacgggggaatgattcccgctgcttttggtcttgggttgcaagcttttgaaataatggcaatagccgcagtggggaacaatctgataacctacgtgacgagtgagatgcacttccctttgtccaaggctgccaacctagtcactaactttgttgggaccatctttctcctcgccctcctcggcggctatctttccgactcttacctcggcagcttctggaccatgctcatctttggtttcgttgaactttccggtttcatattgctttctgtccaagctcatgttcctcagttgaagccacccccatgcaatatcaa

SEQ ID NO: 49790 - DNA, 291 bp, Glycine max
  Clone ID: LIB3107-039-Q1-K1-F11
gagggcacaaccaacgtgaggcatggccttatcctctccctccctcttttcagctgttaacgccacatattcagtaccccatttccatgcactgccacttacactttcttcttcttactttccaattaatgttagaccctccacccatcatgttcttgtctctgatcataatcacaaatggagaacaaaagtttcatttttcacttccttcttgaagcataaagggtaagatgccaagatcatctacgaagaactccttgaggccatggctccacttgatcgaggggctgc

SEQ ID NO: 49791 - DNA, 321 bp, Glycine max
  unsure (1)..(321): unsure at all n locations
  Clone ID: LIB3107-039-Q1-K1-F5
ttcccggggtcgaccccacgccgtccgtcccggctgcgaagaacgaaacagaagggggttctanngtgtgtgattggtttgttggttgtaacctcgttgctgtcttcttttggttgttctgtggtttgtgtttgttttttctctcancctgaaaaatgtcttgctgcggtggtaacctgttggttgcggaaagctccttgcaagtgcggcaaccggctgcggaggctgcaagatgtacccagacttgagctacactgagtcaaccaccaccgagaccttggtcatgggagtggcacctgttaaagctcaatttgagggtgc

SEQ ID NO: 49792 - DNA, 57 bp, Glycine max; identical to SEQ ID NO: 12752
  Clone ID: LIB3107-039-Q1-K1-F8

SEQ ID NO: 49793 - DNA, 428 bp, Glycine max
  unsure (1)..(428): unsure at all n locations
  Clone ID: LIB3107-039-Q1-K1-G1
ccgtccgaccggttgcaaaaggacaccagagggggattccgatttatatttagtgcaaaagacatagctattaacagttcgctttcactctctgtaganttggttttgtgtgatagcttcatagttatttcactctccagatcatgccttcaggtgctaggaagagaaaagctgccaaaaaaaataaggcaaagaaaaacagcatcaacccatcaaccaacaagcccaaaggaaatggtgatttgaagtcgcgggatgagaaaggaagtgatggtggtgagggtaattctcctgcatttcgtgaacatggtgaccatcgtaatccattcaatgatgggagtgaagatctggaagagagagggccatcagctgctcaaccacatgctcctgatgtcgtcgggtccctgaaagaagttgttagtgatgtc

SEQ ID NO: 49794 - DNA, 426 bp, Glycine max
  Clone ID: LIB3107-039-Q1-K1-G2
ggaattcccgggtcggcccaacccttccgaccggttgcaagaggacgacagaggggggagaaccaaggttctattttttctgcatccaattcatcacactttcaatttccgttacctttttttgatttggttttttttttttttttgcatttgttttcgttgaccaccgattcattggggttacattaggtaatcactgcaggggtactatcagcgatcagcgatgttgtgtctcagaaacttaccgggatacagaaaattcaactcaaacgacttcttttcaaagtgatttttggagccgcttatcttggaccctttggacacttttttcatttaatactggataaaattttcaaaggaaagagagattcaaaaactgtggctaagaaggttctgattgaacagttaacatccaatccttggaac

SEQ ID NO: 49795 - DNA, 341 bp, Glycine max
  Clone ID: LIB3107-040-Q1-K1-C1
ggaccgaccttttccattttttatttatttgtttgagataaagttgtgccacgtgggagggtgtgagtggacccagagggtgatgttaggagggtgagttcttcgaacacttgaatcggagggactgcagaagtcgcaacccaaccaaccatggcagcttctgatcccgacaagttgatggtcaaagctgataaactaacaagactcagtctcacgaagtggagtgcggattggaaaagtgctactgttctttatgagcaggcagctaatgggtttagagttgccaaggactatgagaatgctaaaatagcatatgagaaagcttcgaaagggacagaaat

SEQ ID NO: 49796 - DNA, 223 bp, Glycine max
  Clone ID: LIB3107-040-Q1-K1-E8
ggagtaagcaggcggcatggcattctcagcggtctggcgactagcgaatcttgggcgacacttggatttgagtgaatcagtgaacaaggctgcgccagttgggtcaatcaagttgaaggtagcttcagaggtttctgaagcattatcactgggtcgtgctgttgttgctcttgaatctaccattatttcgcatgggatgccatatccccaaaatttggaaact

SEQ ID NO: 49797 - DNA, 391 bp, Glycine max
  Clone ID: LIB3107-040-Q1-K1-F1
gcaaataacaatccatggtcactgcgtaaactccaaaatatgaaccttaagaaacaaggttgtcattaagagataacgaaacaaactcaacctgaaatctgtatcaaagccagtgcagaaaataacaatccatcatcactaagtaaactccaaaatataaaccttaagaaacaaggttgtcattaagagataaggaagccagctgatcagcagtaccgccagcctgctgctgagcaacattccttaggacgtccattgcctcagccacctttgctttcagggcttctggcgactcaagcaaatgcagaacttcagtctggtccatctcaagaagcatgcctgtcactttggcagcattatcaggctctaactgttccacaagggggtagag

SEQ ID NO: 49798 - DNA, 343 bp, Glycine max
  Clone ID: LIB3107-040-Q1-K1-F5
ctacacgatgggttctgagttcaactcatcgtgtggaaaaaaaaggaagaaaatttaaatactatttttgtaatttgtatgtgataaagtgcccatcttgatgtatgtacttcttcacttctttgtatgtgtccctagtttgagtgcaaactaaaacattttgaagtgtttaaggtgtcgcatgatgtgactattattgtgttggattaaggaaacatggtttcatggatgtattgttgtctttgtgatctgtgatattagatcatgtgtgtatgtacaaagcatttatccacctaggatgatggtttttgaccatacccatttgaaaatggcatgggttaaa

SEQ ID NO: 49799 - DNA, 382 bp, Glycine max
  Clone ID: LIB3107-040-Q1-K1-F9
acgcgtgagaatacgaccgaacgctctagaggaaccaaacttacgtacacatgccatgaaaagcataacaatctgggcaaataccctataactacactagttgaccaatcattatacaacaatccatactctgacaaaccctagaccttacacaacatacatgtctaacatcacattcatctttcctctgctgacgtaataactaacaagccctaacagattccacttcactacagaccctcacacccaatttccaaaaggacttcctctggtccgttatcatgagacatacaaatatcttaatatcacctagatttacccggtaaattatccaactcttatcgcccatagcgtacgcactatatcatttgcttttgtcaca

SEQ ID NO: 49800 - DNA, 468 bp, Glycine max
  Clone ID: LIB3107-040-Q1-K1-G4
cggaacgaccgcatcgtccgaaccgttcgtcgaatacgacagaacgacattatggggctcaaatgaatttggtgatcgagagtgcttggaacagtttgatgaaaaggaaagtactagctctcttcgttgcttcaattttggtagcatgtcaatgccatgcctacgatatgttccctctacgaatgaacactggctatggtgcccgtactcacgacgtgaaatgcgcaagtcggatgcttgctgtggaagcacactacatctttggctttgagaccattcctgaagaatgccttgaatcaacaaaggaatacatccatggcaaacaatatagatcagactacaaaacagttaaccaactaacttacttttatgccacaaaccttgagatccataccaaggacacatttttgctcagtatacatggcaccgtactctctaatatatcatactacctaaaacatggatatg

SEQ ID NO: 49801 - DNA, 144 bp, Glycine max
  Clone ID: LIB3107-040-Q1-K1-H1
gctcgcctagccatgctcttcaattgctaagaacttgctcagcacattgtgtcgcgcttagcgactttattccagaccatgtctttcttatccagattgctcgttctcgttaagcctaatgcgaggcttagcgagttagtacct

SEQ ID NO: 49802 - DNA, 289 bp, Glycine max
  Clone ID: LIB3107-040-Q1-K1-H4
gaacgagaatatgcaagtgtgagtgggacgatggggtgagaaacaggagtacgcaacatccaatccaacgatccaaacaaaactgcaaaacaatatacaattgaatagcagtggcgtttcgacgcgcacgaagcttcttctacttcttccactgcgccacattcattcattcaattttattgtttttaccctaattactatcgccaaccccctttttttttttcttcttcttccttttttcaatttcgattgcatggaccatttcccattctaacacctacaatttttc

SEQ ID NO: 49803 - DNA, 280 bp, Glycine max
  Clone ID: LIB3107-040-Q1-K1-H5
gatccaattgaaaacgaaattgacacaaactcaacagatcgaaaatccataatgttgttgcgtaagcaacaataaaaatctcccatttgtgttttcttctcttcacgcacaccaacaaaacctctctctcatcggaatctccaaaaagaatggacaacaaaacgcagcagtccgagagtaagcaaaacgacaacgacgaggaagttgcgccaaaacgacaagaccctaacccgtcgtctggcgggtggggcttttcaccgctctcgtttctctccgatct

SEQ ID NO: 49804 - DNA, 348 bp, Glycine max
  Clone ID: LIB3107-041-Q1-K1-E3
agcgagaaactactaagtaaattgcttgtccgaagcagtgggacccgcggatcatgatacagttcgaatcgacaatctcattcgagcacagtatgatgtacagagacgtataccatgtcatggtagttcataatcacgcactggatttcattacgagaatgctccttcacattgccagacgcctgctctgagatgtggtcatgccgctgttcctgaatataaatctgctgaatggcagattctccaaccatcaactgcatctacctgcctcaagaagctatgttactgctcctagcatagcacctgtccaagcaactaccattaccagacctcagcatgtggacaatg

SEQ ID NO: 49805 - DNA, 373 bp, Glycine max
  Clone ID: LIB3107-041-Q1-K1-E7
ctgtggcactagaagcattattagttgatgttgtccttgacccgtgtctttcagctttggtttcctgaaaatcaaaattaaaaaaattagaatcacataggtgaaagcgccaaattaatacaatattattagctttaaacaaaactaattaactctctctcgatctctttcttttcctgaataaaatccactaatctaattccttgcaactaaactttgaaaatctaatatttccttggttcatgtaaattttcttaattatatacaagtctaagccattagagagtaaacggatcaagaaaatgaaaattatgaagcatcaagttcccaaacaaaactatgtaaagccttgattagtgactagaactagaaa

SEQ ID NO: 49806 - DNA, 421 bp, Glycine max
  Clone ID: LIB3107-041-Q1-K1-E8
ctgtggcactagaagcattattagttgatgttgtccttgacccgtgtctttcagctttggtttcctgaaaatcaaaattaaaaaaattagaatcacatacgtgaaagcgccaaattaatacaatattattagctttaaacaaaactaattaactctctctcgatctctttcttttcctgaataaaatccactaatctaattccttgcaactaaactttgaaaatctaatatttccttggttcatgtaaatattcttaattatatacaagtctaagccattagagagtaaacggatcaagaaaatgaaaattatgaagcatcaagttcccaaacaaaactatgtaaagccttgattagtgactagaactagaaatacatctaaatcaatttgcaaaaccaagccttctaagaaatactccaa

SEQ ID NO: 49807 - DNA, 470 bp, Glycine max
  Clone ID: LIB3107-041-Q1-K1-F6
agaagacgacagaagggtgcccttttcccctcagttcttggcgggacttgtgccattcgtggtgcttttggttgtggtaaaacagtcattagtcaggctctttctaagtattccaattctgatgctgttgtatatgtcggctgtggggaacgtggaaacgaaatggcagaggttctaatggactttccccaacttacaatgacattacctgatggtcgtgaagaatctgtcatgaagcgcacaacactagtggctaacacttcaaacatgccagtggctgctcgtgaagcttcaatttatacaggaatcacattagctgagtattttagagatatgggttataatgtcagtatgatggcagattctacatctagatgggcagaagcattgcgtgaaatctctggacggctggcagaaatgcctgcagatagtggatatcctgcataccttgctgcacgtttagcctcttt

SEQ ID NO: 49808 - DNA, 378 bp, Glycine max
  Clone ID: LIB3107-041-Q1-K1-F7
aagaatacgaccgaatggtactctactaccctcagttcttaacggtactagaggcattagtgaagcttttcaccgtggcagaccagtcattattgcatgcatctttctaagtattgcaattttcgcatctatcctatatgcactctgaagtgaacacagaaacgcaccgatccatgatctaactgactctccataaattacaatgacattagacacatattcgccagataacattgtcatgaatctcatatcaatgtttggtaacactataaacatgccaatgcctgctactacaaacttaaatggatacactattcacattctctgtatattttagagatatgcatgataatgccagtttgatgacatataatacat

SEQ ID NO: 49809 - DNA, 469 bp, Glycine max
  Clone ID: LIB3107-041-Q1-K1-G8
tccgaccacgcgtgcgacgactcctacaagacgacacaaaggacaggcgttaccggaacaattgtaccacaaattaaaggctggccttgacgtgaggcactagcttgcactacttcgggcaaacgtgcctattgatgacatgccccaaggtcaagtcactgaaattggcgactaccaggggacaggcttcatagccactcttgaccattactgtaagcccacattgctacctgtctcttgattgactcattcattgtgacgctacaacgctagcttatatatctgtctagtgcctttgttctaccttgtgacatgtaactacaagtgcagaatcttgcaatacatacaatggaacacattatgaagaacatgaaccaatcttgagaatgacccatttagagtatgcaactatttaaaagcttaaaaatgacacacttagcacatcagaagtaacattatcaggaggaca

SEQ ID NO: 49810 - DNA, 474 bp, Glycine max
  Clone ID: LIB3107-041-Q1-K1-H11
ccgctcctgaattcccgggtcgacgccacgcgtccgagacgacagaagggggaaaattcatcaaatcccccttcaagtggtttactgccgagaattcattgactagctctcaaatttgaaattggtcttggatatggaaacaacacttactagagaatatattaccctccatggtagcctgcccactaacgtttttcatgtctttacatatatgtctataaattcttcttgtaacaagtgcgacaatgacaagaatcaacaaccaatgtgcttcaggactgtgtcttttctcatcaagtgtggcaacacttgaagcttgacctacacattgcgttttatattgcaaagttaattaattcaagggtatagtaaaatcatgtttgcaactacttgctggacgttctgaaaagctaggaacacaactatctttcaagatagcatttgagacatgttgcatgtgggtagaggtgacaa

SEQ ID NO: 49811 - DNA, 364 bp, Glycine max
  unsure (1)..(364): unsure at all n locations
  Clone ID: LIB3107-042-Q1-K1-A12
gttttaagaaagttaggccattttgatctatgcgcattccttaccatgacttctcttttgtttgtttacctttatttctcttacgttcttgtatataactctttgatgcttttagtgtgtttttaaatgtatgcatgagatagatatttattcatttgatgcacatgaacaccaacacttcttgcatacacggtgagttgaaaaagggccctatacccgggtccgtgggaacataagaaatggaggtgaatctgtgatcatgttaagtctccgacatgcttgatgacagtgaaacctcatctagagtttttctcttcgatgatatattgtcgctggtagtccctaccgncacaatgttgatatc

SEQ ID NO: 49812 - DNA, 327 bp, Glycine max
  Clone ID: LIB3107-042-Q1-K1-A3
gggggtgatgactgggatataggtgcatgccacgaaatcatatatatgcatgcacataagatgaaggttcctatatattttggcattccctcctcatttaacgtccatccacattttctgaatccttttctctctctctattccttggtgattttcaaggaactcatttgtattggtgatgagagaagaaaacaagctaattaagaagcaacgatgagcagcgatttgtaccgattcgcagtatcatcccacttcaataggtttccaaaatcggtctccctccgaaagaaagttccatggtggtaccagatcctggacccgcggtcc

SEQ ID NO: 49813 - DNA, 309 bp, Glycine max
  Clone ID: LIB3107-042-Q1-K1-B3
tactggtgcaagtagacgagggaaggggtattggtgtctaggtttcagtagcatatagaacaaatttaaaatttggaacttcaaatgaggatcttttatgatgcaattaggcttcagtaaagcaaatattaaatggaaagttgatcttaattcttaaatatggagcttgagtctctgatatgccctaaattcagtttaatgttggatggaattgacttaaaatttgcttttgatcttaacttgaacatgaaatgtttgttctttatttcctctctacccggtcttgttttttcataaatttattaccta

SEQ ID NO: 49814 - DNA, 54 bp, Glycine max
  Clone ID: LIB3107-042-Q1-K1-C12
tgttgctatagaactactaaagggtactcttttcacaacacaacacacttacac

SEQ ID NO: 49815 - DNA, 83 bp, Glycine max
  Clone ID: LIB3107-042-Q1-K1-D11
tgctgctgctacgagacgacaacagacggctacggatccgggaacactacagaactgggcggctcgcacaagacgacacaacg

SEQ ID NO: 49816 - DNA, 332 bp, Glycine max
  Clone ID: LIB3107-042-Q1-K1-D9
gaaggaaaggggaacccaaaccgaaaccctaaccctaacggagagatggcggagcacttggcatcgatattcgggacggagaaggacagggtgaactgtccgttctacttcaagatcggcgcgtgcaggcacggcgaccggtgctcccggcttcacaccaagccgacaattagcccaacattggttctgtcgaacatgtaccagaggcccgacatgaacatgagcattatcaccaaccccgatcagccacaaccccaatcccttgaccccgacaaggtgcaggatcacttcgacgacttctacgaagatctcttcgaggagctcagcaagta

SEQ ID NO: 49817 - DNA, 392 bp, Glycine max
  Clone ID: LIB3107-042-Q1-K1-E10
ctctgtccttaattcccgggtcgagccactcttccatacttctgataaaacaccacagaagggttacaataccaatacaaaataccacataactgggcaagcgaaccttgcacatgctggaggatgattctaaacatggcaacacattcatcctctactaacatatataactcttcccttagtctcatatcaatgcacttaacatactaacattcaaaatacatcaacttaccttatttcgtactataacaaaaattctacttaaatacacttctacataccttcaatccattcaaactacatactattcaacatatatattacataaatcaaatcttactaactaatagcaataatgacttcatataatatatcacattaatgaattttta

SEQ ID NO: 49818 - DNA, 194 bp, Glycine max
  Clone ID: LIB3107-042-Q1-K1-E6
atgaataccttaagacatactatactactacaggtgatatgagcatttcactgggcgaaaccataaatgtactatattataaaataatattatcttattcataaaccttgcatttaacactttactgcaactatataattaaactattatatcaattactattaatcaactaaatatccgttttaaccttatat

SEQ ID NO: 49819 - DNA, 329 bp, Glycine max
  Clone ID: LIB3107-042-Q1-K1-F9
aggagcatgttgattatatagaaagtaaagggcaacaatcatttttgtttaccatgggtaaggacaccatcgctgacataataacctatataagaaatgctgacatgaataaaaaaggaatggttcaaataccatttactaacataacataaaacattgtaaaaatacttttacgcgagggttttgttgaaaacgttcagataacatagagaaaactactaatattttttagttttaactctactgtatggaagaaatagaaaaggatcatataaaagttttttaaatttataactgatcagtacacccggtctactaatatattctaa

SEQ ID NO: 49820 - DNA, 301 bp, Glycine max
  Clone ID: LIB3107-042-Q1-K1-G12
ttacaggatatgcattttatttacaacagcgatggcttctgtgcctcaaccaaaaatctcccttctaaccttattcttcttctcgtccttcaccatcattgcgcatgcaattgttcctcaaaacgaaaccttcaaatttgagaactcatgtgaacttggaccctacatcgttgagtacggtgcagattacataatgataagcatcttcaactctccattccaagttggtttctacaacaccaccccaaatgccttcactctagctttgcgtgtatggcttcaacgctcggatctactattt

SEQ ID NO: 49821 - DNA, 101 bp, Glycine max
  Clone ID: LIB3107-044-Q1-K1-A3
gcacctaccggtccggaattcccggggctatccacgcgtccagactgcttgcacaagactacaaagtggtacctcttctatagtgccacctaaattcaatt

SEQ ID NO: 49822 - DNA, 56 bp, Glycine max
  Clone ID: LIB3107-044-Q1-K1-B6
taccgctgcgaggataccacagaaaggtaccgttgctagatgacggcagatgggtt

SEQ ID NO: 49823 - DNA, 344 bp, Glycine max
  Clone ID: LIB3107-044-Q1-K1-B9
atgcgagaaaacaccacaaaatggctccatttagctaatccaaacctaaaggggccttccgttaaaaccggggactctacttttctttacccatctaagcaataatatttcctatatatataccgaaaccattgctcacgccaaacctataattttacctattcaaaatctaaactacctttgatacatcattatctttctaacaccagcacccatattatatcaattttttaataataataccacccacagtttcctattactttctcactataatgcactcttcaattgaaatcctatgatattctatacttacataaacactggtgaaattcttcttatca

SEQ ID NO: 49824 - DNA, 431 bp, Glycine max
  Clone ID: LIB3107-044-Q1-K1-C1
ggcacaagtgagtttgttgatcgagataactagaaacagtgtgatgaaaatgaaggtccttgttttcttcgttgctacaattttggtagcatggcaatgccatgcgtacgatatgttccctcttcgaatgaacactggctatggtgcccgtactccggaggtgaaatgcgcaagttggaggcttgctgtggaagcacacaacatctttggctttgagaccattcctgaagagtgcgttgaagcaacaaaggaatacatccatggcgaacaatatagatcagactccaaaacagttaaccaacaagcttacttttatgccagagacctcgaagtccatcccaaggacacatttgtgttcagtatagatggcaccgcactctctaatattccatactacaaaaaacatggatatggggtggagaaatttaact

SEQ ID NO: 49825 - DNA, 256 bp, Glycine max
  Clone ID: LIB3107-044-Q1-K1-C10
actcgtccaaacacctcagattataccacataatgctctatcattttaaaagggcctttcatatatacaaggctgtctcttattccttatactacaattgaaaatacccaccttctaatctttcaaaacaaactcaaactctctttcacaaacattaactacttctattcattaactccttattataaatctacctaatatcaaattattactttaatttaaaaaattttttttataaaaaaaaataaaaactttt

SEQ ID NO: 49826 - DNA, 51 bp, Glycine max
  unsure (1)..(51): unsure at all n locations
  Clone ID: LIB3107-044-Q1-K1-D10
gcctgcacgtacccggtccggaanttcgccgggtcgagcccacgcccgtcc

SEQ ID NO: 49827 - DNA, 430 bp, Glycine max
  Clone ID: LIB3107-044-Q1-K1-D5
gaagcaaaaacgaaatcacaacgtcggaagctcccctctctaagtggcggcgacggcgggcgtgcacggcggtggttcaccttctacactcctctcatctcgtaagtctttgggatctatcgaacgcatagagaaactcttctcctcactcttcatcgtgcttcgcttcgctttatcgcatattaggaaactctccaggacatgtgaaacttgtcaaaatcaggatgagcaatgacatatttgatagacagttgttagcagagaagttgttgaaactcaacaattcacaacaaagcattgaatcactttcccattggtgtatttctcaccggaagagagcaaaagaaatagttgaaacttgggataaattgttcaatgcttcccaaaaagagcagcgtgtctcttttctatacttggctaatgacatatt

SEQ ID NO: 49828 - DNA, 68 bp, Glycine max
  Clone ID: LIB3107-044-Q1-K1-G6
tggtgggagttctgttcgaaatgaagagaaaactcgcagattacttgctggaggtgaagggttggatc

SEQ ID NO: 49829 - DNA, 418 bp, Glycine max
  Clone ID: LIB3107-048-Q1-K1-A10
ggaatcctgtttgggaggagcatatactaaattctcaactaggggaccacaaactcacttgtctctctaacaaatgaacggctagacatgacttttgacagaataatatattatatgaataaaagatggtaacttctggtgatgttctttacagtgtttagtgtggtcacagaaaatgccatcaagtttgagcatttcaatgcatggtttagtactttattcaagacaatttttatctaggaaactagtggttcccaattgatgtcagatttactggctctagactagattatctgattttgtgctttgttttgttgcagctcatctcagctcctggaatccttgccactttcaaatgtgagaattttatatctttaatcaaaatgagattgacttaattgcttatctatgctactat

SEQ ID NO: 49830 - DNA, 402 bp, Glycine max
  Clone ID: LIB3107-048-Q1-K1-B10
atgtgtatcgattttatcctggaaaatcattagtgacccaaattaaatactctttaaaaatactaattaaaatgggtaaaggattaaaatatttatttagaattttgagatactattcaatatgttaaagaaaaatctaaattagattaaataatttttttcagatatcggattgcatccaaaactgttatagagcaagcttcttttcttatctaaatagtactctctttttcttgccaaacttaaaaagattattttaacataaagaaatctcgtaggatgttaatttgtctcattctaccgacactttacattggcaaaacgctgcaatgttacacctcaccacaactgcattgcatttgcagcaccactttgaaatttgtgcaaggagacaaacacgta

SEQ ID NO: 49831 - DNA, 114 bp, Glycine max
  Clone ID: LIB3107-048-Q1-K1-G11
ccggtccggaattcccgggtcgaccgacgcgtacgctcatgcgtgagaacacctacgagtaagactgctgattgtttcattacatcatgtaacaccggggggagcaatgaaact

SEQ ID NO: 49832 - DNA, 312 bp, Glycine max
  Clone ID: LIB3107-049-Q1-K1-A9
cacggagggtggtggctgtgggatagagagagagagatagaggtggagattgctaatactgggccaagcttcacctgatgctactaataaagttatatcctgttatcttgatgatttaattcctccacctgagtgacccatcttcttctacacttccaagcgatagttatgcaattcccatttttattctcattctgaatttttaggtttgtcctctgattctttgcaaatcactgtttcagtaattagatcatcttctgtaattttctccgcaaacctttctctggatgtctattattgctctatatttaa

SEQ ID NO: 49833 - DNA, 411 bp, Glycine max
  Clone ID: LIB3107-049-Q1-K1-B4
acagcaacggcaatgtcaccaatataagcatatcgtcgattactagctcctaggattcgaatacacatcagttcgcgtgctccgctattatcagctacattcaaatgagtttgaggttgaatcatatcatttttttattctttcagtcaaaaaatggaagtaaaaatattttgtgttcaaaaaaaggaacctacatttgcattttttgttttcatcttaaagacctctttcctttggttctaatttattaccctgaaataatgaattgagttcgtataggcattttggatgatgctattgaaatagcctttcttgctatattttctggtaccccacccatttcataaagtattttcccaggtttaacgacagctacccaatattcgggagaacctttttctgaacccatac

SEQ ID NO: 49834 - DNA, 379 bp, Glycine max
  Clone ID: LIB3107-049-Q1-K1-C11
tccgataagacaacacaacggaacgatactgatacgcctgatggaaacagaaagagtatgggcaccatacaaggcgaggtgcaactctaatggcaagtgcctgaatcattgatataacccatactgctcgcaatgaacatggaattcattcttgtatactatttcaacatactcaaacacaaagcgactcttaataccaatggttgcactcttagacaatgttccaattaagtgaaaatgacagataaattctttaagagcggacacataaatcagacttgactcgctgcatttaatccatttcaagtgaagcatgcacattgggagttgtaatgattataacacacactctttattgtcatgcatacatacaatgttt

SEQ ID NO: 49835 - DNA, 113 bp, Glycine max
  Clone ID: LIB3107-049-Q1-K1-C7
ttcacaatgtgtctcacttttctttcttatcgggtatatcttcaaacacagttgctatctacacttcacttacttccttctttcctactttctttcttctttcaaactctttc

SEQ ID NO: 49836 - DNA, 477 bp, Glycine max
  Clone ID: LIB3107-049-Q1-K1-D12
gaattcccggctcgaccgcacgcgcccgtacagatacgacgacgacgacggagctggagaccgctcccaaatcctttaccaccggtcctggtcagaccatctcacccttcgcatgtcgcttctcagtccgttccatcgctgactcttctcctttcaacaaaatccgcattcacagggatgatactgcatttgatgcataatgtcgctcgaaaaaacaacgctcctggaatcgttgtgcttcaagagtgctggggtgtcgacttcgaaactaaaaatcatgctgtgatgatttctcaacttggtcgtggatttaaagctctcattccagatctgtacacaggaaaggttggtctatatgttgcccaagcccaacatttgttcgatggtcttgattgtccaggtgctcgtaaagatatcaatgcttcacttaactggcttaatgcaaatgtgttataaaaagctggtgttactggattt

SEQ ID NO: 49837 - DNA, 413 bp, Glycine max
  Clone ID: LIB3107-049-Q1-K1-D3
gtcttaatgatgatcctacacgtatttcgtgtgtatctcacaggcggttttaaaaaacctcgcgaattaacttgggttacgggtgtagttttggctgtattgactgcatcttttggtgtaaccggttattccttaccttgggatcaaattggttattgggcagtcaaaattgtaacaggcgtacccgacgctattcctgtaataggatcgtctttggtagagttattacgcggaagttccagtgtgggacaatctaccttaactcgtttttatagtttgcatacttttgtattacctcttcttactgctgtatttatgttaatgcacttttcaatgatacgtaagcaaggcatttctggtcctttatagtgaatatggatcatagatatttgtaatcacaatcatttttattt

SEQ ID NO: 49838 - DNA, 434 bp, Glycine max
  Clone ID: LIB3107-049-Q1-K1-D9
ccacgcgtccgaattcgaccggccgctttaccttttgtcattcttttctactttttcatgggcatcacctcaactgtcggatgagtaaaattcttacatgaactctgcatgctttcaaaaaataataccatggtatgcaatcaatcagtcctatgtaattaatgtccaaacaaacctacgggggaggaatattaccaatgaagaaattggaaaatagctaaaccttccacaccaagaaaattccacttaatagacaatgataataatatccacataactttgtttctcgcatttgcatatcatcttatgttttccaaacaacatcatccaagcttgttgaaagtttcttgcacaacttatggaactccaatgtatctccttttgccttccgtacctctaccatgtgaagagaaagtgccacttgaaatatctct

SEQ ID NO: 49839 - DNA, 381 bp, Glycine max
  Clone ID: LIB3107-049-Q1-K1-E7
ccagacgtccgcacacttcagatcagatatatgatgtgttcagatcactaaacggtataggggctcctaaggatctggctcttgttttattagatcctctttacttttgctcttcaaacttcactctacttcatttgcactgtcctattaccattataatattgatacatcggttttcgctcatcatctctaacggtatatatgatattatgcttcattgacagctattgatgttcatcttatatcaataccatagtcatttaataatttatattatatcttgcataataaatattgtaagttatctttaattattatattctatcttatttatttctcattataaatatcttatttcattgaaatttaagcatgtattat

SEQ ID NO: 49840 - DNA, 400 bp, Glycine max
  Clone ID: LIB3107-049-Q1-K1-F11
tactcggacttgaattcccggctcgaccgacgcgtacgtccacgcatactcccacacgttctacggctgctaatgaccacatacgggttaaaatgtatggcaatttacaagaaatcaaggtcaaactagtgtgtcaactttagcgtaacctctatctccccactctactcccctattcccactttacgtacttcttcacctcttctttctttacaaaatacaatatcttacccttcacacactcaccccttttgttcatatctcctcaatctttcatctggcaacttctcaattctcaccaccatcatcctttcactagaatctacctgtgctcttagctgttctatgttcatacgatatagaaactttaattttatctgtgtacaaatttcaccctgat

SEQ ID NO: 49841 - DNA, 209 bp, Glycine max
  Clone ID: LIB3107-049-Q1-K1-F2
gaatcacgcactatcagtacaacaactcactcacgaagctggacaatttcatgaagcctgccatggcttcctcgtgtgctttctcttccattgcagcttttgccatctacacaccaatttcccataagaatggatcactcttgtgaagcacaaaagcttcttttcttagtgggaggaaactgaatgtgaacaattttaccttaccaatt

SEQ ID NO: 49842 - DNA, 242 bp, Glycine max
  Clone ID: LIB3107-049-Q1-K1-F7
tcggtcctgaattcccggtcgatgacgcgtacgtacactcgttctatgacaacacaactgattgttacgcttatatcgttacttcagggattacggccaaaaatctgatcacgggagggcccaaacttatttctagtcttaagcactctatattcttaacatatccaaatacttgacaacttgactattacatattctttacattccatttttctataaaactgaaaaattcgcaaattcta

SEQ ID NO: 49843 - DNA, 400 bp, Glycine max
  unsure (1)..(400): unsure at all n locations
  Clone ID: LIB3107-050-Q1-K1-A12
ccggaccggaattcccgggtcggcccacgcgtccaaaaagaggtaacaatgggtggatgtaagggacctatcaccacatttattgtgaancccttcggtccgttcaaaaaagaggactatctcaatattgtctcacaaagacttctgtgcagtattaacttctccgagtgtggacgaattgaaatcgaagagaattgggataatgttaaaaccatatttatccccacacgagtgtccctcacttcagaaacatgctccgagctggtggcaacccttcctttgtagatcaaaagagaaatccacgagtttatcaaggcaatttataccctattccaagatctcgactgtactttcttggaaatgaatccttttgcgcttgttgatgaaaaaccctatcctt

SEQ ID NO: 49844 - DNA, 324 bp, Glycine max
  Clone ID: LIB3107-050-Q1-K1-A7
aattcccgggtcgacccactcgttcgcccacgcgtccggaagactacagatggggatggtgcaagagtttgttgttagctgtgggctattttatcgtgaggagaatatgacgttgtttgttttctttgatgctgcagtttttttgatagcttgggcatgccatggttcatgctatcaaaggtatccctcttttcatgaaaactggctatttcgagcatgcttaggaggataaatgctcaagtcttatgcttgctctgtaatcacacaatcatcccatcctttaaaaccattccttaagagtgcgttgaaccaacaaaggactac

SEQ ID NO: 49845 - DNA, 490 bp, Glycine max
  unsure (1)..(490): unsure at all n locations
  Clone ID: LIB3107-050-Q1-K1-C10
ccggaccggaattcccgggtcggcccacgcgtacaaacaaggatgggaaaaatgtaatcttcaatggctcctattctttttgctgcctttgttgctcgcctttttctaactctggcgcgcactaccaatgctaattatatctacgcttctcctcctccacctaagaaggtatattacccgcctccagtataccattctcctccaccacccaagaaatcatactatccacctccagtgtatcactctccaccaccacccaagaaggtttactatccaccaccagtttactctccaccaccaccaaagaaagtgtattacccacctcctgtctacaagtctcctccgccacccaagaaagtttattacccacctnccgtctacaaatatccttcgccacctaagaaggtgtattacccacctcccgtctacaagtctcccccgcctcccaagaaagtgtactacccacctgccgtctacaagtatcccccac

SEQ ID NO: 49846 - DNA, 452 bp, Glycine max
  Clone ID: LIB3107-050-Q1-K1-C9
cggaattcccgggtcgggcgacgcgtacggcgtctcaaaggagggtgttaagaaccgtgaggataaaattaagaaggatcctgaaagtgggggagtatctaaagaaggtgccgataaagtaaagaaggacgatggtttaggagaggaagggaggaataagggagacaaagtaaaggggaagccggtggataattcagtttcaaaggatgggtctaagagtagtgggaagggagaaagtacagtatcttcagcctcgaaaagaaatgatggctcttccggtgaggattgtgattcatcaaataaatgcactgatgaggcaaagaagttggttgcttgcttgcgagttccacgaaatgattctcctcaacttttgttgctaatccagaacaaaggaaaaggtcctcttactgcgaaaatttctgccccagattttgttcatctggagaagagtg

SEQ ID NO: 49847 - DNA, 357 bp, Glycine max
  Clone ID: LIB3107-050-Q1-K1-D5
accggtccggaattccctctcgaccaccctacgtccaaccgttgccacaacactacatacggcttaccggattactacttagtcattatattgtggataataccactcaggtgggacctataatcatcatatgaactattaaacccataaaatcactattatcatttatcaaaggccaatctccagtagaatataccgttccctataaacactgatttatatttcatactaccaagtatcatctatctattgcaaactatttatacaacttcgatattattatgaccgaaaattataacgatccttcttaatgactccctgatattgtaacttattcttataatagatgcttgaatc

SEQ ID NO: 49848 - DNA, 482 bp, Glycine max
  unsure (1)..(482): unsure at all n locations
  Clone ID: LIB3107-050-Q1-K1-G9
ccggaccggaattcccgggtcggccgacgcgtacggactcttgtaacatcacctttgctggtgttgttagggattgctggtaaaaatagcaaggctcgatttcaagctacagttggaaccactaaatatcctanagagattccacctttgccttggtaccgtgggacgattccacagatggcaatggcaggatttctgcctttcagtgccatatatattgagttatactacatatttgccagtgtgtggggccacaagatttacaccatatacagcatcttgtttattgtgttcatcattctccttatagttacggcattcattactgtggcattaacatacttccaacttgctgccgaggaccatgaatggtggtggagatcttttctttgtggtggttcaactggcttatttatctacgcttactgtttgtactactactacgctcgctcagatatgtctgggtttatgcaaacatcatt

SEQ ID NO: 49849 - DNA, 369 bp, Glycine max
  Clone ID: LIB3107-050-Q1-K1-H10
taattctaaagaattttcattttaaagttctctaattattactagccatgccgatccgtaggattgcaattggaaggcccgaagaggctactcatccagatgctttgaaggctggattggctgagtttatctccaccttgatttttgtttttgctggccaaggttccggcatagcctttaataagctcaccaatgacggcgctgccactccagctggtctcatctccgcctccatcgcccatgcctttgctcttttcgttgccgtctccgttggcgctaacatctccggtggccatgttaaccccgctgttacctttggtgccttcgttggcgggaacatcacccttctacggggtatcatctactgga

SEQ ID NO: 49850 - DNA, 334 bp, Glycine max
  Clone ID: LIB3107-052-Q1-K1-A1
gattcaaagctttgatgaaagacacacccatagggggttgagtttcctttgatggaccaaaaccttttttttttttcggacatttttcatttgggggaagaaaatatcaacctttaatcttaaaaaacaagatcttagtgagtgagcgatcattttttgtggtgcgattatcttcgactttattccagcgggtcccgccggccgggcgcaccgcgtgaccgccgacatcctgtggccgaatttgatgaagcggttctcgaagtcgctgctggacgatgatttcgaggcaaggttcaaagaattcgaggatgactcggaaatcgaggatgttcta

SEQ ID NO: 49851 - DNA, 418 bp, Glycine max
  Clone ID: LIB3107-052-Q1-K1-A12
gactcagcctaattaataaaaggggaagtttttggatagtgttgagttttgtcgcagcattccatacgaggccgaagggaagagtttttgttgggtttgggaggctaagtagggtttgcgttgagaaagagagagatgggaagagaaaaggagacaacaaaggtagcttacacagtggagcagcttgtagccttcaatccatacaatcccgatattcttccagatctcgaaaactatgtcaacgaccaggtttcgtcgcaaacttacagcctggacgcgaatctctgccttcttcgcctctaccagtttgaaccagagaaaatgagttcccagattgtggcccgcatattggtcaaggctctcatggcaatgccggcgccagatttcagcctttgtctctttttgattccagaacgcg

SEQ ID NO: 49852 - DNA, 385 bp, Glycine max
  Clone ID: LIB3107-052-Q1-K1-A3
atcagtgtatccatattctcgaaatcattcgcttttctataacccctgttgacgtgctcaagtcgtatagtgcagtgattcgtcgcttaatgaaaaaataaaatatatttccaccgatcgccagaatcggtcatacagtgatttttgttaaaatgaatatccgaccgttcggtcaggccggaaccacgttgctcataaaatactgaggttgaatatttatcttgtaaccaaaaaaatatctatttagtaaacgaaagcggaaaatcaatcggacgttttctatctgagagtatctgattcttaattgaactgactaaaaaactaacgcgaaactaaagctgatatcaacttggctagtcaagctcgaacacaaaaatacggtttt

SEQ ID NO: 49853 - DNA, 220 bp, Glycine max
  Clone ID: LIB3107-052-Q1-K1-A4
gaaggccactccttttagcaagataacaacactggggtcctggttccattatctagttctcaattctcttcaccctttgcctctgaaagaaatgggttgtcttgaagcggaaagaacaacagtaggattggcagcaagagacccttcagggattctctgcccatacacctacaatctaagaaacacaggccctgatgatgtttacattaaagatcactac

SEQ ID NO: 49854 - DNA, 323 bp, Glycine max
  Clone ID: LIB3107-052-Q1-K1-A5
ggtggcagagagcgaacccaaaactagagctacggtcccttcaaaccttccactcttctctccttttccaatcaagggaataatatttcttagagatattccgaaaccatggctcacgccaatcctatgatttttgttgttggaattctaggtaaccttgtctcctttctgtgcttctagcaccagacccaacattctatcgagtttgaaaaagaaaaccacggaaggtttccaatcacttccttacgtggctgcactcttcacttcaatgctttggatattttatgcttacataaagacgggcgaaatacttctcatcacca

SEQ ID NO: 49855 - DNA, 411 bp, Glycine max
  Clone ID: LIB3107-052-Q1-K1-A6
gaggagacacaaacaaccacaagtgttcttcctgggtacacaaactctattcctagttcagagtaccgcccttttaccttgcgtacacatcaaagaagaaaaaaaatggaaggagttgggtattgtgggagtttctttcagaggtgcaagccttacatagccatggtttctctgcaattcggatttgcgggtatgaacataatcactaaggtttccctcaaccgtgggatgagccactatgtgcttgtggtttatagacacgcctttgctactgcagctattgctccttttgctattggtctagagaggaaagtgagggccaagatgacattttttatgttcatgcaaatatttgtgttgggtctacttgggcctgtgattgatcaaaacttatactatgccgggcttaaa

SEQ ID NO: 49856 - DNA, 209 bp, Glycine max
  Clone ID: LIB3107-052-Q1-K1-A7
tttggattttcccaaaccaacccaacactagggctcgcgttcctttaacccagtcactattctcttcttttctactcaacgaaaaactatttctaaaaacaattcacaaaccattgctcttccctctccaatgatattaattgctacctatcctataaaccatacatctcctgttattattacaccaaaccacattattatactcttaa

SEQ ID NO: 49857 - DNA, 259 bp, Glycine max
  Clone ID: LIB3107-052-Q1-K1-A8
tgaattcagagaaggtcctgctctaccggttcggggtgaaatgattaaagatgagaagaaccatggaagctatgacttcatctttgttgatgcggacaaggacaactacctcaactaccacaagaggttgatagagcttgtaaaagttgggggcgtgatcgggtacgacaacaccctatggaacggatctgtggtggcaccccctgatgctcctcttaagaaggatgttaggtactacacggactttttgctggagctc

SEQ ID NO: 49858 - DNA, 203 bp, Glycine max
  Clone ID: LIB3107-052-Q1-K1-B1
ggctatttcaattgagcagatccctaattccgagggacgacgcttcgctttctttgttcagctctcgcggtttctctttttctatcagcaattgtccagtggtgagaagcaaattacaattctgagagcatttggctgaaacaggagtctgtgaatttgttaaaagattggtggtcgagtgaatctcggcgattaaaaaagag

SEQ ID NO: 49859 - DNA, 335 bp, Glycine max
  Clone ID: LIB3107-052-Q1-K1-B10
ccacgcgtgcgaatacgacattacgaccctttggttcctctccaaaaagacggcggttgggggctgctttcacaagacgacacattcacccaactgctatattacgacttaaaggtacatccactacatgacgccagacctggactccattacctagacattgctcttatctacatacgccatatctccttatatactcttgatacatatctgcctgcatatccactatgttgaatacaccgtaagattccacctggcctttaacgatctgttcaagcatcatataaaccacaccttaactttacttcctacctgcatctaggaaacggacaaca

SEQ ID NO: 49860 - DNA, 413 bp, Glycine max
  Clone ID: LIB3107-052-Q1-K1-B12
agaagatttgaatgggggacattgaaagttttaatcaaagctaaaagatatttctgctaatctacaagcgaaagaagatcaaaatttgaaaaaaggtggtggtcaaaaaatcagccgtggacagaagggaaagcttaagaagataaaggagaagtatgctgaccaggacgaggaagaaaggagcatccgaatggcattgttagcttcttctggaaaatcaatcaagaaggaagagacatcatctgaaaatgatacattggaccaagggaaaaaacctggcagtggtccttctgacgctccaaaagtaccttctgatgctccaaaaatatgttacaagtgtaagaaggcaggtcacttatctcgggattgtaaggagcaaccagatggtcttttgcataagaatgcaattggtg

SEQ ID NO: 49861 - DNA, 288 bp, Glycine max
  Clone ID: LIB3107-052-Q1-K1-B2
ctagtggaatttcacgaggggtcctttggaacacatgccaatggacatgccatggcctggaagattatgagggcagggtattactggctcaccatggaaaacaattgttgtatccatgtgagaaagtgccataagtgccaggcattcaccgacaatgtcaatgctctgcccgtgcctttgaacattttggcagcaccttgtccattctctatgtggggaatagatgtgattggggttattgagcccaaagcttcgaatgggcattgctttattttggtcggcattgac

SEQ ID NO: 49862 - DNA, 412 bp, Glycine max
  Clone ID: LIB3107-052-Q1-K1-B3
ggcagcgcttgatttgaggccaggcaagccccactgaaccaccacacctctcctcgttcacgctacccctttctgctcttcttctacctttcaagttttaaaagtataaagatggcagagacattcctatttaccttaaagtcggtgaacgagggacacccttacaaggtctgcgaccaaatcttcgaagctgtgcttgacgcttggctctagccggagccacacacggaaaatggcctgcgaaacatgcaccaaaaccaacttggtcatggtcttcggagaaatcacgaccaaggccaacgttgactacaagaagatagtgcgtgacacctgcaggaacatcggcttcgtctcaaatgatgtgggactggatgccgacaactgcaaagtcctcgtcaacattgagcagcag

SEQ ID NO: 49863 - DNA, 389 bp, Glycine max
  Clone ID: LIB3107-052-Q1-K1-B4
gtttttaaggggtggattgaagaaaatggaactggtccagtgaaacctggcacaggacttacggttgctgtaaaaaccctaaaccatgatgggctccagggtcataaagaatggctggctgaagtgaattttcttggtgacctagttcatccaaaccttgttaaacttgtaggttactgcattgaagaggatcaaaggttgctagtgtatgagttcatgcctcggggtagcctggaaaaccacttatttaggagatccattcctctttcatggtccattagaatgaaaattgcactatgagctgctaagggtcttgcttttctttatgaagaaactgaacgaacagtaatatataaggattttaaaacttcaaacatattactggatgc

SEQ ID NO: 49864 - DNA, 282 bp, Glycine max
  Clone ID: LIB3107-052-Q1-K1-B5
gagtgaagaggcaagatttaatagaggaattaatcaccatatgtatgaaaaagttttttcaaaaacttagtatcatatggatttttctcacaacctgtttaccaaataatttttactctctggtaatccattactagattattgtaatcgattaccaatatcaaaatggtttttgaaaagctttcaactcaaattacaacatttcaattgtattcaaaaagctgcaatccatttctatgttttgtttataaattaccagtgtgtttgaccgatgaaattcaa

SEQ ID NO: 49865 - DNA, 408 bp, Glycine max
  unsure (1)..(408): unsure at all n locations
  Clone ID: LIB3107-052-Q1-K1-B6
catacttagtggcatggaaagaaagaaagaaagagtaacctaaaaaccctgtgcaggctttcccagaaaagccaagtgagaaaaccaaaccctctattaccacttactacttacttcatgtaactgactatagccaccactatcactatttaggattttctgtaaaaagcctgatactcttttaccataaaacccgggagagccctcataataaaattgagagagagaataagagaattgtgtgtcgngtttgtttttgtttggtttgttgtaaggttagctagtgagtattctacacaagggtggtggtagggcaaaaaggataagacagtgaatgtgtgtgtgtgtgtgtgtgtgtgtgttgttgacaagcaaaagctatggagggtggtagtagtagctctaatg

SEQ ID NO: 49866 - DNA, 258 bp, Glycine max
  Clone ID: LIB3107-052-Q1-K1-B7
gtaggtggtgcttggtggttgggatatattgttggttagtatttattgtatgtaggcactgatatagtgctgtagccttattgatgaaaaatttggtggtggagatagtcatactaaatagtagattaatgatttgtggttagttatgcaacatacatccaccctggtgacaaaatcaccgctatagatgttgatgagcacaactgctgatttatttctgtaagacttgcgtagatgctgcttatagtgtttatgtta

SEQ ID NO: 49867 - DNA, 161 bp, Glycine max
  Clone ID: LIB3107-052-Q1-K1-B8
ttggggttttagagcataggatgggaaggtgcgcttggggtgagaaagcacacacaaacaaaggtgcatggaccaaagaagaagatcatcgcctcatttcttacattagagctcacggtgaaggctgctggcgctcttctccccaaagacgccggcctttt

SEQ ID NO: 49868 - DNA, 422 bp, Glycine max
  unsure (1)..(422): unsure at all n locations
  Clone ID: LIB3107-052-Q1-K1-C1
gctcacttccagatttcattgaaggcgtcttcataaacgcgtttcttggccgtttccgtttcctcgttcgaattcgctttttgatctgcgaaaatgagagagtgcatctcgatccacattggtcaggctggtatccaggtcggaaatgcttgctgggagctctactgcctcgagcacggtatcgggcccgatgggcaaatgccaagtgacaagacagttggcggtggtgatgatgctttcaatactttcttcagcgagactggtgctggaaagcacgtgccacgtgcagtgtttgtagatcttgagcccactgttattgatgaggtgagaaccggaacttaccgccagcttnttcacccagagcagctcattagcggcaaagaagatgccgccaacaactttgcccgtggccattataccat

SEQ ID NO: 49869 - DNA, 321 bp, Glycine max
  Clone ID: LIB3107-052-Q1-K1-C2
acccacgcgtccggcacgcgtgagaagacgcctgaacggggtgaagacgatcgaacgcttatcttgaactaggggccgtgcggatctttcaccaatcagaccttgttcaatgaacgcaataaaaataatggctgatatttcttacccacactttacgccaaacctatgactatataaggaggagtccttcgaacacttgtttacatctggagcattctctcgcccattccatcattctatcgaatttgtatgaatgaataccatgaaggtttgcaaatactaccttccgtgatctcactgttgaccgtaatgctttggaca

SEQ ID NO: 49870 - DNA, 325 bp, Glycine max
  Clone ID: LIB3107-052-Q1-K1-C4
ggtcacaagaaaaaaaaaaaacatgactgagtgggctttctgaaacaagaagaatgagttatctagtaacctcttctctatcttcttccacttctgtttctccattttttctcaccctttatacttctcctacttcatcttcttctccccttacctcctcaggatcctgtctttcctctcccctttgttcatcaccacaactcttctccttgtggcccttctcactttcactcccaacaatcttgatcaggaaaagggtggttctgagctttctgagtccaaatggggcaatttgctttctggtttgcaaatcttttctaagcat

SEQ ID NO: 49871 - DNA, 169 bp, Glycine max
  Clone ID: LIB3107-052-Q1-K1-C6
aagaatattaattcttatgatcccaaggggagatgggaggctcatgactttaacaccatccctcttatataattaaatattaaattataggttgattattttttaacgcaaactataggagtccataataaagcgagtgttccctagaaatatacgatgtttatggact

SEQ ID NO: 49872 - DNA, 385 bp, Glycine max
  Clone ID: LIB3107-052-Q1-K1-C8
gacaccaacacatccattcattgtctgaatgttggcaatgtcttcctctttctccatccatttcttcctcctcctctcaatagcccttttctcagtttgttgcttagcagcatctcaagctcccaccaccaaatcacacccctatatccttcccattaagaaagaccccgcaacaaatttgtactacacttcaactggcattggaactcctaagcacaactttgatttagtcattgatctttctggtgaaaacttattgtacgattgtgacactcattacaacttatcatcctacaaacctatagcttgtggctcaaaacaatgccccgaaattggatgtggtggttgccatggccccttcaaaccaagttgcacaaacaataca

SEQ ID NO: 49873 - DNA, 447 bp, Glycine max
  unsure (1)..(447): unsure at all n locations
  Clone ID: LIB3107-052-Q1-K1-D1
gggcagtctcaagaaaaggaaagatccgtcacccatctttgtgtggtagcgcgaaacacatnnctgaaagttctcagtgtattgtnncgtggcaagccgtattgtgtgatgaatcnaacctcactgtgtgagaatcgaagagtaaaaccacctcacttcacgcgcgctatcnatcggccaacgacgggaaagcgtttgggcttcagagcanccaacttccctcagttcaaaacctgaggaaataactgccatcaataatgactttaatgagcctggatcacttgctccaactggattgtatatcggtggcaccaaatacatggtcatccagggtgagcctggtgctgtcattcgagggaagaagggtcctgttggtgttactgtgaagaagaccggtgcgggcttgatcattggcatttatgatgaaccaatgactccaggtcaatg

SEQ ID NO: 49874 - DNA, 435 bp, Glycine max
  Clone ID: LIB3107-052-Q1-K1-D10
agaagactacagaaggggatcattcaaaagtttttgaaatgttgtgaccccttcttctatttctatgcctaactcttcctttgtttttgttgtccttcttcaaataccgtaaaaccttcaagaatccaccacttccaccaggtcctagaggccttcccataatagggaatcttcatcaactagatagtccttctcttcatgagcagctatggcatctctcaaagaaatatggtcctttattttcccttcaatttggattaaggccagccatagttgtttcctctccaaaattggccaaagaggtaatgaaagacaatgaccttgagtgctgtggacgacctaaattactatgccaacagaaactaacctataatgggttagacatgggattttcctcatacgatagttattggagagaaatcagaaaaatttgtg

SEQ ID NO: 49875 - DNA, 417 bp, Glycine max
  Clone ID: LIB3107-052-Q1-K1-D12
gaatggcggcatatgtagctgtaatgcaacgggcgagcaaatctaacagatcgggttatgaatcccttttgaaagtatataaggaagctgacctaagtcaggagaaaacgcgtattctgggctctctggcatcttcacgtgatccagatctaattcttgaagctctaaacttcatgttgtcatctgaggttcgtagtcaggatgctgtttttggacttgctgttacccgggaaggacgagatgtagcttgggcatggcttaaggaaaattgggaacacctcataaaaacatatggttcaggatttttgataactcggtttgtcggtgcagttgtctcaccgtttgcttcctttgagaaggccaaggaggtagaagaattctttgctacccacgctatgccatccattgctagaacgt

SEQ ID NO: 49876 - DNA, 387 bp, Glycine max
  Clone ID: LIB3107-052-Q1-K1-D2
ccatagaaacctataatcgtacttcttgggagatgtctggtatatagttgtttaagagtatagagtagttagaaaagttatgagaagtagttaggatgcttagtgtgaaaccttaagagaatgtaaagtcgttagtagggcgttgctttgctgaacataaaggggttcaagagtgaatgttcttgtgaaaggtagatcacctaaagaattagtgatgatagttgtatgattagtgaggtagatattagttctctctaccttaattcgagcaaagtctgagggtgcttcgaggaatactttaatacctatcgtgacctctgcgtgtacttggtcatgtcttaacatgatggatgcccctgtgtgttcggtggatgcatggacaggatc

SEQ ID NO: 49877 - DNA, 413 bp, Glycine max
  unsure (1)..(413): unsure at all n locations
  Clone ID: LIB3107-052-Q1-K1-D3
tcaccttattagtccaggcggaaacaaatttttccttgtgtggtattatccaggtttccttgacatagtcaacaaatattggccaaggtgcacaagctacttcgaacttcttcaggcattcatcaaactgttgttctgaaggacaatcagtcagagatccccaacaatccatgacataattccaagcatttttttgcgcattagtgatttatatttagccttcacattcttgtttatgtgaaagatgcacaacanatttgtgcattcagggaatacatctttcactgcattcatcaatgcttggtctctgtcagtgacaataactccagggagggcatcacgctttaaaaaaaggcctcgaaagcgttgtaaagcccataccaaattattaacgcgttcaccctccacatatg

SEQ ID NO: 49878 - DNA, 405 bp, Glycine max
  Clone ID: LIB3107-052-Q1-K1-D4
cagtctctaaaacagataaccaacaagctttctggtatgctggtgaacgcgaagtccatcacaacgacatatttatattcggcatagataacaccgcactctctaatatcccatactatgaaaaacatggatatggggtggaggaatttaatgaaaccttatatgatgaatgggttaacaagggcgacgcaccggcattgccagagactcttaaaaattacaacacgctgttgtctcttggcttcaagattgtattcttgtcacgaagatatcttgacaaaatggccggaacaaaaacaaacctaaagaaagctggcttccacacatgggagcagttaattctcaaggatacacatcttatcacttcaaatgcactttcatacaaaatagcaatgagagagaatc

SEQ ID NO: 49879 - DNA, 398 bp, Glycine max
  Clone ID: LIB3107-052-Q1-K1-D5
ggttgcatcccaaatggaatgggttcagacatgtccatagcgttgaacaaaactaacagcagcaaaatgagcacacccttgttccatgaattcaaaaagcaagcttctttcttcttcaaggagaaaattaagactgctagattagctctaacagatgtcacccctgcagaactgatgacagaagaggcaacaagtggaaatccatgggccccagatgccagaactctcagatcaatttcaagggatgcttttgagctagaccattattggaggattgtggagattctgcataaaaagtttcttaaatttgaaaagaagaattggaagatctcttacaattccctgatcgtgcttgagcacttgttgactcatggaccagagagtgttgcggaggaatt

SEQ ID NO: 49880 - DNA, 321 bp, Glycine max
  Clone ID: LIB3107-052-Q1-K1-D6
gatatcatttacaagggcaagggctctctctctctggctctctctctctagacttagattttgtgaatggctgaagtggaagagggacaggtcatctgcgtccacaccgttgatgagtggaagctgcaactccagaatgcaaaagactccaaaaaactgattgtggtggattgtactgcttcctggcgtggtccatgccgttttatggccccagttcttgcagagattgcaaaaaaaactcctgaattgatcttcctcaaaatggatgtggatgaagtgaggcctgttgctgaagaatatttcattgaggccatgccaacc

SEQ ID NO: 49881 - DNA, 228 bp, Glycine max
  Clone ID: LIB3107-052-Q1-K1-D7
ttgggctttcctcaaatttcattttgttcctggcccaggcaccaaccccgttgtccggagccaccattttgcgctccggcaatgttcttcccggtggccatcgtaccttaaacccaccacacttcaaagtcatgggtattccatgggacgacgtcgttgtgatccagcaagggaaggatcacaatgagccctgcatcgtcaccgtcaattgccccgacaaggctggtc

SEQ ID NO: 49882 - DNA, 389 bp, Glycine max
  Clone ID: LIB3107-052-Q1-K1-D8
gagtatactggaaaaaataacactatcaatatcaatattatgtaagttatactccaattttattccacattttcatgattgttttgttattaggaatatagaggtcatttaactaagcatttattgaataaatacttatcctacaagtatttataggttgtttctataatagaagagaaaacgagactaaatagttttcatataagttgcaagctattttttacgagttataatcatgagtttattattaaaaattaattgaaagcaatttatgaacctatcataacttatttttatgagttcgctcaaataattatataaatacttactttatgaaataaaattaaataaactgtaaataaattctttaaaaagcaccaatgatacca

SEQ ID NO: 49883 - DNA, 424 bp, Glycine max
  Clone ID: LIB3107-052-Q1-K1-E12
gattatcaaaaccaaaaatctcacatactttgggcgccaatatcctgccatcacaaagtctctctctctctctcctctttaggctatagctaccccactgtgatattttgctggtgaaaccacatatctaccagaagcagcctctccttttataggagaaaaaggctagagaactatccttttctttttttccttctctctcttctttttctctttctcttgaaaccctaatacttgatccttttcacaatctgtagtggtaatccaaaacccaggacaaagaaagaggcaagagacatagcaaagacttctctcaccctctcaagtcccaaacagagtaacttgtattcacaacctctctctgcaccaagtatattaaatgcatgatcatccgtggtctgtttattcccttgtttacgtaaca

SEQ ID NO: 49884 - DNA, 272 bp, Glycine max
  Clone ID: LIB3107-052-Q1-K1-E2
gaggagacacaaacaaccacaagtgttcttcctctgtacacaaactctattcctagttcagagtaccgtccttttaccttgcgtacacatgaaagaagaaaaaaaatggaaggagttgggtattgtgggagtttctttcagaggtgcaagccttacatagccatggtttctctgcaattcggatttgcgggtatgaacataatcactaaggttttcctcaaccaggggatgagccactatgtgcttgtggtttatagacacgcctttgctac

SEQ ID NO: 49885 - DNA, 332 bp, Glycine max
  Clone ID: LIB3107-052-Q1-K1-E4
gaacaaaaataacgtgacactgctaagagagtgagagaaattggcggcggcggtggcggcggcataaagtggaagtcgtaaggatcaatggcagtttcagggaggcgcaacggcatgaacgacgacgaagaggaattagacgacaacgcccttttcgaagaacaaggtgccgtcgaagactacgccgatacccctgctcaccttcgcgacctctccgtcgccgctcagctaagcgacgtccacgccctccgtatcgctcttgataacttgactggtagtattgatgaaccagtggaggatggggatactgctcttcatttgacatgtctata

SEQ ID NO: 49886 - DNA, 104 bp, Glycine max
  Clone ID: LIB3107-052-Q1-K1-E5
agtctacatttatggggagtgagtactgacaatggactttgaagggttaccaaaaggttgcattcctaaaatactctctcgcactacgccacagacctttgtaa

SEQ ID NO: 49887 - DNA, 416 bp, Glycine max
  Clone ID: LIB3107-052-Q1-K1-E6
ggggaacgagttgcgtacacctcacatgctcctgctcctcctcctctacctctgcataagcgccctcgcatcacattctttgcagactcaacaagcattcatttcatttcactcactcactcttcgtttcgtttctctttctcactctagatctgtgtttctctctccaaccttcgtttcaccacacttccatcacttgtcgagtgtagaaatggctccaccaattgagaccccaaccaaggtttccagctatcagcactccccaaaccctcgtcttaacgagaggattctttcatccatttccaggaaacatgttgctgctcacccgtggcatgatcttgagataggacctgaagctccaaagatcttcaactgtgtggttgaaattgggaaaggaagtaaggtgaaatatgaac

SEQ ID NO: 49888 - DNA, 355 bp, Glycine max
  unsure (1)..(355): unsure at all n locations
  Clone ID: LIB3107-052-Q1-K1-E7
tgtgacatacatacatcatcaaaaaacacacgcgacacgctcctatacacacacgttgtctcgcacacattccttcattccgcaacagcaaacatctttaccttaaacgacaacaatggccgatgccgaggatattcaacccctcgtttgcgataatggaaccggaatggtcaacgctggttttgccggacatgatgcgcctagggcggtgttccccagcattgtggagcgtccacgtcacacgggagtgatggttgggatggggcacaaagattcttatgttggggacgaggctcaatccaagaagggtattttgactctcaaatacccaanttaacatggaattgtgagtaat

SEQ ID NO: 49889 - DNA, 230 bp, Glycine max
  Clone ID: LIB3107-052-Q1-K1-F1
cttcagatgatgtgccatcttggaaagacgtgcaagctaattctgagaggcctcgcagctcttctcgtaatggcagttcttcaaaaaagcctgtcttgtctagcagccggccaagctcttctggtgagcctagtgaaagccgttctagccgactggtcttaagcagtggccgactatcaacaactcagagacttcaacctggttttgaatccaaacatctttatcacggg

SEQ ID NO: 49890 - DNA, 272 bp, Glycine max
  Clone ID: LIB3107-052-Q1-K1-F10
aaccccacagaccttcctattttttcactgactacattttcgaatcaaaaatattctgtttccataagctactactctccttcaatatatacccttaattacataaagaactaagatcttattcaatactatctctatcaaaaccccactcttgatctattatagtctcacccatataacaaatttgactgtacaatatctcctcttcccgcataaaatactttttgccataaaatatcttaatcaatcaatcacacatacaaccttaaatt

SEQ ID NO: 49891 - DNA, 410 bp, Glycine max
  Clone ID: LIB3107-052-Q1-K1-F12
gactctctctctgtctctcgaaaagggtcagtttgcagataaaatctgaatcatgtcgtggcaagcgtatgtcgacgatcaccttctgtgtgacatcgaaggtaaccacctcactcacgctgctatcatcggccaagacggcagcgtttgggctcagagtaccgacttccctcagttcaaacctgaggagataactgccatcatgaatgactttaatgagcctggatcacttgctccaactggattgtatctcggtggcaccaaatatatggtcatccagggtgaacccggtgctgtcattcgagggaagaagggtcctggtggtgttactgtgaagaagaccggtgcggccttgatcattggcatttatgatgaaccaatgactccaggtcaatgcaacatggtagttg

SEQ ID NO: 49892 - DNA, 369 bp, Glycine max
  Clone ID: LIB3107-052-Q1-K1-F2
ggcttctggtcaagttcagtccagtgcccgcacggcatcgcaaatttttctttttcttctcccctttagatgagtaacgccacagactccgccggcaaaatcccaccggagacgaggcccgccgagagcgacagtggtggtgatagtgggccccggcccacgatcaagatcaatgttatgcacggatcctctcaacacgagttccacctcccggcccaatcaacttttggggatgttaagaaactccttgtcaataaaactggtttagagcctgtagagcaacgacttctcttcagagggatagaaaagggtgataacctacatttgcacctttgaagtgtaaaggataagtcaaagcttttgcttttg

SEQ ID NO: 49893 - DNA, 361 bp, Glycine max
  unsure (1)..(361): unsure at all n locations
  Clone ID: LIB3107-052-Q1-K1-F3
gaccccttttattgaaatcctgagcttgcattgtgctcactcatctcttacaacgaaaccctcttcatcttgttctatctgtgacgagcatcatggcctcaagagcagngttattgttggctatgtgtgtgcttccggcgatggttgtggccattcgcccagcaaagaaccctttttgcgtgaagggtcgtgtctactgtgacccttgccgtgctggttttgagacctcagctaccacctacattgctggtgctgagattatttttccatgcaagaaccaggttagcaacgaggttgtgtacacgaaaaaagggttcaccggctcaacccgagcctacacaatggacctggattaagatca

SEQ ID NO: 49894 - DNA, 412 bp, Glycine max
  Clone ID: LIB3107-052-Q1-K1-F4
ggttctagtgtgtgattgtttgttgttgtaactcgttcttcttcttttgttgttctgtgtttgtgtttgttttttctctcacctgaaaatgtcttgctgcggtggtaactgtggttgcggaagctcctgcaagtgcggcaacggctgcggaggctgcaagatgtacccagacttgagctacactgagtcaaccaccaccgagaccttggtcatgggagtggcacctgttaaggctcaatttgagggtgctgaaatgggtgtgcccgctgagaacgatggctgcaaatgtggaccaaactgctcctgcaacccctgcacttgcaagtgaagtgttgggagagcaagcttcaagcagagatagcccttaattaggaataatgataaactattaatgtgtagctaaaaacttatg

SEQ ID NO: 49895 - DNA, 384 bp, Glycine max
  Clone ID: LIB3107-052-Q1-K1-F5
gaagttaggtaaggcacgcgaactaatgcaacaggagtagagagtaaagtcaaagtggtgcttttcccaaacttgaagagtccaaattttgttaatagtaagcgatgatgggaaagctaaaggtgtatgcggatcgaatgtcccagccttctcgagcagttctcatattctgcaggtttaacggaattgactttgaggagattaaagtagacatttccaaacgccaccacctttctgctgaatttagagaagtaaaccctctgcagaaagttccggctatagttcatggaagcttcaatctctccgagagccacgcaatccttgtctatcttgcttctgctttccctggaattgctgaccattggtatccaagtgatctttaca

SEQ ID NO: 49896 - DNA, 369 bp, Glycine max
  unsure (1)..(369): unsure at all n locations
  Clone ID: LIB3107-052-Q1-K1-F7
ggctacaacaaatgcctcagcaacctatgctatggtgtgaggtgtttgatgtctggggtatagatttcatgggtccttttcctatctcttttggntatgtttacattctccttgcagttgactatgtttcaaaatggttggaagccaagcccactagaactaatgatgctaaagttgtcgcatactttgtcaggtctaatctgttttgcaggtttggagtacctaaagcaattgctagtgatcaaggaacccattttttgcacaagacaatgcatttccttgttaaaaagtacggggtggttcacaaggtattcacaccataccacccccataccaatgggtaagcaaaaatttctaaccgagaaatca

SEQ ID NO: 49897 - DNA, 407 bp, Glycine max
  Clone ID: LIB3107-052-Q1-K1-F8
gacttaaagaagtgaaggcatcgttagcagttgtgtagattcaacctcaatttgcagagttacgttctaatatatttacacaagactgataagagaaaatgtctctgattccaagtttcttcggtggccgaaggagcagtgttttcgaccctttctccctcgatgtgtgggaccccttcaaggattttccatttcccagttctctttctgctgaaaattcagcgtttgtgagcacacgagtggattggaaggagacaccagaagcacacgtgttcaaggctgatattccagggctgaagaaggaagaagtgaagctggagattcaagatggcagagttcttcagataagcggagagaggaatgttgaaaaagaagacaagaatgatacgtggcatcgcgtggagcga

SEQ ID NO: 49898 - DNA, 316 bp, Glycine max
  Clone ID: LIB3107-052-Q1-K1-F9
cttcatgcaacctttggacaatgctatttttaaattgttttatgctccctccactactgagtctgttgttaaattgtgccaaaaaaacaaatcaaacagtggtctcaatatctctttgtgctctgatgcatttcattgaagttggttgacaccaattcaatgaaagttactgttacacacttcttaaaaacataatagatgcttcttatactacacaacctctataactgcttaatgtgttaagttttgaaaacctgaggaaccatcgaaacattattattgatatttaatgcaactcatgtgacagcggaaccac

SEQ ID NO: 49899 - DNA, 298 bp, Glycine max
  unsure (1)..(298): unsure at all n locations
  Clone ID: LIB3107-052-Q1-K1-G1
accacatctgaatcaatgccttcagatttgaattgatcatcagaaaagaggtcttcaggctctggaagaaggatttcatcaaatgctttctgcaccagctcaattgcatccttattttcctcatccatatcctgatctgtatcacaatcatcacgacaagagttgttcacttcattagttgcaaagaaatcttgctctcttttttctttgtccttccatcaaatngctgcttattttcacctgtgttactcaatacagcatgcttatacatcaactgccacattttgacaaattttta

SEQ ID NO: 49900 - DNA, 424 bp, Glycine max
  Clone ID: LIB3107-052-Q1-K1-G10
gaacacaaccaagagcttgtttttgagaagtctggtactattacacaagaatgaagagctccctctttcaccttctattcgtgattcttttaggactctcccattttgcatgccttaaagcagtcccagttacaagaactgaaagccttatgcaagaacccaaagttcttcatcatgcactggataatatccacaaccacaaggttatcactgggataaaatggcagcaggaggagccaatttttgctgagaggatggacttggaactccatgactacccaccatctgctgctaatggtcgtcacactccaaaaccaccatatccataatatgtgtacaaatgcttcgtgtttattgttattaccctatgaagcataatataatattataatgtggacgcagttatattagtaattaacatatt

SEQ ID NO: 49901 - DNA, 408 bp, Glycine max
  Clone ID: LIB3107-052-Q1-K1-G2
caatggtgaagatgttgcaatcgaaaatctcggagaggcctgaaaatgatccagtaaaggctcaattgatggaacaacagttccagcaggaggtcacaatgttggccacactaaagcattctaacatagttcgtttcattggtgcatgccgcaagccaatggtatggtgcattgtaactgagtatgccaaaggtggttcagttcgacaatttttaatgaagcgtcaaaaccgctcagttcccctcaaattggctgtcaaacaagctttggatgttgcaagggggatggcttatgttcatggccttggatatatccacagggacttgaaatctgataatcttttgatttttggtgacaagtcaattaaaattgctgacttttgagttgcccgtattgaggtgcaaactg

SEQ ID NO: 49902 - DNA, 217 bp, Glycine max
  unsure (1)..(217): unsure at all n locations
  Clone ID: LIB3107-052-Q1-K1-G3
aactggagcgaccacacaaggggggtcctttttgatatgtnnnnttaatattttattctaaggcttagtgtgccatgcgcaagaatgatgataagaacaatattgttccaaccaacgcgtaacactaaactaaagagggttgtacaaaacaataaacttgtcaacaaatagtcacacgatggttatccaaaatttgccattgatgaagtaagtgaat

SEQ ID NO: 49903 - DNA, 419 bp, Glycine max
  Clone ID: LIB3107-052-Q1-K1-G4
gcacgcacttagcaatcaatcaaaacattcccagtaacaataatatacacatcttcaattaagctccttctcctatagccatggctctttctaagcttataattgcttcccttcttgcgtcgcttctccttcttcatttcgttgatgctgatcaatcggcacatgcacaaacgcaggggtctcttcttcagcagatagattgtaacggagcatgtgctgcgaggtgccgtttatcatctcgtccacgcctctgccaaagagcttgtggaacttgttgtagacgctgtaactgcgtgccacctggcactgctggaaaccaagaagtgtgtccctgctatgcaagtttgactactcatggtggcaaacgcaagtgcccttagacttaattggaccactatcctatgcatgcctttgattta

SEQ ID NO: 49904 - DNA, 394 bp, Glycine max
  unsure (1)..(394): unsure at all n locations
  Clone ID: LIB3107-052-Q1-K1-G5
ggagcaacaaaaaaggtaaatgcttatcatttacagaatatggagtcccagacttccacacgagagaaggagtctctcaatctcagggaagtcccagaagcagataaaaccttgggcttggacatggccaagggcagcgcattctgcaagatgggtgaaggctggacatgcatcataactaanactgaggggcctgatgctggcaaagttttcgttaaatgtggtgaaaattgcacctgtaccattgagggcgaaacagtgtcccaagaattgaatttgccacctgatgttgtgagcaacagtggcagtggaacattctgcaagtgtggtgaaaggtggagttgtgtcattttcaagactgaaggccctgatgcatgctctggcatgggctttg

SEQ ID NO: 49905 - DNA, 411 bp, Glycine max
  Clone ID: LIB3107-052-Q1-K1-G8
ggctcaagtgtttttgttgatcgagataactagggacagtgtgatgaaaatgaaggtccttgttttcttctttgctacaatttaggtagcatggcaatgccatgcgtacgatatgttccctctccgaatgaacactggctatggtgcccgtactccggaggtgaaatgcacaagttggaggcttgctgtggaagcacacaacatctttggctttgagaccattcctgaagagtgcgttgaagcaacaaaggaatacattcatggcgaacaatatagatcagactccaaaacagttaaccaacaagcttacttttatgccatagacctcgaaatccatcccaaagacacatttgtgttcagtatagatggcaccgtactctttaatattccatactacaaaaaacatggata

SEQ ID NO: 49906 - DNA, 325 bp, Glycine max
  unsure (1)..(325): unsure at all n locations
  Clone ID: LIB3107-052-Q1-K1-H1
cggttaaaccatatnaantatatgcatgctgtcgtgtggagaaaagaacaaatcggcgtctttgatatttcactaaaataatactttagtaagtcagcaaaaataagttgatgcatgtgttgagtccatcctgttctttttcttttgtacaagtaggaatcgtgcttttccctgtgtacaatatgcaatagattccttgaaaagtggttgaataataattaaatcatgtatacccctctattactttgttattgctttatacagtgacaattctattatatatcaactattgcttttacaataaaaaattttaaatgaaatattg

SEQ ID NO: 49907 - DNA, 392 bp, Glycine max
  Clone ID: LIB3107-052-Q1-K1-H12
tacgggggcgagatgacgacataatgggacggctaaaatctaaatatcatcaaagtactcaaattagcatggctgtcatggttgcattcttgaatttgatcatcatcttttcagtagtctctacaacaggcaagtcactgagcttatactactattcaaaaacatgccctaatgtggagttcattgttgccaatgcagtaaaagatgccactgctagggacaaaactgttccagcagcaattctgcgaatgcacttccatgattgtttcgttcgggggtgtgatgcctctgtgctgctaaattcaaaaggaaacaacaaatcagaaaaagacgggccaccatatgtttctttgcatgcattctatgtcattgatgcagcaaagaatgcacta

SEQ ID NO: 49908 - DNA, 409 bp, Glycine max
  Clone ID: LIB3107-052-Q1-K1-H2
ggcacaagtgagtttgttgatcgagataactagggacagtgtgatgaaaatgaaggtccttgttttcttcgttgctacaattttggtagcatggcaatgccatgcgtacgatatgttccctctccgaatgaacactggctatggtgcccgtactccggaggtgaaatgcgcaagttggaggcttgctgtggaagcacacaacatctttggctttgagaccattcctgaagagtgcgttgaagcaacaaaagaatacatccatggcgaacaatatagatcagactccaaaacagttaaccaacaagcttacttttatgccagagacctcgaagtccatcccaaggacacatttgtgttcagtatagatggcaccgtactctctaatattccatactacaaaaaacatgga

SEQ ID NO: 49909 - DNA, 72 bp, Glycine max
  Clone ID: LIB3107-052-Q1-K1-H3
gagacctcaggtcaagcggggctacccgctgagtttaagcataataataagcggggaaaaaaaaataaaaat

SEQ ID NO: 49910 - DNA, 341 bp, Glycine max
  Clone ID: LIB3107-052-Q1-K1-H4
gtagcgggtatagtttagtggtaaaagtgcgattcgttccatggacccctaaatagttaagggatcccccgtttgattcatattccgatcaaaaactttatttcttacttaaagggaatcctttataccctcaatgaatgatttgcggtataatatacattatcgtaatttgtatacaagaagaatcaattctaaattgacaacttgagttctaaaattatgaaacataagtttttggaattggatctataatccgaatttttttgagtatgacgaaaggatctatggagagatatatagaaagtttctttctaatcgtaactaaaattttcatttttttg

SEQ ID NO: 49911 - DNA, 223 bp, Glycine max
  Clone ID: LIB3107-052-Q1-K1-H5
aacacttgtaagaacagcagaaatatgactttctatgggatcaactctatctgggacttagcgctaattattatgagacctgtgtattttccactatataaatcataacctaaaaaaaaaacacctccacttttacacaatccaaactcacattcactcactatcgaattgataattataaattattataacccaaaaccaatgcactgtccttgtttattca

SEQ ID NO: 49912 - DNA, 337 bp, Glycine max
  Clone ID: LIB3107-052-Q1-K1-H6
tcgccaaaacactacaacaggtggcacaagagactttatggatcgagatcactagagccagtgtgaggaaaatgaaggaccttatactttttttttctacaactataataccacagaaatgccatgcgtacaaaatactacctattcgaatgaacactatctatggaccccggactccggaggtgaaatacgcaagatggatgcttgctgtagaagaacacaacatgtttcgctttgaaaccattcccgaaaagtgcgttgaagcaacagacgactacatgcatgaccaacaatatagatcagactccaaaacagtttaccaacatgcttactttta

SEQ ID NO: 49913 - DNA, 298 bp, Glycine max
  Clone ID: LIB3107-052-Q1-K1-H8
gatgtgacgggttttcctttgaagttttaactcgtctcgagttgtgcacatatatataaatacaacacaagctctcctggttccaacaatttatttctttgctttgggaaatggagaaggagaaagagaaagaatctaagctgaagaacaagatcttcaaaatactgccaaaagcagctgctgcagcagtgagcatgacattccaaaacccttccttcagcccaagcatggatcacaagttcaaacaccattgcggcaaaaggttcttctctggccctatgattcccgttgaagccat

SEQ ID NO: 49914 - DNA, 379 bp, Glycine max
  Clone ID: LIB3107-053-Q1-K1-A3
ccaaccggccgtttttttttttttttttttttggggggggggggtaaataaaaacctttggctaataataaaataaacctcttttttccattttaataattgaattcaaatgattttctttattaaaattaacattcattatttttaattaattttaaaaatgaaaaatcattaaagttttataaaaattacgtttttaaattataaacatatcttctcttttgtctaaattaaaatattaaagttactaatactttatgtaacgatgtgtgaagatattatgtcaatatctgaagcatggatcatgcacttgatatgtcaatatcgacattctctattaaaccagtcttacttttttcatacgtacagttcttaaaac

SEQ ID NO: 49915 - DNA, 376 bp, Glycine max
  Clone ID: LIB3107-053-Q1-K1-A4
ggcccacggctaaaagctaaaaataatcgaagtactcaaattagcatggctgtcacggttgcattcttgaatttgatcatcatgttttcagtagtctctacaagcaagtcactgagcttaaactactattcaaaaacatgccctgatgtggaatgcattgttgccaaggcagtgaaggatgccactgctagggacaaaactgttccagctgcacttctgcgaatgcacttccatgactgtttcgttcgggggtgtgatgcctctgtgctgctaaattcaaaaggaagcaacaaagcagaaaaagatgggccaccaaatgtttctttgcatgcattctatgtcattgatgcaacgaagaaagcactagaagcttcat

SEQ ID NO: 49916 - DNA, 289 bp, Glycine max
  Clone ID: LIB3107-053-Q1-K1-B1
acgagttgttacagagaacgttgagagagagtatcttgaatacgatgatcctaaaacggtatttagaggagaggcttgtgatgatcttggaggaactttttgtgagaccgagtatcagaagggtgtctactagagaaaaaagaaaacccttttttattaccatggctactgcgtttttaatgtctaccagtaatgattgtagtggtgaatgtacataggtataagctatggatctcagtttatattgagtttcattttcgctataaactttacaataattatattcccc

SEQ ID NO: 49917 - DNA, 414 bp, Glycine max
  Clone ID: LIB3107-053-Q1-K1-B3
aggggagagtgaaccaggatctatttcaagcaaagagggaggctcctctggtggtagctaaattcttactcggattcgttctcacaatccagtttgtaccatcaaaatccgattttcaagtgcttatctataccaagataacatcgaaatggagtgtgcaataaaacaagatgttactgaactaattggaaacactccaatggtgtatctgaacaaagttgtggaaggttgtgtggcccgcattgctgccaagttggaatcaatggaaccctgctcaagtgtcaaagacaggttagcattaagtatgatcaaggatgctgaggacaagggactgattacaccaggaaagactgtgcttgttgagactactagtggaaacactggcattggattggcattcattgcagcacttaa

SEQ ID NO: 49918 - DNA, 275 bp, Glycine max
  unsure (1)..(275): unsure at all n locations
  Clone ID: LIB3107-053-Q1-K1-C3
aggagttgaaaaagcgtgaaaagaaggatcttttagcagcacatgttgctgagcangcaaagaaggaggctctcaaggatgatcacgatgctttcactgtggtcattggaagccgggcttcggtgcttgatggaggagatgctgatgctaatgtcaaagatataacagtagaaaatttctccgtgtctgcacggggtaaagaacttctgaaaaatgcaacggtgaagatatctcatggaaagaggtattgtttggttgggcccaacggaaagggc

SEQ ID NO: 49919 - DNA, 392 bp, Glycine max
  Clone ID: LIB3107-053-Q1-K1-D3
gggttggctgaccctcagaaaattcaccctgtgcacgaggatgttgaggcacaaaaccacccttcagcaccattggtgccaaggagcatgtccaaatctgatgcaggtgatccacaacgagtagtagtacaacaacaacaacaaaacattcctctgaagcaaaccaagccaccaccgaagaaaagaagaagctgctgctgcaggttcttctgttggctaataagcatattgctgattctgatagtggcaattggcatcactgttggaatactctaccttgtcttcaggccaaagcttccaaagtactcggtggacgaacttagagtcacacactttgatcttgcagacaacaacagcttatcagtgacattcaacttgacaataaccgccag

SEQ ID NO: 49920 - DNA, 485 bp, Glycine max
  Clone ID: LIB3107-053-Q1-K1-E3
tgaattcccggggcggcccaagccgtccgaccggttgcaaaaagagccagaagggttcctttcaaaaattaaccatcaccccgaccatcaccggagcccattaagaatatcagtaagaagagcgtatgttctagaaaattcatataaccagcttcgcatgagatcaactcaagatttgaagggaaggttgactgttcatttccaaggggaagaaggtatcgatgctggtgggcttacaagggaatggtaccaactgttgtctagagttatttttgacaaaggagcgctacttttcactacagtaggcaatgaatcaacatttcagccaaaccctaactctgtttaccaaacagaacacctatcttatttcaaatttgttggtagagtggttggaaaagctttatttgatggtcagctcttggatgtccattttactcggtcattctacaagcacatcctatgggccaaagttacatatcatgata

SEQ ID NO: 49921 - DNA, 313 bp, Glycine max
  Clone ID: LIB3107-053-Q1-K1-G2
ttgcaagttcttcatcggtgttgccattcaggttctacacgtagaagagtgggaaacgaatttaatatcacccctcttcttggtgatacaaggtacatctatagttacaaggagagtaatgctgcaagcaataactcatcttggtgatacaaggtacattttctagttacaaggagagtaatgctgtacgtaaaaaagaaagttgtacggtgtgtaaattatatgcgtgaaagaataattaaatgtcagtactacagaaaatgaattagaaataatgttgtagaattttcattggagaaatcatggatatgat

SEQ ID NO: 49922 - DNA, 255 bp, Glycine max
  Clone ID: LIB3107-053-Q1-K1-H1
attttcgatttgatctgatggttttggacttctaattagtctaagatggacaaggttacgaagttggcaacagaaaagggtgtggtggttttcaccaagagctcttgttgcctctgctatgcagtcaacattctgttccaagagcttggagtgatccctgtggttcatgaaattgacaaagaccctgagggcaaggaaatagagaaagctataacaaggttggggtgtcctacacctgttcctgcagtcttcatc

SEQ ID NO: 49923 - DNA, 312 bp, Glycine max
  Clone ID: LIB3107-053-Q1-K1-H12
catttggggtcccttctctctttctctggctcgatattttccaaccaaaataattattaaaaccaaacgtagctaggcaccactgctaggaatggcaagtgagatatttcttgcccttctgatcacaacctttgtggttgcagcctctgctggtaacttcaaccaagactttgagataacatggggtgatggtcgtgccaaaatcctcaatagtggggaacttctcaccttgtccctagacaagaccttctgctcttggatttcgttctaggaatgagtacttgtttggaaaaattgacatgcaactaaaac

SEQ ID NO: 49924 - DNA, 399 bp, Glycine max
  Clone ID: LIB3107-053-Q1-K1-H2
gtccgaccggctgcaagaagccgccagagggggttacctattccattaaagggctggacctttaaaatgggattattatttctggggacccttaataatccagggtttaaaagttcccttggactttgtttagatatcataatatttctagtcaatcaaatatggcttgtggaaggaaaccaaccacagtctagtttcaaggcctcctatgaaacagaaaatagattccctacttttctctgacattgcatgagtgaaccttggtgcaacggtaaggttgctgccttgtgacctagtgctcatggattcaaatcctacagacagcctctcagcttacgagggtggagctgagtatatctaccctcctgagacctcactagtagtgagcctcgtgttggg

SEQ ID NO: 49925 - DNA, 110 bp, Glycine max
  Clone ID: LIB3107-053-Q1-K1-H6
cctttcctcccgctcccactaaaatcccgaacccatttccagaaccttaacaccaacactgcgttcatcatcgcaaaagttgttgtgtagttagttttgaggggttaaaa

SEQ ID NO: 49926 - DNA, 389 bp, Glycine max
  Clone ID: LIB3107-054-Q1-K1-A10
cccacgcgtccgaagacgcgtgggcgagaatacaacacagggggtgctatcactattcagggctgagacacaaccacacaggtggaagaatattaatggtctaaaatttcttctcttcaacctgactcatctactgttctctctctctctctggaactcaccaatttttgggaaaagaactaatctgaaccgtccatctctctcatttctgatatcacacggcagatgttcgaccagacctttacatctttttatgatgctttttcacacgagccaaggcatcataatgatagtattcatttttatcgtcctgctgccgcatgtagagtacaatgttggtccatcgtatgaatcattgctactgaacaaattcaaatgccacactcaca

SEQ ID NO: 49927 - DNA, 203 bp, Glycine max
  unsure (1)..(203): unsure at all n locations
  Clone ID: LIB3107-054-Q1-K1-A11
atctgagtcnaatgctccttaagtttaaggggtaagtcctcaacgaaaagccataactcttaaccgttcggatcccatatacgcatgggctacttcactcctttctttatttcacgttttctcgggaaaattagttgcaaatagatttttgcccataaacggaccattaaattgatcaactcgcttaaaccccgtatttttta

SEQ ID NO: 49928 - DNA, 438 bp, Glycine max
  Clone ID: LIB3107-054-Q1-K1-A12
aaaaaacaacaaaaggtgcttctactttaagaccacacaaggttcattcggagaaggactattgtaacttgtccacatgtataaatgcatattatctaatatgaaaatagacacagaacacccattatttctaactaattagttcaaaacacataagccaacactattacttataactcttaagcataatgcaaatttctattctcatatcatttataatgaacgagatctatatactccgattaatccatattactgcatctttaccatatatacacttgttccaaactattgagctacagattattaaaattatatgcatcatcttctttaggatgtgggcttaaaacaatatataatgaggattattttatatctacgtaaactcaatattatcatattaccttcattttattgagtacgatacacctttgtttt

SEQ ID NO: 49929 - DNA, 310 bp, Glycine max
  Clone ID: LIB3107-054-Q1-K1-A2
gatcgctcgagagacatgcgagttccactatagatcggtccatgcatgttcagcactccttgtccatgatggaactgacgatggcagttccgatcacctacgagatgctagaacgttgatgcattttactgcagtcaaagatattggggtagggatacgcgtaccggaccgcgccttaataggttgtttgagattctctaaggcactacttcttgcatcaatagggcaaagatactgaaaggatacccacgcttcaatcactttttatgtaagaaatcatttactggacggaaaaaaggatacaagctta

SEQ ID NO: 49930 - DNA, 340 bp, Glycine max
  Clone ID: LIB3107-054-Q1-K1-A4
cgacggcaacgaaagacgacagattttggtattacccccgtgccttctcaatggggacatgatctttgtgttcctgtctcttccatcatctactttctattcgccgcacccctaaaccattatctgaaaaagagagggtccttctattgtaatcaatctccttaccacctactcttgcgtccctgagtggcaacataaccgcttttaaaacattttcaacgaccaactgatcacaaccactccgccttctttcgtattaactaacacccaccttcttatcttttgattcttccaacaaataaaaaagtcatgaacaccatcaacaacatcttttattcca

SEQ ID NO: 49931 - DNA, 308 bp, Glycine max
  Clone ID: LIB3107-054-Q1-K1-A5
gagagacgtgcgttttggattctatttgtgcggtggattgagatttagatgcaaataaatatataccctgtcttgtgccgcgtcccctttaagccaattgcaatcaaacaaagtttcggttattggcgttcatttttcttcctccatctttctctaaaacattaattgaactctgcattccttaaattttaccaacgagctatttcctacacagacaaagctatggcaaagactgagttacaagtgactgttgagagcaagaacaaagaactaaagcacctgtgatttgtgaggattgctgctattca

SEQ ID NO: 49932 - DNA, 411 bp, Glycine max
  Clone ID: LIB3107-054-Q1-K1-A6
ggaatcacagtggtgccttatcgctgtggttatgatcttcttcttcctctttcttagatctcttctttctctacgccgcacgccgaaaccatggccggaaaaggagagggtcctgctatcggaatcgatctcggaaccacctactcttgcgtcggtgtgtggcaacatgaccgcgttgaaatcatcgccaacgaccaagggaacagaaccacgccgtcttacgtcggattcactgacaccgagcgtctcatcggtgatgcggccaagaatcaagtcgccatgaaccccatcaacaccgtcttcgatgccaagaggttgattggtcgtagattcagtgattcctctgttcagagtgatatcaaattgtggcctttcaaggtcattcctggtgctgctgacaagccaatgatc

SEQ ID NO: 49933 - DNA, 401 bp, Glycine max
  Clone ID: LIB3107-054-Q1-K1-A7
gaaaaaaggggttccccgacttggatagggaacgatgcgagtgacctacctaatcttattgtagaaattttcaggatcaatgattagaccatgcaaactagaaatgctttttcttgtataaaggaagggattactcgatccatttccatatcgatcatgatatatataataattcgagcacccatttcaaacgcatatccaatttttgcacagcagggttatgaaaatccccgagaagcaaccggtcgtattgtctgtgccaattgccatttagctaataagcccgtggatattgaggttccacaagcggtacttcctgatactgtatttgaagcagttgttcgaattccttatgatatgcaagtgaaacaagttcttgctaatggtaaaaagggagcttt

SEQ ID NO: 49934 - DNA, 171 bp, Glycine max
  Clone ID: LIB3107-054-Q1-K1-A8
gaatatcgcagtgatgaggatgaggatgacaagtgtgcttgttctgagcaggatagggattacaagattttgggaaaagctaaagaaaaaacagtgaaagtgttggaggaagaggatgaagttcccaaatcaggattgctttctttgccttttatgaggcgtggattggag

SEQ ID NO: 49935 - DNA, 376 bp, Glycine max
  Clone ID: LIB3107-054-Q1-K1-A9
attcaaagtggagcgcagactgtcttatttgggggagatctttcttatgctgatgggtaccagtacaatgatgttggtttacggtgggatacatggggacgatttgttgaaaggagtacagcatatcatccatggttatggtctgctggaaatcacgaaatagactatatgccttacatgggagaagttgttcctttcaaaaactatctttaccgatatactactccctacttggcctccaatagctccagtcccctctggtatgcagttaggcgtgcgtctgctcatataattgtgctatccagctattcaccatttgtgaaatacactcctcaatacatgtggcttaaagaagagctgaagcgagttgagaggg

SEQ ID NO: 49936 - DNA, 176 bp, Glycine max
  Clone ID: LIB3107-054-Q1-K1-B1
caggcattagtccagctcgacaacatcaacatactgagaataatctttgatatgttcgcagatagggtttgctatacaataagtattgcagctgcaacgttttcaacgctgtcactggtaacaacaccgctcctttttatgatgcaggttttgctgcttatgatttctagggcatt

SEQ ID NO: 49937 - DNA, 410 bp, Glycine max
  Clone ID: LIB3107-054-Q1-K1-B10
atctcatgcatctaaatttgtcatactctcagatcaggggtgacattccctccacaatctctcacttgtccaaattacggtcacttcatctcggtgactaccagagcatgatgagagttgatccatacacatggacaaaactcattcaaaacgcaactaatttaagagagctttctttagatggcttggacatgtcttctatcggagagagctctttgtcattgctaaccaatctgtcttcctctctcatctctcttactctctcattcaccgaattgcaagggaatctatcgagtgacatcctctctttacccaatcttcaacaactagatttgagttttaataaagacctgggaggtgaacttccaaagtccaactggagtactccactaacctactttgatctcgct

SEQ ID NO: 49938 - DNA, 392 bp, Glycine max
  unsure (1)..(392): unsure at all n locations
  Clone ID: LIB3107-054-Q1-K1-B12
ttagaatgggtttttggctggtggacaatcggaagttttagcaacactaaatcttaatgcaatgaaccaaagtcccaacccatggcatgtttctttctcatatgcacgggctcttcagaacaccgtgctaaagacatggcaaggacaccctgagaatgtggaagctgctcaaaagtcccttttggtgcgtgctaaagcaaactccttggctcaacttggaagatactctgctgagggtgagagtgaagaggccaagaagggaatgtttgtcaagggctatacctactaaaactttaggagtcttttggttcaattttgttttagctatttatcatcattccttcttagcagngaaatccaaagggacttagatgttgatttttatatttttt

SEQ ID NO: 49939 - DNA, 412 bp, Glycine max
  Clone ID: LIB3107-054-Q1-K1-B2
gaagagtgaaactgccaaaaagtgaggccgccccaaaagcaaagtgagattataggaaacaaaaatttctttgcttaatactagttcctcctttctcctagcctggtagtcttttgaaaattctttatcttgatcacataattttcattttgaacttgaagaaagttttagtgtattttttttccttaaagaaacagaacatatcctgttctttctttctctgtttgcatttttgttcacttctttctttctttcttattatctagttaagcatgacaacatttatggacatgtacaacactactagtagcatcatgacaccggatttcttagaccagtgtagtgatcaagagctgatgaaagcacttgagccttttatgaaaagtgattcatctaacactactttctcatc

SEQ ID NO: 49940 - DNA, 356 bp, Glycine max
  Clone ID: LIB3107-054-Q1-K1-B3
agataagttgtttgtgtttggtgtaggtggaaatttggaatcggtttgtggggatgagaaggatttgctgtgaaacttggtaatcgtgacaacagagttaatgacaatacaaaatttcaacattgcatgaggtcctgtgactgtgttgcaagcttgcagttggttgggagtgttgtctgttatttaatttatctattttaatgttgtttgcttgggtgcagttgcaaatgaaaggttaagaagtttaatctccgattaattaaccgccttttacattgacctactgacgacaaataggttcacagcttaaattgtggattgaatcgttgaacgaagcttttccagacgcctaattt

SEQ ID NO: 49941 - DNA, 103 bp, Glycine max
  Clone ID: LIB3107-054-Q1-K1-B4
gggtggcgagtgagcgagcgatggaagaagaagattttgatttcgagaagaaggtttcgataaaggaatcgatgtcgatgtcgatgtcgacagagcttgatcc

SEQ ID NO: 49942 - DNA, 409 bp, Glycine max
  Clone ID: LIB3107-054-Q1-K1-B5
ggtgtgagttcattaacatatacaaggtctctgtgttgtgttgagtgcttgtgttaattgtgttggtgttgtaggaaatttaagtgaagagagaatgatgatgaagtctgctatgtgtgcattggtgcttgtggcactggttgtggatgaagaggggcccatggctgaggctgaggggactcgcaacccaacacagttgactgcttgtgttccggcaattaattcaagttctgcaccttcgagtgcttgttgacagaagctgaaggagcaaaagccatgcttgtgtggctacctcaaaaaccctagcttgaagcagtatgttaactatcctaatgccaaaaaaaaccgtagttcttgtggtattgactatccaacttgttaagcacctcttatatatatatataaaatg

SEQ ID NO: 49943 - DNA, 405 bp, Glycine max
  Clone ID: LIB3107-054-Q1-K1-B6
cattagatgctggggaatgggtttgggcctagggtttagagttgtttctctttctcctggtttcagaaaattgtctgttgatcacattgtttcagcttacaaaagaaccggtagaagagccatatttcttgattatgatggtactatcgtaccaaaatcttccataaataagacccccagccctgaagtcatatccgtgctaaatgatatgtgtaatgatcctaaaaatactgtgttcattgtgagtggaaggggaagagattctttaagtaagtggtttacttcatgcaaaatgattggacttgcagccgaacatggatactttctaaggtggagtaaagattctgaatgggaaaccagtcccttgtctcctgatcttgattggaagaagattgtggaacctgt

SEQ ID NO: 49944 - DNA, 437 bp, Glycine max
  Clone ID: LIB3107-054-Q1-K1-B7
ctgcgaagacgacagaagggtatatataccagcaaaaatcagaacaattgaacgtggaggcacaaagaagagaattgtcaagttggaggttctaaagcacgatgacatattcccgttagaaaccccattcatcaaaagtgacatcttttcctatgagaaaatcacgtcgaatgagtcttagagggaaaactggattttgtctcagtaatttcccaattcctgtaaagaaacataaacaaacagtatccatgtttgatatggcgctacaatgaagcctagctttatttggaagtgacaaatttagagtctaagatttgcacaaatgtaacaaaagtcacacaccatattggaattatattccttctcaagtgactctatgtgcttatcctcatccgtcccttaaggaagaaaaatgtcgagtgtgatataatatatga

SEQ ID NO: 49945 - DNA, 400 bp, Glycine max
  Clone ID: LIB3107-054-Q1-K1-B8
gatctggtgttgttgtggactcatcattttcgggttccagtactcaaaagagtggatcttctagttcttcattaacatctagtgatgctttcgaaacaactgaaatcacttcacaacagtctaaggtgtccagtgattcatcagttttgagttcattaccaagtttatctgctgcatctaccatgaagcctacatcagcttccttgttacttcctgcatctgctgtgagtgaagattccatttcagttctgcctaataatgaaggcggaaagaaggaatctcttagtaggtcaaattctttgaaggataaccagaagaaaatacagaagaaaggccaatcacagcatcaggttgctgtgcaatctccttctgtggttaatgtgcctttccaagctgttga

SEQ ID NO: 49946 - DNA, 397 bp, Glycine max
  unsure (1)..(397): unsure at all n locations
  Clone ID: LIB3107-054-Q1-K1-C10
ctttcatttaatccttacaaaatggaggtgttgaatggagtgctcatagagaaagtgaagaaagctggcatcatcactggggtgattgatgactttgatatgacattttcatggcattttgataaccggtgtaatgatggaattcactatggaagggctcctgcaaagatgaagtggcgagatggcaaaattggtcatcagtattttgtggatctcatgttagctcatgttctgctcaatgcactatgtgcaagatgaccttggagcttcagttggaagagaggaaacaatcagaaaagaaaaaacttgtctgcaaagtggatagggttggaaatgtangcattccctgtagaataatgcataccatagcangtgtttggataaaaaaaactatgga

SEQ ID NO: 49947 - DNA, 61 bp, Glycine max
  unsure (1)..(61): unsure at all n locations
  Clone ID: LIB3107-054-Q1-K1-C11
ggaannncngggncgaccgcacgccgtccgcccacgccgtccgcccacgcccgtccggaag

SEQ ID NO: 49948 - DNA, 438 bp, Glycine max
  unsure (1)..(438): unsure at all n locations
  Clone ID: LIB3107-054-Q1-K1-C12
gggggcgnncaggcgtncgaccactcctccggaagattacagattggcaaggggctgattcnagacgaagataggaaagcgcaagagagattgncacaacaagtctcttcatctgaatcatcagaagcctcacaacaacagtatataactattaggcaacaagtgcaagaaaatccaatgaagaagcctaagttggttattctttctagaagtggttcaagagctataactaatgagaatttgcttgtgaagatggcaaaggaaattgggtttttggtgcaagttttgaagcccgacagaacaacagaaatggcaaagatttatatgactctcaatgcaagtgatgtcatgattggtgttcatggagcggctatgacacattttctgttcctgagacctggttctgagtttattcaagtggttccttcttgtaccaca

SEQ ID NO: 49949 - DNA, 394 bp, Glycine max
  Clone ID: LIB3107-054-Q1-K1-C2
cataggatttagggatgaggcacgtcgtctagttcggacagagaggcttagaaccaaagatataacacagagagtgaaaatgaagaactactggcagggaggagtctgcttggcgtttgctgatgaggtattatgctggctgtatggaacagtcaaagaaggtgaagattatattttgcagtttgctccacctttcaaccgtttagagcttctgcaagcccagtcttgcccagatgtaattactagtcatctggagcttttctgaaaatttggagaccttaacagttattattatttaaacaattcaatatacgaaggggaatcaaccctggatttttcccctccgctttgatcagtccacgaattgtagtatagggcaacctctgtgagtgct

SEQ ID NO: 49950 - DNA, 300 bp, Glycine max
  Clone ID: LIB3107-054-Q1-K1-C3
gaaagcacgccttgtgcctctatctctcccattgggtcgggtctcaataccctatggatttgcgaaaagaaagcaaacatgcttgatcaggtccaacaccctacaatcatggacaaggatgctggccagctccatctccgttctggtgtttctggtattatgagtcattaaggagcctactgccaccccacaatgtaccaaataccctctttagggaattactcgtatgctgcattgcatgatcctgtgatgccctcattcaaagctactatggatatgtctgctgctgcaacaactacc

SEQ ID NO: 49951 - DNA, 56 bp, Glycine max
  Clone ID: LIB3107-054-Q1-K1-C5
cgttggggctgggacaatacgacaggggggtggggctgctataagacaacacaagg

SEQ ID NO: 49952 - DNA, 269 bp, Glycine max
  Clone ID: LIB3107-054-Q1-K1-C6
gaacaaagaaatatggtttacaccatctcgggaattcgatttccggtttttccttcgctgcacaacttgagctttcgtggcgatcgcagaactgcgtctcttcccgtttttctccgaaacaactccttctctcggaaaacccttgctgtaaaatcttcccatgattctgatttcttgtcttctgcgattgccgaatctgataaagtacttatttcctaagatcaagataaccttgcattcttgacagatcaacttgaaacttctgatat

SEQ ID NO: 49953 - DNA, 370 bp, Glycine max
  Clone ID: LIB3107-054-Q1-K1-C7
tccagcatcttgggatgttggcagcctttgatgacagctttccaggttctgctatccagtgatttgaggaaggccaccatccttgctttccagtattcatagttggttccatccagaattggtggtctgttcactggtcctccttctttctccatgttcatcagaatttatctccctagatctcactcagtgatttcgagtgcctgctctgataccaattgaaattctgataccaatgacagatgtcgtaccggatgtcacgacatcacgcttcagaacatgcagattatatttgacagtatgaacagattaaacaagtaaataacacaagagaattgttaacccagttcggtgcaacgtcacctacatc

SEQ ID NO: 49954 - DNA, 242 bp, Glycine max
  Clone ID: LIB3107-054-Q1-K1-C9
gattcaacatttcacacaactactacaagtactgccttacgatcaataccaacagcaactattccaagttatcaaaagcactaccatgatcagggtcgcaaggttgactagtatttctacgttgagaagcaaaccgactaatactgcaaccctgttcatgctgctagtgtcacctatttaaccaccataacttcttctttttgtttacagcgattacatttataatcaacattataccacca

SEQ ID NO: 49955 - DNA, 380 bp, Glycine max
  Clone ID: LIB3107-054-Q1-K1-D1
gttattttgatttaagtgtatttgtggtgaaaatggtaaagattgatatgggttttacgcttttatactactacaattcaaatttattttcttaattaatcttttttccctttgacacccaaacacagccgtagaccgtagtccgtggataccaagattttattaacaagaattgctaactccaataacacaaactggtccgatatttgacttatatttttttcgcttaaaaaaaatccaaaccaaactagatctataataatgtatatcaacttgagtttttctgattcgggtagaatcctatataactcggctgtgaacaattgtttatcatccctaacaaatgcgtaattaatgaaatgaatcttaaacaatttgaa

SEQ ID NO: 49956 - DNA, 323 bp, Glycine max
  Clone ID: LIB3107-054-Q1-K1-D10
gtcgatggttgcagtccgatctacgacaccaaggactggtctccaaccggtgatgtctacgctggcggtacgactggcttggctatctgggctgtgactctacttggtcttcttgctggtggtgcacttcttgtctacaacacaagtgctttggcgcaataaactttgcaaatcgatgttttaagctcaaacttagtccatgtaactatctaaaaatgaagaattattcatgaagtactttgtggatacgtgttccttctgttctataaatgtgtggatgtgaaaaatcttgtgttgttaatcatgcttcttcatcagagtct

SEQ ID NO: 49957 - DNA, 385 bp, Glycine max
  unsure (1)..(385): unsure at all n locations
  Clone ID: LIB3107-054-Q1-K1-D11
cgtgcgccacgcgtccgtccactcgtncgaacacttcanaatttacgacacctgggaaactcttgatcattgtggattttaacaagcaactataccaacaccgccaataactaaacatggcatacatatacctaccatatttaaaagaaaagctaaaccattgaccgaaaattttacccacttgttctcttcaattacattcactcagaaacaaaaaacatcccaaaataatattttacccttcattctaaaaaacccaagcttacttacacttacatgctatcaaatatctaatttctcgacacacctaaattcactacactgaccgtcaaataacaacgtctttactaacaaaacccttgcataacccaactaaacctccctg

SEQ ID NO: 49958 - DNA, 335 bp, Glycine max
  Clone ID: LIB3107-054-Q1-K1-D3
gaccgcacgcgtccgaacggacaaaaaaacacctcagagaggactttacattatagcgtattatttttttaatggacacagcgaaattttaaaatcgattagcttaaaacaaacaattaaaataattaattttaaactataaactattaatatgaaaaaaattcactttcttcacctttttagcagtattacgactttttcttaacactaaaatatattcattaatttaaatctacatgaacattatttttcttattgtttaatctttttaaataaccattaaatccatactatgaaatatactaaatactattttaacttttaatgatatattt

SEQ ID NO: 49959 - DNA, 376 bp, Glycine max
  Clone ID: LIB3107-054-Q1-K1-D4
ggtactctgatggcaaggcaagcgcttctcctcgttgtggtgtggctatgcttgttggcaagagttaaatcggacgaggattgcgtgtacacggtgtacgttcggacgggttcgatcatcaagggaggcaccgattcagtaattggtctgaagctatacgacaagtccggctacggcatatacatcaccaacctcgaggcatggggcgggttaatggatccgggtcacaactactacgagcggggcaacctcgacatattcagtggtagaggcccttgcttggaagcacccgtttgcgaggccaacctaacttctgacgggtcggggccccatcacggctggtacgttaattacgtcgaggtcaccaccacttggg

SEQ ID NO: 49960 - DNA, 409 bp, Glycine max
  unsure (1)..(409): unsure at all n locations
  Clone ID: LIB3107-054-Q1-K1-D5
gtcggcaccagcgaaacgctcttcgttatctggtctcagactccgcggcgtagatccgaggagttcgggaaatcctaactcatcatctcaactcaagtcatggctggacttgcacctgagggatcacagttcgatgctcgtcaatatgattctaaaatgagtgacttactttcatctgatggacaggacttcttcacatcctatgacgaggtttatgatagttttgacgctatgggtttgcaggaaaatcttctcaggggaatttacgcatatggttttgagaagccatctgccattcagcaagggggatagttcccttctgcaagggactngatgttattcagcaggctcagtctggaactgggaagacggctactttctgctctggtattctgcagcaacttgacta

SEQ ID NO: 49961 - DNA, 387 bp, Glycine max
  Clone ID: LIB3107-054-Q1-K1-D6
gaccattagagaaagtgccatcctgcgctttggggcctctagaaaaccaaattcattattataaccctaactcaaaaggccctttacccatagtttacatttcccgtgcacctaacaacgtaagaaatccatcattactacccccacctcttcctttccattcctctctccagaagtcctagccctacaatctcaaagacaaacccatcattcaaagtcataaccgatacctaaaatcctcattccaatcaaaaccaaccccaccatgcccacaaaattaagtcatcaaattaaagcaccgatgatcctcaatttgatccttgtgcttatatgtgtcactactccaatcaaaggtgagaaatcaaggaagcttgatgaggtcacaaa

SEQ ID NO: 49962 - DNA, 398 bp, Glycine max
  Clone ID: LIB3107-054-Q1-K1-D7
ctgttgctttattattcaccctggaatttggttgattttattatgttttgaaaaataaggaaagagatttatttgttagcttaattgttttaattggcgaatatgtttttcttttcccttttttgcacagagtgaagctttgttcttagggtaatggattcccttttttgtgatgctagtggatgatttgactgattagtgtttagtggaatgaagaaccagaactagtagtaggtagagggaatcacttttggttttggatgtaaacttagaaatgtgcagcactgcacagaattgatatttgatcgtgggtcaaattgtcaaaatgtgcaaagaatacaaaggcacaggtgatatcattccattttacgttttttaacgaagctgttagtttcaat

SEQ ID NO: 49963 - DNA, 402 bp, Glycine max
  Clone ID: LIB3107-054-Q1-K1-D9
gacttcaacacatccattcattgtcttaatgttggcaatgggttcctgtttctcgatccatttcttcctcctcctctcaatagcccttttctcagtttgttgcttagcagcatctcaagctcccaccaccaaatcacacccctatatccttcccattaagaaagaccccgcaacaaatttgtactacacttcagttggcattggaactcctaggcacaactttgatttagtcattgatctttctggtgaaaacttatggtacgattgcgacactcattacaactcatcatcctacagacctatagcttgtggctcaaagcaatgccccgaaattggatgtgttggttgcaatggccccttcaaaccaggttgcacaaacaatacatgccctgctaatgtaat

SEQ ID NO: 49964 - DNA, 254 bp, Glycine max
  Clone ID: LIB3107-054-Q1-K1-E1
gattgcatttaccggactatctcgttatcaagagaacggtaaattttgcggcgggacagtgccaactgactcacatcattccctctctctacagatctcacagccgacgctcacgacggtgccgccgttgcactcgccgctgatctctctataatctccccctcgccgatactgacaatgtaaagtccttaacgatggtcgaaatctctggtagtaagacttgtggcacttaagctctttctggaggttgatga

SEQ ID NO: 49965 - DNA, 374 bp, Glycine max
  Clone ID: LIB3107-054-Q1-K1-E10
ggactctttctggtctttcgaacaagcaccgcctccactaatggctatgagatcgtgggtgagtcgaggatccgtgactcgtttgatggactcagcaaatcgaggggctttcagtcgcttcttcagcgacaagggtcgcgttctcagcgaggaggaacaggccaaagaaaacgtctacatccagaaatgggagagggagaggttggagaaacagaagcaacaggctgagaagaccaaggcagacaagggcaaagatgctgctgctgataagaaacctgaaggttctcaaaagggctgagtttatccttcacacaaccccgcaaggtcactttgtgggaaataagcatgatggagaataaaacacattgaccctt

SEQ ID NO: 49966 - DNA, 445 bp, Glycine max
  Clone ID: LIB3107-054-Q1-K1-E11
gaccacgcgtccgcacaggcgtgcgagaacacatacgggcgatttatgattaacgaaaacgggaaattattgggtattggggacagatagtcttggttttttctcatctaataaaggtttgatgacttttagtaaaaaatagattatagaactttctaaacaaaattacaaaaaaaaacattaatcattccgaaggcttaccattcttcacatacatttataaatcatctctatatataaaaaacattattgtattgaattgaatgagcgtctttaagagctatttttttaacaaaattaaaacctttttagtaatttttctttcacgaaaacattttcataaatttatctaaccttttatctctttgaatctatcctttccatattggatttttaaattgaatctcaataattctaaaataaattttcgatagttaaaaaaata

SEQ ID NO: 49967 - DNA, 381 bp, Glycine max
  Clone ID: LIB3107-054-Q1-K1-E12
ggcattgtgaaatcaacagagaaacatttcactaatggagagagataagcataatattgagaaataatggagggttgtacttattgtgtgaagttgctatgccttgttgggtttgtggtgcttgtgagtactattgcaggggtggagagtgctggtgaatgtgggaaatctaccaccccagataatgaggcttataagcttgcaccatgtgcctcagcagcacaagatgagaatgctagtgtttctcagagttgctgtgctcacgtgaagaaaattgggcagaacccaagctgcctctgtgcagttctgctctccaacacagccaaaatggctggtgtcaaccctcaagttgctgtcaccatacccaagcgttgcaacctg

SEQ ID NO: 49968 - DNA, 371 bp, Glycine max
  Clone ID: LIB3107-054-Q1-K1-E2
atttcctaacctctctgagctcactcttgatcagtgtgagtatctaactcaagggccctggagcatttgtggaataaagtcactacaaaacttgagtgtcaccaactgccaccatttgagtcaactacctgttgaatttggcaaactaagatcactagagatcctccgtttatatgcttgtccagatctagaaacacttcctcctatcatgtgtgacatgaagagattgaagtatattgatatttctcaatgtgttaacctttcatgcttccctgaagagattggtagattagtatgcttagagaagattgacatgagggaatgccccatgattaagtatttaccaaagtctgcaatggcattgcaatctt

SEQ ID NO: 49969 - DNA, 256 bp, Glycine max
  Clone ID: LIB3107-054-Q1-K1-E3
gtttcttgtttttgctcatctcaataactatggccacgtgtatttatatgaagggccttgacttattcattgctacaattttctttacatgtcaattccatccgttcgatatcttccctttccgaatgatcactgactttggagtcctttctcccgagttgaaatgcgcatgtttgatgctatctattgaaacacacaacatttttgtcttttagaccatttctgaagagagcgtttaaatctacaaatgaataca

SEQ ID NO: 49970 - DNA, 143 bp, Glycine max
  Clone ID: LIB3107-054-Q1-K1-E4
gatagcagcatcatacaaagcattgaattcaaaaacttaagttcattccttgtgttttgctttcttcctcaaaaccaaacatgtctaacacatgcggcaactgcgactgcgcttacaagactagctgcaccaagggaaacagc

SEQ ID NO: 49971 - DNA, 370 bp, Glycine max
  unsure (1)..(370): unsure at all n locations
  Clone ID: LIB3107-054-Q1-K1-E5
accggnatggaatacccgggccgacgcacgcgtccgaccgcttgcaaaaaaccaccaaattgagttttgaggattacatccaatattatgagcccgtgttttctttacggtgcttatagcctctaccttaccatggatcctcatctatccaacaaaagctcccaaacacttcttacgcctaatattgccactattttctacacgaaatcaactacacttacctataatcataatccctactctatgcaaatacaattgatgacctttatgacacttcattgtacgctatcaacatccaatgacttatgctacactttctattgccgtatggagcctgttatatatgaacttacgtctacatcataataaa

SEQ ID NO: 49972 - DNA, 363 bp, Glycine max
  Clone ID: LIB3107-054-Q1-K1-E6
ttgggtgatctctgtgacatcaactccaagggaggtcgacaaagctgttgatgcatgcaagaatgttcttagaggcctgcatagcaataaaattactgagagggaattggacagggctaaacggacccttcttatgagacatgaagctgaaattaagtcaaatgcctactggttaggattattagctcatttacaagcttcttctgttccaaggaaggacatatcatgtatcaaggatctaacatttctatatgaagttgccactattgaggatatataccgtgcatatgaacagttgaaagtggatgaaaattctttatatttatgcatttgaattgctggtgctcatgctgcacaagaaat

SEQ ID NO: 49973 - DNA, 414 bp, Glycine max
  Clone ID: LIB3107-054-Q1-K1-E7
gatatttctcgcattccaattccagtttgttcatgcaccggggcaacgcaacagtgttataaatggggatctggtggttggcagtctgcatgttgcacaacaggcatgtcggtatatcctttgcctatgagtaccaagcggcgtggtgctaggattgctggaaggaaaatgagtataggagcatttaagaaagtgttagagaaactcgccgccgagggttataacttttctaatccgattgatttggggacttattgggcaaaacatggcaccaacaagtttgtcaccatcaggtagatctagtctgtggccatctggcctgttatgtcttttagcctgtttgtgatgtatatacatgcgtatttggccagagacagactttttagctggtttgtagtacagcaattttcaaat

SEQ ID NO: 49974 - DNA, 315 bp, Glycine max
  Clone ID: LIB3107-054-Q1-K1-E8
gatataaaagtgattaaagctaactgttaacttgctacagtagtaaactaaactgagttactcatatacactcttacaaaatggatgaagtcaagtaacctgcttatttggtctgtcttgtggtacatgcaaatgatgtttttggttcaatctttcattctgtttcctatctctggtttataggcggtgttacattcgttttattagaaaggtaaatgacaagaagggcatggagggtcaagaagagacaagaaaagcttttgattttatgcttaactatgttggtaagttgttttctgttgtcttgtttgcatt

SEQ ID NO: 49975 - DNA, 392 bp, Glycine max
  Clone ID: LIB3107-054-Q1-K1-E9
atagtccttgaagatctcttgaacagtggagggtttggaaggcatttagccaaaggctacagatcaaagagtgtagagaaactatgcatcagtttttaatgaataattaaaattggtcaacattatttatcacacaatattcataattaattatttgttttgataataaatagtaacattaaatattatattactatttattataataaccgttgataggatgtaattaaatttaatgaataattaaattgctcaacattatttagtacacaatattgatatttaaatattagttttataataaacaatagcattaaatattatattaatactttcgttcttttttataaaaaataaattatagtgtattttatattataaataagaataga

SEQ ID NO: 49976 - DNA, 413 bp, Glycine max
  Clone ID: LIB3107-054-Q1-K1-F1
ggtgtgagttcattaacatatacaaattctctgtgttgtgttgtgtacttgtgttaattgtgttgttgttgtaggaaatttaagtgaagagagaatgatgatgaagtctgctatgtgtgcattggtgcttgtggcactggttgtggttgaagtggggcccatggctgaggctgcggtgactcgcaacccaacacagttgactccttgtcttccggcaattaattcaggttctgcaccttcgagtgcttgttgccagaagctgaaggagcaaaagccatgcttctgtggctacctcaaaaaccctagcttgaagcagtatgttaactctcctaatgccaaaaaaaccgttagttcttgtggtattgcctatccaacttgttaagcacctcttatatatatatataaaatgtgtg

SEQ ID NO: 49977 - DNA, 398 bp, Glycine max
  Clone ID: LIB3107-054-Q1-K1-F10
gatagttgtgaggcgctattatccggagttgggtctctgatcgacagtcgtcgatacattggtcaaccaactgtgtgcatatgattttgcaaagagaaaatggaatttcagttgggatagatgaatactgataagagaaataacggtaaacaacagacatggatactggtggcaattctttaccatctgcacctgatggggtgaagagaaaggtgtgctatttttatgatccgtaagttgagaattactatcatgggcaaggtcacccaatgaaaccacatcgtatacggatgacacatgctcttctagcccattatggattgctacaacacatgcaggtccataagccattttctgctagagacaaggacctttgtcgatttcatgctgatgattat

SEQ ID NO: 49978 - DNA, 415 bp, Glycine max
  Clone ID: LIB3107-054-Q1-K1-F12
tgggctctatcgttaacgatcatatttcatctaccgtctccagtaacagcccataagtatcgtgtgcagaacttgtatgagggtcctcttgacgatcaatatgcttctgctatcagaaattgtgatcctgaaggtcctctgatgctctatgtctgcaagatgattccagcatctgataaggggagattttttgcctttggccgcatattctatggcaaggtttaaactcgcttgaacgtgacgattatcgcacctaattatgtccctcgggagaaaaaggatttgtatgttaaaagtgtgcaacgaactgtcatttggatggtaaagatgcaagaaactgcacatgatgtcccttgtcgtaatacactggctatggttggccttgaccagttcatcacaaaaaatgcaacattga

SEQ ID NO: 49979 - DNA, 294 bp, Glycine max
  Clone ID: LIB3107-054-Q1-K1-F2
attcctaaaaccatacaaaatataagtagttggctaagagtacataagacatcaaataattgtggaagcaatgtcttccaaggttattttgatgatgccaaagaatcaagagttaagcgcaaagattcaagaatcaagtttcaagtttcaagattcaagattaatcaagatcaagattcaagactcaaagattcaagaatcaagagaagacttaatcaagataagtattaaaaagtttttcaaaatattgagtagcacaagaagttttcacaaaatcatttaccaaagagtttt

SEQ ID NO: 49980 - DNA, 382 bp, Glycine max
  Clone ID: LIB3107-054-Q1-K1-F4
ggtctccgtgcatgccaagtgcgtgtcgaaagggagacgggtcccttcacattcccgccaaccgcacttataaaagacaacacattctctctactcttttgcgttccgttaacgacctctgcgatcgcaacacacagcgcaaaaccctaaaccgtcgagcgatggcgcgtactcctaaacctaaaggcggcccctccgctgcggactccgccgccactgccttcttcaaacccggtactgccgtcgaagtcagttccgaggacgacggattccggcgatcctggttcaccggcaccgtcatccgccgactcgcctacgagaggttcctagtcgaatacgacaacctcttggggacgacaaaaccacaaaaattgagagaagt

SEQ ID NO: 49981 - DNA, 278 bp, Glycine max
  Clone ID: LIB3107-054-Q1-K1-F6
cttgcaaaaaaacaacatatcgcatttcttacaacttataattacctgggaaaacgctccttttacatgggatactgcctcactcctaatcacccaaacaaatttttatcaatctacaacaccaataactacctccgtaatttcaaccatccaaatgaacattttcaaacacacactctatcaacttctccaatcattactcaaaacttcactaatcactacaactcctaatcttcaatatattaaaaaaatttttcccctattaacatttcacaaaa

SEQ ID NO: 49982 - DNA, 264 bp, Glycine max
  Clone ID: LIB3107-054-Q1-K1-F7
cttgcaaaaaaacaacaaattgcagttctagaaactgataatttctcatggaaacgcgtattttttatggggtagtgcccttactcagataaccttatcaatcacctaactaatacttacaacaaaccccactgtctttaatggaagctactacaagatcaaaaaccaacacagactctgccagatgctcccataattcatcaacacttattcaatcaccacctacaccttcctcatacgaatcacaccaattaatgcccaatc

SEQ ID NO: 49983 - DNA, 342 bp, Glycine max
  Clone ID: LIB3107-054-Q1-K1-F9
gatgatactcattttgttggggctaggttcattagctcagaataaggttaatttatagaatattctattgagtttgcagatcagaattcaattccatggtagatcataccaccatatataggacttgcttttcaaactggggtttcaatttctgagtgggtgtccagtggtttgcttaatctataagattttaatatgaattcagctcatttgatcccttatctaatctgcacaaacatgttgtcccacttttagctatagttttgttagctaagcaagaatagttctgctatgttcataaaaaaaaaaaaaaagaatagttcctgtggttgctcttgttta

SEQ ID NO: 49984 - DNA, 360 bp, Glycine max
  Clone ID: LIB3107-054-Q1-K1-G10
tgttgagagaaaaaaaagcaaagcggacaaagttcacgttcacattctgttctgctctcattcacactttcacgagcctatcacctactctcttcacctgcaactgcaacttccaacttcaacttcaaccactgcatgcttatctctgaaagaaaagaaaagaaaaagaaaatatctccatttggtttgcttggagaaagttgaaaccttttcacgagctcaagtttgttgttacttttttaacttgacggtctctttttttctacatcgactctcgtttttgtttgcaaagatactatctccgtcttaggatatttcaatgtgaaacgttatgttttttttgttgcatatttattattg

SEQ ID NO: 49985 - DNA, 446 bp, Glycine max
  unsure (1)..(446): unsure at all n locations
  Clone ID: LIB3107-054-Q1-K1-G2
cgcgtccgcccaggcgtncgtacacctccgaaaggacctcagattggggcccttcattgaattcatggtattaggggctagcgtaatggagctgagaataaattttgcaatcactgccacgggacataaaagaatcgcccaaaaacgcctacatctacacatgagcattacgcccttatctttcttagagagagctgcttctggccaccccaccataaactccctaattcacggatcttcgtcttacacgtggcaacatacttaccaccgttgtcgtcgattcacctccgctctttctaataattccattggtcttggaaaacactgtagcatttattgtacccaacattacagctacttatgaagcttacttttggataccaattgtaggggctgtgttaaacccttgttattttaaggttaattgcattcacggttgctttttt

SEQ ID NO: 49986 - DNA, 411 bp, Glycine max
  Clone ID: LIB3107-054-Q1-K1-G5
gattgcattgggaaatcaacagagaaacatttgactaattgagaggcataagcctaatattgagaaataatggagggttgtacttattgtgtgaagttgctatgccttgttgggtttgtggggcttgtgagtactattgcaggggtggagagtgctggtgaatgtgggaaatctaccaccccagataatgaggcttataagcttgcaccatgtgcctcagcagcacaagatgagaatgctagtgtttctcatagttgctgtgctcaggtgaagaaaattgggcagaacccaagctgcctctgtgcagttctgctctccaacacagccaaaatggctggtgtcaaccctcaagttgctgtcaccatccccaagcgttgcagcctggctaatcgccctgttggttacaagtgt

SEQ ID NO: 49987 - DNA, 274 bp, Glycine max
  Clone ID: LIB3107-054-Q1-K1-G6
ggacaagcagagctctaatattcgcgacaattgcaaaccctaatcagctcacagacctctctttctcgcgtctttggagttatggaggagcaattcatacttagagttccacctaatgtggcagagcggatagagcgtcttctgaatgaaaacaatgcttcttcatctgaagacaagtcactagatttgtcatttatagaggatggaagaagtggtacgtttatgattgggaatgaacaattcccagcttctctattggatcttccttgcgttg

SEQ ID NO: 49988 - DNA, 173 bp, Glycine max
  Clone ID: LIB3107-054-Q1-K1-G7
cgggccgaccgacgcgtccgaccggttgcaaaaaaacaccaaatgggcctttcgctattgaacaaaaatacaggcatttgtctatttaagataggatgccggcctatctacatatgctctctggatccatctaactgctgcacttaaaatggccttctctgtcactgccgctc

SEQ ID NO: 49989 - DNA, 424 bp, Glycine max
  unsure (1)..(424): unsure at all n locations
  Clone ID: LIB3107-054-Q1-K1-G9
aagattgattactacgagattgatgtggctaacagtcanaggaaaaaggaagaggagaaggcgctaaaggagttgaaagccaaggcgcaacagaagggaagctttggaggttctgggctcaagaaaagtggaaagaaataagggctctttatcatgattgtatgcattcaatattgagccctgtaattacagttgctaccatgataacttctcttattattgtggcctactttattgctaatgtgtactgaactgaggtatgtcgtgatgtaagctgcaataagttaattgtctgtagctttattgtatccccttcatggggttctgataattacatccttttagtagtgttgtggatttggcatagacttgttcaagtaaataatggcatgggttacannanaaaaaatttttatattatatt

SEQ ID NO: 49990 - DNA, 415 bp, Glycine max
  Clone ID: LIB3107-054-Q1-K1-H1
gggaaaaacaaaggaagtctaaagcaaattccaaatatgtgactgactgcaaagtatatggaattaaattcttaggccaactagcttgactaattttgtgaactttcaaatgattgactgtttttgagacttgattgagttcagagtgttaaaatcaccataatatgttgattttgtaattcagacacaccgtgtaagggctacaatacaaaacatagaagagggaaatcagaaactctgcgtgttcaatacataaatacaaaggaactgagggtaacaattggcacatggaatgttgctggaagagctccaagtaaggatcttgacattgaggactggctttgtaccaatgagccagcagatatttacattattggtttccaagaggttgtccccctgagtgctggaaatgttc

SEQ ID NO: 49991 - DNA, 406 bp, Glycine max
  unsure (1)..(406): unsure at all n locations
  Clone ID: LIB3107-054-Q1-K1-H10
gactcgatcttttaacttaactcagtgaatcctggcttctgatttcctaggaatgccctaagccaccgcancatcggttcctccacccaccgcgatggcgcacgtgccggcgagcgaagcgacggcgttctggacggacgagaagcacgtgcacttcctaaactccatggaagcctccttcgtccgcacaatgctccaaaacgaaggcaactcaaactcctccaccacgcgctactctctgcgcctcgaccgttatctccccgacacatccgaatccaccttggatttgaaaccaaactctcgctgccaccgcaccgtaaagcaccatgcaccctcagattcaatgggtccaacaaccagaagaacaaggatcaggacgagatcatctcagccctgcaattcggca

SEQ ID NO: 49992 - DNA, 166 bp, Glycine max
  Clone ID: LIB3107-054-Q1-K1-H3
ggctaaagcaactgccttaaaatgcatactccggataagttactggcggatctgggtaactaataaacttcttataacaactagctacacttatttactcaactgttaaattattgaatgttcttgatactgagctcgaatttagaatgtataactcaccataata

SEQ ID NO: 49993 - DNA, 355 bp, Glycine max
  Clone ID: LIB3107-054-Q1-K1-H4
ggataaagtttctttttcaataaaaaatcactgtggatgggttatgtgtcaatgggcttttcttatctcattaagaaaaaaaccattttagattcaaatcttaacgaataattcataaatgaatagttaacggctgcgaattgtctcgatatttttttttttttcaatagaaaaaaaaggggtattctcatatacttcatatatttatatatctatatctatttggcggcatggccgagtggtaaggcgggggactgcaaatcctttttccccagttcaaatccgggtgtcgcctaagcaataatacatttgaaatgaaatatttgtttacgtttttttataaaaacttttttcc

SEQ ID NO: 49994 - DNA, 409 bp, Glycine max
  Clone ID: LIB3107-054-Q1-K1-H5
gacgcacttagcaatcaatcaaaacattcccagggacaataatatacacatcttcaattaagctccttctcctatagccatggctctttctaagcttataattgcttcccttcttgcgtcgcttctccttcttcatttcgttgatgctgatcaatcggcacatgcacaaacgcaggggtctcttcttcagcagatagattgtaacggagcatgtgctgcgaggtgccgtttatcatctcgtccacgcctctgccaaagagcttgtggaacttgttgtagacgctgtaactgcgtgccacctgtcactgctggaaaccaagaagtgtgtccctgctatgcaagtttgactactcatggtggcaaacgcaagtgcccttagacttaattggaccactatcctatgcatgcc

SEQ ID NO: 49995 - DNA, 459 bp, Glycine max
  Clone ID: LIB3107-054-Q1-K1-H7
cggaattcccgggtcgaccgcacgcgtccgacgacagaagggatctctatgtatgatgttaactatgtagaagagattatattggtaggggcacatgatcacaaaccatgtaataatttctcactgtgtaggccttttcattttacacctcaaacgtaacttgtgcaaataatgtacaaaacaagagagctgcagtttgataagtctctagttagattctcgcttacttttagtttctcattttagccgggattgtgtaacatatatatatcgcttttgaacatattgtagaaaagatttctgctcaagttggctagctagtataatctctggattgcgtaatatatatgaaattcttctcattgttctaataattaaatgcaaccgcatactttgataaggaatgctatagtaataacttttctaacacactctcttcaatactccttacaattagtt

SEQ ID NO: 49996 - DNA, 218 bp, Glycine max
  Clone ID: LIB3107-054-Q1-K1-H8
ataaactctatcttggaattgtctcttatcattatgagagttgcgtatttcccacaaaaaaaaactatttaaaaatataaaaagcgcgccgctctatagtgatccaaacttacatacgcgttcattctacatgataattctttttttgtgccacctaaaattcaattcactgtcctttgttttacaactatcttgaatgagaaaacccttattgttac

SEQ ID NO: 49997 - DNA, 388 bp, Glycine max
  Clone ID: LIB3107-054-Q1-K1-H9
gtttttgaattacattatgagactgcgcaaagagttaaagaaactttacaacgttacaaagaacttcaagacattatatctatccttggcttggacgaattatccgaagaagatcgcttaaccgtagcaagagcacgaaaaattgagcgtttcttatcacaaccttttttcgtagcagaagtttttaccggttcgccggggaaatatgttagtctagcagaaacaattatagggtttaaattgattctttctggagaattagaatggtctcccgaacaagccttttattttttatgttatatcgatgaagctactgcgaaagctacgaacttagaaatggaaaagcaatttaagaaatgactttaaatttttttgacttacccccaat

SEQ ID NO: 49998 - DNA, 431 bp, Glycine max
  Clone ID: LIB3107-055-Q1-K1-A12
aattacatgataatttatgattacagataattgggaaccttggttctcgctagttttgaaattctttcaaagtttatacatttgatttacttcatgagatttttaatgtaattattgaattagtaaaattaaatatctataataaaatataaaagatatattattttactaaatttgttatcttttatattttgaaaagacttaagtatgctattacatctattccattaaataatgagatgccataaccaggttatgcaacagaaaaaaatgatttatttgtgacattatttcttaccggaaaaatatattaatagaaattaaaaaaatgtaatgtttgagtaaaattaaggattaaatgaaaaaaaattatactgaaaaaagtatttttgtcaagacgaaaattaaaattatctaatattttatgaatt

SEQ ID NO: 49999 - DNA, 400 bp, Glycine max
  unsure (1)..(400): unsure at all n locations
  Clone ID: LIB3107-055-Q1-K1-A5
cggagacnacaaaaggttaaattaacaatttaatacatacatggcaaacacgctanttcgtacttttaaacaggtaaccggcacactaacttttatgccataaacctctaagtccatcccaaggacacatttgggttcaatataaatggcaccgnactctctaatattccatactacaaaaaacatcgatattgggtggagaaatttaactcgaccttgtatgatgaatgtgttaacaatggcaattcacctgcactgcccgaaacttttaataattacaacaagctcgtttctattggctttaatataatattttttttttgaagaacacttgacaaacatgccgttacataaacaaacttaaataatgtttgtttccacacattgaaaaaataatttt

SEQ ID NO: 50000 - DNA, 430 bp, Glycine max
  Clone ID: LIB3107-055-Q1-K1-B10
gattccttcgcgaagcagccatggcctcatttgcgcgtggtgccgcatctctaacccgcattggtctctcctcttccaagacgccccttcaactcatccaccgccgtggcctcgccaatcaccatggccctcccaaagttgcctgctggaaagacccaatgagcccgtctaaatggaaggaagagcattttgtgattgtctctttaactggctgggggctactcatctatgggggattcaagttggccacaggaggcaagggcaagaaagaagaggttttggcaaaagcatcaactgaggcgtagataatatttacaattcaaagtgttcttggtaataatgcgagctcccagacttttccgagattttcagactcggtcttgtttcatggcaaacaaatcttttggctagttatccattaacatttgcg

SEQ ID NO: 50001 - DNA, 428 bp, Glycine max
  Clone ID: LIB3107-055-Q1-K1-B12
agctttacctaatgatcttgtaaagagaggaggggctgttagggacccatctgctccccatggagttcgtcttttgattgaggactatccttatgcttctgatgggctagagatatgggatgccatcaagtcctgggtgcaagaatatgtctcattctactacaagtcagatgaggaactccaaaaagaccctgaactccaagcttggtggaaagaacttgtagaggtgggtcatggtgatttgaaagataagccatggtggcaaaagatgcaaactcgtgaagagttggttgaagcttccgctatcctcatatggattgcttcagcccttcatgctgctgttaactttggacagtatccatatggaggtttaatcctaaacaggccaactattagcaggagattcatgcctgaaaaggggtcttctg

SEQ ID NO: 50002 - DNA, 406 bp, Glycine max
  Clone ID: LIB3107-055-Q1-K1-C9
aagacgacagaaggggtgtatctccattgtctatcgaatgtacgatgatcttggccagcatgggcttgtcgagggtttatcaccaagaatgggccttcaatgacagggttattggcacaactcttttttgtgcacgatgaatgcaaacaatgtgcatgcgagttttgaagtttataatgcccaaactgatctgatgaagtgtgtgttccaatgcaatataattctaaataactctggaggctttttttttgattagtttgatagctactgggataagagattgtcatggaatattccaaaaacaccatctttttaaaagttttatatgcttatcttatgctaagaataattaaataataaagaattattataatttccctttatttaatcacaattaatttacttt

SEQ ID NO: 50003 - DNA, 176 bp, Glycine max
  Clone ID: LIB3107-055-Q1-K1-D10
cttcacctttcttcatacaacacaatatggatgaccaaattggtattaataagttattccaatggcttctcaaggttaatccttacctcaccttattgttccttcatttaaactactcatagttttttatcatcactataatttctttcaatcatttcataattcatttcatactt

SEQ ID NO: 50004 - DNA, 354 bp, Glycine max
  unsure (1)..(354): unsure at all n locations
  Clone ID: LIB3107-055-Q1-K1-D12
tgctatattgttttcagagattgagtantanaaggctatttgtgcaatttttcctacactantgctcatatcaaagtatgtagtgtattttgcatttgttcaccaatctctataccttaggaatcataaaagctaatgtcagaatcactaattttttggcctctacttggtctcctgatcttgctatgtattatgtacagaggaaatttatcaattatttataaaatagggcgttattttgacataaaaaaaaataaatataaaaaatattttgcggccgctctataggatccaagcttacttacgcttgcattctacttcataactcttctatagttgcacctaaattcaatt

SEQ ID NO: 50005 - DNA, 288 bp, Glycine max
  Clone ID: LIB3107-055-Q1-K1-D9
taaaatcccaagcatttaaatggggagaaagatgagcgaggggataagctccatgagtttcaagctcaaggagttcttccagcctgggcccaatcatgccgacaagcttgtggaggacactacttccgaagccctggacgagccctaatgggccctcaatcttaatctctgcaacctcatcaacaccgacaagctcaactgcgtcgaactcttccgtggaatcaaaaaacggatcattctcaaaagccctaagtttcattacccttcccttttcctacttcaaaccct

SEQ ID NO: 50006 - DNA, 366 bp, Glycine max
  Clone ID: LIB3107-055-Q1-K1-E10
ggtgttttgggatttctggagtctcaggaaaatggtcctttgacaagacatggcattgttcctgatattgtcataaatccacatgcatttccctcacgacaaactcctgggcaactcctagaagctgctttaggaaaggggattgcttgtggtggcatactgagacaagctacgcctttctccacaccttcttgtgatgccattactgaacagcttcacagagctgggttttcaagatggggaaatgagaaggtatacaatggaaggactggtgagatggttcgatcactcatttttatgggaccaacattttaccaacgtctgcaccatatgtctgaagacaaaatgaaattccggaacactggt

SEQ ID NO: 50007 - DNA, 425 bp, Glycine max
  unsure (1)..(425): unsure at all n locations
  Clone ID: LIB3107-055-Q1-K1-E12
gaattccaaaaagtaaaaagaaaaatattatgaggcgctactgaactggaaaaaaaattaataataacaatactaatattccatctaaatattgtgcccattttcaaaaatatatctcctgtgaagcaacaaaattaaatttttttattggaaaatgttctcactttctaatgtatgtttaacgtgacactaatcagcaatactcattacattattattcattttcattttctagaagaagccaaaaaaagggaaatttatttctgttcattttattttaatttattttcattgttctgatacccgtgatactggtgttgtctttatgtcagcttcaccattcggaaaaattcaatggagtgccatatgggctgtttttgggacccaaggtcagttgcattttcgnttctgtaatcttgtattat

SEQ ID NO: 50008 - DNA, 428 bp, Glycine max
  Clone ID: LIB3107-055-Q1-K1-F10
ggttctagtgtgtgattgtttgttgttgtaactcgttcttgttcttttgttgttctgtgtttgtgtttgttttttctctcacctgaaaatgtcttgctgcggtggtaactgtggttgcggaagctcctgcaagtgcggcaacggctgcggaggctgcaagatgtacccagacttgagctacactgagtcaaccaccaccgagaccttggtcatgggagtggcacctgttaaggctcaatttgagggtgctgaaatgggtgtgcccgctgagaacgatggctgcaaatgtggaccaaactgctcctgcaacccctgcacttgcaagtgaggtgttgggagagcaagcttcaagcagagatagcccttaattaggaataatgataaactattaatgtgtaactaaaaacttatgtattatgtctgtgatg

SEQ ID NO: 50009 - DNA, 429 bp, Glycine max
  unsure (1)..(429): unsure at all n locations
  Clone ID: LIB3107-055-Q1-K1-F12
ttcataaggttacacagctattcctcttaaagtggcttcgtagtttccacactgcataccttangtcttccgaattcgaagttaatttgcaagatggctaaggaaaaggctcagatcaacattgtggtggttggtcatgtggaccctgaggaggcaaccaccattaacgagctgaagaagcctgttgtggagaaagaagctccacggcatgccatatgagggcatgcacgtacggcctctgaggggaaccagaaaattatgttaacaaaataatctggaaccctaatgtatcagtgtcatcatcagtgtgtagtttaagctaactttgctatggttacgttctttgagatgagagtcttgatgaacagtaccattctgatgtattgctttccttgaaagntaatgcatgcttcttatcctctgtctaaa

SEQ ID NO: 50010 - DNA, 348 bp, Glycine max
  Clone ID: LIB3107-055-Q1-K1-F2
ggcccgaaaaaccgggtcgaaccaacccgtccgaccggttgcaaaaaaacaacaaagggggattttgcgttagaactttaaacacccaaaggtgattctgtcttcgaagggcttcaccggattgcaaccatatctgggggaaaggtgagagagccaaaggaggaaaacgcgactctgtgcccacatgttatagatggtgaacacgtttttggagtcgctcgcatatatggctcaccaaatgacaccttcattcatgtgactgatatgtctgagagggaaacacttgtcctcctcactagcgggatgaagagttaagctgccagatatgaataatcatcatattctgct

SEQ ID NO: 50011 - DNA, 182 bp, Glycine max
  Clone ID: LIB3107-055-Q1-K1-G10
aacttacatacatcttttttccaaaattcccaacttacatctattccaaattatcaagtgattttattcttctacaataacaatccaatcattttgtaaacaatcccttctctgtattctacatctttactcatttaaaacttatattaatcttttatccacaaatcctatttttctctttt

SEQ ID NO: 50012 - DNA, 391 bp, Glycine max
  unsure (1)..(391): unsure at all n locations
  Clone ID: LIB3107-055-Q1-K1-G4
atatatcttattccgtttcattcgcgataacttctatctatataccttctactctttctctctnctcatcccactcgttacccatttccatttggtttgtttgttctcacgctcaagaagcgattctttgcctaagtcctcgatttttttatcggaatggtagatttgaggtgaaaaggttccatatttgttacgccttggatcttcttcatcaatggagtattttgcatcttgaagatcatggaagcggaatggagaacgaagaaagattattggagatgtcacttcaagaaaaaaatttgtcaaaaagaagttcactaccataggaagccatggataagagcttgaactttgtatcaatggagattcttgaaaaccgaacgtggatgta

SEQ ID NO: 50013 - DNA, 335 bp, Glycine max
  Clone ID: LIB3107-055-Q1-K1-G7
cgaccacgcgtgctacggatacaacaaaaaacagtttgggattttgcttctccttgaaaagcagcgatttttgttgaatttaaatgtgcacagggatcttctaatatataagagcagctaatttgctgataaactttctgaacaatctagtttgtcatgtctccaagttgatgactgagaggatgttgaaatatatgttgagactgttgggcttatttactgcaaagaaatgaaacatcatctaatgaaacaaagtgtttctcacattcttctaatactcaatgtaatagaattccttggcttcaactaatgtattcaatcatgtatggagtact

SEQ ID NO: 50014 - DNA, 282 bp, Glycine max
  Clone ID: LIB3107-055-Q1-K1-H10
tgtcagtcctaacgttattgcgcagctacccgctcaggttaatccgactcattttaaacaatgacaagaccatcccatcctctctaaaggatccaagcttactttcgcgcgctttcgacgatccaactttactatctcgtcccttaaattcaatttactttccatagtgtcacaacaattcaatctactaaaaccctttctacacccaacttaatcgcataaccctacatccacctttctcaagctgccttaataacaaacacgcccttacagatcgccctt

SEQ ID NO: 50015 - DNA, 401 bp, Glycine max
  Clone ID: LIB3107-055-Q1-K1-H12
caaatttaaaccatagacccttcctaagagttaatgatgactttgaatgacccaccccaacccaatattctatatcctcacctcatacaatatttttatacatctaaaaaatgaaaaaaagttcaagaaaatgatctctaatgaataacacccgacaatttcgattcatccacacttactacaccaattgatgaagaaaatgtttatatccttgaacatcaaacctctaataaatctaacctctattaaattaacactgttctctgaaccaaacgaaaccaatcctagtctaccttactttaattgaaacatatcactccatttttccatgttcatctttccaaaaaagacacacttacattcacattcttttataataccaccacaaaattttcataaat

SEQ ID NO: 50016 - DNA, 293 bp, Glycine max
  unsure (1)..(293): unsure at all n locations
  Clone ID: LIB3107-055-Q1-K1-H7
acggctgcaaaacaacaaaaatttataattgacaaaaaaaaaaacaaaaaccgaaaaatgtgaaattttaaaacacaanccccccncaaaaactaaatacaagacacaaaatgccgtttatacgcctttcaactttattgaataaactttcatcaaatgaaaccctttcttctatctataatgcaaccattgacgcattttaccctctttcaaacaatgctctaatgtatataacataaatagccatacctctaaccttacccaaatccatacacaaatatcttataaaaatt

SEQ ID NO: 50017 - DNA, 369 bp, Glycine max
  unsure (1)..(369): unsure at all n locations
  Clone ID: LIB3107-055-Q1-K1-H8
ggggttctttctcacgttcatattctacgcgtccctcgtctatgtcttaaacggcgatggcgatggcatttcnggtgcgaagccctgacctccgctctctctttcttctctctctcttgtccatcgcttccgccaatgtcttcttcgaagagcgtttcgatgacgggtgggaaaatcgatgggttaaatcagattgtaaaaaagatgataacgtggctggggagtggaaccacacctctggtcaatggaatggagacgctaatgacaaaggtattcaaaccagtgaggattacagattctatgctatttcagctgaataccctgaattcagcaacaagggtaagacactagtctttcaattttctgtta

SEQ ID NO: 50018 - DNA, 237 bp, Glycine max
  unsure (1)..(237): unsure at all n locations
  Clone ID: LIB3107-055-Q1-K1-H9
cagaaggtacatttattagatttagttgnttcctgtgagacacgtaccattgccctttttgtttcataaccattcttccncatgtttgatccatttccttggttttcaagaattgctctaagggaanggnttgaagaaccaggnaatggcaaagttggcggaatatgaattttattattgttaaatgaacggcntgaagaaactccattatatggtgttgncttttttttttttttt

SEQ ID NO: 50019 - DNA, 370 bp, Glycine max
  Clone ID: LIB3107-056-Q1-K1-A1
gacctttctcctaaaacatctcaatgggttcttcttctattacaacatcgcccgcaaccatgaccatggctgcgatcgtgctcctgttcacggtctttgccgtttcctccgccctagacatgtcgataatctcgtacgacagcgcccacgcggacaaggccgccacgttgcgcaccgaggaggagctgatgtccatgtacgagcagtggctcgtgaagcacgggaaggtgtacaacgcgctcggcgagaaggagaagcgcttccagatcttcaaggacaacctgcgattcatcgacgaccacaactccgcggaggaccgaacctacaagctcggactgaaaccgctcgctgatctcaccaacgaggaata

SEQ ID NO: 50020 - DNA, 314 bp, Glycine max
  Clone ID: LIB3107-056-Q1-K1-A11
cagggatggacgtttattcgtgattcgataactgaatcaagatcggaccgatcgcgccttctctctcttgtgtttatgccaaggctgacagtgtataagaggcaaggcaagaaacgcgagggagagcgtcattgtgaaggtataaagccaccgaatgtaacattaccttacatgaacccacaacctccttattttgaaaactactcactaactcaaagttatctcagtgtgcaccacattgcgttctgctgagttctcttactaacaagtatgaccgcgccaacacgtactatcatacatagtggcatgctgag

SEQ ID NO: 50021 - DNA, 227 bp, Glycine max
  Clone ID: LIB3107-056-Q1-K1-A12
ccaatgatgtttctggctattttaaatgcttctccaaagcggcctgcatgcagcggttctttaccgtggatgctacgtccacctcattttcaacagtgctatgatcaacaacaccaccatcaacatcctcagtctttgggaactcctcggcggtctgagtatgatccgtcatccaagcccatcaaaggggtttttggcccacgctcatccgatgttgctatggatct

SEQ ID NO: 50022 - DNA, 454 bp, Glycine max
  Clone ID: LIB3107-056-Q1-K1-A2
gagtgtgtgagttcattaacatatacaaattctctgtgttgtgttgtgtacttgtgttaattgtgttgttgttgtaggaaatttaagtgaagagagaatgatgatgaagtctgctatgtgtgcattggtgcttgtggcactggttgtggttgaagtggggcccatggctgaggctgcggtgacttgcaacccaacacagttgactccttgtcttccggcaattaattcaggttctgcaccttcgagtgcttgttgccagaagctgaaggagcaaaagccatgcttctgtggctacctcaaaaaccctagcttgaagcagtatgttaactctcctaatgccaaaaaaaccgttagttcttgtggtattgcctatccaacttgttaagcacctcttatatatatatataaaatgtgtgaacaatatatatatattgattaaaaaatatagtttaat

SEQ ID NO: 50023 - DNA, 426 bp, Glycine max
  Clone ID: LIB3107-056-Q1-K1-A4
gaaattgttgccggctccagcaacctctgccaatctttaatgggtgtgattgatttctacaacactggtgctttgtgctgggttaagtccaacgccaatctgaagcagcaagtgggtttggcaccaagacccatttgttcatttgaggggaataatcagaggaagtttgtggcaatggcttctaccgttcctgtggagcaagtcaacaatggccccctgcaggtgacaggtgactccttcatcagagagcatctgaggaagttggctccttatcagcccattttgccctttgaggttttatcagctcgccttggacgtaagcctgaggatatcgtgaagttagatgctaatgaaaatccttatggtccccctccagaggtcatggaagccctatgatcaatgcaattcccatatgtctatcctgac

SEQ ID NO: 50024 - DNA, 309 bp, Glycine max
  Clone ID: LIB3107-056-Q1-K1-A5
gtcgggagaaaactaacgacggaacgttttcattatagatggaaatcgattggtatatgggggtgttttcggatgtatacctccaatcaagcctaccgacatccaataacctttatcagacatagaaggactcaaagttgttcaaaaggaaaattgagggctaggccaataggtacaacacaattgggctaatgattttttcgctgtgaatgagatttagatgcaatttgttgagtctatgcgcaagcatatcacacatgaacttgaactacattaacaaccacaacgcccttatgaagatgtaagtta

SEQ ID NO: 50025 - DNA, 453 bp, Glycine max
  Clone ID: LIB3107-056-Q1-K1-A6
gaagacgacttaatgttgatcttagtaaagggtgctttggatgcgcgtggttctaagttaatgccagataaaaaagattttggttatagttttccttgcgatggcccgggacgaggcggtacttgcgatatttcggcttgggacgcattttatttggcagttttctggatgttaaataccattgggtgggttactttttattggcattggaaacacattacactatggcagggtaatgtttcacagtttaatgaatcttctacctatttgatgggatggctaagagattatctatggttgaactcttcacaacttatcaacggatataacccttttggtatgaatagtttatcagtctgggcatggatgttcttgttgggacatcctgttagggctactggaaatatgttcttaatatcctggcgcggatattgacaggaattgattgaaact

SEQ ID NO: 50026 - DNA, 53 bp, Glycine max; identical to SEQ ID NO: 13458
  Clone ID: LIB3107-056-Q1-K1-A7

SEQ ID NO: 50027 - DNA, 433 bp, Glycine max
  Clone ID: LIB3107-056-Q1-K1-A8
ggacgcgtgggcggacgcgtgggagtttactttagggggtgcgtcggagctgtctgtgcaaaggtgcgttgttcttcgcggcacacctcactcactgaacggtaagtatggcggacaaggctgttacaatccgaacccgaaagttcatgaccaacaggcttctttccaggaagcaatttgtcgatgatgtccttcatccagggagggcaaacgttttcaaggctgaacttaaggagaagctggctaagatgtatgaagtgaaagaccctaatactgtatttgtcttcaaattcctaacacattttggaggtggcaaattcactggatttggtttgatttatgatacagtggagaatgccaagaagtatgagcccaaatacatgcttatcacgaacggacttgacaccaaggttgaaaagtctacgaagcccat

SEQ ID NO: 50028 - DNA, 386 bp, Glycine max
  Clone ID: LIB3107-056-Q1-K1-A9
ggtcaatttcaaagctctctacataacggaaggggacaggggagtggggtttgattgcttttgtttgtgtgaggcaattacagagtgagaatcgatgggggagaaagggtgtgtgagcttagaaggaaagaaggtgatattggtcccttacatggaggcccacgtgcccaaatatcacgaatggatgaaggacccttctctccttcaagccactggctcagagcctctcaccctccaacaggagtacaccatgcaactctcctggtcccaagaccctaacaaagagacctttattgtattggacaggacttggttgtggcgatttctctcacgggaaccccccctgaagccatggtggagatgtaatatttcataatgattggatg

SEQ ID NO: 50029 - DNA, 336 bp, Glycine max
  Clone ID: LIB3107-056-Q1-K1-B1
tgacagagcaagaatgaatatgacaaatgccttgactaaaaaattcaaggatctcatgacagagttccagactcttagacaaagaatacaagacgaatatcgtgaggttgtggagagaagagttattacagttacgggaactaggccagatgatgagacaattgatcgcctgatagaaactggaaacagtgagcaaatcttccagagagcaattctagaagcaggccgaggacaggtagtaaacacagtagaagaaattaggagagacatgatgctgtaaaagaaattgagaaaaaacttcttgatttacaccagatttaccttgacatggcagtc

SEQ ID NO: 50030 - DNA, 318 bp, Glycine max
  Clone ID: LIB3107-056-Q1-K1-B10
tggggcgctagttttcatagctttttatattcccttcaccaaacaggacacgcacggggagacaaacagatcatagaagcattgatatcgtattatcggtactaatccaaccgctcgtgggaaacaggacaaagacgaacattattcacagcatacagaccctctaattcgaaagaaaggaaccattcgcatgtatagatggacccggagcagacataaatacgcgtgcagaagaagatttcgcacatgctgactcacaaaggcacaggcgctctggagcacccatacctattaaacgccctcaccaagtgcaggatt

SEQ ID NO: 50031 - DNA, 116 bp, Glycine max
  Clone ID: LIB3107-056-Q1-K1-B12
gaacattgggggggatataagcaatttacactcttttaaccaaattattcaccatgcttacatgcccttcagccagcagtgtttgaacattgtttgtttgttttctaatgacgaag

SEQ ID NO: 50032 - DNA, 429 bp, Glycine max
  unsure (1)..(429): unsure at all n locations
  Clone ID: LIB3107-056-Q1-K1-B4
ggttctgtcctcttttctctgggactccctttctctctggctctctctcgctcttcttctcattcagcaccgagtcacagactcaccgatcttccgagtccctttcgtgtcggtttatgagctcgaaggagagacccactcttggtggcacgcggattaagacccgcaaacggaatattgctgcgccgctggaccctgcagcattctcggatgcagaggtccagatttatctggataatgctggtgatctggaactcattgctaagagcattggatcttcagaccttaactcttcaagatacggcgataccttttttgaggatgctttcactgggggtcgtacacaacctgnaactaccaagcctgatgagggggaccgccatccatactctataatagagcgtgagcctaagcgggcagtcattttac

SEQ ID NO: 50033 - DNA, 439 bp, Glycine max
  Clone ID: LIB3107-056-Q1-K1-B6
ctctagatgtctttgtcacacacccttctttgcagtaaatgacattttgatcctttagtgagtgtgaaagggattttcctagtcctactctcctctaagtagtgggagtttggttcagccttgacaggtcatttttctttaaacaaatcattgttaaacacctagagactttggttcagctttgacaaatcattgtgctttaaagaaattttatttgtagagattttgtgaagctgtaatttacccaaataaataagtattgagttaatttgttataggtgaatgatgttgataacctgcatgtttaagggaatacttgagaaatataaaaaaagttggaatcatgggtgataatgtttcctatcatattttttctctccatgtttctttgctattggagttggtatccaatattcctttaattggaagggccctcttg

SEQ ID NO: 50034 - DNA, 361 bp, Glycine max
  Clone ID: LIB3107-056-Q1-K1-B7
ggagccttgtactgattaacgagaatggacaaggaagtggagcttggttcccttgaaggtgaaatggccacccagcacatttcacaaccacagaagcgcaagggtggtcttgttaccatgccttccatcattgcaaatgaggcacttgcgagggtggcaagtttgggccttttgcccaacatgatactgtatttgatggggacctacaggcttcaccttgcccaagcaacccagatacttctctggtcccatgctaccagcaatttcacacctgtggtgggtgctttcattgctgattcttatctgggtcgattcctcgctgttgggttgggttcggccatcactttttgggaatgacact

SEQ ID NO: 50035 - DNA, 361 bp, Glycine max
  Clone ID: LIB3107-056-Q1-K1-B8
ttatatttttttgcccaactcactatttagtggacggggttgttttgcttctgtaaactgtccaataacagaacctctaatgagtccacgctacagaaggacaaactgtgttgatatctaccaatcttattgatcaggttttagcccacaaggaaatgccaaatatgatcggcgggctaccagcaaattgtaagaccaccatactctgcaagcttatacttggagagatcgctaccacaaattccaccattgaggttaatgagaagacttgtgtgaaacaacaacattagcttcactgtatgcgaaggtcaaggccatgacaatattcgaaccttgtggaagaactacttttaaaaaacac

SEQ ID NO: 50036 - DNA, 321 bp, Glycine max
  unsure (1)..(321): unsure at all n locations
  Clone ID: LIB3107-056-Q1-K1-C12
tatggggaaatggtttttggtaaaactttgcaaactatatccttattgangtatttgcgcgagttccgaggaatcaaaggtcctcatatggtggttgctccaaaatctactctnggaaatnggatgaatgagattcggcgcttttgtcctgttcttcgtgcaatcaagtttcttggcaaccccgatgaaaggagacatatcagagatgaattgctggttgccgggaagtttgatgtttgtgtcacaagttttgaaatggcaatcaatgagaagtctgctttgcgtcgatttagttggggctacataattattgatgaaact

SEQ ID NO: 50037 - DNA, 446 bp, Glycine max
  Clone ID: LIB3107-056-Q1-K1-C2
gattgttaagcattcttcgcctttctctctcttctttttactctctctctgtctctctctacgctttctcgttcgagatccctcaagggatccactaactgaaggagaaatggggttgacattcaccaagcttttcagccggcttttcgccaagaaggaaatgcgaattctgatggtgggtctcgatgcagctggtaagaccaccatcctgtacaagctcaaacttggagagatcgttaccacaattcccaccattgggttcaatgtggagactgtggaatacaagaacattagtttcactgtctgggatgttggtggccaggacaagattcgtcccttgtggaggcactacttccaaaacacacagggtctcatttttgtggttgacagcaacgacagggacagagttgttgaggccagagatgagttgcacaggatgttgaatg

SEQ ID NO: 50038 - DNA, 248 bp, Glycine max
  Clone ID: LIB3107-056-Q1-K1-C3
tgttggggtaataaaaatagcagataattaggtgccctctgctggtacttcttcttcttctccattggtttcttcaatccttcattcctttcaatggcgctaaaggttcatttcaattagaggcaccgcacgctccaaaccgaaccatgaatcttttggtggcagctccttcgtcttttcgcgggaatcttctcgttcccctgtcgcgctgcacctcttgcttggaacttgatcttcgtattcaacac

SEQ ID NO: 50039 - DNA, 422 bp, Glycine max
  Clone ID: LIB3107-056-Q1-K1-C4
gaccagttccctggttgaaacgaagcgaaatttccacctgcatcatcttcaaacctgcgcttcttttgaaccgatttgtgctgttttgttagtgaagcacatcgagtgcaaactgtcgaacaggcatggcaagtctgttgacaacatcagccatcacctattctcctctcaacaatggttccaaggatttcagaaagtcagggaattcttctaaaggaaggtgttgcataaaagcaatggggatagagaaatccttggaggaattgtacaatgtgaaggtggaaagaaaagtgtctcctgagaaactagctgagcttggagtttcaaaatggtcggtgtggaagactgggaaaagcaagttgccctgggactggcaggtagaccaactggtgtacattgaaaaaggggaagtgagagttgtg

SEQ ID NO: 50040 - DNA, 303 bp, Glycine max
  Clone ID: LIB3107-056-Q1-K1-C5
cgttcgcttattttgggaacaaattacagaccagggctttgattcaaggctccagaccttctttgacatggtggacaaaaatgccgacggaagaatcaccctagaggaagttcaagagattatggccttaagcgcttccgctgataagctgtctaattagataacaactacttaaacttttgcggcggatctagaggatccaatgttacgctcgcgtgcttgcgacgaactagatcttctatattgccaactaaatacaatttactggccggcgttctacaacgacttgactgagaaaacctt

SEQ ID NO: 50041 - DNA, 444 bp, Glycine max
  Clone ID: LIB3107-056-Q1-K1-C6
gactttgttctgctttcaattttgatcatcacacaacaaattctttagtgctcggtacaagattcgtgaggggccagcaatgaccacatctcttctactcccatctccttcttgtgctgctatactgagcaaagggactaatagaatttgcactcgtgcttcatttcactcacttaaatcccatgtgaagaagggattcagagtgagagctcttaaagaaaaaacagaggaaattgaaagtccttcacagccatcttcacctgaggaagttacaaagaagtatggccttgaagctggtctttggcagattttcagctcaaaagaggaaggaaaggataattctcaacagaaatcaaagggtgatcgagccaaagaattgctagcaaaatatggtggagcatacttagccacctccattactctgtcattaatctctttcgcact

SEQ ID NO: 50042 - DNA, 272 bp, Glycine max
  Clone ID: LIB3107-056-Q1-K1-C7
acgcggacgcgtgggctgacgcgtgggcttttaagtttaccaaaggggggtggtctgtggtggcggttggtttttctttcacctgaaaatggcttggtggggggggaactgtggttgcggaagctcctgcaagggcggcaacggattcggaggctgcgagaggttcccagacttgagctacactgtggtaaccaccacctatacctttgtcatgggagtggcacctgttaaaggtcaacttgagggtgctgtaatgggtgtgcccccttaga

SEQ ID NO: 50043 - DNA, 177 bp, Glycine max
  Clone ID: LIB3107-056-Q1-K1-C8
aaccctttggcactcaactttttgggcagggtaaaaaggaagctgctcccaaagctagtgatggtgcatcatccaaatccaagggttcagcttccaaatctgctaccaagaaagttccagtacagaagccccaagaatccaagaaaaagggaaaaggaggcttaccaaaaaaaataa

SEQ ID NO: 50044 - DNA, 190 bp, Glycine max
  unsure (1)..(190): unsure at all n locations
  Clone ID: LIB3107-056-Q1-K1-C9
agaaaacaacccaaaggggagangcnatagncaaagagtttaaacggggacgaaagcagggacagacccgaacgcggggggctcaaggagaaagccaacggaaccgccaataacaccgtgccaaggcccacacgaagcctgcaagagccgcccctaacagccacaatgtggaacacagggaggcaaagag

SEQ ID NO: 50045 - DNA, 382 bp, Glycine max
  Clone ID: LIB3107-056-Q1-K1-D1
gggtggaaagtgaaagagtaagacaccacatagtgtaacttgagtgattagatctgatgagtgcagaaagaaggaaggattgttggtgatcgatcatcgatcatcgatcatcgatggcgtctgctagccttggaagtggtggggtgggcagttccaggtctgttaatggtggcttcaggggttcttacagttccgtcgattggcttggcagagagatgcttgagatgtctttgagagaccacgaggacgatagagatagtgagcctgacatcattgatggtttgggtgctgagactggtcacgtgataagaaccagcgttggtggccgaaatggtcaatctaagcagaatgttagttatatttctgagcatgttgtgggaac

SEQ ID NO: 50046 - DNA, 331 bp, Glycine max
  Clone ID: LIB3107-056-Q1-K1-D10
cagaattgatgttagaagggttttcccacaaggtgctacagtggtatttatgcagaatggagggctggtttgctacagatgctgataccatatcactgaaatgttgggatcaggaagtattactacctggtggtcatggtcttatggtcaggggttaccagcctgttataaataccctagccaagggtcttgatattcgcctgggacataaggtaacaaaaatagttaggcaatataatgaagtaaaggtgacagtggaaaatggaaaacatttgttgcagaacccgctattgttgctgtacctcttggggtgctgaaagcaaagagcata

SEQ ID NO: 50047 - DNA, 337 bp, Glycine max
  Clone ID: LIB3107-056-Q1-K1-D12
gaagaagacgtacggacccacaaacattttcattgtttcataactaatgttctaagctatgaagcacacggatatcggatgcgaatatctggatacgaatatgtggacatctgtcaaatacatcaaactcaattcggacacgaacgtcgatatcatgatattgtgtcggataccggatagagattggggtgtccgtgctttataggtctaagttaagtaaatcctactactttgctacaaagatcagggtgcacaaggtgagtttcaattttttttctttctctttcccactttacccctgcacactcgtctctctcaccagtcaccactgtgaaca

SEQ ID NO: 50048 - DNA, 444 bp, Glycine max
  Clone ID: LIB3107-056-Q1-K1-D2
gaacacagaacagagcataagctacttccattgctcccaacaccatcatcttcatcattattttctttctcttcactcatgtcactgtgattatggctcttgtacccactcgcccattcttcgattcatttcattcttctcccaacttccactctctccgcttctgcaactccctcttccgccactccctcacaccctctcccaattccactttcctccgtcgcaaaccactcttcatctttcgttgcaaccctgccaagagtttctccaccgacaaacactggttgaagcgttggaacgaccccacaaacaaccacgcccgtccgaagccgccatgtgctgttttggactattctgaaaatgggcacgcgtcaaaatccggtcttgcgagctctgacgaggagggtggtgatggaaataccggtggaaagcaccatgatagga

SEQ ID NO: 50049 - DNA, 416 bp, Glycine max
  unsure (1)..(416): unsure at all n locations
  Clone ID: LIB3107-056-Q1-K1-D3
ggtncttttgataatatatgnaannacaaaagatgttatcataggtccattacatgccctaatatgaaatttatcantgcacatatnctagtctacacatggganctttgcatgtctaatgttggaacataagtttaatttttcagtaagaactccctcatcattgtttgaatgggtaaatgttttacttttttcccagttttgttaattaactgaatgtcttaaaaaaatagttaaaaccaaaattaattaaattctaattgattaaacacctaagccaattaagttttgataaaatgtttaatatacacaatcaaccactgcaaaaatataaaccattttcattgaaccaggaagggaaaaattactttcttgtcatcttgttaaaaaatttcaatggcaatgcaaactttttc

SEQ ID NO: 50050 - DNA, 402 bp, Glycine max
  Clone ID: LIB3107-056-Q1-K1-D4
tttatattcctacaaaaatgtagaaatgtattgtatatgtaacccaattataactttcatttttagtcttacttttattctattatttttttaattttttttaaaaatattactaggaatattataatttaactgaactcatttttttaatgtactcaagaataatttttttttagttatagtattcccgagaatgtcattgctaaaaacgtagtcttataccttgaaataaagttaacttgtagtttaatgaaatttcaaggttaggctaactttcttttaaagtactcttgttttcaattttttaaaccagctttgaaacgaaaaagtagtttgatctattacgcctaacaatcaattctaaacaattgttaaagggaagatccgaaacgcatttcaatg

SEQ ID NO: 50051 - DNA, 458 bp, Glycine max
  Clone ID: LIB3107-056-Q1-K1-D6
cccacgcgtccgcgacagaagggggaggcattttcgtctttgtaattgttgatattgatatttgattgatgcgcatgcggtggttcctccgaagcccaatcatcaaaacctcgctgctgaatctgagcccttcaatctcattaagacctcactgggcgaggagaaccttcacttcttcttcgagatcgtcaatggcggccatccacaaccacagcaatagcaacagcaacagcgaaaccggactggcgagacgcttttggatcaagttcacgcgcgaatccatcttcgccatgtacactcccttcgtcatcgccttggcctccggtaacttgcacattgatcctttcaccgttacatcgcccaagacgttcatttcctacgtgcctttgctcaagcgtatgaagtggctgaagagtgtgctgatgacgacgatgcgaaactttgaatctgtgaattga

SEQ ID NO: 50052 - DNA, 428 bp, Glycine max
  Clone ID: LIB3107-056-Q1-K1-D7
gacccacaaactccacaagtgtcacaagtcattactcgttagagagagtttgtgtgtgtttttgtgtgtcaccttggtgcatacaacacaagatggaggaccaaaatggtagtggtaagttgggccaagggcttcgcaaggtgaagccttaccttgctatattgtcccttcagtttggctactcagggatgtatatcatcactatggtttctttcaagcatggcatgagtcattggatactctcagtgtaccgtcatgtagttgctgctattataatagtcccttttgcacttgtccttgaaagaaaaataagaccaaagatgactcttcccatcttcctgaggatagtggcacttggtttccttgagccagtgctagatcagaacttgtacaacatggggatgaagatgacctcaacaacgtttgca

SEQ ID NO: 50053 - DNA, 177 bp, Glycine max
  Clone ID: LIB3107-056-Q1-K1-D8
gggggtgacatacaaaaggaatgtaccctgctcttggtttagaggcttcttggtggactgcagatcttgggaaaaactatgacgggaaaaacgatgccctcataagatgggaggtctcataccattgatcacgggacggcgatgatacaacacatagacgggattccaccagaccag

SEQ ID NO: 50054 - DNA, 433 bp, Glycine max
  Clone ID: LIB3107-056-Q1-K1-E1
ggcatataataaacttaacagtgtgacagaacataatagcagaagggaacaagatggacttactggagttatgggcaattttcggccccggcgtcgccggcgccgtcttcggcgccggatggtggatctggcttgacgccgtcgtctgcagtaccgtcaccgttcccttccttcattaccttcccggaattttcgcatctcttgcggctttgatgttcaattgcgttagaaaagaagacatcgattattctccctacgacgaaggcgagtggagactgaagctgtggctcttcattgcatatgttgtatcctttgtttctttagctggatcagcaggcctgctgatccaagattcacttgataaatccgccccttcagtttggactggagttgcaggtgttttgcagtgtgtttttgtcttgatctgtggact

SEQ ID NO: 50055 - DNA, 278 bp, Glycine max
  Clone ID: LIB3107-056-Q1-K1-E11
agggagggcacttgttcaatcttttcaactttcgtgtagtgcactgttttgctatagtaacccattaattaaaccgacctacgtagtagccatgaagagaggcagagaagagagctagttagacatggctaattgcttgatgctattgacgaaagttggagagagtgaaaccaattacccaatatcaaagggtagtgatattggtgatttcaagtgcaagacttgcaatagaaggttctcttcttttcaagcccttggtggccatagagcaagccaca

SEQ ID NO: 50056 - DNA, 368 bp, Glycine max
  unsure (1)..(368): unsure at all n locations
  Clone ID: LIB3107-056-Q1-K1-E12
ggagaagacgttttattttacgacatttttgcaanctttttaactngcgaggaatgcgggggtttgctatggaaacctattaattaaaccgacctacttagtatccatgaacagaggcagagaatagagtaagttagacatggctaattgctagaagctattgacaaaagttggagagagtgaaaccaattacccaatatcaaagggtagagatattggtgatttgaagtgctacacttgcactagagcgttctgctattttacaaacccttggtggacattaaacaaaccacataaaaaccaaaactcataggtacagatctttcgtgccatcaagagttaccgaacccaaccatgaaacaacaacc

SEQ ID NO: 50057 - DNA, 458 bp, Glycine max
  Clone ID: LIB3107-056-Q1-K1-E3
tacggctgttttaagacgacagaagggatttgctaatccttgtgtttaatcctaaaaaaatagaaatacatatccttttttccgtggacttgctttaccggtcttgccttttcgaattctatttatattaatatttcactcctataattctttatccgttcggacaagaacacaggggaaggactaattgaaaggtgaagaattcacatactgattcgccctctttcttctcttttttagtccaatgacccccccttttttttaagataatttttctcaagtgttaaaacttgagagattttgcaatggatataagaactggtatctaattcgaataagtatcattcttttagggaatcttccaattgattgaccaatccaaataatatatggatatatatatatagatagatctatctatatatatatctaactaatataggaaatttagaaagata

SEQ ID NO: 50058 - DNA, 422 bp, Glycine max
  Clone ID: LIB3107-056-Q1-K1-E5
gacctttaaactccacaagtgtcacaagtcataactcgttagagagagtttgtgtgtgtttttgtgtgtcaccttggtgcatacaacacaagatggaggaccaaaatggtagtggtaagttgagccaagggcttcgcaaggtgaagccttaccttgctatattgtcccttcagtttggctactcagggatgtatatcatcactatggtttctttcaagcatggcatgagtcattggatactctcagtgtaccgtcatgtagttgctgctattataatagtcccttttgcacttgtccttgaaagaaaaataagaccaaagatgactcttcccatcttcctgaggatagtggcacttggtttccttgagccagtgctagatcagaacttgtacaacatggggatgaagatgacctcaacaacg

SEQ ID NO: 50059 - DNA, 445 bp, Glycine max
  Clone ID: LIB3107-056-Q1-K1-E6
tgtgtattacggtgaaatccgaacccctccatcaaagtgaagaaaagagaagtaggctctacggttttcgcgagtaagtgtgggtcagaattcaaaatccgaatcagcaactccaattcaaaaccggttatccgaatcgaaatttataaaagtaccaaatcctctgtgactgctagttaatcagagagagtagtgagccaaagctgggaagttaaacttggttgcatgcgaagagcaagaaatatgagaccaaacatcgtttctgaggccgggttgcctactaagatgagtcaatggtgggaaagcattccgtttctcacttctgcagtggtggttgtctgtggaatcatttacttggtttgtcttttggttggatatgattccttcaacgaggtttgcttcttgccgtctgcggttggttcgcgggttcaagtttaccggattt

SEQ ID NO: 50060 - DNA, 445 bp, Glycine max
  Clone ID: LIB3107-056-Q1-K1-E8
tgtacatgtgctagccatcaatgagatttttgagaagagtcctaccaagattaagaattatggaatttggctgcgttatcagagccgcactggttatcacaatatgtacaaggaataccgagatacaactctgaatggtgcagttgagcatatgtacactgaaatggcatctcgtcatagggtgaggcatccatgcatccagataattaagactgccaccatcccagctaagctgtgcaaaagggagagcaccaagcagtttcacaattctaaaatcaagttcccattggtgttcaagaagattaggcctccaactaggaagctgaagacaacatacaaggcatccaggccaaacctatttatgtgattcagttaatggaatttccctgctttttgattcattaagtataaaaaggaagagcttagaggtgatccatgtagtgac

SEQ ID NO: 50061 - DNA, 401 bp, Glycine max
  Clone ID: LIB3107-056-Q1-K1-F1
tgggcacacttttttctgaactcactcactggaagccttggggtgagtaagggaaaggctttctgctctgagcaccaaattgaaacctcatgaatctttgcttagaattccacagaatatggagactgttcttttcaatgactccccacctttggagttcaagggtatgagcaaggaggaggaagactcattgctagggcaagttgaaatatggaggtacatgacatgctttacggactccgtggccttgaaatccgtcatagagctgcgcatagccgacataatagaccgttatgggaaaccactattcttgtcacaattgttgagaacatagatgatgcacccttcccagatgccttttttttacaaaaagtgattagagtgaatgtacgtaaaaagat

SEQ ID NO: 50062 - DNA, 396 bp, Glycine max
  Clone ID: LIB3107-056-Q1-K1-F10
taaccacttttatgcctggttaggttcaatactgctatactgaacaggagagctctactttagagcattgtggaagtatagttgattcgagattttgggtttgtgaagttagggtatttttttgtttgaaaagagtaaaaggtaaaaaatataattagaatgattcccaagagaatagtattttagacatgctctcctttatggagggaatggtcattcttcatttgatggaatgcacattctcattttaaaggtgctaccaatcattctatcctgtcatttttttagttcatttgtattacatacatttaatctccaagtaatttgcataatcacttttcttgaattggtatgtactacatacatactaaagtatgaagatctgtcttgttgact

SEQ ID NO: 50063 - DNA, 196 bp, Glycine max
  Clone ID: LIB3107-056-Q1-K1-F11
acagcgctactttttagcactgaggaccttcactgctttgtgattcagcatttgctacgtacggggatgaatgtgttcaacaagacgtgcttggacaaagaacatagtcacatgatgttccaagagaatgggtcttgaacgaccatcttctttacggagggaacggtgattctagatcagcaggactgcacaactc

SEQ ID NO: 50064 - DNA, 441 bp, Glycine max
  Clone ID: LIB3107-056-Q1-K1-F2
gaagggtttgcatttcaagctcgggaaaatttaactgcggagaggctagttaaattacacagaaggagtgggacgacactttctggaacccttctcaactatttcacaccatcaaggtatggagatggcaaagattctcaaatttattggaatgcaagtggaggttagcaagcacacggaggggtccaaggagaagacgctacgtccaaatggattgcccgaatccttgattcgatatgatgcacggcagaaagagaaggctacaagttcagtaactgagttgctgcaggccatgaagcgcccccgagcattaagtgaatccgcaagccgtccctccatcaaaaaatcaggatctagatcttcagacgaagaaaaattagaacaagaacaagaagatgacaaagagaaagcacaaaaaacattaagaagaatttctgagag

SEQ ID NO: 50065 - DNA, 450 bp, Glycine max
  Clone ID: LIB3107-056-Q1-K1-F3
gatacaattcacatcatacaccgtttctttcacttcacaaaaatgaaaaacatgaaattgtgttcggtgatgctatgcttatcactagcgttccttcttggggccacagcagaacaatgtggcacacaagctggtggagcgttatgcccaaatagattatgttgcagcaaatttgggtggtgtggtgacacagattcctactgtggagaaggttgccagagccaatgcaaatctgcaacaccctcaacaccaactccaacaacacctagtagtggtggagatattagcagactcattagctcttctctctttgatcaaatgcttaaataccgaaacgatggccgctgttctggccatggattctacagatatgatgctttcattgccgctgctggctctttcaatggctttggcacaaccggtgatgacaacactcgcaagaaagagatt

SEQ ID NO: 50066 - DNA, 391 bp, Glycine max
  unsure (1)..(391): unsure at all n locations
  Clone ID: LIB3107-056-Q1-K1-F4
ttctgttgaacctgtagctggagaggatgttatgttggaagctggtgatgcattttctagtcctcgaatccctcttgttcatcagcaggtttcagttgaatctattggaaattacatagtttcctgtcctttagatgttgagctgagttgcaagtccaacacaatggtggatggtgatgttgtttcagaagataatgccattacaaacnaagaggaacctcgtctctctatggattctatcacagaaaattcaatccaggagcagttgaaggtagatgtgcacaacactaaaatgatgaaggaaaacgtgacctctgacgatctaaataataagagtcttggggagctgaagaggatgctgaggcagttaacgctaaatgaaaaccaaaat

SEQ ID NO: 50067 - DNA, 113 bp, Glycine max
  unsure (1)..(113): unsure at all n locations
  Clone ID: LIB3107-056-Q1-K1-F5
cacgccgtctcgtacggtctgctggaagaacgactataaggggtgactttttcttggcaccttatgangaaatcaaagagctttgggttctcggggggtagtatcggtcgcac

SEQ ID NO: 50068 - DNA, 180 bp, Glycine max
  Clone ID: LIB3107-056-Q1-K1-G1
gaatttacaagacaaggaaggcagcctcggatgttgtggttgtcgtcgtcgtgttcttaaggtttggtctgagacccaatttttcattcttctaatgggccaatcctttggtcagaccgagatcaactgggacaagctagataaaactagattctatgtcgtaggagctggactctttac

SEQ ID NO: 50069 - DNA, 227 bp, Glycine max
  unsure (1)..(227): unsure at all n locations
  Clone ID: LIB3107-056-Q1-K1-G12
cacttnaattttatcaaattttttnattctctttgcgcagaggcctacctctgggttcaagatgcagatcttcgtcaagaccctcaccggaaagaccatcacccttgaggtggaaagctctgacaccatcgacaacgtcaaggccaagatccaagacaaggaaggaattcccccggatcagcaacgtctcatcttcgccggaaagcagctcgaggacggtcgtaccc

SEQ ID NO: 50070 - DNA, 423 bp, Glycine max
  Clone ID: LIB3107-056-Q1-K1-G2
ggtgttcatttgggttctgcacataaaggtcctatgtatggggtaggtgctgcttcgagaaaggggcatgagaagccacgcatgaatcgtcgttgaaattcaagcaactgctattggtgatgaaatggaaagctgggattcttgttgggggaggactgagaagtaacgaaaaaccccatatatttattttgaataacaccggtaggttctttattatttcaaaatgtgaaattcgttgaagctcttattggactgaaaaaccattggtcactggtggatggatatattttacctggctgtgatggattgagataaacgcattaccatgcctttgttgggttggatcacattattgagattggaaatgaaagctttagcgtgaagcaactaaacaagggttgtttctaacttacaaatgttagt

SEQ ID NO: 50071 - DNA, 155 bp, Glycine max
  Clone ID: LIB3107-056-Q1-K1-G3
gagacttcaggtcaggcggggctacccgctgagtttaagcgaaaaaaaaaaaaaaaaaaaaaaaaaaaaaggcggccgttttaaaggatcaaagttaacttacccttgcttgcaacgtaatagttttttaatagggtaacctaaattaaattaat

SEQ ID NO: 50072 - DNA, 123 bp, Glycine max
  Clone ID: LIB3107-056-Q1-K1-G4
gagatttgattgactttttttcttcttctattctcacacatacccatctactccttccctcatggctgaacaatcttccaactccatttacgattcactgtcaggacatcagggaaagagtga

SEQ ID NO: 50073 - DNA, 467 bp, Glycine max
  Clone ID: LIB3107-056-Q1-K1-G6
gaagacgacagaagggggagcttcagaatcttcaggccaagccaggtaagcaagcacaacacaaccccgaaatggcttctgcttctgttcccatggctttctcgctgagctctgttatcaacaacaacaagccttcatccgaagccttcttcaggccactacccctacggcaaccaaagaggaccctcttcaccacaaaggcagtgtcaaactccaaggctcaaatcaatgcatctttgaaggagaaggcagttgcaggactcacagcagcttctgtgacagcatctatggtggttccggaggtggctcatgctgctggatatgagttctccccttccctcaagaactttctgctaagcatctttgctggtgggtttgttctagtagccatatttggagccgttattggggtttccaactttgatccggttaagagaacttaaagcccgcatgctccaatgcttttt

SEQ ID NO: 50074 - DNA, 433 bp, Glycine max
  Clone ID: LIB3107-056-Q1-K1-G7
gcgagagcacgacagaagggggcgttagtttcgctaaaccctaaacctcacagctgagagagtttcgctttcggttagtttctccgccgtcgcagtagcactcacagcttcgctaggttaaatggcaatgcctgttaatgatgatacactggttgaggctgaaactgaagatcagcgagaagaaatgtcatcatctgaatcagagcacgatgaagatgtgaaactaactgaaccatctaaaaatgcactgtttaacagagatgctctactagataaacttggagacatcagctggtcagagaatgtggaatggatacacaaactctgtgttgatgtttatcaagagcaataagcacatgtcaatgatgacttgtcacgagaacttgcgttttacacacaggcattggagggaactaaagatgcctttgagaaa

SEQ ID NO: 50075 - DNA, 258 bp, Glycine max
  Clone ID: LIB3107-056-Q1-K1-G9
ggttctagtgtatgtgattgttgtgactcgttcttcttcgtcgttatcttcttcttttgttgtttgtgtgtttgttttttctctcacctgaaaatgtcttgctgcggtggtaactgtggttgcggaagcgcctgcaagtgcggcaacggctgcggaggctgcaagatgtacccagacttgagctacaccgagtcaaccaccaccgagaccttggtcatgggagtggcaccagttaaagctcaattcgagagtgctgaa

SEQ ID NO: 50076 - DNA, 183 bp, Glycine max
  Clone ID: LIB3107-056-Q1-K1-H1
gatagtttcattatacaaagcgttgaattcaaaaactaggttcattaaatgtgctttgctttgttcctccaaacccaacatgttttacacatgccgcaactgtgacttctctgaccaaactaactcgcccaaagggaacaccttttgggttataccttaaactgggaaaagcttcatggatac

SEQ ID NO: 50077 - DNA, 451 bp, Glycine max
  unsure (1)..(451): unsure at all n locations
  Clone ID: LIB3107-056-Q1-K1-H10
acgaccacgccggacgggcggcnagctttaagacgacagatttgggagagggggaaaaaaacggcaactttgcaggtgctgaaaaccctaactggtccgaaccattggagccaccgtgcaatagttactcctatcactctctccctaaacacaccagtgatttcggtttcagctctattcggaagagggttgaaacgctgacgcgaaatttttctgaagacagagatgcaggcttgtacaacgatgagttctttgcagcaacaacctatctggaccaaagggttaaatttccatgcaaaagggtatggcaacaataacgggtttctaccctcagtgagggtctggaatattaagccatcccaagcttctcaatgtgaagcaagtttagtcactgggaagccggcatctgtgcctttctctgtgcctgaaattggaggcgaccgaagtagct

SEQ ID NO: 50078 - DNA, 268 bp, Glycine max
  Clone ID: LIB3107-056-Q1-K1-H11
gcggacgcgtgggttataacgtttctctatttctttttattatactattttgtcaatgaaatcaatcatgtatttctttgtatctctctcaatgcataaatactcaaaagatgtccacgaatcatttttgaatgtgatatacctaggttagttcatccaacggtatgatacgacttagtctataacatgtcattgaacaaagtcctaaatgatgtcatctaatcatctactctctctaatacgaaatccatattttttattccataat

SEQ ID NO: 50079 - DNA, 379 bp, Glycine max
  unsure (1)..(379): unsure at all n locations
  Clone ID: LIB3107-056-Q1-K1-H12
catttttcagtctgggggagnacagaaagaaaagagcgatccatacaccgggagagatggcacctgcaaatttgacaaaaccaaagttgcggctactgtatctaattacagtgtggtttcccttgatgaagaacaaattgctgcaaacctagtaaagaatggccctcttgcagttgctatcaatgcagtttttatgcagacatatgtatggggcgtctcatgcccatacatctgtgggaagcatttggatcatggggttcttctaggtggctatggtgaaggtgcatatgctcccattcgttntaagaacaaaccttactggatcattaagaattcatggggcgagagctggggaaaaaatggatattacaagatctgc

SEQ ID NO: 50080 - DNA, 296 bp, Glycine max
  Clone ID: LIB3107-056-Q1-K1-H2
ggggggatagttttattttgtcagacaacccattccaactcgcgcgggctacagtaacttgggcactattgtgaacaaacaccattcgtaggcagagatgagaaggctcacacatgatgatcggaatttggttgaattctatgtttgggatgagcgcgagcgacaagatgatgatgcacaaggttgtcaggaacaaaggacaggcggtagaacacgcaccacgggcccacggattatgtttcgagctcacaatcgatctgatgctcaaattttgtccaacgactcccatattgatc

SEQ ID NO: 50081 - DNA, 424 bp, Glycine max
  Clone ID: LIB3107-056-Q1-K1-H5
ggcctattatatatatatgtatctatattctatatatagatatattggttaggttatcaagtattaatctgaaataaataagaattgctgcttctaatacttataataattactacaaattctaataattactacaaaagggatatatgttagataaaatagattaattaatctatttcacaaaaaaataatgtatccatagcacagtttcgtcttataatacctcgggtgctaatgaaactattttagtgaaatttaactgtctcaattcccgggcgattgcacaaaagattcgagttccttttggatttccttcttgatcaatgacaactgcagcattatcatcatactgaattattataccgttgctacgtttgagttctttacaagtacgtacaaatacagctctgatcacttctgatct

SEQ ID NO: 50082 - DNA, 429 bp, Glycine max
  Clone ID: LIB3107-056-Q1-K1-H6
gagatgtgttgagatccactgctgcagaatccaatttgtgacactaaatctaagttactatgactgcgcagacccaagaggagcttcttgcgcaacacctcgaacagcaaaagatccatgatgatgaacctgtcgtcgaggatgatgatgacgaggaagtggatgatgatgatgacgatgaggatgatgaccatgacgaaggactagaaggtgatgcatctggtaggtcgaagcagaccagaagtgaaaagaagagtcgcaaggcaatgcttaaacttggaatgaaacctgtcacaggtgtcagtcgagtgacagtcaagaagagcaagaatatcctgtttcgaatctcaaaaccagacgttttcaagagtccaacatctgacacgtacattatatttggggaagccaagattgaagacttgagctcac

SEQ ID NO: 50083 - DNA, 311 bp, Glycine max
  Clone ID: LIB3107-056-Q1-K1-H9
gtatagtcttaattatatcatatgtatttcagtaaacttaatagtatgacagcgcattcatttcctatgcattgattcgatttctgatactatcggagtgaaaaaagtagatctaaagaaaaacgcgggttggattatattagtaacaagtaaattctttgtacgtaaaaagttccaagattttgttggacagaataacaattgcaaagtttgagatcacccagaaagcattatcaattttaaaagcctactcgggtattgagcgtttatcaaagtttacttaataaaaaactaatttttttttttttttt

SEQ ID NO: 50084 - DNA, 54 bp, Glycine max; identical to SEQ ID NO: 15991
  Clone ID: LIB3107-057-Q1-K1-A1

SEQ ID NO: 50085 - DNA, 468 bp, Glycine max
  Clone ID: LIB3107-057-Q1-K1-A10
gtgaatccatcggcagaagttcaaagcgatttgaaagggcatcatacgtataaagtgtctaaaaacatggtccaagacgccatgaggagatatgatggcattcaacctgctactgaatcactgaggaaccagaatatcaggtcatccgtgtagtgagacacagcatttctcaatggctattttattgcagcaagcatcacagagtcacggatcactaatttgtagggataaatttgcgaaagtcaatctttttgctcgttggttcagcttgcagtgcaggagagttgtttactttaaagcattagcaaaattattatttagagaagaaggctattttctacaaaattgtccatattgaggctgagtcatcagcgtgtggattcggatgcaatatataggttaaagagttttactgaggtgtggcttaaaggaagaaatatgatgcaggcttagagttctcttgatgtg

SEQ ID NO: 50086 - DNA, 466 bp, Glycine max
  Clone ID: LIB3107-057-Q1-K1-A11
cactgtttgggagaattctcctgcagaagttcaaagcgagttgaaaggggggcatacttataaagtgtctaaaaacatggtccaagacgccatgaggagatatgatggcattcaacctgctactgaatcactgaggaaccagaatatcaggtcatccgtgtagtgagacacaacatttctcaatggctattttattgcagcaagcattacagagtcacggatcactaatttgcagggataaatttgcgaaagtcaatctttttgctcgttggttcagcttgcagcgcaagagagttgtttactttaaagcattagcaaaattattatttagagaagaaggctattttctacaaaattgtccatattgaggctgagtcatcagcgtgtggattcggatgcaatatataggttaaagagttttactgaggcgtggcttataggaagaaatatgatgcatgcttatagt

SEQ ID NO: 50087 - DNA, 377 bp, Glycine max
  unsure (1)..(377): unsure at all n locations
  Clone ID: LIB3107-057-Q1-K1-A12
tattgggagaagctttctacagacgcgcaaagcgaggggaaagggcggcacacgtataaagagnctaaaaacatggtccaagacgccatgaggagatatgacggcatgcaacccgctaccgaaccactgaggaaccagaatatcaggtcatccgtgtagtgagacacaacatgactcagcggctatacaatagcaccaagcacaacatagtcaccgagcactaaaaacgagggataaatctgcgaacgacaacccagaggcccgacgggncagccagcagggcaagagagaaagccactttaaagcatcagcaaagaaattattcacagaacaaagctcatctgcacaaaaatggccacattgaggctgagtcatca

SEQ ID NO: 50088 - DNA, 300 bp, Glycine max
  Clone ID: LIB3107-057-Q1-K1-A2
aggcgtgcgaacaggtgcgagaggacaacggataggggagtattcaggccggataagacgagcgacactttctacacataccgctggctcagggacgtactacgacctccttcatgattaattatgacgcagccattcaccgatcgcattcaaactcaacacagagcgagatgcttctctgttgatacgtaccaagctacaaactttgagatattatatctcagagtcgctcgcttagcatactgagtctggctcctagctacacgcccatctcatatgcgtgattgtgtcgtatcacga

SEQ ID NO: 50089 - DNA, 439 bp, Glycine max
  Clone ID: LIB3107-057-Q1-K1-A3
ggcctgctagtgcgatacacatttcactcaagcttaggtgttgtgctccactctcgtcaccacagagaagaacttgaagttgaacttgctctgagctccgagaaaatgtgcatcggagtccgttgcttaacagtgctgggcgagttcaagccatttggcctcattgccgaagctctcgacggcaagccccccgacaccgtcaccgacaagtacgattactttctcttcgatcccgaaatcgctcgtgaccgtgacgccgatgacgattgcgacgacatcgcttctgcgccgagcaatcgtggggatcacgagctgttcatgcgaggcaatcggattatatggtcgacgggtgcgagagtatttaagagatttaccgtgtcatctgacatcgttaaaggttgagtttttgagttttcatgctttgaatatgaaataaatg

SEQ ID NO: 50090 - DNA, 405 bp, Glycine max
  Clone ID: LIB3107-057-Q1-K1-A4
gacccacaaactccacaagtgtcacaagtcataactcgttagagagagtttgtgtgtgtttttgtgtgtcaccttggtgcatacaacacaagatggaggaccaaaatggtagtggtaagttgagccaagggcttcgcaaggtgaagccttaccttgctatattgtcccttcagtttggctactcagggatgtatatcatcactatggtttctttcaagcatggcatgagtcattggatactctcagtgtaccgtcatgtagttgctgctattataatagtcccttttgcacttgtccttgaaagaaaaataagaccaaagatgactcttcccatcttcctgaggatagtggcacttggtttccttgagccagtgctagatcagaacttgtacaacatggggatga

SEQ ID NO: 50091 - DNA, 362 bp, Glycine max
  Clone ID: LIB3107-057-Q1-K1-A6
tcgctgagctgcagcacttcagggcctgggtgttcttcaagctcaatctcacttcacttatcgccagggtttaatctgaatatctctcgcgcagtcactgagggagttatatttcttccaaaatggcgacgcttatgcttaaaatcaaagatatctaagatgctatggctaacacccaaaaaaacaactctactgctcatcatctgggcttgctgaactctaaactagccaagattgcgggggtactccttacaccttcataaaaaggagctggtggtgctggtgaaagctttgatcttactacatgtggagattcaagaagtggacttgggggcttcccttcagttggcaaatctactcta

SEQ ID NO: 50092 - DNA, 339 bp, Glycine max
  Clone ID: LIB3107-057-Q1-K1-A7
tgccttaacttacggggcggcttcctttctgaactctgaaaaaatccttgagctcaacttaagcctaccctctgtatacattaccatgggataacaccactaaaaactcctcctaatgtgtagccctttgggctcagtgtcaagactttcagggacagacccccgcacacctataccaaaaagaacggttaatttcttttatataccaaaaacgatcatctccgaaaaccctctcaacaattggactaactaatttttgtcccaagccattggctggaataccatcagattcttccctagtatcaaattttatcgacgcccggtgcggaacaatttaaa

SEQ ID NO: 50093 - DNA, 435 bp, Glycine max
  Clone ID: LIB3107-057-Q1-K1-A8
agaaggggacattctactttaaacccatttccataatcacttttggctactttcttctccatccatcccttgactaattaattatccctcacaactaccaatggccgaagagaaacaccacaagcaccgcctcttccaccaccacaaggacgaggataataagccagtagaaaccgatactggttacgacaacacatcatattccaagccttctgatgactatgactctggtttcaacaagccatcgtatgagtcttctggcggtggctatgaaggtggctacaacaaaacatcttattctagtgatgagccagcttctggtggcggctatgaaggagggtacaagaaaacaggttattctggtggcattgatgagacttctggtggctatggcgctggtggcggtggatactctgacgtcactgatggtggcta

SEQ ID NO: 50094 - DNA, 490 bp, Glycine max
  Clone ID: LIB3107-057-Q1-K1-A9
ggatatgtgcagaatcccagcacactggcggcctttactagtggatctcttccgtcgcgacctcggcggggaagtcggggcctatcatgaagtggcgcgccgccttgccctgttcccggatggcgacgcctccgacttgctctacctcgagacacaccgcaggaagcgggggaagtaaacttcggttcgcgcagcacggaattgaaggggctcgccaccagcgtgcccctatcctatccgccttccatgcacttccaacgcccttcccgaacgatttccgattgctagttcgcccccgccgcgccataagcgcgcccatgatactgcccatcatcgtcaccttgaagaacggattgctcgatccgcatggcaaggccattcacaacgcgctcggaggacttgttttcgatggcgattaggatatccgcgccgtcaggatcttagagctggacgttgatgattcaaccagcgacgcctgcatcgacgagat

SEQ ID NO: 50095 - DNA, 445 bp, Glycine max
  Clone ID: LIB3107-057-Q1-K1-B1
gatagtatcaacttcaactactgatatcatatcacaaaacagtgaaggattattagggaagttttattagtttgaaaccgcaccaatttattatataacatgtgtcgtggaacttttgtggttgcaaccactgttggagtggtggaggcgttgaaggatcaagggtattgcaaaatgaacaacacaatgatgaagtcggtggctcaacaagccaagagccacttatggtcagcaactcgggccaagaagctggcttctccttctccttcttcttcttcagcaacttcaaataatgagaagagaaggatggcagaggagtctctcaaaacagttatgtatttgagcacctggggtcccaattcttaaagttagaaaacattaaattaatgataaatattagtataattcagcaaggcacaaaaatatgatgccagtgatgatcagc

SEQ ID NO: 50096 - DNA, 345 bp, Glycine max
  Clone ID: LIB3107-057-Q1-K1-B10
gaggcattttataagaaagatcttgcaaaaagactgttgttgggaaagagtgcttctattgatgcagagaaatctatgatctccaagttgaagaccgagtgtggcagccagttcacaaacaaactagaagggatgtttaaggacattgaattatcaaaagaaataaacgagtccttcaaacagtcattccaggctaggacaaaactcccatccgggattgaaatgagtgttcatgttttgacaactgagtactggccgacgtatccacccatggatgttagactatctcatgaattgaatgtttaccaggatattttcaaagagttctatctaagtaaatatagt

SEQ ID NO: 50097 - DNA, 355 bp, Glycine max
  Clone ID: LIB3107-057-Q1-K1-B12
gaagactacaaaagtttttccaacaaactccttatgagtcacaagccataggacggtcgagggagaatttgtgtgttattgagtgtcacctcgctgcatacaacacaagaaggacgaccaaaatcagcactggtttataaacctattgactgccacggagagaccttaccttagccatatgagacccacaagttcgatactcagggattgatatcatcacaatagctcctttcaagcatggcattgagtgataatatactgtcaacgtgaccgccatgtagcggatgcaattataaaagtcagactagcacatgtccttgatagaaaactaaaaccaaacataacgctctatatc

SEQ ID NO: 50098 - DNA, 416 bp, Glycine max
  Clone ID: LIB3107-057-Q1-K1-B2
ggaagagtgaagagaatggctcccaagggtttaacctttctggctgtgttaatatgcgtttcagcactgtcactgagtccttctgttgcgggggaagggcaaaataatggccttgttatgaacttctacaaggaatcatgccctcaggctgaagacatcatcacagaacaagtcaagcttctctacaagcgccacaagaacactgctttctcctggctcaggaacatcttccatgactgtgctgttcagagttgtgatgcttcactgttgctggactccacaagaaggagcttgtctgagaaggaaacagatagaagctttgggttgagaaatttcaagtacattgagaccatcaaagaagctttggaaagagaatgccctggagttgtttcatgtgctgatatcctcgttctctc

SEQ ID NO: 50099 - DNA, 442 bp, Glycine max
  Clone ID: LIB3107-057-Q1-K1-B3
gatagttttaactttaactactgatatcatatcacaaagcggtgagggattattagggaagttttattagttcgaaaccgcaccaatttattatataacatgtgtcgtggaacttttgtggttgcaaccactgttggagtggtggaggcgttgaacgatcaagggtattgcaaaatgaacaacacaatgatgaagtcggcggctcaacaagccaagagccacttatggtcagcaacttgggccaagaagctggcttctccttctccttcttcttcttcagcaactttaaataatgagaagagaaggatggcagaagagtctctcataacagttatgtatttgagcacctggggtcccaattcttagagttagaaaacattagattaatgataaatattagtataattcagcaaggcacacaaatatgatgccagtgatgatc

SEQ ID NO: 50100 - DNA, 316 bp, Glycine max
  unsure (1)..(316): unsure at all n locations
  Clone ID: LIB3107-057-Q1-K1-B4
ggcgccaaagaaaaaaaaatcctaattttctgagcagccaaacactctctctctgtctctcgaaaattctcagtttgcagagaaaatctgaatcatgtcgtggcaagcgtatgtcgacgatcaccttctgtgtgacatcgaaagtaaccacctcactcacgctgctatcatcggccaagacggcagcgtttgggctcagagtaccgacttccctcagttcaaacctgaggagataactgccatcatgaatgactntaatgagcctggatcacttgctccaactggattgtatctcggtggcaccaaatatatggtc

SEQ ID NO: 50101 - DNA, 487 bp, Glycine max
  unsure (1)..(487): unsure at all n locations
  Clone ID: LIB3107-057-Q1-K1-B5
ggaccacccacgcgtgcggccacgctgtccgcgcgagagttaccacattttggatgatcacccganacccaaacagaaaaggcgagagaaaaattcttaaatcataatttaattgattccatgatcttattgatctattccacatcataatgctctacatacattataataacttatctactcgagccgtacccatataaaacttcttatacctttctagacggcgggtgcattaattatctatctctatccccaagaacctattatcgaatccctgcaatccacgttagatctccaacacagacaatagatccttcgaaagtgcttctttatgatccaataaagatatcaacctatttaaatattccagttatactatatttactacaacgacgcgctcatcctacaggaacagctcaggacattacataaaaggcttgtgttttatggaacttatcctttatcaacacactaaattccttttatt

SEQ ID NO: 50102 - DNA, 452 bp, Glycine max
  Clone ID: LIB3107-057-Q1-K1-B6
gttactttattctcgcttggttgcagcttcagcagcagcggcaagcaactccatccgcaatgggaatcgatttgaaggcaggaggtaagtccaagaagaccaaacgtacagcccccaaatccaatgatatttacctcaagctcctcgtcaagctgtaccgttttcttgttcggaggactggtagtaacttcaatgccgtcatcctcaaacgccttttcatgagcaaggtcaacaagcccccgctatccctctctagattgattcgttacaccaagggaaaggaggataagatagctgtggtagtcggggccgtgaccgatgacattagggtgtatgaagtccctgctctgaaggtaactgccctgaggttcactgaaactgccagagctagaattgaaaaggctggtggcgaatgcctcacctttgatcaactggctcttagagctccactc

SEQ ID NO: 50103 - DNA, 487 bp, Glycine max
  unsure (1)..(487): unsure at all n locations
  Clone ID: LIB3107-057-Q1-K1-B8
gagacgacagaaggggactccttgtgtagcattctgatgccaattgttctaaaaaatttgctgaccctggcgacctcaactatccatccttctcggttgttttcggaagcaacaaggttgttcgatacacgcgcacgttgaccaacgtgggggaaccgggatccgcgtatgacgtggcggtgagcgcgccatccaccgtggacataacggtgaatccaaataagcttgagtttggagaagtaggggaaaggcaaacgtacacggtgacatttgtgtcgaataggagtgttaatgattccgctacgtctggttttggtagcattatgtggagcaatgaacaacaccaagttaggagcccggttgcatttacatggacctatttttgaggtaatgctagagtgaaatgaaaaagaaaagctgcatgactntagtctctagtcacattgccgttgccatcagtcgagattgtaaaagcaacattgacagt

SEQ ID NO: 50104 - DNA, 466 bp, Glycine max
  Clone ID: LIB3107-057-Q1-K1-C1
gaacccggttagtacattgggtccagcaatagctgcaaacaactacaagggcatatgggtctatctcatagctcccatacttggaactctatgtggggcaggtgcctacactgtggtcaagctgcctgaagaagaggcaacaaagacaccttcttctgctcctaatgggagcttcagaaggtgatgatatatatatgattaatcattttcatgcatccccagcaattcttcatcacatgatgcaccttagaaaaacatacctcgatcagaatcagccatatgggatatgagatatttgtgcatgcatgatgatatagatattgccggaagaagcaagcaaaattgagcacttgttggtgcatgcacgtacgtatactagctatattagatatcgatctgtgtacttcagatgcatcgatgtgtactggtaaatatcccaggacgacaaaatgatcagtgattttgt

SEQ ID NO: 50105 - DNA, 398 bp, Glycine max
  Clone ID: LIB3107-057-Q1-K1-C10
cgttggtctcccctttctgcttatcctcaccactcagaggttccaagcagggctaaatcaagtgctctcaagtctatggagaacgagcctaaagctgctcagctgacgaccttttatgctgcgcatgttgctgtgtttgatgatacccctgctgaaaaattggaggagataacgacatcagccggcaagggaatatcccaatgccaaaacacctctgctcatgctcacactcataaccagcaagcgaataatccctcctttggacctaatatctgccatgaagcaccgatcacaccactcgtatgtgatctgccaattgctaggaaagctgcacttcatcggcttctttctaagagaaaagaatagattgctgccatagcaccctatcaaataaacaa

SEQ ID NO: 50106 - DNA, 452 bp, Glycine max
  Clone ID: LIB3107-057-Q1-K1-C11
ttgttggaaagcaactggaacagacaagatcatgaccactgaaggtagaaaagttggcataaaaaaagcacttgttttctacattggcaaagcacccaaaggctccaaaaccaattggatcatgcacgagtatcgccttctcgattcttcccgcaaacacaacctcggaaccgcaaagcttgatgattgggttctatgtcgtatctataagaagaactcaagttcacaaaaggttgaggctaattttttggctatggaatgcagcaatgggtcatcaccttcttcatcgtcccacgtggatgacatgctgggatcgttgccggagataaatgaccggtgcttcaccctgccacgagtgaactcactcagaacaatgcaccagcaggatgagaaattcgggtctccgaacatgggatccgggtttttctcggattgggttaactcgaccgatc

SEQ ID NO: 50107 - DNA, 456 bp, Glycine max
  Clone ID: LIB3107-057-Q1-K1-C2
gacggctaaaagctataaatcatcgaagtactcaaattagcatggctgtcacggctgcattcttgaatttgatcatcatgttttcagtagtctctacaagcaagtcactgagcttaaactactattcaaaaacatgccctgatgtggaatgcattgttgccaaggcagtgaaggatgccactgctagggacaaaactgttccagctgcacttctgcgaatgcacttccatgactgtttcgttcgggggtgtgatgcctctgtgctgctaaattcaaaaggaagcaacaaagcagaaaaagatgggccaccaaatgtttctttgcatgcattctatgtcattgatgcagcgaagaaagcactagaagcttcatgcccaggtgtggtctcttgtgctgacatccttgctctagcagcaagggatgcagtttttctgtcaggaggacctacatgggatg

SEQ ID NO: 50108 - DNA, 463 bp, Glycine max
  Clone ID: LIB3107-057-Q1-K1-C3
gtcacagaagttgcagcttattctgttccagccaagtgttcaccggagaaaagtcacaagaaagaggaatacaattactctgatgtcaacagtgaccaggaccattcatctgatgaaaaataccatgcaaaaattgacaagcattcaccatcaagatattcagttgcgcaaaaggatctggcatcaactggaggttcatatcagcaggaagattggcacactgatttactcgcttgttgttctgaaccttctctttgtatgaagacattcttctatccttgtggaacattttcaaagattgcttctgttgcaagaaacaggcccatatcatctggagaagcatgtaatgacttgatggcatattcgttaattttgtcttgttggtgctatactcgctgcgtaaggaggaagcttccgaagatgttgaacatcacagggggctttattgatgatttcctctctc

SEQ ID NO: 50109 - DNA, 471 bp, Glycine max
  Clone ID: LIB3107-057-Q1-K1-C4
cggatgtctattctgtccccttctatttcaccaaatctcacacctatccttctacttattaaataataatccactttacacactaggtttttttttagcattattattattactataatataacgtttgaaattgaggtcattcatttctattctctcttgttgattagatctcattttctaattccatgtcggttctgtcgtgattttgtttgttgaccatgccattaattaaaggttctatatagaatttagatattagattagattctcttccaccacttcagtgagctgtttctggtacggactttggaggccaagatactagtattttactattttaagcattatgatgtatgcatcttaccctccactagttaactattttcccacttatattatattttaagtatagttatagttaaagtagttaataacatgcattttagttaccttaaaaaaaacatacatt

SEQ ID NO: 50110 - DNA, 312 bp, Glycine max
  Clone ID: LIB3107-057-Q1-K1-C5
gtatctattgtgtgatagtgtgcagacgcaactggctctgcttatattgtcgtcctgtgtggagtctagttttgtctctcacctgaaaacaaaatgcttcggtggtaacaaaactcccggaagctactcgcaatccttcaccagcagcggtggctgtgcgacaaaacgaaacttgacctactctaagtcaacattcaccagaaaccttgcccaagtgattagcaccttaccaggctaaacccaactcttctgaaataaacttgctcttatcgaacggaaccatttcaaaaaatcgctactgttccaagaacc

SEQ ID NO: 50111 - DNA, 248 bp, Glycine max
  Clone ID: LIB3107-057-Q1-K1-C6
ccacgcgtccgcccacgcgttcgtactgtttctttatgacacataagggcagaacaagtgtggcagggggtttattaactaagatctgtggccagagagatggttagattgatagaaacagccactgttacaatatttgctgaagatgtcgatggccacgtaaatgtttggaatgcacaggtttcagaattaacaggtctgcaaattaatgtggctattgggaatgttttgattcactatcatgactt

SEQ ID NO: 50112 - DNA, 449 bp, Glycine max
  Clone ID: LIB3107-057-Q1-K1-C8
ttgggcaaggtccgcatgatgcttccgaggagcattcgatgcaacacttgcggcaattacatctacaaaggaaccaagttcaattccagaaaggaagatgttattggcgagacatatctgggaattcaaatattcaggttctactttaaatgcaccaagtgctcagccgaggttaccatgaagactgatccgaataattcggattatattgttgaatctggtgcgaccagaaattttgaaccttggcgtgcataagatgaagaaactgataaaatgaaggagaagagggaagctgaagagatgggagatgctatgaaatcattggaaaatagaaccctggattctaagagggagatggacatccttgctgcattggatgagatgaagtcaatgaagtctatgcatgcaactgtcagtgttgatgaaatgctggatgctctgcagcgcac

SEQ ID NO: 50113 - DNA, 456 bp, Glycine max
  Clone ID: LIB3107-057-Q1-K1-D1
attctagtttctcataagatgacatttgatagaaattgttagaacttgcctatcatagaaccagtctagtaaaatgattacctctggtctttcatttaacctatcatcttcattcttcacagttaagaaggatctttattaacacaaatgactttttatttgaatttcagattcctataaatgctgctggtttgattgagtataggtgccaccccttttggtcgcaaaagtattgtccatctcatgagtatgataatacagctcgctgctgtagttgtgaaagattggaggtattaatttaagcactccagactatttaatgattcgtattttcagaacaggtatttatctgaatcttttttgctactggtgtgtttcgcttgaagcctctgaacataaaatactatagactataagatggacggagtttgtgtttagagtgcatggaatctgcta

SEQ ID NO: 50114 - DNA, 78 bp, Glycine max
  Clone ID: LIB3107-057-Q1-K1-D11
gagcgtattttaaatggaaagatatgaaagctactatcctggagtcaatgcctagacgaaatatacatacgttcacga

SEQ ID NO: 50115 - DNA, 239 bp, Glycine max
  Clone ID: LIB3107-057-Q1-K1-D12
tacgggtactcactcagcctcttctcccttcatctacggagaatgtctgatcaacaaaaccatgacttcaagctggggcaccattctctgggagagaagaagggaaaaaggaggaaaaagaagaaaatactacccagttatacatcattactacttcatgtcaggaagctagggcgtgtactaaggggctaccatctttgaatctacaattatataggtaattcacatgctatctttct

SEQ ID NO: 50116 - DNA, 423 bp, Glycine max
  Clone ID: LIB3107-057-Q1-K1-D2
gggatgatcacacgtgaaagaagaagaagaagaagaagaagaagaaaagggttttgtgtgtgtcgaagtggataattccttccttcaattaatctccgatccgaaaccgtatggggattctatacgcactggtaggtcgcggatcggtggtgctggcggagttcatcggcaccaccaccaactccagcgcaatcgcgcgtcaaattctcgagaaaacccccggcaacaacgacatgcacgtttcttactctcaagatcgctacatcttccacgtcaaacgcaccgatggactcaccgttctctgcatggccgacgataccgccggcaggagaattccttttgcttttctcgaggacattcatcagaagttcgtgcggacttacggacgcgccgttcactccgctcagccttatggaatgaacg

SEQ ID NO: 50117 - DNA, 387 bp, Glycine max
  Clone ID: LIB3107-057-Q1-K1-D3
ggcagcgttaactgtcgatccgaagaatacccttttcatctctctctacaataatcatcctcttcctcttcagtaaattattgtacctgacgatcttctcggtttgatcttatatcaatggaaaatttttagacagaactcggattcacagggaaatctaattgcataggaacagtaaagacaacacctttttatctctacacaagtgattatggcggttgctgagaatgttggggccaaaatcggttcttccagtcaaaatttagaaaacagtgtagtatcatcggactcgggcgaggttgagaaatcaaaacccagaagtgggtccatcaacgacgatcagaagctgaacaacggtgtcttcaaccaccaaaatagagttcctgg

SEQ ID NO: 50118 - DNA, 314 bp, Glycine max
  Clone ID: LIB3107-057-Q1-K1-D4
tcggaaagggcagatgtcggatgttattatcattcacaccacagagcgaaactacaaactcaggacgagaatgttcttttgagaatgcaacccgagctctacccatccacttttgcagatggggatttttcacgtaactggaggggtcatatacatagtttggagaacaggactatctgtgtgccacgcccaggaaagacaaaccatggtaagtagcacagttcaccactgtcttgatgtaatggaggttgacaatagtatataactcacactatgctctgtgttaacggtcagtgcaagaacacataaagcgt

SEQ ID NO: 50119 - DNA, 209 bp, Glycine max
  Clone ID: LIB3107-057-Q1-K1-D7
ttcctcttcagtaaattattgtacctgacgatcttctcggtttgatcttatatcaatggaaaaattttagacagaactcggattcacagggaaatctaattgcataggaaccgtaaagacaacacccttttatctctacacaagtgattattgcgggtgctgaaaatggttgggccaaaatcggttcttccaatcaaaatttataaaac

SEQ ID NO: 50120 - DNA, 438 bp, Glycine max
  Clone ID: LIB3107-057-Q1-K1-D8
agctacaacacagactagtgaggctcgtacacaattacactagcaatgaatggttattataaatactagtctaagtctttcggaatttactattccgcttatgaacatcatagtaagggttgggcagcttctattatcgaaaacccagacataagtgttctactttctaattaactccatagtcatgagcacttgcaacacactgcaagaatgcagccctgcaaagaggttaaaaatatattaatgatagttttatctaaattttaataaagagtgttagtatatgtcatcaattattatatataataattattatatgttaatatatatggaaggattactatcttcacacataagttatattatttaaatttataaaaatatattttatatccacacatgcttttatttgatattaatcttttaagaaaaataaaa

SEQ ID NO: 50121 - DNA, 265 bp, Glycine max
  Clone ID: LIB3107-057-Q1-K1-D9
cgctcgagttggccgccagtgtgacggatatgtgcagactgccagcacactgccggccgttgctagtggatttttgacgtgcgtgctcatcgacagcgtcttggcgggcggccccagcgcgccggcgacggaccgcggacggccgtacttggcctggcactcgtccacaatctgccgcacgagcttgtctctcttcatgctgatctcgcgggccaaacgctcggcgccgtcatcagcctggctgctccggatggcgtagaaggtg

SEQ ID NO: 50122 - DNA, 462 bp, Glycine max
  Clone ID: LIB3107-057-Q1-K1-E1
gaactgttgtcagtgtgcttgtcaaatttataccactcgatggaatgcagaaccgaaaggtctgtgttctttgcaacctaaagccagtaaccatgaggggcattaaatctcaagcaatggttcttgctgcttccgatggtgatcacaccaaggttgagttggttgagcctcccagttctgctcaaccaggagaaagaattacattccctgggtatgaaggtaatcctgatgaactcttaaacccaaagaagaaagtttgggaaacattgcaagtcgatttgcacacaaatgaggaactggtggcatgctacaaaaatgttccactcaccacatcagctggcgtttgcaaggtttcatccataagctgtggatccataaggtagacaacgagttcaaaaagagagaaaaaaaagggaattaaaaaaagaaagaatttgcttttttatcttgtgcctttttttt

SEQ ID NO: 50123 - DNA, 469 bp, Glycine max
  Clone ID: LIB3107-057-Q1-K1-E10
ggttatgattgggaaggagatgaatctgagtctaagagaaggaaactggaatcatatgcagagtggagtggagctactagagccattcgcgagcctagagttgttgtacagactaccagcgaagtagatatcctcgatgatggctatcggcggcggaaatatgggcaaaaagttgtcaaaggaaatcccaacccaaggagttactacaagtgcacgaatgcatggtgcacggccaggaagcatgtggagagagcatcacatgaccttaaatctgtgatcacgacatacgagggaaaacataaccatgatgttcctgctgctcgtgccagcagtcacgtcaacgctaatgcttccaatgccgttactggccaagcttctcttcagactcatgttcatagacccgaaccatctcaagttcacaatggcattggaaggcttgagaggccttctcttggctcattcaacctac

SEQ ID NO: 50124 - DNA, 354 bp, Glycine max
  Clone ID: LIB3107-057-Q1-K1-E11
tgtgggaatagttttcgaaaagtaattagcttctctctctgacttggtcacaagacaacagaggaacactcccaaacaaaccatggacgtgggtcagacgcagagacagtgtatcgactacaccaaatccatatatcttgagggcttgctggatggccagtgtaatgctactccagcagcttcaggatgagaacaaccctgactgtgtggtacaagttcactatctcttctttgacgattctgaaaggcttctgaaagagctcacctgagccctagatcagaatggcgacgtattcaaaaaagcagatgcacatgtgcaccacttaaagggccgcaattcaagcatacgttcac

SEQ ID NO: 50125 - DNA, 353 bp, Glycine max
  Clone ID: LIB3107-057-Q1-K1-E12
caccgattgggacgaagtttaggatcgaaatggaaatagacgggaatagaggggtaatcctaggaggtggcgttgcgggatccgtcgtcgctaaatctcttcaattccatgcccatgtcacactcgttgatccgtaatcaaaacattctctgcaattttttttttttatgtttgattattgaagcagtaatttttttgtttgaatttagctaattacccattttctgtatttaatccataaggttaatgggttgaagtttatgcactgtgttttttggttaatgcatagtgcgcattttatacccttgctaatttttggaacccttatcgcactcaatttttgaaatctttaa

SEQ ID NO: 50126 - DNA, 370 bp, Glycine max
  Clone ID: LIB3107-057-Q1-K1-E2
tattggggttctagtgtgtgatcgtttggtgttgcgactggttcttcttcttttggtgttctgtgtttgtgtttgacttttctctcacctgaaaatgtcttgctgcggaggtaactgtggttgctgaagctcctgcaagtgcggcaaccgctgcggaggctgcaagatgtacccatacttgagctacactgggtcaaccaccaccgagaccttggtcataggagtggcacctgttaaggctcaatttgagggtgctgaaatgggtgtgcccgctgagaacgatagctgcaaatgtggaccaaactgctcctgcgacccctgcacttgcaagtgaggtgttgggagagcaagcttcaagcagagatagccc

SEQ ID NO: 50127 - DNA, 445 bp, Glycine max
  Clone ID: LIB3107-057-Q1-K1-E3
tcttcttttcattttatatgccactttcgaatttgggttgggctgaatgctacattcacaaaggattgaagctcaactgaacgtaataacaattcaaacccgttgccttgtatctgcttggaaggtgggtcatggagagaaaggaaacgaggataatttttttagattatatattatgtttataaaaacaaacaaaaagttaggacattaaattcatgcctggccggagcataacacatacctttgtatactgctccaaaacctattggtgtctgtgagattatgttagatattattcctgatattgtatttattattagaatattctatttcctattaattaggaatggattgatctttgaatcaatattgcatttcttttccatattataaatagcatgaggtgtggtctacattgacacacaacattacacacgtaaacact

SEQ ID NO: 50128 - DNA, 416 bp, Glycine max
  Clone ID: LIB3107-057-Q1-K1-E4
tatgggggcccaatattttttatagcattttcagaggaacaatggcgggtagggtttcgacgtgcttcttcttcgtgtttgctctttctctccttcttcctttttagatctccgctgaggaatcatcggagaaagagttcgtactcacattggatcactctaactttcacgacactgtcagcaagcacgatttcatcgtcgtcgagttctacgctccatggtgtggccactgtaagaagcttgctcccgagtatgagaaagctgcttctatcttgagtagtcatgatcctccggttgttttggctaaaattgatgccaatgaggagaagaacaaagaccttgcatctcaatatgatgttaggggatacccaacaattaagattctgagaaatgggggaaagaatgttcaggaatac

SEQ ID NO: 50129 - DNA, 390 bp, Glycine max
  Clone ID: LIB3107-057-Q1-K1-E5
tacgggttttcattatatcacaccacacaaaaaagcagaggagagggtacaactgttactcacacacgccatgggtaaatgaatggttttcgagcaacagcatttaaaatagaaaagggattcatcgaagatgacatcggttggtgtggcaccaactattggtttgagagaagccattgtgcatggaacagacactgctgatagattgctagaggagatgaacgatctgaaaattagtgatgatcgagaaatggagtccgcaatcttttgtggctactgaacggacacaggacatatcattgtgactactattgggggttgaaatggtcagctcaagctgactataaactgcattgcacatcgtgttgtaatgcatggatcatttggagt

SEQ ID NO: 50130 - DNA, 251 bp, Glycine max
  Clone ID: LIB3107-057-Q1-K1-E6
gggacgggttaaggtgattgttcttcacaactctgtacgctgatctcctttagtcctttgtcaccgctccgtcggcaaccctacctttggatctgcgtttgcccttcatgttttgaagtccgaaggacgaacaagaagagattcctgacagcgtaatcatgttttgtgtcctacggcgaatggttgcttctagcagcccgtctccttggttgctaagacagtctgctcataaaattccgtcttgcccatca

SEQ ID NO: 50131 - DNA, 442 bp, Glycine max
  Clone ID: LIB3107-057-Q1-K1-E7
ttttagttgggggaaggagtgaggtagcaacagcgctgccactgccactaccaatagcagaatgggaaccttgggcagagctttctacgccgtcggattttggatccgcgagaccggccaagccattgatcgcctcggctctcgtctccaaggcaactacctctttcaagaacagctatctaggcatcgacctctgatgaatctgttcgacaaagctccctcggttcacagggatgcatttgtggcccccagtgcctcccttctcggcgatgtccacgttggcccagcttcctccatttggtatggatgcgttctcagaggtgatgttaacagcattactattggatctggaactaatatacaagacaattctcttgttcatgttgccaagtctaatttaagtggaaaagtcttgccaactatcattggagataatgtcact

SEQ ID NO: 50132 - DNA, 493 bp, Glycine max
  Clone ID: LIB3107-057-Q1-K1-E9
cgcgcgagcagccgccagggcgaccgacacgtgcatactgccgccacactaccacacattgctaaagaatttctctcacaaagtagacgtttgggttataaggcgaatgtgccaaaacagatcgccgaccatagcatgtgcttattgaagctccactgagcgctgaatctacttggtctgcttgagagatcgatcgtgttaacacacatgtaactgcagtaaatcaagtggaataatgatatcacacatgctcagaatataaacctgaccagatttataaattttttagttcacacacactctaatatatccgaccttgagcctttctcctgatcttgatgtgcgaatatacaaaaagctgctaacaactcagtctaatattatggctctgaaagatgaggctaagtatagggtgcctgactctataggaccggtatcatgaatatcaggagcgcagaacccataaatgtagtttacaatagcatggcctata

SEQ ID NO: 50133 - DNA, 449 bp, Glycine max
  Clone ID: LIB3107-057-Q1-K1-F1
agacgacagaaggggagaccaagaattggtttgtagttttcatcattactccgatgaaataaagttgcgtcatataccattagactggtcaaagctcgtgagtcacttgtctttgtttcttgttgagtaacaactcaacctgtgacagtttcaaatgagtgaagcaacggcaagattcgaacggcgggtcctggtggcggtggacgaaggcgaggagagcatgtacgctctttcttggagcctcaggaacgtaattttccaaaattccagagatacccttatccttctttacgtcaagccccctcatgccgtttattcccccttagattccactggcaggatagatgatcctgaaactccagttttggtgaattaaagcggtggtgttaggatggttaatttcaagatatttgttttcgccggacataaatgcggccatcgagaagtac

SEQ ID NO: 50134 - DNA, 466 bp, Glycine max
  Clone ID: LIB3107-057-Q1-K1-F10
gagcaaattaggggtgacaatggggaacttcgattctggtggcaatactgggtcattgtagcacttttcacagtactggagaattttaccgatgcagttattggatggtggtttcccttatacggagagttgaagcttgcactctttatctacttgtggtatcccaaaactaaggggacgggatatgtatataatactgtgctgcggccttatgtatcaagccatgaaaatgacattgagaaaaagttccgagagtggcgagctagggcatgggatttggccattttttactggaaaaactgcacagagttggggcaagctacaacttttcagattctcgactattaggctgcacagtctaaaaaattctgcagcaaatcttactctgagaaaaaagacaagctgtgtccaactccaagtgccccaccattatcttcacttcgagaaactctctttgagaacaacc

SEQ ID NO: 50135 - DNA, 451 bp, Glycine max
  Clone ID: LIB3107-057-Q1-K1-F11
ttgggatcttcaacttatattctccataaacacatcaaactattagcaatttagcaccttctactactttgtaatcgttcaagagttgtgaactgtgaagaatgagttcaacaagccgtgcttggacttggagcgtggcagcaagtgttggagtggtggaggccttgaaggaccagggtatatgcaggtggaacagtgtgatgagatcagcacaacaacatgctaaacataatatgaggtctttgtctcaaaccaagaagttttcttttcaatcatctgcgatggcttctgccaaattgaaagatgagaaagctaagcagtcagaggagtctttgagaacagttatgtacttgagttgctggggtcccaactaaacaaagatgctaagacttcatgcaattttggatttccctttttttttcgctcggaatatgatgaggaatgaaagagc

SEQ ID NO: 50136 - DNA, 466 bp, Glycine max
  Clone ID: LIB3107-057-Q1-K1-F2
attgtaatgctgttgtatctttctctctcagagtttaaaaaggacagatgttaaatcactgctcagacagagtgtcattgctctttcgtccgaagttgatgaggtggtagaccctgtttttgcggcatatcatttgcaatccaagctaaaaagtaaatcacaatcattgaatgatacagcgactgcatctgacaatgtaatgcaagttccttgtaaaaagctaaagatctcctcatcttcaacttcagccaggtttcttgaacgaactactaatgtcaatccccaatgcagtaggaagactactgatgatgttcagttcctactagagaaggatagtgtggaggttgcagagatggtgacgaaatattccaatgatctatctagaacactagggtatatggaagaacaacttgagttgcttctagatactataatgttgaaatgcaagcccatgacccttgctgag

SEQ ID NO: 50137 - DNA, 411 bp, Glycine max
  Clone ID: LIB3107-057-Q1-K1-F3
ccagtggtttcatttttcggaccatctagcaactgcgggtgagatttttgttgtgcttgggcaggtatcaacagattacatggagtggttctttcggatatctcatcccttcatcacacccacacaggcaggtgataagcctagacattcacctgccccacagcatgaggaatacatcgagctaggtatcccggaggttcaagtgggagaaggacgtggaccgtcaaaggcatctgatccccctagacacgttgtggtaagattagttgctttaatgttttataaaatgttatttattttaaaagttgtaataaatgtatatttatgaatgtcataagatgcttatgaaggttgtgaagcgatcggagaaatattggagcgggtgctcaacctaatgatggtcactgaaag

SEQ ID NO: 50138 - DNA, 476 bp, Glycine max
  Clone ID: LIB3107-057-Q1-K1-F4
acagaagggggcaaaaatccgatcagaaaatttcatctaacccgtcgtagcagaaaaacttgtcaccatggtttcttccgacaaggatccacgagaggatgtccttcaagcctggtacatggatgatagtgatgaagatcaaagactcccccaccacaaagaacccaaggagtttgtctcgttggaccaacttgctgaacttggagtccttagctggaaactagatgctgataaccatgaaaatgatccagagctgaagaagattcgtgaagagcgtggttacacctacatggatgtttgtgaggtctgcccagaaaagttgccaaattatgaacagaaaatcaaaagcttctttgaagagcatcttcacactgatgaggagatccgcttttgtgctgctggaagtggctattttgatgttagggatcgcaatgaagcttggattcgtgtgtgggtcaagaaaagaggaatgatca

SEQ ID NO: 50139 - DNA, 445 bp, Glycine max
  Clone ID: LIB3107-057-Q1-K1-F5
ttttactttgagatatgtcgcgggggtcaggagagcttggggacgtcaggtggggtgctattgcccaaaaccaagcttgaccaatctcgacccaacccggtcatagtcagtcagtgagaacctgtgatgtacctaaacaggcgagctcctggcagtcattcaataaaagaacaaagaccacaaagcaaggaggcttgtgtggtggttggccagctatggatcttgagtgatatctggaatttggcctctggtaatcgattatcaagggtgtgtaatcgattacaaggcttaaaaatggagacaggaagttaagatggcctctggtaatcgattaccaagaggtgtaatcgattacaaggcttaaaaatggagacagaatgttgatgtggcctttggtaatcgattaccaatgctgtgtaatcgattacacagagtaacagggcac

SEQ ID NO: 50140 - DNA, 476 bp, Glycine max
  Clone ID: LIB3107-057-Q1-K1-F6
tatggggtttctccttatcatattgaggttgcagcgaagacggagagggaatgaaatgagcatatcctaatccagttatccataatttcataagcataaacgagaaattgagagagaatgtctcgtatctctacactctatcttctcgcttacaactcctttcaggccattggatggacgatttccttaactaagattttgtacaatcttctcgtcactgcatccatcaaaggaacctatgcttccgccgccagcttaatctgttttctgcaatgcgctgcattcttggaagttatacacggagccattggcattgtgcccagcggggttttgcttcctcttatgcaatggggaggaaggacgcactttgtgcttgccattgttaggaaacttgatgagcttcaagaattaccttcagttcttatcaacttttcttgcatggagcatggcggaggtcattagatattcacattatt

SEQ ID NO: 50141 - DNA, 430 bp, Glycine max
  Clone ID: LIB3107-057-Q1-K1-F7
tctgagtttagttttaccattccaaattccaattccacagatcactattaaacggtaaaagcagggctgagaagcaccccactttgataggatgcttatttctcactgctttgatcaaatttcttttttccccctcatggatacactgtataaaactataacattaaacataacctatcctatttattttaaagagagaaaaaacacaaaccccataattatttttttttcaataaaagaaattaagaaaggatcatctaactctgacctggggttgtatgagcaagggaggtggtggctcatatggtccaggtccaggtggagttaactgaaccaaaagatctgtgaatccattggtattgccataaagcgcttcaagtggcagaaatttgatgtcttgttcgtactcatcctttttaactcctgaagt

SEQ ID NO: 50142 - DNA, 410 bp, Glycine max
  Clone ID: LIB3107-057-Q1-K1-F8
gggtcgcacccacgcgtccgcccacgcgtccgcttacgcgttcgcactgttgctttatgacgacagaagggaataactgtgaatggagcagaacagttgggaaatattcaagtacctaaaagagccagttatatccgagtaataatgttggagttaagtcgtatagcttctcacctactatggctaggaccttatatggcagatattgatgcacaaaccctcttattatatattttcagagaaagagaattaatatatgatctatttgaagctgctacaggtatgagaatgatgcataatttttttcgtatcggcggggtagcgactgatctaccttatggttgggtagataaatgctatgatttctgcgattatttcttaacaagaattgttgaatatcaaaaacttat

SEQ ID NO: 50143 - DNA, 308 bp, Glycine max
  Clone ID: LIB3107-057-Q1-K1-F9
tgtgggaaggtgcttgagtttgttgggagctataagctagtttatcgcgaggagaatatgaaggtgtttggtttctttgttgctgcagtagtcttggtagcatggccatgccatggcgcaagctaccaaaggttccctgtacgaatgaaaactggatatggtgagcgttcttcggaggtaaaatgcgcaagttttaggcttgctggggaagcacacaacatccgagcctttaaaaccatgtcttgagagtgcgttgaaccaacaaaggactacattaatggcgaacaatttatatcagactctaaaac

SEQ ID NO: 50144 - DNA, 435 bp, Glycine max
  Clone ID: LIB3107-057-Q1-K1-G1
ggcatagcagcatcatacaaagcattgaattcaaaaacttaagttcattccttgtgttttgctttcttcctcaaaaccaaacatgtcgaacacatgcggcaactgcgactgcgctgacaagactagctgcaccaagggaaacagctatggtgttattgtagagactgagaagagttacatcgagactgttgtcatggatgttccagcagctgagcatgatgggaagtgcaagtgtggcactaactgcacttgcacggactgcacctgtggccattaaggaatatgtatgaaaatgtaattgccatgtgtttggcaatacaaatatccaaataatgtaatcttcgtatgaataaatgtgtgtgctgttatcctacttcaggtctgtgtagtcatgcagtctgaatcatttcaagttcctgtcttagttaatataac

SEQ ID NO: 50145 - DNA, 252 bp, Glycine max
  unsure (1)..(252): unsure at all n locations
  Clone ID: LIB3107-057-Q1-K1-G10
gaaggtgcagaatccagccactggcggcctttactagaggatttgcgacaacancacaggcgggagccancagagaacgctaaacgcgaacaacaacgccggcaacaacaccaaaccaaatgcccgcgcgccaggcaggggcaccacgaccaaacaccgcaaagcataaaaagcgccgacccgacctagaacgaacccggcccctctacgaacagctaaccgacgacacagtcactgacaaacatagccaaa

SEQ ID NO: 50146 - DNA, 127 bp, Glycine max
  Clone ID: LIB3107-057-Q1-K1-G11
ggtcaggaatgtgcaaaaaccatcacactgcggcctttactaatggaatgttaccacaccacacgcaagaggcatacacgatcacttttcactaatattactcccccaacacgactaaaccaaattc

SEQ ID NO: 50147 - DNA, 245 bp, Glycine max
  unsure (1)..(245): unsure at all n locations
  Clone ID: LIB3107-057-Q1-K1-G12
cgagttcttggagaggaganaggcgggcccanngagagagatggacccgaagccacaatgactggcataagcaaagaggcaatacacctcattacagccgctgcttaagggcaacaacaccttcatttatagtattttcacggtgagactgaagtgaacgctgatctctaatttccttctccatcccaggaatttggaaaaatagctagagtatatgtgtataaaaccaagccatcccaaaaaga

SEQ ID NO: 50148 - DNA, 380 bp, Glycine max
  Clone ID: LIB3107-057-Q1-K1-G4
tgttggggtttgcgtctggtgagttgagttcatggtcaacatgtcgatgctgctgaggaaggtgtgggaaagggtgttatggagatctgattcttcaacgtcagcatcagcatcagcatcatcttcatcatcatcatcaccaccagaagtggcatgttctgacatgggtgagttggagctgctacccagtgacatcttgatgcacattctgagacttttgggtccaaaagaggctgcaaagtttagtgtggtttgcaaggctttgagatcccttgtgtctgataacagactttgtattcactttcttcagacccatcatgctgagccctctgcggatattgtcttcttttcttagaccaccttgagctatggcttccctc

SEQ ID NO: 50149 - DNA, 429 bp, Glycine max
  unsure (1)..(429): unsure at all n locations
  Clone ID: LIB3107-057-Q1-K1-G5
tctaaggtttcttattctttctncaaattacctttcattgagctcagtgtcatgagttcacctaatgaataaataatgtaacctattacatatgcggaaaatgacatccataccatatcgaataaatgactaaaaataatttctccataaagtataacgactaaattaaataatatacagctatcagatacattttaacatttcatgtaaatatacagactaaaaatacatatttgactttcaattaatttacaatacttaagattctctttatgaaaattaaactcatagtcaattaaccacaatttatcatgtacaataaatttattaactcttccaataattattttaaaaattatataaataattatttgttatctgatgaaattatatgatgatgttactacataggcattaaacatatgattt

SEQ ID NO: 50150 - DNA, 426 bp, Glycine max
  Clone ID: LIB3107-057-Q1-K1-H1
tttgggtttttctctagggttttgactaacgtgggagctccgggaacgtacaaagcttcggtgatgtcgttgggggattcgaatgtgaagactgtggtggaaccgaatacgttgagtttcacggaattgtacgagaagaaagactatactgtgtcgtttacatacacttcgatgccgtctgggacgaccagcttctcacgtttggaatggacggatgggaagcataaggttggtagtccaattgcgttcagctggacatgatgggctgtggaaaatgtatgacccaaataaaagggcccactcaagtgttgtaggctcttcgtggtttgcttttgggcccggcccgatacagcttgtttttattatgtatctcacttattcactttgctgtttttattccgtaagctgaagttcacgagaaaactt

SEQ ID NO: 50151 - DNA, 353 bp, Glycine max
  unsure (1)..(353): unsure at all n locations
  Clone ID: LIB3107-057-Q1-K1-H12
cgcgtccgcccacgcgttcggctgcgagtttctacagaaggtttttcaagagtttgttgngagctataagctagggtatcgttaggagaatatgaaggtgtttgttttctttgttgctgcagtagttttggtagcatggccatgccatggcgcaggctaccaaaggttccctctccgaatgaaaactggctatggtgagcgttcttcggaggtaaaatgcgcaagttttaggcttgctgtggaagcacacaacatccgagcctttaaaaccattcctgaagagtgcgttgaaccaacaaaggactacattaatggcgaacaatttagatcagactctaaaacagttaaccaac

SEQ ID NO: 50152 - DNA, 412 bp, Glycine max
  Clone ID: LIB3107-057-Q1-K1-H2
ggccacctacctcattatttcaattttcccctctcttacggattcttttctctcttcccttattcatcactcttccaaaataaaattaaaaaaaaaacccacctttttagttttctctcatagtctcatctcatcacgacaaacaacaatctaatctatgcaaccccaaagaaacccaattcaatagaaaaagaaaacaaaaaatcagatgagccagtggatacacgtggcggtggcagcatccgccgtgggatgcgtctcgacccttttgttggtctttctctggcgttggtgccataaaagaaatcatcgcagaaatttcgttgagccggctagtttgaccagagtggagagtgtccagggagggatttctgttttcaggcttcatcaacaacaacgaccttttcaattg

SEQ ID NO: 50153 - DNA, 465 bp, Glycine max
  Clone ID: LIB3107-057-Q1-K1-H3
ggttctagtttatgttattgttgtgactcgttcttcttcggcgttatcttcttcttttgttgtttgtgtgtttgttttttctctcacctgaaaatgtcttgctgcggtggtaactgtggttgcggaagcgcctgcaagtgccgcaaccgctgcggaggctgcaagatgtacccagacttgagctacaccgagtcaaccaccaccgagaccttggtcatgggagtggcaccagttaaggctcaattcgagagtgctgaaatgggtgttcccgctgagaacgatagctgcaaatgtggagctaactgtacctgtaacccctgcacttgcaagtgaggtgttggagagctaaagcttcaagcagaaatggccccttaaaataatgataaaaactatatttagtttcaaaacttaaaaatatgtagtatgtattatgttgcactctggtgttttgtgtctaaacaaaca

SEQ ID NO: 50154 - DNA, 469 bp, Glycine max
  Clone ID: LIB3107-057-Q1-K1-H4
gtttaagcaagctctctcgtgttgctgatgtatttgcgaaacgacttcaagagcctcagcgtctggcagatgaggtatgctctgctttacatcggggaataaagccggcaggtgttgctatcacacttcaatgtacacatatccactttccagacatagaaccagtctttcttgactcaaaccatcaagggtgggtgaagatacttgtttcctcaggttctggggtttttgagaacaaaaatgcagatgtatgggatgatttctttggtcttcttaaatttagaggcatcaatatggataaaattcatttgagaggatcatctgatccatgctggtgtccttctcagtcttctctatctgccaaagtttcctcgaaaataagaccagtcaatcctgtaatggttactgcagtagcttcaattattgaatctttgggagaagatcctttgaggaaagagcttatagggac

SEQ ID NO: 50155 - DNA, 254 bp, Glycine max
  Clone ID: LIB3107-057-Q1-K1-H5
ccagaaaatgtctggttgtggccctaaccgggtttgctgaagcccctgcatgagcggaaacttctgtctaggctgaaaaattaccccacacttgccctacactgattcaccccccaccgatccctgggacaggggaggggccccagttaaggctcaatctgagggggccaaaaggggtgtccccgctgaaacacaatggctacaaatgtggaccaaactgctcctgcaacccctgcacttcaaagtgaggtttt

SEQ ID NO: 50156 - DNA, 453 bp, Glycine max
  Clone ID: LIB3107-057-Q1-K1-H6
atgtttgtcatgtattgcttgtctgtgttgttcgaatggtgcgttctgcggttgatagtgcaagacaagaggatactcctgggatagtgaaccttgtgttgcggtgctgtgtaaatgcattgctgacagcagttgattttcttaacaagtttaccataaactttgctgcaataactggtgaagcctactgctcttctgcaaggatgacatatgaacttctaagacgcaatcttctctctgctgtttttgtggagaccatctcatctcgcatcctggctggaattgtctttgttttttctgcatcatacacaatagtggcctgtgttatcttaaaagctggtaccaatcttgggtctgactcatattttgtggctgcgatggcatgggtgctactgatggtagtgctgggttacctcgtgcatgtgctagacaacgtaattgacacaatttacg

SEQ ID NO: 50157 - DNA, 442 bp, Glycine max
  Clone ID: LIB3107-057-Q1-K1-H8
gatagcagcatcatacaaagcattgaattcaaaaacttaagttcattccttgtgttttgctttcttcctcaaaaccaaacatgtcgaacacatgcggcaactgcgactgcgctgacaagactagctgcaccaagggaaacagctatggtgttattgtagagactgagaagagttacatcgagactgttgtcatggatgttccagcagctgagcatgatgggaagtgcaagtgtggcactaactgcacttgcacggactgcacctgtggccattaaggaatatgtatgaaaatgtaattgccatgtgtttggcaatgcaaatatccaaataatgtaatcttcgtatgaataaatgtgtgtgctgttatcctacttcaggtctgtgtagtcatgcagtctgaatcatttcaagttcctgtcttagttaatataacagccatggt

SEQ ID NO: 50158 - DNA, 355 bp, Glycine max
  Clone ID: LIB3107-057-Q1-K1-H9
cacactaccacacattgctgttctagtttgtgactgtttgatgccgaaactcgcccttgggcttttgttgccctgtgtttgcgtttgtttcttctctcacctgacaatgtcttgctgcggtggtaactgtggttgcggaagctcctgcaagtgcggcaacggctgcgtaggctgcatgatgtacccagacttgatctacactgagtcaaccaccaccgataccttggtcatgggagtggcacctgttaaggctcaatttgagggtgctgcaatggctgtgcccgctgagaacgatggctgcaaatgttgaccaaactgctcctgcaacccctgcacttgcaagtgaggtgttgga

SEQ ID NO: 50159 - DNA, 182 bp, Glycine max
  Clone ID: LIB3107-058-Q1-K1-B7
ggttccaaaaaaccaccaaagggttcattttcgagatgacaacacaaggggacctggggtacctctaattcgatatccaaaaaaaaaaaaaaagcgggcgctctagaggacccaagcttacgtacccgtacgttccacggcatacccatgctataccggcaccaaccatcaatccagagaca

SEQ ID NO: 50160 - DNA, 75 bp, Glycine max
  unsure (1)..(75): unsure at all n locations
  Clone ID: LIB3107-058-Q1-K1-B9
gacttcagaagggtatgtactcctcanaaaaaaaaaaaaaaaaaaaaggaaggttataaaaaaaaaagagggccc

SEQ ID NO: 50161 - DNA, 260 bp, Glycine max
  Clone ID: LIB3107-058-Q1-K1-C6
gaaaacccggcccggaccaacccgtccgaccgcttgcaaaaaacttacaaaagggaatatatattactcatcaacatacgatctactgaggatatacaaccatgcacaatattgaataccatagtctctaccaacaactactatggcccaaaaaaaaggaaaaacatgaacaaaacaaagcggccgctctagaagatccaagcttacaaacgcttgcatgcgacatcataactcttctatagtgacacctaaatacaata

SEQ ID NO: 50162 - DNA, 456 bp, Glycine max
  Clone ID: LIB3107-058-Q1-K1-G10
cgcgtacgcccactcgtccgtactgtttctagaaacgttttaagggggttctagtgtgtgattgtttgtggttgtttctcaatcttcttcgtttgttgttctgtgtttgtgtttgttttttctctcacctgaaaatgtcttgctgcggtggtaactgtggttgcggaagctcctgcaagtgcggcaacggctgcggaggctgcaagatgtacccagacttgagctacactgagtcaaccaccaccgagaccttggtcatgggagtggcacctgttaaggctcaatttgagggtgctgaaatgggtgtgcccgctgagaacgatggctgcaaatgtggaccaaactgctcctgcaacccctgcacttgcaagtgaggtgttgggagagcaagcttcaagcagagatagcccttaattaggaataatgataaactattaatgtgtaacttaaaactta

SEQ ID NO: 50163 - DNA, 195 bp, Glycine max
  Clone ID: LIB3107-059-Q1-K1-A1
tttttcttatcagttccatagctagctgtgtggagacgacaactgccacccattccaacatacagagaggctatttactaattactgttcctcgtgtgaacaaacatataaaccacctcggattttgcttcctctgctgtgttttaacgacaacgcgtttctttgcttatacactaagatttcaaacggcgattc

SEQ ID NO: 50164 - DNA, 434 bp, Glycine max
  unsure (1)..(434): unsure at all n locations
  Clone ID: LIB3107-059-Q1-K1-A10
cactgcttgcacgtacgggaataaaatagcttactaatgaatattaatataattttgttaataacttacatgaatacatgattgggaatatatttcttgatactattttgtaacacttgaaataattgcatgttaagatgaatataattcttttagcatagaataacattagtaggctataatataagttaaattttagtaaaataaagcaaaaaactaaaaattcttcaaacatgtcggtaaattaggctacatattgtttgttatgatgagcattttaaaccaatggtcattactcaataacaatgtatcanggaattaactaataaatttttcaactttctcccaagaaaaaatattcatctctcacatgtaatattttatgtatagggtctattttaataaatttactttgatattttatatcaatattt

SEQ ID NO: 50165 - DNA, 444 bp, Glycine max
  Clone ID: LIB3107-059-Q1-K1-A11
gctgcgagagactacagatggggttttggaattgcgatcccagtgttagtgtgtgtttcctcggttctcactccgggatcgatattttcaagaacagatcgaaaagccgttcatcgatttgttggatctgtgagtgagaagatggttactaagacagaggagactcaattgaacaggctcgaaaaccaggtcgataacggcggcggcggcgcgtgggagtacctctgcctcgtgcggaagctcaaagttcggcggtcggagaaagttctgaagcacggtctctccatcttgaacgacctcaaacaacgatcctctctcggctccgatgaatggaccttgtatgagcaggttgctgttgctgctatggactgccaatgtctcgacgttgccaaggactgtacaaaggttcttcggaagagattcctataaagtaaaagaatttgt

SEQ ID NO: 50166 - DNA, 323 bp, Glycine max
  Clone ID: LIB3107-059-Q1-K1-A3
gcagggaaaagagtgtcgtgtggtctgtagcatcaaaaccgtgctgtcaattcgaatttggtagacacactaatacttgttttctttcgatgctcatgatggcagaccaagctcaagtattgttctctttggagtctacagatcacgcgcctgtgaagcgcgttggcacgcacaacggaagctttcactgttacgaggtccatgactgcttcatgattagtgtcacgaacatatatagcagcgacgaaattggtggtttccgaaaccctgaagtggaggaggatcatgatgctgctcacgatgttgggggagtgtatgaccct

SEQ ID NO: 50167 - DNA, 384 bp, Glycine max
  Clone ID: LIB3107-059-Q1-K1-A4
cataggatttagggatgatgcaggtcgtctagttcggacagagaggcttagaaccaaagatataacacagagagtgaaaatgaagaactactggcagggaggagtctgcttggcgtttgctgatgaggtattatgctggctgtatggaacagtcaaagaaggtgaagattatattttgcagtttgctccacctttcaaccgtttagagcttctgcaagcccagtcttgcccagatgtaattactagtcatctggagcttttctgaaaatttggagaccttaacagttattattatttaaacaattcaatatacgaaggggaatcaaccctggatttttcccctccgctttgatcagtccacgaatttttagtataagggcaccc

SEQ ID NO: 50168 - DNA, 430 bp, Glycine max
  Clone ID: LIB3107-059-Q1-K1-A6
gagtgtgtttaaggtgttcttagattgactaaatctgactgccgagagccagtaaatattggaagcgatgagatggttagcatgaatgagatggctgagattattcttggctttgagaacaagaatattcctattcaccacattcctggccctgagggtgttcgaggtcgtaattcagacaatacactgataaaagaaaaacttggttgggctccaactatgaggttgaaggatgggttgagaatcacatacttctggattaaggagcagatcgagaaggagaaggctcaaggtattgatatatctgtgtatgggtcttccaaagtggtgcagactcaagccccagttcaactaggctcacttcgagctgcagatggcaaaagaatgaggtggtcaacatatggctgtagtaggattcaccttaatgttt

SEQ ID NO: 50169 - DNA, 397 bp, Glycine max
  Clone ID: LIB3107-059-Q1-K1-A9
ggttctagtgtgtgattgtttgttgttgtaactcgttcttcttcttttgttgttctgtgtttgtgtttgttttttctctcacctgaaaatgtcttgctgcggtggtaactgtggttgcggaagctcctgcaagtgcggcaacggctgcggaggctgcaagatgtacccagacttgagctacactgagtcaaccaccaccgagaccttggtcatgggagtggcacctgttaaggctcaatttgagggtgctgaaatgggtgtgcccgctgagaacgatggctgcaaatgtggaccaaactgctcctgcaacccctgcacttgcaagtgaggtgttgggagagcaagcttcaagcaaagatagcccttaattaagaataatgataaactattaatgtgt

SEQ ID NO: 50170 - DNA, 347 bp, Glycine max
  Clone ID: LIB3107-059-Q1-K1-B10
gaaggcttagaagcgggtgtagtggaggaggaaggcggtgcagttgtagtagtagaggaggacgaggaggaaggtgacgagcgcgatgaggacgacgaagaccacggcgttgaggacggcgccctcgagcttctgggcggtggtgtcggaggggttctcggcgtagacgaggttggcggcggtggcgatagtggtggtggtggacggcgaggagagagaatacactaacaggaccacaaggaacatgcagatcgagactgggctcatcacgccgattatctccatgcccagacattccagaacgctcgattccattttcactattttttttcttttttttaagtttt

SEQ ID NO: 50171 - DNA, 436 bp, Glycine max
  Clone ID: LIB3107-059-Q1-K1-B11
ttaggggacaatccctaattccccaaaattttctctgaagaagaagcaacaatgtctggtcgcggaaagggaggcaagggtttgggaaagggtggagcgaagaggcatcgcaaggtgctccgcgacaacatccagggaatcacgaaacccgcgattcggaggctagccagaagaggcggcgtgaaaagaatcagcggcttgatctacgaggaaaccaggggtgtgctcaagatcttcctcgagaacgtcattcgcgacgccgtcacctacaccgagcacgctaggagaaagaccgtcacggccatggacgtcgtttacgcgctcaagaggcagggaagaaccctctacggtttcggaagctgagggcttgggctttttctgggcctggatttgttcttcgctgggctttaaaatgttgttgggaatttgtgttttg

SEQ ID NO: 50172 - DNA, 247 bp, Glycine max
  Clone ID: LIB3107-059-Q1-K1-B12
tacacttctattcttcttaagcttgctactgagtttcgacactgcgtaccttaagtcttccgaattcgaagttaatttgcaagatggctaaaggaaaggctcaaaatcaccattgggggggtgggcaatttgacccttgaggggccaccaacatttaacaacctaaaaaaccttttttggaaaaaggaacttctaggcattccattatgagggcattcacttacggcctcggaggggaacaagaaaa

SEQ ID NO: 50173 - DNA, 340 bp, Glycine max
  Clone ID: LIB3107-059-Q1-K1-B2
atatgtacgatggaatttcccatatggagagcaccagttcatccaatattataaaaaaggacagaaatcaatggtttgaagaccaaaatgagtgattcaagtggctcaactagagatgaaattaaagttgagccagtaataattaaatatatattttaatattatataattaacataaaaatatattacatgtttaaaaataatataaaatttcataatgcatagttgaataataacagttggtttgtacatctcatatataccagcttttatttatttatttataaagaaagagagaaattattcttttttttaaaattggttcacactggtttggtac

SEQ ID NO: 50174 - DNA, 378 bp, Glycine max
  Clone ID: LIB3107-059-Q1-K1-B3
tacgaaggttcatggtacgaaggtcgtaggcaaggttatggcatgtatatgtttcgaaatggtgatggaagatgtggtgaatgggatgctggcaacctcaaactctctctaccaccacaaaatgatgctatcattcgcacagttcaggctgctaggaaaacagctgaaaatgctataaatcttccccggaaggatgaccacgtgaacaaggcagtaattgctgcaaacagggctgccactgctgctagagttgctgcagtgaaagctgttcagaaccaaatgggtggaaaattttgcgatattgatgtctgagtttaggtgttagctagcttttggttgaaaattggaaatttttactaatagtaccagttttaagta

SEQ ID NO: 50175 - DNA, 397 bp, Glycine max
  unsure (1)..(397): unsure at all n locations
  Clone ID: LIB3107-059-Q1-K1-B4
ggtggctgacttctctctcgactcagctcacgtttggtttggcagtgctcttacctccaacttttgtattcttcttttccttttctattctttctctctccattcttcctccttccactctttgcgtactagtaatcccccttcaataccatccatcagcattcatattttcacaatttttctttcaattcccaaaagcataaacaaaaaaaaaattgaaaatcaaagcaataagaacacgcattctttacttccaattcccaattcttcttctgccctagattttaccccctttattattgcactccaccaccactgtgcatcgatcgatcgttggttcttgaatntccctttgtgttaaggtttctcgatggagtcggaggatgatatgcccgac

SEQ ID NO: 50176 - DNA, 361 bp, Glycine max
  Clone ID: LIB3107-059-Q1-K1-B5
gatagcagcatcatacaaagcattgaattcaaaaacttaagttcattccttgtgttttgctttcttcctcaaaaccaaacatgtcgaacacatgcggcaactgcgactgcgctgacaagactagctgcaccaagggaaacagctatggtgttattgtagagactgagaagagttacatcgagactgttgtcatggatgttccagcagctgagcatgatgggaagtgcaagtgtggcactaactgcacttgcacggactgcacctgtggccattaaagaatatgtatgaaaatgtaattgccatgtgtttggcaatacaaatatccaaataatgtaatcttcgtatgaataaatgtgtgtgc

SEQ ID NO: 50177 - DNA, 277 bp, Glycine max
  Clone ID: LIB3107-059-Q1-K1-B6
gagaccattgaagcatcaagaccattcgacgaagagaacgtgctgagcagaacaaggcatggattagtgttcaaggcctgctacaacgatggaatggtcctttccattcgcaggctgcaagatggatcattggatgagaacatgtttagaaaagaagccgagtcacttggcaaagtcaagaaccgaaatttagcagttctcagaagttactatgcagggccacctgacatgagactcctagtctacgattacatgcccaatggaaaccttgcaaccc

SEQ ID NO: 50178 - DNA, 434 bp, Glycine max
  Clone ID: LIB3107-059-Q1-K1-B9
gatatataaagtgttcagcccaccctatctctatttttggtggattggtgacatgcaagccgaaacaagttaaataagttggtctagtatgtttcttcatccttaatactaataacatcctaatgcaaaagctcaatttaaatttttaactctctgttcgtctcttttaatcacatatgatttaagaatactcactaatttttactccaaatgtaaaaacttgagttttaacttacttttaaagggtacaccattttatctctctgttcacataagaactttcattttaacttaaaaatatttttttgacagttaaataaccttggtttttagttatttatataaacaatgtctaacagaatttactgatttgctccaatgatctttttaaatttcttaattttaagaagtaacttaagcaacttcaatggagt

SEQ ID NO: 50179 - DNA, 347 bp, Glycine max
  Clone ID: LIB3107-059-Q1-K1-C1
gggcatgcccattgttttcaattccacaagtggaaacatgttcatgtcagcaccactgcatggcatttcttcatatgaatctagaccacaggagcaaaatttacttagacaatctccatggatgccagttttcaccttgtgatgctattttgcaaatgcaattgatgcgacatcggtgatctatacaagtggtgcagggattagagttttgaagttagatggaaggtttgtgtgagctagcatccgatgttcatcttcctatataggcagccaggaattatctgcagatcgccctgaggaagaggagctatctcttgcctttttaaaagatgcttcaaataaatata

SEQ ID NO: 50180 - DNA, 405 bp, Glycine max
  Clone ID: LIB3107-059-Q1-K1-C10
ggacacgcaactatgtctgactacgttttgctctacgcctctccctctctctcaaaaatcgttctcttcgattttagggttttgttttgctgctgcctccgttccccccttctcataaacaacgcgttttctcttctgcttcgtatctattctttgcttttggttttggttgattcaaggccttcacagcattcgttgcggcattttaatcgatttatccaagcaggactgaatgaactaatggagtctaaaggtgggaaaaagaagtctagtagtagtagtaaatcattgttctacgaagctcccctcggatacagcattgaagacgttagaccaaacggtggaatcaaaaaattcagatctgctgcttactccaactgcgctcgcaaacctttctgatatcca

SEQ ID NO: 50181 - DNA, 315 bp, Glycine max
  unsure (1)..(315): unsure at all n locations
  Clone ID: LIB3107-059-Q1-K1-C12
tacgacagattggttttagcaaatttcttttatccctatnttttcttccggagtagtgggcatttactgcttctctntctctgcagcaactatgncctaacctctaagggtcttctttgacanttaccatctggcggtcaatcntgctggccgcatctgtgatggagcctctactgccgacgttcactccctcgcactcgtcgagtaacttcctgcgctgctttgcatccgtctatgaagggcgtagcggcggagcggctaagctcctttcactacaatgggctttgtcctttccaccgtgttgatcccgagttt

SEQ ID NO: 50182 - DNA, 337 bp, Glycine max
  Clone ID: LIB3107-059-Q1-K1-C2
ggtagatacaagagttgctggcacagggttctggccacaccagatgggaacagaagatcaattgcctccttctataacccttcattcaaagccaccatatgtcctgcaccacaacttgtggagaaagaagaccaacaagtgaatcaaacttatcctaagtctgtttttggtgactacatgtctgtctatgctgagcagaagttccttcccaaggaaccaaggttccaagctgttagggccatgtgagaaaagcaacttgctttcttgtagaaaatgcttttgctcttcccccccccccacactttttttatttttgaaaaaaaataacttcatcttt

SEQ ID NO: 50183 - DNA, 367 bp, Glycine max
  Clone ID: LIB3107-059-Q1-K1-C4
agacgacagaagggggatcttgatctggtggctatcgacggtttttcgtggtctcggtgtgttgtgggtgttgttgtttgtgattggcgcgggcgccgactatgccaaacgcgacgacgacagggctcccaagtcggaatcctgcaataaccccttccaactggtgaaagtggagaacttggtggatggtgaggaagggcatatttataatggcgttagtgcttgatttgggtctgtgttgcccgaaaaaccttacaacagtgtgaaaacttcagcaatattcgctgatgccttagactgctgtttcaattcaacttcaaagttatttggctcaagtgctctctttgtgcgtgggggttgtgacttt

SEQ ID NO: 50184 - DNA, 152 bp, Glycine max
  unsure (1)..(152): unsure at all n locations
  Clone ID: LIB3107-059-Q1-K1-C5
tgagggcgtagttagcgacgttatgcttcggggagttgaaaataagcgtagagccggggattcccgatataggtcaacctttcgaactgctgctgaatccacgggcaggcaagagacaacctggtgaactgaaacatcttagtagcctgngg

SEQ ID NO: 50185 - DNA, 351 bp, Glycine max
  Clone ID: LIB3107-059-Q1-K1-C6
gacagcttttcctcttaagcttgctactgagtttccacactgcataccttaggtcttccgaattcgaagttaatttgcaagatggctaaggaaaaggctcagatcaacattgtggtggttggtcatgtggaccctgaggaggcaaccaccattaacgagctgaagaagcctgttgtggagaaagaagctccagggcatgccatatgagggcatgcacgtacggcctcggaggggaaccagaaaattatgttaacaaaataatctggaaccctaatgtatcagtgtcatcatcagtgtgtagtttaagctagctttgctatggttacgttctttgagatgagagtcttgatt

SEQ ID NO: 50186 - DNA, 377 bp, Glycine max
  Clone ID: LIB3107-059-Q1-K1-C8
ttgggaatttatttgaaggaattgttgtaactgtttgattcctaaattctctaaaattcgaaattctaatttcgttaggggaaagagattgtttgtgtgtgagtgagtatggctggaaaaggcgagggtcctgctatcggaatcgatttgggaacgacgtactcttgcgtcggcgtgtggcaacacgatcgtgttgaaatcatagccaacgatcagggtaacagaactaccccatcctacgtggctttcaccgacacagaacggttgatcggcgatgcggcgaagaaccaggtcgctatgaacccaaccaacaccgtttttgatgctaagcgtttgattggaaggcgtttttccgatgcatcagtacaaggtgacat

SEQ ID NO: 50187 - DNA, 433 bp, Glycine max
  Clone ID: LIB3107-059-Q1-K1-C9
tagatttgaagcttttgaagggtttggctaaggcgcaacccgcgtggctcaaagccatggaacagtttatcccctaatttctgggcaccatctgcaacgtttcctcgatctgcagggaaaattccgaccatcactcttcctgaggatgtttatgtgaagaagttttataagaaatatccggaatctaaatcccatgacgccataaagtttcatgcttttaaccccctccgtctcgtgtatttggcttgagggttcttgaattgaaggagcagggcgttagtgaggagcaagcaatggctattgctgatatggagtatctcacagagaagaaggcaaagaagaaagatatacccgtttgaaagaaattgcacgtcttcaagaaagcgacttcctcaaaacccatattctagtgccatcaaggagatacaagctt

SEQ ID NO: 50188 - DNA, 409 bp, Glycine max
  Clone ID: LIB3107-059-Q1-K1-D1
ccagtctttaggtgcctttgatattcttttctagttaaattaaagttttattttaataatcaacataataaaagttcattatcaaagtaaaactctagtttgcattcaagacaaacatacgttatcaaagttttgcattccgtttctacttagatgcatcatgtttgcaccaagttatgagaaattctctttcacgtattttaatactttttccattgaaatttgttttctatttctgaataaggagaggaactaactccgtataacttctttgccttttataatgtttccttcctcattttaattttaataaaatttcctcgtttctcttgtaggcttccattcattctatgcaccaaaatcatggtaacaaaattaaataaaaccaaagatcaatttatagatatga

SEQ ID NO: 50189 - DNA, 438 bp, Glycine max
  Clone ID: LIB3107-059-Q1-K1-D10
ttatggggacagctgttgtttatattcacttcttcaaccctcatttctggttaaatcagtactcactctctacccgtttcctgataatccctaatttgatccaaatgactcacttgtaatttcttataaaaaaaaattcaattctaatcacttcaatcaaccccaatatcttgaacacgaatgtcagacatggatccgtccaaaaaagtggccgatagatatctgaagcgtgaagtccttggtgaaggtacctatggagttgtgtacaaagctattgatacccatacaaggcagacggttgcaattaagaaaattcggcttggcaaacagaaagaaggggttaattttacagctcttagagaaattaagctgctaaaagagctcaaagatccaaacattgttgaattgattgatgcattcccaccataaagggaattt

SEQ ID NO: 50190 - DNA, 129 bp, Glycine max
  Clone ID: LIB3107-059-Q1-K1-D2
gacatcaggtgaggcggggctacacgctgagtgttagcgtatcaataagcaaaaaaaaaaaaaaaaaaaagcggacgatgcggacgatctaaaagaaccaagcttaccttcgcatgcatgcgacgttat

SEQ ID NO: 50191 - DNA, 316 bp, Glycine max
  Clone ID: LIB3107-059-Q1-K1-D5
accaaggcgtccgccaacgcgtccgcggacgcgtgaagacgacagtttggggaatctttgcattctattcattcaagattcagcaggtgcgttttggaagcagagaccgaaatacttcgagatggcccgtacaaagcaaactgctcgtaagtcaactggaggaaaagctcccaggaagcagcttgcaaccaaggctgcacgtaagtctgcaccaacaactggtggtgtgaagaagcctcatcgttatcgccctggaactgttgctcttcgtgagattaggaaataccagaagagcactgagctcctaatcaggaag

SEQ ID NO: 50192 - DNA, 439 bp, Glycine max
  Clone ID: LIB3107-059-Q1-K1-D7
ggtgtattaaatttttaatcaaggattaatttcataatcaatcccgaaactgagttccatagttaaagagtcaaacttgtgaagataacttaagattttacaggagaaccaaataccctaatcacgatgcttaaaagaaaaattaggtataataaattagtaaaattataactttagcctgaagcaacaccaacttatgaaaacgcgttaacaccgcataaaatggatgatgaatttgttaccttaacaccaaacatagtccaattttttaattatattttcttggcaatcgttcttcgtatatatatcacatgtaatatgaggttccagcagtgcagcctccaagacttggtgagtgtcactgctgaagagagaaccacgcagaactgacgcaatgggaagcacaagtttgcttcatctattacttggtgttgttttg

SEQ ID NO: 50193 - DNA, 377 bp, Glycine max
  Clone ID: LIB3107-059-Q1-K1-D8
gatgctttctgagcagagactgaaggagctgcaggaagaaaggaaggagcctttaacatatggacaagcaaagaggttgaagacttacttggagagcatgctgctctttatgaggagcactattacatcaagcaatggggtaactgaggcctatctggaatgagtgatcctcactatgaatataagggaaagaatgccctgatgtgagagaaaggaaccttcagaactggcatgaaaatatggcatgtaagttgagacatatcaagaaattcttggagaatgcacgcataagttgtttgaagtaaggtcaaggcgttcaaagccacatttggatgataaggttattgtatcgtggaaaggactggcaatattatctt

SEQ ID NO: 50194 - DNA, 436 bp, Glycine max
  unsure (1)..(436): unsure at all n locations
  Clone ID: LIB3107-059-Q1-K1-D9
cccacgcgtccggaagacgtcagattggaatttttgatcatcttgngcataaaagtcactgtcgggatttcctatttttattttgaaaatgttacgcttaaatgaaatttactggttcctgggttaaatgtttacttattgccatcagttacgtgcattgggtaaaatggtgtggtgataatttagttttagtaggggttataaggttggcttggtggtgaggggggagagattgtgggttcgaatcccccactaacaaaaaactaacaattacttttaagcctgtttgagtaagcccatctatcaattgttgtcggttactttttcctatttttttaatttcttttaaactgctttttttatcttttatgcctgtttgattaagcccaccttttgctctctttttcctattgtatttggagggggaggtcgtggg

SEQ ID NO: 50195 - DNA, 351 bp, Glycine max
  Clone ID: LIB3107-059-Q1-K1-E1
gctctctctctgaccattctcttcttcttctttttcttctcctctctctctctcccctccgccatggctgaggataaggagatgtctacctctgtcatcaatgggaatgattccctaactggtcacatcatatctacaactattggaggcaaaaatggggaacccaaacagactattagctacatggcagaacgggttgtaggaactggatcatttggaatcgttttccaggcaaaatgcttggaaactggggaggcagtggcaattaaaaaggttttacaagacagaagatacaagaatcgtgaactgcagttaatgcgtgtgatggatcatccaaaatgtgatctcttt

SEQ ID NO: 50196 - DNA, 461 bp, Glycine max
  Clone ID: LIB3107-059-Q1-K1-E10
cccacgcgtgcgcccacgcgtgcggacgacagattggggtgcacagatcaatacagccccacgtgggctgggattaattgcactcactcctattgttctccgctcttcaccttcactctgttcaatatcataatcaatcattgatcataaaagaaacaacattcagctatttctctgaactaaacatgttacaatctatggaagtgcctgattgtgtctatcggcggcaaccactgatcattcctccaagtgctcctaccccaaaacattctctgtatttgtctagcctcgatgaccaacagtttctaagattctccattaagtatttgcacctcttcgagacagcttcgagcttgaatatcatgaagtcttctgtggccagaggtctagtggattattaccccgtaactggaaagatgaggagtgtggatgatcacactcacaaacttgaggtggattgc

SEQ ID NO: 50197 - DNA, 430 bp, Glycine max
  Clone ID: LIB3107-059-Q1-K1-E2
aacttgattgggcagacctttactatatgaccacccttccaaaacactctagaatgccccacttatttccacaactccctcttcctttcagagacactctagaggcttactcacaggaaataaaagatctagccatagttattataggccttatgggaaaagctttgaagattcaagaaagggaaataagagaattatttgaagatggaatacaactaatgaggatgaactattaccctccatgccctgaaccagaaaaagttattggcctcactcctcattcaaacggaattggactcgctattcttctacaactcaatgaagttgaaagtcttcaaataaagaaagatggcttgtgggttccggttaaacccttgattaatgctttcattgtcaatgttggtgacatattaaagattataactaatgg

SEQ ID NO: 50198 - DNA, 305 bp, Glycine max
  unsure (1)..(305): unsure at all n locations
  Clone ID: LIB3107-059-Q1-K1-E3
gtccgaatcgagcggccgcttttttttgtatcttgtttttttatttttggcctcttcatttatctgtagattttcagtggganagccccactatattgacacaagtccctttccccttcagagacactctagaggcttactcacacgcaagggtgcttcatgccctggccataagacgccggctggcatacgctccggggataccagcaagggcagatccgttaattgttagtagatgggactcaactaatgaggatgaactattaccctccatgccctgaaccagataaggaccttgtgcctac

SEQ ID NO: 50199 - DNA, 375 bp, Glycine max
  unsure (1)..(375): unsure at all n locations
  Clone ID: LIB3107-059-Q1-K1-E4
ggatcaagagtgcttcatcaaggtaatgcatcaatacactgatgcatggtgttgaccattacaactctcaatgtgtgcttcttgactatgtagacatgtttatcttcacttgtagtcaaaccattgcatcttctaatgattcttaagtcatgtgcagcttccaatatctgccccttgacttaaactacctccaaaatgatacttctagtcatatacaacttctaatatatgcactttgacatagaaaacatgactgcccttcttcttttggtttcttgcttctaaagttggaacaagcttcagggttgggaaaccaagtctgtcggaaaaaagcttaacacctgntctctatgtttcttgataagtcacaatttt

SEQ ID NO: 50200 - DNA, 311 bp, Glycine max
  Clone ID: LIB3107-059-Q1-K1-E5
ttgttgaagactacagttatggggttttaaagaaaaaaaaagatataattgagatgggggtgagtaggagaagacttggagttagatgcagtgtggttgcagggtcagtgtgggagagcagaatgaagagtgatgaagttggtggtggagttaaggtcttcactggagaacaaagtgcttaagaaagaggcaatggtggcacctgcagattgaagagaagccaaattgggagtgtggttgccactggaaagagaaaaacttggaaattagaagggttagaaaacaaccatattcaaatagccatatgaaaa

SEQ ID NO: 50201 - DNA, 403 bp, Glycine max
  Clone ID: LIB3107-059-Q1-K1-E7
tgatttgtatgtttttgtttggactgcacaaacaattgctccagacagtgaatgtgctattgatggacaccttcgtgaagttggactcacatttcacctcctcaaggatgttcccgggattgtctcaaagaacattgataaggcactttttgaggctttcaacccattgaacatctctgattacaactccatcttttggattgcacaccctggtgggcctgcgattttagaccaagttgagcaaaagttgggtctcaaacctgagaagatgaaggccactagagatgtgcttagtgaatatgggaacatgtcaagtgcttgtgttcttttcatcttggatgagatgaggaggaaatctgctgaaaatggacataaaaccacaagttgaaggacttgaatgggt

SEQ ID NO: 50202 - DNA, 344 bp, Glycine max
  Clone ID: LIB3107-059-Q1-K1-E9
gatctgtcagcagaagaacaagtagttgagaactaagaaggagaagcaaatggcttcctcaatgatctcttccccagctgttaccactgtcaaccgtgccggtgccggcatggttgctccattcactggcctcaagtccatggctggcttccccaccaggaagaccaacaatgacattacctccattgctagcaacggtggaagagtgcaatgcatgcaggtgtggccaccagttggcaagaagaagtttgagactctttcctacctgccagaccttgatgatgcacaattggcaaaggaagtagaataccttcttaggaagggatggattccttgcttggaat

SEQ ID NO: 50203 - DNA, 327 bp, Glycine max
  Clone ID: LIB3107-059-Q1-K1-F1
ggtggcagagagcgaacccaaaactagagctaccttcccttcaaaccttccactcttctctccttttccaatcaagggaataatatttcttagagatattccgaaaccatggctcacgccaatcctatgatttttgttgttggaattctaggtaaccttgtctccttctgttgctttctagcaccagtaccaacattctatcgagtttgtaagaagaaaaccacggaaggtttccaatcacttccttacgtggctgcactcttcacttcaatgctttggatattttatgcttacataaagacgggcgaaatacttctcatcaccatt

SEQ ID NO: 50204 - DNA, 404 bp, Glycine max
  unsure (1)..(404): unsure at all n locations
  Clone ID: LIB3107-059-Q1-K1-F10
gacttctctcactattggtattatcgtcggaagcggtatccatcaatgtttctttctgataaacttgcaccacacttcaattccacactctttactcatctccacacccaccaggtaccgtcacttcaaattttcagccacatttcacaatcttctctgcattttccttccaaatttatgatctgtttcgttttctgctatctgggtatgtctcaagtttgagttagagtgcttccctcgcttcttccaaaaaagggttggtacccttttcatgccatggtatttccctgaactgaagagcaatacccgtttgtgcctcactttccgtggaagaaggctttgttcaagtttcagcaatgatagtgttagtaatctatcntaatnngtatactatnnntcttatg

SEQ ID NO: 50205 - DNA, 429 bp, Glycine max
  Clone ID: LIB3107-059-Q1-K1-F11
gacgcacttagcaatcaagcaacacttgcaattacaatatacacatcttcaattaagccatgactctctctaagcttatagttgcttcccttcttgcctcgcttctccttcttcatcttgttgatgctgatcaatcggcacatgtacaaacgcaggggtctcttctgcagaagatagattgtaatggagcatgtgctgcgaggttgcatttatcatctcggccacgtctgtgcaaaagagcctgcggaacttgttgtagacgctgcaactgcgtgccacctggcactgctggaaaccaagaagtgtgtccctgctatgctagtttgactactcatggtggcaaacgcaagtgcccttagacttaaaagttgtgtttggattgctagctgctgatatattctccgattatgtttaacctcagtttgaagg

SEQ ID NO: 50206 - DNA, 441 bp, Glycine max
  unsure (1)..(441): unsure at all n locations
  Clone ID: LIB3107-059-Q1-K1-F12
tggtgcaactttctggagcttatataacaaaccggaataggggcccaataagaaagaagagtcatcacaaggaaaaaggggaaagaaaagatgccttgcctttacatctccaccaacataaacttagatggagttaacatcgatccaatcttttctcaagccaccactgcagtttccacaatcatcggcaagccagagaaggtatgccactctattctcttttctctctaatcatcttttttccaatcatagcttatgaaatttggtctcaattctcaagacgtgtgaaaaattcgcttttggggtattcttattcttattctttngttggtctattgtaaatttgatgcatatctgttaatggttcaactgtttgatttttatatactcccccaacaactcaatctactgcaaaaaggaatttgaattctatattgtaaa

SEQ ID NO: 50207 - DNA, 259 bp, Glycine max
  Clone ID: LIB3107-059-Q1-K1-F2
acgcgtagagggcgacaagattggtccatctttctacttgggaattctgagaatcggattgaagaagagacctctagagattgatagtgttaatgctgctagaaaggcaagagaaggtctaagatctgaaagatcaatgatgggtgcacatgatcagcatattggtgagtcaaaaggtgaagatctagtacctttgaagaattatatggacgctcaatattttggtgagattggaattggcacacccccacagcccttc

SEQ ID NO: 50208 - DNA, 335 bp, Glycine max
  Clone ID: LIB3107-059-Q1-K1-F4
gtatctttcggaacactacaatggaatatgccctggtccattttcaagagtattgaaactcgtataagaattctccatttgcgtactagtggcgcatttacaacaccttttcaggtcaaatcctattttttcccgtgaaagttcatgttcaaataaataggccttgctgaaagaggggttttatgattatttttttcttcattaattttgatcctaaacattagaaaaaccatccaaattgagcaaatttttacccgaactctctcaaaattgtgacacaggtagcacaaaccatccaatctctactccctgtgccagaacccaagatgcacgaa

SEQ ID NO: 50209 - DNA, 320 bp, Glycine max
  Clone ID: LIB3107-059-Q1-K1-F5
aatataatttagaatattaaaataaaaaaaaaaaaaagaagctatatgagtataaaaataatatatataaggtacaaatagtaaatcgaggtacccattttatgataaactttccttccatttttgatcctctagtaggcctagtatttccggcaattgcaatggcttctttatttctttatgttcaaaaaaacaagattttttagatacagaaaacaaagtaaaattctggggttttttattccccaattataatacctaaattcaaaaaaaggagagtaatgagtataatctttcgctcagacgatgtactgatatat

SEQ ID NO: 50210 - DNA, 256 bp, Glycine max
  unsure (1)..(256): unsure at all n locations
  Clone ID: LIB3107-059-Q1-K1-F6
ggtacttttgtgcttttgtttgcngctgcaactcgacggtcttctggtgctgttctgagtttgcgtttgttttttctctcacctgaaaatgtcttgctgcggtggtaactgtggttgcggaagctcctgcaagtgctgcaacggctgcggaggctgcaagatgtacccagacttgagctacactgagtcaaccaccaccgagaccttggtcatgggagtggcacctgttaaaggctcaatttgagggtgctgaaat

SEQ ID NO: 50211 - DNA, 354 bp, Glycine max
  Clone ID: LIB3107-059-Q1-K1-F8
tgaaggttcaagagtttgttgtgagctataagctagtttatcgtgaggagaatatgaagttgtttgttttctttgttgctgcagtagttttggtagcatggccatgccatggcgcaggctaccaaaggttccctctccgaatgaaaactggctatggtgagcgttcttcggaggtaaaatgcgcaagttttacgcttgctgtggaagcacacaacatccgagcctttaaaaccattcctgaagagtgcgttgaaccaacaaaggactacattaatggcgaacaatttagatcagactctaaaacaatttaaccaacaagctctcttttatgctagtgaacgcgaagtccatcac

SEQ ID NO: 50212 - DNA, 432 bp, Glycine max
  Clone ID: LIB3107-059-Q1-K1-F9
gaaggttcaagagtttgttgtgagctataagctagtttatcgtgaggagaatatgaagttgtttgttttctttgttgctgcagtagttttggtagcatggccatgccatggcgcaggctaccaaaggttccctctccgaatgaaaactggctatggtgagcgttcttcggaggtaaaatgcgcaagttttaggcttgctgtggaagcacacaacatccgagcctttaaaaccattcctgaagagtgcgttgaaccaacaaaggactacattaatggcgaacaatttagatcagactctaaaacagttaaccaacaagctttcttttatgctagtgaacgcgaagtccatcacaacgacatatttatattcggcatagataacaccgtactctctaatatcccatactatgaaaaacatggatatggggtgga

SEQ ID NO: 50213 - DNA, 319 bp, Glycine max
  Clone ID: LIB3107-059-Q1-K1-G1
gtaccttttgaaatattttgaacaaaaaaaacgtttttttttttcagaacatttccatttttatagatgaggcgttatttgatttcgaaagccgattattatattcctaacccgaagtgctccttggtgtattcataaaaagtagtaatttttgttcgaatcttagcaattgatatcctttcgaaacaccatttttttcttcatttgaattgacagtgaattctttcgatttcttattcgatttatgtatgctttgttctaaattaaacaaggcaaggactaactcccgaactgcaagtaaaaaaaatgatagcataga

SEQ ID NO: 50214 - DNA, 439 bp, Glycine max
  Clone ID: LIB3107-059-Q1-K1-G10
gacttctctcactattggtattatcgtcggaagcggtatccatcaatgtttctttctgataaacttgcaccacacttcaattccacactctttactcatctccacacccaccaggtaccgtcacttcaaattttcagccacatttcacaatcttctctgcattttccttccaaatttaatgatctgtttcgttttctgctatctgggtatgtctcaagtttgagttagagtgcttccctcgcttctccaagaaaagggttggtacccttttcatgccatggtatttccctgaactgaagagcaatacccgtttgtgcctcactttccgtggaaagaaggctttgttcaagtttcagcaatgatagtgttaagaatccaatcttattggtattactaattctttatgttgaattgattttattgtgtaaattgtttcatg

SEQ ID NO: 50215 - DNA, 224 bp, Glycine max
  Clone ID: LIB3107-059-Q1-K1-G11
cccaaacactacacaaggggacttttgtcagtgttggtataacagcaacaggcggggtacgtcggtgaaaaatttctgatgaacttgcaccacacttgaatggccacacgtctatactgaattgcacacagaccaagtaccggcactgcacattatcagcctcattttacaatactcttctgcattaagctttcataaaaatgatctgtttcattttttgctat

SEQ ID NO: 50216 - DNA, 345 bp, Glycine max
  Clone ID: LIB3107-059-Q1-K1-G12
ttgtagacctttttttgcttatatttctggtttgagaacttagacaagtctagctagaatgtataaaaatgttcgatttcatgagttacggaatgacaaaatcagattcttggtgttgattattggggaagcattgggaacatttggggtgtgtgatacaaagactaaacatactttaaggattttgagagtattgtggaatgtggacaaagtagaggctcaaagaatggaggaaatatttgtgcaccctgctggaaggatgaccctcattaattctatcccttcttaccacaagtcttttgatcttctttccaagagaataagtgactttacttgatagaagtg

SEQ ID NO: 50217 - DNA, 398 bp, Glycine max
  Clone ID: LIB3107-059-Q1-K1-G2
gacacaagttcaccctccaaagtccaatccactatcactcactctctcttctcctaccattatttctctctaccttaaacttccacaatacaactctctcttcctataaacgctgttgtttaacgtgagaacttgggtgatctttttggagttgtaggagcccttacaccttgcagaatcatcgctacattcccaagggctcctactacgcaataactccaagcccgatctcaaattaatatttcatttactcatcttaatcaatattaaataagaaaagatgggagagatgtcaaacttccaattgggtgtgattggtgcactatttctctcttgggcttcttctgtctccattgtcatctgcaacaaagccttgatgagcaatcttggctttcctt

SEQ ID NO: 50218 - DNA, 228 bp, Glycine max
  Clone ID: LIB3107-059-Q1-K1-G4
gctgcttatgctggtggtccaccaggtggcccaaggagtgcatggcctgctcaggctccttctggttatggatctatgggctatgggaacactgctgcttggggtgctccaagtggtggtgctggctttggtggcggtggtcctggttcagcaactgcaggtcaatctcctggtggagctgctggatatgggaatcaaggttatcgatatggtggggtatgggggata

SEQ ID NO: 50219 - DNA, 229 bp, Glycine max
  unsure (1)..(229): unsure at all n locations
  Clone ID: LIB3107-059-Q1-K1-G5
cggnccggaangaccgagtcgaccgacccgttgtnagaacagttcttagaggactacttttggggtttgtctatcaggaaccaacgggtgggaatgggcggggcttgtgctgttcggtgtcccagactttaaagctccaaaccttactattcaaatgattcctatccagatacttccttcctggataacagaatgcagcttcacagaaagcatgctgtgatgcttttct

SEQ ID NO: 50220 - DNA, 422 bp, Glycine max
  unsure (1)..(422): unsure at all n locations
  Clone ID: LIB3107-059-Q1-K1-G6
ggtcgaccgacgcgtacgaacagatacggttggactcaaggtttagggccttccatggctnccgcttgtgcttgcgctgcaggtacagctgttgccatctctacgccgagttccgggcagaagaatggatcaggaggttgttttcttagtggaaggaaattgagggtgaaaaaggagagagcagcaattggaggacgatcgatgggcactacagtgtgcgcagttgctgagcctgacagacctctatggttcccaagcagcacccctcctccatggcttgatggcactctacctggagacttcggctttgaccctcttggtcttggatctgacccggagagtctgagatggaattgttaagcagagctagtgcactgcagatgggcaatgttgggtgctgctggcattttcattccagaatt

SEQ ID NO: 50221 - DNA, 442 bp, Glycine max
  Clone ID: LIB3107-059-Q1-K1-G8
tacttgattgggcagacctttactatatgaccacccttcgaaaacactctagaatgccccacttatttccacaactccctcttcctttcagagacactctagaggcttactcacaggaaataaaagatctagccatagttattataggccttatgggaaaagctttgaagattcaagaaagggaaataagagaattatttgaagatggaatacaactaatgaggatgaactattaccctccatgccctgaaccagagaaggttattggcctcactcctcattcagacggaattggactcgctattcttctacaactcaatgaagttgaaggtcttcagataaggaaagatggcttgtgggttccggttaaacccttgattaatgctttcattgtcaatgttggtgacatataagagattataactaatggtatataccgaag

SEQ ID NO: 50222 - DNA, 367 bp, Glycine max
  Clone ID: LIB3107-059-Q1-K1-H1
ggaaggaggtatctcgtgccagcgatgtgggacccgcagacttcgacatgcaagaccctcgtctgaagactgccacgtggcgaggttgtgtaatggttgtagatattggtcgatgggaacggaagcagggaatggataatagaggtggtgatggatttggttcggacttcggagtgtttctaaattttctatattctgtaagcctgcttttgtcgtttagtgtgacgtgtaagacgtgtaaattctcttttgctaaagactatagaggaagaagaactgggatgttgtataaataataaattatgaaaaacgaggaataagattttaaaaaaaagggatatcatgaatgtgatatatttttattttt

SEQ ID NO: 50223 - DNA, 341 bp, Glycine max
  unsure (1)..(341): unsure at all n locations
  Clone ID: LIB3107-059-Q1-K1-H10
gacgactgatttgtatacatgacatgctttgnctgagaagctgtttcatgggtcgtggtgcaatcatatgatctcagatgtacaagtttttggcaaattaccagctagcgctgaccagtgcagcaacttgatgatttgagattcttttcaatgacagttaatgattgcatgcgtgcacatccacactgacattaaaagcatgatcttctaatcttgttccattgatttgcacaaactaacctgtctaatttatatgttgcagatgatntttcattactctacatctatgttaatttgacaatgctacctatcaactggtggtttaaaagagagttattttt

SEQ ID NO: 50224 - DNA, 206 bp, Glycine max
  Clone ID: LIB3107-059-Q1-K1-H3
tagtgacaacaaagacaaaaataacagacaactactttacaaggacattattcacgctatatgctaaaatgctacagaaaatggaaaattgccgcaaaaatttttaagaaattccaaaacaccatagtaaatgtcaaaaaaacattttgattcttgtaattttggtgatttaaagcatgaatagaaatatcaaagtgataatataa

SEQ ID NO: 50225 - DNA, 175 bp, Glycine max
  Clone ID: LIB3107-059-Q1-K1-H5
atcactacaaaacgttacttttcacacctggttatcaacgccgaaagcggcgaccaacaaggtcatctttcagataaacttgcaccacacttcaattccacactctttactcatcttcacacccaccatttaccgtcacttcaaattttcagccacatttcacaaacttctctgc

SEQ ID NO: 50226 - DNA, 170 bp, Glycine max
  Clone ID: LIB3107-059-Q1-K1-H6
cttttttggggttcctctctgcaacgtagggttgggcagattataagctctctctctctttgcttttcgtcattcaaatccaatccaatatcaaatatgagtcgtcatcccgaggttaagtgggctcagagacttgacaaggtctatatcacggtgcaattggctgattc

SEQ ID NO: 50227 - DNA, 436 bp, Glycine max
  Clone ID: LIB3107-059-Q1-K1-H8
gactctttcacatcacaagaagtacaattggtctctttctttttgtgtccaaaatggctcctagttctactcacaatactgggttctatgtgcttatgctagttgggatagtgattagcactatggttgctacctgtgctggtagcttctaccaagactttgatctaacatggggtggtgaccgtgctaagatattcaatggtggccagcttctatctctttcccttgacaaagtctctggctctggcttcaaatcaaagaaagaatacctatttgggaggattgatatgcagctcaagctcgttgctggcaactctgctggcactgtcactgcttactacttgtcatcccaagggccaacacatgatgagattgatttcgagtttttgggaaacctaagtggggacccttatattctccacacaaacatcttcac

SEQ ID NO: 50228 - DNA, 406 bp, Glycine max
  Clone ID: LIB3107-060-Q1-K1-A1
gataccaaaaacaaaacacaagccaagtgaaagtgagaaaaaataaaaatcaaagagcataatgtcagggatcattcacaagattggggagacccttcatgtgggagggcacaagaaggaggaggagcataagggtgagcaccatgctggagaatacaaaggggagcaccatggtgaacacagtagtgagtacaaaggagagcatcatggtgaacacaaagctggagagtaccatggtgagcacaagccagagcacaaagaggggttcctagacaaagtcaaggacaagatccatggtgagggcggcgccgccgagggcgagaagaagaagaaggagaagaagaagaaggagcatggccatgaacatggccatgacagcagcagcagcagtgacagtgattaaact

SEQ ID NO: 50229 - DNA, 432 bp, Glycine max
  Clone ID: LIB3107-060-Q1-K1-A10
agaaggggagggttagatggatgagcttgcttgtaggactttggaacgtcggggttgccctcatgggcgccttcctcatcttgctcactttccgcctctgtcatgcctccttcttgcttcccttcgtcctggtttccttcgccgctttgcttagggttctgctcatgattcttaccgcttccgcccaacaagccgctgccaccctcatccttcaacactcctcctccgatctccttatacgcctccgccgaaggctttagctttacttcaaagccatggaaactctaccgaatcctatgaagaatccatggaagcaccagagatgaaaattagggaggctgaagctcttcataaatttgctgaagctgcgtacacgggtccattgcttgatgttggacgaaatccatttgtatttccttgtgcatggctgta

SEQ ID NO: 50230 - DNA, 330 bp, Glycine max
  Clone ID: LIB3107-060-Q1-K1-A11
tgtgtcatttcaaagcgaagaaagattcgaaaggaagggagaaagttttgtgaagaatggcgcaagagggacaggtgatcggtgtccacagcgtataggagtggaaggaacatctcaagaagggagaagagtccaagaaattgattgtggtggattttactgcttcttggtgcggtccatgccgtttcattgccccaattcttgcagagtttgctaaaaagttgccgaatgtcaccttcctcaaggtggatgtggatgaattggagactgttttcaatgagtggggaaatgaggctatgccaacctttctgttctttgaaagaatgcaag

SEQ ID NO: 50231 - DNA, 367 bp, Glycine max
  Clone ID: LIB3107-060-Q1-K1-A12
gatctatgtgatcattgttgtactaaaaaaatgtatcctagatctaccctctattccttcattcattgatggtttcaagagcagcaatagtgttactcataggtcttgtgggaatgttttaccagggcactcaactcccccctccaaacaacagtgattcatcagatgatggtgttccagtttcaccaccaagagtcagactcagagatgggaggtacttggcttatagagaaaagggtgtccccaaggaccaagcaaaacacagcatcatcattgtacatggctttggaagctccaaagatatgaattttctggcaccccaagaactaatagatgaattgggtatatatattctgcaatatgatcg

SEQ ID NO: 50232 - DNA, 346 bp, Glycine max
  Clone ID: LIB3107-060-Q1-K1-A2
acgcccacgcgtacgtacaagacgacagaaggggatcttgacaaggatgacaattatagaaaagatgatgaaagtaagacttcaagttcaaagctttctcacgagagcaaggcagatgtaagggctgccaagaccagtggctttgatggtgacaatgacctagatgctgcgaaagttgcagccatgagagctgctgaattggttaataggaacttagttggggctggttgcttgactactgaccaaaagaagaaactgttgtggggtggcaaaaggagtacacctactgaagagtctgggccatcgttggatacagctatgttttctgatcgtgagaggcaagaaa

SEQ ID NO: 50233 - DNA, 315 bp, Glycine max
  Clone ID: LIB3107-060-Q1-K1-A3
gacaccaacacatccattcattgtcttaatgttagcaatgtcttcctctttctccatccatttcttcctcctcctctcaatagcccttttctcagtttgttgcttagcagcatctcaagctcccaccaccaaatcacacccctatatccttcccattaagaaagaccccgcaacaaatttgtactacacttcagttggcattggaactcctaggcacaactttgatttagtcattgatctttctggtgaaaacttatggtacgattgtgacactcattacaactcatcatcctacagacctatagcttgtggctc

SEQ ID NO: 50234 - DNA, 383 bp, Glycine max
  unsure (1)..(383): unsure at all n locations
  Clone ID: LIB3107-060-Q1-K1-A4
cggaattcccccgggtcggacccacgccgtnccgtacgggctggcgaaaaagaacaacaagaagggggggttagggtttttttctttagaatttggagtgggagaaagtgccatgcggattaagaaaatttatttcaattaggggtttttggttttacctttcctgggctggtttggagaaacccttaactagnnngtttttagaatgtnntggataattggttttaagaattccggggctttttgttggagggagaaggaaggggaaaaaaagggggaagaatggtaatgaactnnngatgatttaatnnttgtgaaatttgtcaatggtgaagaannatttgtacccgatttgagggctgnngaattgggtttcaagaaag

SEQ ID NO: 50235 - DNA, 429 bp, Glycine max
  Clone ID: LIB3107-060-Q1-K1-A5
atgttcatttctcttgcaacaagtaactcgttcagattttggtttttgcttccctatccgccctctcttcttcacttcagtatggcggtggtaccttacaccaccggttctgcacctcttctttctcctccttctacttctagtgttgccacaaagctctactccggattgaaacttcaagctgcgagtcctttcggagctgcaaaacctaacgtaaccgctgagttttatggaaaagttcacaacactcttcactgtcggtatgctaaccacaatacatcaatggcacgtattcgaatgatgccaatagggactcctaaagtcccctataggacacctggtgaaggaacttggcaatgggttgatgtatggaacgccctttatcgagaacgtgttatcttcattggacaagagatagatgaagaattt

SEQ ID NO: 50236 - DNA, 418 bp, Glycine max
  unsure (1)..(418): unsure at all n locations
  Clone ID: LIB3107-060-Q1-K1-A6
agtaacgnatatttttaaaaatggccgggagaacatttatatttatgtataatagaaaaagaatactaattggggctttccgttggtagaaaaaataaggcagtactccccagaattccgatccagagtatacttccatccaccgattaaataaataactatcagaaacgaaataatcctttaatttttggaagtccccttttattttacttacacaaaaaagactaggataagaacgaaaaaaaaagtgatcccccttttcttgtttgtcttatatccatatttatggagatagaattcatgtcataatttaaaaaatgaacatgtataattctttttcgtaatcgaaaatgatgagggagttattgataatttgaaaagagtattttatggaagaattaaattattactcaacaaa

SEQ ID NO: 50237 - DNA, 335 bp, Glycine max
  Clone ID: LIB3107-060-Q1-K1-A7
gatagacatttccgtggtgtgggattggccaattcggccactctcctctgagaaagcctccagcctctcctccaaagtcccctgcggttcgttcggttattcttcgaaccgttgtctgaagtttacaactcaaaacttcaccgaacgcatttcattcaccaattcgtccaagtctcgtatcaatcaatcagcctatccgtcttgcggttggagagatcggaggggagagcagccatggcgcatcgagtagaccacgagtatgactcatctgtcaagatcgttctgatcggagactcaggtgtaggcaaatccaacttcttctccgggttcactcg

SEQ ID NO: 50238 - DNA, 387 bp, Glycine max
  unsure (1)..(387): unsure at all n locations
  Clone ID: LIB3107-060-Q1-K1-A8
gggttttcgatcacgagataatttatgtaggttgggaccgggttaatgaaannaactagggtcangnnaattaattgactnnntggatatttgnnatgctttnncaaatgtgtnnttgactgggttgaggtaccgaagaaccannatgaattnncttggatcacangnntctcagttctttacccttccaaacacactttnngcggaaatgaagaacagcagnnaatgaaagcactnnngcttttggtacccagttggacccggcaagctctttgatggatctacannaatagcaaccaccaaanattgggtggcttactttgcnagctaccaagacacaaaagtggctggtggtgcgatctatgcctttgctcaatgtgttgaaac

SEQ ID NO: 50239 - DNA, 131 bp, Glycine max
  unsure (1)..(131): unsure at all n locations
  Clone ID: LIB3107-060-Q1-K1-A9
ttgggttgatgatcgnttatgataaatcaaggattaggtgtttattgagtgattaaaactgcctgaaagcaagttaaatgtttatttgctgtgaattgagtctgaaattacattttacaggtacaaatttt

SEQ ID NO: 50240 - DNA, 305 bp, Glycine max
  Clone ID: LIB3107-060-Q1-K1-B1
atgtatcaaaagcacaagggctatagctcagttaggtagagcacctcgtttacacgagcgccaatgtttttttcagaggagtttcatcttgtaatcaaaagagtttatcttatagtaagaaatcgatgtcttactccattttaaggaacaaaacaagagaacaatagcctgacaaagggtttagccataaaatcgaatccatcattgatttgagatttgataaggtgaatactcatttctcgcaatgctaggcataatgcgggtatagggacctaaaaaagattatcttttcttcctatcttatg

SEQ ID NO: 50241 - DNA, 425 bp, Glycine max
  Clone ID: LIB3107-060-Q1-K1-B10
tgtgattcaatccaattgaattctccagagagaggaggaaacttaatcgatcatcacttcacttcactaatacatcatggcagacgagacccagaacaagtatgagagctctgaggttgaggtccaggatcgtggtgtttttgactttctcggtaagaaaaaggatgaagaagacaagcctcatcctcaggaggaggtcatcgccaccgagtttcaaaaagtcactgtctcagaccaaggagagaacaagcacagcctcttagaaaagcttcaccgatctgacagcagctctagctcttcaagtgaggaggaaggagaagatggagagaaaaggaagaagaagaaggaaaagaaagggctgaaagagaagatcgaggagaaaatagagggtgatcatcatcatcacaaggatgaggacacaagtg

SEQ ID NO: 50242 - DNA, 419 bp, Glycine max
  Clone ID: LIB3107-060-Q1-K1-B11
tgggttcctgttaaggctcaatttgagggtggggaggtgggtgtgcccgctgagaacgatggctgcaaatgtggaccaaactgctcctgcaacccctgcacttgcaagtgaggtgttgggagagcaagcttcaagcagagatagcccttaattaggaataatgataaactattaatgtgtagctaaaaacttatgtattatgtctgtgatggttttcgtgcactctggtgttttgtgttaaacaaacatccttagaataaagtggtcatgtcttgcctttcagcaagttcaagtgttttggacttgtgatgggtgtgttaagctcatggttgcttctttttttttttttttaatgttttgtaattggtcgcttctgtataaagttcggcttatctgaattatgaatctctgcttataat

SEQ ID NO: 50243 - DNA, 52 bp, Glycine max
  unsure (1)..(52): unsure at all n locations
  Clone ID: LIB3107-060-Q1-K1-B2
gagacctcaggtcaggcggngctacccgctgagtttaagcatncnananaaa

SEQ ID NO: 50244 - DNA, 242 bp, Glycine max
  Clone ID: LIB3107-060-Q1-K1-B3
aaacctattagttagggcaccatttcgacttttattgtcgatgaaaatatacgcctgcattcctgaaaatttaaagaacatgccacttggcattgacaaaccttgtctaggctagggctagtttgtgctggaccagtctgatgggtgaatggttattgtgttgttgaaagttttctgtgactggtttccttttttgggtggttaagctgattggaccaagctgttgattggtcatgtatata

SEQ ID NO: 50245 - DNA, 430 bp, Glycine max
  Clone ID: LIB3107-060-Q1-K1-B4
atctgagacctcccttctgctcttcatttagacctagtcctcactttgagcccagtcaaatgtcaccttgaactaggattttagacctaatgtttcttatctaggcttcagtcttaaatcttgcagattcacaaccaaaatgagcaccaacacgaacatccattcttgtcactatttcaaaattaccactgcattcacatgtgatctttagtaatatttttttaacacttaataaaaatgttgctaaaatcttttggcaccatttaaaactatcgttaaatataaataaatgttattaatatatttttgtgacattttatcaaattgcgaaaacatattagtgacatttgtttatatttgatgtcattttttaaatgttaggttaaattactcatttggttcttatagttttacgattcttacctttttg

SEQ ID NO: 50246 - DNA, 424 bp, Glycine max
  Clone ID: LIB3107-060-Q1-K1-B5
gatttatttattcatgagataagccattgcattcgctcaagtgagaaaaaaaaagtaacaaaaataaacaccaaaaacagatcagaacagagcaacaaccatggtgattcacagactcgaattgtgcataaccatggttcgactagccatagagttcgtcgtgagcgtcgcggaaacagtggtcatagttcaacagagaaccgctgagcctcttggaacgttgaatcgcgcaagtacacctcttcctttctatggctacctccgttgagttgaagaatatctcttatttattttcttttcttctgtgaaattccgcaatttgtatagaccctatgttttcttttccttttgggtgcatcaaacgctgattgatgcaaacccagttgttgttgttgtaaagaaaattgatgcccttttttttttt

SEQ ID NO: 50247 - DNA, 430 bp, Glycine max
  Clone ID: LIB3107-060-Q1-K1-B6
gtttcttttctcacatattcaaaacttcaagtctaactggtagcgtttagcactattgcaataattcctgagctgcagtgagtcaaaactcaaaagggcttcagtgaatcatgatttagatgaatctccaatttgtaggtatattactactgttttgattactgatttggtaattgcttctctacttaaatcagatgggaacacattagctactgcagcagcacaattgaagatttttaactgttctaatcacaaaaagattcaaaagttctctggtcatcctggatctgttcgatgcatgcttttcactgaagatgggaagtatgtcctctcgtctgctgttggagaaagatatgttgctgtttggaggatagatggtgctaaaaagcagtcagctagttgtgttcttgcgatggagcaccctgctgtc

SEQ ID NO: 50248 - DNA, 142 bp, Glycine max
  unsure (1)..(142): unsure at all n locations
  Clone ID: LIB3107-060-Q1-K1-B7
gatcggcanggtctctcctttctttaaatcccaatattttctgggccgattttggctggaaccggttggtggtattcctaaaaatctaagatttccattcgtttgttgaccgatttttaggggtgataattacgtttttttt

SEQ ID NO: 50249 - DNA, 384 bp, Glycine max
  unsure (1)..(384): unsure at all n locations
  Clone ID: LIB3107-060-Q1-K1-B8
gaaggtagtatttcctgaacaggtagcagcaatctcacaacagagaaagcgatcgagagagaaaaagagagagaaatggagcttcatgaccatgatttcttggaggaattaatgtctctaagaagagaaacatgggatacaaatccatgttcacaagaaaanagcttttctctaatggctggggttttgatggtttgatcaaaactatcatcaagcttttcctccaaactctttctcttgccaacaagttcctcaaagttacaaccacgactacacctacaatgaaatctatagttccttacttcacgaattctctgcaccacaagttatagattcatcatcctataacacccttgatagtactccacataataccccttcttt

SEQ ID NO: 50250 - DNA, 359 bp, Glycine max
  unsure (1)..(359): unsure at all n locations
  Clone ID: LIB3107-060-Q1-K1-B9
gggccgacccacgcgtccttcctccnattttacaacacaactttgaatttncagacacagaaatnaagctngggctagtttttttttttcttttgtcaccttccatctctcccttcacacaagggacgaaaaatcatacacagatatagagatagtgagagaaattccaaaaccatgtcttcccacagtcatctaaatttctcctttggggttctaggtaacatctcctacttcttgttcttactggcaccactaccgacattttatagaattcgtaagaagaaatcaaccgaatggttccaatcaataccatatgtggctgcactcttcactgcaatgctttgtatcttttataccta

SEQ ID NO: 50251 - DNA, 331 bp, Glycine max
  Clone ID: LIB3107-060-Q1-K1-C1
tgattgcaccttataacgacgtcgccggagaactctccgccgctccgttctttgaccttccgaattccaatgacttcgatgggttcttgaaagacgctattcagatggtgaagcccgcgaagggtactacaactcttgcttttatatttaaagagggtgttatggtagctgctgattctcgagctagcatgggaggatatatatcgtcgcagtctgtgaagaaaattatcgaaatcaatccgtatatgcttgggacaatggctggtggtgctgctgattgccagttttggcacaggaatctcgggattaagtgtcgtttgcatgagttggc

SEQ ID NO: 50252 - DNA, 408 bp, Glycine max
  Clone ID: LIB3107-060-Q1-K1-C10
ttttgactccaaacgagccatttgggagttaggggctggacgctctgcttccagcgagtgttctttcttcgtttcaacaccttaatttgcacacgctgcttcttcagcttgagaaatggcacaagaaacctttctattcacatctgaatctgtaaacgagggtcaccccgacaagctgtgcgaccagatctctgatgcagtgctcgatgcgtgccttgaacaggaccctgacagcaaggttgcctgtgagacatgcaccaagaccaacatggtcatggtctttggagagatcacaaccaaggccaacgtagactatgagaagattgtccgtgacacatgccgcgaaattggattcatctctgatgatgttggtcttgatgctgacaaatgcaaggttgttgtcaacat

SEQ ID NO: 50253 - DNA, 332 bp, Glycine max
  Clone ID: LIB3107-060-Q1-K1-C12
ttaaagaaggggtccagccccttaagcacttctctctctttcgaatttgcttggaaaaattgtttccttgaagaaaatctaagccggggcgctttcgaaacgtttccgtaacgttttccgtgaggaatctcgcaatggtttcaaccgttcttctacgttcttcattcgttcttcatcgttcttcgatcttcaacgggtaagtacctttaaccaatcttttcgattttattctatgtacccgtatctgtccacattgtgtttcgtgcatttttattcttgttttgtttactctatataccccctgttgacctgcttaaaccattttacttaat

SEQ ID NO: 50254 - DNA, 125 bp, Glycine max
  Clone ID: LIB3107-060-Q1-K1-C2
gcagcatccctgcatcaatgggcgcttctctgccccccaaggaggccaacctcttcaagcttattgtcaaatcatatgaaaccaaacaatataaaaagggtctcaaagccgctgatgccattttg

SEQ ID NO: 50255 - DNA, 395 bp, Glycine max
  Clone ID: LIB3107-060-Q1-K1-C3
tcttgttgatgtttgagattcatgtatccgattctcagtgaaatcttcttttccgggtgtatgatcaattccactgttaggcgcaggacccatttagttcaatccttctcagttgctttcctctattggttgtactacgtttcatgatttctaaaccttccttagtctaataatcatctactactagctattattattattattattattatcatcatcatcatatataataaaatctatctgcaatattatttttctgagtttgtgtctagttagtgtctgggtcctggtcctgccaattgtgtcaattaattgtattgaatcataaaagatggcttcctcaagtggaacatcttcagggtcatctctgcttcagaactctggttctgaggagg

SEQ ID NO: 50256 - DNA, 311 bp, Glycine max
  Clone ID: LIB3107-060-Q1-K1-C4
gggggaaggggaccaaccgttgctctgcatctatcaacaaccagagtctacgttgggtgtatgaaatctgcacctgtcctttctagactggatgtctgattccacgaacctgagttttggaagtttggagaagaggggatccaatacttacaacatgcatctgggccgatatatgccaactcaatggatctggccacttacattttcattaaactgcccagtccgcataaatatgctgatgaagatgtctcactcgttgcatgactcattggtcttgaagttcgagcatattgatgaccgcaatatgtgtt

SEQ ID NO: 50257 - DNA, 422 bp, Glycine max
  Clone ID: LIB3107-060-Q1-K1-C5
gccttaatctatgtttttagccctaagcaggatggggcggtggtctgaaaaattcctttccaagatgaattgggtgcagcctggccatttgttgatccattcatgggagacaaaaaatctgtctaatttgctcgtagcagccccatttggtttgaaccatgtgaattttctccccacactaagtatttcttcaatctctaggtcagctatccattcattgaaatcaatgatattgttggcttccattcccctatgagacacaccctctctttcagattgatgtctgatgctgttaaaatctcccaggaagcaccacaatccatcaagaccatgatgtcttagttgcttgattgattcccataattccctcttattcagattatcacatggggaatatatgtttactatagttgctttttgat

SEQ ID NO: 50258 - DNA, 453 bp, Glycine max
  Clone ID: LIB3107-060-Q1-K1-C6
ccaatccttccccaaaattacaccaaagggttccattcttgtgggaccttccaacctgggtgacccaggggagtttaccatgttagagcttgctcaggttgtcaaagaaacaattgattcaagtgctacaatagaatacaaaccaaatactgctgatgatccacacatgaggaagccagatattagcaaagccaaggaactgctgaactgggagccaaaaatccctctgagagaagggttgcctctcatggttaatgatttccgaaatcgaattctgaatgaaaacgaaggaaaagggatgaaataagcataatagcaaaccctgtatgtatatggagatgagcttgtctccttcatttttttgttcttatttgcggtcagcatcaacagaaaaattctggcaacacgtcactttttgtagaagatatacctactgctggccttttacattta

SEQ ID NO: 50259 - DNA, 285 bp, Glycine max
  Clone ID: LIB3107-060-Q1-K1-C7
gatgcatagcaattcccggttcgtaattgtttaaacctaattctcatttcttcatcgttcgattcttctcctcctaaagatgcagatcttcgtgaaaactttgaccggtaagaccatcacccttgaggtggagtcctccgacaccatcgataacgtgaaagcttagattcaagacaagggagggatcccacctgaccagccgagacttatctttgccggttaaccgcttgaggatgggcgaacccttggcggctaccacattcaaaagggattcactcttcacct

SEQ ID NO: 50260 - DNA, 96 bp, Glycine max
  Clone ID: LIB3107-060-Q1-K1-C8
ggatccatgggcatatgctagggttgtccttcttctcctccacacaccgagagggctggctggtcagaaatgagaatggcttcagcattgtccctg

SEQ ID NO: 50261 - DNA, 418 bp, Glycine max
  unsure (1)..(418): unsure at all n locations
  Clone ID: LIB3107-060-Q1-K1-C9
cgggccgacccacgcgttcgggcttctttatttctacttaagggtatagctgcancacacaaagcattgaattcggggacgtaagttcattccttgtgttttgctttcttcctcaaaaccaaacatgtcgaacacatgcggcaactgcgactgcgctgacaagactagctgcaccaagggaaacagctatggtgttattgtagagactgagaagagttacatcgagactgttgtcatggatgttccagcagctgagcatgatgggaagtgcaagtgtggcactaactgcacttgcacggactgcacctgtggccattaaggaatatgtatgaaaatgtaattgccatgtgtttggcaatacaaatattcaaataatgtaatcttcgtatgaataaatgtgtgtgctgttatccaaatc

SEQ ID NO: 50262 - DNA, 370 bp, Glycine max
  Clone ID: LIB3107-060-Q1-K1-D1
gacaacctcaaaccacacaaacacacacacctctgcttccctctctctctctctctctcaaccaatgcaatcattcattcactaaaaaaaaaattaaaacaccatgcaacaagcaattccttataggtcatggcaacctctcatcacacccaccaacgccaacaccactcacttcacaattagcccacacacattagtaaccttttccacagtgtctacaacagaattatctctaaaagacgatattggttcggaaccgaataacaacatccataatagtgataatcctttctttgtttcctccaaaatggtgcccaacatggtcttagagagcgcgattatagtcttcgctaggcgtggttgttgcatg

SEQ ID NO: 50263 - DNA, 418 bp, Glycine max
  Clone ID: LIB3107-060-Q1-K1-D10
ttaatgttactctgaatcttaaggaacaaccggataaactattgagattttttgtgctgcttaatttgcaatgataattatacttttctgccttctggagtaatctacttgtttattactggggcctaacccaagaaaagacacttcactttaggcctaggctaaataatagtttttggtgggaactttgacagagactaaattttgcaaaataagcttaacttgaaagtggttacaactatttctacagtttcatgctgcttattttaatcaaatatttcccattagcaggctaattcaattataccaattaccaagcaaagataggttagtatcatgaaattatgaattgtaacaactgctctttcttgtcaattagttgtctgttgtaggattagatgtggaaatgctggttttt

SEQ ID NO: 50264 - DNA, 393 bp, Glycine max
  unsure (1)..(393): unsure at all n locations
  Clone ID: LIB3107-060-Q1-K1-D11
ctttcgtacgataagacnacagaatggcatttatgatcttaagaaannaatcaagcaagtggggccggaaggtatcccccctgtgggagtccactaatcacaaacggtaagacgattgtttttccgccaaccggctcggtttgagtattcagatactgttataaaatatgaaataaatgatcttatcaccaactaataactgttgaatgtgttagttcaatctaactactggaaaaaatatggaccaatataaattctagctttctttactaaatattttgaagactatgtcagtgttactttttttaacaacttgatgtcatgtttaatattttgtttttttttatatttaacctttatatgatactgcgtgttttattctcataataaaat

SEQ ID NO: 50265 - DNA, 426 bp, Glycine max
  Clone ID: LIB3107-060-Q1-K1-D12
gttcttcattagacattgaaataaatgacctctttccagggagctctatagtagattgaggccaaccagttgtgaatttatcatcgtctgtaagcacccttttgcatgtttcaggtgttgtcacaattacacttggatttccaaacatcaaggtcttgtacattccagttcttccatatcttcatgatttgttgattgaatcaaaaacgttagtatcatcaactatatgatgcacaaatatgatatacgtatcaaatatttcacatgtttaggatgcataaacatgatagatatgtatataaagtttataaaataataaatatatgaagtaatgcatgtactgatatttttatgataattttgttcactataataataattactttaaaatttaaaattgatgttaacgataatttctgattaatt

SEQ ID NO: 50266 - DNA, 412 bp, Glycine max
  Clone ID: LIB3107-060-Q1-K1-D2
gagattcgcctggttgagaaatgtgtccagatgttcatctagattagtggttccattgttctgatctaggttgagtggtttccaacctagggatatgtcagcttccatgatatgatcgacaaagggacgttgataggtagtctgctcttcttggtggtgtatgtgtgacagaatgggatcatcttgggtgttaacagtttgtcaggggtgtgattccccttgagtgcactcatgcattgtgtgggcggaatgctcgttgccctgggggcattgtacatgagcctccaactagtcgtggttagccttcatatttttaagcttctcttcatggtgtcgctccatctctacaatgcgggtttgaacttgttggagaataccaatatatgtcatggttgttgggggcgaaaggggt

SEQ ID NO: 50267 - DNA, 431 bp, Glycine max
  Clone ID: LIB3107-060-Q1-K1-D3
gaagctatgaaaggcgcctatgataggcagataaagcaaagaggctacatcatcaagggtgatggtcacttctcttacaggaagatgaaaactcctagtttccttatgtcatctctctgcaaaagcctatataagtctctgatagccagtgtccaatgaacatgcgataagaaaacttaatcttgtggtagtaactaagcctttaatctctacatcaagctcccgaatttctgaactttccttccatgggaagataacttcaattcaggatggtcctaaaaaaatgaatttaataattttaacaataataacaaatacttattgaaatataacttatttaaaaatacaaatacctcttcattatagacaatgactgcaacatgatcaacatagccaatcagaattgacgtgtcatgcggtccgctgggaaa

SEQ ID NO: 50268 - DNA, 418 bp, Glycine max
  Clone ID: LIB3107-060-Q1-K1-D4
cagtacaagcataaggcatgtgctgccctgctggatccgtcgtcagcagcaccgcttgtttggccatccccattaaagttcatcagtgagctcaatcaggaagcaaaagccttactggaaaaggccttactagaagctaacagggagggggagaagaccatactaaaggagactgacatgcctccatccccactgcattcagagagtgaagatgataacattgcctctgaggtacaaaattttcctttcttgactgcttcagagtttagatttataagttttactttgatgcatttcaatgtttagtttggttaaagattatatactttggtagaagtcccaagaatgttctttgggacccatgaatgttatacaatactatttcatctgcaatgtagtctttggtaggttagtcact

SEQ ID NO: 50269 - DNA, 409 bp, Glycine max
  Clone ID: LIB3107-060-Q1-K1-D5
ggggtggcagaagagcgaacccaaaactagagctaccttcccttcaaaccttccactcttctctccttttccaatcaagggaataatatttcttagagatattccgaaaccatggctcacgccaatcctatgatttttgttgttggaattctaggtaaccttgtctccttctgttgctttctagcaccagtaccaacattctatcgagtttgtaagaagaaaaccacggaaggtttccaatcacttccttacgtggctgcactcttcacttcaatgctttggatattttatgcttacataaagacgggcgaaatacttctcatcaccattaacgcattcggttgtttcatagagacagtttaccttgtcatctatatcacttattgccccaagaaaagctaggtcttta

SEQ ID NO: 50270 - DNA, 420 bp, Glycine max
  Clone ID: LIB3107-060-Q1-K1-D6
tgactattttagtgcgagctgaattcaactcaaggatcggggctaatactgttcttgtgcagatgcctctgccatcatttacatctcgtgttacttttgagttagaacctggagcagttggacacaccactgattttaaggaagcaaataaaagactggaatggggtctgaaaaaggttgttggtggatctgaacatactttacgagcaaagctgacattttcacaggagttacatggaaatatcatgaaagaagcagggcctgtcagcatgactttcaccgtacctatgtacaatgcttcaaggcttcaggtgaagtatttgcaaatagcaaagaaatcaaaagcacataatccttatcgctgggttagatatgtaacccaagcaaactcatacgtagcacggttataattggaatctc

SEQ ID NO: 50271 - DNA, 419 bp, Glycine max
  Clone ID: LIB3107-060-Q1-K1-D7
gatcaaaccaagacatagcaaacgatccaaactgttttttcatttgcagcatcaaaatgagtggtagcaacgatggtagcggcagctggagctctaggtttttgaaggtggctagtgcagctgccgctacagccgccgttgccggcggtttatatgccattctttcatcctcaacctctgctagctctgagatggaagtgccgtttggcagcgcacggcgtgagagcaaagaacgtgacgatggtggctccgggtctcatcctcgcgagggtgccaccacggtcagtcgttggaagaaacctgagattggttgggtgaagctgaacgtggatggttcacgcgacccatacaaaagttcctccgctggttgtggtggtgttctgagggacgcatcagcaaagtggctccgtggctttgct

SEQ ID NO: 50272 - DNA, 358 bp, Glycine max
  Clone ID: LIB3107-060-Q1-K1-E1
gatttcactgagtgtagtaatcaatcatcttttgtttgttcttcagtactttagtgtgtgatttaattccaagattttgagaatgtctagctgtgggtgtggaagtagctgcaactgtggcagcaactgcggttgcaacaagtactcttttgacttgagctatgttgagaagacaaccacagagactcttgttttgggtgttgggtctgtgaaggcccaattggagggtgctgaaatgggtgttgcagctgagaacggtggctgcaactgtggatcaagctgcacctgcgacccatgcaactgcaagtgaggtcaagatttataaccttgaagcagaaataactgtaatatatgtatc

SEQ ID NO: 50273 - DNA, 417 bp, Glycine max
  Clone ID: LIB3107-060-Q1-K1-E10
ggctccgcttgagcagacttaacaacagcgcagagcgggttactgtctgttcaagctaccatctctctctctctttcttagtgcctccttgccagaagttaaaatggcccaagaaactttcctattcacatctgaatcagtgaacgaggggcaccctgacaagctctgtgaccagatctccgatgctgtgctcgatgcatgcttggagcaggaccctgacagcaaggttgcctgtgaaacctgcaccaagaccaacatggtgatggttttcggagagatcacaaccaaggccaacgtggactatgagaagattgtgcgtgacacatgcaggaacattggttttgtctctgatgatgttggtcttgatgctgacaactgcaaggtcctcgtcaacattgagcaacagagtcctgatat

SEQ ID NO: 50274 - DNA, 426 bp, Glycine max
  Clone ID: LIB3107-060-Q1-K1-E11
tttacgttagaaggggacttattaattgtgtggagagatttaagtgaggagctagagaatgatgatgaagtctgctatgtgtgcagtggtggttgtagcacttcttcttctggcggaggtggggcccatggctgaggctgtgacatgcaccccaacagagttgagtccgtgtcttccagcaatcacttccggtgctaaaccttccaatgcttgttgcacgaagctgaagcagcaaaaaccatgcttatgtggctacctcaaaaacgctagcttgaagcagtatgttaactctcctaatgcccgaaaaaccgttgcttcttgtgggattccctttccaacttgttaattaattaagccttcttataattaaagtgtgggatatatatatatatatagataaacagtttaatttatacacactttgat

SEQ ID NO: 50275 - DNA, 403 bp, Glycine max
  Clone ID: LIB3107-060-Q1-K1-E2
aattggaagatggtctgctttgtgatgctggatatgaatttcctcaatctttagaaagtgccagaaacaatcagatggttgaagaagctggcacctcaggatcgtcctcagacagtcaaagagtgagacagatagtatctccatcagtctcctctcagaaatttggatccctctctgcattagatgctaggccaagttccatttcaaaaaggatgacagatgagttagaggaaggggaaattgcagtatctggtgattctcacatggaccatcaacagtctggaagttggattcatgatcgtgatgaaggtgaagatgaacaagttttgcagaaaccgaagattaaacgtaaacgcagtcttcgtgttcgaccttcccatgccactgaaagacctgaagaaaa

SEQ ID NO: 50276 - DNA, 363 bp, Glycine max
  Clone ID: LIB3107-060-Q1-K1-E3
atttctgaatgacatatttgaaaccctactcaaagcactttcagattcatctgatgaggttgtgcttctagttcttgatgttcatgcatgcattgcaagagatccccaccacttccggcagcttgttgtttttctagtgcacaatttccgactagataattctcttttggagaagcgtggtgctttgatagtccgtcgcctttgtgttcttttgaatgctgagagagtctaccgtgaactttctacaatattagaaagagaatctgactttgattttgcgtcaattatggttcaagctctgaatttgatcttacttacatcatcagaattatctgagattcgagatcttttgaagcaatcact

SEQ ID NO: 50277 - DNA, 476 bp, Glycine max
  Clone ID: LIB3107-060-Q1-K1-E4
ccgggccgaccccacccgtccgcggcctcttggccaaaattacgacagaaggttagatttatgcgagcaagagcctttcacaggttggggccaaaaggcactggagatatgcttatcctcttcctagaggaaagaagtgatggggctcctcctctacttgatagttatagggatgcgaagagtaggattataccttttcttggtaaatggaaaggtcattccatcacaaaacgaagtggtgtgtatggatctacaattgctaatgctgatactgttgtgttgcacgatatggatgacaatggccaacttatgcaggatgttacttcaagttcaacttttgatggggaaaatgttactaccaatgtgcattggactggcacagtatcagactatttggttacatttgatggaggttatcagatgatactattacccggtggcatgtacatggggtgcccttgtgatgtagcaaaaag

SEQ ID NO: 50278 - DNA, 421 bp, Glycine max
  Clone ID: LIB3107-060-Q1-K1-E5
gttttagtgtgtgattgtttgttgttgtaactcggtcttcttcttttgttgttctgtgtttgtgtttgttttttctctcacctgaaaatgtcttgctgcggtggtaactgtggttgcggaagctcctgcaagtgcggcaacggctgcggaggctgcaagatgtacccagacttgagctacactgagtcaaccaccaccgagaccttggtcatgggagtggcacctgttaaggctcaatttgagggtgctgaaatgggtgtgcccgctgagaacgatggctgcaaatgtggaccaaactgctcctgcaacccctgcacttgcaagtgaggtgttgggagagcaagcttcaagcagagatagcccttaattaggaataatgataaactattaatgtgtagctaaaaacttatgtattatgtct

SEQ ID NO: 50279 - DNA, 425 bp, Glycine max
  unsure (1)..(425): unsure at all n locations
  Clone ID: LIB3107-060-Q1-K1-E8
tggggttctagtgtgtgattgtttgttgttgggactggttcttcttcttttgttgttctgtgtttgtgtttgttttttctctcacctgaaaatgtcttgctgcggtggtaactgtggttgcggaagctcctgcaagtgcggcaacggctgcggaggctgcaagatgtacccagacttgagctacactgagtcaaccaccaccgagaccttggtcatgggagtggcacctgttaaggctcaatttgagggtgctgaaatgggtgtgcccgctgagaacgatggctgcaaatgtggaccaaactgctcctgcaacccctgcacttgcaagtgaagtgttgggagagcaagcttcaagcagagatagcccttaattaggaataatgataaactattaatgtgtagctaanaacttatgtattatgtct

SEQ ID NO: 50280 - DNA, 420 bp, Glycine max
  Clone ID: LIB3107-060-Q1-K1-E9
cgctcttgtgattaaactcgtcgggtccgcttaggggttcccatcgcaatactcgtcacgcattaactcgtcgcccttaaagggtcttatagtcgtgtgattgtgctacaattcatagctcacaactcaatgcacacaacatctcaatgcacatatatattacaagtcaatactgttagaccctaatttcgtccgggaactattattcactgatgttttgattctcactaattgaaaggtgttgttgacaccagtttctacacaaggcgtgagatcgttcgatgttttggtcaaggatgcgaaaaatacctaaggggaggggaaaaatttcattttaggcaattttctggaccctggctcgcctggccccacaaattgcttagggctgaaagaaccaactcacctgggcgagccagtttc

SEQ ID NO: 50281 - DNA, 410 bp, Glycine max
  Clone ID: LIB3107-060-Q1-K1-F1
ggggtttcattcatctttctcaggcaagcatgaactctcgatcactctttgccttcctcttcgcaatttgcgcgcactccgtcgccgttgccgacacctcctccgcgtatccttccatccccggcacggaaaccggtgagtgctccctccgcggcgtgggcgtgggcgacggtgttctggttcctccacggcgagaagtatacgaggaggggcgaatcttcgacatcactcacagatatgtccccgagatgccggtgtgggactcgacggaggggctcgggcaacacttcctgtggctcgataagagcatgaagaatggctcgctcgctaacagctctaacatgaagctcggtgttcacacccgcacccatgtcgacgccgcccgtcacttttacgacaattactacgac

SEQ ID NO: 50282 - DNA, 422 bp, Glycine max
  unsure (1)..(422): unsure at all n locations
  Clone ID: LIB3107-060-Q1-K1-F10
gcataacattgttttggccactatttttggtttgtcatattctttatttagttaaaaacaaatttatactatttttatgaatttcccttacctaagtgacaagctttgtacgtatttttctttttcttaagaaacacacagaacaaacatattaagaaatttttttctctcatcctccgtttattctttttacagttggaccacatgtcaaagcacacaaagggcttttgtgaataattgttaattaggaccgtgttgttcaagggagggcttgtcgaaaggacaagattactgctatctatttcaacattagcaatcaatgattttttggacaaatatcaagcaaattgagaacaaaattgttcaataaaagaggactnntaatcctttttagtcttcattatttgtggcactatgcgttg

SEQ ID NO: 50283 - DNA, 406 bp, Glycine max
  unsure (1)..(406): unsure at all n locations
  Clone ID: LIB3107-060-Q1-K1-F11
cacactcnngatttgactcggtgtttatttcagaagacgacagaaggctnttgtgtgctgcaatacattatagactgtggttatctttgagcatgaaacatggtaaccttgttatatatttttgctcttgcataaatattttggggataatttcttgatgttggttggatatgttgtccagtgttatatgttctatttaacattctatgtaactatggaaagaatttgactttaaaaataaattgttttatagaaattgatcggaaattgaatttccttattctttcatttgactcttactttacctttatttgtcattcacattgttatttttttaaccaaatttttattcttgaacaatatttctatacacttattacttacaattaacaaactttttactctt

SEQ ID NO: 50284 - DNA, 426 bp, Glycine max
  Clone ID: LIB3107-060-Q1-K1-F12
gccacacacctacccaagtgccaaaatgaaagcccagttgggccttttcttgctcatgattcttgtcaccttcactagcaatgttaacactctctcgattaatcccaaatctaactcttcaattcctcaattgacccaacagaaaaggcctgacaatgagaccatatatagggtgtcaaagcagctatgttggggttgcattgcggagtcactagagtttttgttcaggcacaacttggtgagagcagccaagtgggaacttccactgatgtgggacttccagctggagcaatacgcgaggtggtgggctggtgaaaggaaagcagattgcaagctcgaacattctttcccagaagatggtttcaagcttggagagaacatttattggggtagtggctcagcgtggacgccaagtgatgctgtaag

SEQ ID NO: 50285 - DNA, 361 bp, Glycine max
  Clone ID: LIB3107-060-Q1-K1-F2
gagcgattctattttttacacatttctatgaagcgatcggttcgtccataccattggtagagcttgtaaaaccacgactgatccataaaggaatgaatggaaaaagtagcatgtcgtatcgatgaagaattctaaaaatatttcattctcttataggatccggccagaatttttgtttgtgaattcttggctcggaacaaaaaaattcagttgggtttaattaataaagggatagagcttggtgactccaattataatagggaaacaaaaagcaacgagctttcattttttttatttgaatgattaccccatctaattgtacgttaaaaaagatttaatgcttgatatgggaaaagctttt

SEQ ID NO: 50286 - DNA, 421 bp, Glycine max
  Clone ID: LIB3107-060-Q1-K1-F3
gaatgtgcatgagtttgttgtgagctataagctagtttatcgtgaggagaatatgaagttgtttgttttctttgttgctgcagtagttttggtagcatggccatgccatggcgcaggctaccaaaggttccctctccgaatgaaaactggctatggtgagcgttcttcggaggtaaaatgcgcaagttttaggcttgctgtggaagcacacaacatccgagcctttaaaaccattcctgaagagtgcgttgaaccaacaaaggactacattaatggcgaacaatttagatcagactctaaaacagttaaccaacaagctttcttttatgctagtgaacgcgaaatccatcacaacgacatatttatattcggcatagattacaccgtactctctaatatcccatactatgaaaaacatgga

SEQ ID NO: 50287 - DNA, 425 bp, Glycine max
  Clone ID: LIB3107-060-Q1-K1-F4
tcattaattgttttgtgtactttcactataatttcggttactttcagttttcttttcttccgtttttaacgtgctttagtcatttacttaagtcattttctcgcctaatcaaaaaaataaaataaatttccaccgatcatttgaattgtaacatccattaatttctgttaaaatgaaattcgaccgttcggtcttgccgtaaccacgttggaaaccaaaaagaggtaaaataataatataataatcaaaaatatcttttagtaaaataaatcaaaaaaatcaatcggacgtttttctttgggatttctctttcttaaatcgaatcgactaataaccaaagtgaaactaaggctaaaatcaattcataaaccaaacttttgtcatcgcctaaaaaagccattttcaaaggtccaacgccttgaaat

SEQ ID NO: 50288 - DNA, 414 bp, Glycine max
  Clone ID: LIB3107-060-Q1-K1-F5
gtcttattaaattggttagagaagcttggtgtctttcctgagtctggtgtgagtgaaggtgatatgtttttgtctgctaaccaagctgaggcatctttgagggaggatgcacgggtatacatgatcttagctagtatgagtgtcgagactacaaaccctgtgagtgatataccattggtgagagagtttccagaagtgtttgaggaggtgtcaggattaccaccagagaaagaggtcgagttctctatagacctagtgcccgactgggttcaagtgtggtataaactatcagccttcaaccgttgttcctggaggtgaccttgccagggtgcagagggctgtgtgcatgatttctaactccaccagtgtagctgaagtgttctcaaagattgatcataagtttgatctcatgta

SEQ ID NO: 50289 - DNA, 463 bp, Glycine max
  Clone ID: LIB3107-060-Q1-K1-F6
gccgtcggaccggttgcaaaagaactcaaatgggggattttattgcaataaggttagaaatgggatagggtttgggaaggttgaaaatgagatgagaaaagttgtgaattggatacgatagtttttgtggtattttaccgagatctaaaagaaagaacgaaaaatgcaggatatataagctgacaaaaaaaaaaccctgtaatgtgaaagtattagaaattcaagaagacaaacaaaatgtagcttactatagtagaattcaatttggagtggtaaaagaaacccttaagttcgaggtttataagacatgtgtgatggagtatgtattaatttgagaattctaagcgcaaacaataaagacttttctacaagggtatatatttttgtgttacttagggctgaaccatagatagtattagatatgtttccttgggatataaaaaaaatctataaatgcatgctt

SEQ ID NO: 50290 - DNA, 426 bp, Glycine max
  unsure (1)..(426): unsure at all n locations
  Clone ID: LIB3107-060-Q1-K1-F8
ttcgctttaggaaagtctcatggtatagctcgatagggggtctagataagcacacccatacaatgattttctttgttgttttaatgctctccaaaaaagctggtctccatcgctaaacaacaacgtcatgatcggccaccatccatgacccctcaaacaaagcatgtctataatctttctccgatgtgaattgcaccagatagtaataatctggcatgtctacaattcgaattttaccatattgggcccaaccttgttgtaatttatactccaacatcttanaccccactgtctttctaagaacatgtaccacaagagaacccttccatggtgcacaccagacaacacattcagaatccagaatattcacaataggacaagagataaaatccttctcctcttcacttttgtcccttgacattttat

SEQ ID NO: 50291 - DNA, 62 bp, Glycine max
  unsure (1)..(62): unsure at all n locations
  Clone ID: LIB3107-060-Q1-K1-F9
tgtgagatctcaggncaggcggggctacccgcggagtgtaagcatatcaaaaaaaaaaaaga

SEQ ID NO: 50292 - DNA, 419 bp, Glycine max
  unsure (1)..(419): unsure at all n locations
  Clone ID: LIB3107-060-Q1-K1-G1
aagtatttgaagcanatgagtgatttataattttacgattttgttcataattattttagccaagtgtggattgtttttaattttttttaaactatactaatttactaatttgtttttattttgcttttttattatttttatgtgtctcatctcttgttaggaggctagtttttggttcttgtgtttgaaactaagtacccaattttctgagatgagaaaaaagaccaaaaactttttttttttatcagcaaagactaaaaaactttgatataaaataaatgcatttattgttatgattctattctcttaacccgaagtgttgaaatcttttataattttccccccattgtatagctaagtttcngtaggtggtggttttgtgacatatgtttggtagtgaaaattaaatattcgcatgg

SEQ ID NO: 50293 - DNA, 292 bp, Glycine max
  Clone ID: LIB3107-060-Q1-K1-G10
aaaaaaattaattaataattttttatttaaaattaaatttattttttttttaataattataaattttttttttttataattttttttttttattttttttttttttttatttttaaaattattttttttttatttatttttttattttattttattattttttttttattaattatttttaatttttaatttttcaattctatattttattaattttttaaattttttatttttttaaattttttttattttattatattttttacttttttttaaatttataattttttta

SEQ ID NO: 50294 - DNA, 456 bp, Glycine max
  unsure (1)..(456): unsure at all n locations
  Clone ID: LIB3107-060-Q1-K1-G12
cgggccgacccacgcgtccnacttctctatagactacagaatggttttctcaaaaacagagaagagaggggggtaggttatttttgtagaatttaaaagacgatctcacataagacattatttatttgaatttattacacaaatattatatatataataagttgttgattttcataataaacatcttgtaaaataatttttaattgattgataatgtaaaaaatactaataatatatgtcaagggatctaattcattagttgagaaaatacattagttatgttgttttttattcttataatatcaaattttaggtttgaatatttttacttattttttatataattagaagagaaatgaaataaaaaagacataaaataaattatgaaataatgttacaaagacaggataattaacgcgagaataaataattaagtattgtaaactattttgaatt

SEQ ID NO: 50295 - DNA, 104 bp, Glycine max
  unsure (1)..(104): unsure at all n locations
  Clone ID: LIB3107-060-Q1-K1-G2
ttcaccggattggcannaccatgtcgagnngagaaagggttagagaagccaannaggaggannaaacgtgactttctgggcncnncagctgttaagaagaatgg

SEQ ID NO: 50296 - DNA, 368 bp, Glycine max
  Clone ID: LIB3107-060-Q1-K1-G3
aggacgcacttagcaatcaatcaacacttccaattgcgatatacacatcttcaattaagccatgactctctctaagcttatagttgcttcccttcttgcctcgcttctccttcttcatcttgttgatgctgatcaatcggcacatgtacaaacgcaggggtctcttctgcagaagatagattgtaatggagcatgtgctgcgaggtgtcgtttatcatctcggccacgtctctgcaaaagagcctgtggaacttgttgtagacgctgcaactgcgtgccacctggcactgctggaaaccaagaagtgtgtccctgctatgctagtttgactactcatggtggcaaacgcaagtgcccttagacttaaa

SEQ ID NO: 50297 - DNA, 460 bp, Glycine max
  Clone ID: LIB3107-060-Q1-K1-G4
ggtcgacccacgccttcctaccggttgcaaaaaaccaacaaaggggtttttttcttggaaaattccaaaccagggtcctggggagctgatccaagtttcatggttggaggtatccggcgtggtaaacttaccaggtgtcaagaaatatagggttgaattcgaagtgagagttaaagacgatgggttcggttggagtggcacggacgtgctagtgatggctaagattgggaaaacgggaaaatatacgtataaggtgacgaaactaaaccctggtgaaaccttgaatattccaaaatcaactgacccacttgagattcaagtgaacaagcaatctgaggaccttcactttggattatatgaagtgtggagcggaaaatggaagggaggccttgaaattgtcagagccctcatcaaacctttaacttaattgcatgcaactcatcataccatatatcgtttt

SEQ ID NO: 50298 - DNA, 374 bp, Glycine max
  Clone ID: LIB3107-060-Q1-K1-G5
cagaggggggtgttagtatttaattgtttgttgtccaaactcgttcttcttcttttgttgttctgtgtttgtgtttgttttttctctcacctgaaaatgtcttgctgcggtggtaactgtggttgcggaagctcctgcaagtgcggcaactgctgcggaggctgcaagatgtacccagacttgagctacactgagtcaaccaccaccgagaccttggtcatgggagtggcacctgttaaggctcaatttgagggtgctgaaatgggtgtgcccgctgagaacgatggctgcaaatgtggaccaaactgctcctgcaacccctgcacttgcaagtgaggtgttgggagagcaagcttcaagcatagatagccctt

SEQ ID NO: 50299 - DNA, 428 bp, Glycine max
  Clone ID: LIB3107-060-Q1-K1-G6
ttccgcttgcaaaagaccaccatatggggccccattattcctttccaaaccaaaccagaccaaggggggggggtgtgaaaggtgaaccaaaaaccagaccaccattggcaacactaaaggttcctaagccttttccccccgttgcaaataattgtaaccagttccaaaaagccttctaaggttggggaactaacaaggagctgattgtatcaatcttggctcatagaaatgctgctcaaaggaagctaatcaaaaaaacttatgcccaaacctatggaaaaaatctcctcaaggccttgaccaaaaaactaacaagtgattttaagaggctggttcatttttggacacttgattctgctgaacgtgatgcatttttggcaaacgaggcgactaaaaaatggacttcaagcaatcaggttctggtggaa

SEQ ID NO: 50300 - DNA, 466 bp, Glycine max
  unsure (1)..(466): unsure at all n locations
  Clone ID: LIB3107-060-Q1-K1-G7
cgggccgacccacgcgnccgnactgtttttatttgacttcagatttttgtttgacgagggnaaggtcgcgttgtcgtgcgtggtgtcatgcgctgttcctctgtctgtcgtttttgttttcagaccaaaccctagctccgcatcgcaaccatgtcgaccaagcaaggtggaaaagctaagcctttgaagaaacccaagtctgataagaaggattacgacgaggttgacatggctaacattcagaagaaaaaggaagaggagaatgcgctaaaggagttgaaagccaatgcgcaacagaagggaagctttggaggttctgggctcaagaaaagtggaaagaaataaaggctctttatcatgattgtatacatccaatattgagccctgtagtttattaccatgattacttctgncttattgtggccttctttattgctctaatgttagtactgaactgaggtatttc

SEQ ID NO: 50301 - DNA, 379 bp, Glycine max
  Clone ID: LIB3107-060-Q1-K1-H1
gagagtggtggggtgtgcaaaagagcgtcgcaggtgtaaccctaatcagaagaagcgcagcttcaagcgagtgacagccaccagccatgggtcgtatgcacagccgcggtaagggtatatcctcttctgctttgccctacaaaaggacacctcctagctggctcaagatctcttcgcaagatgtcgaagaaaatatctgcaagtttgcgaagaaaggtttgaccccgtctcagattggtgtcattctcagagattctcacggtattgctcaggtcaatagcgtcactggcagcaaaatccttcgcatcctcaaagctcacggacttgcgcctgaaattccagaggatctgtaccatttgattaagaaagcagtttcaat

SEQ ID NO: 50302 - DNA, 413 bp, Glycine max
  unsure (1)..(413): unsure at all n locations
  Clone ID: LIB3107-060-Q1-K1-H11
acccacgcgtgcggctttaaccaacagatgggattcaagttcctgacgaanncngcaacagcgcgcatggagggtttaacaagctcgcggagttattggaggtggagagggttggcgtctgccatcaggctgggtctgatagtttactcacttcttgtacatttagaaagttgagggatacgttcttcagtggctccacggagaaatatgctggtgtcttgtatggtttaggggttgagagtggacagactaattgaaattgaaagagaaaaagaaaaaaggaaagaagaatataattggatgtagagtacgttttaagtgtgagtctctttttacttcgtgtacacttctgccaaaaaatggttgttgtttacttgtaacattttcatcatcatccttgcttgaactgtaac

SEQ ID NO: 50303 - DNA, 421 bp, Glycine max
  unsure (1)..(421): unsure at all n locations
  Clone ID: LIB3107-060-Q1-K1-H12
tttttattttgcaagagtttgntgngagctatgagctggtttattttgaggagaatatgaacttgtttgttttctttgttgctgcagtagttttggtagcatggccatgccatggcgcaggctaccaaaggttccctctccgaatgaaaactggctatggtgagcgttcttcggaggtaaaatgcgcaagttttaggcttgctgtggaagcacacaacatccgagcctttaaaaccattcctgaagagtgcgttgaaccaacaaaggactacattaatggcgaacaatttagatcagactctaaaacagttaaccaacaagctttcttttatgctagtgaacgcgaagtccatcacaacgacatatttatattcggcataaataacaccgtactctctaatatcccatactatgaaaaaca

SEQ ID NO: 50304 - DNA, 353 bp, Glycine max
  unsure (1)..(353): unsure at all n locations
  Clone ID: LIB3107-060-Q1-K1-H2
cctaattaaggtgaaaatgaaggcatcacccattgcttggttcactttggtggttgtgtttcttgtggctgaagttcaagtttcaatggcagtgacatgcagcccagtgcagctgagtgcatgtgtaagtgcaataacctcttcaacccctccatcaaacctatgctgctccaagatcaaagaacagaaaccatgtctctgccaatacctcaagaaccccaatctcaagaagtttgttgactctcctaatgcaaggagagttgctagcacttgtggaactcccttcccaaagtgctaagtgttaataaattggaaagaggtttaatttctctgnctgattatgcatcttgata

SEQ ID NO: 50305 - DNA, 477 bp, Glycine max
  unsure (1)..(477): unsure at all n locations
  Clone ID: LIB3107-060-Q1-K1-H3
gaattcccgggntcggacccacgcccgtccgtaccggcnttgcgagaagaacgatcagaagggggagagtannnagttggtgnnnaagttggattatttgtggtgagtattgagagannngtttcgtnnttaataccatnnngcattcnnaattatnnntaaacccttatanntgttttgggttnnntttttctttcnnttctggannaataagaaatgttttcattttcgtcgannaaattaatangcnttttannatttnntttagagnnngagagaaattatangnnaaataannnattttatttatttctttcnnaataannatatgtntnntggttttgggttttnntttttttaannaaaaaatattattattnnttattccggtggcttattaagttaccaagtaatttaatttgaaggttnnaccatttaccaaccgtgttgtaagtcgtaaaagcatgattaaagcga

SEQ ID NO: 50306 - DNA, 320 bp, Glycine max
  Clone ID: LIB3107-060-Q1-K1-H4
tttcaaaactaaacaaatactaaaaccatataagatcgagttcttcatacccttatatttttagattatatacattaataacctcattaattaattcactttttttccattccaaatttttttccccctttccccaaaaactatatcaacttcttattatcgccacaaatatataatatctttcaaccaacttccactcaaacttctttttgttcaatatttaatttttttctatttttctttcaccctatccttttcttatatttccaaagatcttttccaaaattaaattttaaccccaatttatttataaatttttt

SEQ ID NO: 50307 - DNA, 441 bp, Glycine max
  unsure (1)..(441): unsure at all n locations
  Clone ID: LIB3107-060-Q1-K1-H8
tgtttttattttacttcagaattttaatgtgcacgagcnngnngngagctatgggctggtttattttgaggagaatatgaacttgttcattttctttgttgctgcagtagttttggtagcatggccatgccatggcgcaggctaccaaaggttccctctccgaatgaaaactggctatggagagcgttcttctgaggtaaaatgcgcatgttttacgcttgcttgtgaagcacacaacatccgagcctttaaaaccattcctgaagagtgcgttgaaccaacaaaggactacattaatggcgaacaatttagatcagactctaaaacatttaaccaacaagctttcttttatgctagtgaacgccaagtccatcacaacgacatatttatattcggcatagataacaccgtactctcttataatccatacttatgaaaaca

SEQ ID NO: 50308 - DNA, 417 bp, Glycine max
  Clone ID: LIB3107-061-Q1-K1-B4
gggggccttttccttttttggtttttccttcaattcaatgggggggaggagaggagaggagggggaaccccagatcctttccttcctttccacaaaaaaaaggtttttcatcgctcttcttgccgattccgccatttctcatttcggattcgagattgttgcaggtgcattgcttttgcctctcgatggtatgttccccgggaagtgggagaatggaagtcatggccaggcttctcgctgctgagactttctctcacactgtagcagatgactttgcccgtgagaagttggctgctgagtatatttgtagagaactacgtgaggcagatgaaacaaatttgcttcaggaagaagatatgcatgtctatggtgagagccccatgactgatgccttgcagctggtatgctgcaacactt

SEQ ID NO: 50309 - DNA, 258 bp, Glycine max
  Clone ID: LIB3107-061-Q1-K1-B9
acgggggcgaccgacgcttacgcccacgcttcctaccacataatggaactgtttttagaagacgacagaagttttcgggggcgggattactacggaagggttcggttgttttaagactacatatgggggctcttatcaattaatcaacacttacatttactatatacacatcttcaatttatccatgactctatctaagcttattgtgcttacctttttgcctcgcttctcctttttcatctagtagatgctgatcaa

SEQ ID NO: 50310 - DNA, 277 bp, Glycine max
  Clone ID: LIB3107-061-Q1-K1-C7
ccggggcgccacgcgttctactgtttcatataatacacaagtttatttttcacagtaccaacatctccctgcggggggattgatttgcttcttccgatcccatcactaattgcatattgcaattcctctactcacaaaaaacctattcctataccctttctcttttcctgaacccaacacaacaactcaacacaggattaataaattaaattaaaatctatcttaaatcctctctctctctctttctcttttaacggtttgcatttctcttcctccc

SEQ ID NO: 50311 - DNA, 311 bp, Glycine max
  Clone ID: LIB3107-061-Q1-K1-D12
agctgtttcctttaagaagaagatggatatgtatcaccgctggattcttaggatagcgtggggagcgttcgcgtttgttctgcttttcctatcggcctcagcatacgacgtcgttgtgctctctgaagataacttcgataaggaagttgttcaggacagaggagctttcgttgagttctatgcttcttggcgtggacactgtataaagcttgctccataatatgaatagcttgttaccatcttcaagaaagccaaatctgttttaatctgcataggttgactgtgatgagcacaataatttttgcatcaaa

SEQ ID NO: 50312 - DNA, 208 bp, Glycine max
  Clone ID: LIB3107-061-Q1-K1-D7
aaaacaacaaaagggctcaattaagcaacactgccacttttacctggaaccgcactattaacacgtgtgcagggctcattaattacaattcactaaccttatactactattccaaaacaaccccatatccaccatctcatttttcacaaccaaatatttataccttccctaaatacaaaactcttacccattcacttcttcaaataca

SEQ ID NO: 50313 - DNA, 300 bp, Glycine max
  unsure (1)..(300): unsure at all n locations
  Clone ID: LIB3107-061-Q1-K1-E12
aaattatattttttaaataatatatataataattaaatttataaatattataatatttatatatttatatttaaatttaataataaattatatttaattatataaataatattattaaaatattatatataataaaattntaaaatttaatatttaaatataaaataaaaatatattaatataaatatataataatatattattaaaatttaaaaaatattatttatattataaaaataatataataataattatattaaaattaaaaattataaatattaaaataaatatatttaataa

SEQ ID NO: 50314 - DNA, 387 bp, Glycine max
  unsure (1)..(387): unsure at all n locations
  Clone ID: LIB3107-061-Q1-K1-G1
ccggaatnncggggccgacccacccgtccggacaacaaatgggggtgagagagcgaccgaccaaccagtttcaaagagaggatttgggattgggaaggcgagggattgcgctgcgtctcttcctcttctctttcgattcatccctcattcataatcttccaatccaacaacctcagcctcacacttacacatacacacatctgaacgcgtatcgtccctcccatggcttcaaagcgcatcctcaaggagctcaaggacttgcagaaagacccaccaacttcttgcagcgctggtccagtagctgaggacatgttccattggcaagcaacgattatgggtcctgctgatagtccttatgctggaggtgtattcctagtcactattcac

SEQ ID NO: 50315 - DNA, 182 bp, Glycine max
  Clone ID: LIB3107-061-Q1-K1-G11
cggataaccgttatatttcttgcgctcgggcgtattacaaaccccgacttttttattgtatacatttattacataaaatgtcaacacatgctctgcctgttgctttgattattcatgataacttttcctatctcactgactttgagccctctacacatcattcaaattttttccctatcaac

SEQ ID NO: 50316 - DNA, 255 bp, Glycine max
  Clone ID: LIB3107-062-Q1-K1-A10
gtggtgcttctcacccatcagggggcgattggtgaaattccaggacatgccgaaaaaccaaataaatattgatgcacaatccgtaagtttccgtcacacaccgtaaatcaaattgtatcatcgctgcataattaaatgaagttccctaacattccctaagttaaaaatgggataactatgtaatccccaaggttacgtaacattacggaaagaaaacatttatcatttcgaaattcataagtttacgtaacttta

SEQ ID NO: 50317 - DNA, 261 bp, Glycine max
  Clone ID: LIB3107-062-Q1-K1-A11
gatggttttgcgctgttgttggggctcattctgcggaacctccgagctctgcaccgaataacgaatccatggggaagacatatggaatgggatctgctcgcaagctcaagtcccaccgcatgaggcataagtgggctgacatgtcatacaataaatcacatcttgtaaatgaatggaagaaaccttttgctggttcatcccattccaagggaattgtccttgaaaagataggttttgaggcttaacagcccaactctgcca

SEQ ID NO: 50318 - DNA, 474 bp, Glycine max
  Clone ID: LIB3107-062-Q1-K1-A5
cccggggcgacccacgcgtgcgcccaggcttccgaacggttacaaaaagacatcagaagggatattactatggatcgagaggggataagagtatctactcggacactacaatggaaatgtgttgaatcaagaatagacagtaaacgtctttattatggacgctgtattctgtctccacttatgaaaggtcaagccgatacaatatgcattgcaatgcgaagagttttactcggagaaatagagggaacatgtatcacacgtgtaaaattagaaaaaataccacatgaatattctaccataataggtattgaagaatcagtacatgaacatttaatgaatctgaaagaaattgatttgagaagtaatctgtatggaactcgggacgcgtctattgtgttcaaatgtcctggatatgtaaccgctcaagacattattttaccaccttctgtggaaatggttgataatacacaatct

SEQ ID NO: 50319 - DNA, 406 bp, Glycine max
  Clone ID: LIB3107-062-Q1-K1-B8
cgtccaccggctacaaaaagacgacagaaagggactccatacatcacacttaactgcgatctacgtgagacactaacaaaaatcaccccggccaaaaactcatgactcttacactttaacgcgcattatccgaactactcaccctaatagctaaacactcaatatttctaatgatccctacctttagtttcaaccccaaaaagctttataatgcttcatattattctccatctaattcagattggtcacctgcagaggacacttggtatggacctgccaatggatatcgaagagaatgaggagcttgtgcatatggtaacgctgttgggcaacctccattatattctttaatatccgcgggaagccctcttatatatgactctggcaaaggatgtggttcttgtta

SEQ ID NO: 50320 - DNA, 164 bp, Glycine max
  Clone ID: LIB3107-062-Q1-K1-B9
gcatttcaacaattcttccataaaaaatatatagaatttcttttgcttaccctcttctcctaacacctaaaagatccctacttttcctatacaactacaattctttcactctttcacaccaaaatcttttcttattactgaaaacagtgcaattttgagtcttt

SEQ ID NO: 50321 - DNA, 227 bp, Glycine max
  Clone ID: LIB3107-062-Q1-K1-C8
gattttcacatattcaacatactaataatgaaggaaggctgggtacttataaatgtaatgtcttctcaaaaggaatgttttgacctctctggacccttacatttaacttatgctgactgagataatgcatatcatcgaaagtctgttgctgctagttttgcccaaacgtgctatgttctaaagaaagacaagctagaacggcagtgaaagccctgatgctcttacac

SEQ ID NO: 50322 - DNA, 273 bp, Glycine max
  Clone ID: LIB3107-062-Q1-K1-E10
attgtacaattatctacttgtaagaagttcagattcgggcgacaacatttgtaatgcagaattaggtcattaacattgtaaatcttctggcgatgattggaatatcaatgtgaagacgctatatgacttctgctatggcaatatcattgtggttgtcaaggtatttttgaagaaatatcgtggatttacaaagaatctggttaggcttctacaattctttaaggtgaagataacttcggctctttacacaagcatagaatgatattttttctt

SEQ ID NO: 50323 - DNA, 380 bp, Glycine max
  unsure (1)..(380): unsure at all n locations
  Clone ID: LIB3107-062-Q1-K1-E9
aagacacagagggtagtttntaaanagatattgaaagtaagcatatccagacacataagggaatgattgggtgtggacggcagatccacgtgggcagtactcaacgcaaagtgcttacaatatgttgaggggggaagcaatagaggggatctaggatcgagcctttgaggaactgtggaagttgaaggtcccaaccaaattttcagtgtttgcatggaggctacttagagatagattgccaattaaaataaaccttcacaggagacaagttgaggtcaatgataggcgctgtccattttgcagcacgatggatgttgatgcatgacacttgttctttcactgcaataaaatcaaccctattcgggaggaatccttgtctt

SEQ ID NO: 50324 - DNA, 324 bp, Glycine max
  Clone ID: LIB3107-062-Q1-K1-F10
agacgccaaaacgacagacaggttaatctacaataattataagaactataaagtgtagaagatattggatagctatacgatggccgattaaaaaataaatattcactaaagaccaaaatccaaaattccttatgaggcgatgcaaatacaaatggacagagatttgtgcaccatactgaagggcaagcgcatagaaatgggcattgcttgtctaaagggtttacttgactaaaagactggaacacttcggtcatcggcgttgtcagtgttaggtctcgatttcttaatatgttccacagtctatttctcacgctatcaaacttt

SEQ ID NO: 50325 - DNA, 239 bp, Glycine max
  Clone ID: LIB3107-062-Q1-K1-F12
gaaaacgcgtgcggacaagagcaaaaagacgacagaaggggattctagtgtgttattgtttgttaatataactgaagcttttggttttgttattctgcgtctattttacatctttctctcacctaaaaatgcctttctgcaatgataactgtggttgctgaagctacttcaagtgctaaaactgctgctgatgcttctagatttacccatactttatcttcactgattcaaccaccacc

SEQ ID NO: 50326 - DNA, 378 bp, Glycine max
  unsure (1)..(378): unsure at all n locations
  Clone ID: LIB3107-062-Q1-K1-F5
aaagggccgaccacgcggacgnacaggcgtaaaaacggtttttttacgactttttgggacgacggaaaatggggctaatcgggggacataccctaatttcctctggagattattactngangacatgcaacctttagttatccgttttgacgtactagtcgttcttcgaagcacaataaatgaagtccctatacgtctcggaaatcaaaaggaaacatgcttgcgctatccaggatatttcttaatgttagctaatagtctataatagatgtttttgcgcaatcctcgagtttccgtaacttcttcgaaagctaaaaaatattaattacataattcacttagattcttagccttgcgcaagggaaataagtatctata

SEQ ID NO: 50327 - DNA, 418 bp, Glycine max
  Clone ID: LIB3107-062-Q1-K1-F9
cactataataattgtacaggacttggaatccagggtctcacttaaggagattaagttcattaggagactaaaaacttgttggtaaaaatttaaatgtttttttatagagttacttttacttaataattgaaacaatttaatgtgttaaagttataaccttttcatttaatatttgtatttaaactatttaactaacttataattttaaattattacactacaacacatgtgatctttaataacattttatttttgtctaacacttagttaaaatgttgctaaaaaattttgttgataacatttaaaaaatgttgtcaaatatgaataaatgttactaatatattttcatgacattttatcaaatgttgtgtatagtccatggtgttaaaaaatcacatgtctagtggtgttattttat

SEQ ID NO: 50328 - DNA, 295 bp, Glycine max
  Clone ID: LIB3107-062-Q1-K1-G9
aagacgacagaaggggtgaataatacaaatttaaataatattagaaaaatttttgaataatgattaaataagtccttcatatttttagagataggatacaaaatttacatggatatagtaagtcttgcttgggctgctttaatggtagttttttcattttctctttccctcgtagtatggtgaagaagtggactatagggatactcaaaattgagttaaggtatcaaagtaccctctttgttttctacttgggttttttaattttctttatcttttctatctaatttaagtattt

SEQ ID NO: 50329 - DNA, 309 bp, Glycine max
  Clone ID: LIB3107-062-Q1-K1-H11
ggtgtgtgagttcattaacgtatacatattctctgtgttgtgttgtgtacttgtgttaattgtgttgttgttgtaggaaatttaagtgaagagagaatgatgatgaagtctgctatgtgtgcattggtgcttgtggcactggttgtggttgaagtggtgcccatggctgatgctgctgtgacttgcaacccaacacagttgacttcttgtcttccggcaattaattcatgttctgcacctttcagtgcttgtttccatatacttaatgagcaaaagccatgcttctgtggctaccttaaataccctatc

SEQ ID NO: 50330 - DNA, 286 bp, Glycine max
  Clone ID: LIB3107-062-Q1-K1-H7
aaaaaaaaaaattgttaataataaaaatatataaaaatttaatatataaatttaataaaatttaaaatatattaaattaaaaaaattataaaatataaatattaatgtataaattaaaaaaaatataaaaaataaatataatataatatatataaaaaaataaatataaaaataataatttaaaaaaaaaaattaattaaataataataaaataaaaaaatatataaaataataaaatatatataaaatataaaaaaataaaaaaaaaatattattgatttataat

SEQ ID NO: 50331 - DNA, 314 bp, Glycine max
  Clone ID: LIB3107-063-Q1-K1-A1
gatagctgtagcggcgacactaagatcggagaaagaatggcgaaaacgacgtcgttgctgctctttacactgctcctcttcggaaccctagctctcatccaggcgaagaaatcgaaggaggatttgaaggaggtgacccacaaggtttactttgatgttgagattaatggaaaagaagcaggtcgtattgtaatgggtctttatgggaaggctgttccaaaaactgcagaaaacttccgagcactttgcacaggggaaaagggaactgggtaaagtggaaagctctcattacaaggtagctcattcatagaata

SEQ ID NO: 50332 - DNA, 407 bp, Glycine max
  Clone ID: LIB3107-063-Q1-K1-A10
agtttgttgtgagctttaggctagtttatcgagaggagaatatgaagtggttggttttctttgttgctgcagtagtttgggtagcatggccttgccatggcgcaggctaccaaaggttccctctccgaatgaaaactggctatggtgagcgttcttcggaggtaaaatgcgcaagttttaggcttgctgtggaagcacacaacatccgagcctttaaaaccattcctgaagagtgcgttgaaccaacataggactacattaatggcgaacattttagatcagactcttaaacagttaaccaacaagctttcttttatgctagtgaacgcgatgtccatcacaacgacatatttatattcggcatagataacaccgtactctttaatatcccatactatgaaaaacat

SEQ ID NO: 50333 - DNA, 421 bp, Glycine max
  Clone ID: LIB3107-063-Q1-K1-A11
catccacttggttgttcaaagagaacaagggatggtacataccttgtggatctttgcttgtaaaggcttttataaggttgaaaagaaatctcaaggaccgcaggtcgcttggggactgtatgtatgcacgggttgttgccgaaccagtataaaattcttgtgtttgtcttcttcttccctacactctttaatttccgctgtgcactttaattatcgcttttacttttggttaagtttctatttctgttctttattttcttaacattatagtaaaagcctaattgaatctagtaacattaagaaggatatcttttaattagtaaaggttcattaataattaattcaatccccccttcttaattattccgaggccacttgatccaacaagatacaacagagtcagttctcaattattaaaatg

SEQ ID NO: 50334 - DNA, 356 bp, Glycine max
  Clone ID: LIB3107-063-Q1-K1-A2
gtagccagaggcttcttgaggaagatttctaagcgcatcccatttactaagttcaccccccttttcatattttatggaaaagttacggaatccttacagaagtgttttggatttgattttaatcttttttatcttccctttcaccaatgttaagtgaaatatgcttacccatggttttcagaaattttacggaagcattacggaagccacgaaagccccaaaaaccatttttcaacaacgtggaggagcttgccgcccagttgcttcccccttaagcaatcccaattgcctagattcaaattgctatttacacccctatcttgataagttcacccccttatttttgtgtttttggg

SEQ ID NO: 50335 - DNA, 391 bp, Glycine max
  unsure (1)..(391): unsure at all n locations
  Clone ID: LIB3107-063-Q1-K1-A3
atttccggggtcgatcccacgcccgtccgctccacgtcgtctcgtcccacgtcgtctcgtaccggctttgcgagaaagacccgacagaagggggagaagtgaagaagaatgggctcccaagggggtttaacctttctnggctgtgttaatatgcccgtttcagcactgtcanctgagnntccttctgttgcgggggatagggcnnaaaataatggccctttgttatgaaccttctacaagggaatcantgccctcatggctgaagacatcatcacnagaacaaagtcaatgcttcttctacaaagcgccacaaagaaccacttgctttctcctggctcaaggaacccatcttccatgactgtgcttgttcaagagtttgtgaatgcttcac

SEQ ID NO: 50336 - DNA, 421 bp, Glycine max
  Clone ID: LIB3107-063-Q1-K1-A4
ccatcattcaaagtcataaccgatacctaaaatcctcattccaatcaaaaccaaccccaccatgcccacaaaattaagtcatcaaattaaagcaccgatgatcctcaatttgatccttgtgcttatttgtgtcactactccaatcaaaggtgagaaatcaaggaagcttgatgaggtcacaaacggtaatgagaagtgcacaccatgtgaaggtggttacaccccatcaccaccaatagagtatttatcaccaccaccaccaatagagtatttttcaccgccaccaccaattgtgtatccatcaccaccacccccttcacccaagaaaccaccaacgaagtattgccctccaccaccatcatcagcatatttgtacatgacgggtccaccggggaacttgtatcccgttgatgagaatttt

SEQ ID NO: 50337 - DNA, 416 bp, Glycine max
  Clone ID: LIB3107-063-Q1-K1-A6
gagatctgaagtgtgtagagttaaagactgagagagacgaagccagagaaaaccaaaaaccttactctttttcacgcgacgccctagttcatttttcttctccgttctcttctctctctgttcttcactcactctcattcattcaccatgacgaaacaacatgccaattggtctccttacgataacaacggaggatcatgtgttgcgattgctggagcagattactgcgttatcgccgcagatacgagaatgtccaccggttacaacatcctcactcgcgattactccaaaatctcccaactggctgagaagtgtgtgatggcttcatctggctttcaagctgatgtcaaagctttgcagaaggttttgtctgctaggcatttgatttatcagcatcaacacaacaagcaaatgag

SEQ ID NO: 50338 - DNA, 331 bp, Glycine max
  Clone ID: LIB3107-063-Q1-K1-A7
gatacttctccttcttttgaaataattttatgctctctaaaaaagttgtaaattttatgagatttggactcgaatatctgcttgcgttttttgctacactgaagtatacaatagaaagaagcatgacattatcttttatatgagggggcattgcacatggtcatgaggaagcgaacatcatataaattacaaagttaaaagcgaacgatattatcaactcttttatgccatttctattaacacgtgctgcaccaaatttacagatgcatttaacttattgtgtctgaacatttacatacaaaactatttgaatgtcaaacgtatttttata

SEQ ID NO: 50339 - DNA, 318 bp, Glycine max
  Clone ID: LIB3107-063-Q1-K1-A8
aatgattggagatgggatggtgatcttttcactgctgaaccactcaattcagtgccatctgattgtaggggtcgccagttttccccacctcatcctgaaattcctgcaaaaaatgctaatccatctaccaccaatttgtcttattctgttttcatctcaggtgaaggaaagagggaattggagaaaaggaggaggggtgttataggtgaaagtgaaggtgagggactgaattatgaagctggttctcttagtttgaaccttgcgggtcaaggttaccctctcatggtggaagaagaaaaaaagagtggaaagaaaaca

SEQ ID NO: 50340 - DNA, 281 bp, Glycine max
  Clone ID: LIB3107-063-Q1-K1-A9
ttggttccaatttttcaacccagtagttttccgtcaaagttcatttcatataccagtttatggtcttactaatctcaatacactagaactccaatgataacattctttttaagacgagtaaatcatattctggaaattaagctttcatagtaccattacattctttcatcctaatcaaatatacgagcacaaagtcctaagcaaatatttgatgatggccagggagggttgaatcgaggttagcaaatagcaatgacacattttgagtaatgcaacgcgtg

SEQ ID NO: 50341 - DNA, 285 bp, Glycine max
  Clone ID: LIB3107-063-Q1-K1-B1
ccgggatttgagtacctgtaccggctggcgttccagctttccctaatgcgtgtcgacttaaaatgaggtactgtgtacaatatacgtctagcttgccattgataccattcattcgtttatgtgtaatgaggactggattgagactactacagcttttactgaggaccttagatgctcccaatagaagcaccgcgcctctctatagagctttttcttaagacttgaacacttactgcaacaatctctcgagcgcttaaaacatcttaaaaggtcactacttaaaat

SEQ ID NO: 50342 - DNA, 355 bp, Glycine max
  Clone ID: LIB3107-063-Q1-K1-B10
gtaggaaggttgtttgttgggactggcttgggcctgggccctcctgttgcctctctgtatgtgacagaggtttctcctgcttttgtgcggggcacctttggagctttcatccagattgccacatgccttggtctaatgggagctttatttattggaatccctgtcaaagaaatatctggatggtggcgggtttgtttttgggtatctaccattccagctgctatacttgccacagctatggtcttctgcgcagagagtccacattggttatacaagcaaggaagaactgctgaagcagaagctgagtttgagaggcttcttggtgtatcagaagcaaaatttgcaatgtcagagt

SEQ ID NO: 50343 - DNA, 369 bp, Glycine max
  unsure (1)..(369): unsure at all n locations
  Clone ID: LIB3107-063-Q1-K1-B12
ggcgctcgtttgagaaacactgagtgtccctactctctaaccttttctctctcactaaccctaatcccaactaattcgaatttcgcttccgtcgtgtctccttccatttcacaaggtcaattcatcttaacccaattcttctctttctttttgttctttttctatgtagtctcttgttatttctgttccttaattccgcgcgtaggtacaacatttcacgccgcttaacgttagggtttcaaatttgacaaatcttgccaattcgtttttttcttttctccctcctttttaaagcaattcgccgattcggttaaagattntcaaaatccaaaatttcatgggaagcaacgataatttcggcgacgggat

SEQ ID NO: 50344 - DNA, 318 bp, Glycine max
  Clone ID: LIB3107-063-Q1-K1-B2
ggtgtccaagcttatttgttgctttgtgcttaatggaaggcccttgagcttttctttctttctctgctctcttttcttttaggtttccactctcacacactctccctcttctctttctctgcaataatctctcttctcttcttcactctctcaactcctgccaaacccccatttccgcagttcttaaatttggagtctgatgtctccgccattgctggttaccgaagatgaagggcagtgccatgcctcgatggtagcatctgcatcttcaccatccctgaactgtttctccctaaatgaggccggatttaaagaatg

SEQ ID NO: 50345 - DNA, 407 bp, Glycine max
  Clone ID: LIB3107-063-Q1-K1-B3
aaatataatgaatgtatagtcattggatgaagaataaaataatagaaatattccattttgaatattctatctcatgtatttactataaaaaaagtatataaatcaaataactaggattagtaactgaaaataataaagagcgagttggtattaaaaagaaatgataataaaatcaaaaataataagaaacattaaaaaaaaaagtacctcaataggggtaatctatttatctatttataagtccaattacttcatttagtgactattttttttctttttcctatattctatcttttatctctatacattttttcattttgttttgaagatcgatgcaaatttcatttctttttctggctatagaaaactacatcctatcattctatataaccacaagaaatagaaaa

SEQ ID NO: 50346 - DNA, 383 bp, Glycine max
  Clone ID: LIB3107-063-Q1-K1-B5
gaatttgaggttcgacccaggcgtacgcgcccgcgaacacgacgccagaggggggcactgcaattgcaaccaaataaggtcattctgtttgcgcagttccctacctctcctttcaagatgcagatcttcgtcaagaccctcaccggaaagaccatcacccttgaggtggaaagctctgacaccatctactacgtctaggccaagatccaggacacggaaggaattcccccggatcagcaacgtctcatctgcgccggaaagcagctcgaggacggacgtaccctctccgactacaacattcagaacgagtcaacccttcaccttgtccttcgtgtccgtggtggcatgcagatcttcgtcaagactctcactggcaaaaccat

SEQ ID NO: 50347 - DNA, 415 bp, Glycine max
  Clone ID: LIB3107-063-Q1-K1-B6
agatgtaaaaatatctgtgcctacccgtcttataagatttccaaagcattctggccccactgggcgtatcggatgtttgactcttattcgcttgcacaaagggctgcagatatgtggaagcgaatagttgggatgcctgacatggatagtctcattaagaagcctgatattttatcatttcacatagccagtaaaatacctgtgtctgagtctacaaggcaggagcttttggatattgatggcattgcatataggctgcgcaaggaaattgaattactagagagcattgatcttatccggtgtaaaagctgcgagactataattgcaaaaagaagtgatatgttggtgatgtcaagtgagggtcctcttagtgcatatgtgaatccaggtggttatgtgcatgagataatgactc

SEQ ID NO: 50348 - DNA, 291 bp, Glycine max
  Clone ID: LIB3107-063-Q1-K1-B7
ggtgtgtgagttcattaacatatacaaattctctgtgttgtgttgtgtacttgtgttaattgtgttgttgttgtaggaaatttaagtgaagagagaatgatgatgaagtctgctatgtgtgcattggtgcttgtggcactggttgtggttgaagtggggcccatggctgaggctgcggtgacttgcaacccaacacagttgactccttgtcttccggcaattaattcatgttctgcaccttcgagtgcttgttgccagaagctgaatgagcaaaagccatgcttttgtggc

SEQ ID NO: 50349 - DNA, 415 bp, Glycine max
  Clone ID: LIB3107-063-Q1-K1-B8
ttatggggaccgtatcatccaaactattggccatgcaattgagacccaggataacaatgatgtcttggcttattggttatccaatgcctctacacttctcttgttactccagcgcacactcaaggctagtggtgctgctggaatggctccacaacgccatcgttcttcagcaaccctgtttgggaggatgactcaaagtttccgtggagcaccagctggagtcaatgtttccctaatcaatggtaacacaagcagaggagtagatacattaagacaagttgaggccaagtacccagctctgctgttcaaacaacagcttacagcatatgtggaaaagatatatggaatgattcgtgataatttgaagaaagaaatttctcccttgcttggattatgcatccaggcaccgagaaca

SEQ ID NO: 50350 - DNA, 401 bp, Glycine max
  unsure (1)..(401): unsure at all n locations
  Clone ID: LIB3107-063-Q1-K1-B9
gagttctgcactgatgaagttcccataatagaatcaaatgagattctagttccttctgctccttcttccacttcaccaaccactactactactacatcatcttcaacatcaacatcagcatcttcaaattcaaattcatccaacttccttgaagaccttctgctcccagattttgagtggtctgatgattacaatgatactaattctgacaataataacaatagcagcatggccttgtgggatgatgactttattagaagttggaatttgcttattaatgatgatgatggtgatggtgacaganagcaagtgtttgaggctcctatcaatcagtacccaagagtgatcatggattcagattctcgggcctatggcttgttttgatttggaaattttttttc

SEQ ID NO: 50351 - DNA, 450 bp, Glycine max
  unsure (1)..(450): unsure at all n locations
  Clone ID: LIB3107-063-Q1-K1-C1
agaagggccctatantgtacgtggaaccctcaaaagggttggggctgaagaaaatctgtgtggttttctaaatggagggaagcgccaccaaaagggggtcacaatactgattagcgatcatgcccatgagtaccgctgtttctgaaaacaatgcctaatcaataggcctcctgggtgtgacttgggccacaagaaaaactccctaaggctggatgattgggtgttatgccggatctacaagaagggtaacacacaaaggtcacatgagagggatgattccatggacgacatgattggagaagtacctccttccatcaacgtgggccacatgaatgcgaggtttcacctttcaaagatgtccacgagctacagtggtgcattgttggaaaatgacagaaacacgttagaaggtgtggttataggcaatggtaatgtcaatggaatcaacac

SEQ ID NO: 50352 - DNA, 442 bp, Glycine max
  Clone ID: LIB3107-063-Q1-K1-C11
agacgacagaagggggtgtgagttcattaacatatacaaattctctgtgttgtgttgtgtacttgtgttaattgtgttgttgttgtaggaaatttaagtgaagagagaatgatgatgaagtctgctatgtgtgcattggtgcttgtggcactggttgtggttgaagtggggcccatggctgaggctgcggtgacttgcaacccaacacagttgactccttgtcttccgacaattaattcaggttctgcaccttcgagtgcttgttgccagaagctgaaggagcaaaagccatgcttccgtggctaccttaaaaaccctagcttgaagcagtatgttaactctcctaatgccaaaaaaaaccgtagttcttgtggtattgcctatccaacttgttaaacacctcttatatatatatataaaatgtgtgaacaatatttttttt

SEQ ID NO: 50353 - DNA, 320 bp, Glycine max
  unsure (1)..(320): unsure at all n locations
  Clone ID: LIB3107-063-Q1-K1-C12
gacttttcaatacattttaaccactggtctagcaatattagagaagggtttttgtattaaaaaagttaagtcatataggctagtttatggcagggagtagcctgtttggttcctctctagactctattaagtctgatttggaaccaattgcacggccatccaaaactatgtatttcagtacctctggtactcagtttcatatatataaatatctatctttgctgaanaaaaaaaaaaaaaaaaaaaaaaaaagcgcgggctctctagaagacacaattttacacacgcgcgcgtgagacgatatatcttttatattgtgt

SEQ ID NO: 50354 - DNA, 437 bp, Glycine max
  Clone ID: LIB3107-063-Q1-K1-C2
agacgacagaaggggatcacatcccaccttaaacccatttccataatcactttttcctactttcttctccatccatcccttgactaattaattatccctcacaactaccaatggccgaagagaaacaccacaagcaccgcctcttccaccaccacaaggacgaggataataagccagtagaaaccgatactggttacgacaacacatcatattccaagccttctgatgactatgactctggtttcaacaagccatcgtatgagtcttctggcggtggctatgaaggtggttacaacaaaacatcttattctagtgatgagccagcttctggtggtggctatgaaggtgggtacaagaaaacaagttattctggtggcattgatgagacttctggtggctatggcgcttgtggtggtggatactctgacgtcactgat

SEQ ID NO: 50355 - DNA, 407 bp, Glycine max
  Clone ID: LIB3107-063-Q1-K1-C3
tggtgacccatacaatacaacacaagttttccatccacattgcacagttagcacttagcagactctgctgcagtgaggtgaggggaggtttgtttgttgtttcgtttttcctttcctttccgccagaatccgttgagaatggcgttgccggtagtcgtcgatgcagagtacctcaaggaggtcgacaaggctcgccgcgatctccgcgcactcatcgctaacaggaactgcgctcctctcatgctccgattagcctggcacgatgccggaacttacgatgctaagaccaagaccggtggacctaacggttcgatccggaacgaggaagagtattctcacggagccaataatggcttgaagaaagctattgatttctgccaggaagtgaaagcaaaatatcctaaaat

SEQ ID NO: 50356 - DNA, 407 bp, Glycine max
  Clone ID: LIB3107-063-Q1-K1-C4
gacaccggttgttgacattggaagaggcattgtgcagtagcttcaatttttgtttcctgggagagcgagaagagtgttcggatttcaccattccaggtgacggcggaagatgcttctgtcgtcgatacgcagaggattcactagtcgagtaggtcccatacgaaccctctcttcgcactccgaaatgaaagactttctggattacctcgactccctcaaaaattacgagaaatcaggagttcccaaaggtgccggcaccgattccagcgacggtttcgatcttggtagaatgagacgcctcatggagcgttttggtaaccctcactccaagttcaaggctgttcatattgctggaactaaggggaagggatcaacagctgcttttgtatctaatattctgaggaatg

SEQ ID NO: 50357 - DNA, 299 bp, Glycine max
  Clone ID: LIB3107-063-Q1-K1-C6
ccactcgttcgtacaggtgttgaagacaactgttagttttacacacaggtgtggtgcatcagaggcccgggtttcatgcctacttgcactgcgataccatctcttactgaaacaccccatatggcacctcaaagctcacaacgtaacataccttacgatatctaaggtgacgtcaccttcactaagagggatgatatggacatcagctccgttcactcttgcttatgctaattccatatccatggactatcaacacagaccatacttgtatgctaaagctcttcgtgtttgcgatactt

SEQ ID NO: 50358 - DNA, 337 bp, Glycine max
  Clone ID: LIB3107-063-Q1-K1-C7
ggttctagtgtgtgattgtttgttgttgtaactcgttcttcttcttttgttgttctgtgtttgtgtttgttttttctctcacctgaaaatgtcttgctgcggtggtaactgtggttgccgaagcttcttcaagtgccgcaaccgctgccgaggcttcaagatgtacccagacttgaacttcacttaatcaaccaccacccagaccttggtcatgggagtggcacctgttaaggctcaatttgagggtgctgaaatgggtgtgcccgcttagaaccattgcttcaaatgttgaccaaacttgttctgcaacccctgcacttgcaagtgaggtgttggg

SEQ ID NO: 50359 - DNA, 369 bp, Glycine max
  Clone ID: LIB3107-063-Q1-K1-C8
aatgattggagatgggatggtgatcttttcactgctcaaccactcaattcagtgccatctgattgtaggggtcgccagttttccccacctcatcctgaaattcctgcaaaaaatgctaatccatctaccaccaatttgtcttattctgttttcatctcaggtgaaggaaagagggaattggagaaaaggaggaggggtgttataggtgaaggtgaaggtgagggactgaattatgaggctggttctcttagtttgaaccttgcgggtcaaggttaccctctcatggtggaagaagaagaaaagagtggaaagaaaacaaaggtaattgggaccactacagctagtactaccacttgctttaatcgtgct

SEQ ID NO: 50360 - DNA, 418 bp, Glycine max
  Clone ID: LIB3107-063-Q1-K1-C9
cttcgttcgttcttcattcttcatctggttagcatttgtctttaaggatttgaacatgattcatggacccttaggggtcctttttattgttttgtgcatctttatctccttctcttatcatcggtaattgtttttctcttgtaaagcatgttttaaccgatcattagtcctgcaagttatctttaaaaaaggttgaaggttaataagcaaaaaccaagataaaaccaactcataactaacttcctttttatcaaatatcacttgagatcgtttcaaggtccaacgccttagcgattctctcctctttacaaaaaaaaaaaagatcgtttcaaggtccaatgccttaacgatcctcttcgctttttaaaagtttgaaacatcgtttcaaggtctaacgccttaaatgacttttgttcgt

SEQ ID NO: 50361 - DNA, 317 bp, Glycine max
  Clone ID: LIB3107-063-Q1-K1-D1
atctgaaggatcatctaacagggtagaaatagaaggactctcaccatcatttcgggacccagggaaacatgtatttgggtgtgagcactataagagaaattgcaagcttcgggctgcatgttgtggcaagttatttacttgcagattttgtcatggcaatgtccgcgatcactctatggatagaaaagcaacatcagaaatgatgtgtatgcgctgcctgaatatacagccaatagggcccctatgcataacaccttcatgtaatgggttttcaatggcaaagtactattgcaatatatgcaaattttttgatgatg

SEQ ID NO: 50362 - DNA, 327 bp, Glycine max
  Clone ID: LIB3107-063-Q1-K1-D10
ggttctagtgtgtgattgtttgttgttgtaactcgttcttcttcttttgttgttctgtgtttgtgtttgttttttctctcacctgaaaatgtcttgctgcggtggtaactgtggttgcggaagctcctgcaagtgcggcaacggctgcggaggctgcaagatgtacccagacttgagctacactgagtcaaccaccaccgagaccttggtcatgggagtggcacctgttaaggctcaatttgagggtgctgaaatgggtgtgcccgctgagaacgatggctgcaaatgtggaccaaactgctcctgcaacccctgcacttgcaagtg

SEQ ID NO: 50363 - DNA, 268 bp, Glycine max
  Clone ID: LIB3107-063-Q1-K1-D11
gacaacggggccgttccttcaaaaaccaaagccagaccgaccctgagaagaaaccaacaaacatgggacgcaagaaaacctacgaggaagaagaacgcacggctctattttcccattcccaaacacaaacagacctgctgctacccttgaacgagaacgacccacaggacatggtcatataccaagtcctccacgaagccaatgctctcaccaacacattccttcctcagcccaccagaaacataacaaagaagcactacagatgagt

SEQ ID NO: 50364 - DNA, 357 bp, Glycine max
  Clone ID: LIB3107-063-Q1-K1-D12
gaaagaaaccaaagtctatttttttttggggctgagcctcccctcccctctctctaagatccccaaattgcttgtgaatgctagaaaccctagacagattcgattggatgcgctcccatttcacatcaagggcgagcgcattcggttcttgcaagcaagcctggtactaccgctgcctcggcctcgacccctgaatttgaaccattcatcaccacctttcttcattcattcacggttttccttttcgactcgatttgatggtttttttgttttgtttccttgacgatgtttaccaatagcaagcacaaaaagaaccggaacgcgaagaggctgctgataatcatcaatgtgctgggg

SEQ ID NO: 50365 - DNA, 311 bp, Glycine max
  Clone ID: LIB3107-063-Q1-K1-D2
cccgctgcggctagacgacgacaggagactgcactgagagcacgaaccattactactgtggttcatgctgtcgcataacagtcatataactagaactacatgtatcatgattacgcacagccgttcaattcctggattacagcagtggacgctcatgcaccagtggcattgtggatgcctacacagacccatgcatatgcaggtagaatcatgccctaagatcacttcaacaccatgtcaaaaaccatgttgagtcattgtctcacgctaacaagctttctccttctgctgtgatatccacaacactcaaa

SEQ ID NO: 50366 - DNA, 274 bp, Glycine max
  unsure (1)..(274): unsure at all n locations
  Clone ID: LIB3107-063-Q1-K1-D3
gtcaaacacaagtgttatgcaacagataccctagattcaagcctacatgcaatgtgataccatttttcagtgaaaaaccttgtcgggcacctagaagtacacgatgagacatgcctcacaatggctaaggcaggtcactctcactaagtgaaatcttagggagatcagttagggtcactctgtnttgcgagaaatgctcaaccatgtaggatcaacacaagctttaaggagcactcatactcagtgtattttcaaaattaattttaactcatcg

SEQ ID NO: 50367 - DNA, 383 bp, Glycine max
  Clone ID: LIB3107-063-Q1-K1-D4
gaaaatggaaagagatcactcgggatgatagttcttccttcgggaaggaatcagagaaggatgtgtcaagctttagccaaactactgggaaaaagaagaatgaaaagggcagtaagagcacatacaagaaaacctcatctttggatgataatgtcatttctccaatgaaagtggatacaaaaccactgttagataactcagatggtgggtttatcaattcaactaccactatggaagtagatacattaaataaggtagatcatgaggaaaaagttaaacacgccagaatttatgatgacaaggagcaaaatgaatctgtgcctggattggaccaaatttcttttgattggatgcctgattacaattttggatccctggatgtg

SEQ ID NO: 50368 - DNA, 273 bp, Glycine max
  Clone ID: LIB3107-063-Q1-K1-D6
ttggggaaagaaaccaaagtctattttttttggtgtctgagcctcccctcccctctctctaagatccccaaattgcttgtgaatgctagaaaccctagacagattcgattggatgcgctcccatttcacatcaatggcgagcgcattccgttctttcaagcatgcctggtactaccgcttcctctgcctcgacccctgaatttgaaccattcatcaccacctttctttattcattcaccgtttttcttttccactcgatttggtggttttttt

SEQ ID NO: 50369 - DNA, 222 bp, Glycine max
  Clone ID: LIB3107-063-Q1-K1-D8
gtcaaacacaagtgttatgcaacagagaccctagattcaagcctacatgcaatgtgataccatttttcagtgaaaaaccttgtcgggcacctagaagtacacgatgagacatgcctcacaatggctaaggcaggtcactctcactaagtgaaatcttagggagatcagttagggtcactctgttttgcgagaatgctccaaccatgtatgatcaacacaagc

SEQ ID NO: 50370 - DNA, 121 bp, Glycine max
  Clone ID: LIB3107-063-Q1-K1-D9
ttacatgtattatttagttcacaactcttttcaaagtaagtggtcaattggaattttaaccttttatttgagtttattaagatgattaccagggacaaaaacctggttacctaatataaaa

SEQ ID NO: 50371 - DNA, 215 bp, Glycine max
  unsure (1)..(215): unsure at all n locations
  Clone ID: LIB3107-063-Q1-K1-E1
ggacggcaataccattcattcatcaacagcgatatgccgncaatgaagtttgtggtgaaaaaagcatggagcaatggtggatgtggtccggtaggaacactagagatgggaagctgcccgggacccataaagacacccggtcttcttctatctactcgtaaagggctttcttactttatcttccctgaactaattaattttcttcctttccccga

SEQ ID NO: 50372 - DNA, 316 bp, Glycine max
  Clone ID: LIB3107-063-Q1-K1-E10
aaaagggaatcattgccgcatatgaatatcctattatcctctggcatgaacaaattgaaaccccaatttatgcatcacgaaagggggcattagaatggtctcaacacttgactattgagacaattagattagacaattggaaaaaaatatcgagacaattatgaattccattgagtctcccttacttgatcaaacaaccaaaaattcagttatttcaactacattcaatgatctttcaaatgaggcaagatcatccagtgtatggacgcttatctatggaactagttgatgcttcatcgaatttgcttcattaata

SEQ ID NO: 50373 - DNA, 526 bp, Glycine max
  unsure (1)..(526): unsure at all n locations
  Clone ID: LIB3107-063-Q1-K1-E11
ccggtccgtgatattcccggtgtcgatcccacgtcgtctcgtaccggtctgcatgaagaacgacagtaagggggagagcatattnatttccgtaccgnnntctttgtttttcgctttcgatcgttttccnnttctccaaatttatttgtacccgtattccaaccatctgggctccccaataaccgcgccgatgacnnttcactttcgctggccnnntctttgaaaaaaatcaacacncnntctttttcttcctttccttctgatnntccgattccannattccattgannatatggagaannaactctcctcaaagggatttcgagcctcnncagcacaaaaatcccttccgtcgaatgccctccgccgatggaagatcccgccgtcacttctcgtcaaaaaccaaccgccgccgcttccgcatggtcgccgatctcgacaagcgcgtccaagccgagcagattaagcaggggatcaaggttttttttctttcactttcctnctctttttttttatttcattatta

SEQ ID NO: 50374 - DNA, 402 bp, Glycine max
  Clone ID: LIB3107-063-Q1-K1-E12
ggggttattggacacattcttcagcgactgcgtttttggatcggaacctcttctgcggcgtagcaatgggacactccaacgtttggaactctcacccaaaaaactacggtcctggttctcgcacttgccgtgtgtgtgggaatccacatggactgatcaggaagtatggccttatgtgctgcaggcagtgcttccgtagcaatgccaaggaaattggcttcatcaagtatcgctaaaagagcagttgtcaactacggaccaatattgtgttctggcactaagatgttttgaagatgttatgtttgaagaaacttgaaactttcttttttcatctaattaattattaaacgtaatttgtggtactaaagaatacttttatataaaatgggtttgaaccccttt

SEQ ID NO: 50375 - DNA, 212 bp, Glycine max
  Clone ID: LIB3107-063-Q1-K1-E2
cacggggattgtgggagaacaaagcaatggcttcagctaaaaggtggcttccgctcgaagctaatcctgacgtcatgaatcagttcctttgggggcttggacttcgagaggatgaggcagaatgctgtgacgtttatggcttagatgaagagcttctggaaatggttccaaagcccgttcttgccgtgctttttctttatcccataaccacc

SEQ ID NO: 50376 - DNA, 358 bp, Glycine max
  unsure (1)..(358): unsure at all n locations
  Clone ID: LIB3107-063-Q1-K1-E3
gcacagcaatgacgaccaggaatgggcacagacaccacgtgagccggcgtacgtgcctacaacaccggtgactattaactccggggtcccaccgcgcgccttaacttccccgaactcttgttccaggacgacgaccaggagggcagtgattcggtgcagcacggcgcagcagggaacatgtccgctgattccattcgccgaaaagccacgcaagtcggcgccagagtcgacgctctccaaaccgcgcttcaccaccacgcgccaagtaccaactctctcaatctcaagcccgacttgaacgagtttccaaaactcgaagagcttcaagattgatatanatcaaatatcaatatcaatc

SEQ ID NO: 50377 - DNA, 380 bp, Glycine max
  Clone ID: LIB3107-063-Q1-K1-E4
gaatcattgcgtcgtaggagtctcttattttcctttgtaatggaaagttagaaaccctcatcgtcaaagcacgcgttttttttaatctctctctctcaacaaatatttgtgggtagattcaattcaccatgtcgagctcatcggagtactctgaattttccggccagaaaccggcgaggtcgccggagaaatcgagcttctctcagacttgcagtctgttgagtcaatacatcaaggagaagggtagcttcggagatcttaccctcggaatgacatcatgtgggtcacctgagacatcttgtcaatctgctacaaccatgaacttgtttcctcccaaggaaaacaacgtggcaccaaagaacctgacagctatggatttg

SEQ ID NO: 50378 - DNA, 421 bp, Glycine max
  unsure (1)..(421): unsure at all n locations
  Clone ID: LIB3107-063-Q1-K1-E6
gacagtaaggggctactttttctgttctgtatgctttganntaacttgtttaggttcgcatgttgataggtagnggaagttgtaacccgatggtgtgcggtgaaagagggtgcaataactgggtagaagtggtttgtaatagctcttccaaatcatcgagaactctcgtggtttctgagaattcgggaaagctatcaagtagctcatcttgttcagagaagaaataagaaaaatcagcatttgggtcatccatggtgatggcttcaccggtgcttcctcttacaatagcttccaaatcccaatctctcaagcacgcaaattcatccatcaaccaagttgcaactaattaagttataatatatcaagatatatcaaattaaaaatgaaaaaagaacttgaaagggggtgttggaccgtgtga

SEQ ID NO: 50379 - DNA, 359 bp, Glycine max
  unsure (1)..(359): unsure at all n locations
  Clone ID: LIB3107-063-Q1-K1-E8
gatcatccaacatcacacacaactacaagaaagaacttccttataaccaaaaccaacaacaactatggcaagttatcagaagcactacgatgatcagggtcgcaaggtcgacgagtatggcaatgttgagaggcaaactgacgaatatggcaacccggttcatgccactagtgtcacttatgtagccaccaaaagtgttggtggctacaatgatgacgctaataagcaacatgatattactggtgtctatcccgagaaagacaccggtagacatcattttggtcgtggttacgacggtgacactaacaagcaacatgatgctactggtgttatccccgaatagacnatggtagagatca

SEQ ID NO: 50380 - DNA, 413 bp, Glycine max
  unsure (1)..(413): unsure at all n locations
  Clone ID: LIB3107-063-Q1-K1-F1
cggaannttcccgggtcgatcccacgtccgtccgacgtgctggcgatgaagaaccgacagaagggggatttcaacttaaaagccaagaaccaattacctttagtgggttttctctttgtcacnnataaaagtcatctaagaaagaattacaagaaatcatcatcacaataacccaagatgagttcaggaattagagcatggagtgtggcagcaagtggttggaattgtggagggccttgaaagaccaaggcatatgcaggtggaatcatgccttaagatcagctcaacaccatctcaaaaaccatgttggctcattctctcaggctaacaagctttcttcttctgctatgatatccacaacactaaaacatgagaaggcaaatcaatcagaagagtctttgaaaactgtcatg

SEQ ID NO: 50381 - DNA, 350 bp, Glycine max
  Clone ID: LIB3107-063-Q1-K1-F10
gtttgatatataactaatactatagcacgtatagagcactttcgcactacacaactaagatttataatatagtatataaagtaaactataattaaaattcgctatgaataaatattttttaacacgcttcatcattaagcgacgatcgaagttagttattacgagctattagaagttacgtgaataattactctagttatgttactagaagttattgaagttagttattaggaattactagaaattggttattctctatatttgtataaataaatcacctttctaatactttgatgaatgaattcgaaaactatcggttcatttctttcattctcgatatgggatcaaaa

SEQ ID NO: 50382 - DNA, 453 bp, Glycine max
  unsure (1)..(453): unsure at all n locations
  Clone ID: LIB3107-063-Q1-K1-F11
cccacgcgtccgacgacagaaggctcttacatctctggcccaatcttcttggagtcgctaccgaatcgcgatcatgatcattccctacattgttctcttgttttgtgtcgctcgtgcaacaattggttagtcttttccaagagtttaatgtaatctatgtacccttaggggttccctctgttattatgtgcatattcatcttctccatttatcatcggtgatcacattttttatttgtaaagtttaatcctaaccgatcactagtacagtaacattgtctttaaagcgattgaaagttaataaacaaaactagaataaaaaacaacaactcataactaaatttctctccatgaaaaatcacttgagatcgtttcaaggtccaacgccttaacgacctgcttgtttgtcatanaaatgaatatctcaaaatcataaaaccaactcaacacacaa

SEQ ID NO: 50383 - DNA, 411 bp, Glycine max
  Clone ID: LIB3107-063-Q1-K1-F12
cattccattatggacgcagattagattcgcgctcacattcccttctcctcgatttgttcaaactctctgctctgagatctgatcgcattttcattcagaaaggaaactcgtgtgactgatttatgcgctaattgcaattgcactgcgagcgtcactctgccgaatcggaagatgggaatagtgttcaccaaattgttttcctctcttttcggtaacaaggaagctcgaatcctcgttctcggcctcgacaatgccggcaaaaccactattctctatcggcttcagatgggcgaagttgtctccaccattccaacaattgggtttaatgtcgaaacagtgcagtataacaacattaaatttcaagtctgggatttaggtgggcaaacaagtatcaggccatattggaggtgt

SEQ ID NO: 50384 - DNA, 315 bp, Glycine max
  Clone ID: LIB3107-063-Q1-K1-F3
caagcaaaggtggactccttggggatggcatcaaatggaacttcgccaagttccttgttgataaagaggggaatgttgttgatcgctatgcacccacaacttctcctctgagcattgagaaggacttgctgaagttgttggatgcatgaagttatgaatgtttggagttgccaataaataaactatgaataagaaatgtactgcagatgctgctgcaatttcctgtgtgccttatatgtaccgaaacaattgctcttgtagctttgacattagattcataaccatgaaaatgtgtacttattaatgggggaatgg

SEQ ID NO: 50385 - DNA, 216 bp, Glycine max
  Clone ID: LIB3107-063-Q1-K1-F4
gtatcaaaagcacaagggctatagctcagttaggtagagcacctcgtttacacgagcgccaatgtttttttcagaggagtttcatcttgtaatcaaaagagtttatcttatggttagaaatcgatgtcttactccattttaagggacacaacaggagaacaatatcctgacaaagggtttagccagtgaatcgaatccatcattgagttgagatat

SEQ ID NO: 50386 - DNA, 411 bp, Glycine max
  Clone ID: LIB3107-063-Q1-K1-F5
ggcgactggagtggttccctcagacatatctgtaacgctgcttcttctgtgaggcatcaatggagacaaaagctttgtccttcgctctgtctctcaatgacctcaccaacaaccgcttcacttccaatgcgccacatgctgccgccaaagtttccgtctttaccgtcagatgctcttcttcgggtagtggagagaggccttggaagaattcagatgctagacttgtgcttgaagatggttcaatttggagagcaaaatcgtttggtgcttcaaggacccaagttggcgaggttgttttcaatacatcattgacagggtatcaagaaattttgactgatcctagttatgctggccagtttgtgctcatgacaaacccacatattgggaatactggcataaattttgatgatg

SEQ ID NO: 50387 - DNA, 327 bp, Glycine max
  Clone ID: LIB3107-063-Q1-K1-F6
gaagatccaaaagcgctaaattactttctttccatttgccttcgttttctctctctttctcagtttctcagtttctcagtcatcaccatcgcagcagcaagatgtggaaccaaccattcggaaaaaccgatttggaaagcggttctcggcctctgtatccgatgatgctcgagagccctgaactgcggtggtcgttcatcagaaaagtgtactccataattgccatccagttgctcgtaaccatcgtcgtcggcgccgtcgtcgtcaccgtccgcccaatcagtgtcttcttcgccaccaccggcgccggactggctctctacatcg

SEQ ID NO: 50388 - DNA, 428 bp, Glycine max
  Clone ID: LIB3107-063-Q1-K1-F7
gtcattcattttaaatataaaagtttttatacaatcaagtaatgaaaaacatttttagtggaattgttaaggaaattgattaattattctaaaaaaatttatatatatagttgcaattacataataatgttaagaaaattttagaacattaatacatatattatttatttaaggaaaatttatttgacttgcatctaaataggatgattttttctcttgggttagagattgtctttcaatttgctgagacatatactaattattaatttaacaaatttttacacacaaaaaaaagcacatcaatcctatgaattactctaaataggatatgtcaaactaaagaacaattcaataatttaatgtatttagaggatttactatttaattaaaatatttatttttcatttaaaaatcatatgtatattttt

SEQ ID NO: 50389 - DNA, 351 bp, Glycine max
  Clone ID: LIB3107-063-Q1-K1-F8
gctgttggtgacggtgtgattgattgtgacgaaatctgacaatgaagcgtggagcattgttgtcagtgcttgcctgcgccttcgcggcggtgatctgggcagcgaacggcgacgacaacctcgtcccgcctcgccgggaagtgtacggcaatgggcgaatattcgacatcagtcatcggtaccaacccgagatgccggaatgggaatcgaatgacggcatagggcagttcctgtggcttcccaagagcatgaagaacggttccctcgccaacaacttcgaaatgaagtttcccacccacaccggcacgcacgtcgatgcccccggtcacgtgttcgaccactacttccacg

SEQ ID NO: 50390 - DNA, 382 bp, Glycine max
  Clone ID: LIB3107-063-Q1-K1-F9
ggctgttctgttgcgtgaacaaattgaggtgtgcatgttcattattgggcaccgatggattcagtttctgtgcaaatagcgacgtcaaaatttgttctttgccccgcggcgacggccagttctaagaagaatgccatcatcaatttcagttccaatttcaaaggaactctcaccaaaatccatgccatttccccaaatggctctgcctctagctgcacttcgcgtgtgtctgtgtcaagtttaaagacagacaagaacaaaggcagaagtaatcttgaatccctgttttgttatgataaggctattccagaagaaataattgagatacctgttgggttatcttttggaagagaaagctattggtaacaatttcccattgcac

SEQ ID NO: 50391 - DNA, 298 bp, Glycine max
  unsure (1)..(298): unsure at all n locations
  Clone ID: LIB3107-063-Q1-K1-G1
gacggctaaaagctaaaaatcatcgaagtactcaaattagcatggctgtcacggttgcattcttgaatttgatcatcatgttttcagtagtctctacaagcaagtcactgagcttaaactactattcaaaaacatgccctgatgtggaatgcattgttgccaaggcagtgaaggatgccactgctagggacaaaactgttccagctgcacttctgcgaatgcacttccatgactgtttcgttcggnggtgtgatgcctctgtgctgctaaattcaaaaggaaagcacaaagcagaaaa

SEQ ID NO: 50392 - DNA, 352 bp, Glycine max
  Clone ID: LIB3107-063-Q1-K1-G10
gggtgccgtcactctctccctgatggtctgatgagggctactgatgtgatgattgctggaaaggtggctgttgtggctggatatggtgatgttggcaagggttgtgctgctgcattgaagcaggctggtgctcgtgtcatcgtgactgagattgaccccatttgtgcccttcaggctctcatggaaggccttcaggttctgaccttggaggatgttgtttctgaggctgatatctttgtcaccaccacgggtaacaaggacatcatcatggttgaccacatgaagaaaatgaagaacaatgccattgtttgcaacattggtcactttgacaatgagatcgacatgctggggc

SEQ ID NO: 50393 - DNA, 312 bp, Glycine max
  Clone ID: LIB3107-063-Q1-K1-G11
gggcaaaagacagtgtttgggtttcacaaacagacacacagtcggttcttccttctcaaatattcttgagatccccattttctccgaagcaaagccatggctaagggtcctggtctctactctgacatcggcaagaaagctagggatctgctgttcaaggactaccacagtgaccagaagttcaccatcaccacctactcaccgactggagtggctattacagcatcaggaaccaggaaaagtgaactgtttctggctgatgtcaacacccatgttgaagacaaaaacatcactactgatatcaaaagttga

SEQ ID NO: 50394 - DNA, 403 bp, Glycine max
  Clone ID: LIB3107-063-Q1-K1-G12
tagcatcatcaagacatcaaaacatcttgcttctacataggagtcatttgacttaatccatcaactgaaagatccttcaattatttctcgtccttggaaaattcttttttgcaagaatcaactgcttctttcattctcccttgctacaaggttgtgaaaacaagacgacgatggttacctcatagccctacactggggcaatgaggggcatcgtgcatgagcctcaagtgaacctaggggcagattagaagttctcactcaataggttcccagctacaaggtcatgacgaaagacaacgattggtacctcatagccttacactggggcaatgaggggcaccgtgcatgagcctcaagtgaacataggagccgatcaaaagttctcacccatcgatgtttttac

SEQ ID NO: 50395 - DNA, 349 bp, Glycine max
  Clone ID: LIB3107-063-Q1-K1-G2
gatataaaggagggaaagagaggaatattagcaaattaacctgcgcaagcgaaggtgctttcttagttgtgctgctaacgacaatccatggaaatgataagctccaaattcttcttcttcttcttttcaactctctatcttctctacggattttccaacgccaccgatattcactattgcgataagaaagctgactatgatgttgaggtcaaaggggttgaaatatctcctgatcccatcgcacgaggccagcctgctacattcagcattgctgcaactacaagtaaagctttatctggagggaaactagtgattgatgtgtcatatttcggatggcacatacacagtg

SEQ ID NO: 50396 - DNA, 165 bp, Glycine max
  unsure (1)..(165): unsure at all n locations
  Clone ID: LIB3107-063-Q1-K1-G3
ttatttatgtgcatttttgagcaaatgaggagcgatatcagactagatatactgtcgatgatcaagatggttcacttanggaagtctatatctcgagaagcaaaattagcattgtgctgatgcaaaatgtatgataaatataaaaatttttaatcaaaatgattt

SEQ ID NO: 50397 - DNA, 367 bp, Glycine max
  Clone ID: LIB3107-063-Q1-K1-G4
gctattactagatgtggctttagattttaaacaacttgcttggtgagggtccattctttgatcagttttctgtggcaatatatgttacttttatgtcccatcttggggtcagctaggtaaaggtggttggagccttgcctctatcactggtgaatttagataatgctgatgagaatgattttacagtttggttgaaagtcgtgatgctaacagattggaagggaaaaaagggagtgtttgtgattgacttgcagataacttggcttgaaagaatcatagtaagcatgctgcatgcatggcactatctgacctaatgtgtctgaaactttgtgcttaagatacataattataatgaaatatttattcc

SEQ ID NO: 50398 - DNA, 239 bp, Glycine max
  Clone ID: LIB3107-063-Q1-K1-G5
cgcgtccagagcaacaaagagatggtgctggcgcgaaaatgcatacaagagactctgatgaaaatgaacatctgatacgaggtatacacactgtgataagatgtgataaatgcacaatattcataaactataaagagagattgatcagtgattgctctgtaatacataagtagatcagtggatggtgatcactcacaaaaacaatgctcgcgatcttgacaaagaccttttttacacat

SEQ ID NO: 50399 - DNA, 402 bp, Glycine max
  Clone ID: LIB3107-063-Q1-K1-G7
gattgcagtaagtaacagcgaacgaagaagaagaagaagaagaagaagaagaacgcagaagccacgatgagtggcagagccatgatctcctgtttctctcctccttcaacaactccatgctctgcccccattccactctggcgccgaaaccacctcctccatgcaactcctccaccttcgctacacctcctctcgcggcggagccacctcgttgccggcggaaggagggtgtgggtgaatgtgaagtccgagaagaacttatccgaatcccccaagtacgaggatgatgtcgtggttcagaagaagaagaagcgtggtttggataacgtggaagatgaaacgaggtggtgggcagtgtttcccaaaagatgggtcattgtggttctctgcttcttagctttt

SEQ ID NO: 50400 - DNA, 421 bp, Glycine max
  Clone ID: LIB3107-063-Q1-K1-G8
cacctagtctctaaggggaccaagaattggttatatggataacaagcttgacgcttatgctccagcttgagggggaatgtagagaatcagtattgatattctgcattcattgtaataaatatagtttataggcacataatcactgatttagaggaaatcaaatatcctccatttatttgcaataagtgcaataagcctctgttctttctcctttaacaagaccaatcaaagtccacaataatgttaatggttgatttctcctcacctacttttgcagcttgttcgagagacagctattcaatgtcttggtgccttgtctgaattgccccacgcccgtatctatcctatgaggacacaggtttggcatgcttttaacttgaaaggatgaatatcagcttttgatagatattcttattgatct

SEQ ID NO: 50401 - DNA, 334 bp, Glycine max
  unsure (1)..(334): unsure at all n locations
  Clone ID: LIB3107-063-Q1-K1-G9
gttctagtgtgtgattgtttgttgttgtaactcgttctgtcttcttttgttgttctgtgtttgtgtttgttttttctctcacctgaaaatgtcttgctgcggtggtaactgtggttgcggaagctcctgcaagtgcggcaacggctgcggaggctgcaagatgtacccagacttgagctacactgagtcaaccaccaccgagaccttggtcatgggagtggcatctgttaaggctcaatttgagggtgctgaaatgggtgtgcccgctgagaacgatggctgcaaatgtggaccaaactgctcctgcaaccnctgcactttcaaagtgaggtgt

SEQ ID NO: 50402 - DNA, 148 bp, Glycine max
  Clone ID: LIB3107-063-Q1-K1-H10
agctgaagttaaagtcagtgatgtcaaacaccagtgcaagcgcctgcgtagaaagtgtcccgcctcatacttcactgggtgctctggtctttacgatgctcgatgggactggctgaacaagcttataacttatgagcgtgataagcgg

SEQ ID NO: 50403 - DNA, 167 bp, Glycine max
  Clone ID: LIB3107-063-Q1-K1-H11
ggcagcaaaccccttcaacatttttcaccctcagaattcatatcatgagttttcatgatacatcaaacacggggcttggacttggtcttggtcttggacttgttagcttccatgatcaatcagagaattgcatgaagagtactaatgatcctttgagagaaatccat

SEQ ID NO: 50404 - DNA, 314 bp, Glycine max
  Clone ID: LIB3107-063-Q1-K1-H2
ggaagactggactaccagaaaggtattgacctgattcggttggcaatgccagagctcatggaagctgatgttcagtttgtaagtgattttgtatatgtgttctataaacagatgatgtttcaatcacaaattaaatccctggcctatccaaaaaaaaaaaactaattaaatccctggacatggtggtatcaaaatgtaggctgtgtttactggtagggtataaaatatatcttgagacgttgcagaatatacctgctaaataaattttaaacaacttgatacttgccataaaaaaaatatgtgatggatcattc

SEQ ID NO: 50405 - DNA, 343 bp, Glycine max
  Clone ID: LIB3107-063-Q1-K1-H3
gaaagcagggttgttttttctggtgttagtgttagctctatgtatccatgcttcctctgtgtggattttcattttatcttctcctccttaattttccaacaaaatctcaaacataaataaattaaaaaataacatttttatttacaattaataaagatatcgggattcatcttgttcttattttgccccctttttcttctggtctcccgaatcagaaaccctaatcagtgtttgggatttcagataaagaaatttaaacagatgaagggtctcttcaagtctaagcctcgcactcctgcagatgtattgcgccagaccatagatcttctgctctttgttgatc

SEQ ID NO: 50406 - DNA, 274 bp, Glycine max
  Clone ID: LIB3107-063-Q1-K1-H4
acctgtttttcttggccaagaccaatgttgataccttctttgggtatatctaccagaagtggtgaggaattggataaggttggtggtggtaatctgtgatttgctataatatgtaggttgtgttcaaggactcattctatcttccttctaagcttagtttgtgttatatgtattccttaatagatgagggaacctgttctccgtagattcccaagggaaccagttcaaatgttcaatacttgactaaacatccaacccttaattactatttaaa

SEQ ID NO: 50407 - DNA, 306 bp, Glycine max
  Clone ID: LIB3107-063-Q1-K1-H6
actgattaattgtgttaagaaatttaagtgaggagtgagagagtgatgatgaagtctgctatgtgtgcagaggcggttgtagcacttcttcttctggcggaggtggggcccatggctgacgctgcgacatgcaccccaacagagtctagtgatcccttgagagaaatccatatgataaataaggcggagaatgcatcataatgtaacagcacatacccttcacttacattatgaccaccccatgatgatgatgatgatgatgatgaagtgaataatcaaccacccaagtcaaaactgagtcctatg

SEQ ID NO: 50408 - DNA, 344 bp, Glycine max
  unsure (1)..(344): unsure at all n locations
  Clone ID: LIB3107-063-Q1-K1-H9
ggcaccactctctctttgttctttctcggttcagtgtctctctttgacggtggtgctgtcagcattgacctcagcttgagcagtaaaacatcatcagcactactacggtaccatggctgtgctgcaatctttcgtttcggtccacccagattctcacttccccatacagaacctcccttacggagtcttcaagccccaatccgcttcgcctcctcgtcccggcgtcgccatcggcgacttcgtcctcgacctctccgaaatatcttccgctggtctcttcgacggtcctctcctcaaaaactccgatgnctttctccagcctaatctaaataagtttgtatcac

SEQ ID NO: 50409 - DNA, 422 bp, Glycine max
  Clone ID: LIB3107-064-Q1-K1-A11
tttggcatctcaatatatatataacaacacggggatggtaatagaaagatagagatccatcaagtctacgttgaaatttattgctacaaggtagacagaaaacgataccaaatctataaaatgtatggaataaaaaacacataaaatgaaggtaaaagaaaagaaaataaaaacgatggctgtttttttgctaaagggaatttttgtatagtgaatacaagcaaacaaacaaggggctagaagaaacatcttttgttatcatgcaatttgcgaaataattaacttccccattgaacaatatgatgtttaaggggttagccaaccaactcatagtgaaaataaagttagcaatttcatgtaaaatacatcagtataaaaatctatttaaatttggattcgcttgtctactttactttaataat

SEQ ID NO: 50410 - DNA, 322 bp, Glycine max
  Clone ID: LIB3107-064-Q1-K1-A12
gagatctgaagtgtgtgtagagttaacaagaccagagagagagacgaagccgaacgaaacataaataaaaccttgctcttttttcacgccctagctcattttcttctccgttctcttctctctgttcctcactcactcgcatttattcaccatgactaagcaacaagctaattggtctccatacgataacaacggaggatcatgtgttgcaattgctggagcagattactgcgtcatcgccgcggatacgaggatgtacaacggtacaatattcttactcgcgatactccaaatctccaactggcgaaagtgtgtatgggtt

SEQ ID NO: 50411 - DNA, 152 bp, Glycine max
  unsure (1)..(152): unsure at all n locations
  Clone ID: LIB3107-064-Q1-K1-A7
gaaccgcntgcggagacccacgctcgacccacgcgtgcgacaacacatcacgagggaacacgacagattgatatgaagaagatcactgaggcttaccggctcaagacataagattatccttctgaagctaccaacatttttaacatctatgc

SEQ ID NO: 50412 - DNA, 174 bp, Glycine max
  Clone ID: LIB3107-064-Q1-K1-A9
aaccgccgggtcgacccacgcggccgatcacacgcacttccgggcccatttataattcacaaggatcatctaaaccgcggaaccgagataggctctacaggactttaaaacccttcatcattctttctttgccgaattacggagtgggatttatttatacatatgtctaaacca

SEQ ID NO: 50413 - DNA, 422 bp, Glycine max
  Clone ID: LIB3107-064-Q1-K1-B10
gtgctgcacatgtgaggctgttgagatggttagaacccttgcgatgatcaagcccgatgggttgtcaggtaagtacacagaagcaatcaaggaggtcatcttggattctggatttcatatcgtcaaagaaaccgaggtccagcttgatgctgagagggcatctgtcttctatgcggagcattcccagagaagcttctttgacagcctagtcaagtacataacaagtggtccagttcttgctatggttctggaaagacctgacgccgttgcgcaatggcgcactgtgattggaccaactgatgcaaaaaaggccaacacctctcatccaaacagcattagagcaatgtgtgggctggactctgagaaaaattgcgtgcatggttcggattcaccagaatctgcagacagagagatctcatttt

SEQ ID NO: 50414 - DNA, 414 bp, Glycine max
  Clone ID: LIB3107-064-Q1-K1-B11
ttgggggtctccccccaaaatttcttaagggtcccatgctcttcatcattgcttttttgttgggtgcggctttcttttctaaaaggagaaaggctcaaatttgtaagccaatcatatgtattttatcgagttgagaagggtcaaactaaggcatatgaagaagggttaatcaagtaattatacagcagctttagggagagagaagagaatagttatgtcagacgttgacagataaagaattcatacacattgatgatcccagtggatctagtattggatcagcaatatcagtggccgcaaatttggtggcaggctccattggtagctagactgatgggtccattttatgcccttcatgttctaactcagtagtgggcattaaaccaacagttggccttactagtatagcaaggg

SEQ ID NO: 50415 - DNA, 54 bp, Glycine max
  Clone ID: LIB3107-064-Q1-K1-B3
tgggcataccactgcaagcagattttgactttgagcaggggtagactactaaat

SEQ ID NO: 50416 - DNA, 108 bp, Glycine max
  Clone ID: LIB3107-064-Q1-K1-B9
actgttacattactacacaatgttatcgtttacaccccgactgcttggaatgggagcacacatcctccctatatgtccctcgccagaaccacacaatcatatcttcta

SEQ ID NO: 50417 - DNA, 376 bp, Glycine max
  Clone ID: LIB3107-064-Q1-K1-C10
gcgggcgactgatgctttaagacaacatatgtgtttcccaaccagtctctgtattcttcgactcttttgtaattgtggcgggggtatccctttctctccaacctcttaatttgaaaatggtgaaaggaagtgagagcggtgcagttcccgaaccggttatggattcagtcaacaccactctctccaaccttcaacaactccgaacgcactttaacgagtttttgtctctctccgaccctcaaaccctctcccaaatgccccctcttcaacgggctcattccctcttcatcctcgccaaagtcacatctacccttcttgcattgaacctaaggtttaccggggtccacccagatgatcatcccatcaaatcagagct

SEQ ID NO: 50418 - DNA, 326 bp, Glycine max
  Clone ID: LIB3107-064-Q1-K1-C11
actcgtcttaacacaacatatctacttaccgagccggcccttttttagcggccccgttttatacactccgcggccacctatatctatgccgaccattaagttgtgaaaaaggtgaacgaggctctgcatagatgcgagtacatcctcaataatctaggtttgatctctcccaatttgaccaaataagatactaacaccacaaatctcaaattcattctgtttctattatatttaaccgagctcacagaaataatatctcaagatgacatacatacatattctaactacttaaaagcaaaacattactgattgtatctcattttgtg

SEQ ID NO: 50419 - DNA, 264 bp, Glycine max
  Clone ID: LIB3107-064-Q1-K1-C12
tttgataacccaaccagtctctgtattcgtgcactggtttatacttgtggctgtggtatacattactctccaacctcttcatttgaaaatggtgaacggccgtcagatcgttgcaaaatcctatccgcctattgattcaatcaacaccactctgtccaaccttcaacaactccgatcgcactttaacgattttttgtctctctccgaccctcatactctctctcaaatgcccacctcttcaactggctcattccctcttcatac

SEQ ID NO: 50420 - DNA, 392 bp, Glycine max
  Clone ID: LIB3107-064-Q1-K1-C9
gatgcttcaaaaccaagaaaaattagtgacaattcctggtcctcgtctgactttttttatatcagcaaaaatataatgatcagttggtgtccaaaaaagttttatgcaattgtgctgcttttatggtatgcagcaggatccattcatggattttcaatggtgcagaaataaagtgcatagagagggagagaatggcactcctcaacttcaaagaaggcctcatagatgtctatggcatgctgtctacatggagtggcgatgaaactaatagagattgctgcaaatggaaaggaatagatgcaacaatgaaacagctcttgtacaaaagcttcgtcttcgtggtcagtatacacaatatttgagagtggctatatttaactggatttccaact

SEQ ID NO: 50421 - DNA, 306 bp, Glycine max
  unsure (1)..(306): unsure at all n locations
  Clone ID: LIB3107-064-Q1-K1-D10
gggacgagccacgcgtgcgtaccaccacattctatcgtcctataatatataatactactaggctgtggtccggtatggcttgtccgagccaaggaagaatacancagaagctagcaaacaacatgagtggtgccatggacatggtgcgagccgcgtgacccaaacaaactacatacgcctgcctagctaggagagagcagacattgagagctcagaagcgtgcgtgcacacgtaatgatcgatgtgctgaggaggaaaagagaacgagatcgaagggattattaaagttctgtcacgtcttttttc

SEQ ID NO: 50422 - DNA, 234 bp, Glycine max
  Clone ID: LIB3107-064-Q1-K1-D11
cattggtattcaaaaactattcttattcatgcgaacattattttagattaaattacaacaacaccactatacttttatataataccctcattcttattcacccaatcgtccggctcacaacagcttaagcacacaataatcccaccttatctataatctataacgtccaccaatatatctacttctacctaactatctaaactactgacacaaggcctttaacattactcaatc

SEQ ID NO: 50423 - DNA, 318 bp, Glycine max
  Clone ID: LIB3107-064-Q1-K1-D12
aacacgcgcgcgcgcacgcgtttttttactctttcgtactgttttgacaagacgagagagtgtagacccacaaaggactttaataattaatactttttaaccactactataaagccagtctagattatctatgcgacttttctcgcaaagaaaaaataactcaatatctctctataatagttcgagctagatctgaactaggcagacactcgcatacgggtcttagctaacatatactaatttatgacatatatgacatgtgcacaacaaagttgccacctttatcagtgaagctcctcacctcaagatcgatgttac

SEQ ID NO: 50424 - DNA, 195 bp, Glycine max
  Clone ID: LIB3107-064-Q1-K1-D3
ggggcgacccacgcgtgcgcacacgcgtgcgtacagatgacaacagactacttagggttcgataataacatagaacggggctgttgagataagtctgaagagtgttactgtttcgatgaaacgactcatggattcgattgattaatgacatcgaatgggaacttttgtcgttgacgaacttccaacacaagggct

SEQ ID NO: 50425 - DNA, 84 bp, Glycine max
  Clone ID: LIB3107-064-Q1-K1-D8
ccggaacggaattcccgggcggacgcacgctttcgaacagacgtccgaacacgccagctggagttttctatactaccacctaca

SEQ ID NO: 50426 - DNA, 436 bp, Glycine max
  unsure (1)..(436): unsure at all n locations
  Clone ID: LIB3107-064-Q1-K1-D9
aaaacggccgacccacgcgtcgcggggcgtggnataacattcaaagcacgtcttggttgcagatcagacataacaaaagggtctctttccataccaattagcaacaacaccacaatacatctatctctcgtgcacatagcaaatgacaatgtcgtccggctcagaatggcgtcagcgcacagcgtcacggcctataccataatctccagcgtccaccgatataactcctgctccggcacgggcaggtcgacggacacgaggccggtgtcggcatcgtagctgaactccacttccgccgagtccaatagacacctcgccggctcccgcgagcagtaagcgccgaaccgaccgcacccgcgaaccctgagagccatggccttgccgccgacattgctgatcacgtcgcactcctcaacgggcccccagcgttaacata

SEQ ID NO: 50427 - DNA, 424 bp, Glycine max
  unsure (1)..(424): unsure at all n locations
  Clone ID: LIB3107-064-Q1-K1-E10
tggtgggttctttgcaattaacaatatatgagaagtactcttctccaattttgttaacctcaaataacccagcaccagtaccgacatcagactcctgcaattcatctggtctagctgttcataataacaacaccagaagcctttgcaattctattattatcacttttgctcagcctcctcattgcactaactccatgcttgctgagataatgtgttgccaaatcagtcagaccctggtccaaaataaccaagtccggtttaaacttcaatatttgcatgcatagctcctcaatatattcttcttcaatctttaataagagaatccagtcttctgcatgcatatctacatctgtcanaccttggccaatctcaacacctactgttgtagtagcttcaatagctaagtcagcaattaaatccccaa

SEQ ID NO: 50428 - DNA, 433 bp, Glycine max
  Clone ID: LIB3107-064-Q1-K1-E11
cccacgcgtgggcggctgccagatcgacagacgggggcacctaaactacttggggatggtcatggatttgatatcttgatttcttaaactacatggattcttccttccttctcatggtttgtcacataccaactagcttgggaccaataattcgatatgttgacccactagatgttccttctacatggtgctccaatctatcaaatacactttggcaaatctggtgaggcattcatatacctcttgttggttatggggactacaacctttcaaataccgaagtccttgcgatggatcctatcgtttcctgcttccctattgtacttgaatgtcagacttacttcatcttcttcctttaattatgaggctgtttatagaaaaccatattaatattctaactatggggaaggacctgtatctactaccatttcgg

SEQ ID NO: 50429 - DNA, 200 bp, Glycine max
  Clone ID: LIB3107-064-Q1-K1-E12
ccacgcgtaagaacggttaattaagaatacagacgcggccctcactctttcgcatcgatctgtcactacaactctcatctctaaaacacacaattaactttctgccttcttacacctctctttatatcatctattccaatatcctccagcacattattttcaacctcactgctactaaataccccattattctgcattta

SEQ ID NO: 50430 - DNA, 301 bp, Glycine max
  Clone ID: LIB3107-064-Q1-K1-E3
gggagacccacgcgtacgcacgcgtgcgaacagatgagagagggaacactggggtctgcttatatacactcatatggggaactatggggagccaatgatgatacagcccacgtgtatacttatttgcttgagaaagtagttgacaactctattactgtgagacaccatgaggttgctcaataccaacgagcaaatggcctactatgctaggaggacaatttataaaatctaacccttgagagctcagacagaattggaatactattaaatgcatgcctttgatttacactataaaacaaaa

SEQ ID NO: 50431 - DNA, 423 bp, Glycine max
  Clone ID: LIB3107-064-Q1-K1-E9
gacactaaaaaaaaaagaaaaaaaagtcttaatgggtttcttgttttctctgtcgtttcgttcccttaatctttgatctctgagttacaagttataacaaaagaaataaacaacacatataaatatttgtaagaaaatatatatatgatcatgggttttcttcacaaactatgggacgaaacgttggcgggtccagcaccggaaacgggtctggggaagctccgaaagtacaactcgttctccggcggaagctccgtccggtcaacggtggcggagcatgttccgataagtcgcagcatcaccattgttcgctcccaatctggtttcggaaccaccaccaccacctctgctccttctgcgcctaccacccctcgcacccccttgactccggaggcaccaggcggtgatttcaagaagctcacg

SEQ ID NO: 50432 - DNA, 387 bp, Glycine max
  Clone ID: LIB3107-064-Q1-K1-F10
gatgacatgcagtggctgacatatacatcacttgatgctgctcgtcaacgtatccaagaacagttaagtgctgtgacagctgatatggatatgctttctacagatgaaccacacaataagaaaaaagcagcaagtaacggaaatggcggttctcataatgataactcaatgcactatagtaccctggttggggaagtgaaagctaatctgaagaaaggtattggagcgaatgaattgctgtcccatctttaagcacatcctgcacctgctcaagaaaagatgagtgctctggttgaagctctacactagggaactgagaaaggttttgctatagaagctgataagaagacaaactactttgctgctgctgtagccaaagatggatcc

SEQ ID NO: 50433 - DNA, 403 bp, Glycine max
  Clone ID: LIB3107-064-Q1-K1-F11
attacaaatctttcgctcacactcagggattgccagaatggcacttggttgcttggtgatgcccctttctgttctcttcactcttggtcttgcgagagaaagccatgccagagacaaaaatttttggcatgctgtttggccaaacactcccattccaagttcattgcgagatcttctaaagcctgcccctgcacgtgttgaaatcgatgaacaccctatgccaattgaagaaacacagtacccgaaaaccttcttctataaagaagaccttcatccatgcttaacaatgagagtacagttcagcacgcgctcctttcaacaaccattgagtgttggtacatgcctaaaggaaattaaagacactactactcaacgatatagttttgaagagctatgcatcaac

SEQ ID NO: 50434 - DNA, 386 bp, Glycine max
  Clone ID: LIB3107-064-Q1-K1-F9
gggaccctgctgatccaaactacaatccgtggggtgatctgatagatgatcctgtgcacaaacatgctcgcagggttctgttatctgttgcagtttatgggagtctgattgtgatgctggtattcttgcctgtcaaacatgccatgcggatggcaccttcgattttcccgcttgacatatcggtatctgatccattcactgaaattccagctgacatgcttctctttcagatttgtatcccatttgctattgagcattttaaattgaggacaactattaaatccctacttcgatattgggttacttgttgtggttgggcacttggtttgactgatttcttacttgctaaacctgatgagagtgttaatcaagaaaatggaaatggg

SEQ ID NO: 50435 - DNA, 403 bp, Glycine max
  Clone ID: LIB3107-064-Q1-K1-G10
cgacggtttcaccgcttgagcagacttaacaacagcggaaagcggtttactgtctgttcaagctaccatctatctctctctttcttagtgcctccttgccagaagttaaaatggcccaagaaactttcctattcacatctgaatcagtgaacgaggggcaccctgacaagctctgtgaccagatctccgatgctgtgctcaatgcatgcttggagcaggaccctgacaccaaggttgcctgtgaaacctgcaccaagaccaacatggtgatggctttcggagagatcacaaccaaggccaacgtggactatgagaagattgtgcgtgacacatgcaagaacatatggtttgtctctgatgatggtggtcttgatgctgacaactgcaaggtcctcgtcaacat

SEQ ID NO: 50436 - DNA, 277 bp, Glycine max
  Clone ID: LIB3107-064-Q1-K1-G11
aaccgaccgacgcatccacgcggacctccttccacttccacacctttctcatccctttcataaaacgcatcacgcccggcgatgctctacctcatctggaggcactaccccaatctccataccgacatcaccctcacttccttcgaccgcttccgcatacacccctcttaccagaccttcctctacctcagtcacgaccccatgccctatcatgcctcacccaaggagctacactctacctcactaatactgctttcacacaaggataagaaaatta

SEQ ID NO: 50437 - DNA, 300 bp, Glycine max
  Clone ID: LIB3107-064-Q1-K1-G12
gaattgccggatcgacccacgcgtacgcccacgcgtctgatacctcagtattgtcgtcatagacctgtttatcaaacgtgcggagtgttaaattcctataccgaactcaaccccctggttaattgcaccttgccttttgccggagctctactgtgacatgctgaaactcttattccgctctctatactaacaagcctattgcgaacgtgcctcgtctattggtggcgtcgggaatgcgttaaactgcgacctcagtggaggaaactccactaacctctcctcctaagaagtgttggccga

SEQ ID NO: 50438 - DNA, 240 bp, Glycine max
  Clone ID: LIB3107-064-Q1-K1-G7
gggagacccacgcgtgacccacacgcgtccgcgcgagaaaaagaacgcttgatgatgtttctattgccctaggaacgggggccactggttgcatctgccaacaaaacttttaatgaataaattattcctaaaactataaatattccttctgtggagaatttgtcagtctatgatgttgcagagaaatacaacgatgaacggcatgatatgactatcttgcctagtgctgaggatgtgagc

SEQ ID NO: 50439 - DNA, 361 bp, Glycine max
  Clone ID: LIB3107-064-Q1-K1-G9
tgcggctagatgactaccactgcctgttttgttcgagtcatgaggaggaagcatcccacatatttttcggctgccaaagaataatgcctttatggtgggagagccttgcatggacagaggttgtaactgtgttccctgcatcacctaaggaacactttctacaacattcatactgtaattcatctggaattgtccaaaacagatgatggatttggtgggctgccctcacatggtgcgtttggaattgtagaaacagaattgtattctcaaatgaggattttaatggacagaaattgatggaggatacaattttcttctgctggaccgtgctagatatttagaataagattttgagctgctg

SEQ ID NO: 50440 - DNA, 304 bp, Glycine max
  Clone ID: LIB3107-064-Q1-K1-H10
ctatatgacgacagtttgttccattaccatcttaactatgccgggcacagcactactgttgaagaagacactaccttccttattatgataagccacctctcacagaacacaacaccgtgtcatccaaaagctcttcttgcgcctccctacacacaagccttatgcaacaggctccctctctaccatgagatcggactcctagaatggttgacctggcttaaggatactatcccgagtcagggttcgataatgcatctgccattgccggctgatattacaaccatatttaactcatggtccacta

SEQ ID NO: 50441 - DNA, 293 bp, Glycine max
  Clone ID: LIB3107-064-Q1-K1-H11
cccacgcgttcgggggagcaagtttgaagagcgaagagaatggctcccaagggtttaatctttttggctgtgttatgcttctcaacactgtcactgagtcgttgtcttgcggaggataatggacttgttatgaacttctacaaggaatcatgccctcaggctgaagacatcatcaaagaacaagtcaagcttctctacaagcgccacaagaacactgctttctcctggctcagaaacatcttccatgactgtgctgatcagagttgtgatgcttcactgttgctgactccaca

SEQ ID NO: 50442 - DNA, 446 bp, Glycine max
  Clone ID: LIB3107-064-Q1-K1-H12
cccacgcgttctggtcagcaagttgtgaagagcgaagagaatggctcccaagaggtgaatctttttggctgcgttatgcttctcaccactgtcactgagtcgatgtcttgcggaggataatggacttgttatgaactactacaaggaatcatgccctcaggctgaagacatcatcaaagaacacgtcatgcttctgtacaagcgccacaagaacactgctatctcctggatcagaaacatcttccatgactgtgctgttcagagttgtgatgcttcactgttgctggactccacaagaatgagcttgtctgagaaggaaacagatagaagcttccggttgagaaatttcaggtacattgagaccatcaaagaagctttggaaaggtaatgcccaggagttgtttcctgtgctgatatcctcgttctctctgccagaaatggcattg

SEQ ID NO: 50443 - DNA, 291 bp, Glycine max
  unsure (1)..(291): unsure at all n locations
  Clone ID: LIB3107-064-Q1-K1-H9
gagaatgaagaaggcaagggcgttgagcgtggcagtgaacgtgttgtgtttggccatagtttgcagtgcgatcgagtcaccgcaacacacagtagtacactccgagtccgatttcgagatcaggctctatcgtacctctgtttggatgttcgctcctgccctcgacatttncttcgaaaaagccacctggaatggctttcacaggttgtttcagttcacagaaggtgccaacttgaatttctctcgaattccaatgactattcccgtgttgacaaccgcggtccccggagc

SEQ ID NO: 50444 - DNA, 311 bp, Glycine max
  Clone ID: LIB3107-065-Q1-K1-A3
aaccggtccggagttcccggctcgacgccccgcgtgcagaggacgacagaagggaacggctgcggaaggacgacggactgtgcctgggtgctagtagacaacagagggggccgggtgtctgatgacgactacacgttccgggtgggagatgacggctgcaagacatatcctatagcaggcggagctacccgttggattactcgtatcatgttactggctatgatgatttaaacttgaagagcggccgctctaatcgatccttgctcattgctacttgcatgcggacgcatggcatttcaatcaagtgacct

SEQ ID NO: 50445 - DNA, 371 bp, Glycine max
  unsure (1)..(371): unsure at all n locations
  Clone ID: LIB3107-065-Q1-K1-B3
tcaatgatctctttcncagctgttaccactgtcaaccgtgccggtgccggcatggttgctccattcactggcctcaagtccatggctggcttccccaccagaaagaccaacaatgacattacctccattgctagcaacggtggaagagtgcaatgcatgcaggtgtggccaccagttggcaagaagaagtttgagactctttcctacctgccagaccttgatgatgcacaattggcaaaggaagtagaataccttcttaggaagggatggattccttgcttggaattcgagttggagcacggnttcgtgtaccgtgagcacaacaggtcaccaggatactacgatggacgctacttnaccatgtggaagct

SEQ ID NO: 50446 - DNA, 209 bp, Glycine max
  Clone ID: LIB3107-065-Q1-K1-D7
tctacatagcatcatcctgcaccaccatgctatatattataaaactacgcagttttgttaggatcttaaaaaacactccgctaacagccagatggcctcttccgacagtaacatgctactaaagaatgatgcagtttatgagatgctcccactcggagttgcccatgctgactctgttgatgaagacccagattgactttaagaacagc

SEQ ID NO: 50447 - DNA, 69 bp, Glycine max
  unsure (1)..(69): unsure at all n locations
  Clone ID: LIB3107-065-Q1-K1-F11
gacccacgcgnccggcgagaagacgacagaggggctccncatcaaaccaagacatagcaaacganccaa

SEQ ID NO: 50448 - DNA, 386 bp, Glycine max
  Clone ID: LIB3107-065-Q1-K1-H10
cggaattcccgggtcgacccacacgctcgcccacactgttgtacagctccgaaaatacaactcaaggggacgtccacattcaggaagggtgttgttcaaaaattcgccatcgtcgatagaagcatgatagccttactcgatcatgatgatacctatgcgcaagaataagcgcatgatgacgctgatgagctagcgcctaacgatgagacattaatctacttaagtgcttgagcaggagtagatatgagctttccatctgctaccagcctcatcacattataagctcgcatggctcttatgatctttaagtctagccactaggagagcttcactcttgacttactttgctttactgacccttgtcctgggcccatactattgagtgt

SEQ ID NO: 50449 - DNA, 354 bp, Glycine max
  Clone ID: LIB3107-066-Q1-K1-A1
gtgagagagagagcgagcagtttcagacacagagagaggggtttgggattggagggattgacgctgcgtctcttcctcttctctttcgatccatccctcattcctaatcctccaatccaaccacctcagcctcacactcacatatacacatatctgaacgcgtatcgtccctcctatggcttcaaagcgcatcctcaaggagctcaaggacttgcagaaagacccaccaacttcttgcagcgctggtccagtagctgaggacatgttccattggcaagcaacaataatgggtcctgctgatagtccttatgctggaggtgtattcctagtcactattcacttccctccggatta

SEQ ID NO: 50450 - DNA, 406 bp, Glycine max
  unsure (1)..(406): unsure at all n locations
  Clone ID: LIB3107-066-Q1-K1-A2
gatgtgacaggaagccagaacagcgttgagatcgatgctctagctcgctttgctgttgaagaacacaacaaaaacagaatgcccttttggagtttgaaaaggtggtaactgcgaaacagcaagtggtttctggtaccttgtacaccatcactttggaggcaaaagatggtgggcaaaagaaggtttatgaagccaaagtttgggagaagtcatggttgaacttcaaggaggtgcaagagttcaagcttgttggagatgcacctgcatagtctagtgcttaattaggttgctgaagagtgaagaatgagacagcctgtttcgaaggggaaaagcctaaggatatatcanaggatcctatatgtataaaataaatgttgcttantaccttcgtattgatatctgaagt

SEQ ID NO: 50451 - DNA, 365 bp, Glycine max
  Clone ID: LIB3107-066-Q1-K1-A3
ggctccttcgtctttcactctttgtatttttcgctgactccggcgtcactttccgttgagtctccgtccaccggcgtggcgatgggctcggaatcttcaaactccgattctcaaccgcaccctctctcgaacccaatcgacgacgcgtgccacgacatgagctccctggaagagctcgcgaaccgcggcgcgtggcgttccatcattgacaaggtctcacgcgcccgcgccctctctgttctccacaagccccacgaccacctcacctaccttgccttcaacgccctctccttcaccaaactgcgtcgtttcaacgaagcctctgcggaactcgattccctcgaagacctcgacagctaccacta

SEQ ID NO: 50452 - DNA, 400 bp, Glycine max
  Clone ID: LIB3107-066-Q1-K1-A4
ccatacaaaagagcgagagccgtggccacatttgactggaagcatggaaactatttgcatcgcgctatacaatggctactattaaataccgcgacatgaaccttaatagaaatgaactagtttgaaaaataaaccaacgtcgaatgtaaaaatatgtaaaaggagtgtagtgacttattaaagtgctttgtaacaatgttatttatcattatgacttgtcaagtacttacttaataatagatccaaacactatagaattgcataatagctcattacctgcagatctatctaagaacataaataactcattaagtatcagacactcatgggatgaactgttggatgtgttacatgacttatttgatgcgatcttgatcaaactgattatcacacatgtgta

SEQ ID NO: 50453 - DNA, 104 bp, Glycine max
  Clone ID: LIB3107-066-Q1-K1-A5
cccggccggaatccgggcgcccacgcgtccgctgcggaagacacagaaggggacacgctataccgctgaagcttgctactgacactctcacgactgcatacgct

SEQ ID NO: 50454 - DNA, 57 bp, Glycine max; identical to SEQ ID NO: 12752
  Clone ID: LIB3107-066-Q1-K1-A6

SEQ ID NO: 50455 - DNA, 286 bp, Glycine max
  Clone ID: LIB3107-066-Q1-K1-A7
ggttctagtgtatgtgattgatgtgactcgttcttcttcgtcgttatcttattcttttgttgattgtgtgtttgttttttctctcacctgaaaatgtcttgctgcggtggtaactgtggttgcggaagcgcctgcaagtgccgcaacggctgtctgtgctgcaagatgtacccagacttgagctacaccgagtcaaccaacaccgagaccttgtcatgggagtgcaccagctaaggctcaattcgagagtgctgaaatgggtgtttccgctgagaacgatggctgt

SEQ ID NO: 50456 - DNA, 365 bp, Glycine max
  Clone ID: LIB3107-066-Q1-K1-A8
ccctgagaccaggagatgttctttctattattttcggacagaagtgcccttgaggttgggaaaaattactttgttgcatgaaccggcattgctcgtcaaccgtagttacttataatcacaattagggacgtatgaagggtcccaaatcacccaacacgtgttaaacgagagccacatcgtgccacgtgtgagtcagccatgcacggatgaaagtcaaagttactaagtactgtagtggttaaataaagaatagatggagttaattactaacattaatgaggtaattaattgagacataaagaaattataaataaaactaagaaaacgccaagaggaaaacagggtccagtatggagggcactgag

SEQ ID NO: 50457 - DNA, 323 bp, Glycine max
  Clone ID: LIB3107-066-Q1-K1-B1
ggttctagtgtatgtgattgttgtgactcgttcttcttcgtcgatatcttcttcttttgttgtttgtgtgtttgttttttctctcacctgaaaatgtcttgctgcggtggtaactgtggttgcggaagcgcctgcaagtgcggcaacggctgcggaggctgcaagatgtacccagacttgagctacaccgagtcaaccaccaccgagaccttggtcatgggagtggcaccagttaaagctcaattcgagagtgctgaaatgggtgttcccgctgagaacgatggctgcatatgtggagctaactgcacctgcaacccctgcac

SEQ ID NO: 50458 - DNA, 54 bp, Glycine max
  unsure (1)..(54): unsure at all n locations
  Clone ID: LIB3107-066-Q1-K1-B2
gacctcaggtcaggcggggctacccgctgagtttaagcatatcaataagcggng

SEQ ID NO: 50459 - DNA, 318 bp, Glycine max
  Clone ID: LIB3107-066-Q1-K1-B3
ggtggcagagagcgaacccaaaactagagctaccttcccttcaaaccttccactcttctctccttttccaatcaagggaataatatttcttagagatattccgaaaccatggctcacgccaatcctatgatttttgttggtggaattctagggaaccttgtctccttctgttgctttctagcaccagtaccaacattctatcgagtttgtaagaagaaaaccacggaaggtttccaatcacttccttacgtggctgcactcttcacttcaatgctttggatattttatgcttacataaagacgggcgaaatacttctc

SEQ ID NO: 50460 - DNA, 370 bp, Glycine max
  unsure (1)..(370): unsure at all n locations
  Clone ID: LIB3107-066-Q1-K1-B4
tctggtgaaataccacctgaaattggatctctgaagcagttatcttctttgcatctagaagagaattctttaactggatcaatacctgcagaactgggtcattgtgcaatgctggtggacttgaatcttgcttggaattctctatctggaaatatcccccagtcagtttcacttatgagctcattgaactctcttaacatatctgggaacaaactttcaggttctattccagaaaatttagaagcaataaagttaagctcagtggatttttctgaaaaccagctttctggaagaatcccatctggtctttttattgttggaggagagaaagctttcttggganacaggggctgtgtgttgagggaaacct

SEQ ID NO: 50461 - DNA, 374 bp, Glycine max
  Clone ID: LIB3107-066-Q1-K1-B5
attcttgattctttgagacgggtgaaggagattgttaaagaggtaaatgccggtctcgagtgtggacttgggttagaagactttgatgattgggaagagggtgacattcttgaagtcttcaacacagttcagaagaggaggacccttgaagaggcctcagcatcaatggcagctgctgtggagggagtaggagttgcattgtagaatgaaccatgatgtattccactatgagattggttcctatcttgtgtttgagcacagtgcaaatgcattccaggttccagtttgaaaaaaatgtattctctccaattgatgttatgaaagtggaaaggtaacaattccctcatcattatattgatattgagggtaccact

SEQ ID NO: 50462 - DNA, 361 bp, Glycine max
  Clone ID: LIB3107-066-Q1-K1-B6
gatatcagtgaagaggatcaggagttctctggtctttgctccttggctccttcactatctgagagcattttgtgcactactgggttgaaaatgtatatgctggagagcaaaggaggtgccatagcatgcatgttcttgtctcttttcttcttggggacatggcctgctcttttgactatgttagagaggcgtggtcgtcttcctcagcatacctaccttgattactcaatcaccaatttcttggctgttttactcattgcttttacacttggtgggataggcaagggcacacatgatcagccaaatttcttagttcaacttgctcaggataactggccctccgttcttttcgcaatggggg

SEQ ID NO: 50463 - DNA, 303 bp, Glycine max
  Clone ID: LIB3107-066-Q1-K1-B9
aaaaccggccgacggacgcgtacgacacgcttccgtacagtttcaaaaagactacagaatgggatgatgacgaggatgaggagcaggattaacatgggggtgaggtgtccatttaaaagaagatcttcagattttttacaacttgatggaagtatttttatcacaaatatatatacatatgtcatcatttcttatttaagatattaagcatttaatattacttcggattaactttcatgttttttttttgtatttattacttgacagataataatcattgttcttctgcctgtgttctcaata

SEQ ID NO: 50464 - DNA, 446 bp, Glycine max
  Clone ID: LIB3107-066-Q1-K1-C1
ccccaaaagaacaacaaagggtattttttataattttccaaaaaaccattatttttggggtgtattaaaaaaggagtcctatttgggcctttccgttggtggaaaaaataaggctttcctccccaaaattccaatccaaagtttacttccttccaccgattaaatgattaactatcacaaccgaaatattcctttattttttgaaagtccctttttattttacttccacaaaaaagactaggataaaaacaaaaaaaaaagtgatcccccttttcttgttggtcttatatccatattaatggagatagaattcatgtcataatttaaaaaatgaacatgtataattctttttcctattcaaaaatgatgagggggttattgataattggaaaagagtttttatggaagatttaagttttactaacaattttaatttgaatttttta

SEQ ID NO: 50465 - DNA, 416 bp, Glycine max
  unsure (1)..(416): unsure at all n locations
  Clone ID: LIB3107-066-Q1-K1-C2
gaagcaaaaacaagagaacaaagagttttaattattgcctcattagtttctaagtgctgagaaaaatgtctgctatggtagaggtatgggttggggagctgacaaagcttcgagaaaaagttcttgcccgcaagcctttcttattatccaaagccaaagaaggatcagaaaggaaccaagaagaaaaggaaactcaaactgcggtggttaagagagacactactaatggaaccatgtctgaggcaacggtgtgtttgcttatggatcgatttgtgccttggtgatatgagcaatagcacaaccaagatgtcttgtattttcttcaactttttggggttatgatatgtcttgtatatttactatttccatctatgagttcttagtcagcgaaatatgtaatggannatgtatcaact

SEQ ID NO: 50466 - DNA, 431 bp, Glycine max
  Clone ID: LIB3107-066-Q1-K1-C3
tatttttaaaaatatccaaaagaacatttatatttatgtataatagaaaaagaatactaattggggctttccgttggtagaaaaaataaggcagtactccccagaattccgatccagagtatacttccatccaccgattaaataaataactatcagaaacgaaataatcctttaatttttggaagtccccttttattttacttacacaaaaaagactaggataagaacgaaaaaaaaagtgatcccccttttcttgtttgtcttatatccatatttatggagatagaattcatgtcataatttaaaaaatgaacatgtataattctttttcgtaatcgaaaatgatgagggggttattgataatttgaaaagagtattttatggaagaattaagttattactcaacaaatttgaatttgaattttttaaag

SEQ ID NO: 50467 - DNA, 353 bp, Glycine max
  Clone ID: LIB3107-066-Q1-K1-C4
gattggtgacaaagttagaaacaaggagaaagaatgaagatggcaggaaagaaaatcccagatgtgttgctgaattcaggacacaaaatgccagttataggcatgggaacttcagtggagaatcgtccatcaaatgagacccttgcttctatctatgttgaagccattgaggtgggttaccgacattttgacactgctgcagtgtatggaacagaggaagccataggcctagccgtgggcaaagccatagacaaaggccttataaagagtagagacgaaggtttcatcacttcaaagccttggaacacagatgcacaccgtgaccttattgtcccagctcttaagaccacatt

SEQ ID NO: 50468 - DNA, 247 bp, Glycine max
  Clone ID: LIB3107-066-Q1-K1-C6
cgtgctcttacattgcctagtgcggccatgtcgactctgaggaacctctgccggtgtcgtgggttgtgtctatccggagcaagatataatacatgttttgacaacgtatatactagcaatgcttgccgatggccgaaactgctgtctttgcttattctggcaacaaccttgtggctggcactcaaggatacctccattgaggagcaacggtcacacacagactaatacaccgctcatgatgaccact

SEQ ID NO: 50469 - DNA, 401 bp, Glycine max
  Clone ID: LIB3107-066-Q1-K1-C7
cccacgcgtccggacgacagaaggggaatacagttaagttattctcactgggctttgtagatattaagcatgggtcaaacacctaatcatttaaatagcctgatgagaccctttatgtattgcaacttggtttggttcattttttttaaaggtgcatatttctacatgaagcttaattttgggtcttttacatttttttccagatgtttatcatgaaaagcaagaggtttttgatcgtgaagcacaaagatatgagaagttagcccaggcaaattatgatatgtttgctgatgatgacgagcatgataccagtaagccatctacggatgaaaataatgcagttagtcaatcttcttcagatgccataaattctggtcctgagggtggagcatctcaaagcg

SEQ ID NO: 50470 - DNA, 374 bp, Glycine max
  Clone ID: LIB3107-066-Q1-K1-C8
gtgaagagatggagtatgatttgtcaaacagaaatgtcgcctggttgtggctttttcaagaggaaacatgttgctgtgcccgaattaccttgtgctgaaattgagggttatgttgctggttgcttctcaggaacacctattatcttaactaagacactgcaactcaattgccggaatgaagcataacaggaaatgcgccttggattccattccagaatatgaaacaactgagtgccagaaagatgtttctgatcatggacttgatatgcaggtagatgactgtagaagcttcaaactggaacaagatgaggactactacagcatgtattgaccaagaacactatatgcagatggggaagatggcgaactatcat

SEQ ID NO: 50471 - DNA, 424 bp, Glycine max
  Clone ID: LIB3107-066-Q1-K1-D1
gggagacgcatggttctgaactaattgttataaataatacctaaaattttgagttgtcctaaacattggggtttaaacaaatccaatctctcaatataaaacccaatgatctcaccctcactctgtttctgatttctcactcttcgtttctcgttcggttcatcagcgtgtgtctcagccatggcgtttccctacatggaagccgttgtcggatttatgatattaatgtacatttttgaaacttacttggatgtgcgacaacatagggccctcaaacttcctactcttccaaagactttagaaggtgttatcagccaagagaaatttgagaaatctagagcctatagtcttgataaaagccacttccattttgttcacgagtttgtgacaatagtgacagactctacaattttgtactttgggg

SEQ ID NO: 50472 - DNA, 336 bp, Glycine max
  Clone ID: LIB3107-066-Q1-K1-D2
ctttcaagttgaatgaggagatgattgaaactttgtttgtagtgaacacgcctaatccgaaacctaaggatactactccacgctctgttcttgcgccacaaaaccaggaggatagggtattggatcctaaaaagtgccaaaacattgctatcttgttaagagcacttaatgtgactatagaagaagtgtgtgaagcactcttagaaggtgttactgatactctcggaaccgaactacttgaaagcttgataaaaatggcaccaagcatggaggaagaacgcatattgaaggaacataaagatgattctacaaccaagctagtgcctgctgagaaat

SEQ ID NO: 50473 - DNA, 399 bp, Glycine max
  Clone ID: LIB3107-066-Q1-K1-D3
ggaagagtgaagagaatggctcccaagggtttaacctttctggctgtgttaatatgcgtttcagcactgtcactgagtccttctgttgcgggggaagggcaaaataatggccttgttatgaacttctacaaggaatcatgccctcaggctgaagacatcatcacagaacaagtcaagcttctctacaagcgccacaagaacactgctttctcctggctcaggaacatcttccatgactgtgctgttcagagttgtgatgcttcactgttgctggactccacaagaaggagcttgtctgagaaggaaacagatagaagctttgggttgagaaatttcaggtacattgagaccatcaagaagctttggaaagagaattgccctgaagtgttcatgtgctga

SEQ ID NO: 50474 - DNA, 329 bp, Glycine max
  Clone ID: LIB3107-066-Q1-K1-D4
gacacctctttctccttctccccagttctcaaaccttacctagtattttcgtttctgaacccaattaattaagcacacaaggaccataacatacctatacctcaatatcacaagtcttatggaggcagagcgagacaagtacaagatgatcaactttgaagaaaccgagttacgactcggcctcccactcagtggaaacgagacgctcaaaaccacttgcagcactgggaagagggtttttttcggatactgccgtggatttgaagcttaacctttcctcaacctcaaacagtgcttcttctgacctgactaaagagaagaacatcact

SEQ ID NO: 50475 - DNA, 420 bp, Glycine max
  Clone ID: LIB3107-066-Q1-K1-D5
cagctttcttattttttcttggatctccttgatttggatgaggaggctggcatgatccagaagtcaactaaccaaactgatcaaaatgagaatgtatttacttattatttctttggcttttttgggattcagatttgagaagaaaacagtctattccaaaatccctaaatcaaatggcggaagaagaatctggactaccaatagtcaatttgcatgcatctcattgtgcagtcatgaacttagggctccaatttttttttatatttagtagttttggaaggattgaaaaataaaattaaggattttctttccccatatgactacaggtgatccaccccaacagaagacaagtcaggaaatgagaaaaagaaagaagatgagaatattactcaaggcgatccacctcaataggagagaagt

SEQ ID NO: 50476 - DNA, 416 bp, Glycine max
  Clone ID: LIB3107-066-Q1-K1-D6
gggcacagcaacagggagggaggaataacatgagatattcatggttggcatgtataaagcaggatataatgttgccgttgcccttgtagtactataagtatgaccaagtaaaagggggagctagcaggagaaaggatcagatagcacttgtatttgattgatgagttaatggaagaatatctcagtccattagctgttacacatcttcttcaacaaacactcagaagcttatgcatccatcaaaattctcaatgggtctatgtagtcttctggaggatcgtgccaagaaactatccaccacccaaatgggaaagtgaagcggctaatgataaatccagaggaaacagaaggaactggatattggtctgggaagatggtttctgcaactttgctacctcatcagcaccctgaaataa

SEQ ID NO: 50477 - DNA, 169 bp, Glycine max
  Clone ID: LIB3107-066-Q1-K1-D7
gtacaattcaaaaaaatgcttccaatggctggggctttttagctggggtaagatgccccataaaaactgtgacttgaatcgttcttttgcaggggaaaggcaacataattggcccttggtatgaacttctacaaaagaatcattgcccttcaagcttgaagacatcatc

SEQ ID NO: 50478 - DNA, 181 bp, Glycine max
  Clone ID: LIB3107-066-Q1-K1-D8
cggccgaatcccggtcgcccacgctccgacggctggagagaccaagaggggcagctgctatttacgacccaagggaaagggttgcagaggcgcttcctgctaaccatacatttcgctgtggtctatcttgactattaaacattatagcggccgattaggggatatctactagtaccgtgca

SEQ ID NO: 50479 - DNA, 358 bp, Glycine max
  Clone ID: LIB3107-066-Q1-K1-E2
ggcagggtgcaaggtacagcttcgatgggaaattgctggggttctccacctcacaacccaaccccaacaactaccggtaaccttagtacaggtacgacggggacatctcaggcgatcagcagcggtagctatactactactactacgacgactactacttcttctggaagtgggagcagctccataaatagcaagttctcagtgtcaagcggtggtcagccttatccaaatggacagatcttacctacctctaatttgaggatcttcacttttgccgagttgaaggctgcgactagaaatttcagagctgatacagtgcttggggagggaggttttggaaaagtttacaagggttggc

SEQ ID NO: 50480 - DNA, 313 bp, Glycine max
  Clone ID: LIB3107-066-Q1-K1-E3
cacggatcgctgactgtggtagagcatgtgctaatagagttgctgcaatccgttgaccatgatagatgctacagcctatatataacgatgctggtcatagaacaactgcgtggctggacaaatagagaaaatcaaatggttcattggctacttcgcgaattcaggtgagtatgcgccgcgtaatgcaaaccagtgctgctgaggaccgtacacaagacacattagacgaaggttgtcgatctattgattaaacatgggagagcttacatgatgtccaggtgagggaccgcacataatgtgcaactctgacttg

SEQ ID NO: 50481 - DNA, 390 bp, Glycine max
  unsure (1)..(390): unsure at all n locations
  Clone ID: LIB3107-066-Q1-K1-E4
agagaaatttccattatagcttttccttcataatttctgcttaggattagaattgtagttgctaccatacactgtgtaatagttttgcttggtgaagttcataagaggaccgtgcgtttaatggcgttacctgataattgcagggagcatgtaacatgaatgcgttacgtaataattgaaggggcgtctaacatggatcggtccaaaatggtaacatcacatgggtctgagaatcagttttgttttataggttataattatatgatatttgtgtgaaatatcttttagctttttttatcttcttttaattatatttggttgtccatcaaatttaaatatgaagctttgtttaagaagatgaaatctaattnttgtcacactanatacata

SEQ ID NO: 50482 - DNA, 413 bp, Glycine max
  Clone ID: LIB3107-066-Q1-K1-E5
atggtaatctttctaacacccgaattatatgagaaacttcgatccatttttggtaaaaaaaaaaagaaagagaaaacgcaagtttctaatagaacttccccctttatgtatatttgtgaatgtgataaggaatttaactggaattaaaaaaaggggggattcacgaagatttaattactaaatgaataacttacccatgaatcatttccccggggtatgtttcaagttcccttatataattaatgcaaattggattttgattataggatatgtttccaaaaagattcaacgtactttttatgggtatacgataaggaaagaaaaaaaatataagtcattcaatttaatttgggtgtttttcaacctcaacatttttttatggggaagaccacaattagaagtcaaaacgtaag

SEQ ID NO: 50483 - DNA, 411 bp, Glycine max
  Clone ID: LIB3107-066-Q1-K1-E7
gacgcttattatggaaggcctgtttatgatagttacggtgggagcaggccttgttacgtgagccgttgcgatgaatatttctgtgaagaaaacacctctgcttgcacaattatgtgatcgatcgcattattacttacttacttcattcatcgaatctctctctcttgtgccgcccatgcatgcaagttgttgcaacggcgcgttcttccatcttattgttggagcgatcatcaccctcatcaatccaaggaataatgatctttgtttttttgtgtttgggagtacaaaatgtttcgtacgtgaaacaaatatagataatatgatatgataccagaggctagctagctaaagaataaatgtttttactgtaatgtatgtaactgatactatatactgtgatatcttacattt

SEQ ID NO: 50484 - DNA, 390 bp, Glycine max
  Clone ID: LIB3107-066-Q1-K1-E8
gatctgcaaggataaagtcggccaacctcaagtctgggaggatgtgcctcatgtagaaggggccttaatagtgaacattggagacatgatggagaggtggacaaattgtttatacaggtcaacacttcacagggttatgccaacaggaaaagaacgttattccgtggcattcttctttgacccggcctcagactgtgtggtggagtgctttgaaagttgctgcagtgaatcatctcctcccagattctctccaatacgtagtggggactacttgaatgaacggttcagactcacctatggttctgaaaaggatctaaaatgtgatttatccagttgaaggactaaatgccgtacttattatggctggctgctaccacaaatatgaaaata

SEQ ID NO: 50485 - DNA, 402 bp, Glycine max
  Clone ID: LIB3107-066-Q1-K1-F1
ggaggtaggaagctctagtatagtatccaatacaagatctcggaggaattttcatccaaattctggattacgtggccaagaaattaaaagctctggttcagtgactcgtgctggtaccagtaggtatggattgaggaacctcaaatgcaatactatttctgatgtcatccctgctggttgttcaccttcagattcaacccttaacagagggaaggatgtcataaaaaagagaaattgtgaaggggaaggtagttccactactagagggaagaaaatgagcgggtcttcattagaagcacggaattctggccccagaaatggcatatctatctctgatacaagaatatctaggaatactcaaagggacaggtcagacagcaacatggcaccagttagaactcg

SEQ ID NO: 50486 - DNA, 389 bp, Glycine max
  Clone ID: LIB3107-066-Q1-K1-F2
gaagaagttaaacccagcaaaatggactctgaagcagtagccaatcctgaggatcagtcatctattgtggggcctggttgctaatgtcttaggtcttccaacatttcagttgttatatatatatacaatagatattggcatgaaaataggaagtagaacgtgagagaaacgagtatgtacctggcaagcccttcatcatggcctataaggagcatatggttagtgtattctgcatctatacaggagcagcataacagcaccaaagcagagggcttggggtattgtggcttttctctttctttcatagctctgtaatcaccgagtttcgatgccttgcttgttcagttttgtattggttgcgagcgtgcagaaatgtcttgttttttttg

SEQ ID NO: 50487 - DNA, 423 bp, Glycine max
  Clone ID: LIB3107-066-Q1-K1-F3
gtttgtggtcccattatgtgtaatcgttgcttggataatgggtatcaatatggacatgaacttcaacctcttagagacaggttcccttgctttggcaataatagtcacaggcttcactttacaggatggaacttctcactacatgaaaggccttgttctcctgctgtgctacattgttattggggcatgcttcttcgtacaaagaacaccctttaataaccaagctgatgttactaacatcacacttaaaccagccactaatgcagttttaagcgcttaattagtaggctttggcctatttcttgtcctttcctgagatgaagaatggtggtatcgatccaaacccaaaatcagattcaaattcaatggattgttattggttcattctgatcacattgtcatatccataaagagggggggaaa

SEQ ID NO: 50488 - DNA, 419 bp, Glycine max
  Clone ID: LIB3107-066-Q1-K1-F4
gttgatgcagaggttgcttgtagtagtgctcaaaagttcaacatatttggttcaatacttgtaaattaccagcttaattatactcctagtgcattgttcaaagcttcgtctgttgccacaacacaggaccaggagatgcatcttgatctctccaattttgaagttcatatgattgggagtgttgatgatgatgtggcggctaagtttggctgaatgaattgctgaagcaaaattttacctagtggctgctgaagtaggtaggtaaccagaatgttaattcatctggtcgtccatttttctgttaagagatattttttgttgtaggattcctttagttatagttcagtagttttgtaattcattttctagttttctgtatagctttgtcaactgaccctcttttgtagttgccatcattc

SEQ ID NO: 50489 - DNA, 426 bp, Glycine max
  unsure (1)..(426): unsure at all n locations
  Clone ID: LIB3107-066-Q1-K1-F5
cccacgcgtccgcccacgcgtccgcccacgcgtccgcccacgcgtccgagacgacagaagggtagatggatagcttgtgtctcaggtgttgttcagacagctttgtatgcagatttcttctactattacttcatcagctggaagaacaattcgaaactgaagttgcctgcctgaattatctcaagttgttttggaatttagacctgtgtgaccagtcaccgctaaattttacagagcgtcgtggtttggatgatgttagttttgagagtaacgagacaaggctaactcctctccctgttcatgagtggggtaagtaagttttgtttttaaggttcaagggtaaacaggttttaacttctgatgaatataaccgtcccgtgggttaaaatgcanatgttatgtgatgatgttttgtatattcacgtc

SEQ ID NO: 50490 - DNA, 420 bp, Glycine max
  unsure (1)..(420): unsure at all n locations
  Clone ID: LIB3107-066-Q1-K1-F6
ggttctagtgtgtgattgtttgttgttgtaactcgttcttcttcttttgttgttctgtgtttgtgtttgttttttctctcacctgaaaatgtcttgctgcggtggtaactgtggttgcggaagctcctgcaagtgcggcaacggctgcggaggctgcaagatgtacccagacttgagctacactgagtcaaccaccaccgagaccttggtcatgggagtggcacctgttaaggctcaatttgagggtgctgaaatgggtgtgcccgctgagaacgatggctgcaaatgtggaccaaactgctcctgcaacccctgcacttgcaagtgaggtgttgggagagcaagcttcaagcagaaatagcccttaattangaataatgataaactattaatgtgtagcttaaaacctatgtattatgt

SEQ ID NO: 50491 - DNA, 415 bp, Glycine max
  Clone ID: LIB3107-066-Q1-K1-F8
aatattgcgtaatttaataatacaaaccattggtggcgcctattcgacatcatatattgtgtatagttcagagacaacatagactttttttaagccttgtaatttaaaggttaactccatcttacacaaagtttgataaaatgtggtagtagaaaattagtcttcaaaagcttaagaaaaattctctaaaaaacacataaatgataaaatatcaactataatcattgattaacgagcgcgtaaagcacaaagtctacatttcttccactagaacccatgtcacatcttgggttttcttttcccacccgagtcaaacgaaccatataattccaattttacttttagattctataccattaccagtagcacgtccatccagtgattcaaatgcaaacatagtagatatgattgattt

SEQ ID NO: 50492 - DNA, 407 bp, Glycine max
  Clone ID: LIB3107-066-Q1-K1-G2
gatcatggacatctgagatgaggctgaaccacgacatagtttcatacgagttcttctattatcaccataccttagccgttcaactcccatataacccaagcaaatttgcctttagattctcattttccgtcaagactatctctctctctctctctaggaatccaaaatattccaactaaacctttcttccttttcatggcagattctacccgtctttcattcagttcaatctcatacctgtatgtgtatctttaatgcaatcagttgatgaatgagaagaggaatccaaaacgtcaaaaaccactgactttcatcatgcctgtgacagactcaaatgatccgcagaattttgatgataacattcttttccctgttgaagagattgaacaatacccgttgtccggata

SEQ ID NO: 50493 - DNA, 392 bp, Glycine max
  Clone ID: LIB3107-066-Q1-K1-G3
gggagctttattgcgttgttgttgctgtagatggaaaagggtagaaccgtggtggtgtccgctctgcagtttgcttgcaccgatgatgtctcaacaaatgtcgccaccgccgagaggctagttagagctgcacataaacagggtgcgaacatcattcttattcaggaactctttgaaggttattacttctgtcaagcacagagagaggagttcattcaaagagcttagccacataaggaccatcccacaatcctcaggtaaaataattgaaaaagtagcttctgtaatctgcttcttagtcactgcttgcatgccactcaatggactggaaccatattatgctgctgtaagggacagtttaaccatattattcttttttgatgctcatgatg

SEQ ID NO: 50494 - DNA, 331 bp, Glycine max
  Clone ID: LIB3107-066-Q1-K1-G4
ggaacaacaacatagttcatcctcttccttctttctccaccaaaccttaaaccttaaactcgcatataacccaatcaaatttgcctttagattctcatttcccgtcaaactatctctctctctctctctaggaatccaaaatattccaactaaacctttcttccttttcatggcagatcctacccgtctttcattcagttcaatctcatacctgtatgtgtatctctaatgcaatcagttgatgaatgagaagaggaatccaaaacgtcaaaaaccactgcctttcagcatgcctgtgacagactcaaatgatccgcagaattttgatgat

SEQ ID NO: 50495 - DNA, 268 bp, Glycine max
  Clone ID: LIB3107-066-Q1-K1-G5
agggtgctcgaatgggcgaggtgactcaaaaaatgcggggtttatgagaacaagggtggagctgttgttggtgctgctatcggggttttggcgcgtatccggtgtgaaacaaagaaaaagaaatgcttacgctacgatgatgttcgtatgaacgccgtgggactactaattctacataggcatactcgtgctggtcatatcgctggctacgctcgacactcaagctgatcttgttgtctttgcttcctttggagcatctcctcgatgg

SEQ ID NO: 50496 - DNA, 338 bp, Glycine max
  Clone ID: LIB3107-066-Q1-K1-G7
cgacatactgatgacagagagggaattgtctcaagttaatgatattaataacctcaaaattgtccatctcacgacaaacatccttaaagccaagatcccaagcattaccaaaaaatatgaatttaaatcgctcagtttggtcgctcaaagtatcaatgatcaaaatggtgaccaaataacgtgtgtcgcaaaaaccctactctcgaagtctttagcgaccgaatttcacttttgtcgctaaatagcgaccaaaacaatcaatcaaaagaaaagaaaattcggtaattgcatatttggttgctattttgcttgggattagttgcgcaaccgaaatattc

SEQ ID NO: 50497 - DNA, 333 bp, Glycine max
  Clone ID: LIB3107-066-Q1-K1-G8
ttgtaagagaacaccagagggggtttacggatatgcgctctgttgggaataacgagggacatgttatgcccacttcgtttcccggcatcaaatattacacaaaatgaacaatattggcatcaccatttcctataccaatatctgatcccaggagatcaagtgaacttgagatagcacggttctaagtatcgatgaaacttgaatactttttttcaaagaaatgccgccctgaaactcattctaagtgaaaagctcacggtgtgacaactctactcagaagtattagactaattatatgaggaaaggtgaccttacaggactattcatgtttat

SEQ ID NO: 50498 - DNA, 429 bp, Glycine max
  unsure (1)..(429): unsure at all n locations
  Clone ID: LIB3107-066-Q1-K1-H2
gggaaacaaaagatggcaggtttgggaatatggatggatttcgttagcctgtgtcttctgtctgtatcagtatcaggtctgctccaacgcctagagcaccctgtcaaagctgatggctcacttagccttatggtcattggagactggggaaggaaaggaacatacaaccaatctcaagttgccactcagatgggaagggttgctgcaaagttaaatatcgactttgtgatatccactggagacaatttctacgatgatggattgactggtatagatgaccctgcatttgaaatttccttctcaaaaatctacactgccaagagcctncaaaagcaatggtatagtgtgttgggcaaccatgactacaggggtgatgttgaagctcaattgaatccaatccttcagaaaattgatcctagatggatctgg

SEQ ID NO: 50499 - DNA, 389 bp, Glycine max
  Clone ID: LIB3107-066-Q1-K1-H3
gggataccataacctataattagggagcaaggataaaggacaatgcatggagcaatccaacctagaaacctactatatcaagcatattgatcattaattaatttgaaaagggatgaatagtgtgggaagtgcgcaaactttgccttaaacaattggttaattgaattgaaataattcccttttaaatcatgcatgttcattgtagctagttgctatcatgctgaaatttttatattttgatgctaacaggtgacaagcctacttaataattgaactcctctttgttgcatgtggctttgcttcctttttttttaatgtgttgagatcgatatacagtaggaccaagaaaaacaaacaggctacacacagtttagagaagccacttgcgt

SEQ ID NO: 50500 - DNA, 423 bp, Glycine max
  Clone ID: LIB3107-066-Q1-K1-H4
gacctccttctactttgttttaagcttagagagtttgattgaaatccccaatcaaaatccaaggtttttctgtttggggcttcaagttttccaagaggtctctcgtcaagtgtttctgaacttgttgagggaaaccatacatcccttagagaaaaaagacatgatcattattctctaccttcatacttgcatggatataattgtcaaatcacgagagaatgtcaaggttaactggatcattccacattatcatcaacaccccttctcgattcctaccattacctttgtagtcaatcacaaaagagtttttcagaccagcaatatccttcacacaattagtctcactataaggtttttttgtctccattaagaagactacattgggagcttccaaggtaaggagctttcacaaagctcaaacta

SEQ ID NO: 50501 - DNA, 423 bp, Glycine max
  Clone ID: LIB3107-066-Q1-K1-H5
ggttctagcgtgcgattgtttgttgttgtaactcgttcttcttcttttgttgttctgcgtttgtgtttgctttttctctcacctgaaaatgtcttgctgcggtggtaactgtggttgcggaagctcctgcaagtgcggcaacggctgcggaggctgcaagatgtacccagacttgagctacactgagtcaaccaccaccgagaccttggtcatgggagtggcacctgttaaggctcaatttgagggtgctgaaatggctgtgcccgctgagaacgatggctgcaaatgtggaccaaactactcctgcaacccctgcacttgcaagtgaggtgttgggagagcaagcttcaagcagagatagcccttaattaggaataatgatcaactattaatgagtagctaagaacttatgtattatgtctg

SEQ ID NO: 50502 - DNA, 316 bp, Glycine max
  Clone ID: LIB3107-066-Q1-K1-H6
ggttacactgggtgtcatgatcagtcattttgggtgtgttcttcagccctttactgtgtgctgtattcccatgatggcgcgaacgcctccctgagggcgctgacgtagctgctactgagtcagccactgcggctgcaacaagcactgttatgacatgaactatccttctatgtctaccgtccaaactcttggaaagggtgtctggctctgtgaacgcccaactgggggtggctgatatggacgtagtcattgagaacgggaggtctgactgtgtatcccgctgcgcgtgcaagcccttccactgcatgtgaggtcg

SEQ ID NO: 50503 - DNA, 200 bp, Glycine max
  Clone ID: LIB3107-066-Q1-K1-H7
ggagactagggtaaggtcaccttgaaacctaccatgtcaagcgctgttactatgtatgtagtttttgatggcagaccaaaccctaaatccgcataacaaccatctttaccaagcgatgaggaaaagctaatcctttgcttaaacacaagtctgattagatggatcacgacgaggttgacatggataacattcataataaa

SEQ ID NO: 50504 - DNA, 189 bp, Glycine max
  Clone ID: LIB3107-066-Q1-K1-H8
agtcttctatagcgtcacctaaataccttggcggtatcatggaaatccctattaacattcaaagattttctgtttgtggctttaagatttccaagacgtctctcgtgcagtgtttctgaacttggtgagggaaaccgtacgtgccttataaaaaaaagacatgatcactcactgtctacctttatactt

SEQ ID NO: 50505 - DNA, 317 bp, Glycine max
  Clone ID: LIB3107-067-Q1-K1-C3
accggcgcggaagacccgggccgacgcacgcgtccgaaacgcgtgcgcactgtagaggatgaagactgaggggcaagggcacgcgtggacttaggggtccttttgtgttaggtaaaaacaccaaatcattttaacttaaacaatgactacggtgggtatatattgtcgtcccttgtacttttctccgatgcaaatatctaatttttggctgtctagactatagctattagatctggagagatcggctgtcgaatcgggaggatatcattaatggcgagggatgagcgcttatatcgatcgcatattataacaatgtg

SEQ ID NO: 50506 - DNA, 386 bp, Glycine max
  Clone ID: LIB3107-067-Q1-K1-D6
ggaagacccacgccgacgcacgcgtgcgagacgactacacaagggggctcaaggcgttttgtctcttggtataatcaaagacactcgtgagtaatataaaaggccctgttttcttaattgatacaatattgcctgtatagtaatgccaagcgttcgatatgtgccctttaccaatgaacactgactattgtgccccacattcggacgtgaaatgcgcaaattggaggcttgctgtggaaacacacaacatctttggctttgagaccattcctgaagagtgcgttctaacaacaaatgaatacattcttggcgaacaatattgattaaacttccaaacagtttagcaacaggcttactttttttccaaagaccttgaaattcattcc

SEQ ID NO: 50507 - DNA, 272 bp, Glycine max
  Clone ID: LIB3107-067-Q1-K1-D8
ggcttaagggagtctgctgatcgatataactagggaccacgggattaatatgaagggccttgctttcttcgttcctacaaatttggtaacatgacaatgccatgcgtacgatatgttccctatccgaatgaacactgcctatcgtgcccttactcctaaggcgaaatgcgcaacttggatgcttgctgtgcaagcacacaacatgtttgtctttgagaccattcctgaagagtgcgccccatcaacataggaatacattcatggcgaacatt

SEQ ID NO: 50508 - DNA, 160 bp, Glycine max
  Clone ID: LIB3107-067-Q1-K1-H11
aacgggccgaccgacgcgtacgcccactcctccgtacaattactagaacacttcttaaaattccacattacattaaaaactagatgcaattttatagactaacacaacactctaactctccaaaacatatcaaaccaacaaaccaattacttctcattca

SEQ ID NO: 50509 - DNA, 225 bp, Glycine max
  Clone ID: LIB3107-067-Q1-K1-H6
gcccggaagacccacgcgtacccacgcgtccgcacacgcgtgagaacacgtcttataggacctcaaaagggaccctatgcatcgtgtgatgggttcctactgaaagatacactcttccattatcccgaaaggtagtgacggatgacttattcagacacctactgaccgctgcatatatatggacatctctttacgacccataaagatagacgggatggatcacta

SEQ ID NO: 50510 - DNA, 343 bp, Glycine max
  Clone ID: LIB3107-068-Q1-K1-A1
gcatctgatgactgataaaagaatcagacacatgcctgtcgtagatgaaaagggaatggttggcatggtgtccattggagatgtggttcgtgctgtggtgcgcgagcaccgacaagaggtggagcgcttgaatgctttcatacaagggggttattagatatgatgatgaaaatttctcaagggcactcaagctaatttggattatgtaataagcttgagtgcttgtaaatatgttatggccacagagccttcttgtttgctttcatgtaatttcagttttatggacattaacccagtggagtagcagcatgttaataataacaactggatgcagtttgaattt

SEQ ID NO: 50511 - DNA, 448 bp, Glycine max
  Clone ID: LIB3107-068-Q1-K1-A12
gcggaccagcggcgtacgttgctaaagcgacagattgaccttttccttgccccattacaacctgaaatgcctttttatcctcatggcttgtctttatgggttgattgtcaattttagaatcttgccaagtttatgtggtgctggttttcatgggtgctttgagggtaaatagtatcctagacacttgagagatggagtgcatatcttgtgaggctttatcacatttcattcttgagctgattaactattttgccatgattgggttgcttggatgatcttcactaatgtctagactctatggatctcttcatgttagatgttacccatttctttcattccttgatgttcattgagaaaaatgtgaatggtttttgtctttctctctttgatatcctaagattttgttcttttgttcattttttcccagcaattccatactgcaaaattt

SEQ ID NO: 50512 - DNA, 238 bp, Glycine max
  Clone ID: LIB3107-068-Q1-K1-A2
ctaccctcactaatataaaaataacatctatcttctatacattccaaaccatatctcattgattccatatcaagaattatctaattacatcattaaacttctcatgttacatctataacacgcactcaccaacctacaatttcaatttttttaaatatattatatacccttcttcaattaaaaaaaaaaaattgatttcatacttatcatccttcatccctttaataatacatacaaa

SEQ ID NO: 50513 - DNA, 357 bp, Glycine max
  Clone ID: LIB3107-068-Q1-K1-A3
gaagaaagtagaaaggatttggattcgaggctggctaggtgaagtcaacaaagaaagaaaaaaagctttctccgagaaagcttctgttcacgtcagggtccggggtaggcttcttcattgagattgggttggtgttcagtgtgaatgcatttccagtgagataagagaaaaggaacgaggggaagaagcgacttatattaagaaatattaatatacttaatttaatattaatgttcgggtacccccctccggctcgtagttgagaagagctttcgtttaggaaagggctaaatgggtgcgatccctctcgttgagagacaagggtctcctggagtagaaagcacatcctgtatctat

SEQ ID NO: 50514 - DNA, 174 bp, Glycine max
  Clone ID: LIB3107-068-Q1-K1-A4
atacgttgcggctgctagaacactactgaaaggagacctcatgtcatgcgacgctacccgctgtgtttatgctacatgtctaacacgcactctccaacctccgcggccgctctataggatccaaatttacgtaccctttcatactaaaaaataatacttttttagtgtctccta

SEQ ID NO: 50515 - DNA, 397 bp, Glycine max
  Clone ID: LIB3107-068-Q1-K1-A5
gaataaagtataaaggatttggattcgaggctggctaggggaagtcaacaaagaaagaaaaaaagctttctccgagaaagcttctgttcacgtcagggtccggggtacgcttcttcattgagattgggttggtgttcagtgtgaatgcatttccagtgagataagagaaaaggaacgaggggaagaagcgacttatattaagaaatattaatatacttaatttaatattaatgttcgggtacccccctccggctcgtagttgagaagagctttcgtttaggaaagggctaaatgggtgcgatccctctcgttgagagtcaagggtctcctgcagtataaggcacatcctggatctattaagccggcaagggttcagcattggctttcacgaccgcaa

SEQ ID NO: 50516 - DNA, 361 bp, Glycine max
  Clone ID: LIB3107-068-Q1-K1-A6
aaggtaacagcatccagtggaaactaagaggagcttaactttttggttaacttctacgttcacgaatataaaattaagttctatcttctatgcattgcaaaccattgtgcattgatgccatagcaggaattatgttattacatcatttagtttctcatgttacatgtctagcacgcacgcaccaacctgcaattgcaatggtttgaagtatatgatggacccttgttagattaaaaaagaatagatgatgtcatacttatcatccttcataccgtttaagatacatagaatgctgaacgacgttttgctttatagatgaatgcctgatgatgttaaacagatgccaataacacataaaatc

SEQ ID NO: 50517 - DNA, 54 bp, Glycine max
  unsure (1)..(54): unsure at all n locations
  Clone ID: LIB3107-068-Q1-K1-A8
agacctcaggtcaggcggggctacccgctgagtttaaacacannaaataaaatg

SEQ ID NO: 50518 - DNA, 352 bp, Glycine max
  unsure (1)..(352): unsure at all n locations
  Clone ID: LIB3107-068-Q1-K1-A9
gcggagccacgcgtccgccacgcgttcgacgactactttatgactttataatgtcacgtctcctnataagaccactgacctgttctaatggcaaaaaacaacttaatttttctgttcctttaatacttcataaatattcatttgctataacactacaaaaagttacaactcctagaatactacatacaatacacctaatttcaaacaacactacactctttgtttaaacaccacaactaatccgaataatacaataaactctaccactttaaatatatccatacttacctacactctcattctactctataatttttttatacattcatataaattaaacttactttatacc

SEQ ID NO: 50519 - DNA, 402 bp, Glycine max
  Clone ID: LIB3107-068-Q1-K1-B1
caacgcagagcgtgttcttgagtcaattcaacttctcttggatcttcttgaggcccctgacccttgcacccttgagactttccttggaagaattcctatggtcttcaatgttgtcattctttctccccatggttactttgcccaagataatgtcttgggataccctgacactggtggccaggttgtttacatcttggatcaagttcgtgctttggagaacgagatgctccatcgcattaagcaacaaggattggacattgtacctcgtattctcattatcacccgtcttctccccgatgcaatcggaactacttgtggccaacgtcttgagaaggtgttcggaaccgagcactcccacattcttcgagttccctttagaactgagaagggaattgttcgtca

SEQ ID NO: 50520 - DNA, 235 bp, Glycine max
  Clone ID: LIB3107-068-Q1-K1-B12
ggttctagtgtgtggttgtggggtgttgtaactcgttcttcttcttttgctgttctgcgtttgtgtttgatttttctctcacctgaaaatgtcttgctgcggagagcactgtggttgctgaagctcctgcaagtgcggctactgctgcggaggctgcaagatgtacccagacttgagctacactgagtcaaccaccaccgataccttgttcatgggagtggcacctgttaaggct

SEQ ID NO: 50521 - DNA, 310 bp, Glycine max
  Clone ID: LIB3107-068-Q1-K1-B2
cggaacgaccgacccgaccgacccgtccatacacacatacaaccacgactattaccttttctaaaagactacacaacttcggggtgagggggttccaattaacgactatcattctatatctaatataatactacaaaaatgtacacttaactaaaatcatgattaggcattaaaaaatattcgaattaacacttaatacccttagtaagcagcttctaccaattttacatgtcctacagcagaatctacttagacaaatcttctcatgttacaaaagatctacgtcacttcatgatctgcattacacatt

SEQ ID NO: 50522 - DNA, 424 bp, Glycine max
  Clone ID: LIB3107-068-Q1-K1-B3
caaaggcaggactaccttgtctaaacatatattcaactgcggggcgaggttgctcccatttcccactagcagtcttgaataatatattaatagaaaaatatacacttaaataaaataatgattaggcattgaaaaataattgtattgaaactaactatacttaagaagcaacagtaacgaatattaaatgtcctacagcaaaagcttgaataggcaaatcttttcgaatattaggaagatttgtgggcacttcaatgactggcatctggaacatttttaagaactctttctcctgcaatgatatatatggtcatcaagaactcataatagcacaaattgtaatagtaatgacaactcaaatgaaatgtcaaaactatataaatctttacttctgttttggcagtaccagtcattcctgacaact

SEQ ID NO: 50523 - DNA, 311 bp, Glycine max
  Clone ID: LIB3107-068-Q1-K1-B4
ggaaagacccacccgtccgaaccgtccaaaaaacaacacaaaggcagacttaacttgtctgaacatatattcaacttttggtgcatggtgctctcatttccaacaatcccattttaataatatattaatagaaaaatatccacttaaataaaataatgattaggcattccaaaatgattgtattgaaactaaacatccttatgaagcaccaactacgacttttaaatgtgctacagcaaaagcttgaatacgcaaaattattctaatattaaaaatacatgagggcactttaaacactgatatgagaaaca

SEQ ID NO: 50524 - DNA, 343 bp, Glycine max
  Clone ID: LIB3107-068-Q1-K1-B5
tgaggcatctttaaggactgaggatccacattatcaagataaaagaatggtggctcaaagaaatggaaagatatcacttcaagtatttcatgtatatgctgggaaggaaagggaagctgtcttagatatgcttcgctatatgcgtgtgtgctatatctcatatccttctgagacggaatctgtacatcttctctcaaagtccattctgtcctgaacgccattgtatataacattctgcatcggatcatgtgcctgattactttaaggcacagtatgactggctaccctacaacattggctgaaggtgaatgtatgctgacagatgataatgtgaatccaaaca

SEQ ID NO: 50525 - DNA, 418 bp, Glycine max
  unsure (1)..(418): unsure at all n locations
  Clone ID: LIB3107-068-Q1-K1-B6
caggacgaccttgtctaaacatatattcaacttctgggcgaacttgctcccatttcccacgagcagtcttgaataatatattaatagaaaaatatacacttaaataaaataatgattaggcattgaaaaataattgtattgaaactaaagatacttaagaagcaacagtaacgaatattaaatgtcctacagcaaaagcttgaataggcaaatcttttcgaatattaggaagatttgtgggcacttcaatgactggcatctggaacatttttaagaactctntctcctgcaatgatatatatggtcatcaagaactcataatagcacaaattgtaatagtaatgacaactcaaatgaaatgtcaaaactatataaatctttacttcttgtttggcagtcccagtcattcctgacaact

SEQ ID NO: 50526 - DNA, 398 bp, Glycine max
  Clone ID: LIB3107-068-Q1-K1-B7
cctttttaaacatatatccaactgcggcgctttgttacttctatttgccacttgcagtctttaataatatattaatacaaaaatatacacttaaataaaataatgattatgcattgaaaaataattgtcttgaaactaactatacttaagaagcaacagtaacgaatattaaatgtcctacagcaaaagcttgaataggcaaatcttttctaatattaggaagatttgtggtcacttcaatgactggcatctggaacattcttaagaactctttctcctgcaatgatatatatggtcatcaagaactcataatagcacaaattgtaatagtcatgacaactcaaatgaaatgtcaaaactatataaatctttacttctgttttggcagtcccaattat

SEQ ID NO: 50527 - DNA, 418 bp, Glycine max
  unsure (1)..(418): unsure at all n locations
  Clone ID: LIB3107-068-Q1-K1-B8
gacaccatatgaaggaaagtttcgtgggttttgggtacatgccttcttcggtttcacaaatcccatcttcgttgtttcaattttcctctcgaccacactttcctttttgcaagtaagtagcaccaagaggcaggaactagagagtaacaacaaattcaatgtcaaactcaaacatcacaagttgtgatagttggagcttcactacagagaataataataatggagaagatgcagcagcaactgttaaacagcaattggagatgcttggccagctttatagtccaaattcaaacacttcaaccacaacaaataatagcaatggtggctcaaacgcagattcacaaccacctgctaagaagaaaagaaacctaccaggaaatccaggcatcntttcttttttctttttcccttttctttt

SEQ ID NO: 50528 - DNA, 392 bp, Glycine max
  Clone ID: LIB3107-068-Q1-K1-C1
accgagcgaccacgcgttctacgggtagcaaagacgacatttgggggttatataacacaaggtcttccaagagtagaggaggtattagaagttcgttcgattgattcaatatcgatgaacctacaaaagagagttgatacttggaatgggcgtataacaaaaattcttggcattccctggggattcttgattggtgctgagctaacgatagcgcaaagtcgtatttctttggttaataaaattcaaaaagtttatcgatcccagggagttcacattcataatagacatatagaaattattgtgcgtcaaataacatcaaaagtcttggtttccgaagatggaatgtctaatgtttttttgcccggggaaactaattggattgttgcgagccg

SEQ ID NO: 50529 - DNA, 291 bp, Glycine max
  Clone ID: LIB3107-068-Q1-K1-C2
tatcggggttttttatgtatcaacacctcctgactcattgatgcattaacaacaccgctcaaacactattcacaaaaaactctctcccaaagtaccaaactctttcctaacagaaacttaccccaattctatcaagatttagatattcagcacagctcacattttagaaaacatactatacgctcacaaagactcattctacatactcataaaactcccattccagcatagacaagatcatatgttgcacaaggaaaaacaatactggtccaattctatacaaaccttctt

SEQ ID NO: 50530 - DNA, 340 bp, Glycine max
  Clone ID: LIB3107-068-Q1-K1-C3
tttagagtgctttctgcgaaaaaaccacaaaagggaacgggtgaaattcgaccactctagggcttccttccattccttctcaacatagctagcctattcttctttaaatgaaggcctttgattcaatataacttccgattttcatcactcactattctcctaatacccgttatcttcccagcttcatattttatacctacatttcggtatgctcacctgttttcttgaccaactgccccagactgattgccattcattattacagctcacattacatttcaaaaccgctacaccatttcacctaacataaacaagatattgtgtgtcattatcatacacc

SEQ ID NO: 50531 - DNA, 369 bp, Glycine max
  Clone ID: LIB3107-068-Q1-K1-C4
ttcatacggcaatattaccatctgaaacctgtgtaaaaatataatactaatagttatgtaaaaactattaacctgttcctaaagtacatataattatttttaaaagaaaagaaaaaaaaagctgagagaatggaatattattagtacaaattatatgaagcaattagtatatctcaatatttagaaatatggtaagtgaatgaaactcaataaatgcgtaccttagtcgaaagtcaaaaccattcaaagccctcaaagcagcaccaaatatctgatgccacgtgttacgacctgtattcaatcattagaaatgttcgaattttttacatcttatacacgagaagttaaataagaattatttacatataa

SEQ ID NO: 50532 - DNA, 409 bp, Glycine max
  Clone ID: LIB3107-068-Q1-K1-C5
attctaaccttgtctgcatgatgtctgagagcggccttgtggtatgccttcttgatatctgttgctgtatcagctgatttgattcctctgatattgacattgtaagaggttgggtctttaataaccttacggttctgaatgaggtaaggcacattgcagagtgtgtgaaattgagagagatgttgaataacaagaaaatagaagatgagaaaacatcttctagctatctttatcttttggtttttggcatagaaccggatttcaaacttagtagattttgagtaagaaattgattgtttgtaagtatgaaattgctatggaaaacagtttttaaaaccaaaaaatgagaatgaaatcaaagaggcctttaatgcttcactcaaagggaacaaaataaagggtcccaaaa

SEQ ID NO: 50533 - DNA, 337 bp, Glycine max
  Clone ID: LIB3107-068-Q1-K1-C6
ggctttttctacatttccctttcctgaattcctcttctactactcacacctctcttttctctcccactctttctccctcctcaattacttctccttttttttctgattttttctttctttctttgaaggtttcgttttgcaggtcgctccaatggggaaatcctcctcttcgctcaagaagaaacgttctaagaaattatcgaaggccaaggcaagcagtaaaagtaagagaagtaggaaaagtaaatccaagaaggttcgtcgccgtaaggtttctccttctagttctgactatgatgattcaaaaagttggacacattggcttcctctagttctg

SEQ ID NO: 50534 - DNA, 340 bp, Glycine max
  Clone ID: LIB3107-068-Q1-K1-C8
gctgcgcgaacacgccggtgggggatgacaaccaatgggatcacgacttaaataccatcggatgttggggcattgacggacatgtgctcaccttaaacctccatgaaaaagtcaatatggagaaccgtgctctctctcagctccttctcgggatgggcccaaagcttgtcaacaagcatgacggatatagaagaaccgaggatcgtacctggatcgatgtgtgaattagcgtataataaatataagcgatggcaacggtggtgccttgtgacactcagcatagcctgtcttatagtagggcaatctgctattgttatccttggcagattgtatcatgatc

SEQ ID NO: 50535 - DNA, 160 bp, Glycine max
  Clone ID: LIB3107-068-Q1-K1-C9
cccacccgtccacaccgatactataagacttcaaattgcttcaccccttacaggcaatcgaattcttatcaatgcgcgccactactaatctcttaaacttacttactaaaacccccacagcaaccctttttcttttttaacccctaattgcaatacaact

SEQ ID NO: 50536 - DNA, 281 bp, Glycine max
  unsure (1)..(281): unsure at all n locations
  Clone ID: LIB3107-068-Q1-K1-D1
cgaccgacccgtccnncacaacattcaaagacgacatttaaagacttataaacgcaaaaaaacaaaactggaaaacttgtaaaatttttcctttctataccatccaaacatactatctcacccattcaacatcttacctcttttatacattaacctaataacaataaacctgccgaaatttaacaacaacaaatctaataaaaccctcaacatacccaacttaatatccttacaacacattaacctatcaacaccagtcaaattaaccattaaacccaaac

SEQ ID NO: 50537 - DNA, 340 bp, Glycine max
  unsure (1)..(340): unsure at all n locations
  Clone ID: LIB3107-068-Q1-K1-D10
tgccgtacaaccactcagatttgcggtctcaaaacgaccacataangggggacagagttaaaatggaactggatccagagaccatccangtcaaaatgcactggattatacacatccgacaaacctactactactatccatatacacgatctctttcactataaccacagcaccaagcgtttatcgagaagaagctaaagaactttgacaataagcttacgacatagcttatcacgcctttaatggatacatggaccacgctttcctcctacattaattgacacctccctcctgcacaagacataatacgcttgcaagctatgcaataaccttgattgac

SEQ ID NO: 50538 - DNA, 316 bp, Glycine max
  Clone ID: LIB3107-068-Q1-K1-D11
catcaaaaagtgttgagaaactattcctcacttttttatgaataatttaaatttgtcaacattatttatcacacaatattcataattaattatttgttttgataataaatagtcacattaaatattatattactatttattataataacccctgattgtatgtgatttaattttatgaataattaaattgctcaacattatttattacacaacattgatatttaaaaatatttttataataaacaatatcctttaatattatattaatactttcggtccttttataaaaaaaaaaatatataggattttttatttt

SEQ ID NO: 50539 - DNA, 259 bp, Glycine max
  Clone ID: LIB3107-068-Q1-K1-D12
cggccacgcgaacaccacctataagacttacaatcgaggacacaaacaggggtttagaacaaatgccaactacactaatatctacaacaactcacattacattaaggaaccgatacacgtttaatatactcatcaaatcgaaaggcatatagtcacttactcagcgacaataatctcatgctcttctaggaagaacaacccaaataaaacaactacatacaaaaatctgaaatggagaggttgctgcaacataatcaac

SEQ ID NO: 50540 - DNA, 204 bp, Glycine max
  Clone ID: LIB3107-068-Q1-K1-D2
tatcgagatacctaaacactctcataaaaaagactattgtagcttttttcatcccaaccggctcccaacctgcccagaacactgatcttcccagctcaccgccagtctcactcactcaccaagccttcttctacgtctacaagagccactcgcattctctcaagatttcaatacattcttcccactccaacaaccgcatatcct

SEQ ID NO: 50541 - DNA, 328 bp, Glycine max
  Clone ID: LIB3107-068-Q1-K1-D3
acaacaaaagcacccccctgatatttgtaaactttaaattactctcccccattcacatttcaaatcctcctttctttcatcacatcatacaacctcacaaactcctcaatcattcatacactataactactaacaaataaatatcaaccttccttctcccattcaaaaaccaaatctgctacaaactactttcaataaacactagcctatttacttaaccaacccaatcatattaaaatcaatgtcaaacaaccttatcttaataatcatcccaacatccaacaaaaacatttcgtatcatactctccttcccacactattcaaaaac

SEQ ID NO: 50542 - DNA, 248 bp, Glycine max
  unsure (1)..(248): unsure at all n locations
  Clone ID: LIB3107-068-Q1-K1-D4
ggaacaggaaaatcggggacatgtaactttatacaagattctttctcgactaaatancctcgatcccaccaatagcaacaaacatattaattgcatccgtatacacgatcccattttacataatcacatcaacaacaggtcttacttgtaccagcagatcacatttactatcatattactacaaaactttcaattgcatacaccagattcatcatctaagctttctattaccacaaaggcacatctca

SEQ ID NO: 50543 - DNA, 336 bp, Glycine max
  Clone ID: LIB3107-068-Q1-K1-D5
aactgcagctagaagacaacaggagggcccagggtgctgaggacggcataaaggtactgtagcgaaagaacaacttataggcacgtattatcatccatacaacagaatacataaaccttatacaggtgatagaatgttgcacaagggggaagagagagagagaatgtgaggcacaatgaataactgcgatgggtgagagattgcgtgggataaacactagacgactctaggtcgtaagtgagtgttttagacataaaagtaatcacacatgtaagtgaagatctaaccaacagcacatagaagtgataagaatcaactgatcagtgaacgggattt

SEQ ID NO: 50544 - DNA, 335 bp, Glycine max
  unsure (1)..(335): unsure at all n locations
  Clone ID: LIB3107-068-Q1-K1-D6
ggaatggacgtangaaggaagtgaattgaaggtgcagtgagggcaaaatggaagggattattcagatccgatcagtgctgctactactatccataaccatggcatctctcactctggctgtggccgatggcgtttctcgagaagaagctaaagaacttcgagatgaggttaaggatatgttttatcacgcctttaatggatacatggaccacgctttccccctcgatgaattgagacctctctcctgcgcaggacatgatacgcttggtggctatgcgttaaccttgattgactctttagacactttggctttacttggtgaccgccaacgattc

SEQ ID NO: 50545 - DNA, 387 bp, Glycine max
  Clone ID: LIB3107-068-Q1-K1-D7
gacaaaacaaaactgacaaaagaagtgcagttcccggatggcggtaatctttctttcaagctccgcaattcttcttccaagtcttgctttctttctcacattatttaaccttgcaagttccgaatcattcatcggcgtgaactacggacaagtcgctgacaacctgccgccgccgtcggcgacggcgaagctgctccagtcgacggccatcggaaaggtgcgtttgtacggaaccgacccggccataataaaagctctggcgaacacggggatcggaatcgtgatccgagcggcgaacggtgacattccggggctagcctcggaccctaacttcgcgaaaacgtgggtgaacaccaacgtcgtaccgtactaccctgccagcaacat

SEQ ID NO: 50546 - DNA, 408 bp, Glycine max
  Clone ID: LIB3107-068-Q1-K1-D8
gtggtcatgatgtggctcttggtttgtttcatgagttagttgattctttatgcaagattcttcctggtggtggagcctcgatctcacgtatggcaacaaacatattaattgactccgcatacacgatcccatgttacataatcacatcaacaaagggtgttgagggtagtgcaagagctgtgttactatcatcttgctacaaaactttcaatttcagacacctatatatgtatctttgttgtcttttaccttagaggcacattttgaaggttaattagaagatattgtctgcaaccctaacgaaacccacgtaattctgatccctcgctcagacccgatcggactcatctaattacacttgtatgcatatgtagataaaattgacgagggttgatataagtagttaat

SEQ ID NO: 50547 - DNA, 367 bp, Glycine max
  Clone ID: LIB3107-068-Q1-K1-D9
tacaacaacacatacgggctgttcctaaaatacctcataatgtggaacatggttaagatggaagtgaattcaagattcatcctggtcaaaatgccatggatcttacatatccgacagacctattactactatccatatacacgagctctttcactataactagatccacatggcgtttctctagaagaagctaaagatcttctactataagttaaggatatgtcttatcacgccttaaatgtatacatgaaccacgctttccttctcgatgaattgacacctatctcctgcgcaagacatatatacgcttgatggctatgcgataaccttgattgactctctatacactcatactatacttggtgac

SEQ ID NO: 50548 - DNA, 375 bp, Glycine max
  Clone ID: LIB3107-068-Q1-K1-E1
tataaggggtttaagctagtagaccaatgccccagatcaaattgtaatattatttttctaacattctctctccataccatttcaacatttttaacaattttatatatcaatatacattcctatttacctcacagtcaatgaacaacctacacccatacaaactatgcgaccaaactttctatgctgccctcaacactccccttgaacaatacccacactactaggttgccttctaaacatccaccacgaccatcttcgaaatttctatcctaaacatcaccaccaatctctacaacaactaccataagatctatagtaacacctccataaacatatactccacctaaaactaaattcaacataaatcttacaact

SEQ ID NO: 50549 - DNA, 272 bp, Glycine max
  unsure (1)..(272): unsure at all n locations
  Clone ID: LIB3107-068-Q1-K1-E10
ccacatatagacttcactccactctaccacacaaagcttgctgtaccatttagctatgactcatgtccanactctatcacaattgagaaatggctacagatcttgatgttcaagaccaaggaagagagtactcttccaaagactaccatgaccctcctgcagcacctttgttcgacccacagcagctcacacagttcttcttctatcaagccctcatcactgagatgatagaaacacttctgtttctttctgatactaccctcaccatcatt

SEQ ID NO: 50550 - DNA, 295 bp, Glycine max
  Clone ID: LIB3107-068-Q1-K1-E11
tatagggactccttttacagagagaaaagagaggattgtgctttctttagagaggaatagagccaaaaaaattggatttttttttggggtgttccaatggttgaactggaaatccaaagaagggtgtgagaaaaaaaaattgcatcttcttttggtgggtgtctctgaaactatgatcttgtgaaaacccacaaaggaaaccttcagtgcgcgttggtagatagatagagagagattattgctgttgggatattctgagagccgctgattgagaaatgaacggtggtgatgacgt

SEQ ID NO: 50551 - DNA, 297 bp, Glycine max
  unsure (1)..(297): unsure at all n locations
  Clone ID: LIB3107-068-Q1-K1-E2
cccgaccgaacggttccacaagacgtcagaaggggctttatgatcttgctcttgattagtaacatgagttattctgatctttattcaagatacttccttgtganntaacctccatctcacctatggcaacaaacatattaatcgactccctatacaccatcccatactacatcatcacatcaacaaagaatgttgatggtattgtaacatctgccttactataatattactacaacactttcaatttcagacaccactgtatgtatctttgttgtctttcaccatataggcacattt

SEQ ID NO: 50552 - DNA, 395 bp, Glycine max
  Clone ID: LIB3107-068-Q1-K1-E5
ggcagcgcttgagaccaagccccgctcaaccgccacaccactctctctgctcttcttctacctttcaagtttttaaagtattaagatggcagagacattcctatttacctcagagtcagtgaacgagggacaccctgacaagctctgcgaccaaatctccgatgctgtcctcgacgcttgccttgaacaggacccagacagcaaggttgcctgcgaaacatgcaccaagaccaacttggtcatggtcttcggagagatcaccaccaaggccaacgttgactacgagaagatcgtgcgtgacacctgcaggaacatcggcttcgtctcaaacgatgtgggacttgatgctgacaactgcaaggtccttgtaaacattgagcagcagagccctgata

SEQ ID NO: 50553 - DNA, 397 bp, Glycine max
  unsure (1)..(397): unsure at all n locations
  Clone ID: LIB3107-068-Q1-K1-E8
tggcgtnagaacacttcagaaaggggttctctggcttacagctccaccatcttcggggtctccggggtcgatatgcacgacatgctctcctctatctaaacgtttccacccacttaccttccgatctttccacccattctgatactcatgctaaacaacaccagcgctatcataggcaattaccatatcacatcactgaattcggtgctattcaacagtgctcacctgagcattgaagtcatatacgagctttgtagcaattatcccaacagaaccatccttaaaggttatactttgactgaatccaccaatgtttgcgactacaccgactccttgtatgagattacaaggtacaggacagatggactattgtctcccgacacccaagctatgatcg

SEQ ID NO: 50554 - DNA, 295 bp, Glycine max
  Clone ID: LIB3107-068-Q1-K1-E9
atttggaaaaattgtttcttgcactgtgaagccagagcaagaacccctataaaaggagaatgttggtgttcctgtccctgaaatttcataaccaaaagaccacaacgctcgaagtaactgcatgggaatttaccaaagttctctgtctggggaaaatgaaaatgatgtgcctctgaatataactgacatttcggtacataatttctggaggcgaggcaatgagaatattttttttaaagaaataactcacttccacgccatacaactcccgccaaaacatttatacaaatttttt

SEQ ID NO: 50555 - DNA, 393 bp, Glycine max
  Clone ID: LIB3107-068-Q1-K1-F10
tattgggtttccttctataactttatatcaagccaactgttgcatagaaagtgctcatgaaaaaaatcaagtctataatttcatatcatttcaaaattgatatttcattacatcactttatttcgaaatgttacttaaatatataagttttctaccaatatattacatgtctatgaataaacttcgtaccccattgctcagaggctctttgctatgcgaaaatctggttgaaggatattgtacgcagccttaccctttcatattcaaagaagctagttcctgattctaacccatgaccaacaaaccaccattgcacaactttaccagtacaccacggctcaccctcagattacatgtttatcaatgtctaaattatttaaaatctggtataca

SEQ ID NO: 50556 - DNA, 364 bp, Glycine max
  Clone ID: LIB3107-068-Q1-K1-F11
tagtgtaattatgatacttgcgggtgataagggtgtttgtacggtcacacacagttatatggtaaaactgaacaatggtttctctttctctttctctgtctgcttcttcactttctctcgtttcaatcgaaaaaaatcatgggcagaaaattcttcgtcggtggcaactggaaatgcaatgggaccactgaagatgtgaagaacattgttactactttaaatgaagctaaagtccctgtataagatgttgtagaagttgttgtgagccctccttttgtgttccttccttttgtaaaaagattgctgcgccctgatttacacgtcttggcccataattgttgagtttcgaaaggtggtgcttata

SEQ ID NO: 50557 - DNA, 81 bp, Glycine max
  unsure (1)..(81): unsure at all n locations
  Clone ID: LIB3107-068-Q1-K1-F12
tacggctgctaggggacgagggaatgtttcagctgctaaaagaccacanaaaggttctgctgccataagacgacaaaagga

SEQ ID NO: 50558 - DNA, 295 bp, Glycine max
  Clone ID: LIB3107-068-Q1-K1-F4
tctcggcaacaaatatccctgctctttgataaatttaaaacgcaccaaaacgccattcttgttataaattgcaaaaacccataaaccatcaactctcttaacgcataatgcgcccaaagccattaaacctatgtcacacctgcctgcgtgtcacacatctaattcccaacgcaaacatgtaacaatctttctgctcagcgaatatgctgacctcccacaatcacccccctccaacttcgttgaaatctaagatcatggcctactattccaacataaaacccagcattaaccactc

SEQ ID NO: 50559 - DNA, 280 bp, Glycine max
  Clone ID: LIB3107-068-Q1-K1-F5
acgcgtccgaaccgatgaaacgacagactgcggttctagcgtatctgaccgctgagagtcattcgtttacttcgctatcttcttcttttgttgtttgtagtgtatgctttttctctcacctaaccatgccttcctgcgcgtgcaactgcggctgcgcaagcgcctgcaagtgcctaaactcaatgcagtggctgcaagatgtacccagacttgctctacaccccgtgaaccaccaccgataccttgctcatgggagcatcaccagttaaggctcaattct

SEQ ID NO: 50560 - DNA, 349 bp, Glycine max
  Clone ID: LIB3107-068-Q1-K1-F6
gatcactggttcttgtgaatctgatatttacaggtatggtagagactctcgaacatgctctgctttcattcacccttgttgtgaaacagattattagctgctgttacaaaatggatgctactacacccaagtattccaaggtctggtttgatgaaattgtgaaggaactctcttactacttcaagatagtacgatacaaccctgacaagatcccttatgttactatctctggttttgacggttacaacataattgaaaagtccacaaacctttactgacacaagggtccaaccctgcttgatgcactttacctgattattgatcccaagaagtcctctgacaagcccct

SEQ ID NO: 50561 - DNA, 329 bp, Glycine max
  Clone ID: LIB3107-068-Q1-K1-F7
tcaaaaccaaaagctatcaagggtccttgcgaagcaacacatggcttctacagacaagcatggctacactgaatacataacatcatcttcaactccagctcctgcgggtgttgattactttaaatttgatgttatcctaaggattgtgttatttgcagcatcactggtagctgctgtggtgatcgtcactggtcatcaaacagaggttattcttgtgccacagcctgtgccatggccagccaagttcatatacacaccagcctttgtgtattttgtagctgcattgttcgttactgtcctttacagtatcattacaacacttgcattac

SEQ ID NO: 50562 - DNA, 419 bp, Glycine max
  Clone ID: LIB3107-068-Q1-K1-F8
gactccttctataactttgtatcaatccaactgttgcatagaaagttctcatgaaaaagatcaagtctataatttcatatcatttcaaaattgatatttcattacatcactttattttgaaatgttacttaaatatataagttttctaccgatagattacatgtctatgaataaacttcgtaccccattgctcagaggctcttcgctatgcgaaagtatgggggagggatattgtacgcagccttacccttgcatatgcaaagaggctgtttccggattcgaacccatgaccaacaagtcaccaaggcacaacttaccgctacaccagggctcgccctcagattacatgtctatgaatgtctaaattatttaaaatttggtatacatgaccattagtatattatcgtataattcaatag

SEQ ID NO: 50563 - DNA, 379 bp, Glycine max
  Clone ID: LIB3107-068-Q1-K1-F9
gactccttctataactttgtatcagggcaactgttgcatagaaagttctcatgaaaaagatcaagtctataatttcatatcatttcaaaattgatatttcattacatcactttattttgaaatgttacttaaatatataagttttctaccgatagattacatgtctatgaataaacttcgtaccccattgctcagaggctcttcgctatgcgaaagtatgggggagggatattgtacgcagccttacccttgcatatgcaaagaggctgtttccggattcgaacccatgaccaacaagtcaccaaggcacaactttaccgctacaccagggctcgccctcagattacatgtctatgaatgtctaaattatttaaaattt

SEQ ID NO: 50564 - DNA, 277 bp, Glycine max
  Clone ID: LIB3107-068-Q1-K1-G2
accaaaccaactgtgcattgaaaacttttatcaacaaaatcacccctataattccataccattccaacattcataatcccttacatcactttattttcaaatcacacttaaatatataattcttctaccaacagactacatttctataaataaacttcgtaccccaccgcctatacgctcttcgctctgcaaaaaaatcgccgacggatattgtacccacccttacccttgcatatgcaaacaagctctttctcagattcaaacccatcactcaaca

SEQ ID NO: 50565 - DNA, 292 bp, Glycine max
  unsure (1)..(292): unsure at all n locations
  Clone ID: LIB3107-068-Q1-K1-G4
ccacaaatttnaaactttacttactganacaaaaaagtgctttttgcctatgttatacagcccnngtacccaaaatatttattaaatataaatctctattcatccaacatatgaatgtaagtcggaccttcctatcataatgaaccaattatcaaaaacgacacaaagttacattactagaatgtgggccatactacaaacatattcttaataccatatgttattcgccagtttatcctgcctctacatcctgtttactaattcttataattttcttgataagtacaaattt

SEQ ID NO: 50566 - DNA, 433 bp, Glycine max
  Clone ID: LIB3107-068-Q1-K1-G6
gacagaaggggatgtcatgttttctttcactctctctccaattagggttttcctgattcccaatgccttctaattctctctgcctattcgcaaccgttcctactccttcgatcactcttcgaatttggtttctcgttcactctcgctcttcgattcggagaaaatcgggcgctattgcttgacactggtttcgtgccatgccgcctagtcgtagaaagggcggaaagaaaagcgccggcggtgccgccgcctgccggcagtttaagctcggcgatctcgtgctcgctaaggttaaggggttccctgcttgcctgcgacggtgagtgagccgcagaagtggggttactctgctgatcggaagaaagtatttgtttgcttctttggagccgccccacaaatagctttctgcaatcctgccgatgttgaaagtatt

SEQ ID NO: 50567 - DNA, 399 bp, Glycine max
  Clone ID: LIB3107-068-Q1-K1-G8
gaacgtcacttactgagattgaaaatggcttttacgcctatgtaatacatttggggtaagcaaaatgttgatgaaatataaatatctattcgtccaacatatgggtgtaagtgggaccttcctatcataatgaaccaattatcaaaaacgaaaaaggtatacattttagtatgtggtttatactagaaacatattcttaatagcatatgttatttgtcagtttattttgtctttttatcctgttttctaatccttttaatttttgtgagaagtacagatgttgttgttgcacctccctttgtgtacatcgatcaggtgaaaaactcaattacagataggattgaaatttctgcccagaattcttgggtgggaaaaagtggggctttcacgggagaaatc

SEQ ID NO: 50568 - DNA, 251 bp, Glycine max
  unsure (1)..(251): unsure at all n locations
  Clone ID: LIB3107-068-Q1-K1-G9
ttttgaacgtcacttactgaaatggaaaatgtctttttccctatgtaatacagtccnnnntaancaaaatgttaatgaaatataaatatctattcgtccaacatatgggtgtaagtgagaccttcctatcataatgaaccaattatcaaaaacgaaaaaggtatacattctattttgtggcctatactacaaacatattcttaatagcatatggtatttgtcaatttatttatgcctttctatcccgtttt

SEQ ID NO: 50569 - DNA, 256 bp, Glycine max
  Clone ID: LIB3107-068-Q1-K1-H11
aagacgcctgaactagattacaactttatggggtgctatcactattcacgactgatgcacaattacacaggtgcaaaactatcaatggtctaaaatttcttctcttcaacctgactcatctactattctctctctctctctgtaactcaccatttttttttaaaagaactaaacagaaccgtccatctctctcatttcttatatttcacggcatatcttcaaccatacctttccatctttttatcttgctatttca

SEQ ID NO: 50570 - DNA, 164 bp, Glycine max
  Clone ID: LIB3107-068-Q1-K1-H12
aaacgacgttttgggtctctttttttgcgctatattttagttcaaagattaatataatatgctaacagcaaatctttatttctaaattctgattttttttttttacaaatgaacagaaattaaattcttttccattcataatttttttttgcataagttctgac

SEQ ID NO: 50571 - DNA, 294 bp, Glycine max
  Clone ID: LIB3107-068-Q1-K1-H2
tcattaaatctaaatatctatccgtccaacatattgatctaacatctaccttactatcataatcaaccaatcatcaaaaactaaaaatctatacattatactatttttcttatactataaacacattcttaatatcatattttatttcacaaactattttatctttttaaactcctatctaatccctataattatcgtcaaaaatacaaattttccttcttcacccttcctttatacacatcaatcacctcaaaaactcaattacacatattattcaaacttatttccaaaatt

SEQ ID NO: 50572 - DNA, 261 bp, Glycine max
  Clone ID: LIB3107-068-Q1-K1-H3
aaacaacataatttacgatttttacacgctccccaaactttagacatttgttaatttcataaaaccacagcccatctttatttcataaactcttaatacaatctaatccaaataattcatcatcaaattattctccaatcttaaaatccacaacaacaatgattaaaagatttctcaacaatctcctatctctctcactctcaatcaccaaaaaatgtcatcacacttaacttccccatctcaacattcactattaccatt

SEQ ID NO: 50573 - DNA, 306 bp, Glycine max
  unsure (1)..(306): unsure at all n locations
  Clone ID: LIB3107-068-Q1-K1-H4
tactttaagggattttacattttcnaaactcatatgttacatttgttatcttttaaaaaccanagagcaaaacattnccctgctttctatttttttcactcataaaagtgacgtataaaataaaatcacaaaaaatatacagcaaatatcataattaacatcaaagtcagtccctatcacatgtcaaacatttaatataatcactagctaactatttagacaatatatacacacatataggtttattaattttacaactgtcaaaaaattacttacaaaaaaaaattttacatgataaaaatgtta

SEQ ID NO: 50574 - DNA, 298 bp, Glycine max
  Clone ID: LIB3107-068-Q1-K1-H5
ggcgtttggcacaggctgcgcagtgtttgaacgttgaaggagagcgtagaggcagtggttttctttttttgatttctctttgtagaatcgaatcgagttaatttttgatcgtgtgagtgtccgatcttgaaatccacaacaacaatggtgagaggattgctcaacaagctcgtctctcgctccctctcggtcgccggaaaatggcagcacaatcaactccgccgcctcaacatccacgagtaccagggtgctgaattgatgagcaaacacggagtcaacgttccgagaggcgtggctg

SEQ ID NO: 50575 - DNA, 234 bp, Glycine max
  Clone ID: LIB3107-068-Q1-K1-H6
tttcacatgctacacaacgacgtaacgttgcgggtgttcgaagacgccatagttttacttttttgatatcactacataaaataccgtcgggttaatttttgatcagtgtgaatgtacaatcttgcaatctacaacatccatgcttacgaacacttctctacaacctcatatctctcttattgtgtcacctaaataaaattcactacactcaacttacacccctcaacatgcaca

SEQ ID NO: 50576 - DNA, 286 bp, Glycine max
  Clone ID: LIB3107-068-Q1-K1-H7
ttttgcgtttttcacaagctgcgcaatgttggaacgttggaggatatcgtagaggcactggttttctttttttgatttctctttgtagaatcgaatcgagttaatttttgatcgtgtgagtgtccgatcttgaaatccacaacaacaatggtgagaggattgctcaacaagctcgtctctcgctccctctcggtcgccggaaaatggcagcacaatcaactccgccgcctcaacatccacgagtaccagggtgctgaattgatgagcaaacacggagtcaacgttc

SEQ ID NO: 50577 - DNA, 385 bp, Glycine max
  Clone ID: LIB3107-068-Q1-K1-H8
gccacgcatacggaaagaaaaccactaatttttccgtttttcacaccctgctacaactgggaactttgaaggatatcataaagccacaggctctctttttttaatttctctttatataatcgaatccagttaatttttcatcatgtgactgtccaatcttgaaatccacaacaacaattgtgacaggattgctcaacaacctcctctctcactccctctcagtcgcccgaaaatggcagcacaatcaactacaccaccttaacatacactagtaccagtgtgctaaatttatgatcaaacacgcagtcaacgttccgagaagcctcgctgtttactctgttgaagaggtcagaaatgtcatcaatgaccttttccctaattaaaa

SEQ ID NO: 50578 - DNA, 277 bp, Glycine max
  unsure (1)..(277): unsure at all n locations
  Clone ID: LIB3107-068-Q1-K1-H9
aacatttaaaaagatcctagccccccccnttttctttatttaatttctctttttataatcaaatccatttaatttttcatcctcttactaacccatctttaaatccacatcatcaaaaataacaatattgcccatcaaactctnatctctctccctctcttacacccgattttttttaccacaattttttttttctccttatcatccatttttaccattgaaccttaanncatgaacaaacaccgacccaaacctcccataaacctcccttatcctc

SEQ ID NO: 50579 - DNA, 322 bp, Glycine max
  Clone ID: LIB3107-069-Q1-K1-C10
gcagtttgacggtgttcaatttgagggggttgagggtgctatttctgctaataatccagcgtttgttgctgcgagctaagtgatacaacacaatgagcataaagaaatcctgttgctggcattaggaacaggaacaataaaagctgaggagaagttatcttgcattattgatggcttgtgtcaacttgagtggctagtaagcatcactaacgtttatagtgaggctctatatatttcaaacatgatccacttctatctttccacagttgtttcaggtgttttgcctgctgattaactatcttcgaatagaggagtatatacc

SEQ ID NO: 50580 - DNA, 409 bp, Glycine max
  unsure (1)..(409): unsure at all n locations
  Clone ID: LIB3107-069-Q1-K1-C6
ggttggaaccacgcggccgaccaacccgnccgaccaggcgcgagaagaccaccgaaggggcaacngaggggggaacaaggccngcgctaggcgagatagaggagaaacacgcaannccaaggaacccagacagccaaaaccgagacnaccacgcactnagaggaaangcaagaactnnaagaaagaaggggtattgggtatcttgttttccaactcaataagatagtggggaggaaagagatatggctgtaggtagcaaaaccagaaatatgcttgaaggtctggttaaagaaggatcatttaaatggttgcttgtcaagaagagttacttttatgaagaatttgaagaaatggaaaattctccttttgctgggaagaaattttatacgagagctttctcctgttgcaa

SEQ ID NO: 50581 - DNA, 426 bp, Glycine max
  Clone ID: LIB3107-069-Q1-K1-C9
ctgttaagcaaaggataggatctgagtgtctgggggatgaggcaacaaggcctgtggcaggaaaacctgtacaagctaccatgaccggtcttcctcccattagtgcagttcggttggaacagatgagtaaagctgttcgatggcttgtgattgaattgcagcatggctctggagctggttctgctaattcagctcttacccacccctcagctccgtttgatgccaggttttctgaagatgctgctcagtagcattaatgtgactgcgatgattaatgttatatatttttttctctatgatgatcatgcttagactatattgtgttaaacattttattcaagattaaggattagatttatgttaagctgttaaagaatgtaacttgtgtgtattgtgcatgacacaacaatccttattccttatttt

SEQ ID NO: 50582 - DNA, 271 bp, Glycine max
  Clone ID: LIB3107-069-Q1-K1-D10
ttattggggcattgtgaaatcaacagataaacatttcactagtagagagacatatgcataatattgagaaataatggagggttgtacttattgtgtgaagttgctatgccttgttgggtttgtggtgcttgtgagtactattgcatgggtggagagtgctggtgaatgtgtgaaatctaccaccccagataattaggcttataagctagcaccatgtgcctcatcatctcaagatgagaatgctagttgtttttataattgctgtgctcat

SEQ ID NO: 50583 - DNA, 356 bp, Glycine max
  Clone ID: LIB3107-069-Q1-K1-D12
gcgttctacggcttctataagacttctttaagggactctgcatctgactcctatagaagcctctgagaattccatatccccgttttccttcactcttaaacccctattcatttccaccatcacaagaagcatggctgcaatatcaattccttctcacatgaaagcttgtacatactctgtgtatgtaaaatccaaagaagttctcaagtttaatctataattggctttgccttaagtgaatgaataccatgtccttatcaaagtctcttctgtttcccttaaccccattgatcataatacaatggaaagctattttaagaacatctacttctctttacctactgctcctgattatt

SEQ ID NO: 50584 - DNA, 226 bp, Glycine max
  unsure (1)..(226): unsure at all n locations
  Clone ID: LIB3107-069-Q1-K1-E1
gaagcacgcagcaaggaacnaggancancancaaagngcaaaacagncgagaccgaacaccacgagcagcaaccaaggagaccncccaaacgaccaccggagaagagacaacgngnnccnncngcnnanaaccggancaacaaggaggaaacacaaagaagaaaggcnagnaanccagagancagccacagggaagcagnnagcacagcagccaaaaaccgggcac

SEQ ID NO: 50585 - DNA, 409 bp, Glycine max
  Clone ID: LIB3107-069-Q1-K1-E11
cagttattgcttttataattttgggcattacaaggatctctatttaaacagataattattcaataaaatgtggccattcatctcccttcattctgtgagttaagtttttttccaacaaattcctatcctagattgtttttgaatccaaagaatcaaaaggaatgtattaatcaagtagggaggtgggaaggtgaactttggaggcgggaattgaagtggcgtagatcgtggtttcaataggagctaaacttgatgcataatttccaaaatctgatcaacaatggtcaacttcataaagaggtagatgatactttgtggtgggaaggggaaggagctggaaagttctcggttcactcaccatacttagcaatgcagaattggtattatggcagccatgaagtggtttttt

SEQ ID NO: 50586 - DNA, 280 bp, Glycine max
  Clone ID: LIB3107-069-Q1-K1-E12
gactggaggaagggggcgtataggagtgccctgtgtcatgggcaccaagaccacgtgtgtaatcatagacactgggtggcgaaaacttcacgaacacttcacaatgtgtcaaaccctgcaccaaccaatactcctatacttaatcaacccacaggagtggtcctctatcaaagtctctacaaaaccctgcttaagcttgtgtggtaacatcatcaaaaaaagaatagagagactttatgtaattcaagtagatcgagatcgcgaaaatgacgaactgcat

SEQ ID NO: 50587 - DNA, 282 bp, Glycine max
  Clone ID: LIB3107-069-Q1-K1-F10
ggattgggtttggttctcagtgtacccaaaaacagaggcagaaggaggaagaagtagaagaagattagagagagtgagtgagtgagcgagggataattggcgagttagggtttcgaattgactcactgagtctttgcattgtgtcgccggtttttttttcgccggagaaaactcgtgctccgatctcctctgcttttgttttcgatagcatagctgtttgaaaggttcggttttcccggcgaggatagtgggattttccggggattccttggtgaattgagt

SEQ ID NO: 50588 - DNA, 301 bp, Glycine max
  Clone ID: LIB3107-069-Q1-K1-F12
ttgaagggggttgtttgatcgtggaatttcggtggttctgagttgccggaatatgagtaaagtttatgattggttcgaagaacgtctttaaattcaggcgattgccgatgatatatccagtaaatatgttccgcctcaagtgaatatattttattgtttaggaggaattacacttacttgttttttagtccaagtagcaacgggatttgctatgactttttattatcatcctaccgttactgaagcttttgcttctgttcaatatataatgactgaagctaactttggttgttaaatctat

SEQ ID NO: 50589 - DNA, 70 bp, Glycine max
  unsure (1)..(70): unsure at all n locations
  Clone ID: LIB3107-069-Q1-K1-H6
nngnccaanagaggcngaagcggaaagancncggggganacnngncnnnanaaagaaaaaggaaagaaaa

SEQ ID NO: 50590 - DNA, 318 bp, Glycine max
  Clone ID: LIB3107-070-Q1-K1-A1
cagatccaaaccagtggaatggtgctgctggtgctggttctggtggtggatattatgggtatgctgctcaaggatatgaaaattatggttatgctcctgctggacaggatcccaacatgtatggcagttatccgggatatcctggttaccaagctcctcaacaacagcagcaaataggatatagttgagaagagtctgttccttttcttctgtaatcttttatgatacttatcgacttgcgtatctcttatctcgtggaaaacccactctgctacttttttccttttgtttgcttagtaacattaaattttatcggag

SEQ ID NO: 50591 - DNA, 405 bp, Glycine max
  Clone ID: LIB3107-070-Q1-K1-A11
tgttgactggatgttggtcggggatgtaccctggaagatgggtgatgtatcatgcaagaggataacacttatgattagctcagaggccgttggtttaggtccgaggtctacttcttcaaaatgtacgggttccacctagctagctagaagaataattaattagtgcgtaataatgataagctgatagctgataattaagcattccttggacaccttcaacgtttacaagcttcggttagaagaagagtgaatttggtacagggaaatatccatgcatggtgcttgatgtacatgtccctttagcacctctggttaattagctacttttgttttgactttaaatgaagaactagaacaaatactgttctctatattagctagttgactaaaaaacaaataatggga

SEQ ID NO: 50592 - DNA, 344 bp, Glycine max
  Clone ID: LIB3107-070-Q1-K1-A2
ctctcgcaagagctacaaacaaaatataataatagtattttggttcttctcttcctgcttaggactttaattaattatataatatgtatatagtctaaagttggaagctttgtattcttgtgtatgatggttgtgttgtgtgagttctcaagggaagcaaagtcctctctttcacacctttcagtctcaaaaccgtgggaagaagaatctagggtttaacagcaccaccccgagtccatcaaggtctgtgctttgatgcttttttcttcttctttttcactgggaaattcggtcgttttttttttctgaaagaggttttgctgcaacttgtgaggcaccctcag

SEQ ID NO: 50593 - DNA, 370 bp, Glycine max
  Clone ID: LIB3107-070-Q1-K1-A3
gacactcatcacaaccactcttaatttctctctggcttgctgatttacacacctctccaacctttcactttcagctttatttgaatccctctctctcctttccaaatggccagcgttgaggttgcacatcaaacaccaacaacagttccagaaaatgaaacaaccgaggtaatcaagacccaggaaacaaccccggaaccagtaccagccactgaggctcctgcaacagaacaagcagcagctgaggttcctgctcaagaagaacaacaagcaactgaggttcctgccccagaatcaaccaccgaagcaccaaaggaagaaaccaccgaagcaccaacaacagaaacagtagaaacaacaactacagaag

SEQ ID NO: 50594 - DNA, 342 bp, Glycine max
  Clone ID: LIB3107-070-Q1-K1-A5
ggatggattacgatttagcagcgttgaagcttttctgttcgcagctgaagcaggctcgagaagtagcaatgccttgtcaaactcaaagtcaaagtcaaagcagcttcactctcggcggcctccttttccagcgcccttggttgcagggcgttctcgtctccgcctccgacgccggctctctgcttctcgacgacggaaccgacctcgtcgagctctccctcaatagcgagtttcgccaccgtccatggaaactcgggatgtatgtaatggtggttggagggtatgctgcacgtccagggaaagcttcccatgaacaaggtttacaaaattggtgatctttca

SEQ ID NO: 50595 - DNA, 406 bp, Glycine max
  unsure (1)..(406): unsure at all n locations
  Clone ID: LIB3107-070-Q1-K1-A6
gagtgaattagaatccaccttggcctagccagggagcgcttgttctctcgcattcccgggagatctaatgctgcccaaccttgctgaaaattaaggtttcgtttcggaggtagaccaaaatgttcggaagggcaccgaagaaaagcgacagcaccaggtactacgaaatcctcggcgtttcgaagaacgcttcgccggatgatttaaagaaggcttacaagaaagccgccattaagaaccaccctgacaaaggcggtgatcctgagaagttcaaagagcttgctcaagcctatgaggttctgagtgaccctgagaagcgtgaaatttatgacacatatggagaagatgctcttaaggaangaatgtgtggtggtggcggtggccatgatccatttgatatcttcag

SEQ ID NO: 50596 - DNA, 316 bp, Glycine max
  Clone ID: LIB3107-070-Q1-K1-A7
catatccaaactattggaatggtgctgctggtgctggttctggtggtggatattatgggtatgctgctcaaggatatgaaaattattgttatgtttctgatgtacaggattccaacatgtatggcagttattcgggatatcctgattaccaagctgcttaactacagcagcaaataggatatagttgagaagagtctgttcctttgcttatgtaatcttttatgatacttatcgacttgcgtatctcttatctcgtggaaaacccactctgctacttttttcctttgtttgcttagtaacattaaatcatatcgga

SEQ ID NO: 50597 - DNA, 337 bp, Glycine max
  Clone ID: LIB3107-070-Q1-K1-A8
ggaaaaccaggcgcgacccacgcgtgcgacaggaccaagaaggacccatagcgggctctactaacaaaatatcatactggtatcaaatgcactcattatgcgcgaaagacttaaataaagtgcatgataaacatacaaggtctagttaaaagctgagtctgcaagcaggtgaagatagcgtcctttgaggcttaccactaagcatagtgatcgctatgacacatatcatactcgactccgcgttaagaatacattacagtgccacatcgccagcaccggtacatcaaagactgtgctttgaagcttccaaaaacatctctttcagtgcaaaatgaga

SEQ ID NO: 50598 - DNA, 360 bp, Glycine max
  Clone ID: LIB3107-070-Q1-K1-A9
aacacctctagcttgcctctccggcatcttgtgctcaaaaatcctgcactttgtcaccagctgattaaaatccgtgatctgcatataactaaccgcttgttggatctccaaccgaagcccattctcaaactgagcacataaatcttcctcattccgagcatcttggtattgaggccaacactgcagaagctcattgaacttagccgtgtactccccaacagacatgtttccttgcttcaaatccagaaatttcctcgccttcctctttctgagatctcgtggaaagtgattctccacgaatttgatcttgaaggcattccaaggaatcacgcctccacgtgcgacaaatgaaggcttcac

SEQ ID NO: 50599 - DNA, 374 bp, Glycine max
  Clone ID: LIB3107-070-Q1-K1-B1
aacacctctagcttgcctctccgtcatcttgtcctcaaaaatcctgcactttgtcaccagctgattaaaatccgtgatctgcatataactaaccgcttgttggatctccaaccgaagcccattctcaaactgagcacataaatcttcctcattccgagcatcttggtattgaggccaacactgcacaagctcattgaacttagccgtgtactccccaacagacatgtttccttgcttcaaatccagaaattccctcgccttcctcttactgagatctcgtggaaagtaattctccaggaatttgtccttgaaagcattccaaggaatcacgcctacacgtgcgacaaatgaagcttcacaaactccaccaattc

SEQ ID NO: 50600 - DNA, 353 bp, Glycine max
  Clone ID: LIB3107-070-Q1-K1-B11
gatattgagagaattctatggagcggggaccagatttctcgccgtgttttcgagctcgccgccgaaatctctgacgacttcggcggccattctccggcgcccgtggtcgtcggcgtggccactggcgcgttcctcttcttggctgaccttgttcgcaaaatagatctctccatcgccgttgatttcgtccgagtcgaatcctacggttccggaaccgtgtccaatggcgcacccaccatttccttcgatttgaaggtcgacgtcaactcccgccatgtcatcgtggtcgaagacattgtagatactggacataccttatcaaaagtcattgagcacttgaaaatcaaaagagc

SEQ ID NO: 50601 - DNA, 353 bp, Glycine max
  Clone ID: LIB3107-070-Q1-K1-B2
ggttctagtgtgtgattgtttgttgttgtaactcgttcttcttcttttgttgttctgtgtttgtgtttgttttttctctcacctgaaaatgtcttgctgtggtggtaactgtggttgcggaagctcctgcaagtgcggcaacggctgcggaggctgcaagatgtacccagacttgagctacactgagtcaaccaccaccgagaccttggtcatgggagtggcgcctgttaaggctcaatttgagggtgctgaaatgggtgtgcccgctgagaacgatggctgcaaatgtggaccaaactgctcctgcaacccctgcacttgcaagtgaggtgttgggagaacaagcttcaagc

SEQ ID NO: 50602 - DNA, 452 bp, Glycine max
  Clone ID: LIB3107-070-Q1-K1-B3
ctgctgttacaggtggaagtaaaccagtaggaagtgctcctcctggagttgaaggtcaggcgaataaagtaaataaccgcaaaaatatgagaggtggaggccctgcattagctagacgacaaacagttgcagcagattcttctccaccatctcctgcagctctacgagcttctatgtcattacggttgcagttgctcctgagatttcttcctattctttgcactgacagggagccatctgtgcggagcatgagacaatttcttgccactgtaatttttcgtctccttggtagccgggttgtgcatgaggatgcagacatttcggtgaatgctgtgccatttctgcctataagggaggcagagtcatcttctgaagttgcttctgctgcttttgtggattcttcttctgggagtttgtttgatcgtttggtgttggttttgcatggattatta

SEQ ID NO: 50603 - DNA, 309 bp, Glycine max
  Clone ID: LIB3107-070-Q1-K1-B4
gagttcaattccaatatattccattctctctgggtatttccgtacctctcccttcaagatgcagatcttcgtcaagaccctcaccggcaagaccatcacccttgaggtggaaagctctgacaccatcgacaacgtcaaggccaagatccaggacaaggaaggaatccccccggaccagcaacgtctcattttcgccggaaagcaacttgaggacggccgtacccttgctgactacaacattcagaaggagagtactcttcacctcgtcctccgtctccgtggtggcatgcagatcttcgttaagacact

SEQ ID NO: 50604 - DNA, 298 bp, Glycine max
  Clone ID: LIB3107-070-Q1-K1-B5
gatagggaaacatatagtggtttcagtgagtgatcggtgttcacttgatccttcataagtcgtcatcatcatcatcatcatcaccgttgattgaagaagatgccgatcagaaacatcgccatcggaaggcctgaagaggctactcaccccgacacgttgaaggcggggttggctgagttcatctccaccttgatcttcgtgttcgccggttcaggttccggcatcgcctacaacaagctcaccgacaacggcgccggcactcccgccggccttatcttcgctttcaatcgccatgctt

SEQ ID NO: 50605 - DNA, 307 bp, Glycine max
  unsure (1)..(307): unsure at all n locations
  Clone ID: LIB3107-070-Q1-K1-B6
cgaataaaatcatctgcttcgccgttcaaaggcaaaattgacctcaatatccaaccagagcgagaagaagaattatcacctggttcggattctggcggcatgatgaagttgctccatgatgctactgagcgatatctcaaacagcaagactgtgaactctggtactggagattcatcangcagtcagtcacagctggtaggagatgcaatgagggaagataaacttagcaatggtgttgcccatggcagtagtagtcataatactgataaggaacatgcccaatctttgcctatgaatgtgtgaaaa

SEQ ID NO: 50606 - DNA, 218 bp, Glycine max
  Clone ID: LIB3107-070-Q1-K1-B7
acgacacaagggaacaactgtatcttgccgctacgtgatcttgtgcttaaaaatcccgcactttgtcaccagctgattaaaacacctgaaaatgtcttgcttaaccggtaactgtagctgcagaagctcctgaaagtgcaactgcgcatgcaaatgctgcaagatgtacccagacttgatctacactgagtcaaccaccacctcatacctacttaatc

SEQ ID NO: 50607 - DNA, 262 bp, Glycine max
  Clone ID: LIB3107-070-Q1-K1-B8
gagtgctattgtgacgttgtgacgggtacggagggaaatggagggcggtgacggtgtgcattggttctctcacctccaaatgcctcgctgtacccataactgtgcatgcacctactcctgaaagtgcttcgactgctcccacttgctgactgatatacccagacttaaactacacttattctaccaccactgaaacaccactcattcgatgggtgtctgcccaagctcaatctgaagaccctcaaactcctgtacccactta

SEQ ID NO: 50608 - DNA, 240 bp, Glycine max
  Clone ID: LIB3107-070-Q1-K1-B9
ggttcaattccaatatatgccaggggctctgtgtaaatccctacctatcccttcaagatgcacatcttcgtcaagaccctaaccggcacgaccatcacccttgaggtggaaagctctgacaccatcgacaacgttaaggccaagatccaggacaaggaaggaatacccccggaccatcaacttgtgattttcaccggaaagcaacttgaggacggtcgaacccttgtgactacaacattc

SEQ ID NO: 50609 - DNA, 105 bp, Glycine max
  Clone ID: LIB3107-070-Q1-K1-C1
aatcaaaaccaaatcaagcgggccagaacgaatgagttaacaaggccaaaagatgatgatgaagacggcagatcatctggatcagagaagaatgtttcagtttcg

SEQ ID NO: 50610 - DNA, 362 bp, Glycine max
  Clone ID: LIB3107-070-Q1-K1-C11
ggtagctccatgagggatgagagtcgtatgatgtcacataacaaaaattgatgtgctacaatgccactgaaattgtcgcgtggttccatttccatagaagaagaatcaaaaaaaagagcattgtagcgtttcaagttgatcataaatgcaagtgcgttactcctacgttcgaagactatgctttttgctctgttcacctttagccaaactcggcacttccaaaactcaatcttcttcttcttttttagccaatttattcgtcgatgacgattccacgctgttaagccttaagctttatcgacccttttatccaaataaatatcgtctaatggggtgtttaaacatattttctttctattttc

SEQ ID NO: 50611 - DNA, 305 bp, Glycine max
  Clone ID: LIB3107-070-Q1-K1-C2
gaaatcactggacgaggggttctttcaacagaagtgattgagaaggctttggcagaagtggacaggctagtcaaactaaaagcaagcagaatgaaagaacttgttaataagaacaggtcagagttagaggaaatatgtaaattgactcatactgaaccagatacaagtactacaggcgcgatagctagtgcattaatagattttggactggtggatccttatgagctattagccaacattgaatcacagatcatcaaagcaaaagatgaagctttgagcataaaagatgaacaaatgcgattgat

SEQ ID NO: 50612 - DNA, 347 bp, Glycine max
  Clone ID: LIB3107-070-Q1-K1-C3
aactcatggttgcttgatttggttttagtaaatgtactttgattttttattgatcaactatatgatattctttcctcattagcttttgactgatctggttccactcttcattttgttgaagagatgtaattgtacctagtacaagaaaatcaaggtcaaagcatggacgctgtgtcatccgcactactagagccagtaactaattctgtgttggatctgattaaaaagcaagtggattacatccgttataggcaaaactttgatgaactacgcgagtgtgtaaagcagcttaaacttgtaaaggagaaagtagatcatcaatgtgaggaagctttcaaaaatggaca

SEQ ID NO: 50613 - DNA, 294 bp, Glycine max
  Clone ID: LIB3107-070-Q1-K1-C4
gacaagtgagtttgttgatcgagataactagaaacagtgtgatgaaaatgaaggtccttgttttcttcgttgctacaattttggtagcatggcaatgccatgcgtacgatatgttccctctccgaatgaacactggctatggtgcccgtactccggaggtgaaatgcgcaagttggaggcttgctgtggaagcacacaacatctttggctttgagaccattcctgaagagtgcgttgaagcaacaaaagaatacatccatggcgaacaatatagatccagactccaaaacagtt

SEQ ID NO: 50614 - DNA, 359 bp, Glycine max
  Clone ID: LIB3107-070-Q1-K1-C5
gaagacatgtatatgtcatgttcttagttccaatctaactgctcataacaaaaggaaccatatagacaccttcgtacttgtcatggcccttaagatcaacactttccttctagttcttctcttgatcctcattcccttatcttcaggcttggctgaaggcttcggggaaaacatgcatccaactcatggcttactttataaggatggtatcaagatgaactcgaggaagcttttggttcatgattttgtgttggattatgatgaggcaagacccaacccaaggcacacaaagaaacctggcaagggcccttgaatacccttaccaccaaataatgaaataaaataatctatatactatc

SEQ ID NO: 50615 - DNA, 364 bp, Glycine max
  Clone ID: LIB3107-070-Q1-K1-C6
gaatacatgtttatgtcatgtgcttagttccggtctaactgcgtcataacaaaaggaaccatatagacaccttcgtacttgtcatggcccttaagatcaacactttccttctagttcttctcttgatcctcattcccttatcttcaggcttggctgaaggcttctgggaaaacatgcatccaactcatggcttactttataaggatggaatcaagatcaattccaggaacttatgggttcatgattttgtggtgtattatgatgaggcaggacccaaccttatgcacacaataaaacctgtcagggcccattaatccctttcctccaataatgaataaattattcttttactttcatttttttt

SEQ ID NO: 50616 - DNA, 356 bp, Glycine max
  Clone ID: LIB3107-070-Q1-K1-C9
aactcatggttgcttgatttggcctgagtaaatgtactatgattctttatctatcaactatattatataatatcctcattatcttatgactgacctggttccactcttcattccgatgaacatatttaaacttacctcatacatcaaaatcattgtcaacatattgacactgaggcctacactctactagatccttgaacttattctgtgtctgatctgattaaaaagcaacttgattacatcccatatattcaatactcttactaactacgcgagctcgtaaaacgacatactctaggaaattatacatttaaagcattacatagaatcacgcctccaaaatcgacacaaaaatg

SEQ ID NO: 50617 - DNA, 350 bp, Glycine max
  Clone ID: LIB3107-070-Q1-K1-D1
aacacctctagcttgcctctccttcatcttgtcctcaaaaatcctgcactttgtcaccagctgattaaaatccgtgatctgcatataactaaccgcttgttggatctccaaccgaagcccattctcaaactgagcacataaatcttcctcattccgagcatcttggtattgaggccaacactgcagaagctcattgaacttagccgtgtactccccaacagacatgtttccttgcttcaaatccagaaattccctcgccttcctcttcctgagatctcgtggaaagtaattctccaggaatttgtccttgaaagcattccaaggaatcacgcctccaggtgcgacaaatg

SEQ ID NO: 50618 - DNA, 399 bp, Glycine max
  Clone ID: LIB3107-070-Q1-K1-D11
ttatggggattaaaaataaaacaaatcgcaagggcagaggagaatataaagcctttctccctgttccagtccagttcattgtatagagcatacaccaacaccaaaccttaaaattattttgcccctctgcttctctctctgtctttctcataatacaacttataaaaaccattgacgtgggtcagatgcaaatacagtggatcgactacaccaaatccctcttccttgatggcttcctgtatggtcagtttctgcaacttcagcagcttcaagatgagaacaaccctgactttgttgttcatagattatcctctctttttttgaaaattctgaaaggctttcttaagatctcaccttttcccttaaatcaagattgagtttaactttaaaaaaatttta

SEQ ID NO: 50619 - DNA, 378 bp, Glycine max
  unsure (1)..(378): unsure at all n locations
  Clone ID: LIB3107-070-Q1-K1-D12
gcactannngaactttacttgtcttcctgtttttcaaaggaaaatntttaaaagggtgaaatacacgtgaattgatgttanncctaataaaagtaggacattaaaacaattctaatccaaaggntgtctttattagttcacataanagttgcagggttgcacctagctgtgtgaatggcttaggaagggtttgaaatgttcnnaattcattgtggatctttgtgttttttgtttgaaatgtttcaatttggcaaggttaaaatcacaaattaatctaattggtcaagatttttaaactaaattctaaaacactcagcttcaaggggtgaaaaattgaaaaagttattataccggcgactatattataccatacaaaat

SEQ ID NO: 50620 - DNA, 360 bp, Glycine max
  Clone ID: LIB3107-070-Q1-K1-D2
gcctcctcatcaaaccaagacatagcaaacgatccaaactcttttttcatttgcagcatcaaaatgagtggtagcaacgatggtagcggcagctggagctctaggtttttgaaggtggctagtgcagctgccgctacagccgccgttgccggcggtttatatgccattctttcatcctcaacctctgctagctctgagatggaagtgccgtttggcagcgcacggcgtgagagcaaagaacgtgacgatggtggctccgggtctcatcctcgcgagggtgccaccacggtcagtcgttggaagaaacctgagattggttgggtgaagctgaacgtggatggttcacgcgacccatacaaa

SEQ ID NO: 50621 - DNA, 416 bp, Glycine max
  Clone ID: LIB3107-070-Q1-K1-D3
gaacaaaacagagttcacaagacaaaccctcgaaccgaacgtttttcagggttgatagaacacgatggttcagtacaatcttaagaagattaccgttgtgccaaatgggaaggacgtggtcgacatcatcctctctcgcacccagcgtcaaacaccaaccgttgtgcacaaatgctttggttggtgcgtgatgggatcagtgacaaagtggggagaagactgaaaataaaccaatagatcacataaagaaaggatgttaagtgtcagggctgcttcaacatgcagaagaagcatcatccaggcaaattgcatttgggttaacatagaatgaggtaaaagaatgacaagatgcatgggaagaaagggataaggattttgagaagcaaggaattaataagcaagattcattttggagc

SEQ ID NO: 50622 - DNA, 322 bp, Glycine max
  Clone ID: LIB3107-070-Q1-K1-D4
gaggatggaaaattctgcattgagggaaaaactgagaaatactcaactgggacaaggggaagagataattttgagtagcatcgagagtaagagggctgcacctgtaagtacagaaaacttgttatcaagagttaataattctagttctaatgacagaactacagagaatgagaatgatttctgtgagaacaaaccaaattctggtgcaaagctgcatcaactattggatacaaatcctagagcagatgctgtggcagctggttgaaaccagtaactgcactggctgattatgcaattttggcatattacaagcccaaaatta

SEQ ID NO: 50623 - DNA, 295 bp, Glycine max
  Clone ID: LIB3107-070-Q1-K1-D5
tattttttaagtgatcctgagaagagggaactgtgtgaccagtatggtgaaaatgcccttaaagaagggatggggggaggaggctcgtttcataatccatttgatatatttgaatcattttttggaggagcaagctttggtggtggtggtagttcccgaggtagaagacagaagcatggtgaagatgtggtgcattctttaaaggtttccttggaggacgtttataatggcacaacaaagaaactatctctttctagaaacatattatgcccaaaatgtaaagggaaaggttcaa

SEQ ID NO: 50624 - DNA, 323 bp, Glycine max
  Clone ID: LIB3107-070-Q1-K1-D6
ggatgagcaacaaaaaaattaaattcttatcagttacagagtatggagtcccagacttccacacgagagaaggagtctctcaatctcagggaagtcccagaagcagataaaaccttgggcttggacatggccaagggcagcgcattctgcaagatgggtgaaggttggacatgcatcataactaaaactgaggggcctgatgctggcaaagttttcgttaaatgtggtgaaaattgcacctgtaccattgagggcgaagcagtgtcccaagaattgaatttgccacctgattgtgtgagcagcagtggcagtggagcattctg

SEQ ID NO: 50625 - DNA, 125 bp, Glycine max
  Clone ID: LIB3107-070-Q1-K1-D7
ggttctagtgtgtgattgtttgttgttgtaactcgttcttcttcttttgttgttctgtgtttgtgtttgatatttctctcacctgaaaatgtcttgctgcggtggtcactgtggttgcagaagct

SEQ ID NO: 50626 - DNA, 241 bp, Glycine max
  Clone ID: LIB3107-070-Q1-K1-D8
tacggcgaatgtgcccgacttatctgaccgcgatatgcgagtttatccaaactagaatatgattttcatcatcaactttattgctaccaacgatttgatcgcatggtcatgctatggctcatgctaccaaactatcccatttcccattacaaccgcctatggcgaccgttcatctgccgttaaatgctcatgatccatgcctacttcggaaacacacatcccgttagccattacacccctt

SEQ ID NO: 50627 - DNA, 294 bp, Glycine max
  Clone ID: LIB3107-070-Q1-K1-D9
acgacagaagacttcatcaagcggttcaatcccaacataccctagtgcctatctgtatttatctaccactcactacaacattcaaatccaatcttagaccctaacaccctagaccatcacccttgagactgaaagcacttacaccattctcaaccccaatgtcaaaatccaacacatgtacacaattcctccggaccatccacgattcaatctctcacaaaagcatcttaagaatggtcgtacccttttttactacatcatttataattatagaacttttcaccttttcctaca

SEQ ID NO: 50628 - DNA, 350 bp, Glycine max
  Clone ID: LIB3107-070-Q1-K1-E10
ggatctcgggcggagccctctcttcaggtcaccatctagactgcaatcatggctgatggaccacagcatccatcagttgttcagaagctagctggacagtcttacctggtgtccaggcttagccccaactttaactctaggaattattctgcaactggttcttacgtcaatggcggaatgcactcgcctgggttggctgttgtgtcacctgtatctccagttactgtgcatgctccagcagagaaaggagtgagtggatttctagtggattttctgatgggtggagtatccgctgctgtatcgaaaacagcttgctgctccaattgaacgaatcaaattgcttatccaaa

SEQ ID NO: 50629 - DNA, 478 bp, Glycine max
  unsure (1)..(478): unsure at all n locations
  Clone ID: LIB3107-070-Q1-K1-E11
accggnctcggaattacccgggctcgaccccacgcccgtccgtacccggctgtcgagaagaccgacagtaagggggtatacganggtgggatgagnntattcaagatnatgtgagattcggaagggagttgagaatgacccttcaggagttnntatggggataatgggtctncttactttatcanccatggatantggatantgnnngccttatggcccctattcgccagcagnggtctccagttccaaccatggggaatgatggtcagttgtatgggcctcaacactatcagtatcctccatatttccaaccgttaacaccaaccagtgcgccattcacacctactcctgctgtcctacctcagggtgaggtttccacctctgtagctgctgatcaaaagcctctccctgtcgatgcagccaatggaaattctaatggtgttgcgaatggtgggaatgcaaaaagtcggggtccact

SEQ ID NO: 50630 - DNA, 376 bp, Glycine max
  Clone ID: LIB3107-070-Q1-K1-E12
aacaatctcatctacaagtttcggtccatcaacagcaacagcaacagcaacagtctccaaggatgccaggacctgcaggccaaaagtcacttagtctaacaggatcacagccagatgtgactgcatctggcgcaactacaccaggtggtagttctagccaaggaactgaagctacaaaccaagtccttgggaagagaaagatacaagatttagttgcacaggtggatccacaaggtaggctggaccccgaagttatagatcttcttttagagcttgctgatgactttcattgattctgcaactacacatggttgcattttggcgaaacatagaaaatcgtcaactttggagtccaaggatttattgctacacctag

SEQ ID NO: 50631 - DNA, 400 bp, Glycine max
  Clone ID: LIB3107-070-Q1-K1-E3
ggaaaaaaaagagtgaagaaaagaacgcagaaactgaaataaaaaatggcagaacccaaggttaaatacgatcgtcaactcagaatatggggtgaacaaggacaggcagcccttgagaagtctagtatttgcttacttaactgtggtcctactggttctgaaacacttaagaatcttgttcttggtggggttggaagcatcactgtagttgatggatctaaagttgaagcgggagacctcggaaacaattttttggtggatgaagcaagtcttgggaagtcaaaggcaaaatgtgtatgctcatttctttaagagctgaatgatgcagttaaagcaaaatttgtagaagagtctccagaaacattgattgagacaaatccatcattcttttctcaattta

SEQ ID NO: 50632 - DNA, 324 bp, Glycine max
  Clone ID: LIB3107-070-Q1-K1-E4
gacttttcacaatgaagaagcacattcacatagccctattgctccttctggtgtcaccgttaatccccatcgccgtcgcgcaggcccaatcccagcccaatgacttctccgacgcaaacctcaaccagttcagcccctccatagccataatcatagtcatacttgtcgccgcgcttttcctcatggcttttttctccatctacgtacgccactgcgccgattccccttccaccaccgttagccctctcactaccgcacgctcccggagggccgcgcgtgggcttgacccagctgtgatccaaacattcccaatcctcgaatact

SEQ ID NO: 50633 - DNA, 407 bp, Glycine max
  Clone ID: LIB3107-070-Q1-K1-E5
aggatgctattgatattcaagatgggcatatagtattgggcttaacggaatttctaatgtgtatgagccctatgattacatatcaaaaacggtattttcaatgtatgaattgcctgactttttttttatctgtaagagctacctattgcaatgtaatttattaaaaaaaaataatagttcagtctaaacttgtttaaggatgataaaaaaaaaaacatttcggattgtggcacactatgcataacgtaaataattttgtttgtatgttgggcttcattagttcctattatgtatgacaacgaccactgcgactcctattatataattggaagaagcccatactcccaacaaaatgtgtactaagagactgcttttatttttcttcaccgcacaaaaataattccaaa

SEQ ID NO: 50634 - DNA, 322 bp, Glycine max
  Clone ID: LIB3107-070-Q1-K1-E6
ttttagaagggtcatgtagcttggcaagggagggttgaagcatgggtacaggatcctttacatgtaagacctatagctcatgcaatttgggatcctcattttggtcaaccggctgtagaagcttttactcgaggaggtgctctaggcccagttaatatagcctattctggtgtttatcagtggtggtatacaatcggtttacgtactaatggggatctttatactggagctctttttctattatttctttctactatatctttaatagcgggttggttacacttgcaaccaaaatgggaaccaaacgtttcgtgggttaaaa

SEQ ID NO: 50635 - DNA, 217 bp, Glycine max
  unsure (1)..(217): unsure at all n locations
  Clone ID: LIB3107-070-Q1-K1-E8
ttgatcctgccagtagtcatatntgggnttttttggaaatttntaactttatttttaaattctactataatattattttttttttttttttagtactttaatatttttaaaatttttttatttttttacttaactgtattcctactatttctaaaaaactcaaaaatcttatttttatttattattagaataaattcattttttaaattaaaatttt

SEQ ID NO: 50636 - DNA, 405 bp, Glycine max
  Clone ID: LIB3107-070-Q1-K1-E9
gaagacgacagaagggattagagtaataaggaggtaatagtttcatgatttcaaattatcactaacataatatactaattatcaatatttatggattaaaaatatcacttccagttagtgttttaaattcaaagattggaaattaattgtgtgctaaatattttatttaggtttttgaatttatcataattaaagattaaatgtgcattttatgtttattattatttttttagttgttgttactactcttaatttcactactcaaattaatcatatcctaaaattacatgtacaaattttaatgtttggaaggagtctcttgagattgttctcaattgcatggaatggacgaatcagtccattttaactataaaaaaatctaataagacttaatttttatgacac

SEQ ID NO: 50637 - DNA, 293 bp, Glycine max
  Clone ID: LIB3107-070-Q1-K1-F1
tggggctttatgccaatcttcagattggaccttatgtatgcgctgagtggaactttgggtacatgttgcttccataatccatatttctctctctctctctctctctgagtgcgtgtgttaatatgttgtgattctcaatcgcattctttaatggtgtactggagaggaattactgtatggttgaagtatgttcctggcgtaagcttcagaacggataatgagcctttcgaggttggacttacaattccatcgacatggcttctctatattgtctcaagtcttggataatctat

SEQ ID NO: 50638 - DNA, 365 bp, Glycine max
  Clone ID: LIB3107-070-Q1-K1-F12
ttcctatttacagatgctccaatcttgcatttactacaagactttgtacaacaagtggcttgcattcaaaacctttaacctcacatttcatcacaaaaaatatgatctataccgacgaaatcatatggttgcaccatttttgcctacttgcattattggcttcacaactctaacatgaacagaatgtttgtatctatattgctcaatgtcagtgaatatgattactcaataagcacttgttgctgcaaagtcttggaatcttaggaattacttcctccgtttttttcttcaagaaacatgcttcagttttttatgtaactataagtatcgcaaatagctcttggattgtattcttatctgtagca

SEQ ID NO: 50639 - DNA, 243 bp, Glycine max
  Clone ID: LIB3107-070-Q1-K1-F2
aagacccaaatgttttctttgccacaaaaatcaagaggtatggctctatattcaagtcacacattttgggttatccttgtgtgatgatttctgacccggaagcagcaaagtttgtactgaacaaagctcaactcttcaaaccaacatttcctgctagcaaagagaggatgttggggaagcaagcaattttctttcaccaaggagcataccatgctaatcttagaaggcttgttcttcgcacct

SEQ ID NO: 50640 - DNA, 344 bp, Glycine max
  Clone ID: LIB3107-070-Q1-K1-F3
gggaatgcagccccaatcgggcggtaaattccgtccaaggctaaatactggcgagagaccgataccgtctaagggaagaaaaagattatggtcgtgagagagagggtagggagcgggagagaagagagaaggatcgtgaccgtggaaggcgaaggagtcactcaaggagtcgaagtagaagtagggatcacagggaacatgatggcggggactacagaaagagacatgctcggagtagtgtaagtcctagaagacatggagatggacttgaggatggtgagccaaagaagaagaagaagaaagaaaagaaagaaaagaaggatgatgggactgaccaccctgat

SEQ ID NO: 50641 - DNA, 367 bp, Glycine max
  Clone ID: LIB3107-070-Q1-K1-F4
ggaagagtgaagagaatggctcccgagggttgaacctttctggctgtgttaatatgcgtttcagcactgtcactgagtccttctgttgcgggggaagggcaaaataatggccttgttatgaacttctacaaggaatcatgccctcaggctgaagacatcatcacagaacaagtcaaacttctctacaagcgccacaagaacactgctttctcctggctcaggaacatcttccatgactgtgctgttcagagttgtgatgcttcactgttgctggactccacaagaaggagcttgtctgagaaggaaacagatagaagctttgggttgagaaatttcaggtacattgagaccatcaaagaagctttgg

SEQ ID NO: 50642 - DNA, 360 bp, Glycine max
  Clone ID: LIB3107-070-Q1-K1-F5
tgttaattgacgaggttgttcgcagaaagtagggtgacatgccaccattgactgtggctgaagcaattgagcagcttgaaaatgttgatcatgacttctatggttttcgaaatgaagaaactggggaaattaatattgtgtacaaaagaaaagaaggaggatatggactcattgtaccaaagggagatggcgaagcatataaattggagcctgtagtgcttgaaccagctatagaatccttcctgaaagaatgatatgcttctacaatatactctttttgtaagaacattaaaccttgtacatgaattagcggatactaatggcgggttttttggagccagaaattgcatacacaaattt

SEQ ID NO: 50643 - DNA, 303 bp, Glycine max
  unsure (1)..(303): unsure at all n locations
  Clone ID: LIB3107-070-Q1-K1-F6
gaagtagaacccatggatgcagagcgtctgctgctgaccgcgtcgtgggattggggcttaaggtttccgctagtgaaagagatgattgttgaagaatgtgagtgggcgctaggggtggaaataggccaggccagaccaggctttaaaaggcctgagcctagcctacgatgaattttttaggcctgagcctggcctatagcctatcaaaagcttttattttggctcggcctgtaccttttaaaagcctagcctgacctgatagcctttttaaaagcctntttatatttgtttgctttggggtag

SEQ ID NO: 50644 - DNA, 407 bp, Glycine max
  Clone ID: LIB3107-070-Q1-K1-F8
ggtgccttcactctgacaatggatccagcgtgagccattgtggcgctgtcgcttctcttgggtgccatcatcgccttcctcatcttcaacacctacttctgcaagcgccaatccgaaatccgatccatcgccgatccaaatccaaattcaaattcgaatcccaaactcgtgtcttccaaaccccctcccaagaagcctctctccaaaccccattcctccgacaaggatcaaaacaagcgtcaccatccgttggatttgaataccttgaaaggtcatggtgatgcattgacaggggtatgcttctcccccatggacgaaatttggcaactgcttgccctgatggagttgtgagagtattcaagttggattatgctttcagtaaagttttaagtttcttaaggattaat

SEQ ID NO: 50645 - DNA, 397 bp, Glycine max
  Clone ID: LIB3107-070-Q1-K1-F9
ggctctttccgtggggaatgggatggcggaagaattatcaacagcgattccgcaatcgcaagcaagctccacgaagaaacgcgcttcaaagaatgaaaagctgtgcctcgaggactaccttcatctcgttcactctcgccaaacgcttcatctcaccatgaatcaactccatcaggtcatccgcattcacggcttcaagaaaatccaccacgctcctaagaaagtgctggtgcaagcggtggagtcgctggatctggtggatctgccgcagtctaaggtgagcgagagcgtgtcggcgtttgctgcggtggcgctggaggacgtggttggggatctcggcgagctcagctggcatgagtgctgcgtgaccttcgtcgagaagatcagcattttcgac

SEQ ID NO: 50646 - DNA, 358 bp, Glycine max
  Clone ID: LIB3107-070-Q1-K1-G1
gatcacttcatagtaagcactatagaaaaaacgacattcattcatctatggctacccttattgctcccagcaaccactctccccaagaagacgctgaggctctcagaaaggcttttgaaggatgggggactgatgagaaaactgtcatagtaatattgggtcatagaactgtttatcagaggcagcaaatcagaagagtctatgaggaaattttccaggaggatcttgtgaaacgcctagagtctgagatcaaaggagactttgagaaagccgtgtaccgatggatactagaacctgcagatcgtgatgctgttttggccaatgttgccatcaagaatggcaaaaactacaatgtcat

SEQ ID NO: 50647 - DNA, 415 bp, Glycine max
  unsure (1)..(415): unsure at all n locations
  Clone ID: LIB3107-070-Q1-K1-G10
cgcgtccgaccacgcctnccaaccgttcgaacacacatccgaacggttgcgtctagtgagtgaatgtgggttgcggggaactaaaacaaaacttttgttgttctgtgcatgtgtttgttttttctctcacctgaaaatgtcttgctgcggtggtaactgtggttgctgaagattatgcaaatagattataaggatgcggaggctgcaagatgtacccagacttgaactacactgatttaaccacaaccctacacctatggacattaagattgaacaaaagtatgcaaaaagtgcaggtgctaaaatggtttgttccacgatgaaaacatatgtttaataaatcccacattaaatacgaaaaactcaaaacaacctccaaattaataatataaggattaaaaaaaaggcaatttat

SEQ ID NO: 50648 - DNA, 325 bp, Glycine max
  Clone ID: LIB3107-070-Q1-K1-G11
gcgctcacatcgtgttctctggggcgcgagctagctagggtttagaacctcgcagttacagaaaacatggcgactgtggtgccaacctccgaagaagacgctgcactctccgtcgttcgattcgcctctgaacttgcctgggccgatgccggtcccgaggttgctgagccccaagttagcagactctgcgtggaggctgaagaattcattgttatgggaaagtggttggagctagcatcattgatgattacctctgctgaattgattttttcgaagtttttaaaaaagatatagagtccatcttcactattatcttgcaatcttg

SEQ ID NO: 50649 - DNA, 346 bp, Glycine max
  unsure (1)..(346): unsure at all n locations
  Clone ID: LIB3107-070-Q1-K1-G12
gaacaacaacatatgcgagctttacaatatataagtgcgcttctaacttctaaatagtgtgtgtggtctctctctatactataggtctcgcccaatacctactctccgctcccaagagcacgcaccaccactattgcacttcttcctcgttctccctctttttcttcttcttcgctaaacccttttttctatctcactaacacaacaatgggagacgagaagaagggcaagcctgctgcttccggcgtgtggtccaccatcaagcctttcgtcaatggtggagcctncggcatgctcgccacctgcgtcattcaacccatcgatatgatcaaggtgaggattcaac

SEQ ID NO: 50650 - DNA, 271 bp, Glycine max
  Clone ID: LIB3107-070-Q1-K1-G3
gaccacaccgagtcgcagaaaaagaaaaaagcgatcatagtttcacttcggccttatccagtttagggtttcggttctctaccctatctttcacgtatcgaaaccttaaatttacgatcaggtctgagcaatctggttggtagaacctttggtcttagtgagtcaagttttatgtctgaattagacgatcaaattcctactgccttcgatccttttgttgatgcaaatgctgatgactcgggtgctgggtcaaaagagtatgtgcatattc

SEQ ID NO: 50651 - DNA, 337 bp, Glycine max
  Clone ID: LIB3107-070-Q1-K1-G4
ggttctagtgtgtgattgtttgttgttgtaactcgttcttcttcttttgttgttctgtgtttgtgtttgttttttctctcacctgaaaatgtcttgctgcggtggtaactgtggttgcggaagctcctgcaagtgcggcaacggctgcggaggctgcaagatgtacccagacttgagctacactgagtcaaccaccaccgagaccttggtcatgggaatggcacctgttaaagctcaatttgagggtgctgaaatgggtgtgcccgctgagaacgatggctgcaaatgtggaccaaactgctcctgcaacccctgcacttgcaagtgaggtgttggg

SEQ ID NO: 50652 - DNA, 351 bp, Glycine max
  Clone ID: LIB3107-070-Q1-K1-G5
agctaccggggcattggaacaaaatgggtgtttagaaataaattagatgaaaatggcatagttattagaaataaggctagattagtcgccaaaggatataatcaagaagaggggatagattatgaggaaacatatgctctagttgctagattagaagccatcagaatgttattagcctatgcatccataatggactttaagatttatcaaatggatgtaaaaagtgcattcttaaatggctttactaaagaggaagtatatgtagatcaaccccctggatttgaaaactcagaacagcctaatcatgtttttagaataaaaaaaggctttatatggcttaaagcaagcccc

SEQ ID NO: 50653 - DNA, 412 bp, Glycine max
  Clone ID: LIB3107-070-Q1-K1-G7
ttggtaatatatgaatgttttaaagtaatttttggaacatattaaatacattttaaaaataattttcagaaatgttaagatttacatattttagaaattaatttccaaaaatattaaatttttcaaaatttatttttaataataataggtaaatgttgttgaaattaaattctaaaatatattagttacattatgaaaattaattttcaaaagtaaaatattaaaattataaaacttctaaaagttaattccacactcatacaacatgaatccaataactgagttatatgccaaaaaattcagattacacacattgatcttattgcagagacacagaacatcattggtttactctttcatgagaatgaggcaccttattcccttcccttttagcattaattcaaatgctttg

SEQ ID NO: 50654 - DNA, 359 bp, Glycine max
  Clone ID: LIB3107-070-Q1-K1-G8
gacctatcctgcgtttcatctcatgtactactagcgaccctcagaaccgttccccacttgcttttcaattttctttttttgcccttttcgccgccctcaaagagttcaaggatttatacaattaatagttttttaatttggaatggctggaatttgctgtggagttgttggagaatccggagagacttcttcctcttcaatcgaacccacctcgcgcccctccgttcgccggagtttggaccttttgcctttgagatacatagctgctgacgtgtcagtcccggcgccggagaacagccggaagcgccagaagctggatcggtgcgtttcttccgcaagggagtgcgaaaaccctgttc

SEQ ID NO: 50655 - DNA, 336 bp, Glycine max
  Clone ID: LIB3107-070-Q1-K1-G9
caaaatgtaaaggataatactgattgggatcacgcggggcatgattctcctgttgctgatcagagtgctggtaatagtttatgccatgatgctgcaaatcatgtcaatagtagtgcatatggaagcatggacagtggaaatgatggaaatgctacttcagctatagtatccaagaacgccccagatggtttcagtgatagtggttgtcataattatgatggatttagagtgacagatcctcatcgctccagtcaaagagaagcagcgttagtgaagtttcgactgaagcggaaagagagatgcttcgagaaaaaaggtcgatatcaaagcctgaaa

SEQ ID NO: 50656 - DNA, 278 bp, Glycine max
  Clone ID: LIB3107-070-Q1-K1-H1
gatgcatagcaattcccaattcctaattgtttaaacctaattctcatttcttcatcgttcgattcttctcctcctaaagatgcagatcttcgtgaaaactttgaccggtaagaccatcacccttgaggtggagtcctccgacaccatcgataacgtgaaagctaagattcaagacaaggaagggatcccacctgaccagcagagacttatctttgcgggtaaacagcttgaggatggtcgaacccttgccgactacaacatccaaaaagaatccactc

SEQ ID NO: 50657 - DNA, 350 bp, Glycine max
  Clone ID: LIB3107-070-Q1-K1-H10
ggcacaaaaatacaatacaaaacaaaacagagcggagagagagtgtgtgaaaagtgaaacaaaaaacagaacaacaatggcgacacttaaggttcctcagcctcttccccccgttgcagatgattgtgagcagctccgaaaagccttctcaggttggggaactaacgaggagctgattgtatcgatcttggctcataggaatgctgctcagaggaagcttatcagagaaacttatgcccaaacctatggagaagatctcctcaaggccttggacaaagaactcacgaagtgatttgagaagctggttcatctttggacacttgattcttgtgaacgtgatgcaattttgg

SEQ ID NO: 50658 - DNA, 396 bp, Glycine max
  Clone ID: LIB3107-070-Q1-K1-H2
accttgctatgagaaaagaataagattttaattgggtgagaatgatatatatattataaattttatttacattgaaaaattctaaacatttttatattgatgaagacaaaaattatattttaactttttttttatcatactattgtactagctgacaatttcttttagttttttaaacagtgttcttaaagttagttgaccatgtaaaaactgtccggccatattcaatccaatttttaacataagtctgactacgtctaaggctttaattaacatattgagtctagcatataaaatctctttcccttgtcttctgtacaaagtgctttgtgttgttagtggccgggttcagtttccatggattcgatgcatgttattatgtcttcttctaatgct

SEQ ID NO: 50659 - DNA, 305 bp, Glycine max
  unsure (1)..(305): unsure at all n locations
  Clone ID: LIB3107-070-Q1-K1-H3
ggcacaagtgagtntgttgatcggtataactagaaacagtgtgatgaaaatgaatgtccttgttttcttcgttgctacaattttggtagcatggcaatgccatgcgtacgatatgttccctctccgaatgaacactggctatggtgcccgtactccggaggtgaaatgcgcaagttggaggcttgctgtggaagcacacaacatctatggctttgagaccatttctgaagagtgcgttgaagcaacaaaggaatacattcatggcgaacaatatatatcagacttcaaaacagttaaccaacaag

SEQ ID NO: 50660 - DNA, 414 bp, Glycine max
  Clone ID: LIB3107-070-Q1-K1-H4
ggggtttggtcgtttggtgtttttgcgaattagggtttgtgatttgatctccatcttcaccaatcaccattaccataacttgatcttctctctcgccatgacggacggcttctggaatcggcagcagcagcagccgcttcaaccttcttccgccatgctcaaacgacctcgtactgaatatgatatgtcaccttctggtctgacagggggtaatgagatgcataattatattgctcgaaatgatgaccataccggtcatcgaatgctaaaggacactaaaacacttggatctgcttatgaccgctaccttcaaagtgcaaggcttacttcgtttaattcttgggaagccaatgcaatttgtgggtgttgatttggaaagggtgttggtggataccacccatttactaactgatc

SEQ ID NO: 50661 - DNA, 330 bp, Glycine max
  Clone ID: LIB3107-070-Q1-K1-H7
gatgccctacaatgtcatttggacttgcttcaactgagtatgttcttgctaatcttttgtattggttcaattggaatatgtccgagtctggacgtatattgatgcacaacattgacatgagtgagacaaatggactcactgtcagtaagaaagtaccacttcatcttgaaccagaaccatataaaacatgatcatttcacattatgcatgtttggcaacacctataaagagtatagatctggaagtacttcaatttagtaatggatgtaaaagctatacaataagaagtgctaacaagctaagatatgagcatttatggaagtacgagtg

SEQ ID NO: 50662 - DNA, 378 bp, Glycine max
  Clone ID: LIB3107-070-Q1-K1-H8
ggacagagagaagggaaagagagagaggtggttgaagaaacgaaccctaagagagagagagagagagagacagagagtctttgctttgatttcaagctcctttaccattgcatttcgggatctcgaatcttcaatctgcaaaggtattgttgattctgcttctatggcaaattcaaagggctcattaggtttcagaaattttatgtatcctggaaagcattctctacttcctcctaaaagtccgtttcctagtgtttcccaagcatatgctgattatgtcccaaattctgctgttggtttaaaggctggtaacagacctaaagatggaaacacacaccaccaacgtactttatctgagagccttgatatagaggagca

SEQ ID NO: 50663 - DNA, 315 bp, Glycine max
  Clone ID: LIB3107-070-Q1-K1-H9
agaagacgacagaaggggaaacagagatggctcttgcagagcatcaggggaggtatgtggctattgtagtcaacaagctcgcccagtcatgaatggtgttttcttcatttcattctattcttgttgatcatctgtatttttttaccgttcttttttgtcaaaattggttctggcattttaccattgcattgtgatgaggaatggaagctctgttacactattttaattgattctgttgggtttgggggttctgcattgtatccggaaggtttagatgttgataaaatttcgtctaataataattgttaatttttg

SEQ ID NO: 50664 - DNA, 243 bp, Glycine max
  Clone ID: LIB3107-071-Q1-K1-A11
aagatatggtcttcctccattgcttatgtttttttctcatctaagacacccacggatggagattcatggatggaatctttcataactccatattgctttaacaagcaccatgcgtataccatatttaatcccgtgctcacaaaatactgcctacctaggcagaatccaaggctgtttttgaatatcaacgtagccgtcttacaacctacaaacacctaaaaacatccaaaaaaaattggattc

SEQ ID NO: 50665 - DNA, 336 bp, Glycine max
  Clone ID: LIB3107-071-Q1-K1-A4
acgcgtccgaagacgagcggccgctttttttttactcttttttttttctttttataaaacaactaaattgaggattatctgataatgaatatgaactaaatatatcatgatcttattatgaatatgaatgcataataataatcgaaatcaaaagaatgtaataaataatgatcaggttctaaattatataaaagttggctctgataccaaatgttaggaaaactatgccattaattatatattttataaaaatttaaaacgccgttaaaagtcttgttgaaatcattatctaaaatattggaaaggactattcatactatatacctgtttaaaccc

SEQ ID NO: 50666 - DNA, 193 bp, Glycine max
  Clone ID: LIB3107-071-Q1-K1-B11
tacgtttcaaagaatatttcataagggtttccccactaccacttctgtgaaattttctggttcttaccagataaaaaatgaaatttttctttaatatccctcccccatcctataatatttaattttaaattatcgtctaaactgatgttagctatcttataggtgtgtcaaaaaatgtacatatgtatgtgtg

SEQ ID NO: 50667 - DNA, 208 bp, Glycine max
  Clone ID: LIB3107-071-Q1-K1-B12
gaacaagcaggattgatattctccaaccctttcagggtcctccgaacacactaatgcaaggggcaaactcgggaagaagaaaaagaagcagaaaaataagaaaagctgcacacgagaattctttgaaaattgactagaacacatttatctcatcttacacaggattgaagacagcactaggttcaaccacccaagcccccctccactg

SEQ ID NO: 50668 - DNA, 290 bp, Glycine max
  Clone ID: LIB3107-071-Q1-K1-C3
ttataccaaaaacaaaacacaatccaactaaattaattatatatttaaaataatttctcctttcttattattcaactttttacctttcatctacttcatattctttatattttacctaaattattttatttttccatttttacttcttccttacttatataaactttttctttaccctattaatttctttttatatattttaattttttcattttttcttatatcttaatattccttatataattttttctttcaaatatttttttctatctttatttatcaatttatat

SEQ ID NO: 50669 - DNA, 431 bp, Glycine max
  Clone ID: LIB3107-071-Q1-K1-C4
gataccaaaaacaaaacacacgccaagtgaaagtgagaaaaaataaaaatcaacgagcataatgtcagggatcattcacaagattggggagacccttcatgtgggagggcacaagaaggaggaggagcataagggtgagcaccatgctggagaatacaaaggggagcaccatggtgaacacagtagtgagtacaaaggagagcatcatggtgaacacaaagctggagagtaccatggtgagcacaagccagagcacaaagaggggttcctagacaaagtcaaggacaagatccatggtgagggcggcgccgccgagggcgagaagaagaagaaggagaagaagaagaaggagcatggccatgagcatggccatgacagcagcagcagcagtgacagtgattaaactgctgcatcacctatatatttaaaag

SEQ ID NO: 50670 - DNA, 212 bp, Glycine max
  unsure (1)..(212): unsure at all n locations
  Clone ID: LIB3107-071-Q1-K1-D12
gcacacacacacgcacacacacacactttcacacgctccctccctccngcgctctaggccgcgcccgggcgcccgctcgccctccccccctcctcttacgcaccggcctcggctccccgcgcccagcgtcgagcgaagattttctaggatcggagcagctcatggagaaagtgcccggcgacatggagatagagcgcaaggagaggaacgag

SEQ ID NO: 50671 - DNA, 427 bp, Glycine max
  Clone ID: LIB3107-071-Q1-K1-D2
ggcatcacgcacgtgtctctctctcgctcgccatggctatggctatgcacagcggaatcggagtctccaagatcctcatcatagcaggagcaggttacaccggcaccgacctcatcaaaaacggaaaactctcggatttaatcggcgagcttcagttgctggtgaagggattggaaaaatctggggagcatgctgaaggtgaaggtgaatatgctgatgccatagctgctcaggtgcgtcgcctggcgaatgaagttcggcagctagcatcaaacaggccaatcacagtactgaatgggggttctgaacaaagtaatttatcatcccttgtcgttccagctgctgccttgggcgctctggggtatggctacatgtggtggaggggaattcattctcagatcttatgtatgtgactagacggaatatg

SEQ ID NO: 50672 - DNA, 173 bp, Glycine max
  Clone ID: LIB3107-071-Q1-K1-D3
atttattccaataaaaaaatctccttataaaaaactcaactattttatttccctcacatcctacttcataaattacacaaaactaattcttaattcataaaattcaaaaaccatatcacaacaataatttcaataaaacaccccccaatttctaacatagtagaccaaaataa

SEQ ID NO: 50673 - DNA, 171 bp, Glycine max
  Clone ID: LIB3107-071-Q1-K1-E10
caactggtcagaaggggtggctggatgaagtaaactatctaggccagctttctcatcctcatctagtgcaatcaattgtccattgcttttactatgcacaccgacttctgccctatgaatttacgcctactggccacttggaatatcacttgcccatgagaggctcgaatc

SEQ ID NO: 50674 - DNA, 220 bp, Glycine max
  Clone ID: LIB3107-071-Q1-K1-E11
agaaggggttgcagatgtagttggatggagaagctggatttgatgatgctcaacatgagggaggaaagggagctcttgatgactctagttgaaaaagtcactaattcaaggtttggtgaaataataatggaacctcaaagagcaaattatgatgtatcatttggagttcctccaattgaattggagagaaagttgcatgaactgctttgaacacgactgg

SEQ ID NO: 50675 - DNA, 264 bp, Glycine max
  unsure (1)..(264): unsure at all n locations
  Clone ID: LIB3107-071-Q1-K1-E4
gggccgaccgacgcgntacaacacctccaaaagacaactttacgggaccactatattctaagacacttatgggaaaaccgtgcgaataaatatgatttcatattatcatctcactttttatcacgggacctaaccgccgtagaatatcctgtagacttgacttgacacatcataattgtaatatttaaatctcaatctaattctccatttacacagatattttgctactttatcctttttgctcattaaatttatcctaaacac

SEQ ID NO: 50676 - DNA, 190 bp, Glycine max
  Clone ID: LIB3107-071-Q1-K1-F11
ttcttaaaggcttattgagaataaagacttggggatttaagagtgagatttaaagcactctctatttatttattgatgcaacaactctgtaatgcaatttttagacaaagtcaacaatatatcttttgtcaaatgcacaaatacagtagctttatttaaggttgatgttgcaccatgtcatattgtatac

SEQ ID NO: 50677 - DNA, 178 bp, Glycine max
  Clone ID: LIB3107-071-Q1-K1-F12
gtactacatttggcataatgacggaatatgagggagagcatatgataatctggtagttttatatttgctcacaactaactttttaaagagttatttttaatcctaaaagagatttccctgctttgatccttatagaaatgatttcgtataattaaggctaaaaaatgcacttagtcat

SEQ ID NO: 50678 - DNA, 178 bp, Glycine max
  Clone ID: LIB3107-071-Q1-K1-G10
ggtaaaccgcattccttatgaggttacctaacggaaccgttcccttttaaactcttatctctctttttcgcccaaaatttaatttttttttattattaaatcgcgttttatgatcatgcttacttacaagcttagcttttgactgcgcataaattttaaccttccttccttggatccc

SEQ ID NO: 50679 - DNA, 123 bp, Glycine max
  Clone ID: LIB3107-071-Q1-K1-G2
cgtccgaccgcgcgttccaatccgatcggacctactttttttgggggttttttctcctctttcccaagggtaaattatgagcttcaattaacaaagatatttctactatctaataatcaaaag

SEQ ID NO: 50680 - DNA, 214 bp, Glycine max
  Clone ID: LIB3107-071-Q1-K1-G4
tttataatacacttaacggtgccaatttgagagacgacaaaaggcgaagacagaaacatattttttacggatttcaaagatggtttgaccaaatttcttatattaacacatattctttctcatgtctttcatcagtaacaacttaatttgctctttcattatgatcttcctactaaattctttggcgcttatgagccataacttaatatgaact

SEQ ID NO: 50681 - DNA, 325 bp, Glycine max
  Clone ID: LIB3107-071-Q1-K1-G8
atagcaaacgatccaaactcttttttcatttgcagcatcaaaatgagtggtagcaacgatggtagcggcagctggagctctaggtttttgaaggtggctagtgcagctgccgctacagccgccgttgccggcggtttatatgccattctttcatcctcaacctctgctagctctgagatggaagtgccgtttggcagcgcacggcgtgagagcaaagaacgtgacgatggtggctccgggtctcatcctcgcgagggtgccaccacggtcagtcgttggaagaaacctgagattggttgggtgaaactgaacgtggatggttcac

SEQ ID NO: 50682 - DNA, 274 bp, Glycine max
  unsure (1)..(274): unsure at all n locations
  Clone ID: LIB3107-071-Q1-K1-H2
ggttgagccacgcgnccgaatgcgagcgaccacttttttttttttttttttttctatcctttctctaaaatcataacttgtttactacatgtgatttattatcttcaatcattctttaacttccacaagttttgagtaatcaatgagtatatacaaacttaaatcaaaatacttaatatcattgctatacatttatacaaaacttctaccctaagcacacgcaatggatccctatacagtcaagtaaaatccaatccacgaaatcatttgatct

SEQ ID NO: 50683 - DNA, 427 bp, Glycine max
  Clone ID: LIB3107-072-Q1-K1-A8
accgacccacgcgtgcgtccaggcgtgcgaacaggtgagatacgacttatgggaccccattctacaatgaaggtgcgggtccattgtgaattgtgaattatgatgttttcagaatctttgaatgggattttgatccaaaagcaatcttgataggaccaataacaatttcatgttattcataatctattatcttttcttatgttaaaatactatgatattttatgagcttatgaactatcacttttgacttcttcttttaaaaataccttgatcctttaaatttccacttacctcaattaagattgcttacatagggttgtgatttaaaacttaaacaatttatttctatataatgaccattgcattaaaaataaactacttttaggcttaattacatattttgtcttcaaagattaaaatgtttgat

SEQ ID NO: 50684 - DNA, 201 bp, Glycine max
  Clone ID: LIB3107-072-Q1-K1-B5
gacacaaggggtaacaaaaagggtcgggctgccaatccttaccggtctgttgatccagatttggctgcttcagctgcagaaataatcttacagggtattgtctcccgataagcaaaatcattggattcgtatgaagactctgtgactttggttaatggaggcaacaatcattacatttgaataaaccatctgatcctattg

SEQ ID NO: 50685 - DNA, 232 bp, Glycine max
  Clone ID: LIB3107-072-Q1-K1-D5
cgcgttcggacggctgatagaatacaaccgacaactgctctgaatgtttaaaatccaatacccctcacggggggctgcccttgccctttcttggtttataaaccaaccagctatttacaacaaacaagtctttcctcttcctatagtcgagatactaccaacctcatttgtcttttttaaggggagcatagctatttcttacagttacctcatgttgaataacatattaact

SEQ ID NO: 50686 - DNA, 292 bp, Glycine max
  Clone ID: LIB3107-072-Q1-K1-E5
gaccgaagcgttcttacagctgaaaaaagactacataaggggatgcgaattatatatctagacgctggaaattggtcaatggtagctctcgtgcaattcaaatggtcataactttgcactctgatttgcgattcatgctcataatatatcgtgacccttgtaatagatcaactgaagctctcgagcacataaatgatcctaacttttcacttggagttcctattaaggcgcataatatatgtagacgctctaaattgaataacgttggctcttgtgaaatgcatatggtcat

SEQ ID NO: 50687 - DNA, 259 bp, Glycine max
  Clone ID: LIB3107-072-Q1-K1-E7
ccacgcgttcgttgggtgcaaaaagacgcttaaggggttccaaacagaaagatatccaggagacatggggagtgttattggggtgttcgcataattcacatacatccctctatctattatgatattaaatagcatagttgattgttaggaacaatgttttacatctacaattaatgaaccaaatcaatcctatacaattgtttagagtttaacaaattcttaagaagtaccccacaccttcccaacaaatttaaaacat

SEQ ID NO: 50688 - DNA, 303 bp, Glycine max
  Clone ID: LIB3107-072-Q1-K1-H5
gacacacagctattcctcttaagcttgctactgagtttccacactgcataccttatgtcttccgaattcgaagttaatttgcaagatggctaaggaaaaggctcagatcaacattgtggtggttggtcatgtggaccctgatgaggcaaccaccattaacgagctgaataagcctgttgtggagaaagaagctccagggcatgccatatgagggcatgcacgtaccgcctctgaggggaaccagaaaattatgtttacaaaatattctgaaacccttaagtatcagagtcatcatcagtgtgt

SEQ ID NO: 50689 - DNA, 430 bp, Glycine max
  unsure (1)..(430): unsure at all n locations
  Clone ID: LIB3107-073-Q1-K1-A1
ggggacaatttattccattattaaagggataagcctcaggcttgcggcccaacacaaccaaaattcgctacttgttaagggctgcactataccagaatgtctcagggaagaggcagtgcatctttgcctattgtggtcactgtggtttcactactgtgccttttggaacgtgctaacgcagcaacttactccgttggaggacctgngggatggaccttcaacactaatgcttggcccaatggaaaaagattcagagctggtgatatcctaatcttcaactatgactcaacgacccacaatgtggttgctgtggacagaagtggatacaacagctgcaagacaccaaggggtgctaaagtgttcagttcagggaaggaccaaatcaaactagcaagagggcagaactacttcatatgtaactaccctggtc

SEQ ID NO: 50690 - DNA, 235 bp, Glycine max
  Clone ID: LIB3107-074-Q1-K1-A11
gatgacggggcgtccacacggccgcccaaacacgcccgattgtgtatgtgagtgcaaggatttgtctttcaaactaaacctaggttcactctctacggtaaggtcatgcattatcttgtcacgagggaattgaatggcactagtattcactcgatcaggagaacagaagctggacagattgtagggtatgctgttcttagttgtgaggcgaaggggactgaaccctatacatcat

SEQ ID NO: 50691 - DNA, 331 bp, Glycine max
  Clone ID: LIB3107-074-Q1-K1-A12
ctgccacacgacctcccacggggacgcaatgaccacctcagggcttcattggacgcagggatgatataccagaccctagccagcctgtacaggctactcgctctgatgttgccggtcctgctcgtgcataaggatcttgaagtataagacgaataagtatttcgtgttatgctttgagatagtcgtactcgaatggatgagaacttggatcatgtaggggagagttctttattgttttaaagaccgatactcagttaaatctggatggtaatgagcggttgagaatacatgtcggaacttgaaacttcataataattgtttgattgcatat

SEQ ID NO: 50692 - DNA, 521 bp, Glycine max
  unsure (1)..(521): unsure at all n locations
  Clone ID: LIB3107-074-Q1-K1-C10
cggaanncgccgggncggacccacgcccgtccggttccatcnnccaaatatttatggcgtgtatggtatgcatcgtggtttaggaccacnntctacaaagagtcagtgggggagtccagaatttatagagtagtatgcttgcaataccttgacatcntnnattcaagtcattgggctttgtgatcnnncaaatcactaattcnnccctgcaaattctagaagtctgtctcggatagtttagtggagaaccaagcgccgaataccaataggagagtaccgtgagatatgtcgagcagagtntggacgctgctgattgatctctcatgttnggatttccatagtcagaacaaagcgtggatacattaggagagcatgtgagactgtcaagcatagttggactgctgattgatagctcaacgtttggtttggtttctatggaacgtcaaaaatagtccaatgtcgtgtctaaataacattgaacaccgcaaatgtgttgcaaactactttgtctntattatgtt

SEQ ID NO: 50693 - DNA, 335 bp, Glycine max
  Clone ID: LIB3107-074-Q1-K1-C12
ccacacgaccaaaggggggggtacttactagtggtataagaagcaaaaagacttacctgggtccgagaggggaggtttcactcttattttacactctggaaatcctgacaatttgatgaacgagagtcctactgtcatagtcgatcctttttcatcacggcttgatctgggatacatcctcttagatccaccatgggcttttcgtgcaatggctggaaaaggctaccattgaagaagaatacgtattgatggcagagcctgaccacatttttggcactcccctacctaatctagcacatgggggatacccgggtgcattactgtttttgtacatt

SEQ ID NO: 50694 - DNA, 412 bp, Glycine max
  unsure (1)..(412): unsure at all n locations
  Clone ID: LIB3107-074-Q1-K1-C8
gcgtgcgnacagacgaccgcacacgcggaagagcatgtatataatcaccatacttctatgggggatgagcgcttattgcatacgggcagaaaactatttctcattaccagcaccactcctagtgcagttgatccaaaagatgcaagtgctaaagatgatcaatctcagattgtttatgaagaacatagagatcatgacaatacttttgtggttgaggagcctgaaagcatacaggagaagattattcaacagacaggaaccactcctagtgcagcttaaccaaaggaagcaagtaataacgatgatcaatctcagatttttgatgaagagcatatagatcatgacaatacttctgttgttgatgagcctgaaagcatacaagagaagactattcacagacaggaaccactcc

SEQ ID NO: 50695 - DNA, 291 bp, Glycine max
  Clone ID: LIB3107-074-Q1-K1-C9
ccgccagggcagccgtcactgaaactgagggaccgtgcctgtccgtcattgcttagatacctgtcgaggtggccaagcgccttcgtgagccaagactggttgtgaaatgcatatggatggaaaagatcatgaggcttggcctggagcgagtcctgccgggccacggcactgtacctataaggccgtactcattgtgggcccggaatgatgccttggcagagcggaaggcctgtgtacaaagtaccgccacggatttctgagaggacgatgaggatgctcctcaatcaggcc

SEQ ID NO: 50696 - DNA, 285 bp, Glycine max
  Clone ID: LIB3107-074-Q1-K1-D10
gctgccagacgacctcggaagggggttctagatgcatgattgcttaccgacctgacggagttgagcctatagtgatgggccccgttcgtcttggtagaaaaatacacatgacattgccaaagctaacagtggatactggggatgctgaagatccatgctgttcgcattggcgatgatggtgcatttgaatgtgcccaggctggagctcctccggagcgaccacctgcggcacctctaccataggagtgcgccctggccaggctgacttcgatgctgccgaaacgg

SEQ ID NO: 50697 - DNA, 388 bp, Glycine max
  unsure (1)..(388): unsure at all n locations
  Clone ID: LIB3107-074-Q1-K1-D11
cacgcgtncgccatgcccaaaaaaagaggatttcgggtgctggtcaggatgtgcagcaaaggggtgagcagagggggttcatccctcgcgtggtcaaggagcttgccttcttagatgccagtaaccatggctgactcaccgaggaagatcatttgagagatgccaagtgttgcaaacgaatctacgacgatgaattacgccggataaacagtggttctttgaaaataaaaaggcctaagactgattgaggggtagaaggcaacaatggtgaaaccaaatccattatggcatcaggacattacagtgatgagacaaataagatgtcggaggaagaagattagctcgcgtatataaattttaagttttgaacgatgaaactagagcttta

SEQ ID NO: 50698 - DNA, 470 bp, Glycine max
  Clone ID: LIB3107-074-Q1-K1-D12
tggaaaggggtaataatggatcatgagctaccaaagccgtacctgatagtgacttgagccctgcacgtctcttcgtcactggcgcggctacgatacgaataaactagaaattaccatgtgccaaactgaacaatctgagaattggaaagtcctcaaagatccactgctgctggcatttgcaagcattggtgacaattgactatgaagcgtgctgttaaaccttgctgagggttttaatggtgctgatctacgaaatgtttgcacggaggccggaatgtcagcgattcgtgcagaacgtgattatgtaatccatgaagatttcatgaaagcagtaagaaagttgaacgaagccaagaaactggaatctagtgcacactacagtactgattttgggaaagagtagagagattacttcttttccgttttggaagccatggagtacggagcagtgcattatattttagatgtct

SEQ ID NO: 50699 - DNA, 418 bp, Glycine max
  Clone ID: LIB3107-074-Q1-K1-D9
aattgaggggtggacccacgcgtccgcccacagcgttagacgaagggggctgcggcggttgtggtgctgcatgtggtgggggctgagggaatttgattaagagtactggctgcggaggtcgtggtggtgatcttatggatagtaaatgtggtattgatgaacatctcaatgaagagctaaagtatgcgaatgaagaagcagtcactgcatgaatcatgtttcatgattatgcattggcactattgtattgtatgtatgaacgtgtggctatgagcttctcaatttcgcttctctgtcattgaagtctttcttagacagaaaacgtagaaaaataagcaggagagttaaatgtgttataatcaacttggaggttatgattctcagttagttacctgtgtgtgtacttatgcctttctgt

SEQ ID NO: 50700 - DNA, 96 bp, Glycine max
  Clone ID: LIB3107-074-Q1-K1-E7
ctctctctctctctctctctctcccccccgcgcgcttgctttttgtgtgtctcttgccggcttgctgttcctgctgttggctccctttctttcttt

SEQ ID NO: 50701 - DNA, 266 bp, Glycine max
  Clone ID: LIB3107-074-Q1-K1-G1
ggcgagccgcgcgtgcgaccacgcgcgcgcgctgttgttagaagacgacagaaggggacaccacacgagccatctcggggtaaggttctgcacgctgtgctttcagcgagtgtgcttttttcgtttcaacaccccaattttcacacgctgcttctttagattcagaaatggcgcaagaaacccttttatttacataataatctgttaacaaaggtgacccccacaagcggtgcgaccacatatctgaggcacagcgccatgggtgc

SEQ ID NO: 50702 - DNA, 227 bp, Glycine max
  unsure (1)..(227): unsure at all n locations
  Clone ID: LIB3107-074-Q1-K1-G5
aaaagaccaccgaagggggggcaacagaaaagaaaaaaaacancaggggcggggcgngaaaggacgcgccacgaacggaaccagaaacgaanncaaggcagccacgcacagacgagcccaagcagagggaggaacgacaacgaaaagnancaaccccacaacgaagagaaggccacgcagccagaacaaaaaaggccaccaccggncacaagaacagggacaacaaa

SEQ ID NO: 50703 - DNA, 346 bp, Glycine max
  Clone ID: LIB3107-074-Q1-K1-H10
accttcgacgggcctgaacatgctggccacggtctctaggtatatggcggtctataatccctaattactgttaacatagacagcactgaacgtgtatcccaaatcatgaacttccatagatcaaatgttatgctcctacaccctcagttgtggattaagaaaaacctctttttttttacggtgaagaatttgcttacacatatagatactgaaatactatgcattctttttttctttccaaatgtttattagttgcagacaacagtgaacatttaaaaaaaaatgtactcactcgtaactgttatgaaagcgtcttttgcatcagattaaacaaaatttaattctt

SEQ ID NO: 50704 - DNA, 241 bp, Glycine max
  Clone ID: LIB3107-074-Q1-K1-H12
acctccctttgttaaaagaaagcctccaagatcctcacttcttgattaattagagatttctttttttttacggtgaggaattgcttacaaggatgtatactcgaatactttgtattctttttttcttttcaaatctttataaggtgcgggcaacaaggaacattttaaagaatatctccctaatgtaagcttttatgagtgcggccttttgcctccgattaaaaaaaaatttaattttttt

SEQ ID NO: 50705 - DNA, 283 bp, Glycine max
  unsure (1)..(283): unsure at all n locations
  Clone ID: LIB3107-074-Q1-K1-H7
aattatacggggactatatccccaatggcaataagtcttgaggagttgataccatcaaaccatgccaaggcttatctatattccatcttcatcaaaacacgggtggtactttctaccctgggtattgggctctcagaaccctcttttcgtctggggaagacattgattggatcattacccacaatgccttgttacttttaatctaccctgngcgtgtttcctaataaaacttgcgcggcaaaaagacacgaacacatgcagcacttttcattacaattattac

SEQ ID NO: 50706 - DNA, 325 bp, Glycine max
  Clone ID: LIB3107-075-Q1-K1-A11
ttaaatttttcactttttttttttttccttgttttttaaattggaagttgtacatttatttttcagtttttttttctttgaaaatttccttttgggttttttaacttggtttatttaagtggttttttttttcttgttttaatttttttcttttatataaaaaaagttttataatattttttttgtttcttaatatctgattttttttccccattttattttttttttttttattttattttttaatttttttttttattttttttttttaatttttttttgttgcggttttttttattgtttatatttttttattttttttttt

SEQ ID NO: 50707 - DNA, 400 bp, Glycine max
  Clone ID: LIB3107-075-Q1-K1-B2
cggtccggaattcccgggtcgacccaagccttcggccaacccttccgtccggttgcgaaaaaaacaacagaaggggaaccttttaagcacaacacatcacacagtgagagaagtatacgtacgaggatgtctgacattgctatgtttggtggcgaggagtatgagaggagggtcaagagtttaagaaaggccgtggtggtggaaaccgagcggggaatttgcatggttcttggtttcgggatgggctagctcaggaaagagcacttttaatgggttggacccaagaccaagtgcatggtgttcaacacttttctctgtaaacaactattatcactcctctgactctgactgcttgtgatgattgtgcaccaatgtatctagttttcatatctaatttatg

SEQ ID NO: 50708 - DNA, 373 bp, Glycine max
  Clone ID: LIB3107-075-Q1-K1-C2
ggtccggaattcccgggtcgacccacgccgtccgccaagccttccgggagtacattgaccaccatgaaggttgatggttcacgtactatgtatgaacatgtcattgagatgacagacattggaccaagacttaagaccttggaaatataatggctgtgaatgagaactttcttgctcagattgttctaaactcattaccgtctgagtttggtccgttctatatgaactatactaccacgaaagatacacggaatgagcatggatcgcacagtatgttagttcagaaaaaaaatatggctcacgaatcaaggaagccactcagttcattatgtgagccaccaatgacatcaaagagcttgataagaaatttatg

SEQ ID NO: 50709 - DNA, 314 bp, Glycine max
  unsure (1)..(314): unsure at all n locations
  Clone ID: LIB3107-075-Q1-K1-F4
cggaattcccgggtcgacccacgccttccttccggttggcaaaagaacaacagaaagagcctacccctttctcttctttcttgtagatcgngatggcggcgcagctaatccgtgatcgagtagagatggagtgcctagagggagcttgggagaccctcgaaggcaacacgaggtgccgatttcggggcaccattcgattcacggctacttctttggtgcatccagatgaacctgcacggacgcttcagcgcactgtggagtggatactacccacgcctacaccatatcgtctagtggagcccgttcaagtgatc

SEQ ID NO: 50710 - DNA, 397 bp, Glycine max
  unsure (1)..(397): unsure at all n locations
  Clone ID: LIB3107-075-Q1-K1-G1
cggtccggaattcccgggtcgacccacgccgtcctaccggttgcaaaaaaccaccaaaggggggtggcaaaaaccgaccccaaaactaaacctaccttcctttaaacctttcactctttttttcttttccaatcaaaggaataatatttcttaaaaatattcccgaaccattgctcaacccaatcctatgatttttggtggtggaattctaggtaaccttgtctccttctgttgctttctagcaccagtaccaacattctatcgagtttgtaagaagaaaaccacggaaggtttccaatcacttccttacgtggctgcactcttcacttcaatgctttggatattntatgcttacataaagacgggcgaaatacttctcatcaccattaacgcattc

SEQ ID NO: 50711 - DNA, 263 bp, Glycine max
  Clone ID: LIB3107-075-Q1-K1-G11
gtcgaccgactcgtccgttcatagtctacataaggttgatctagagccaaaaatgagccactagcagtctagcacaagggcgcactgtcatgtttgccatttctctttcctttcctccttttttcctttatcagcacccttttgatttgccacttgtacttgcagaccctaatcaacatatttttcaatgcttcttctctcattcaacctatgttcgtgcgcctctaattataattgaaaatctccgatcttcaaggtttttc

SEQ ID NO: 50712 - DNA, 183 bp, Glycine max
  Clone ID: LIB3107-075-Q1-K1-G2
actttaaacacctaaataattttgcctttttgattgactgggttgaatacttgtaacttgtggcattaaattatttgtacgatgctgaaatttatactatatctgttatatgctataagtgctgatatgatctaaatgttgtctttgaattaacatacaggagtaccagggtgaagtacattt

SEQ ID NO: 50713 - DNA, 291 bp, Glycine max
  Clone ID: LIB3107-075-Q1-K1-H4
ggggttctagtgtgtgatggtttgttgttgtaactcgttcttcttcttttgttgttctgtgtttgtgtttgttttttctctcacctgaaaatgtcttgctgcggtggtaactgtggttgcggaagctcctgcaagtgcggcaacggctgcggaggctgcaagatgtacccagacttgagctacactgagtcaaccaccaccgagaccttggtcatgggagtggcacctgttaaggctcaatttgagggtgctgaaatgggtgtgcccgctgagaacgatggctgcaaatgt

SEQ ID NO: 50714 - DNA, 287 bp, Glycine max
  Clone ID: LIB3107-075-Q1-K1-H5
atgttacaccctcgattcaagatgaagttggtagattattattatccgcaaatttttggcagcatgtctgcaaatcgaattgaagaggtctttgatggtgtaaaggctctatacaatgaacattcaatatgctcccctttagcttctcatgatcaaggtctggcctggcaggttggcaatggttcacttctcttgcaaggttctgcgaaggattccagggatcgattgatggggtttgataaatttctccatgaaactacacatggtgaatgcacaaaatcggatct

SEQ ID NO: 50715 - DNA, 355 bp, Glycine max
  Clone ID: LIB3107-076-Q1-K1-B5
gagaagacgaccgaacgggcgtttgactatggactatcagactgggctagagctttgggggtccggatggggagtcgggtgtacactgtattagcatttatggagtgcctaacatcacgtttactgttggagacaaaactttcacccttactactgagcagtatattctgaaaactggagaaagcattgcagaagtttgccttattgggtttattggttttgacattcctcctccacggggtcctctctggattcttggggatggtttcatgagggtatattacaccgcctttgactattgcaatatgacagttggtttttccaaagctgtcttacaagacatgtttgagattat

SEQ ID NO: 50716 - DNA, 131 bp, Glycine max
  Clone ID: LIB3107-076-Q1-K1-B6
gggttgttcttggtgtgcaccatatcaatggggggctctggaaccaggctatgggttttttcactcacacttcaaagctccccatcaaataagttgcgccccccattatttttttttgctttaaaattttt

SEQ ID NO: 50717 - DNA, 263 bp, Glycine max
  unsure (1)..(263): unsure at all n locations
  Clone ID: LIB3107-076-Q1-K1-D10
ggaanacagggccgacccactcgtccgnactgtttctggatgacgacttattgtgttgtcttgtgtgtgattgttatgttttgttactcgtttttcttcttgtgcttgtctgtgtttgtgtttgttttttctctcaccttatgttgtcttgctgctgtggtaactgtggttgctgtggctcctgctggtgcgatacttgtttcttatgctgttgattgttcccttacagtttcttctctgtttcaaccaccaccgagaccttg

SEQ ID NO: 50718 - DNA, 366 bp, Glycine max
  Clone ID: LIB3107-076-Q1-K1-D8
agaaaacaacatatgggggtttaagatagcgaacccaaatcgagaacggggttattttcaaaggtgacaatcttttttcctatttcaaacaagggaataatatttcttatagatattcccaaaccatgactcattccaacactattactcctgttgtttgaatactagataaaaaatatcttcttttgttacatatctaccaccattaccaacatactatttactatttaagaaaaaaaccatctattgtttccaatcactttcttacgtggttgtacatctaactaaaatacttagtatatattatgcttacataaatactgtctaaatacttctcataaccattaacgcattctgttgtcatat

SEQ ID NO: 50719 - DNA, 181 bp, Glycine max
  unsure (1)..(181): unsure at all n locations
  Clone ID: LIB3107-076-Q1-K1-E10
cccacacgtccgcggaggaggagaagcnacagaggaggaagagagaagcgnaaaagggaggnaagagagaggaggtngggcaggaggtgaccgaacgaacanatagagggtttgcaggttggtggggcagagaagagagagngaaagtgcctaactacatgcgaggggaggctccaggtgt

SEQ ID NO: 50720 - DNA, 425 bp, Glycine max
  Clone ID: LIB3107-076-Q1-K1-E3
gcgtccgtccaggagttcgaacgggtgagataagacttattgattgtaaaattgttgatcaccacgggtaacggaaaccgtgtgaaggttccccacaaatctcaacacattttaatattttaaaatcaaatatttttggaaaataccacatcagtttttagctttctacaacgtttgatttggatcacttttcgagagaaaatatttgatcatataaacattgcttctcaatcatatgttgtgtgccaacaaaacgttttttgtgttggatgtgtactatttttcaaataatggaagctatgtttaccacatcggagactctgattcttttttttcttcgtgatttgatcgattttgtttcattgagttattttttgtcgagttactcactatacattatgattttaatgtttcatatttgatct

SEQ ID NO: 50721 - DNA, 224 bp, Glycine max
  Clone ID: LIB3107-076-Q1-K1-E5
gcgtacgacggatgaaaaaaaaaaatatatgggattttacaacatctctaaacccacggggccgggggacaatccaagggggctaccccttaatatatacttacaaaattcgtataattaaaactgctcctgtgacactgtttttacactgttttttttaatacttttttttttcacactttttaaacaacataaactttctatctaatttaattttaatttaa

SEQ ID NO: 50722 - DNA, 397 bp, Glycine max
  Clone ID: LIB3107-077-Q1-K1-A8
ccggaccggaatgcccggctccgacccatcgcgtccgttcgcgataagacgacagacggggaaagattttggaggttctagttttgatgggagggatttgttgggtggtcttgttggggtggtcaagaaaaagaaggatgtgctgaagcaaactgatttccatgatcctgtgagagaatcctttgaggcggagcttgaaagggttcagaggatgcaagaacaggagcggcagcgaatcattgaggagcaagaaagggcattggagttggctcgcagagaagaggaggaaagattaaggcaggctagagaacaggaagagaggcagaggagattggaagaagaggcaagagaggcagcatggagagctgaacaagagaggattgaagctttgcgaaag

SEQ ID NO: 50723 - DNA, 316 bp, Glycine max
  unsure (1)..(316): unsure at all n locations
  Clone ID: LIB3107-077-Q1-K1-C6
cggcgacggtgcanaatacacagaagggaaattttttcttctatcctaacccctaccatgggcgggggcttttggattgattccataaacaaatttatttactattataatatttgtagcatttaataaatattatcttcgacctaaatatttaataaagttatcacttttttttttgaaagaataaagtcttcattaattggcttatttaatattacattattctacttaatttttatattatctgtattaagataattaaactgatatttatattaaaactaatatttttccatgaaagaaaaatgttatttaa

SEQ ID NO: 50724 - DNA, 143 bp, Glycine max
  unsure (1)..(143): unsure at all n locations
  Clone ID: LIB3107-077-Q1-K1-C7
cccggnccggaattnncccgggtcgaacccacgcccgtccgtaccggcnttgtcgagaagaaacgacagaaggggtgatgtgtaaaatttggtcattaccttgcaccnaacttttttcgaactgatgtttttgggtattaccg

SEQ ID NO: 50725 - DNA, 410 bp, Glycine max
  Clone ID: LIB3107-077-Q1-K1-C8
cgaccccacgcccgtccgtacccggctgctgagaaagacccgacagaagtggggatgtaacttatgaatagatgtactcatctcacattaaattcgagagtgtcaatgttgtgactcccaagcgaacgcgctacatagacccataatcgatagtccaataaacgacacctgcaatggagattggacgtcaccgctacctactttcgagtcgctttcattataccttttaacaaaagcttcaattaccaattgacaagtgggtatatctgaaacctttgccaaaattgtagaagaatactagtcgtgccaatgatattggcgtggagaggtaccttaagatgataaaatgggtgccagaggagggactatatgctgaaagcctatgccatattggcactgcgcatttgata

SEQ ID NO: 50726 - DNA, 169 bp, Glycine max
  Clone ID: LIB3107-077-Q1-K1-E8
gtgagactgctgatctaaataactggtgggcggtttattaaaatgaatgtcctttgaaatattcgttgctacaatttttgtagcatggcaatgccatgcgtacgatatgttccctctccgatgaacactgtatattgtgcccttacttcttatgttgaaatcgcaagat

SEQ ID NO: 50727 - DNA, 206 bp, Glycine max
  Clone ID: LIB3107-077-Q1-K1-G4
acaaatcaaacagctgccggggctttctctatgcctctgaacacattttattttacattcatattacttacactacacatagacagcaatacacaatgataggatcttttattaacaatgcacttgagatggttttaggttatgcctttccactctataaatgctataaatcaattgaaaagaatatgccataaattgaacaactt

SEQ ID NO: 50728 - DNA, 350 bp, Glycine max
  Clone ID: LIB3107-077-Q1-K1-G9
aaaaaaacgacaaaaagttgttttgaaaaacacgcaaaaattttacatttggttgtttattcttaaaatggttcggatcctaataccggaaagacgattatatatacttgacaccacacttgttatacgtgaacttcaataaattgcaactcgcatcttgattgtcaactaccataaatgatgtatgtaatgttccctattcaaactggaagatattaaagttttattaacagatctaaattgctcaattgtattattaacttattgtacaccatatattgtatcctccaacttaaattttattttgtgccagaaatttttatcaaaacttaacctattatttatcaaaa

SEQ ID NO: 50729 - DNA, 421 bp, Glycine max
  Clone ID: LIB3107-077-Q1-K1-H1
accacgcgtccggacgacagaacggtccttcaccatcatacgatcatcactacaaaatttcccattaaatactggtatgtggaatggaccctaatttcatattatttcctcattaattatcaattattgcgcgctatttaactttctagcatagagtttaggcggcaccaatatactctctccaacctataattattatcgagatttctttttttatctcacaacagatcttattttaattttttaatataatattaattacatttttatttataatattaatggtaaacaaaaaatatataaataaattaataataatataaaattaatgttataaatacatttatgattattttttatttatgtaaagtaatctaaaatgactgatattttgtaactaagtagatatctttttcagaag

SEQ ID NO: 50730 - DNA, 403 bp, Glycine max
  Clone ID: LIB3107-077-Q1-K1-H10
caaaagggggggaggtgccttttttcactacctaactctatatcgggtcgcggaacataccctagccttttgagtcttccaagatttcaccatcgtaatgggttccgaaggatccagcgtcgtggttcctacgaatttcagattattggaagagcttgagagaggtgagaagggaattggggatggaactgttatctatggaatggatgatgctgatgacatatacatgcaatcttggactgggactatcatcggtccccctactactgttcatgaatggcgtatctaccaattgaaattgtgttgcagcatggattatccaaacaatccttcatctgttagatttaaacaaggattaacctgacatgtgtcaatcaagaaactggggtggtttgaccccatt

SEQ ID NO: 50731 - DNA, 199 bp, Glycine max
  Clone ID: LIB3107-077-Q1-K1-H5
actcaacttaacataactaacatgaattcattctctaatttcatcattatctttttaatcatctctacaacatgcaaattactcatcttaaactactatacaaaaacataccctaaatgtgatattatttattccaattcactaaatcattccactcctatgaacaaaacttttccatcatcaattctaccaatccact

SEQ ID NO: 50732 - DNA, 245 bp, Glycine max
  Clone ID: LIB3107-078-Q1-K1-A10
agtctagggttttctgtgagctctcggctctggtcttcaaccttctccggtcaccgtcgatcgtgccggagcctccggcgaggcgttcgccggcgggggcgcagattactccggcggggttcgcgtcgctactgctagggatttcggcggcgctgatgctgtgtggatcggtgactttcttcatcgggttcatgctgatgccgtgggttctcggattggttatggtgttttacgtcgctggcgtc

SEQ ID NO: 50733 - DNA, 322 bp, Glycine max
  unsure (1)..(322): unsure at all n locations
  Clone ID: LIB3107-078-Q1-K1-A4
atatttctttcttatgctcttaaacttttcattatgcaagatgaatattttgaggttgataattctgcaatcaaacatgatgggttctttgtaaatagggggaaattggaacgcatgtaagtttttctgttttaaaaaatctactttgaatattacattttgttcttttcaaaccacacatgtttaaagcaaatcatagaaaggtttctttgaaacttattttatttgttgatcccttttcatttctgagggtggtctcttgntatcattttattgtatttgctgttaaataacatctttttagctggctcaaattattcat

SEQ ID NO: 50734 - DNA, 418 bp, Glycine max
  unsure (1)..(418): unsure at all n locations
  Clone ID: LIB3107-078-Q1-K1-C6
ccacgcgttcggccagcgttcggccatgccgtcggcctttttctcttttagccgtccgaccggttggggagaacgccaaagggggttttccgaacccgttgatgttaggattaaggaagtagactagattctcggaaccaagctcaacgcggcatgttccggtattgccaatacagtcttgtccagtaacccgctagaacgattaagccagtgtcctgatgaatcccgtggaacctagtataggatctcgtctgaggatcctcggcattctgagtggatgtatgattcgccctaatccattaatcacaaaagaagcgcatcagtacaagcggatattgatcctgcaagtggagtggctctccatactacctacagaggtagcttgngagcacatgcctatctgtgtactgttctttcc

SEQ ID NO: 50735 - DNA, 390 bp, Glycine max
  unsure (1)..(390): unsure at all n locations
  Clone ID: LIB3107-078-Q1-K1-D5
ttctctctaaaaacaatnctaatgtcattctccttctgttcaaacactctctctcatggcatcagataagaagattaagatcggcatcaacgggtttggaaggattggccgtttggtggccagcgttgcccttcaaaggaatgatgttgaacttgttgctgtcaacgatcctttcatcaccactgattacatgacatacatgttcaagtacgacaccgttcatggccagtggaagcattttgatgtgaaggtgaaggactctaagacccttctctttggtgagaagcccgtcaccgtttttggaatcaggaaccctgaggaaattccatggggtgaggatggtgctgattatgctgttgagtcaactggtgtattcactgacaaggacaa

SEQ ID NO: 50736 - DNA, 350 bp, Glycine max
  Clone ID: LIB3107-078-Q1-K1-E12
tgagggcactgtacgtatcatattgtcaacatcattaacaatatcagagatacagtcctttctaatctcacgtggctagagttccattgattttgatgcttatatttgcaatagtggcagtgatctatactatccatccctcaatcctggagagcgcccatttgtggatgactttcattaccactcacacaatgaataccgttggcgtggagaagggttgaggaagactttaatgccatgggctgattcaaccactgataacaagggtgataatgaaaaacaaatcgtcagtcctgttgaacagctttctacacactattgatattcctttcaagtgcctaatccactca

SEQ ID NO: 50737 - DNA, 252 bp, Glycine max
  Clone ID: LIB3107-078-Q1-K1-E6
tttttattagactcatataccatattccatcaagctatcccccctgagtgtgacaagccatttgattgctcacggcttggttattaaaaatgcttttttgttgctttgcttcaaaccacaggtttgttggtaaggagtttttttttttttttatacggtttaaaaaaaaaaagttaataaacaaatacacctcaaccctaaaaatttcaaaaatctaaccccattaatataagtacatgctttaatataccc

SEQ ID NO: 50738 - DNA, 277 bp, Glycine max
  Clone ID: LIB3107-078-Q1-K1-F6
ggggttttaaaagaatcactaataaaataccaaatgtacaagcccattgacttcacacatttagacaaagatggaatagcgaccctcgggtcgtgggtagaaacgggtgatctttaagcgggtcaatcaacacctcaaatggcaaaagaatcctcgtattgccccggagatggattattacgagcgatacttggcattcagggatccacctcaaaggaaacttggataatactacctacaggcgggaggggtagagttattgatgagagatggatcc

SEQ ID NO: 50739 - DNA, 462 bp, Glycine max
  unsure (1)..(462): unsure at all n locations
  Clone ID: LIB3107-078-Q1-K1-G11
aaaaanntaaaaaaaaaaattaatttaaaaagttnaaaaaaaaaaaaaaaaaaaggagaaagggggaaaaaaaaaaaggaaaaagaaaaaaaaaaaaaaaaaaaanaaaaaaaaaaaaaaaaaagaaaaaaaaaaaaaaaaaaaaaaaaaaagaaaaaaaaaaaaaaaaagaaaaaaaaaaaaggaaaaaaaaaaaaaaaaaaaaaaaaaaaaaaaaaaaaaaaaaaaaaaaaaaagaaaaaaaaaaaaagaaaaaaaaaaaaaaaaaaaaaaaaaaaaaaaaaagaaaagaaaaaaaaaaaaaagaaaaaaaaggaaaaggaaaaaaaaaaaaaaaaaaagaaagaaaaaaaaaagaaaaaaaaaaaaaaaaaanaagaaaaaaaaaaaaaagaaaaaaaaaaaaaaaaaaaaaaaaagagaaaaggaaaaaaaaaaaaaaaaaaaaagaaaaaaaaaaaa

SEQ ID NO: 50740 - DNA, 258 bp, Glycine max
  Clone ID: LIB3107-078-Q1-K1-H12
tcgaaaccttaagtttccgatcaggtctgagcaatctggttggtagaacctttggtcttagagagtcaagttttatgtctgaattagacgatcaaattcctactgccttcgatccttttgctgaagcaaatgctgatgactccggtgctgggtcaaaagaatatgtgcatattctcgtacagcaacgaaatggaaggaaaagcctgacaaccgttcatggattgaaaaaagaattcaactataacacgatacttaaag

SEQ ID NO: 50741 - DNA, 381 bp, Glycine max
  unsure (1)..(381): unsure at all n locations
  Clone ID: LIB3107-078-Q1-K1-H5
gaattttacagcaggggtanacaatttgaacaacanaagcccccangggcgatccgcaagaagagcctggtccccagaaaccattagtcttgaatccaattcatatcaaagcaccaaagtgttcactgatgactgggagctcaattccccattttctgtcgtctcttcgctttatcaagaacctgacgcaaaattttctgtgcatgatcgtgtgctttcagaccaaattatagaagatgatgatgacgacgacgacgacgatattatgagctcctatgtcattgaactcaactccaacctgagaagggaagagtgtggaaaatcaaccattgatgaagcaattgcatgggccaaaaagaaatttcaatcgcaaagctctga

SEQ ID NO: 50742 - DNA, 451 bp, Glycine max
  Clone ID: LIB3107-079-Q1-K1-A12
gttttgaattcccgctgagaggacgcgtccgacagttcctcccaccatttacttcaatgttcttcgaacatccagccgcgcaagcctacagactacttctagcgcttgcggcgagcgtcttacaacaaccaattgcccaattgcaacaacaatccttggcacatctaaacctacaaaccatcgcaacgcaacagcaacaacagtttctgccatcactgagccacctagccgtggtgaaccctgtcgcctacttgcaacagcagctacttgcatccaacccacttgctctggcgaacgtagctgcataccatctacaacaacgtctgcaacagtttatgccagcgctcattcaactagccatggtgaaccctgtcacctacctacaacagcaacaattgctttcatctaacccgctcgctgtggacaatgcacctacttacctacaacaaca

SEQ ID NO: 50743 - DNA, 323 bp, Glycine max
  Clone ID: LIB3107-079-Q1-K1-B10
attccgggtcgagccaacgctcatacagatgccataagacgactgatggagctgcctatgccattttatttcgctatacctacaggcttctacggttcgcagcttggctctcatacaatggccctgttccttatctacaaatccaattcttgctacaccctagcctacgttcactggctcgacaaaatcacacagaacaccgaaccgactcagaactccatcccagacctaaacaggctcctactagcaactaaacttacttgcttcaaacctattacttccgctctacatgctctcatacaatgcaccaccacctctgaaag

SEQ ID NO: 50744 - DNA, 443 bp, Glycine max
  Clone ID: LIB3107-079-Q1-K1-B11
gcgtacgcccacgcattcatctcatcttgctagaagacgattttaagggggatgaagaaacagggacaatagacatttttaactgtgaagagctgaaagaacctttgtttttgttgttgttgttgttgttcatctggattgggttggctttagggctttgaatgccatctggggttttgctctcaagcaatcaagctccaaagctgacccctttctctcacttctaactcacataccttgttccattcttcactttctctctctagaactacaatggtagaagacatgtgtttcctctacaaagaaattcttgttatgaagcctccaaagagatcaccaatgttgttaaggacggcagtcataatattttcgattagttgtgagcgttttatcttccttgtatgtctaaaacagataagcacccaaacttaggactacattta

SEQ ID NO: 50745 - DNA, 409 bp, Glycine max
  Clone ID: LIB3107-079-Q1-K1-C1
attcgagcggccgatatacttatggggtgttttttttttttccattctacctttggagggttggtcccttcaaagcccaagtttactgccttataaaatatagctgctgatattttatttgtggtatgatacaattaacttttctttaaacttaaaaaatactttgcaataacaacaaaaccttaatgttgttttccattttgatcacccaacttaagtgacatcttaaataacttatttatcattttctttgcaatgcatatatacttaatctattcctactcaagtaaaaatcctttgattcaatgtttgtgtccaaaactcaagtttggagttaacttcttgccttattttctcaatcagaaattctattttaggtaaaaaagcctgcatttatagaatttttttt

SEQ ID NO: 50746 - DNA, 168 bp, Glycine max
  Clone ID: LIB3107-079-Q1-K1-E8
ggaaaaccggcggacgacgcgtccagttgcattgaacgaacggatgttgcataccactaataggaatacacaaacccaatggagggctactattgacctgatatacgtacctgatcattttgttgtagaatttataagtgttcccaaaagacaaagggattgctactt

SEQ ID NO: 50747 - DNA, 344 bp, Glycine max
  Clone ID: LIB3107-079-Q1-K1-F3
cacaaaaccacaaacaaacggcgtcaaatacaaacccatacatccatcctaacccttcttctttctttctctatccttatctcttaatccacttctatttactacccaccagttaatactccatcatttttcaagctttcataatacaaaccaatactctacaaactactcctactattatccaaaaacatcaaattacaatcctaaactccctctttaacaaccatcatataataatcctccatacaatattccaccttatccttaatacccttctccaaattaccccccccatacctaacttaagtcatgaaatctattttctactttataaataacattta

SEQ ID NO: 50748 - DNA, 330 bp, Glycine max
  Clone ID: LIB3107-079-Q1-K1-G7
gatgttataaaacaactgaaatatgctattttactatccttcaatctttttcattggggggtgtactaaatataccgttccttctttcacaaaatatctattaaaaagatatctgctcacccatatatctcttaccttctcacatcatatcctttcttcccttttgattctctataataaactatacatgtaaaatttaccatacttattaaaacaatctttatcatggtatcaacaaatatccagcatcttttaactttaaaactctaacaatgaataacaactcatatttcctttcttaaaaaatatcttaccaattcaaaaaacaac

SEQ ID NO: 50749 - DNA, 131 bp, Glycine max
  Clone ID: LIB3107-079-Q1-K1-H12
aattcccgggccgacgcacgcgtccgtccactcgtccgaacacctctgaaaagactttttatagccgatcctctgaattatcataagaggtttttttctatcgccttagagcatccaaacgacccacaact

SEQ ID NO: 50750 - DNA, 290 bp, Glycine max
  Clone ID: LIB3107-079-Q1-K1-H5
tcttgctagcagacgaccgatgggcaatctggggccttttattcatggtccaaataatctaatatattctgtaaaatttacattctatcatttgatcctccctcccttcaacgcggggatcaaaagtgatttgcatgacaatgaaacacaatcatcggttgatcatcatgctgctgcctatcctacgtctgagatagctcttgcttttacccacaaccagcttatccgcaataacacacattatcatatactcatttacatcaaccagccctgcgataaaatgcctatcc

SEQ ID NO: 50751 - DNA, 156 bp, Glycine max
  Clone ID: LIB3107-080-Q1-K1-A1
tcttaattccacaaccaaaaatgcatagttcaatgttacaatctgagatttttatcactgattaccttgtaccccaagaagtttcatgtcaatttcaatttcaagatatgagcaagaatgacaacaacatgccaatgaaccataccaataataacc

SEQ ID NO: 50752 - DNA, 103 bp, Glycine max
  Clone ID: LIB3107-080-Q1-K1-B9
ttgaaataagaactaagcgcggccactctgccggtacaacgactgtcttcagagaagaaactttcgaacccaatgagggggataaaggtgcaatagctagaaa

SEQ ID NO: 50753 - DNA, 314 bp, Glycine max
  unsure (1)..(314): unsure at all n locations
  Clone ID: LIB3107-080-Q1-K1-C3
atgttttattaatntcttattgtgaactctttaatgagtttatttggtgttggtacttgattattgtatgaacttatgaaacctttttagtttatttgaatgcaatcttttgtttttttcaatttcaatgagtttatatatatgtttttttttttttgtgtccgccatgacatccgccattttccgctacgccatccgccatatttttatggcggatttttgactttccgccatgaaccgccatccgccattaacaacattgcttaaaagtccatccctcttggaaagtgtcctcaatatgtataacccacata

SEQ ID NO: 50754 - DNA, 338 bp, Glycine max
  Clone ID: LIB3107-080-Q1-K1-C5
tcggaaaacaattttgactagattaagtgcagcacagagggatgtgcgattcagagagagaaagagaggcatggctgctgcaggtccagaaaacgtccctcctttcatcgacgctcagattagccacctcctctcccacttcggtcttacagtcaaggttgaacaaacgtggtcgagtgacaaatacaactccacccccctcgatcgcttcaccctcctcataccctactgcttagacttcatcaaatgggatgttatatacgacgcggaatctccgaacaccgcccccgacgttatctttagccccgaagacgacgatttacaccccctttcacatg

SEQ ID NO: 50755 - DNA, 341 bp, Glycine max
  Clone ID: LIB3107-080-Q1-K1-D4
aaaaagatttggtatagttttccttgcgatgggcccgggacgaggcggtacttgcgatatttcggcttgggacgcattttatttggcagttttctggatgttaaataccattgggtgggttactttttattggcattggaaacacattacactatggcagggtaatgtttcacagtttaatgaatcttctacctatttgatgggatggttaagagattatctatggttgaactcttcacaacttatcaacggatataacccttttggtatgaatagtttatcagtctgggcatggatgttcttgtttgacatcttgttgggctactggattatgttctaat

SEQ ID NO: 50756 - DNA, 401 bp, Glycine max
  Clone ID: LIB3107-080-Q1-K1-D5
accggttgcaaaaaacaaaagagggggtttcatttttccaatccaaaccaaaccaggccaacgtgaaagggtggaaaaggtgaaacaaaaaacagaccaccaatggcgacacttaaggttcctcaccctcttacccccgttgcagatgattgtgagcagctccgaaaagccttctcaggttggggaactaacgaggagctgattgtatcgatcttggctcataggaatgctgctcacaggaagcttatcagagaaacttatgcccagacctatggagaagatcttctcaaggccttggacaaagaactcacgagtgattttgagaggctggatcatctttggacactcgattctgctgaacgtgatgcattttttgcaaacgaggcgactaaaaaatggac

SEQ ID NO: 50757 - DNA, 178 bp, Glycine max
  unsure (1)..(178): unsure at all n locations
  Clone ID: LIB3107-080-Q1-K1-E1
accggnccggaattcccggtcgacccacgccgtcggccacgccttcggaccggtgggaaaagatcaccgaagggggggggccttgtaattaccatttccggttccaggaggaaaagcccgccccaaccggtgtgaagtaattgtgtgcggaaaatcgaggaatcaaaataggggttcg

SEQ ID NO: 50758 - DNA, 303 bp, Glycine max
  Clone ID: LIB3107-080-Q1-K1-E5
ggagcaggttacttggaaaatgaaaatcccccttatgtcatgacatgagtagtagtatttaagacgcatccgtgcttgtgttgtaataaagttttgtgtgttgttaggaataggatggagggggttgagagcaaagaaagagaagtgatggtggcaaaaccagttgcagtagtaagtgtctgtgatttgcttatgaggctgttggccttcacagttactcttgtcgctgctatagtcattgcggtcgataagcaaacaaagcttgatcccatccagctttcagattcttttccacctttgaac

SEQ ID NO: 50759 - DNA, 276 bp, Glycine max
  Clone ID: LIB3107-080-Q1-K1-F3
aaaaatgcaaatgtaggttcttttttgacacaaatattttacttcatttttgactgaagaataaaaatgattggtcacctaaactcattgatgtactgataatacggacacgcgaactgatggtttcgaatctagagctgtatcgacgattgcttatttgggacattgtgtgtgaatcaacaagcagaccaatcgacttaaaagatcaaaggacagactgtattgacgtacttgtaagactaaacgtacacggatataatcatatgatgatatgct

SEQ ID NO: 50760 - DNA, 377 bp, Glycine max
  Clone ID: LIB3107-080-Q1-K1-F5
cctttccattccccaattcctaatggttgaaccctaattctcatttcttcatcgttcgattcttctcctcctaaaggtacgtctctggtttcctctctctcttgttcattcttttcgtaatagcaaccttattagccttcgtttattgatttttctcctaattacacttcaattttttcgatttgtgtttgttacgtcaatctgtatatcttttttgttgtcgtcgaatccgaaacttttcattcgcctttctgattccgtaaatcgtttgttaagtgcaacatctttccctgttcttaggtatctgattgatttctctctttcttttttttttatcaagtttgaggaattaaggttcgtgatctgaatttgttctt

SEQ ID NO: 50761 - DNA, 373 bp, Glycine max
  Clone ID: LIB3107-080-Q1-K1-G1
aggggtttcttataaaatggtaaaacctgggaatcttcttcaacaaaattctggtactctttggtcggcccccagaggctattataacttatatgacttggccattataaaggcaaagtgacatttatctgtgggcgtgctggtgtttgtgctcttggtgctgtgatagctaagcatactggtgatgaaagattacttgactattacctgaagcaattcaaagagaacagattgcgatacctcgcgagtctccctatgagctattgtatggcagagcaagttacttatgggcttgttcattcttaaacaagcatattggtaacaacacaatacctactacccacatgagaatcaatgtggatgaagtattatg

SEQ ID NO: 50762 - DNA, 82 bp, Glycine max
  Clone ID: LIB3107-080-Q1-K1-G3
tgttattccacccatctacaccatttaggccatgttctaatggcatgataatgaattcgtgtgctccatctaaagattccat

SEQ ID NO: 50763 - DNA, 359 bp, Glycine max
  unsure (1)..(359): unsure at all n locations
  Clone ID: LIB3107-080-Q1-K1-G5
ccactgcctgtggcttccaaactctttccaatagctctcttgaaaacttctgcaggggtgatttcatcatctccatgaaggttgttgtatattgcanatgatggggctgaatgcaaggttgttgactcaaattcatcctccatcactgaattggaagaactatccatggacatagctagcaacaagatctgccaatatctccaatttgctattagagttatcaaaattgagaaatgctaggaatgaaaaacagtgctaaaaaagaaaaggtcggcgttagatattgctagcgatgatatggtaaagagactatgttcatgagaaatagcgaaaacgagtatttctatactctaagtgat

SEQ ID NO: 50764 - DNA, 243 bp, Glycine max
  unsure (1)..(243): unsure at all n locations
  Clone ID: LIB3107-080-Q1-K1-H10
tccaactacacagcccagaaaggnccatcacctcccacaaccttggacttggagcatcataaaacaacaccatgtttgctttcttccatcgaaaaaggacgtgcggttaataggagacaacttattcttcacacgccagtaacactagctgcatttgcagtcccaaatgcatcggcactcaatgatgtgtctgaagatgttcgtgtctacactgacgatgagaacaagttcaagattgagatt

SEQ ID NO: 50765 - DNA, 402 bp, Glycine max
  unsure (1)..(402): unsure at all n locations
  Clone ID: LIB3107-080-Q1-K1-H4
cggaattcccgggtcgacccacgcgntccgggagaagaccaccgaagggggccaccatccctttctttcatggcctaatggtaaccatggccttcttttttctcaatccatttcttcctcctcctttcaatagcccttttctcagtttgttgtttagcagtatctcaagctcccaccaccaaatcacccccctatatctttcccattaagaaagaccccgcaacaaatttgtactacacttcagttggcattggaactcctaggcacaactntgatttagtcattgatctttctggtgaaaacttatggtacgattgtgacactcattacaactcatcatcctacagacctatagcttgtggctcaaagcaatgccccgaaattggatgtgttggttgcaat

SEQ ID NO: 50766 - DNA, 314 bp, Glycine max
  unsure (1)..(314): unsure at all n locations
  Clone ID: LIB3107-080-Q1-K1-H5
tttttccttatggtacaagttggagatcaaaagcgactttccacaacacaagagctttcaaggggtcaacggaccatcgacttttaagccattccttcacgaacccttctttagntggacgtaagtggtggaaagagacttccttactccaccctactcttcctccaccatgacttanggagtttttcttttcctatctccttctttgcttttattacacttgtccgattctctttgatgatttaattcgttttaatcttttacatgtgctacattgangacaatgtgtngttaaaatatgggggggggagtgt

SEQ ID NO: 50767 - DNA, 249 bp, Glycine max
  Clone ID: LIB3107-081-Q1-K1-A3
taccggtccggaattccggggtcgaccaagccgtccgtacggtggcaaaagcaccacaaagggtttctctagaggatggtagcacgtgggcgcggctaaagcttgaggattagttggtcaaccgggggaagcagttgatctatactctgacagaggatgctgcaactagtaccggagctccttgctggtctggaccaaacagattccctcgtccactacaattctaagactcagatctggagcatctaa

SEQ ID NO: 50768 - DNA, 259 bp, Glycine max
  Clone ID: LIB3107-081-Q1-K1-A7
gacccggtccggaattccggggcggaccacagccttcgcgccggtgtgaagacaacaacagaggtgtcatatggctgatgtaccttgatgaatcagaggcttattctttgtttgattaggccactactgtttgatagctggaggacacaaagaatctgcgttttgtttgctagatgacacgcaacactgagaatgtgtgcgagtttcaacgctgctcagaacaagctcttcgagcttaagaactcaggtcagcatctac

SEQ ID NO: 50769 - DNA, 143 bp, Glycine max
  Clone ID: LIB3107-081-Q1-K1-B7
gattccgggcccgaccacacccgtccggcagaatacgacaaatacgacacagcggatagtcacataggctattaacggtgagagcgggagagaaacatacgacatcagatacaaatggataagtttccagccgttgacatggg

SEQ ID NO: 50770 - DNA, 270 bp, Glycine max
  Clone ID: LIB3107-082-Q1-K1-B8
gcgtccgtccggattcccggtcgacccacctcgtcgtgcaagcgacgatggtgaggaagcttccgagatatttcgcttgtcagaagggaaaagttatgggaggatgttgcttgattgccacaggaggatcgtgcgacgcaaaaaggttgtgtacgaccccgaccccctttgaccgtgtcatgatcctgctggagatgtggttctgcaaatgtggcaacgccaattaaattgaggtcaaaatagaagttctggacccagaccacacactga

SEQ ID NO: 50771 - DNA, 452 bp, Glycine max
  unsure (1)..(452): unsure at all n locations
  Clone ID: LIB3107-082-Q1-K1-H5
acccgtccggaattcccggtcggaccaacccgtccgccaagccgtccgccaacccgtccgacggtttggtttaagcgacagaaggggaagtaaaatcttaaatttctgaacattgaacaactcttcacacaacanaacttttttctggcattgtagcatcatgactggcagagaaatcctccatatgatgaaggtgaaagcagggtttggaacaccagacacagggaatggaaaaggcaaaatatcaaaacacattacacatggctttcacttgatgaagggcaaatcagcgcatcctatggaagattatttagtttcagaatttaagcaagaaaaggacagagaattaggcttgtttgcaatatttgatggccacttaggccatgatgtagcaagctatttgcagaaccaccttttccaaaacatcttgcaacagcatgacttttggactg

SEQ ID NO: 50772 - DNA, 179 bp, Glycine max
  unsure (1)..(179): unsure at all n locations
  Clone ID: LIB3107-008-Q1-K1-D2.R1
cccccccccccccccnttcncccccccccccccccccccccccccccccccccccccccccccccccccccccccccccccccccncccccccccnccccccccnccccccccccccccccccccccccccccccccccccnccccccccccccncccccccccccccccccccccccc

SEQ ID NO: 50773 - DNA, 462 bp, Glycine max
  unsure (1)..(462): unsure at all n locations
  Clone ID: LIB3107-017-Q1-K1-D12.R2
gggggggggcccccccccccggggggggggggggggggggggggggggggggggggggggggggggggggcgggggggggcgcgggggggggggggcgggggcggccggggcgggggcggggggggcgggggggggggngggcgggccggggggggggggggggggggcgggggggggggggggggcggggggggggggcggggcgcgggggggggggggggggcgggcgggggggcgggggggggggggcggcgggggggggggcgggcgggggggggcgggggggggcggggggggggcgggcgcggcgggcggggggggggggccggggggggggggggnggggggggcgggccgggggggggggggggggggcggggcggggcgggggcggggggggggggggggggggggcgggcgggggggggggggggggggcgggnggcgggggaggggggggg

SEQ ID NO: 50774 - DNA, 447 bp, Glycine max
  unsure (1)..(447): unsure at all n locations
  Clone ID: LIB3107-024-Q1-K1-A10.R2
ccccccccccccccccccccccccccccccccccncccccnnncncccccccccccccnnccccnnncccccccccnncnnnccccccccccccccccccccccccnccccccccccnncccccccccccccnnnnnccccccccnnnccccccccccccccccccccccccccccccccccnccccccccccccccccgccccccgcccccccccccccncccccnccccccccccccccgcccccccccccccgnccnccccccccccccnccccccccccccccggnnccccccccncccccccccccccccccccccccccccccccccccccccccccgnngncccccccccccccccccccccccccgccccccccccccccccccccccccncccccccccccccccccccccccgcccngcgccccccccccccgcgcc

SEQ ID NO: 50775 - DNA, 615 bp, Glycine max
  unsure (1)..(615): unsure at all n locations
  Clone ID: LIB3107-052-Q1-K1-B8.R2
cccgcccggcggggcgggggggggggggggggggggggggggggggggggggggccggggggggggggggggcggggccggcgggggggggggggggggggggggggggggggcggggggggggggggggggggggggggggggggcgcggccgcggggggggggccggggcggggggggggggcggcgggcggggggggggcgggggggcgggcggcggggcggggggggggggggggggcgcggcgggggggngcgaggggggcggcggggggggcggcgggggggggggggggcgggggggccgcggggcgngggggcgggcggcgggggggggcggggcggggggggngggggggggggggggggggcggggggggcgcgcccgggggggggcggggggggggggggggggggggcgggggggggccggggggcgggggggggggccgggggcgggggggggggggggggggcgcggcggggcgggggggggggggggggggggcggggggggggggcgggcgggggggggggggcgcgggggggcgggncggggggccggggggggggggggggcgggggggggcggggggggggggagggggggggggg

SEQ ID NO: 50776 - DNA, 65 bp, Glycine max
  Clone ID: LIB3107-082-Q1-K1-G7.R1
aaaaaaaaaaaaaaaaaaaaaaaaaaaaaaatattaaaaaaaaaaaaaaaaaaaaaagaatattt

SEQ ID NO: 50777 - DNA, 561 bp, Glycine max
  Clone ID: LIB3107-078-F5-R1A
ggtacaggctcttcaataattgcagtataccctagctagcccacgaagaaactttactttgttatgtcgccccctctcctctgttgtcttacgacgttagccatagaagtctcaaaagaagaagctcgagtggcacccgcaccggcagtagtggcgatgctgccatcccctagcatgggccacctaatcccaatgatcgagttcacaaagcgagtggtgtgctaccataacctggcggtgagcttcatgatccccagtgacgacccaccttcaaaagcccaagaggcagttctgaaggcccttccggactccatttcccacaccttccccaaacatgagtctgcatcaccgaaggtaggaagagatgttggggagcagtgagagctcaccctactcccccaaatccatcaagcacactagatctctcccccagatccatcaactacctcctccgcgagcaacgcctcttggtcatcctcatcgactccaccttcttcatcatccaggccactctctcttgcatggggcccaccgagccggtccacaaattcctccctcaaa

SEQ ID NO: 50778 - DNA, 345 bp, Glycine max
  Clone ID: LIB3107-079-F6-R1A
tggcatgccatatgtagaggggagtgtactggtgcggatattgcttgcagcaggagctggttcatctgcgcagggttcgcaggatgggtggtcagctttgcatacagcagctatggctgatgacgtggacttggttagggttatttgaggtgctggggttgatgtgagcattcgcggtgtgcagatcagtatacctcttcacttggccttagctaggggtgctaaggcgtgtgttggacggcttcttgatgctggagcagagtattgtttgagggatgatgatggtgacaatgctttccatatagctgcagtgtcggcaagtgtgttgtcgagataatcttggct

SEQ ID NO: 50779 - DNA, 626 bp, Glycine max
  unsure (1)..(626): unsure at all n locations
  Clone ID: LIB3107-080-C1-R1A
gacaacacaacgcaacacaacgcgcactctctcttttctctcttaacacaaaaaccctatcgttcttcgcggtttcgccgattctcgccatgccgaaagccaaatccgacgccaaagccgccgatagccggttgaagcgcaagggcgctggtgctggaaggaagcaatcgaagaaagctgctaaggatcctaacaagccaaagagacctccaagcgctttcttcgttttcatgtccgagttcagagagcagtttaagaaggagcatcctaacaacaaatccgtcgctgttgtcggtaaagctggtggtgacaaatggaaatcgctgtctgatgctgaaaaggcccccttcgttgccacggccgaaaagaagaaacaagagtatgagaaaactattttggcttacaataagaaattggaggggaagaattcagaggaagacgagtctgacaagtcaaagtctgaagtcaatgacgatgaggaagatgaggaggaggaggatgatgatgacgacgagtgaagatggtgatacaagatgaagcgtaggangatgtgggaaaaagaaattgttttgcatagtagttgttgggtttagaatttcataggatgggtcccacccacatccctt

SEQ ID NO: 50780 - DNA, 1027 bp, Glycine max
  unsure (1)..(1027): unsure at all n locations
  Clone ID: LIB3107-017-Q1-K1-D12.F2
ggggggggnnnggggagggggggggggggggggggggggggggggnnnnaanngnnnnggggggggggggggggggggggggggggggggggggggggggggggngggggggggggggggggngggggggngggnngggggggggggggggggggggggggggggggggngggnggnnnggggggggggggggggggggngggggggggggggggnggggggnggnnngggggggggggggggggggggggggggggggggcgagggcgggggggggggggggggggggggggggncgcacggggggggggggggggggggggcggggggcaagggggggggggggggggggggggggggggggggggggggggggggggggggggggcgggggggggggggggggggggggggggggggggggggggggggggggggggggggggggggggggggaggggggggggggggggggagcgggggggcgggggggggggggggggggagggggggggggggggggggnggcggggggggggggggggggncgggggagggggacgggggggggggggggggacggcggnaagggggggggggggggcgggggggggggggcgggggggggggaggggggaggggggaaggggcgggggggcncgagggagggggggggggggngggagggggggggggggngggggggggggagggggggggggggggggggggggggcgagggggggggggggagcggggggggggggggggggggagggggggnaggggggggaggggggggcggggagggggggggggggggggtagggggggggggtgggggggggggagggggaggggggggggggcgggggggggggaaagaggaaggagagaggggggggcgggggggggggggggggggggggaggggaggggaggagggggggggggggggggggggggggggagggggggggggggaggaggggggggggggcggggcgggggggggggagaaagaaga

SEQ ID NO: 50781 - DNA, 170 bp, Glycine max
  Clone ID: LIB3107-041-G12-F1A
tcgtccaaggaccgacaagtaaatggtccttatattagttggttacagatcacattcccttacgcattacgtgcctttgacgtatgacgcaaggtctccgtcttgctatcgactttagtagcctcacactgttttgtctcgccctagcttgccctggtcttgcaggtcga

SEQ ID NO: 50782 - DNA, 453 bp, Glycine max
  Clone ID: LIB3107-078-F5-F1A
gttaattataaactagctctgatcaattcaacaaacacataacctacctcagcaccaacaccccaatgacaatccatggccaacgtctccgcagtccttttcccttcatcgtaacaactcctctcacctgtaatcaccaaaccaaaccaacaacgaaaacacaagttatttatgttaaaacataaaagcatggtccattcattcactcactcaccaattggattcacatttccccagtaagtctctttctgaggatgctccaacgaatcaccataaacctcactagtactagtaagtagaaatctagccccaattctcttcgcaaggccaagcatgttaagcatgcccatcacattcgtcttgatggtcttcacgggcgaatgagctcgaatagaatcggctcaacgacgtcgtggcgaatgagctcgaacctagggttcccgaacagatgca

SEQ ID NO: 50783 - DNA, 438 bp, Glycine max
  Clone ID: LIB3107-078-H7-F1A
cacaaaacacaactagtttacaaccgtatcgctttagggatttactatttaactaatgcttcattttcttttttctctcccaacacaacctttcatggaaacttcaatagcctactattaaatttccataaaattagaatcataagcgagtgtaacgaggtttctgctccaaacccatcatgagattacatctaatccccgtccttctcctctcagttttcacacacactctctctctctctctctctaacagacttccagatactcactccgtacataaaccactggcactactggctagggattaggatagagagaaccatacagacatattaatattaattgagagcaacggaattaagaacgtgctttacacatgtttataccccagtgtttatcccctaggattccaacaatgtatacgactactagtatgtg

SEQ ID NO: 50784 - DNA, 305 bp, Glycine max
  Clone ID: LIB3107-079-F6-F1A
agttaaataaattggtgtcttttcagctgcacttcagctacactatatgtattgaactcattttgaagaaaaggggacttttggcattttgaggaaatacatggatcttgtgagagcttctctctgggttcctggttgaaccaatctcaaacttatcaagggtgaacccttgtggcgtctacccttgacgtatcgtccatctctggaaggggcatcatctgatgccttgacctttaccaagcggtctgcgcctaataaggcgcacatcacttactaaagagggcatgggaaaccaaatgttcttt

SEQ ID NO: 50785 - DNA, 463 bp, Glycine max
  Clone ID: LIB3107-080-C1-F1A
gggaatagaattgaaacgtatcatagcattgacttttaagtacatgatcatgatactgaaccctaattacgattgtgcgctaatctaaccctagtaagggaggacaaaataaaaattcagaaactaattatcataaagggatgtgggttgggaaccatcctatgaaattctaaacccaacaactactatgcaaaacaattttcttttcccacatcctcctacgcttcatcttgtatcaccatcttcactcgtcgtcatcatcatcctcctcctcctcatcttcctcatcgtcattgacttcagactttgacttgtcagactcgtcttcctctgaattcttcccctccaatttcttattgtaagccaaaatagttttctcatactcttgtttcttcttttcggccgtggcaacgaagggggccttttcagcatcagacagcgatttccatttgtcaccaccagg

SEQ ID NO: 50786 - DNA, 481 bp, Glycine max
  unsure (1)..(481): unsure at all n locations
  Clone ID: LIB3107-078-H7-F3A
tataacacttcactcttgagttcttgactcttctctcagtattttgcatacacatactcctncacgtatacattgttgggaaacctaggggataaaaactggggtataaacatgtgtaaagcacgttcttaattccgttgctttcaattaatattaatatgtctgtatggttctttctatcctaattcctagccagtagtgccagtggtttatgtacggagtgagtatctggaagtctgttagagagagagagagagagagtgtgtgtgaaaactgagaggagaaggacggggattagatgtaatctcatgatgggtttggagcagaaacctcgtttcactcgcttatggttctaattttatggaaatttaatagtaggctattgaagtttccatgaaaggttgtgttgggagagaaaaaagaaaatgaagcattagttaaatagtaattcctaagcgatcgttttaactattttttttgt

SEQ ID NO: 50787 - DNA, 526 bp, Glycine max
  Clone ID: LIB3107-078-H7-R3A
aattgaaagcaacggaattaagaacgtgctttacacatgtttataccccagtttttatcccctaggtttcccaacaatgtatacgtctactagtatgtgtatacaaaatactgagagaaaagtcaaaaactcaagagtggtgtgttataatataccagtcgtcgtccgtacacgtacctggagctgctataatcaaagagcttcccggtagatgagaaaacaatgagaccaacctcagcatcgcatagcacagaaagctcttcagctttcttgaatagccctcgcctcctcttagaaaatgttacctgcctcgccgttatgttgtcgattttctttatctttatcctcgttctcgtcattttaataattagcagctgcacaaaccaatcaaaaggaagctcgtgaacatgcaagggtatgatagctttggattggtggggttcgattttaatttgttgatatatttcactctattagctagttggagcactatctcgattacttgattggaaatgctggcttggtc

SEQ ID NO: 50788 - DNA, 413 bp, Glycine max
  Clone ID: LIB3109-016-Q1-K2-A8
tttgaaggggaagagggtgtttgcaaacatgcgtttgagttgatttttgcatttgatgaactcatctctcttgggcacaaggaaaatgtgactgttgcacaagtgaagcaatactgtgagatggagagtcatgaagagaagctgcacaagttggttttgcagagcaagattaatgaaactaaggatgttatgaagcgaaaagctagtgagattgataaaagcaagattgaaaagaacagaggtgataaaggaggatttggtccattacagtcaatgggctctggaagaattgaaaatagctttagtgatttgagcatatctagcagtggaaactggttttggaagtggctcttggtttggaatgacttctgatgtcgattcctttgcaaccaaacctaaaggtcgtccaactt

SEQ ID NO: 50789 - DNA, 266 bp, Glycine max
  Clone ID: LIB3109-016-Q1-K2-B3
gatttcaagagtgattagggttttggtttggtggggttcttacgcttgagatcaggaattaatttcagaggttcagagaatggcaacggattcttctaatggtaatggacatcaccaaacaacaacaaagcaacctcctttgccgtctcccctgcgcttttccaaattttttcagtccaacatgagaatcttggttactggaggagctggattcattgggtctcacttagttgacagattgatggaatatgaaaaaaatgaggtaa

SEQ ID NO: 50790 - DNA, 391 bp, Glycine max
  Clone ID: LIB3109-016-Q1-K2-B8
ggaggttgcagagttagaccgagagagagagagagaatgggtctcatctcaatgcaatttaggttctgaaaaccaaagcttttcataggaaaagttgtgctaagatgccagggaaacctgacactgatgattggcgtgtagagcgtggggagcagattcagtttcagtcttccatttactctcatcatcagccttggtggcgcggagtgggggaaaatgcctccaaatcatcttcagatgatcaggtaaatggctcaatcgtgaatggtatcacgctgtctgagaccaatgataagtcaagcggaggtgttgccaaagaataccaaaacatcaaacatgccatgttggcaaccccatttaccatggagaaacgtcttgcttcaaaatccca

SEQ ID NO: 50791 - DNA, 271 bp, Glycine max
  Clone ID: LIB3109-016-Q1-K2-C3
ggcttaggcggaatatgtttggtgcaccttggtgtgatccacacgatgtggattgtgctaatgatacacctaaacttgttaattctgacccacttgattttagctcattggagcattgtgatgtttactatggaactcatcgcttatggccaaggaagcgcaggatgtctgaaagagatgcagcttttgggttgaatacttctgtgggcttgggaggttatcttggtataatgggttctcgaagagatgttgttactgcaacgtggaaaac

SEQ ID NO: 50792 - DNA, 221 bp, Glycine max
  Clone ID: LIB3109-016-Q1-K2-C6
aggtgttatagaccactgagtcccatgattaaggtggcatcagcactgccactgcgagtaccacccccagaatgggggccttccgcagagctttctacaccgtcggattttggatccgcgagaccggccaagccatcgatcgcctcggctctcgtctccaatgcaactacctctttaaagaacagctatctaagcatcgacctctgatgaatctgctcgac

SEQ ID NO: 50793 - DNA, 294 bp, Glycine max
  unsure (1)..(294): unsure at all n locations
  Clone ID: LIB3109-016-Q1-K2-D7
ttatataagggggagatgaaagagtgaggagacgggttacagagcacttttccaacagcgattacancgaccgaatcaaacacctctctttctctccgaagctgcgtttaatatcttactcgccttagattgttcttctctttcattatactgttctcttttcgatttgagggaacagttcaagagtgtgaggatcggttaacccaactgcacaggtagacactaaaataatggagtctaacgatgagactggatgccagtctcctgaacgccccattctttgcattaataatt

SEQ ID NO: 50794 - DNA, 227 bp, Glycine max
  Clone ID: LIB3109-016-Q1-K2-E1
ggaatccgagaagaagaagatggttatgtatcagggctggagcacgagaatagcgttgggagccttcgcgtttggtctgcttttcctatcggcctcagcagacgacgtcgttgtgctctctgaagataacttcgagaaggaagttggtcaggacacaggagctctcgttgagatctatgctccttggggtggacactgtaaaaagcttgctccagaatatgaaaagc

SEQ ID NO: 50795 - DNA, 311 bp, Glycine max
  Clone ID: LIB3109-016-Q1-K2-E2
gtcctaaggaatgcagaaagccgatcaggcacttgtctctggatgttctgcgggtggtctggcatccataatacactgtgatgagttcgggagcttgtttggaaaatcttccaaagttaaatgtttgagcgatggaagtttttttcttgatgcaatggatgtatctggtggacgcacactgaggactcttttcagatgtgtggttcacttgcaggatgtacaaaaaaatctgccaaaaagttgtctcgaccaactagacccaacttcgtgcttcttttctcaaaatatgatcgaacatgttgagaccccat

SEQ ID NO: 50796 - DNA, 149 bp, Glycine max
  Clone ID: LIB3109-016-Q1-K2-E4
cgggggttttggatatgaagatatatattttctacttggattcataaaatcaaataggagggtaatccctactttacggagtaacctgatctagctctcaaaaaaagcagtcgatctagatgatccaatctaacttacacattcaaact

SEQ ID NO: 50797 - DNA, 184 bp, Glycine max
  Clone ID: LIB3109-016-Q1-K2-E6
gtgcttatgaagacgacacgaacggggagtttctacaagtgagtgttgttcgatcgatgataacgtgagagaacagtgtcgatcgaacaatgagacggtcccttgttttctttcgttgcgtacaagttttcggtagcaatggcaactgcgcatgccgtaccgtatatgtttccctctccgaatg

SEQ ID NO: 50798 - DNA, 336 bp, Glycine max
  Clone ID: LIB3109-016-Q1-K2-E8
ggttaaaatgttgaggaaggaggagtggaggggagcggatctgctgggtgggacgggataaagtgaaccaagctgacaagactaagggaagattggatggtggaaatggaatcggcagctgaaaaccctatttacccggcggtggactacaagcaaccttcaatttggtaatttcttcgggggcctgccttaaaagttccatcccatttcatatgttaagcccaattttttttcattagaatttcctgaaagtgtttgacaagctttgcaaattaaaagttttgtttaaacaacagtggtaagggcggtacaattttctaaacttaatttaagttt

SEQ ID NO: 50799 - DNA, 140 bp, Glycine max
  Clone ID: LIB3109-016-Q1-K2-F4
tttagggtgtgaattctaaaaggaaagaacagctgagctggtcagaaaatcaatggcatcatccttgggttttgagttcctgacgaagaagccttacagtccttcatactgggcattccaatttcaccctttacctttcc

SEQ ID NO: 50800 - DNA, 225 bp, Glycine max
  Clone ID: LIB3109-016-Q1-K2-F7
catattgaattgacctgttagtggattgccatgttgctggtctaagccatgtagaaagtctatacatttttggcatttttgtagaaaaaatgaagatgaattatttcaagttgttcttgttgaactgaaatctttttgattcattgagtgcattacaaggttgcaggcactgattatcttttcccttacatttttcactctaatgtattaggatatttcaggaaa

SEQ ID NO: 50801 - DNA, 282 bp, Glycine max
  Clone ID: LIB3109-016-Q1-K2-F8
ccacgcgtccgtagcgagaagacgacagattgtggtagtggaagtagtaacaggtacgtcgcatatctagttcatctttagcggctatacagttttggcccttccaattatcagatctgaatcaccggtctcactctgcacactcactcacactgaatggctgctgaatgcaaccatcaccaccaccaccaccaccatcaatatcacgaccatcatcattatcatcatgatcaccatcatcatcacgatcgagagggacagaccaactcatggctaggtaat

SEQ ID NO: 50802 - DNA, 154 bp, Glycine max
  unsure (1)..(154): unsure at all n locations
  Clone ID: LIB3109-016-Q1-K2-G1
gatgataattctgttcatggttcacctgtgaatgcanatgggaagcangataatgctgctaatggtgattatacagttgatgatgaatcctatgcacacagtgaagatgacctggcaagaatcccccatagtctagctgggaggagtccggtgg

SEQ ID NO: 50803 - DNA, 279 bp, Glycine max
  Clone ID: LIB3109-016-Q1-K2-G2
ggcgcatatctagattagaaatgggttctgataagcgtaagttcctctgcttgcccagttcgtttgtgcgtagatgagcacgtgacaaggatttataatgcattccgtcctatcctttatcaatttgttggggaagaattaacaaagtcggaagctgttgaagtactcaggattactaaaggaattcttttggatcttagcaagtccccctataaaacaagaaggacctccattgactcagttctagataacccaaaatttcagaaactattgccatct

SEQ ID NO: 50804 - DNA, 258 bp, Glycine max
  unsure (1)..(258): unsure at all n locations
  Clone ID: LIB3109-016-Q1-K2-G3
gacacacagatcgngaaagcgcctttctactctcttctcttctttgttagagctgtgtcacagtcacacagatcttggctgtgcctgcgcctacggtgatagaggaaactgaagcctttgtacatgccacggtggcaatagcagcattattactcctaaatttttcatgcttatcttgtgctacacactctctctctctctgctagagcgcgcgcttaaacttgtaataggtttaaaaagagcaggcaaaaagtgaat

SEQ ID NO: 50805 - DNA, 363 bp, Glycine max
  Clone ID: LIB3109-016-Q1-K2-G4
gtatcaagggataaataatcggaccggtccttagattttgttaaggctttaagggagccgtatgaggtgaaaatctcatgtacggttctgtaatagagatggtaacagtaatgtcatcaccgactaggattatctaacagtttaagtacagttgatatagttgatgcacaatcaaaatatggtttttggggatggaatttgtggcgtcaacctatgggtttcattgtttttctaatctcgtccctagcagaatgtgaaagattaccttttgatttaccggaagcggaagaagaactagtaacgggttatcaaaccgaatactcgggtatcaaatttggtttattttatggttgcttcctattt

SEQ ID NO: 50806 - DNA, 197 bp, Glycine max
  Clone ID: LIB3109-016-Q1-K2-G6
ggcttcaaatgtggaccaaactgctcctgcaacggctgcacttgcaagtgaggtgttgggagagcaagcttcaagcagagatagcccttaattaggaataatgataaactattaatgtgtagctaaaaacttatgtattatgtctgtgatggttttcgtgcactctggtgttttgtgttaaacaaacatccttagaa

SEQ ID NO: 50807 - DNA, 344 bp, Glycine max
  Clone ID: LIB3109-016-Q1-K2-G8
ggggtgttgtgtcggtaggtttgtggtggagaagaacagtttgaaggtgacttctccgaaatcgttgaagggtacgtatgaatgtgcaattgggaattttggggttcccaagtatggaggaacgttggttggttctgttctgtacccaaaggtgaatcagaaagggtgcaccaacttcagtgatgtcaattttcagtccaagccaggagggtttcccacttttcttcttgttgatcgtggagattgctacttcactttgaaggcttggaatgcacagaatggtggagcagcagctattcttgtagctgatgacaaggcagaaacgttgatcactatggacactc

SEQ ID NO: 50808 - DNA, 436 bp, Glycine max
  Clone ID: LIB3109-016-Q1-K2-H1
gaatacatggagtggaatgacaagaattcacaggtaagaacatgcaataaagatacggagaatttgatgcaaggtagtactgtcccacaagaagttgatacaagcaaggatattgtattcacatatgatgtttccttcacggaaagtgatatcaaatgggcatcacggtgggacacatatcttttaatgaatgatgatcagatccactggttctacatcattaactctctgatgattgttcttttcctgtctggaatggtggcaatgatcatgatgagaactcttttcagagacattggcaattataatcaactagaaacccaagatgaagcccaagaagaaacagggtggaaacttgttcatggaaatgtttttaggccaacaatcaattcaaatttgctttgtgtttaatgtggtactggtgttcacatctttg

SEQ ID NO: 50809 - DNA, 399 bp, Glycine max
  Clone ID: LIB3109-016-Q1-K2-H2
ggagctagagtgaagagcgaagagaatggctcccaagggtttaatctttttggctgtgttatgcttctcagcactgtcactgagtcgttgtcttgcggaggataatggacttgttatgaacttctacaaggaatcatgccctcaggctgaagacatcatcaaagaacaagtcaagcttctctacaagcgccacaagaacactgctttctcctggctcagaaacatcttccatgactgtgctgttcagagttgtgatgcttcactgttgctggactccacaagaaggagcttgtctgagaaggaaacagatagaagctttgggttgagaaatttcaggtacattgagaccatcaaagaagctttggaaagggaatgcccaggagttgcttcctgtgctga

SEQ ID NO: 50810 - DNA, 312 bp, Glycine max
  Clone ID: LIB3109-016-Q1-K2-H3
gaatgaaaggagtgatatattgtctttggaatttgactgtggtgtcttcttctttgtgactcactctctcttcagctcttgaatttgatccacctgtgttgcttttcccaccaaaccaaacaaaataacctgatattaacgtaatagtagttcttttatcgaacattgtgccatgacattcgacgaggtttccatggaacacggcaagagcttcatcttcgccttgcaggaacttaagaacctgaggcctcaactctattctgctgcagactaccgtgagaaatcttatctcaatagtggataaaaacccat

SEQ ID NO: 50811 - DNA, 309 bp, Glycine max
  Clone ID: LIB3109-016-Q1-K2-H4
ggaatcgccattgagctcatagtcatgtacccgattcagcaccgcaggtacagggaaggaattgacaacctgttagtgctcttgattggaggaattcccattgccatgccaactgtgttgtctgtcactatggctattggttcccacaggctttctcagcagggtgccatcacaaaaagaatgacagctattgaggaaatggcagggatggatgtcctatgcagtgacaaaactgggactctcaccttaaataagttgagtgttgacaggaacttgattgacgtgtttgctaaaggtgttgagaaagag

SEQ ID NO: 50812 - DNA, 416 bp, Glycine max
  unsure (1)..(416): unsure at all n locations
  Clone ID: LIB3109-016-Q1-K2-H5
gacttataacatgggcagngaaactgaaaagggggagaagagagagaaaagggggagctttacgcgttggacttcgatggagtcatatgtgatagctgcggagaaagctctctctctgctctcaaggctgccaaagtgagatggcctggtttgtttgatggggtggattcaaccacagaaaattggattattgaccagatgcacacagtgcgaccagtagtggaaactggatatgaaaacgttttacttgtgagattgttgcttgagagcagaacaccaaccatccggaagtcttcggttgcagaggggctaacagttgagggtatattggagaactggtcaaagttgaagcctattatcatggaagaatgggatgagaagagggatgatctgatagatctttttggaaaggtcag

SEQ ID NO: 50813 - DNA, 327 bp, Glycine max; identical to SEQ ID NO: 50362
  Clone ID: LIB3109-016-Q1-K2-H6

SEQ ID NO: 50814 - DNA, 413 bp, Glycine max
  Clone ID: LIB3109-016-Q1-K2-H7
ggatagaagagaagcttacgatggctacttttctgtgcaaccaatctgtgatgggttcttgtccttgttctactcccttctcttcaaagccctttcaaaccctaaaaccccaaatcttatcttttccatctcgcgggtttccgagccccctaatttcctcagtcaatcgaagaacccaattgaagtcttgccaagatatgcctccaactacaaacgatgaagcagaggagacccacaatgacgtaagaaggacaaatgatgatgaagatgataaacaagtacctactttaatgatcctccttgaagcatacaaagaagccttttttaatggcgaccaaaataccgtagctcagattgaacaagggatatattcaatagccaatctgaaaaataaattgattcagaaattatca

SEQ ID NO: 50815 - DNA, 351 bp, Glycine max
  Clone ID: LIB3109-016-Q1-K2-H8
gagggagcgaaggtatgaagccttcaacaggctgagaatattccaagttgtaagtgtcgcttttctaggtggactattgtggtggcatactccagagtcacacattgatgatcgggttgccttgctctttttcttttctgttttctggggattctaccctctctacaatgcagttttcacattccctcaagagaggagaatgctgatcaaggaacggtcttcgggaatgtaccgcctttcttcctactttctggctagaacaataggagacttgcctctggagcttgcactaccaactgcatttggcttcataatctattggatgggagggcttaaacctgatcctatgac

SEQ ID NO: 50816 - DNA, 288 bp, Glycine max
  Clone ID: LIB3109-016-Q1-K3-A1
ggtgcacaagtgagtttgttgatcgagataactagaaacagtgtgatgaaaatgaaggtccttgttttcttcgttgctacaattttggtagcatggcaatgccatgcgtacgatatgttccctctgcgaatgaacactggctatggtgcccgtactccggaggtgaaatgcgcaagttggaggcttgctgtggaagcacacaacatctttggctttgagaccattcctggagagtgcgttgaagcaacaaaggaatacattcatggcgaacaatatagatcagacttc

SEQ ID NO: 50817 - DNA, 324 bp, Glycine max
  Clone ID: LIB3109-016-Q1-K3-A2
gatggtcagtagtaggtaacttgttttctcttgctcgatttggtcgatcgttgcttctctctcttgagtttatgccaggaatgacagcgtatcagtggcagtgcaggaaacgagagggagagctttcattgggaaggtaaaagcctttggttgtagcagtgccttacatgaaccctcgtcccccttctctcgttcgctaccactaactcatcgttttctcagtgtgccccgcgtgcgttctgctgtgtcctctcactcacaggtgtaaccgtgtaaccactatgatcatacttagtggcatggaaagaaagaatgaaagattaa

SEQ ID NO: 50818 - DNA, 208 bp, Glycine max
  Clone ID: LIB3109-016-Q1-K3-A4
gatggtcagtattagagaacttgttttctcttcctggattggatcgatcgtgcgttctctctctcgtgttgatgcgatgattgactgcgtatcagtgcctgtgcttgaaacgagagggagtgtttccattgggaaggtataagcctttgtttgtagcattgccttacatgatcccttgtcctacttatctcggtctcttccactaact

SEQ ID NO: 50819 - DNA, 398 bp, Glycine max
  Clone ID: LIB3109-016-Q1-K3-A5
ggccaaagggaatggataaaagtttgcagtcaacaagtagaggacgtgaagttactgtcacgaatgatggcgctacaatcttgaagtccctccatattgataacccatctgctaaagtccttgttgacatatcaaaagttcaagatgatgaagttggggatggaactacctcagttgttgtgttggctggtgaacttttaagggaggcagaaaagctggttgcaaccaagattcatccgatgacaataatatcaggttttcgaatggcagcagattgtgctcgtaatgctttgttggagaaaggtgtggacaataaagcagattctgagaaattcaggtcagacttattgaacattgcaatgactactttgagctccaagattctctcacaggacaag

SEQ ID NO: 50820 - DNA, 414 bp, Glycine max
  Clone ID: LIB3109-016-Q1-K3-A7
cgatagggaagcctttgatatataccgagcatggttgaaaatcacaagaatatggggcaactcaaggtcgtatcctcaacctctgtggtgttgcggtcatggtggagctttgatggtgcagttggagaccctcaactctttttactcaaatgggagtgcagcgtattcgcagtacacgacttgctcaacttcaaccaaaatctaaacgcaagtttggtcgaccttagagcacaagtgagcaaccaaagaaaacactttgccacggctcaatcaaccaggcggagcatacccagtccatgccatgttccaatggaagaactacctctccatcactgactgcaccacctgctttggcaccgctgccaccagaattcacaactgctccactggaaacggtgcccatgtcgtgtatga

SEQ ID NO: 50821 - DNA, 295 bp, Glycine max
  Clone ID: LIB3109-016-Q1-K3-A8
cgatagggaagagggtgtttgcaaacatgcctttgagttgatttttgcatttgatgaagtcatctctcttgggcacaaggaaaatgtgactgttgcacaagtgaagcattactgtgagatggaaagtcatgaaaagaagctgcccaagttggttttgcagagcaggattaatgaaactaaggatgttatgaagcgaaaagctagtgagattgttaaaagcacgattgaaaagaacagaggggttaaaggaggatttggtccattacagtcaatgggctctggaagaattgaaaat

SEQ ID NO: 50822 - DNA, 370 bp, Glycine max
  unsure (1)..(370): unsure at all n locations
  Clone ID: LIB3109-016-Q1-K3-B1
ggacaaatgattgatttacctattcaaagcaatttgcgcgaagggctttctttaacagaatatataatttcttgctacggagctcgtaaaggggttgtagatactgctgtacgaacatcagatgctggatatcttacacgcagacttgttgaagtggttcaacacattgttgtacgtcgaacggattgtggtaccattcaaggaatttcggtgaatacccagaatggaatgatgccggaaagaatatggatacaaacattaattggtcgtgtattagcagacgatatatacagaggttcacgatgcattgncgttagaaatcaagatattggaattggacttatcaatcgatttaaaacccttcaaaccc

SEQ ID NO: 50823 - DNA, 447 bp, Glycine max
  Clone ID: LIB3109-016-Q1-K3-B3
ggaggcaagaagttgtattttggcatccccgtggcttcaagaagagaatctcaatggaggcccatgagctgaagcgcgtgttccagatgttcgaccgcaacggcgacgggagaataacgaagaaggagctgaacgactcgctggagaacctgggcatcttcatctctgacaaggacctgatccaaatgatccagaggatcgacgtcaacggcgacggttgcgtggacatggacgagtttggggagctgtatcagaccataatggacgagcgcgacaatgaggaggacatgagggatgccttcaacgtcttcgaccagaacgccgacggcttcatcaccgtcgacgagttgaggaccgtcttgtcctccctcggctagaatcaaggaagaaccgtccaagactgcaaggccatgatctccaatgtcgatgttgatggagatggcatgg

SEQ ID NO: 50824 - DNA, 282 bp, Glycine max
  Clone ID: LIB3109-016-Q1-K3-B4
gggggcagagactgatatatggtatggtcgtctctgagtctgaagatctgtgagttaattgcatttgcagagagagagagagagagggaagacggttgtggggattcgatgggggccaccgttcactcgccgctagtcacttatgcttccgtcatatctctgcttacactctgccctccgtttgtcatacttctatggtacaccatgactcttgctgacggatctgtttccgagacattccattatttaaggcagaatgggttgcagggtttgctacatata

SEQ ID NO: 50825 - DNA, 416 bp, Glycine max
  Clone ID: LIB3109-016-Q1-K3-B5
ggatctgaatcagtgtgtgactgtctttcttcatttctctcttgcaatatttgcaatggcagaaacacaaacccagagaccctgttcaagcgtcctcgattctctgggggaagaaatcgtgagaatcatcgcacccgtttcaatatgcatgttcctggtcgtaatcctggtctcaactctcaacaccgattcttctctcttcgacgcatcgatgagcatggtcaccatcgcgtacaacgaaacaacctcggactccacctgggacaagttcctaggagcccttctgaactccttagccttcgtcatcctcgtcaccttcgcaaccttcgtcttggtcctcctcttctacttccgatgcaccaggttcttaaaactctacatggctttctccactttcatcgtgctgctattcctcg

SEQ ID NO: 50826 - DNA, 418 bp, Glycine max
  unsure (1)..(418): unsure at all n locations
  Clone ID: LIB3109-016-Q1-K3-B6
ggagggagacggagacgattttacaaggaagatctgaaattctgaattcttaactggaatcagggttttggttttttttcattatcttcctcagtaagcaatgtcttctcccgcggagttttatcactctcttccgccaataacgaaggcatatggcaccgtttgcctgttggctaccgcaacttaccatcttggattatatcatccagcttacattgcactattctacgataaagtgttctacggttttcaggtttggaggttgttcacaaacttatttttccttggaccattctctatcaattttgggatccgtctcctaatgatagtaaggtatggtgtccaacttgagaaaggaccatttgatcgacggactgctgatttcttgtggatgatgatattnggtgcctttgcacta

SEQ ID NO: 50827 - DNA, 427 bp, Glycine max
  Clone ID: LIB3109-016-Q1-K3-B7
gaagacaagagtgattagggttttggtttggtgtttttcttaagcttgagatcaggaattaatttcagaggttcagagaatggcaacggattcttctaatggtaatggacatcaccaaacatcatcaaagcaacctcctttgccgtctcccctgcgcttttccaaattttttcagtccaacatgagaatcttggttactggaggagctggattcattgggtctcacttagttgacagattgatggaaaatgaaaaaaatgaggtaattgttgctgacaactacttcactggatccaaggacaacctcaaaaaatggataggtcatccaagatttgagcttatccgtcatgatgtcacggagcctttattgatcgaggttgatcagatctaccatcttgcatgtcctgcctctcctattttctacaaa

SEQ ID NO: 50828 - DNA, 325 bp, Glycine max
  Clone ID: LIB3109-016-Q1-K3-B8
ggaggttgcagacttagaaagagagagagagagagaatgggtctcatctcaatgcaatttaggttctgaaaaccaaagcttttcataggaaaagttgtgctaagatgccagggaaacctgacactgatgattggcgtgtagagcgtggggagcagattcagtttcagtcttccatttactctcatcatcagccttggtggcgcggagtgggggaaaatgcctccaaatcatcttcagatgatcagttaaatggttcaatcgtgaatggtatcacgcggtctgagaccaatgataagtcattgcggaggtgttgccaaagaatacc

SEQ ID NO: 50829 - DNA, 421 bp, Glycine max
  Clone ID: LIB3109-016-Q1-K3-C1
ggcagcgcttgatttgaggccaggcaagccccactcaaccaccacacctctcctcgttcacgctacccctttctgctcttcttctacctttcaagttttaaaagtataaagatggcagagacattcctatttacctcagagtcggtgaacgagggacaccctgacaagctctgcgaccaaatctccgatgctgtcctcgacgcttgcctcgagcaggacccagacagcaaagttgcctgcgaaacatgcaccaaaaccaacttggtcatggccttcggagaaatcacgaccaaggccaacgttgactacgagaagatagtgcgtgacacctgcaggaacatcggcttcgtctcaaatgatgtgggactggatgccgacaactgcaaggtcctcgtcaacattgagcagcagagccctgata

SEQ ID NO: 50830 - DNA, 343 bp, Glycine max
  unsure (1)..(343): unsure at all n locations
  Clone ID: LIB3109-016-Q1-K3-C2
ggacacgacgagtacatcgtaaaaggaggcagggatttgtttcacttgttgcccgatgctttcaaggggatcaagcagattggtgttatcggttggggatctcatggacctgcgcaggctcagaatctacgggactcacttgctgaagcaaagtctgatattgtggtcaagattggactcaggaagggttctcgttcctttgctgaagctcgcgcagctgggttttctgaggagaatgggactctatgtgatatatgggaaactgtctctggaagtgatcttgtgatgctngtaatttctgattctgcacatggctgatactatgagaagatattgtctcaca

SEQ ID NO: 50831 - DNA, 365 bp, Glycine max
  Clone ID: LIB3109-016-Q1-K3-C3
ggagagtgagtgagattgagagagacgcctcgcagatctcaatcgaatctcagaaaaatgagagaaatcatcagcattcacataggtcaggccgggatccaggtcggaaactcctactgggaactctactggctcgaacatggcattcagcccgacggcatgatgccttctgactccaccttcggtgtagcccacgacgccttcaacaccttcttcagcgaaaccggatctggcaagcacgttccccgtgctgtcttcgtcgacctcgaacccaccgtcatcgacgaggtccgctgcggcacctaccgtcaactcttccaccccgaacaactcatctccggcaaggaagacgccgtcaacaactt

SEQ ID NO: 50832 - DNA, 398 bp, Glycine max
  Clone ID: LIB3109-016-Q1-K3-C5
gacggctaaaagctaaaaatcatcgaagtactcaaattagcatggctgtcacggttgcattcttgaatttgatcatcatgttttcagtagtctctacaagcaagtcactgagcttaaactactattcaaaaacatgccctgatgtggaatgcattgttgccaaggcagtgaaggatgccactgctagggacaaaactgttccagctgcacttctgcgaatgcacttccatgactgtttcgttcgggggtgtgatgcctctgtgctgctaaattcaaaaggaagcatcaaagcagaaaaagatgggccaccaaatgtttctttgcatgcattctatgtcattgatgcatcgaagaaagcactagaagcttcatgcccatgtgtggtctcttgtgctgac

SEQ ID NO: 50833 - DNA, 388 bp, Glycine max
  Clone ID: LIB3109-016-Q1-K3-C6
ggaaggagtgaggtagcaacagcgctgccactgcggctaccaatagcagaatgggaaccttgggcagagctttctacgccgtcggattttggatccgcgagaccggccaagccatcgatcgcctcggctctcgtctccaaggcaactacctctttcaagaacagctatctaggcatcgacctctgatgaatctgttcgacaaagctccctcggttcacagggatgcatttgtggcccccagtgcctccctcctcggcgatgtccacgttggcccagcttcctccatttggtatggatgcgttctcagaggtgatgttaacagcattactattggatctggaactaatatacaagacaattctctggttcatgttgccaagtctaattt

SEQ ID NO: 50834 - DNA, 319 bp, Glycine max
  unsure (1)..(319): unsure at all n locations
  Clone ID: LIB3109-016-Q1-K3-C7
ggcacatgcggaatatgtttggtgcaccttggtctgatccagatgatgtggattgtgctaatgatacacctaaacttgttaattctgacccacttgattttagctcattggagcattgtgatgtttactatggaactcatcgcttatggccaaggaagcgcangatgtctgaaagagatgcagcttttgggttgaatacttctgtgggcttgggaagttatcttggtataatgggttctcgaagagatgttgttacttgaacgtggaaaactggccttgaaggggtctggtacaagtgcgtaagatgtcagcggcagac

SEQ ID NO: 50835 - DNA, 410 bp, Glycine max
  Clone ID: LIB3109-016-Q1-K3-C8
gggcgtgttatagatgttaaaggcacaacagttcgtgttgagttggaatcccaaatgaaggttgtgacagttgaccgcatccatatatctgacaatgtggctgtaaccccatatcgtgatacatctcgctatggaatgggaagtgaaacaccaatgcatccttctcgaactcccttacatccatatatgactccaatgagagatcctggagcaacacctattcatgatggaatgagaacacctatgcatagccgagcatggaatccttatactccaatgagtcctccaagggataactgggaagatggaaatccaggctcttggggagccagtccacagtatcatcctggaagccctccttcacggccatatgaatcccctactcctggtgctggttgggctatcactcc

SEQ ID NO: 50836 - DNA, 420 bp, Glycine max
  unsure (1)..(420): unsure at all n locations
  Clone ID: LIB3109-016-Q1-K3-D1
ggagcgagtgatgctcatcacatcatgtgcttccaaaactgatctatttcccttctccttcttacttctgtcgttctctctgctgcaaatccaaaaaccaccaaatcgcggttccaaattgcaatttctcgagcgaactttgcgagttctagggttcccccactgccatggaccaggccgaattaacctccgaacaggttctgaggagggacatcccatgggagacctacatgtccaccaagctcatctcaggcaccatccttcagctcttaaggcgctacgatcaccggccatagagtcacagagcacagttgctcgatgatgatggtccctcttatgttcgcgtgtttgttcgtgttntgcgtgacattttcaaggaagataccgtggagtatgttttggcactgatagatgaaatgc

SEQ ID NO: 50837 - DNA, 397 bp, Glycine max
  Clone ID: LIB3109-016-Q1-K3-D3
gctggaaatattgataaaactggtgaaatttggtcaaggagcctgtcaaatgagtaccgaggaaaatcttatgttgaccttcttcaagatttaatggaaaagactattggtcttgccttggcaactgggcagaagcggtttagtgcttctctgtgcaagcttgttgagaaatatgctgaaattttagcaagtcaagggctgttgactacagcgatggagtatttaaaacttttgggttctgaagaactgtcgcctgaacttacaatcttaaaggatcgaattgcactttctacagaacctgagaaagacttcaaaactactgctttttgaagttctcaatcacatagtgggtcctattatggtgccgataattccaattataataggaattattatc

SEQ ID NO: 50838 - DNA, 422 bp, Glycine max
  Clone ID: LIB3109-016-Q1-K3-D5
ggatcaaaacaagtgtttcgaatagattatcctaagtctttgggaatagtgctgcggtggcttcaagtcaggaggaggtgacccttttgggagctactggaagcccatttgtgtgcagggttcatattgccctcaagttgaagggagttcaatacaaatatgtcgaagaaaatttgaggaacaagagtgaactgcttctcaaatccaacccagttcacaagaaggttccagtgtttattcacaatgagaagcccatagcagagtctcttgtgattgttgaatacattgatgagacatggaagaacaaccccatcttgccttctgatccttaccaaagagccttggctcgtttctggtccaaattcattgatgataaggcttttggtgctgcatggaaatccgttttcacagctgatgagaaa

SEQ ID NO: 50839 - DNA, 417 bp, Glycine max
  Clone ID: LIB3109-016-Q1-K3-D7
ggagagaaagagtgaggagagaattacagagcattttccaacacgattacacgaccgaatcaaaccctctctttctctccgaagctgcgtttaatatcttactcgccttagattgttcttctctttcattatactgttctcttttcgatttgagggaacagtacaagagtgtgaggatcggttaacccaactgcacaggtagtcactaaaataatggagtctcacgatgagactggatgccaggctcctgaacgccccattctttgcattaataattgtggcttctttggaagagcagctaccatgaacatgtgttccaagtgttacaaggacatgctgttgaagcaggagcaggacaattttgcagcatcgtcggttgaaaacattgtgaatggcagttccaatggcaatggggct

SEQ ID NO: 50840 - DNA, 270 bp, Glycine max
  Clone ID: LIB3109-016-Q1-K3-E1
ggaaaccgagaagaagaagatggagatgtatcagatctggagcaggggaatagcgttgggagcgttcgcgtttggtctgcttttcctatcggcctcagcagacgacgtccttgggctctctgaagattacttcgagaaggaagttggtcaggacagaagaactctcggtgaggtctatgctccttggtgtggacactggaaaaagcttgctccagaatatgaaaagcttggtagcagcttcaagaaagccaaatctggtttaatcggcaa

SEQ ID NO: 50841 - DNA, 363 bp, Glycine max
  Clone ID: LIB3109-016-Q1-K3-E3
ggcctccggcatgcagtagaccgatctgtctctggtctctagctggggaatagctggtctagcgtgcgtatttcacctgcttttcctatcgatcttagcagacgacgccggcgtgctctctgaagataactacgagaaggaagttgttcatgccataggagctttcggtgaactctatgctccttctcgttgacactgcataaagcttgctccagaatttcaaaagcttggtaccaacttcaagaaagcccaacctgacccaatcggcaacgtcgactgtgatgagctcatcagtcttgtcaagacatatggagtcttatgttacgcatctattcattggtttccaaaccgatctcttgtacc

SEQ ID NO: 50842 - DNA, 73 bp, Glycine max
  Clone ID: LIB3109-016-Q1-K3-E4
gggtttggatatgaagatatatatgttctacttgcattcataaaatcagataattgtataatgttttcttttc

SEQ ID NO: 50843 - DNA, 412 bp, Glycine max
  Clone ID: LIB3109-016-Q1-K3-E5
gaagtctatgttcttaaaccaagccacatatcaaccttgcaatgcaaaataattgaaaattccataccagacagtgtttcagctatcccaaatgtcacaaatgtggagtctgaatttgaagcaggccatgatgctgatccaccaaaatccaaaggtgatcttgtatcagtcttgaaggctgagaaagaagagttggagtcatcactgagcaaggagaaacagcatgctcttcaactaaagcgagatctggtggaagctgagtctcgtaactctgacctttacaaggagctccaatcatttcgtggtcagcttgcatctgatcaatcgaggtgtttcaaactcgaggtggaggttgctgaattaggtcagaagctccaaacgattgggacattacagaaggagctggagcttc

SEQ ID NO: 50844 - DNA, 420 bp, Glycine max
  Clone ID: LIB3109-016-Q1-K3-F1
attgaaacatatgacgtgactacaattagagcaagcacacctatgtttctcatgtgtcggaagattaaatcacttggtgtcaaatgggttatctcaggagaaggatctgatgagatctttggagggtatttgtacttccacaaggcacccaacaaggaggagttccacagagaaacatgccgcaagatcaaagcacttcaccaatatgattgcttgcgagccaataaatcaacatttgcttggggtctagaagcccgtgtaccatttttggacaaggcgtttatcaatgctgcaatgagtattgaccctgagtggaagatgataaaaagagatgaaggacgaattgagaagtggattctgaggagagcctttgatgatgaagagcatccttatctgccaaagcacattttatacaggcag

SEQ ID NO: 50845 - DNA, 286 bp, Glycine max
  unsure (1)..(286): unsure at all n locations
  Clone ID: LIB3109-016-Q1-K3-F4
ggaaggtgtggattctaaaaggaaagaacagctgagctggtcagaaaatcaatggcatcatccttgggttttgagttcctgacgaagaagccttacagtccttcatcctgggcattccatctgcaccctttaccttcccacttcttctctcttgcccatcttcccactccaattcacagatggaaccttcccaatctgcccaccaataccgagctgtggatcaagcgagacgacctttccggaatgcagctgagtggtaacanagtgaggaaattggagttcctga

SEQ ID NO: 50846 - DNA, 401 bp, Glycine max
  Clone ID: LIB3109-016-Q1-K3-F5
gagtgtgtgagttcattaacatatacaaattctgtgtgttgtgttgtgtacttgtgttaattgtgttgttgttgtaggaaatttaagtgaagagagaatgatgatgaagtctgctatgtgtgcattggtgcttgtggcactggttgtggttgaagtggggcccatggctgaagctgcggtgacttgcaacccaacacagttgactccttgtcttccggcaattaattcatgttctgcaccttcgagtgcttgttgccagaagctgaatgatcatatgccatgcttctgtggtacctcaaaaccctagcttgaacagatgtaaacttctatgccaaaaaccgtagtcttgggattgctatcaactgtaagactctattattattaaatgggatcatttttat

SEQ ID NO: 50847 - DNA, 284 bp, Glycine max
  unsure (1)..(284): unsure at all n locations
  Clone ID: LIB3109-016-Q1-K3-F7
catattgaattgacctgttagtggattgccatgttgctggtctaagccatgtagaaagtctatacatttttggcatttttgtagaaaaaatgaagatgaattatttcaagttgtttttgttgaactgaaatctttttgattcattgagtgcattacaaggttgcaggcactgttttttttttcccttacattnttcacttcagtgtattaggatatttcaggaaatcaggaaactgtatgtaagtaaccggagaattgagaagatattggaatattgaattagc

SEQ ID NO: 50848 - DNA, 407 bp, Glycine max
  unsure (1)..(407): unsure at all n locations
  Clone ID: LIB3109-016-Q1-K3-G1
gatgataattctgttcatgggtcacctgtgaatgcaaatgggaagcaagaaaattctgctaatggggattattcagttgaggatgaatcctatgcacacagtgaagatgacctggcaagaatcccccatagtctaactgggaggagtacggtggagaagccttctcaagacttttcaaattctcattttggaaaaagttttgaagcagatgcagaaacacacagaagttttgatgaatcaacctggggtgcatttgacaacaacgatgatgtggactcagtgtggggttttaacaccaagaccaaggactctgacttcgagcagaaagatttctttaaatctgatgaanttggtataaacccagttagaacatgatctacacatacagatgggacgttccagacgaa

SEQ ID NO: 50849 - DNA, 428 bp, Glycine max
  Clone ID: LIB3109-016-Q1-K3-G2
ggcgcaaatctagattagaaatgggttctgataagctaagttcctctgcttgcccagttcgtttgtgcgtagatgagcacgtgacaaggatttataatgcattccgtcctatcctttatcaattcgttggggaagaattaacaaagtcggaagctgttgaagtactcaggattactaaaggaattcttttggatcttagcatgtccccctataaaacaagaaggacctccattgactcagttctagataacccaaaatttcagaaactattgccatcttttgatgacttacttggtgctctttcactggagaaaaaggtgaatacagatgggagagttgaattttgttagattgttgaccctgtagtaacttctttagcattgcctgctgcgttagatgctctggatgacatgatttacattcttaac

SEQ ID NO: 50850 - DNA, 432 bp, Glycine max
  Clone ID: LIB3109-016-Q1-K3-G3
gacacacagatcgtgaaagcgcctctctactctggtgtcttctttggtagagctctgtcacaggcacacagatcttggctgtgcctgcgcctacggtgatagaggaaactgaagcctttggtacatgccacggtggcaatagcagcattattactcctaaatttttcatgcttatcttgtgctacacactctctctctctctgctagagcgcgcgctaaaactggaataagtttaagaagagcaggcaaaagtgaatgtatctatctatctgaaacagcattattatttgttcgctctgtgcaactgcaactgcaactgcaaccaaccgcgctttaccgaatgccaacaaattaagcctggggtagtgaagatctgggaataatcttagagtaagagacctaattagatctctcgacgtctcaaatcgagag

SEQ ID NO: 50851 - DNA, 280 bp, Glycine max
  Clone ID: LIB3109-016-Q1-K3-G4
gtatcaaggggataataatcggaccggtccctaaaattttgtaaggccttaaggggaccggattaagtgaaaatctcatgtacggttctggaatagagatggggacaggaatgtcatcaccgactaggattatctaacaggttaagtacaggtgatatagttgatgcacaatcaaaatagggttttggggatggaatttgtgggcgtaacctatgggtttcattgactttctaatctcgtacctatcagaatgtgaaagaataccttttggattaccgga

SEQ ID NO: 50852 - DNA, 349 bp, Glycine max
  Clone ID: LIB3109-016-Q1-K3-G7
gagagtgagtgagatagagagagacgcttcgcaaatctcaatcgaatctcagaaaaatgagagaaatcatcagcattcacataggtcaggccgggatccaggtcggaaactcctgctgggaactctactgcctcgaacatggcatccagcccgacggcatgatgccttctgactccaccttcggtgtagcccacgacgccttcaacaccttcttcagcgaaaccggatctggcaagcacgtcccccgtgctgtcttcgtcgacctcgaacccaccgtcatcgacgaggtccgctgcggcacctaccgtcaactcttccaccccgaacaactcatctccggcaaggaaga

SEQ ID NO: 50853 - DNA, 399 bp, Glycine max
  Clone ID: LIB3109-016-Q1-K3-H1
gaatacaaggagtggaatgacaagaatccacaggtaacatcatgcaataaagataccaagaatttgatgcaaggtagtactgtcccacaagaagttgatacaagcaaggatattgtattcacatatgatgcttacttcacggaaagtgatatcaaatgggcatcacggtgggacacatatcttttaatgaatgatgatcagatccactggttctacatcattaactctctgatgattgttcttttcctgtctggaatggtggcaatgatcatgatgagaactcttttcagagacattgccaattataatcagctagaaacccaagatgaggcccaagaagaaacagggtggaaaacttgtcatgggaaatgttttatgccaacaatcaaattaaatttg

SEQ ID NO: 50854 - DNA, 379 bp, Glycine max
  Clone ID: LIB3109-016-Q1-K3-H2
ggagcaagagtgaagagcttagagaatggctcccaagggtttaatcttgttggctgagttatgcttctcagcactgtcactgagtcgttgtcttgcggaggataatggacttggtatgaacttctacaaggaatcatgccctcaggctgaagacatcatcaaagaacaagtcaagcttctctacaagcgccacaagaacactgctttctcctggctcagaaacatcttccatgactgtgctgttcagagttgtgatgcttcactgttgctggactccacaagaaggagcttgtctgagaaggaaacagatagaagctttgggttgagaaatttcaggtacattgagaccatcaaagaagctttggaaagggaatgccca

SEQ ID NO: 50855 - DNA, 300 bp, Glycine max
  Clone ID: LIB3109-016-Q1-K3-H3
gaatgaaaggagtgatatattgtctttggaatttgactgtgttgtcttcttctttgtgactcactctctcttcagctcttgaatttgatccacctgtgttgcttttcccaccaaaccaaacaaaataacctgatattaacgtaatagtagttcttttatcgaacattgtgccatgacattcgacgaggtttccatggaacacggcaagagcttcatcttcgccttgcaggaacttaagaacctgaggcctcaactctattctgctgcagactactgtgagaaatcttatctcaatagtga

SEQ ID NO: 50856 - DNA, 405 bp, Glycine max
  Clone ID: LIB3109-016-Q1-K3-H5
gacacacaacattttcagtgaaactgaaaaggggaagaagagagtgaaatgggggagctttacgcgttggacttcgatggagtcatatgtgatagctgcggagaaagctctctctctgctctcaaggctgccaaagtgagatggcctggtttgtttgatggggtggattcaaccacagaaaattggattattgaccagatgcacacagtgcgaccagtagtggaaactggatatgaaaacgttttacttgtgagattgttgcttgagagcagaacaccaaccatccggaagtcttcggttgcagaggggctaacagttgagggtatattggagaactggtcaaagttgaagcctattatcatggaagaatgggatgagaagagggatgatctgatagatcttttt

SEQ ID NO: 50857 - DNA, 313 bp, Glycine max
  Clone ID: LIB3109-016-Q1-K3-H6
ggttctagtgtgcgattgcatgtcggtgtatctcgctcttcttcttttgttgatctgtgtctgggtttgatctttctctcacctgaaaatgtcttgctgcggtggtaactgtggttgcggaagctcctgcaagtgcggcaacggctgcggaggctgcaagatgtacccagacttgagctacactgagtcaaccaccaccgagaccttggtcatgggagtggcacctgttaaggctcaatttgagggtgctgaaatgggtgtgcccgctgagaacgatggcttgaaatgtggaccaaactgctcctgcaacccc

SEQ ID NO: 50858 - DNA, 412 bp, Glycine max
  Clone ID: LIB3109-016-Q1-K3-H7
ggagagaagagaagcaaacgatggctacttttctttccaaccaatctctgttgggttcttgtccttgttctactcccttctcttcaaagccctttcaaaccctaaaaccccaaatcttatcttttccatctcgcgggtttccgcgccccctaatttcctcagtcaatcgaagaacccaattgaagtcttcccaagatttccctccaactacaaatgatgaaacagaggagacccagaatgatgtaagagggacaaatgatgatgaagataaaaaacaagtacctagtttaatgatcctccttgaagcatacaaggaagccttttttaatggcgaccaaaataccgtagctcagattgaagaggggatatattcaatagcaaataggaaaaataaattgattcagaaattatc

SEQ ID NO: 50859 - DNA, 210 bp, Glycine max
  unsure (1)..(210): unsure at all n locations
  Clone ID: LIB3109-017-Q1-K2-A2
ggaagtgtgaagcactgagcagttgaggaaatgggagcgcctgggagagcgatctacagcgttggtaactggattcgaaaaactggacaagccattgatcgtctcggntcccgtcttcanggcgggtactacttccaagagcagctctctangcatcgaactctgatgaacatatttgataaggctccttgtgttgataaggatgtattt

SEQ ID NO: 50860 - DNA, 352 bp, Glycine max
  Clone ID: LIB3109-017-Q1-K2-A7
ggaacacaatgttcttgttgatttctataaggtggaaggaagggtgggagcagccgcaagcaagaggtagcgaatcagattgagatggggtcgtttggtcggagaagcatgtccactgtggcgaaagcggtggaggaaatcaccggcactggcaacaccaagatccgcaaatcttccagcgagctctgcaccttcctcggcatccctcgccaatctcgttccgaaatcgctctcattctctccaagttcatcaaactctataatttcaagagtcccggcattaagaaggacaagatttgggagcagaatttgcagacactgttgcgtggcagaaacaatgttggttttcctg

SEQ ID NO: 50861 - DNA, 383 bp, Glycine max
  Clone ID: LIB3109-017-Q1-K2-A8
ggcaccacaatgttcttctagatatatatctgggggcaggaagaataaaagcagcctccttcattacttagctaatcaaattgagatagcatcgcaatgccatacaaacattttcattgctctgaaaacgaacactgaaattaccgcccctgctaacaccaagatccgcacatcttgcacgctctctgcaccttcactcagcattctttgccaatctcactctgaaatcactctgattctctccaacttcatcatactctattatttaacaagttccagcattactaaagacaatatttcagcgcactttcttcaaacactgatacctgccagaaccaaccttggacctactgagattgcgaatatactgtctccacaattct

SEQ ID NO: 50862 - DNA, 412 bp, Glycine max
  Clone ID: LIB3109-017-Q1-K2-B2
agggggaagtgaaagaggagagggagaagaagaagaagtggaggaagaaaaggggaaaacgcaaagaaaaaaagaggaagatagatcaagatctcccttgcgtttgtctcacgtgaagaaattcaagagcagaacgagactaactcaacggtatcagacgtttcaaggtttcagcacttccattttttttttttccggatttgagttggaaaaaaatcaaaaaagttcctacgtgcttggattgttcctctgggtggtggagactttgtgtatttttaaaatattgacaattcaaaatgccaaaagagagaagggataggtctttgtcacatgaaagtagcagagcctcaccttaccctagcagctctagtcgtgttggaagatcttctcttaaagagtcagaggaaaatgt

SEQ ID NO: 50863 - DNA, 363 bp, Glycine max
  Clone ID: LIB3109-017-Q1-K2-B3
gtcaacactctaagcaaagcaggcgtgaagaagggcatgaatgactttgtattcatcatgtactccaatgccttcgctgcatgcctcctccttctcttagccttattcttttataggaaaagaacacttccgccactctcctgtaacacccttggcctattccttgttgttggcatgctcagttgcattaatcagtcgatcaagtttttcggcataggttacagctctccaactttggcctcagcactgtccgatttggtgcccgcctttaccttcatacttgccgtcatcttcaggatggaaaaattagattggaaagctaatagcactctggccaagtccattggcacagtggtatcgatc

SEQ ID NO: 50864 - DNA, 367 bp, Glycine max
  Clone ID: LIB3109-017-Q1-K2-B5
gacgacagaagggggcacaaaaatacaatacaaaacaaaacagagcaaagagagagtgtgtgaaaagtgaaacaaaaaacagaacaacaatggcgacacttaaggttcctcagcctcttccccccgttgcagatgattgtgagcagctccgaaaagccttctcaggttggggaactaacgaggagctgattgtatcgatcttggctcataggaatgctgctcagaggaagcttatcagagaaacttatgcccagacctatggagaagatctcctcaaggccttggacaaagaactcacgagtgattttgagaggctggttcatctttggacacttgattctgctgaacgtgatgcatttttggcaaa

SEQ ID NO: 50865 - DNA, 354 bp, Glycine max
  Clone ID: LIB3109-017-Q1-K2-B7
gagagtgagtttgataattatggttttcccatgttgtcttgtgacatctcttgggtaggtgtccatcgttgcccaataatatatttttgttattatttgagctacatctggactccacaacgcaaaacctcagccctttgcctttgttccttcaacaaaatttttctttattacttgtgctattaaaatttagaattcctattatcgtggtagaatacctgttatttttcttaccagacatagtcaggtgtctgctttgtttggagtttggtagagaccgttacatgtctgggacataaaataccaagagtgagtctgataaatatgggtttcccatgttttatgataaaatct

SEQ ID NO: 50866 - DNA, 401 bp, Glycine max
  Clone ID: LIB3109-017-Q1-K2-B8
gcccgaacaagagagcatggccgtagctgatcccaagcctgactccgaacctaaggtctggaacttcttcaagctttcgtttcgccatttcgtcgtcaccaatacgacgccggcttccgctaaccttcaccatcttcattatcaccattaccaccaccaacaccatcatcatcaccacaaccctaataatctacccctcggagggtccaacttccacaccctgccattgcgtttactccgccgcgagatctcttctgccaacacgacatcgtgttaagctcgatcccttcaacaagctctactttccttatgagccgggcaaacaggttaggagtgccatcaggattaaaaacacccgttaatctagcgtagctgtcaagtttcaaacaactgcacccaaa

SEQ ID NO: 50867 - DNA, 334 bp, Glycine max
  Clone ID: LIB3109-017-Q1-K2-C1
ggagaaagacggaagggcgaaggttggggaagcgcggtgagggaactgactcaggcgattctgaaattcggtgaggcttatgaacaagcagagagttcgaagctgcagcaggtggtggagatggagaagcagaggatgaagttcgcgaaggatttggagttgcagagaatgcagtttttcttgaagacgcagctggagatttcgcagctcaagcttggaaggaaaggtggtaaccctagcaacaatctcaatggcaccaccaacaataacaacaacaatcataacaataatagtgacagtgaatgaatgtgtgagagtcaggaagggataacta

SEQ ID NO: 50868 - DNA, 403 bp, Glycine max
  Clone ID: LIB3109-017-Q1-K2-C2
gtcaacactctaagcaaagcagccatgaagaagggcatgaatgactttgtattcatcatgtactccaatgccttcgctgcatgcctcctccttctcttagccttattcttttataggaaaagaacacttccgccactctcctgtaacacccttggcctattccttgttgttggcatgctcagttgcattaatcagtcgatcaagtttttcggcataggttacagctctccaactttggcctcagcactgtccgatttggtgcccgcctttaccttcatacttgccgtcatcttcaggatggaaaaattagattggaaagctaatagcactctggccaagtccattggcacaagggtatcgatcgctggggcattgttattgtctttgtacaaaggccaagtca

SEQ ID NO: 50869 - DNA, 299 bp, Glycine max
  Clone ID: LIB3109-017-Q1-K2-C3
ggggggaggaatggaagcaaacaagaacaagttcatagaggattggggcactgccagagagaatctggagttcaatttccgttggactcgccgcaaccttgctcttgttggcatcttcggcatcgctattcccgtcctcgtctacaagggcatcgtccgtgaattccatatgcaagatgaggataatggtcggccgtacaggaagttcatgtgagagagtatggagagtcttttgtaataattcgtcaagttagaccttgatattatgaggctacaaaccatgtttttttttccttaat

SEQ ID NO: 50870 - DNA, 395 bp, Glycine max
  Clone ID: LIB3109-017-Q1-K2-C5
gaaggaagagatgaatattgatattggaagcgaagacacaggtttcacaaatggagcagtggtaaaatggcccttcatgaacaaagtatatgtccatcctcttttgatgtcattcaatcctcctcaggtgaattctgtgaaccatcctcatggtatgaagatgttttcagttcccaatcaagcaatttcagtttccatgggacatccatccctaaagaatcattttgcaactgttggtcagaatatgaatgttgctactgtgaagcaaccactactcggaggaatacctgttacggtgcctcattcagttcatcccattgttggtgctgttgctggaatgaccgaaacacgcgtgaaaccatccgtacctgctcctaaacttacaatcttctatg

SEQ ID NO: 50871 - DNA, 219 bp, Glycine max
  Clone ID: LIB3109-017-Q1-K2-C7
ggtgtgtgggatgagaagatgatgaggaaacattggtagaagaaattgaagagagagagagagagagagagagagagagagagggttggattgcatttcttcttgctttgctctaaagagaatctaatctcaatcctcattacaaattgattgattcctatctcagtcttttgtgctttctccctttgacatactcgttttcgccgaaacataaacaac

SEQ ID NO: 50872 - DNA, 416 bp, Glycine max
  unsure (1)..(416): unsure at all n locations
  Clone ID: LIB3109-017-Q1-K2-C8
gaaggtgcaagagtttgttgtgagctataagctagtttatcgtgaggagaatatgaagttgtttgttttctttgttgctgcagtagttttggtagcatggccatgccatggcgcangctaccaaaggttccctctccgaatgaaaactggctatggtgagcgttcttcggaggtaaaatgcgcaagttttaggcttgctgtggaagcacacaacatccgagcctttaaaaccattcctgaagagtgcgttgaaccaacaaaggactacattaatggcgaacaatttagatcagactctaaaacagttaaccaacaagctttcttttatgctagtgaacgcgaagtccatcacaacgacatatttatattcggcatagataacaccgtactctctaatatcccatactatgaaaaac

SEQ ID NO: 50873 - DNA, 106 bp, Glycine max
  unsure (1)..(106): unsure at all n locations
  Clone ID: LIB3109-017-Q1-K2-D2
aggggttctagtgggtgattgtttggtgttggaactcgntcttcttcttttgttgatctgagtttgcgattggtttttctctcacctgaaaatgtcttgctgcggt

SEQ ID NO: 50874 - DNA, 407 bp, Glycine max
  unsure (1)..(407): unsure at all n locations
  Clone ID: LIB3109-017-Q1-K2-D3
ggatgtggaatgtgggaaaccacgaagtagagtttttgcctgaagtgggagaagttgaacctttcaaaaactatctttaccgatatactactccctattcggcttccaaaagcaccagccccctctggtatgcagtcaggcgtgcctctgctcatatcattgtgctatcaagctattctccatttgtgaagtacacgcctcaatacatatggcttaaagaagagctggcgcgggttgatagaaagaaaacaccttggctcattgtgctcgtgcacaagccactctacagcagcaacgtagctcactacatggagggtgaaaccatgcgatcacgttttgagacatggntcgtccaatacaaaagtgatgtcatctttgcccggcatgtncatgcttatgaaagatca

SEQ ID NO: 50875 - DNA, 414 bp, Glycine max
  unsure (1)..(414): unsure at all n locations
  Clone ID: LIB3109-017-Q1-K2-D5
gaaggtgcaagagtttgttgtgagctataagctagtttatcgtgaggagaatatgaagttgtttgttttctttgttgctgcagtagttttggtagcatggccatgccatggcgcangctaccaaaggttccctctccgaatgaaaactggctatggtgagcgttcttcggaggtaaaatgcgcaagttttaggcttgctgtggaagcacacaacatccgagcctttaaaaccattcctgaagagtgcgttgaaccaacaaaggactacattaatggcgaacaatttagatcagactctaaaacagttaaccaacaagctttcttttatgctagtgaacgcgaagtccatcacaacgacatatttatattcggcatagataacaccgtactctctaatatcccatactatgaaaa

SEQ ID NO: 50876 - DNA, 419 bp, Glycine max
  Clone ID: LIB3109-017-Q1-K2-D6
ggcaaaagaaagagagagaaatggcactgagggcagccgtgctccggcacgttcgtgtgccactccaagccgctccaaaactgcagccatggcgtgccatgtcatcacacggcgacgatcatctctccaaaaaagaagtcgtcgaaagagtcctcgccgtcgtcaaagatttccccaaagtcgatccttccaaggtgagtccagatgtacatttccagaaagatttgggtttggatagcttggacaatgtggaaattgtaatggcactagaagaggagttcaagctagagatcccagacaaggaagctgataaaattgactcttgtcatcttgctattgagtacatttctaaccatcccatggctggttaactaatgtgtcctttttcctatttggcttcatgttgaacttaaacacag

SEQ ID NO: 50877 - DNA, 371 bp, Glycine max
  unsure (1)..(371): unsure at all n locations
  Clone ID: LIB3109-017-Q1-K2-D7
ggttttgagcatgagtagattgggtggagttggtgcagtggcgccactggtaactgatatcccattatcgtcagtcgaagaagaaggcggtgagggaagaaaccagccagcctgngagaagtggtcaaatgatggcacagaaagacaggtagccaagcttatggaagaaaatgtgggtgctgccatgcagtttcttcaatcaaaagcactctgcatcatgcccgtctcactagcttcagcaatataccagtcacaaccctcaagcacttctagtatagttaagcctgaaactaatcctccttcataatcatagtcagaactctggcacagatgcaccatccagtggtcccatcaagggctcacctaacact

SEQ ID NO: 50878 - DNA, 173 bp, Glycine max
  Clone ID: LIB3109-017-Q1-K2-E1
ggaagcagctcacgatatggaagaggatggagctgataagggaacttttccaagtacaaggagtgttgaaaaggtgggggacatgaagcaagtaaatgatgctgtgaatttgagttttgctactaaggattccgaggaattgaagtcaaggttgagtataatggatgcaaagc

SEQ ID NO: 50879 - DNA, 84 bp, Glycine max
  Clone ID: LIB3109-017-Q1-K2-E3
gggctcaaggaatttcgcttaattctttgcagaaaaatcagtgcagatgagagcaaattgaatttttaagccgagaacaagatc

SEQ ID NO: 50880 - DNA, 404 bp, Glycine max
  Clone ID: LIB3109-017-Q1-K2-E4
ggggcgaggtagccagagagtgatacaatacagagtgcgttgttgctccttcgccacaactccctgccaacatgggtatctccagagattctatgcacaagaggcgtgccactggtggcaagaagaaggcatggaggaagaagagaaagtatgagcttggtcgccagcctgctaacactaagctgtcaagcaacaagacagtcaggaggatccgggttagaggtggaaatgtgaagtggagggcactgagattggatactggaaattactcctggggaagtgaagctgtaactcgcaagactcgtatactagatgtggtttacaatgcctcaaacaacgagcttgtgcgtactcagactcttgtaaaaagtgctatcgttcaggttgatgctgctccattcaaa

SEQ ID NO: 50881 - DNA, 343 bp, Glycine max
  Clone ID: LIB3109-017-Q1-K2-E5
gatacaacagttatagtgtgaactcaactaagaataataataaaaaaagaagaaaaagaagcggaacaatggagctaactcctgcgagtgttgtttggtgacagttgaagtcgaacaaaagacggctagaaacgcggcatggcgtcgtcgaagcttgtctcgacgaatccggatctgccacgggacccttcttcttctatatctcccctttcttctcttctctccgatctgcaccccatggacgacctcctcaagtgcatcacccccaattccgtcgacgacttctggaaggggatcgctgccgcctccaccgacaatgccggcggcgtgaccctcgaggatt

SEQ ID NO: 50882 - DNA, 351 bp, Glycine max
  Clone ID: LIB3109-017-Q1-K2-E6
gatacaacagttatagtgtgaactcaactagggggaataataaaaaaagaagaaaaagaagcggaacaatggagctaactcctgcgagtgttgtttggagacagttgaagtcgaacaaaaaacggctagaaacgcagcatggcgtcgtcgaaccttgtctcgacgaatccggatctgccacgggacccttcttcttctatatctcccctttcttctcttctctccgatctgcaccccatggacgacctcctcaagtccatcacccccaattccgtcgacgacttctggaaggggatcgctgccgcctccaccgacaatgccggcggcgtgaccctcgaagatttcctcacc

SEQ ID NO: 50883 - DNA, 172 bp, Glycine max
  Clone ID: LIB3109-017-Q1-K2-E7
gagaataccactgaggggtgggttaaactacttatttcaaacacaaactttattgttaattcttttattaatatgaaactattccgggcctggttccttaataagaaaaccacgattatctgaaaaaaaaacaaattttctttgtactagggttttttgtgcttaaataaaa

SEQ ID NO: 50884 - DNA, 391 bp, Glycine max
  Clone ID: LIB3109-017-Q1-K2-E8
gggagtgaagaagattaacgaacgatggaatgtgggtctagcgaaggagaagaggtgcagcaacgcgtgccgatgagggagagagtggagtggtcagatgttactccggttcctcaaaacgacggccctaaccctgtcgttccgatccagtacactgaagagttttccgaagatatggattactttcgcgccgtttacctcaccgatgaacgctcccctcgcgccctcgctctcacagccgaagccgttcaattgaactccggcaactacactgtgtggcatttccgacggctgttacttgagtcgctaaaagtcgacttgaacgatgaactggagtttgtggagcgtatggccgctggaaattctaaaaattatcagatgtggcatcata

SEQ ID NO: 50885 - DNA, 404 bp, Glycine max
  Clone ID: LIB3109-017-Q1-K2-F3
ggagagaaaaaatgaccaaatcaatcaaattctttgagttgaacacaggggccaagattccttctcttgggttagggacttggcaagctgaacctggtgttgtagctgaagctctcaccacagccattcaggttggatacaggcatattgactgtgctagtgcgtataagaatcaagcagagattggttctgctcttaagaagctttttgatgatggtgtggtgaagcgtgaggacttatggatcacttgcaaactctggtgttcagatcatgcaccagaagatgtgccaaaagcattggataaaacattacaggaattgcaacttgactatcttgacctctatctgatccactggccagtccgcatgaaaagtggaacatttggactcaataaagaatatctt

SEQ ID NO: 50886 - DNA, 387 bp, Glycine max
  Clone ID: LIB3109-017-Q1-K2-F5
ggcagttcaaagcgaagaaagattcgaaacgaagaaagaaagcgttgtgaagaatggcggaagagggacaagtgatcggtgtccacagcgtagaggagtggaaggaacatctcaagaagggagaagagtccaagaaattgattgtggtggattttactgcttcttggtgcggtccatgccgtttcattgccccaattcttgcagagtttgctaaaaagttgccgaatgtcaccttcctcaaggtggatgtggatgaattggagactgtttccaaggagtggggaattgaggctatgccaaccttcctgttcttgaaagaaggcaagctggtggacaaggttgtgggtgccaagaaagaggagctgcaattgacaatagccaaacatg

SEQ ID NO: 50887 - DNA, 408 bp, Glycine max
  Clone ID: LIB3109-017-Q1-K2-F7
ggaagaagaagaatcagttccgtcgtgagacactgtcataacataagagtcgtggacgcggttggctgttgctgtctacggttccaacttccaagttacaagcttcacccattttataaaagttacggttcggttccgctgcattcgtgcaacacaaaatgagcgccatctctttcagttccacccatttgcacagttggaaaaatcccaaggggtttggaaaggtgagaaagcaacgagatgggaagctacttgtcaagtgttccagcaagagtgggaacccaacttcattgcaaaatggggttcgtgttggtgttcttggagctagtggctacactggttctgaggttatgcgactcttggctaatcatccacagtttgggattgcactgatgactgctgatagga

SEQ ID NO: 50888 - DNA, 399 bp, Glycine max
  unsure (1)..(399): unsure at all n locations
  Clone ID: LIB3109-017-Q1-K2-G1
ggagagagagagaagaaaaaaaaaatggtgaacttcatgttgatgattactgcagagcttgagaacctcacgaatctgcaaccccaagatggctgcgacgaccccaacttctgctacctcttcaagttgaaatgcgggagatgcggagaactgagccagaaaaaaacctgcgtcgtcttaaacgacaccgttcctcttccccgtggcaagagcaccactcatctcattcaaaagtgcaaattttgtggcagggatggcactgtgaccatgattgaaggcaaaggtaaaccactcacccaggaaatcagtgaatcagggaagtacgccccattgatgttatttgactgtaggggctatgagccagtagattttgtattncgtgatggatggaaaagtgaa

SEQ ID NO: 50889 - DNA, 301 bp, Glycine max
  Clone ID: LIB3109-017-Q1-K2-G2
aggggtactggctggggtgacaattataaaaacaaaggtgaaaggcatacttttagtttaaacctttttcacaagaacaaagaaaatttatgggactgtaaatccaggtgctttgatggtgaccatgaactaaatgccgagaaaattgccagcatgagaactgatcaattgcataatatgaacttagatgactctgtatgcttgactactgaccaaaagaagaaactgatgtggcgtggcaaaaagagtacacctactgaagactctggccatcgatgggatacctggatgtgttctgatc

SEQ ID NO: 50890 - DNA, 121 bp, Glycine max
  Clone ID: LIB3109-017-Q1-K2-G3
ggaagcttgaaacaacaaagtattattgcacaattattgatgcgcctggacataaggatttcattaagaatatgattactgggacattccaagctgactgtgctggtcttatcattgattc

SEQ ID NO: 50891 - DNA, 418 bp, Glycine max
  Clone ID: LIB3109-017-Q1-K2-G8
ggtgtgagttcattaacatatacaaattctgtgtgttgtgttgtgtacttgtgttaattgtgttgttgttgtaggaaatttaagtgaagagagaatgatgatgaagtctgctatgtgtgcattggtgcttgtggcactggttgtggttgaagtggggcccatggctgaggctgcggtgacttgcaacccaacacagttgactccttgtcttccggcaattaattcatgttctgcaccttcgagtgcttgttgccagaagctgaaggagcaaaagccatgcttctgtggctacctcaaaaaccctagcttgaagcagtatgttaactctcctaatgccaaaaaaaccgttagttcttgtggtattgcctatccaacttgttaagcacctgttatatatatatataaaatgtgtgaacaa

SEQ ID NO: 50892 - DNA, 280 bp, Glycine max
  Clone ID: LIB3109-017-Q1-K2-H4
agggatagcatcctaagatacagagactatcaccatcgtcctgctcatttggcacatgcttctccccctgaatactttgtccgcctggagaacacaacttacaaagacgatctatatttaaggaagaagacaacgatgcgtcggtggctttgttgtacttgtcacgtggaagagtcttacccatcaaatgaaaatgaacacctcgaaagcccaaggaattatggagatggcgaccaaaaaggctcaaaggtgtcagcttctgtcaaacctgaaacacaaa

SEQ ID NO: 50893 - DNA, 286 bp, Glycine max
  unsure (1)..(286): unsure at all n locations
  Clone ID: LIB3109-017-Q1-K2-H5
ggagcgaaaaatgaagaaaatggcttccaagggtttaacctttcttgctggggtaatatgccgttcaacacttgcccttgagtcctcttgtggcgggggaaggccaaaataatggcctggttatgaccttttccaaggaatcatgccttcagcttgaagacatcatcacaaaacaggtcaagcttttctacaagcgccacaagaacactgctttctcctggctcaagaacatcttncatgactgtgctgttcaaagttgtgatgcttcactgttgctggactccac

SEQ ID NO: 50894 - DNA, 406 bp, Glycine max
  unsure (1)..(406): unsure at all n locations
  Clone ID: LIB3109-017-Q1-K2-H6
ggcacaagtgagtttgttgatcgagataactagaaacagtgtgatgaaaatgaaagtccttgttttcttcgttgctacaattttggtagcatggcaatgccatgcgtacgatatgttccctctccgaatgaacactggctatggtgcccgtactccggaagtgaaatgcgcaagttggaggcttgctgtggaagcacacaacatctttggctttgagaccattcctgaagagtgcgttgaagcaacaaaggaatacatgcatggcgaacaatatagatcagactccaaaacagttaaccaacaagcttacttttatgccagagacctcgaagtccatcccaaagacacatttgtgttcagtatagatggcaccgnactctctaatattccatactacaaaaaacat

SEQ ID NO: 50895 - DNA, 365 bp, Glycine max
  unsure (1)..(365): unsure at all n locations
  Clone ID: LIB3109-017-Q1-K2-H7
ggagagatgcgtgtttgaatctgtgtgtgtgaaagttgaacaagacccgaagcaatcgcaacccccaaaaacgcggcgttttgaacggtccacgacacgaacatggccgaaacgtcttctacagaagatgatcacaatcatattgccatcgaaattatcagcgacgacgaaatggctctaattgaagctgctttcgcttttgcttacactcgcactttctcttcacttcgttcttcttcttcttcaaaattacccctttgcacaaacgccttatgcatcacacctttgtccaaaagaaagttatcgagtgacattgaggatttacccacttgcaagaanaaacacactctttctgattcttttct

SEQ ID NO: 50896 - DNA, 417 bp, Glycine max
  Clone ID: LIB3109-021-Q1-K2-A1
ggttctagtgtgtgattgtttgttgttgtaactcgttcttcttcttttgttgttctgtgtttgtgtttgttttttctctcacctgaaaatgtcttgctgcggtggtaactgtggttgcggaagctcctgcaagtgcggcaacggctgcggaggctgcaagatgtacccagacttgagctacactgagtcaaccaccaccgagaccttggtcatgggagtggcacctgttaaggctcaatttgagggtgctgaaatgggtgtgcccgctgagaacgatggctgcaaatgtggaccaaactgctcctgcaacccctgcacttgcaagtgaggtgttgggagagcaagcttcaagcagagatagcccttaattaggaataatgataaactattaatgtgtaactaaaaacttatgtatta

SEQ ID NO: 50897 - DNA, 286 bp, Glycine max
  Clone ID: LIB3109-021-Q1-K2-A11
tattgggacacagagaaagaaacatggcgtcggagcttgctatttcatcgtcatcatgcacattgaggcacgttctcaccttacccaaaaccctaacttcaaaaccccaattacaagtcgatgcttgttcctcatggaacacacagcggcgctgggggaacttgaagtgctccatgacgacaacgccatcataccctaagccctctgagattccgtggcagaaggaggctctgcaacttcgccaacctaatctgcaatgttgcagcccccgtcgaaatcaaacacc

SEQ ID NO: 50898 - DNA, 407 bp, Glycine max
  Clone ID: LIB3109-021-Q1-K2-A12
ggggaacagaaacaagaaaaaaaaactcccacaatagggatgaggagtgccgacaggattaattgaggtcagggactgaaagggggtgttctgttctgatcggatctgaaatcatcgggaaaatgtcgtcgtttctgcaccagagaagcagtctccagaacccattctcgaatccattcccggcatcaactccatcatcatcgaattcgaagaaatccctgtccatcatgggccccaccaccctcctagccctaatctccctcatagtcatactcggcgtcttctgcccctgggtgggctttccccagggctttcccttcactcccactcccacttccaaatgggctcactacactttagaacaagcgctctccttcgtcgccaaaaacggttcctccgtcatcgtc

SEQ ID NO: 50899 - DNA, 419 bp, Glycine max
  Clone ID: LIB3109-021-Q1-K2-A2
gagagcgaacagtgaagagaatggctcccaagggtggggcctttctggctgtgttaatatgcctttcagcactgtcactgagtccttatgttgcggaggaagggcaaaataatggcctcgttatgaacttctacacggaatcatgccctcaggctgaatacatcatcacagaacaagttaagcttctctacaagcgccacaagaacactgctttctcctggctcaggaacatcttccatgactgtgctgttcacagttgtgatgcttcactgttgctggactccacaagaaggagcttgtctgagaaggaaacagatcgaagctttgggttgagaaatttcaggtacattgagaccatcaaagaagctttggaaagagaatgccctggagttgcttcatgtgctgatatcctcgttctc

SEQ ID NO: 50900 - DNA, 145 bp, Glycine max
  Clone ID: LIB3109-021-Q1-K2-A3
gaaggtgcaagagtttgttgtgagctataagctagtttatcgggaagagaatatgaaggtggttggtttctttggtgcttgcataattttgggaaccatggcattgcattgggcaaggttaccaagggttccttttccgatggaa

SEQ ID NO: 50901 - DNA, 201 bp, Glycine max
  Clone ID: LIB3109-021-Q1-K2-A5
ggactcaaaagctcaataaatgcacgggaccaagcgaacaaatcaaatctctctctcaatctagccttctttctttttttcaatttccaaatcacgaaactcaagaagatggagaaagcgatcaacagacagaagattttgcttcatcatctcaacccttcatcattcacccaccccaacgaatcatccttccttcatggc

SEQ ID NO: 50902 - DNA, 422 bp, Glycine max
  unsure (1)..(422): unsure at all n locations
  Clone ID: LIB3109-021-Q1-K2-A6
ggaaaagaaaaatgaaaaatagcacaaggccaaaaatatcacctgatctgaaacttggacacgaaagaaaggctcgtatgcgcgacttctctctcttgcattgattcaacgttgtccattctccgaaacatcacaaagaaacccaactgagagagtgaagaataagaagaataaaaagaagaagaagggacgacaacaatggggggtttcgcaatgggttctgccttcgattccaaatctgggcagattattatggctgctttgcttttgatgattatgtccttctatgctggcaacctttttggcaacaatgctcccctttacgtctctcagcttgcttctcattcttctcccaacaatgtctcctccaacggtgctaccaaatttactaacanagttgctctgacttactggaaaacccc

SEQ ID NO: 50903 - DNA, 321 bp, Glycine max
  Clone ID: LIB3109-021-Q1-K2-A7
ggagggaaaaaagtagagtggtatgtgggttgctgcggcaacaaaaccattcatcaaattccaattccacagacacactacttctcttccgttcttctgagggaaaacaaacttcaattttcttttcttctttccgggcttctggtcaagcgccttttaagcgcctgggcacgcacaacggaagccttcattgcgaacaaggccttggctgcttcatgaatcgccttacgaacaaattcaacagcgccgaaatcggtcgcttccgagacccttagggggtggaaggtctcgatgctgttctcgatgttgggggagtgtatg

SEQ ID NO: 50904 - DNA, 422 bp, Glycine max
  Clone ID: LIB3109-021-Q1-K2-A8
ggagcactgagcaggtgcaccaaacaaaaacaacgacaacttcacacacagctgacgcgtaaactaagattcaacgtctgcgctctgcagccaccatacaatagatccttcattctttctctgcaacgatcaaacaacaaaaaacactgcacctcttcttctggatttggtgaagaagaagaagaagaagaagaagaagaaagtgtgatttgatgattatgaattgaagtgtgagaggtgaagagatgaacgtgagccatgcttcggttcacccagttgaagaagctccaactactgaaggtggtggtgaccaaaacgtcaacgctcctagggtgaggatgaaggatgttcaaggcatgcctggcactgccggtggcctttctctgcgtgtttctcagtttgttttcgctgctgctgcactc

SEQ ID NO: 50905 - DNA, 425 bp, Glycine max
  Clone ID: LIB3109-021-Q1-K2-A9
gcagctgagatgtcgtgacatggaatggtggatgaggaggaggcagttgccatcgcgattaagacagagagttcgccattttgaacgtcagagatgggcagcaatgggaggagaagatgagatggaaatgatcaaagacttgccagaggggctgaggagggacatcaagcgccatctttgcctcgatctcattagaaaggttcctctattccacaacttggatgatcttattcttgacaacatctgtgacagggtgaaacccctagtcttctctaaagatgaaaagataatcagagaaggtgatcctgtaccaaggatggtgttcatcgtccgagggcgcataaaacgcaaccaaagccttagcaaaggcatggtagcctcaagcatccttgagccaggagggtttttgggtgacgagctgcttt

SEQ ID NO: 50906 - DNA, 394 bp, Glycine max
  Clone ID: LIB3109-021-Q1-K2-B1
gaatgtaaaaaatagaggttgaagaagcaagcaccaacgtgaataccctaattcggagggtttcagttttcgccctcttttctcatctccaacatcttcgtcgtcacggaggctagtcttcctgttatcacaaacaatgtctgacggtcaagaatcagacaagaatattgagatatggaagatcaagaaattgataaaggcattggaagctgctcgaggtaatggtaccagcatgatttctctgataatgcctccacgtgatcaaatatctcgggtcactaagatgttgggagatgaatttggaactgcttcaaacatcaaaagtagggtgaaccgacagtctgtgttgggagccattacttctgctcagcagaggttgaaactatataacaag

SEQ ID NO: 50907 - DNA, 261 bp, Glycine max
  Clone ID: LIB3109-021-Q1-K2-B11
gactctaagatgaatgaattgctttccgctgatggacaagaatttttcacttcatatgatgaagtctatgatagttttgatgcaatgggccttcaagaaaatcttctcagaggcatatatgcttatggttttgagaggccttctgcaatacagcaaaggggaattgttcctttctgcaagggtctggatgtgattcagcaggctcagtctggaactggaaagacagcaacattctgttcggggattttgcaacagcttgac

SEQ ID NO: 50908 - DNA, 423 bp, Glycine max
  unsure (1)..(423): unsure at all n locations
  Clone ID: LIB3109-021-Q1-K2-B12
ggacgaaggtgataataatcggtgccggaacttggggtatcgccaccgccggttgcttaacgaagcaatcaataccttacataatgctcgagagagaagactgtttcgcttcgctgtggcagaaatacacctacgatcgtctccaccttcatttgaggaagcaagtttgcgagttaccgcacttaccgtttcccaagtcttaccctcactacgtgcctcggaagcagttcatagactacttgggaaactacgttaaccactttgagatcaagcctctgtaccagcgtgcagtggagttggtggagtatgatggatggaaagggatttggagagtgaaggctcanaatagaagatctggtgagcttgaggaatacgctggaaagtacctggtcgtggccagtggcgaaaccgccgagcctcgtt

SEQ ID NO: 50909 - DNA, 413 bp, Glycine max
  Clone ID: LIB3109-021-Q1-K2-B2
ggaggacacggtgggtaaagtattgaagagaaacctacatcacttgaaccgcaactgatggagctgaagaagcagaagctactaatcatttgttgtgactgtgagtagcaaagtttagtttggagatgttagaggagaaggatgtttgtgtatatgtgaaagtgtagactctgacaatgaccccgccggagctccgtcacggccacttcgtgttcctgcaaccagccttcgccggaaattaaccgtcacagcgacttgagggttggatgaggtggctgttttggttcaaggtttggttcgaggaacttgactataccttgccaagcacaagaaaatggttgatcatggaggtgtgccagtagaagttggtggtgaggcgggctatgcagtacgtaatgctcgaaaaaccgagt

SEQ ID NO: 50910 - DNA, 418 bp, Glycine max
  Clone ID: LIB3109-021-Q1-K2-B4
gggagagcgaggtggtgtccattgcagttttctaatgaaaacaacaaaatagacacctgttaagaaggaggacaacgatggtgctgccgctatttactgctttcattctctttgcttttattccgaatggattgttagcagttccttccaccgtcccggcattcctttggtcatcacattatgaactggcctctgaaaatatattgaaggaatctgtaaattaccaagtcatttctccgaaggatctagcaaaatctattttatctgaagcaggctggtcaaattttctgtgcaaaggaaagaaatttcatgagcctctggatctggcactcttattcgttggtagagagttacaatcttcagatttaagcatgaacaaacatgcaaactcagctcttttggacctgctcaagaactc

SEQ ID NO: 50911 - DNA, 276 bp, Glycine max
  Clone ID: LIB3109-021-Q1-K2-B5
gggcaaaaaaggaggtaatatggagcatgatgggaaggcagaccccttgaccaaggggatgttcaaaatttaagggaggcattccacattggtgtaagaaagatcccaccggtggagatttgctacctggaacaccttaccatcaaccaattgcaaattggttcaaaagtggggtgcttaagttaatggtgccaggatcaacccaaggcagttctcacatttaaagacagtgttgatagactctggacccacatatagctctgtaaaagtcccaaa

SEQ ID NO: 50912 - DNA, 417 bp, Glycine max
  Clone ID: LIB3109-021-Q1-K2-B6
ggcgcaagagaagagagagggagtaatggacagagacgaagcagaaaccatggagaatgtggaattcgatgcttctgagattgagtacgttagttacggtggcgagcatcacctccctctcgtaatgaacctggtggaccaagaactcagcgaaccttattccatcttcacgtaccgttacttcgtctatctctggcctcagctttcattcctggcgttccacaagggtaaatgcgtgggcaccgtggtatgtaagatgggggaacaccgtaacactttcagaggctacattgccatgctggttgtcatcaagccctacagaggaagaggcattgctacggagcttgttactaggtctatcaaggtgatgatggaatcaggttgcgaagaggttacattagaagcggaagtgacaaa

SEQ ID NO: 50913 - DNA, 398 bp, Glycine max
  Clone ID: LIB3109-021-Q1-K2-B8
gggagaattaggcaaaatgtttgatatcccaatggatggctctaaatctagaaaatccggtcccataagtaatgctccttcaaggacaggatcatttgcaggtgctgcttcacactctggacctatcatgcaaaatgctgcagctcgttctgcttatatcacatctggtaatgtatctactggaggcatgtctgcttcagcctcaatgaaaaagaccaactctggtccattgaataagcatggggaaccagtcaagaagtcatctggccctcaatctggtggagttacacgccaaaactctggtccaattcctccagttcttcctacgactggtcttattacatctggcccattaaattcatctggagctccaaggaaagtgtctggtcaattagatt

SEQ ID NO: 50914 - DNA, 326 bp, Glycine max
  unsure (1)..(326): unsure at all n locations
  Clone ID: LIB3109-021-Q1-K2-B9
ggctaagcgaaaccaaaccaatctttttatctcgaccctttttatttgggaataataataataataagcacttcaaggttgtgaagccttgaaggtgcatcaacacttgtgtcaacacaagaatgaggctctctgttttacttctagtgttcctcgcagttctggctgccacaaggcctagcctcgtaaactgtatggtccttccttcaccaaaaaacacagagaaagcccctcatgagcctctcaaagtgattcgaattctcatcaatntagtgatggcagaaaacgccaacactagtgagggtaatataaacaacatggctttg

SEQ ID NO: 50915 - DNA, 428 bp, Glycine max
  Clone ID: LIB3109-021-Q1-K2-C1
ggagcagaatgatagcgaaaaccaaaaaacaagtgtcatcaccttcttcttcttctttccctgattctgttggttccatctcttcattcataccttgatccgtgatctcccaatttctcacttgaaagtatgaagaaagaatagataagtaatggcaggagcagaagcaagggctctgtggcagagaactgctaatcgttgctttgtccaagaagatgcaaaaagagctcccaagttggcttgttgccaatcttcatgtgcaacatcaaaatcagttgatactggacctgccagtacagcagatgaatctgatcataatacagttaatgttacccattttaacaggaaatcgtcaatttctaatctatcatcagactgtatgtggtggttgcattcacaacctaattatgggtatcaaaagggtttaa

SEQ ID NO: 50916 - DNA, 68 bp, Glycine max
  Clone ID: LIB3109-021-Q1-K2-C10
gcacaagtgacctcttgatcgggatggcgggtaacactgttatgaaaatgtaaatccttgtttccttt

SEQ ID NO: 50917 - DNA, 417 bp, Glycine max
  Clone ID: LIB3109-021-Q1-K2-C11
gggttgaaagtgagcaatgtcgttcgcagtggcggtgtgtacaacgtcgtcgttcttcccttcccgttttgaaattcgcaatccaaagcagcttcagcttccacctctcctttcaatgtcactgtcgtcgaagctaccgttgcatttctccggcaatgccatattcaaccgcaaccacccaaccatgttcaaaattcgagcctcaaactcttcatccaaactcgtcttattgagctccactatcgtcgtcacaacagcggtagcgaatcgcgtgctctacaaattggcccttgttcccatgaaagagtaccccttttttctcgctcagttcataacttttgggtatgttgttatatatttctcgatcttgtatttccggtaccgggcgagaattgtgaccgatgagatgctggcaat

SEQ ID NO: 50918 - DNA, 407 bp, Glycine max
  Clone ID: LIB3109-021-Q1-K2-C12
ggcccaagtgagttggttgatggagttaactagaaccagggggatgaaaatgaaggtcctggttttcttcgttgctacaattttggtagcatggcaatgccatgcgtacgatttgttccctctccgaatgaacactggctatggtgcccgtactccggaggtgaaatgcgcaagttggaggcttgctgtggaagcacacaacatctttggctttgagaccattcctgaagagtgcgttgaagcaacataggaatacatccatggcgaacaatatagatcggactccaaaacagttaaccaacaagcttacttttatgccagagacctcgaagtccatcccaaggacacatttgtgttcagtatagatggcaccgtactctctaatattccatactacaaaaaacatg

SEQ ID NO: 50919 - DNA, 406 bp, Glycine max
  Clone ID: LIB3109-021-Q1-K2-C2
ggactggccagagggtgcaatctcacgagagagtattaaagctgttatgaagcttccccgactacagaaccttataatgcagcatgttgatcattcagctggagatcttatacatcttttgcaggggctacttagatatgacccctttgaaagacttacagctagggatgctttgaggcattccttctttatgagagatcatcttaggagatgatttttatgtgtttgtaaacgattggtctgcttttaggtgaaagatcactcgagggcaaatatggctgtaaggagcctatgtgccaatgtaaataaatatttaaatttaggcttgtgtggcaagtgaggatggttattcagcagcatttacacctcaacctcaaagcctgtgtttcaaacgttttattaaaaa

SEQ ID NO: 50920 - DNA, 427 bp, Glycine max
  Clone ID: LIB3109-021-Q1-K2-C3
gaggaagaatttgatgaatcagacaagtcacatgataatgaagctccagaatatagacgtctaattgcaattcatgctgggaagcctaaaggtggattagcagaatgcctcaaagtggatcctgataaagtgagacgtctaagtttaagtgagcaacagcttgaaaaggctgccataaatcatggacaacaaattgtcaggtttactcagcggaatatactaagggtgtatccaaaaggtactcgcattgactcatcaaattataacccattaattgggtggatgcatggagctcagatggttgcatttaacatgcaggggtatgggagatctctttggttgatgcatggaatgttcagagccaatggagggtgtggttatgttaaaaaaccaaattttctattggagactggtccagatgacgagg

SEQ ID NO: 50921 - DNA, 426 bp, Glycine max
  Clone ID: LIB3109-021-Q1-K2-C4
ggttcaaggaatgtagagagagcgggcggagactgctatgccctttgactcttcaagaactaagaagtacagagctgaatccaagtatggctttgcgtaacaccattgaagaatggactgccaggaatgaagctgcacagctggatatggctcgccggtcattgaatatggggagtccagaaaatgagactcttcaggccttaaagtatgtccagcacatctgccgaagaagtcgatcaaacaaatacactgtccgcaatgcagggcttatcccaatgattgttgacatgctgaagagtagcagccgtaaggttcgttgtagagctctggaaacccttagagttgtggtagaggaagatgatgagaataaggaattgttggctgaaggggatactgttcgcactgtagtaaaattcctttcacatg

SEQ ID NO: 50922 - DNA, 418 bp, Glycine max
  Clone ID: LIB3109-021-Q1-K2-C6
gagagcgaagagcgaagagaatggctcccaaggggttaacctttctggctgtgttaatatgcgtttcagcactgtcactgagtccttctgttgcgggggaagggcaaaataatggccttgttatgaacttctacaaggaatcatgccctcaggctgaagacatcatcacagaacaagtcaagcttctctacaagcgccacaagaacactgctttctcctggctcaggaacatcttccatgactgtgctgttcagagttgtgatgcttcactgttgctggactccacaagaaggagcttgtctgagaaggaaacagatagaagctttgggttgagaaatttcaggtacattgagaccatcaaagaagctttggaaagagaatgccctggagttgtttcatgtgctgatatcctcgttct

SEQ ID NO: 50923 - DNA, 418 bp, Glycine max
  Clone ID: LIB3109-021-Q1-K2-C7
ggcgagagttctgagaagaaaagagaagatcggtgagtgaggaagcaaatagcaatagcaccgccaccgtcaccactgccactgccactgccactagcaacagcagaatgggaaccttgggcagagttttctacgccgtcggattttggatccgcgagaccggccaagccatcgatcgcctcggctctcgtctccaaggcaactacctctttcaagaacagctgtctaggcatcgacctctgatgaatctgttcgacaaagctccctcggttcacagggatgcatttgtggcccctagtgcctccctcctcggcgatgtccacgttggccccgcttcctccatttggtatggatgcgttctcagaggtgatgttaacagcattactattggatctggaactaatatacaagacaattc

SEQ ID NO: 50924 - DNA, 387 bp, Glycine max
  Clone ID: LIB3109-021-Q1-K2-C8
ggcacgttgttaaggatgttcctaacaatttgttgaggcacattaccctggataacaatgagaacaaacctgtcactaacagtagggatacacaagaggtaatgttggagcctggcctgaaattaatcaaaattttcaaggaatataccagcaagacatgcattctggatgattttggcttctatgaggcccgtcagaagactattttggagaagaaagcaaagcaacaattcccaaagcaggtatgggaagggaaacctgctgatgagaagattgagataaatggggaagtcaatactcaaaaatctgaagttagctcggaagtgctcaaggagtcccttgctgaggaggatagtgatgaccacaaagttcccgagaatggatgtg

SEQ ID NO: 50925 - DNA, 416 bp, Glycine max
  Clone ID: LIB3109-021-Q1-K2-C9
ttggggggcaagagtgaagagcgaagagaatggctccgaagggtttaatctttttggctgcgttatgcttctcagcactggcactgagtcgttgtcttgcggatgataatggacttgttatgaacttgtacatggaatcatgccctcacgctgaagacataatcaaagaacacgtcaagcttatgtacaagcgccgcaagaacactgctttatcctggctcagaaacatcttccatgactgtgctgttcaaagatgtgatgcttaactggtgctggactccacaagaaggggcttgtctgataaggaaacatatagtatctctgggttgagaacattcaggtacattgagaccatctaagaagctttggaaaggggatgcccaggagtagtttccttggctgatattctcgttctc

SEQ ID NO: 50926 - DNA, 407 bp, Glycine max
  Clone ID: LIB3109-021-Q1-K2-D1
gacgaaacaatggtagaactagtatctcaatacccgagaacgtgtgaacgaaaaatagcgtttattttaaactagaagactagaagattacgtatttgattatgcaaagcggtgcacaaattacataatccaaagtccagaactcacactatatatataagcaggacctaggcttcttctttgcactgcaaatcacttttctactttgagtcttcttgatccttctgtgtctccttgaactcaaacatggcagatgaggtggttctgctagatttctggccaagtccatttgggatgagggtcatgattgcacttgctgaaaagggtatgaaatatgagtacaaagaagaggacttgaggaacaagagtcctctactgctccaaatgaacccggttcacaagaagat

SEQ ID NO: 50927 - DNA, 399 bp, Glycine max
  Clone ID: LIB3109-021-Q1-K2-D10
ggaagaggaaggggctagaaaaaaaagaactagggggctggaatctgagaactttaacatgtactagtactactactacattcatgcatattactttgtactatttttttttaaccatagcatcaagaacacaaagatggtgtgagctccttcgtgtgaaaagatacgcatgaagaaaggtccttgagctatcgaggaagatcaaatcctcacatcttacattgacaaacatggacatgggaattgtcctgccctcccatagcaagcaagcttggtaaggtgtgggaaaagctgtatactacactggattaactatgtgtggcccgatattctaagacggactctcacaattgaagaagaagaaactatcattaagctgcatgacatgctggagaacag

SEQ ID NO: 50928 - DNA, 249 bp, Glycine max
  Clone ID: LIB3109-021-Q1-K2-D12
ggagggtgcattgtgtcaaacctggggggggtgaaaagacccagatcattgttatgggcaatgggctttgctcggagtaccagatccacaagaggtttgacgctgaaggctcttgtcatggtcaatgtacagataagcctagggcacaaattgataatactaccactctcaaagtccttgatcttaactttgactttggccttgaatagtattggtttcaagagcttatatgtcaacttggcatagatt

SEQ ID NO: 50929 - DNA, 425 bp, Glycine max
  Clone ID: LIB3109-021-Q1-K2-D2
gacacacaacatttacatttctctctccagtatggcttctactcacaatgagttttatgcacttatgctagtggtggtggttggctccatggtggcttcctgtggtgctaacttcaaccaagactttgatctaacatggggtgatcaccgtgctaagatattcaatggtggtcagcttctatctctttctctggacaaagtctctggctccggcttccaatccaagaaagagtacctatttgggaggatcgatatgcaactcaagctcgttgctggcaactctgccggcactgtcactgcttactacttgtcgtctcaagggccaactcatgatgagattgattttgaattcttgggaaacgtgagcggtgacccttacattctccacacaaacgtgtttaccaaaggccaagggaacagagagc

SEQ ID NO: 50930 - DNA, 373 bp, Glycine max
  Clone ID: LIB3109-021-Q1-K2-D3
gagggcgtcagagggagttaggctcttgggctagatctggattaacagctactagttgtgagatggggctttaatgctaagcctgatggaggcatgtctacatgcggttgctcattcatgcgaaatcgtgtaacgagtggatcactggtactgacactgtggactgatgtggaaggtgaggacatgaactacacgcaacagattgtcataggtgctagaccaaggagatggcgagccagggactacgagcccgtatagatgggggctaagaatatagtgaactcggcaacaaaggaacgtgagagcattacgattgagctccgataccacacggtagtgcggatggaagacagttgatacatgatgacagacg

SEQ ID NO: 50931 - DNA, 157 bp, Glycine max
  Clone ID: LIB3109-021-Q1-K2-D4
catgccacaggttaaaatgatggtagtacttggggaacttggtgggcgtgatgagtattccttagtggaggccttaaaacagggaaaggtatccaaaccggttgttgcctgggtcagtggcacatgtgcacgactcttcaaatttgaagtccaattt

SEQ ID NO: 50932 - DNA, 384 bp, Glycine max
  Clone ID: LIB3109-021-Q1-K2-D5
ggctgagttcagaacaaaacaagagaaaaaaaagggtttcacactttgtccaatctttcacactgaactcttcaattttcaattctctttttcatgcaccactcttctttttcttcagacaccttcatcatctgcataccgcttagctccaaaaactacacacacaagaattctgtttctttctgttgatttgatggatccgcaggtctaatggtttcacacactttcttcactacggatcattgtcttcttcatctggggcaccccaatagcttcttctaatcgatagtcaaattttgttggtttgtggtggatcatcttcgtcgttgtggtgactagtgaggagtgcaggactatacctatctatatagtgtatgaaaattc

SEQ ID NO: 50933 - DNA, 384 bp, Glycine max
  Clone ID: LIB3109-021-Q1-K2-D6
gtggaacatggagacattgcaaacagaaagtactccggaggaacacagtcttattattactgatgttcgcttcagaccaaattcaactcagctggcaacatcttcgtttgatacaactgtgcggctgtgggatgctgcagatccaaccttccctttacatacatatagtggtcatacttcacatgtggtgtcccttgattttcacccaaagaaaactgagcttttctgttcttgtgacaataacaatgagattcgcttttggagtattagtcaatattcttccacacgtatttttaagggaggatctacacaggtgaggttttagccaaggcttggtcaacctctggctgcaacaagtggcaatgttgtgtcttcttttgatgt

SEQ ID NO: 50934 - DNA, 401 bp, Glycine max
  Clone ID: LIB3109-021-Q1-K2-D7
ggaggaaggaagatgagtttgagggcatcagagatagcgaagaagttgaatctgcaacctcacccagaaggtgggttttacgtggagacattccgagaccattccgtccagctttcgacctctcagctcccccccgaatacaaagtggatcgccctgtatcgacctccatctattttctcgttccttctgggagtgtgtctcgcctccatcgcataccctgcgccgaaacctggcatcattacatcggcgaccctctcaccgtagtggaattgaatgagaaagatgggagcgtaaaattcacttgccttggatcagatctgactcagaatcaggtgccgcagtacacggtgcctcccaacgtctggtttggctcttttcctaccaaggactttacctactc

SEQ ID NO: 50935 - DNA, 424 bp, Glycine max
  unsure (1)..(424): unsure at all n locations
  Clone ID: LIB3109-021-Q1-K2-D9
gaactcaaacagggaggatcatttctgatcgattgattgcttacgatttggaatagtgacaagtaaagacaaatcacaactcacggtcatccaattccaagaatagagctttacgaggcagcggcttcaaaaggaggggaatattcagaggaaaagaaagagtagttgttgaacaacaagagctttcctcattcttagcttatctcacaaggaaggtacgtaagatccttaacacccttaccgcggttacttgccgcctcaatccattgctgaaatgaatgctcataaataaatatatntgcaggctacgaatctctgctcctagattttggtttcttaattatcaatctagtctctaaattatattaaaagatttaatttgattccaaatttttaaataatttaatttaatttctatattatt

SEQ ID NO: 50936 - DNA, 368 bp, Glycine max
  unsure (1)..(368): unsure at all n locations
  Clone ID: LIB3109-021-Q1-K2-E1
ggggagatggagcggaagtggagcagtgaatctggtgggaatgtgatatcgtcgccatcacactcgcgtaatgggcattctcgctcctcttcgctcactatccccggaggaggaatttcaaccgtcaaaaggactcagaatgttgctgccaaagccgccgctcagcgcctcgcccaggtcatggcttctcagactgccgacgacgacgacgacgacgaagacgatctaggatttcgctacactgctcctncacctctctctctttccaggagctctgctagatctccatctnctgcgttagctcggaacctcgtagaagaatcatcaatgtatcttcgcccagcaccacctgctgctggtaataatag

SEQ ID NO: 50937 - DNA, 292 bp, Glycine max
  Clone ID: LIB3109-021-Q1-K2-E2
ggttctagtgtgtgattgtttggtgttgtaactcgttcttcttcttttgttgttctgtgtttgtgtttgttttttctctcacctgaaaatgtcttgctgcggtggtaactgtggttgcggaagctcctgcaagtgcggcaacggctgctgaggctgcaagatgtacccagacttgagctacactgagtcaaccaccaccgagaccttggtcatgggagtggcacctgttaaggctcaatttgagggtgctgaaatgggtgtgcccgcttagaacgatggctgcaaatgtgga

SEQ ID NO: 50938 - DNA, 410 bp, Glycine max
  Clone ID: LIB3109-021-Q1-K2-E3
gaccacttggataaacgaacttggacttatatctttggagcttgctgtgccacctctgtgttcataccttcttttcacaattaccgtatttggtcttttctgggacttggaatgaccacttacactgcttggtacttggcaatagcagcccttattcatggccaggcagaaaatgtgacacacacgggtccaacgaagctagtgctgtacttcacaggagccaccaacatactgtacacgtttggtggacatgcagttactgtagagattatgcacgccatgtggaagccacagaagttcaagtacatatacttgctggccactttgtacgttttcacactaacgattccttctgctgctgccgtttactgggcttttggtgatgaacttctcaatcattccaatgcatt

SEQ ID NO: 50939 - DNA, 429 bp, Glycine max
  Clone ID: LIB3109-021-Q1-K2-E4
gagagaaaggatgcggaaagagatcttttggccaaactacttgtcagccttgtgaaatctcagcatggaaccttgaatcaagttcagctcattaaagggtttgaatctgctctcagtacattggaggatgctgttaatgatgctcccagagcagcagagtttcttggccgaatttttgcaaaagccataacagagaatgtagtttctttgaaggagattgggcagttaatacatgatggtggagaggagccaggtagtctcttagaagttggacttgcagctgatgttcttggaggcactttggaggtaattcaaagcgagaagggggacgtggttctaaacgagatgcgttcagactctaacttgaggttggaaactttccggcaacctaatgctaaaacatcaaggaagttggaaaaatttatttag

SEQ ID NO: 50940 - DNA, 415 bp, Glycine max
  Clone ID: LIB3109-021-Q1-K2-E5
ggtggaaaaactgaagattatgatcatgaagatgaacaaagtggtgtcactttcttcagctgcagctcttaaatctgtgtgttccaaaactttttgaggtaaagtctcaaaactttctctcttttctcattaatcacattcttgcttaattagctcttcttttacaaattcttcttcattatattcagctgcagctcttaaatctgtgtgctccaaaactttttgaggtgaagtctcaaaactttctctcttttctcattaatcacattcttgcttaattagctcttcttttacaaattctccttcattatattcagctgcagctcttaaatctgtgtgttccaaaactttttgaggtaaagtctcaaaactttctctcttttctcattaatcacattcttgcttaattagctct

SEQ ID NO: 50941 - DNA, 306 bp, Glycine max
  Clone ID: LIB3109-021-Q1-K2-E6
gggggaaggtcgagtagtgggccagataaatcctgccagcgttcctctcgcagcatgtctgtcagtcctgatcgtgttcgtgtgagggggcggtctccagcctttaatgctctagcagctaattttgagaaccctaattctaggaacctttcaaccccacctccagtaattagaaagctgtatcctaaatctgtgacaacagattctgcaatactggcgccaaaatcttctgccatagctgcacttagttcttcttttgaacaaccaccttcagcacgagaaaccatgatacctcgctcacttaaa

SEQ ID NO: 50942 - DNA, 322 bp, Glycine max
  Clone ID: LIB3109-021-Q1-K2-E7
ggatgactgatgaagaatttgcaagagaaacgattgctggtttaaatccaaatgtcattaagattatagaggagttcccactaagtagcaagctagatactcaagcctatggtgatcatacctgtataatagcaaaagaacatttggagcctaacttaggtgggctcactgttgagcaggctatccaaaacaagaagttgttcatcttagatcaccatgactatctcattccttatttgaggaaaataaatgcaaataccacaaagacttatgctacaagaaccatatttttcttgaaagatgatggaactttgacaccatt

SEQ ID NO: 50943 - DNA, 402 bp, Glycine max
  Clone ID: LIB3109-021-Q1-K2-E8
ggacccgaaggcctgaagaacattgcacaccgtgttcatggtcttgctggggcatttgctcttggattaaagaaacttggaactgtggaagttcaggaccttcccttctttgacactgtgaaggttaagacttctaatgcacatgcaattgctgatgctgctctcaagagtggaataaatttgcgagttgtagatggaaacactatcactgttgcttttgatgaaacaaccacattagaggatgttgataatcttttcaaagtttttgctggtggaaagccggtccccttcactgctgcatctcttgcaccagaagttcagagtgcgattccttctggattagttaggaagagcccttatctgacacactctatctttaacatgtaccaaactgagcatgag

SEQ ID NO: 50944 - DNA, 418 bp, Glycine max
  Clone ID: LIB3109-021-Q1-K2-E9
ggtagtttaagtgtgaatccctttccctctctacgtcttctttcactttccatttccatttccattttttctggttcactttctcgatggcctccgagaaccccaccgccgacgacgccgtcaacggcttcaatcggccggaaatgttctcggaaaacctcgccggcaccgtcgacgcctacgaccgccacgtgttcctctgctacaagagtcacctgtcctggcccccgcgcatcgaggcctccgacgccgatcccttccccaagcgcgttgccaccaccttcaaagcccgcaagaacgacttgcccctcaagacgaaaatcaccgtgtgcgaggtgcgtgaggaggctggcttcctcgacggtgacgtgttgattttccccgacatgatcaaatacaggggtttggaggaatcaaa

SEQ ID NO: 50945 - DNA, 287 bp, Glycine max
  Clone ID: LIB3109-021-Q1-K2-F1
ggagcctgagtgtgacaagctcataatggcttcacttaacaagaactacgttgacatggatgagtatcctgtcaccactgagctccagaaccggtgtgttaatatcatagcaaatctattccatgctcctataagtgatgatgagactgcagtaagtgtgggaacctgggggtcatcggaggcaataatgttggcaggtctaacttttaaaaggaaatggcagacaaagagaaaagcagaaggcaaaccatatgataagcccaacatagtaactggggctaatgtgc

SEQ ID NO: 50946 - DNA, 397 bp, Glycine max
  Clone ID: LIB3109-021-Q1-K2-F10
gacacacagagacatttttctttcttagaagcgtccaccacacggaacctcgcaattccttcacacccaccataataataatatcttcattgttcttttcttctttgttaccattaaaaacacacacacacacacaacaacactctgaaactaacaacaacaattaaagaccatgtcggtgaaggagtgcgagcaccacaaggggaagaagaggaagatcttccggcaagtgttctggtgcttagtggtgttccttttcatcgtgctggtcacaattcttttgatatgggcaatccttagacccaccaaacccaccttcacgctccaagacgtcaccgtctacgccttcaacgccaccgtggcgaacttcctcacttcaattttcaggtcacgctca

SEQ ID NO: 50947 - DNA, 415 bp, Glycine max
  Clone ID: LIB3109-021-Q1-K2-F11
ggagttagggtgagttgcaggcagtgtcatctctcctttgacgacaagatgagcatcccaattccccatcggcagttattcatagacggagactggaaagtccccgtcctcaagaatcggattcccatcatcaacccttccacccaacacatcatcggggatatcccagcagctactaaggaagacgttgatctcgctgtcgctgccgccaaagctgccctctcccgcaacaagggcgccgattgggcctccgcttccggctccgttcgggctcgctacctccgcgccatcgctgccaagatcaccgagaaaaagcctgaactagcaaaactcgaagctattgactgtggaaaaccgctcgatgaagccgcctgggacatcgacgatgttgctggttgctttgagttctatgctg

SEQ ID NO: 50948 - DNA, 331 bp, Glycine max
  Clone ID: LIB3109-021-Q1-K2-F12
ggagaattgttctacgtcgtcaaagacaccgatttaggggttaaaaaatatcgattaacctctgatatttctcttagctgcagcctgcagtgagactaagaaaatctccgaacccgctacttcctattttctatcctttcaaaagagaaactggaaaagttagctaaacgtcatagctagatcgtcgaacaaaacgaaaagaaaagcgttgaaaatggctcaggagtcactctcagaaacccctgatatctcgcccccttcgtctactgcacaatcgctgccagatccatctctttcaaggaacgtttcttttagccggctcaacgcacag

SEQ ID NO: 50949 - DNA, 424 bp, Glycine max
  Clone ID: LIB3109-021-Q1-K2-F2
ggtgagacgagggtaaggtcgcgttgtggcgcgtcgtgtcgcgcgctgtttctgtgtgtgtcgtttgtgtttacagaccaaactatatctgcgtatcgcaaccatgtagaccaagcaaggtggaaaagctaaccctgtgaagaaacccaagtgtgataagagggattacgacgagggtgacatgtctcacattcagaagaaaagggaagaagagaacgctctaagggagttgagagccaacgcgcaacagaggggaagctttagaggttctgctctcaagaagagtggagagatatagggtctctatatcatgagtgtacacatacaatagtgagccgtgtagtatattaccatgatcacttgtgtcatagtgtggtcttctatagcgctataatgatagctctgaactgatgtatttcgagat

SEQ ID NO: 50950 - DNA, 181 bp, Glycine max
  Clone ID: LIB3109-021-Q1-K2-F3
gtatgttaaaagtgttcaaagaactgtcatttggatgggaaaaagacaggaaactgtggaagatgtcccctgtggtaacactgttgctatggttggtttggatcagttcataacaaagaatgctactttgactaatgaaaaggaagttgatgcccatcccattcgagctatgaagttttct

SEQ ID NO: 50951 - DNA, 289 bp, Glycine max
  Clone ID: LIB3109-021-Q1-K2-F4
gtctgttacaagtgtgcaaagagctgtcatgtggcatggtaaaaagacaggaaactgtggaagatgtcccctgtaggaacactgatgctatggttggattggatcagttcataacatagaatgctactttgactaatgaaaaggaacttgatgcccatcccattcgatctatgaagttttctgcctcacctgttgttcgtgctgctgttcaatgtaaggttgcatcaaatcttcccaagcttgctgaatgtcttaagcggctggccaagtcagatcctaaagttgtttg

SEQ ID NO: 50952 - DNA, 412 bp, Glycine max
  Clone ID: LIB3109-021-Q1-K2-F5
ggtcaacttaggctggagaaccgatatcaaaatgtaatgcacacacaacacaacacaacagcgtggaacgagacaactaagtacgaaaatcgttatccgccgcaacagccactaagatgttctttgagtcttggcacgccacgtgtcagaactgccaacagatagccccatctctttctccttctccctaaacctcgaactcagcacccccatccactggtgattgtttgattgagccttgaagaaatggaccacagcgctgatgcacatcgcacggacttgatgaccataacgcggttcgtgctgaacgagcaatccaagcaccccgagtcacgcggcgatttcaccatcttgctcagtcacattgttctcggttgcaagttcgtttgttccgctgtcagcaaggctggtc

SEQ ID NO: 50953 - DNA, 404 bp, Glycine max
  Clone ID: LIB3109-021-Q1-K2-F6
gaagtacaagcagagagttacggcacatatttctttttcttttccctttttcctaggcacagcacacgccctctcaaatagaaactgagagatgaattctgatcagtttcagaagaacagcatgttcgtagaaacccctgaagatggtggcaaaaacttcgacgatgatggacgagtcagaagaacgggtacatggataactgcgagtgcccatatcataacggcagtgatagggtcaggagtgttgtcacttgcatgggcaattgcacaaatgggttgggtggctggccctgccgttctctttgccttctctttcatcacttacttcacttccactcttcttgccgactgttatcgttcacctgatcctgttcatggcaggcgaaactacacctattccgatg

SEQ ID NO: 50954 - DNA, 417 bp, Glycine max
  Clone ID: LIB3109-021-Q1-K2-F7
ggtatcgcttcagagttgagaccaagacgacactcgttcatatatctctctgctcttctcttctcttctacctctcaagtttttgaagtataaagatggcagagacattcctattcacctcggagtccgtgaacgagggacaccctgataagctctgcgaccaaatctccgatgctgtcctcgacgcttgcctcgaacaggacccagacagcaaggttgcctgcgaaacatgcaccaagaccaacttggtcatggtcttcggagagatcaccaccaaggccaacgttgactacgagaagatcgtgcgtgacacctgcatgagcatcggcttcatctcaaacgatgtgggacttgatgctgacaactgcaaggtccttgtaaacattgagcaccagagccctgatattgcccagggcg

SEQ ID NO: 50955 - DNA, 420 bp, Glycine max
  Clone ID: LIB3109-021-Q1-K2-F8
gacacaaaaacggctaaaaccataacaagaatggtgtttggctcaaaaaaaaagaagaagaagaaatgttagggttaggatgcttaaacctcaatcgattctctcacttcccatcccctccctctctaccatcctctcgttccgatttacttaaggttgcgtctcgtagattcgctttatcagtgactaaaacgcagcaatctccagtcactaagccacaatccaccttcaccgctataattgaaatagataacccggccagtgtcaaaaggcaattggcgcagctgtttgacttgtctctgagggcaactgtgcccgatgagccagatgttgtgccgttaattgatgcttgtgctgttaaaggtggcgtaaaatttggtgattatcaatgtaataatgcaatgggtatatggtctaaga

SEQ ID NO: 50956 - DNA, 404 bp, Glycine max
  Clone ID: LIB3109-021-Q1-K2-F9
ggaatccagaaagtttgataaatgagtgattgtgtgactccaaaagtttatgcactttggaaaggaattttctgtctcataaactctgttcaaaggattttaataatttgtttctggcttagaccattccatgattgctctcctttcttgggggtccatttttttttctcagtttataattataataattgaagcttttgaaccctctcatgtttcattaaattctgtgccctcaaaggggtactgttgaaccattttttttaatctatttacttggctgcggattgtccactcataatctttacaaagctttatctccaatggatttgattaccactttgattgtcttcctttatgatgctctagcttctttccatgctaatccgagttatcaagaccaaatt

SEQ ID NO: 50957 - DNA, 428 bp, Glycine max
  Clone ID: LIB3109-021-Q1-K2-G1
ggtccgttgcaatatcggcagaagagagacaccaacaaccttccattggttgatgacacatcggatggagcatttgtccagtttagggggcggtttaaggtcacgccggcagatctcagtccaatgggtccttcaaacagcacatctggcccacttgttagtcctaccagtccaccaaatccaaatttcctgtctgtagctattcttccatcactgcagtgcatcttgcaacagaacggcttgcagagggaagagattattaaattaataaaatatgcagagcaatcttctggcaagaatacagaatcaatggaggcagggatagttgatattttgcaggcaccacctgcaacaactagggagcgagagctgcattttcaggtgattcaactccagcagagcaatggaatcctttttgaggaattgca

SEQ ID NO: 50958 - DNA, 426 bp, Glycine max
  Clone ID: LIB3109-021-Q1-K2-G10
ggaaaagaaggtagagaaggtgttgtgaaagggtgaagatcgagaaattagggtgaagtgaaggagaagctcttgagaaggtatagttcttgttcttgctcatgctcccttgtgttttgtgtgactcgttgttcttgttcttgctacatttttatctttaatttacgtgcttctaatcatgttaacattagtgttttgtttcaccttctacacatttacacatttatcgtctcaaatctcaaatacaaagcacctatactttctttctcccaaaataattgatcgtctcaaatctcaatttaataaatgtattataaagtcttttaacataagattcttttttaaaaaagacaaaacaaaacattaatataaaccaaaagatcgttatcacttatgttaattaataagtgataacgatttatattt

SEQ ID NO: 50959 - DNA, 403 bp, Glycine max
  Clone ID: LIB3109-021-Q1-K2-G12
ggaagaaggcatggagcagtggtggatgtggtcgggtaggagcactagagatgggaagctgcccgggacccatagagacacccgctcttctcctatctactcgtaaagggcttcctcactttatctcccctgacctactcacttctctcccttcccccgattcccatctccttcaaatttctccactccactttttggaaggacttgcttcaaccactatatcaaaattaggagggcttcaccaaatgcttggtttgcaccaatatggaatggcggctgtagccagggattccattcaatgccttcctgagtctaagggagctaccaaactcggagcctcttttgaaactccttggggtcgtctgttgattaaacccaaagattatgttgaaatgatttcatg

SEQ ID NO: 50960 - DNA, 360 bp, Glycine max
  Clone ID: LIB3109-021-Q1-K2-G2
gacatgaagaagaagaagaagaagaagaagaagggttggttggtcccattccataggaagagatcaaagagaagagaaaagatgtttgagccgcagcagctatacactcgagcgaagaccgaggaattcgacctcgaatcaggggaaaccctctacccagggctgagcgtctgcgagaaccagctccgatggggcttcattcgcaaggtctacggcatcctctgcgcccagatcgtcctcaccaccctcgtctctgtcaccaccgttttctatactccaatcaatgacctcctcaagggcaattccaccctcctgctcatcctgctcttgcttcctttcatctttttgattcccctgttg

SEQ ID NO: 50961 - DNA, 357 bp, Glycine max
  Clone ID: LIB3109-021-Q1-K2-G3
ggtggttggcttgctttcgctctcttctctgcaaatgcttcattccaagatggttaggactctgtacgctgataaagacaacactcataccgttggaaagaaggatgctgctggccatgttgcttaatttagttcttgcttcctttgtcttcttgagttttatcagagacgggagtgcagggatcactagctctttcattcggtcagagtggccggcagttgacataccccttgatcatgaagcatttgcagatccaaagggttataatgcacctcaacaagtgcacatcacgcaaggtgactatgatcgaaaagcaggtatcatctcatgggtgaccacagaagagccaggggaca

SEQ ID NO: 50962 - DNA, 405 bp, Glycine max
  unsure (1)..(405): unsure at all n locations
  Clone ID: LIB3109-021-Q1-K2-G4
ggaggaagaggaggagtaacaaaacaagtatgtcagaatcaaacgcaattgcaaatggtttggctggtgcaggtggtggaattattgctcaaatcataacttatcctcttcaaacggtaaacacgcgccagcaaactgagagaacactcaagaggaacaagcaaagtttgccctccaactcaaccactgctcctggcactcttcttcagatctttcaggtcattggaactganggttggggtggactctatagtggcctcaagccttctcttcttggaactgctgcttctcagggaatttactactatttctatcaagtttttaagaacaaggcagttgccattgcagctgcacggatggtgaaagggcgtggagatggtacttgtgggatgtttggttggcttg

SEQ ID NO: 50963 - DNA, 415 bp, Glycine max
  Clone ID: LIB3109-021-Q1-K2-G5
gagtgagagacggaaagtgcaaagccaccgtcttgtcttctcagagcttggctttgcttatcgattctctctcctctcatctttctcattcaaggtttgtaaaagatggccgatgctgaggatattcaaccccttgcttgtgacaatggaactggaatggtcaaggctggatttgctggtgatgatgctcccagggctgtctttcccagtattgttggccgacctcgacacactggcgttatggttgggatgggtcaaaaggatgcctatgttggtgatgaagcccaatcagaaagaggtattcttactctcaagtatcccattgagcatgggatagtcagcaactgggatgacatggaaaagatctggcatcacacattttataatgaacttcgtgttgctcctgaggagcacc

SEQ ID NO: 50964 - DNA, 405 bp, Glycine max
  Clone ID: LIB3109-021-Q1-K2-G7
ggtacaagcagagagttacagcacatgtgactctgtctcttccctttttactatgctcagatcacgccctctcaaatagaaactgagagatgaattctgatcagcttcagaagaacagcatgttcgcagaaacccatgaggatggtggcaaaaacttcgacgatgatggacgactcagaggaacggttacatggataactgctagtgcccatattataacggcagtgatatggtcacgagcgctggcacttgcatgggcaattgcccacatgggctgagtggctggccctgccgttgactttgtcttctatgtcatcacttactgtacttacactcttcttgacgactgatatcgttcaccagatcctgtggatggctagcgaaactacacctattccgatgttg

SEQ ID NO: 50965 - DNA, 419 bp, Glycine max
  Clone ID: LIB3109-021-Q1-K2-G8
gggatggagaaagtgaaggtgcttcggcgactcctcgagacaccaggggttcaccaggggtcagcctgtttcgacgctctgggtgcgaagctcatagaatccgctggcttcccctactgcatcaccagtggcttctccatcgccgcttccaggttggctctgcccgacaccggcttcatctcctacggcgaaatgctggagcagggccaactcatcacccaagccgtttccattcccgtcattggcgacgccgacaacggctacggcaatgccatgaacctcaagcgaaccgtcaagggtttcattgccgccggtttcgcaggaatcattctggaagaccagattgcgccgaaagcgtgtgggcacacgcgcgggaggaaagtgataccgagagaggagggcgttatgaagattagagc

SEQ ID NO: 50966 - DNA, 388 bp, Glycine max
  Clone ID: LIB3109-021-Q1-K2-G9
ggaagagaatggctcccaagggtttaacctttctggctgtgttaatatgcgtttcagcactgtcactgagtccttctgttgcgggggaagggcaaaataatggccttgttatgaacttctacaaggaatcatgccctcaggctgaagacatcatcacagaacaagtcaagcttctctacaagcgccacaagaacactgctttctcctggctcaggaacatcttccatgactgtgctgttcagagttgtgatgcttcactgttgctggactccacaagaaggagcttgtctgagaaggaaacagatagaagctttgggttgagaaatttcaggtacattgagaccatcaaagaagctttggaaagagaatgccctggagtggtttcatg

SEQ ID NO: 50967 - DNA, 350 bp, Glycine max
  Clone ID: LIB3109-021-Q1-K2-H10
gaagaaggaacggatgggatgcaagatcccccagcgcacgaattaacgatggcgtcttcaatcgaaaagctcctagaaagtggtcgtcccttccttcgcggtgatctggagtccatctacaagaacttacctcggctggttggcgtcctgcaaagtgtgggtgccggagagtgctgtcacaaacacggcagcttccttcaccacctcgtctacatatttcgcattctcaagctctggaaagcccctcactctgtctgtctttgtggccgctttcactcaggctactccaatccttacgttaacctcgccatcttctaccctttaacctgtcgagaagtggttcgagcact

SEQ ID NO: 50968 - DNA, 306 bp, Glycine max
  Clone ID: LIB3109-021-Q1-K2-H11
gggtgagacagggacggaaataaatcgaaaacggataaagatgaacgtaaacaacgacttggtattgctaatgatgctacaaagggtgaattccgaccacctatgcaaggtgggctccatcttcaacatcacaccccgctgtagtctcagtctaaacatatggccttatcggatgagtgggtgtcaggcacggaatttctggacaccaacttgactacagatttggtgctgcatgtcgtgttagtatagggattgtcgtatggagtggggaaaggaattgctcaagctgacaacattatttccttt

SEQ ID NO: 50969 - DNA, 376 bp, Glycine max
  Clone ID: LIB3109-021-Q1-K2-H12
gaactcaagctttcagacattttcccttttcagctttcattggtgtggcctagctgttttctcaatgagaaagccttcatctctgcaaagcgcacttttgcgctttggggttcccttgttgcttgttatcaccttctgttatgctacttctactgctgcagcaacaactcaagtttcagggaatgaagagctgccaaagacaaacctaaatgggcatgatgaagaagcaaaattcggattttttcatcataaaccaatattcaagaaacatattccaattccagtatataaacctgtaccaaagccatttccagtgtataaacctataccatagccagttccagttccagtgtacaagcctattccaaagccagtg

SEQ ID NO: 50970 - DNA, 433 bp, Glycine max
  unsure (1)..(433): unsure at all n locations
  Clone ID: LIB3109-021-Q1-K2-H2
ggcatccaaaatggcgcattcttctgttatagtcttcctctgcactctccttctcttcttttctccgtcaattcgtgcctccgacgatgacgtggcgctgcacgcgaagaagctcatcagagacctcaacttgttccccgacgctgacgtcaacatcgttcccgttgctaattgcaccctccaaccccgcaggatcgtcgagaagcgcctgaggttcccgaagctgctagcttcggattccgagccttcggttgaggatttgggtcaccacgctggctattaccccattcagcattcacatgccgcanggatgttctactttttcttcgaatcacgcaataggaaggaggatcctgtcgtaatttgggtgactgggggacctgggtgtagcagtgaattggctttgatttatgaaaatggccctttcaaaatt

SEQ ID NO: 50971 - DNA, 418 bp, Glycine max
  Clone ID: LIB3109-021-Q1-K2-H3
ggcatacaaagtggcgcattcttctgttatagtcgtactctggactctgcttctattcttttctacgtcaattcgtgcctccgacgatgacgtggctctgcacgcgaagaagctcatcagagacctcaacttgttccccgacgctgacgtcaacatcggtcccgttgctaattgcacccttcaaccccgcaggatcgtcgagaagcgcctgaggttcccgaagctgctagcttcggattccgagccttcggttgaggatttgggtcaccacgctggctattaccccattcagcattcacatgccgcaaggatgttctactttttcttccaatcacgcgataggaaggaggatcctggcgtaattagggtgactgtgggacctgggtgtatcagtgaatgggctttgggctatgaaaat

SEQ ID NO: 50972 - DNA, 411 bp, Glycine max
  Clone ID: LIB3109-021-Q1-K2-H4
ggaggatagataggcctcagaagaagaagagagaggtctctcaacaatggccactgccactgtttcaatttcaactttatgcgctactttcggaacccattgcgccatttcccacaacccaaaacctctattttctcaacctttcaatctcaatcactttccttctaactcttacaagctcgctttctcgcctcgctcacctgtttcaccccttcccaaggcctctgaatccgcggtagccgaaaccgaacccggttcggccgagcccgaaccggcccaaatttccccggcccaacctgcctcctgggaacccggtctcttcgctgtcgtaatgattggcggacgccaatatattgttcacccggggcgacatcttactgttcagaggttaaaaggtgctaatgttaatga

SEQ ID NO: 50973 - DNA, 413 bp, Glycine max
  Clone ID: LIB3109-021-Q1-K2-H5
ggtgggattttgagagagagaaatagagagagaacttcaagtgagggtgagagtgacacaaatctagagagagcactagtactctaaaagtctattatattcttcaaaatatgaccatgcatcgcgagtcttgggcttttgtcttcggcgttatgggcaacatcatctcctttggagtgttccttgctccattgccaaccttttaccaaatctacaagaagaaatccactgaaggtttccagtcacttccttatgttgttgcactgttcagtgcaatgctttggatttactatgctttcgtgaaaagggaaactgccctgcttctcattaccattaacacatttggaattgttgtggagtcaatttacctttctatcttcctaatttatgccccaaggaagccaaggcttaca

SEQ ID NO: 50974 - DNA, 296 bp, Glycine max
  Clone ID: LIB3109-021-Q1-K2-H6
gcgccagctggggagatgatggctacataccatgtgacctgcaggcatgagttaatctacccttgaccactaagacaggatccagacgatgctgacacaagggtctaggacatgtgaccaaggtggcctatgacgcagattcgcgcactcaagctcttcacctcagtacattccagcgatccggtttagtacgagcgctacatgaccactcattactctatgccttaggcacgattgccatgactgtaatgcgaacagggggtctgctaaaaagttactggtctaagcaacaacga

SEQ ID NO: 50975 - DNA, 419 bp, Glycine max
  Clone ID: LIB3109-021-Q1-K2-H7
gagagcgaacagtgaagagaatggctcccaagggtttaacctttctggctgtgttaatatgcgtttcagcactgtcactgagtccttatgatgcggaggaagggcaaaataatggcctcgttatgaacttctacacggaatcatgccctcaggctgaagacatcatcacagaacaagtcaagcttctctacaagcgccacatgaacactgctttctcctggctcaggaacatcttccatgactgtgctggtcacagttgtgatgcttcactgttgctggactccacaagaaggagcttgtctgagaaggaaacagatcgaagctttgggttgagaaatttcaggtacattgagaccatcaaagaagctttggaaagagaatgccctggagttgcatcatgtgctgatatcctcggtctc

SEQ ID NO: 50976 - DNA, 428 bp, Glycine max
  Clone ID: LIB3109-021-Q1-K2-H8
gggggccgtgtgtggaagagttgccagcgtcagaaagtcagaaacaacttgacttcttctccttcttcttcttcttcttctctttgaacagaacaacaactcaactcatctcacgattcattcagctttttaaataaataaaattcctttctccctcacaatcacaatgctcttctacccttcaaacccaacatcacacccctcttccttccttccttccctaatactataatttgttacgtcacggagcccaaatgtctgttacggagctcaaagagcgtcactccgctgccaccgacaccgtcaacaatctcagacaccgtttaaagcagaagcgcctttcgttgctcgacacagatgtttctgggtatgcaaggtctcagggtagaacacctgtgacctttggacctacggatctggtttgctgg

SEQ ID NO: 50977 - DNA, 409 bp, Glycine max
  Clone ID: LIB3109-021-Q1-K2-H9
gggttgttaaaggagcagttgatgtagacattggtgcaaacccttctgctgagggtggaggagaagatgagggagttgatgatgcaactgttaaggttgttgacattgttgacacattcagacttcaggagcaacccgcattcgataagaagcagtttgttaccttcatgaagaggtttatcaagaatttgactcccaagctcgatgcagagcaacaggagttgtttaagaagcacatcgagggagcaactaaatacctgctctctaagattaaagatttccaattttttgttggtgagagcatgggtgatgatgcttgcttggtctttgcctactacaaggacggcgctgccgatccaacattcctgtactttgcatatgccttaaaggaggtcaagtgctaagtgac

SEQ ID NO: 50978 - DNA, 393 bp, Glycine max
  unsure (1)..(393): unsure at all n locations
  Clone ID: LIB3109-021-Q1-K3-A1
ggttctagtgtgtgattgtttgttgttgtaactcgttcttcttcttttgttgttctgtgtttgtgtttgttttttctctcacctgaaaatgtcttgctgcggtggtaactgtggttgcggaagctcctgcaagtgcggcaacggctgcggaggctgcaagatgtacccagacttgagctacactgagtcaaccaccaccgagaccttggtcatgggagtggcacctgttaaggctcaatttgagggtgctgaaatgggtgtgcccgctgagaacgatggctgcaaatgtggaccaaactgctcctgcaacccctgcacttgcaagtgangtgttgtgagagcaagcttcaagcagagatagcccttaattaggaataatgataaactattaat

SEQ ID NO: 50979 - DNA, 420 bp, Glycine max
  Clone ID: LIB3109-021-Q1-K3-A10
gacggtgacggcgctcgacatggacggcactctggttcagcggtctaacttactggacacatgccaatcccctctgatttcgactggatcgagtaaggtcgacacagcaatcaagtgtgcactacacaaccacactcacttttcctgctaaactaaacaaaaatggtatgctccggtagaaattgctgcttcaaatatcctggcacctacttgacgagggggaatgcctcacatcatactaatactatactctgcacaaactcattttgccccaaatttgctgaccccaattacccttttggaaaagatgcacggagtgctcatttctttcaccatgcccacaaacttgacctccttttattccaaatcaacactagttacactcaactttccatcccatttgcaccctttaattctcac

SEQ ID NO: 50980 - DNA, 422 bp, Glycine max
  unsure (1)..(422): unsure at all n locations
  Clone ID: LIB3109-021-Q1-K3-A11
gacacagagaaggaaacatggcgtcggagcaagcagtatgatggtcatcaagcacattgaggaacgttctcaccttccccaaaaccctaatttcaaaaccccaattccaagtcgctgcttctccctcatggaaaacacagcggcgttgggggaacttgaagtgctccatgacgacaacgccatcataccctaagccctcggagattccgtggcagaaggagctctgcaactccgtcaacctcatcggcaatgtcgcggcccccgtcgaaatcaaacacctcccctccggcaaggtcgtcgcctggacccgcctctgcgtcaagaaaagcgccacgcaatcatcgtccataagcctcacattctgggacgacctcgctcatgtcgcgtnccagcatctccagaaaggttaccaaattcatgtc

SEQ ID NO: 50981 - DNA, 412 bp, Glycine max
  Clone ID: LIB3109-021-Q1-K3-A12
ggggaacagaaacaagaaaaaaaaactcgcgacaatagggatgaggagtgccgacaggattaattgaggtcagggactgaaagggggtgttctgttctgatcggatctgaaatcatcgggaaaatgtcgtcgtttctgcaccagagaagcagtctccagaacccattctcgaatccattcccggcatcaactccatcatcatcgaattcgaagaaatccctgtccatcatgggccccaccaccctcctagccctaatctccctcatagtcatactcggcgtcttctgcccctgggtgggctttccccagggctttcccttcactcccactcccacttccaaatgggctcactacactttagaacaagcgctctccttcgtcgccaaaaacggatcctccgtcatcgtctgca

SEQ ID NO: 50982 - DNA, 408 bp, Glycine max
  Clone ID: LIB3109-021-Q1-K3-A3
gaaggtgcaagagtttgttgtgagctataagctagtttatcgtgaggagaatatgaagttgtttgttttctttgttgctgcagtagttttggtagcatggccatgccatggcgcaggctaccaaaggttccctctccgaatgaaaactggctatggtgagcgttcttcggaggtaaaatgcgcaagttttaggcttgctgtggaagcacacatcatccgagcctttaaaaccattcctgaagagtgcgttgaaccaacaaaggactacattaatggcgaacaatttagatcagactctaaaacagttaaccaacaagctttcttttatgctagtgaacgcgaagtccatcacaacgacatatttatattcggcatagataacaccgtactctctaatatcccatacta

SEQ ID NO: 50983 - DNA, 240 bp, Glycine max
  Clone ID: LIB3109-021-Q1-K3-A5
ggacccaaaagcgcaagacaagcacggggccaagcgaacaaagcaaaacgcgcgctcaaaggagccggcgcggcccggagcaacgggcaaagcacgaaacgcaagaagacggagaaagcgagcaacagacagaagacgaagcgggagcagcggaaccctgcagcagacgcccaccccaacgaagcagcctccctacaagctcgagcacgcggggcgggggacagcgctgcggagcaaagg

SEQ ID NO: 50984 - DNA, 413 bp, Glycine max
  Clone ID: LIB3109-021-Q1-K3-A6
ggaaaagaaaaatgaaaaatagcacatggccaaaaatatcacctgatctgaaacttggacacgaaagaaaggctcgtatgcgcgacttctctctcttgcattgattcaacgttgtccattctccgaaacatcacaaagaaacccaactgagagagtgaagaataagaagaataaaaagaagaagaagggacgacaacaatggggggtttcgcaatgggttctgccttcgattccaaatctgggcagattattatggctgctttgcttttgatgattatgtccttctatgctggcaacctttttggcaacaatgctcccctttacgtctctcagcttggttctcattcttctcccaacaatgtctcctccaacggtgctaccaaatttactaacaaagttgctctgacttactg

SEQ ID NO: 50985 - DNA, 358 bp, Glycine max
  Clone ID: LIB3109-021-Q1-K3-A7
ggagggaaaaaagtagagtggtatgtgggttgctgcggcaacaaaaccattcatcaaattccaattccacagacacactacttctcttccgcttcttctgatggcaaaccaagcttcactctccttttcttcttccgtgtctcctgttcacgcgcctctcaagcgcgtgggcacgcacaacggaagctttcattgcgacgaggccctcggctgcttcatgattcgcctcacgaacaaattcaacagcgccgaaatcgttcgctcccgagaccctcacgtgttggaggttctcgatgctgttctcgatgttgggggagtgtatgaccctgcccgagatcggtatgatcattatcaaaag

SEQ ID NO: 50986 - DNA, 363 bp, Glycine max
  Clone ID: LIB3109-021-Q1-K3-A8
ggagcactgagcaggtgcaccaaacaaaaacagcgacaacttcacacacagctgacgcgtaaactaagattcaacgtctgcgctctgcagccaccatacaatagatccttcattctttctctgcaacgatcaaacaacaaaaaacactgcacctcttcttctggatttggtgaagaagaagaagaagaagaagaagaagaaagtgtgatttgatgattatgaattgaagtgtgagaggtgaagagatgaacgtgagccatgcttcgggtcacccaggtgaagaagctccaactactgaagggggtggggaccaaaacgtgaacgctcctaaggtgaggatgaaggatgttcaagggatgcctg

SEQ ID NO: 50987 - DNA, 299 bp, Glycine max
  Clone ID: LIB3109-021-Q1-K3-A9
gcatctgacatgtcgtgacatggaacgttggatgattgtggggcaggtggcatcgcgattaacacatacacatcgccattttgaacgtgaaagatgggcatcaatgggaggagaagatgagatggaaatgatcaaagacttgccacaggcgctgaggagggacatgaagcgccatcttcgcctctatctcattagaaaggttactgtattccacatcttggatgatcttattcttgacaacatctgcgacagggtgaaaccgctagccttctctatagatgaaaagataatcagagaag

SEQ ID NO: 50988 - DNA, 342 bp, Glycine max
  Clone ID: LIB3109-021-Q1-K3-B1
gaatgtaaaaaatagaggttgaagaagcaagcaccaacgtgaataccctaattcggagggtttcagttttcgccctcttttctcatctccaacatcttcgtcgtcacggaggctagtcttcctgttatcacaaacaatgtctgacggtcaagaatcagacaagaatattgagatatggaagatcaagaaattgataaaggcattggaagctgctcgaggtaatggtaccagcatgatttctctgataatgcctccacgtgatcaaatatctcgggtcactaagatgttgggagatgaatttggaactgcttcaaacatcaaaagtagggtgaaccgacagtc

SEQ ID NO: 50989 - DNA, 418 bp, Glycine max
  Clone ID: LIB3109-021-Q1-K3-B12
ggacgaaggtgataataatcggtgccggaacttctggtatcgccaccgccggttgcttaacgaagcaatcaataccttacataatgctcgagagagaagactgtttcgcttcgctgtggcagaaatacacctacgatcgtctccaccttcatttgaggaagcaagtttgcgagttaccgcacttaccgtttcccaagtcttaccctcactacgtgcctcggaagcagttcatagactacttgggaaactacgttaaccactttgagatcaagcctctgtaccagcgtgcagtggagttggtggagtatgatggatggaaagggatttggagagtgaaggctcagaatagaagatctggtgagcttgaggaatacgctggaaagtacctggtcgtggccagtggcgaaaccgccgagcc

SEQ ID NO: 50990 - DNA, 413 bp, Glycine max
  Clone ID: LIB3109-021-Q1-K3-B4
gggagagcgaggtggtgtccattgcagttttctaatgaaaacaacaaaatagacacctgttaagaaggaggacaacgatggtgctgccgctatttactgctttcattctctttgcttttattccgaatggattgttagcagttccttccaccgtcccggcattcctttggtcatcacattatgaactggcctctgaaaatatattgaaggaatctgtaaattaccaagtcatttctccgaaggatctagcaaaatctattttatctgaagcaggctggtcaaattttctgtgcaaaggaaagaaatttcatgagcctctggatctggcactcttattcgttggtagagagttacaatcttcagatttaagcatgaacaaacatgcaaactcagctcttttggacctgctcaag

SEQ ID NO: 50991 - DNA, 353 bp, Glycine max
  Clone ID: LIB3109-021-Q1-K3-B5
gggcaaaaaaggaggtaatatggagcatgatgggagggcagaccactgaacaaggggattgttcaaaatttaagggaggcattccacattgctgtaagaaagatccgacggttgtagatttgctacctggaacaccttacaatcaacaaattgcaaattgctgcaaaggtggggtgctcagttcatgggtgcaggatccaaccaatgcagtttcctcatttcaagtcagtgttggtagagctggaaccacaaatagaactgtcaaagtcccaaaaaacttcaccttgaaagcaccaggaccaggttatacttgtgggccagctaagattgtggcacccactaaattcattact

SEQ ID NO: 50992 - DNA, 406 bp, Glycine max
  Clone ID: LIB3109-021-Q1-K3-B6
ggcgcaagagaagagagagggagtaatggacagagacgaagcagaaaccatggagaatgtggaattcgatgcttctgagattgagtacgttagttacggtggcgagcatcacctccctctcgtaatgaacctggtggaccaagaactcagcgaaccttattccatcttcacgtaccgttacttcgtctatctctggcctcagctttcattcctggcgttccacaagggtaaatgcgtgggcaccgtggtatgtaagatgggggaacaccgtaacactttcagaggctacattgccatgctggttgtcatcaagccctacagaggaagaggcattgctacggagcttgttactaggtctatcaaggtgatgatggaatcaggttgcgaagaggttacattagaagcg

SEQ ID NO: 50993 - DNA, 383 bp, Glycine max
  Clone ID: LIB3109-021-Q1-K3-B8
gggagaattaggcaaaatgtttgatatcccaatggatggctctaaatctagaaaatccggtcccataagtaatgctccttcaaggacaggatcatttgcaggtgctgcttcacactctggacctatcatgcaaaatgctgcagctcgttctgcttatatcacatctggtaatgtatctactggaggcatgtctgcttcagcctcaatgaaaaagaccaactctggtccattgaataagcatggggaaccagtcaagaagtcatctggccctcaatctggtggagttacacgccaaaactctggtccaattcctccagttcttcctacgactggtcttattacatctggcccattaaattcatctggagctccaaggaaagtgt

SEQ ID NO: 50994 - DNA, 398 bp, Glycine max
  Clone ID: LIB3109-021-Q1-K3-B9
ggctttgcgaaaccaaaccaatctttttatctccaccctttttatttgggaataataataataataagcacttcaaggttgtgaagccttgaaggtgcatcaacacttgtgtcaacacaagaatgaggctctctgttttacttctagtgttcctcgcagttctggctgccacaaggcctagccttgtagactgtagggtccttccttcaccaaaaaacacagagaaagcccctcatgagcctctcaaagtgattcgatttctcatcaatttagtgatggcagaaaaggccaacactagtgagggtaatataagcaacaggggtttgactgagaacaaattccaaaccatgccttcagggccaagcagaagaggttcgggtcactagcaccatgtttca

SEQ ID NO: 50995 - DNA, 421 bp, Glycine max
  Clone ID: LIB3109-021-Q1-K3-C1
ggagcagaatgatagcgaataccaaaaaacaagtgtcatcaccttcttcttcttctttccctgattctgttggttccatctcttcattcataccttgatccgtgatctcccaatttctcacttgaaagtatgaagaaagaatagataagtaatggcaggagcagaagctagggctctgtggcagagaactgctaatcgttgctttgtccaagaagatgcataaagagctcccaagttggcttgttgccaatcttcatgtgcaacatccaaatcaggtgatactggacctgccagtacagcagatgaatctgatcataatacaagtaatgttacccattttaacaggaaatcgtcaatttctaatctatcatcagactgtaggtggtggttgcattcacaacctaattatgggtatcaaaag

SEQ ID NO: 50996 - DNA, 324 bp, Glycine max
  Clone ID: LIB3109-021-Q1-K3-C11
gggttgaaagtgagcaatgtcgttcgcagtggcattgtgtacaacgtcatcgttcttcccttcccgttttgaaattcgcaatccaaagcagcttcagcttccacctctcctttcaatgtcactgtcgccgaagctaccgttgcatttctccggcaatgccatattcaaccgcaaccacccaaccatgttcaaaattcgagcctgaaactcttcatccaaactcgtcttattgagctccactatcgccgtcacaacagcggtagcgaatcgcgtgctctacaaaatgagcactggccccatgaaagaggacaccttttttatcgc

SEQ ID NO: 50997 - DNA, 412 bp, Glycine max
  Clone ID: LIB3109-021-Q1-K3-C12
ggcacaagtgagtttgttgatcgagataactagaaacagtgtgatgaaaatgaaggtccttgttttcttcgttgctacaattttggtagcatggcaatgccatgcgtacgatatgttccctctccgaatgaacactggctatggtgcccgtactccggaggtgaaatgcgcaagttggaggcttgctgtggaagcacacaacatctttggctttgagaccattcctgaagagtgcgttgtagcaacaaaggaatacatccatggcgaacaatatagatcggactccaaaacagttaaccaacaagcttacttttatgccagagacctcgaagtccattccaaggacacatttgtgttcagtatagatggcaccggactctctaatattccatactacaaaaaacatggatat

SEQ ID NO: 50998 - DNA, 401 bp, Glycine max
  Clone ID: LIB3109-021-Q1-K3-C2
ggactggccagagggtgcaatctcacgagagagtattaaagctgggatgaagcttccccgactacagaaccttataatgcagcatgttgatcattcagctggagatcttatacatcttttgcaggggctacttagatatgacccctttgaaagacttacagctagggatgctttgaggcattccttctttatgagagatcatcttaggagatgatttttatgtgtttgtaaacgattggtctgcttttaggtgaaagatcactcgagggcaaatatggctgtaaggagcctatgtgccaatgtaaataaatatttaaatttaggcttgtgtggcaagtgaggatgggtattcagcagcatttacacctcaaccttcaagcctgtggttcaaaacgtttatt

SEQ ID NO: 50999 - DNA, 422 bp, Glycine max
  Clone ID: LIB3109-021-Q1-K3-C3
gaggaagaatttgatgaatcagacaagtcacatcataatgaagctccagaatatagacgtctaattgcaattcatgctgggaagcctaaaggtggattagcagaatgcctcaaagtggatcctgataaagtgagacgtctaagtttaagtgagcaacagcttgaaaaggctgccataaatcatggacaacaaattgtcaggtttactcagcggaatatactaagggtgtatccaaaaggtactcgcattgactcatcaaattataacccattaattgggtggatgcatggagctcagatggttgcatttaacatgcaggggtatgggagatctctttggttgatgcatggaatgttcagagccaatggagggtgtggttatgttaaaaaaccaaattttctattggagactggtccagatga

SEQ ID NO: 51000 - DNA, 405 bp, Glycine max
  Clone ID: LIB3109-021-Q1-K3-C4
ggttcaaggaatgtagagagagcggtcggagactgctatggcgctttgactcttcaagaactaagaagtacagagctgaatccaagtatggctttgcgtaacaccattgaagaatggactgccaggaatgaagctgcacagctggatatggctcgccggtcattgaatatggggagtccagaaaatgagactcttcaggccttaaagtatgtccagcacatctgccgaagaagtcgatcaaacaaatacactgtccgcaatgcaaggcttatcccaatgattgttgacatgctgaagagtagcagccgtaaggttcgttgtagagctctggaaacccttataggtgtggtagaggaagatgacgagaataaggaattgttggctgaaggggatactggtcgcact

SEQ ID NO: 51001 - DNA, 409 bp, Glycine max
  Clone ID: LIB3109-021-Q1-K3-C6
gagagcgaagagcgaagagaatggctcccaagggtttaacctttctggctgtgttaatatgcgtttcagcactgtcactgagtccttctgttgcgggggaagggcaaaataatggccttgttatgaacttctacaaggaatcatgccctcaggctgaagacatcatcacagaacaagtcaagcttctctacaagcgccacaagaacactgctttctcctggctcaggaacatcttccatgactgtgctgttcagagttgtgatgcttcactgttgctggactccacaagaaggagcttgtctgagaaggaaacagatagaagctttgggttgagaaatttcaggtacattgagaccatcaaagaagctttggaaagagaatgccctggagttgtttcatgtgctgatat

SEQ ID NO: 51002 - DNA, 418 bp, Glycine max; identical to SEQ ID NO: 50923
  Clone ID: LIB3109-021-Q1-K3-C7

SEQ ID NO: 51003 - DNA, 365 bp, Glycine max
  Clone ID: LIB3109-021-Q1-K3-C8
ggcacgttgttaaggatgttcctaacaatttgttgaggcacattaccctggataacaatgagaacaaacctgtcactaacagtagggatacacaagaggtaatgttggagcctggcctgaaattaatcaaaattttcaaggaatataccagcaagacatgcattctggatgattttggcttctatgaggcccgtcagaagactattttggagaagaaagcaaagcaacaattcccaaagcaagtatgggaagggaaacctgctgatgagaagattgagataaatggggaagtcaatactcaaaaatctgaagttagcttcgaagtgctcaaggagtcccttgctgaggaggatagtgatgaccac

SEQ ID NO: 51004 - DNA, 347 bp, Glycine max
  Clone ID: LIB3109-021-Q1-K3-C9
ggttcgagagtgaagagcgaagagaatggctcccgttgtggaatctttttggctgcgttatgcttctaagcactggcactgagtcgttgtcttgcggaggataatggacttgttatgaacttctacatggaatcatgccctgaggctgaagacatcatcaaagaacaagtcatgcttctctacaagcgccgcatgaacactgctttctcctggctcagaaacatattacatgactgtgctgttcagagttgtgatgcttcactgtcgctggactccacaagaaggagcttgtctgataaggaaacagatagaaactttgggttgagatatttcaggttcattgagac

SEQ ID NO: 51005 - DNA, 162 bp, Glycine max
  Clone ID: LIB3109-021-Q1-K3-D1
gacgaaacaatagtagaactagcatctcaatacccgagaacgtgtgaacgaaaaatagcgtttattttaaactagaagactagaagattacgtatttgattatgcatagcggtgcacatattacataatccagagtccagaactcacactatatatataagc

SEQ ID NO: 51006 - DNA, 403 bp, Glycine max
  Clone ID: LIB3109-021-Q1-K3-D10
ggaagaggaaggggcaagagaaaaaagaactagcgggcggggggctgagaaccctaacatgtactagtactactactacattcctgcatattactttgtactatttttttttaaccatagaatcaagagcacaaagatggtgagagctccttcttgtgaaaagatgcgcctgaagaaagagccctgagctacccaggaagatcaaatcctcacatcttacattgacaaacatggacatgggaattgtcccgcccttccataacaagcaagcttgttaaggtgtgggaaaagctgtatactacactggattaactatgcgaggcccgatattaaaagacggactctcacaattgaagaagaagaaactatcattaagctgcatgacatgctgaagaacaggtgg

SEQ ID NO: 51007 - DNA, 403 bp, Glycine max
  Clone ID: LIB3109-021-Q1-K3-D2
gacacacaacatttacatttctctctccagtatggcttctactcacaatgagttttatgcacttatgctagtggtggtggttggctccatggtggcttcctgtggtgctaacttcaaccaagactttgatctaacatggggtgatcaccgtgctaagatattcaatggtggtcagcttctatctctttctctggacaaagtctctggctccggcttccaatccaagaaagagtacctatttgggaggatcgatatgcaactcaagctcgttgctggcaactctgccggcactgtcactgcttactacttgtcgtctcaagggccaactcatgatgagattgattttgaattcttgggaaacgtgagcggtgacccttacattctccacacaaacgtgtttacc

SEQ ID NO: 51008 - DNA, 369 bp, Glycine max
  Clone ID: LIB3109-021-Q1-K3-D3
gagggcgtcagagggagagaagctcttgggctagatatggatgaacagctactagttgtgagatggggctttaatgctaagccttgatgaagcatgtacagattgcggttgctcattcatgcgaagagtcataacgagtggatccctggtactgacactgtggactgatgtggaaggtgaggacatgaactacacggaacagattgtcgtaggtgctataccaaggggatggcgagtcagggactacgagcgcgtatagatgggggctatgaagatagtgaaccctgacacttaggatcgtgagagcgttacgatcgagctccgatacctcacggtactgcggatggaagatcagccgctacatgatga

SEQ ID NO: 51009 - DNA, 415 bp, Glycine max
  Clone ID: LIB3109-021-Q1-K3-D4
catgccacaggttaaaatgatggtagtacttggggaacttggtgggcgtgatgagtattccttagtggaggccttaaaacaaggaaaggtatccaaaccggttgttgcctgggtcagtggcacatgtgcacgactcttcaaatctgaagtacaatttggtcatgcaggagccaaaagtggtggtgagttagagtctgctcaagcaaagaatcaggcactaagggacgctggagctgttgttcccacatcatatgaagcttttgaagctgcaattagggaaacatttgataaattggttgaagaagggaagatcacaccaatcaaggaaatcacaccttcaccaatccctgaagaccttagtactgcaattaagagtggaaaagtccgtgctccaactcatattattttcaccatt

SEQ ID NO: 51010 - DNA, 406 bp, Glycine max
  Clone ID: LIB3109-021-Q1-K3-D5
ggctgagttcagaacaaaacaagagaaaaaaaagggtttcacactttgtccaatctttcacactgaactcttcaattttcaattctctttttcatgcaccactcttctttttcttcagacaccttcatcatctgcataccgcttagctccaaaaactacacacacaagaattctgtttctttctgttgatttgatggatccgcaggtctaatggtttcacacactttcttcactacggatcattgtcttcttcatctggggcaccccaatagcttcttctaatcgatagtcaaattttgttggtttgtggtggatcatcttcgtcgttgtggtgactagtgaggagtgcaggactatacctatctatatagtgtatgaaaattctggggggtgaagtcgtttttgg

SEQ ID NO: 51011 - DNA, 409 bp, Glycine max
  Clone ID: LIB3109-021-Q1-K3-D6
gtggaacatggagacattgcaaacagaaagtactccggaggaacacagtcttattattactgatgttcgcttcagaccaaattcaactcagctggcaacatcttcgtttgatacaactgtgctgctgtgggatgctgcagatccaaccttccctttacatacatatagtggtcatacttcacatgtggtgtcccttgatttccacccaaagaaaactgagcttttctgttcttgggacaataacaatgagattcgcttctggagtattagtcaatattcttccacacgtatttttaagggaggatctacacaggtgaggttttagccaaggcttggtcaccttctggcttcagcaagtggcagttgtgtgtctctccttgatgttgagactgacaggcataatcacaca

SEQ ID NO: 51012 - DNA, 353 bp, Glycine max
  Clone ID: LIB3109-021-Q1-K3-D7
ggaggaaggaagatgagtttgagggcatcagagatagcgaagaagttgaatctgcaacctcacccataaggtgggttttacgtggagacattccgagaccattccgtccagctttcgacctctcagctcccccccgaatacatattggatcgccctgtatcgacctccatctattttgtcgttccttatgggagtgtgtcttgccttcatcgcataccctgcgccgaaacctggcatcattacattggcgacactttcacccgattggaattgaatgagaaagatgggagcgtataatttacttgccttggatcagatctgactcagaatcatgggtccgattacacggtgcc

SEQ ID NO: 51013 - DNA, 384 bp, Glycine max
  Clone ID: LIB3109-021-Q1-K3-D9
gaactcaaacagggaggatcatttctgatcgatttattgctgacgatttggaatagtgacaagtaaagacaaatcacaactcacggtcatccaattccaagaatagagctttacgaggcagcggcttcaaaaggaggggaatattcagaggaaaagaaagagtagttgttgaacaacaagagctttcctcattcttagcttatctcacaaggaaggtacgtaagatccttaacacccttaccgcggttacttgccgcctcaatccattgctgaaatgaatgctcataaataaatatatttgcaggctacgaatctccgctcctagattcttgcttcttaattatcaatctagtgtctaaattatattaaaagacttaatttgat

SEQ ID NO: 51014 - DNA, 374 bp, Glycine max
  Clone ID: LIB3109-021-Q1-K3-E1
ggggagatggagcggaagtggagcagtgaatctggtgggaatgtgatatcgtcgccatcacactcgcgtaatgggcattctcgctcctcttcgctcactatccccggaggaggaatttcaaccgtcaaaaggactcagaatgttgctgccaaagccgccgctcagcgcctcgcccaggtcatggcttctcagactgccgacgacgacgacgacgacgaagacgatctaggatttcgctacactgctcctccacctctctctctttccaagagctctgctagatctccatctcctgcgttagctcggaacctcgtagaagaatcatcaatgtatcttcgcccagcaccacctgctgctggtaataatagaccacc

SEQ ID NO: 51015 - DNA, 414 bp, Glycine max
  Clone ID: LIB3109-021-Q1-K3-E10
ggagggtgcattgtgtcaaacctgttggaggtaaaaagacccagtttattgtaatgggcaatgtgttttgctcggagtaccagatccacaagaggtttgacctcaaaggctcttctcatggtcaatctacagataagccaagggaacaaattgatgagactaccactctcaaagaccttgatcttaactttgtctttcgccttgaatagtcttggtttcaagagcttatatggcaacttggtagagattgtgagttcctggaagcaaagggaatcatggattacagtcttctaattggcctgcatttctgtgatgatagctcagttgatgaaatgaaaagttcacctcgcagttctcattcatgcaagagagacatgcttgataatgagatgctcacatgctggtaagttcttt

SEQ ID NO: 51016 - DNA, 346 bp, Glycine max
  Clone ID: LIB3109-021-Q1-K3-E12
ggatagagagaggtgaaaagaaacgtcgcataaaaaatcagataatgcgtgcggctctgactcaacccacctgggacctggctcggaagcgctaagaaagttacaaagctatcttctactttcttctctgtggtgtgtgtggtgatggtggttgtggcgccggacgggaataaaatttgctgtttgaaccgcccagagcagagacttatttgtatggtaccccctattctatttaatggactgtgttctggagcgcatcaagggagagtgagctcatacctagcactgaataggcctggcacgtgcatgctgtatctgatgcacatcgtggggcatagttacagag

SEQ ID NO: 51017 - DNA, 136 bp, Glycine max
  Clone ID: LIB3109-021-Q1-K3-E3
gaccacttggataaacgaacttggacttatatctttggagcttgctgtgccacctctgtgttcataccttcttttcacaattaccgtatttggtcttttctgggacttggaatgaccacttacactggttgggact

SEQ ID NO: 51018 - DNA, 418 bp, Glycine max
  Clone ID: LIB3109-021-Q1-K3-E4
gagagaaaggatgcggaaagagatcttttggccaaactacttgtgggccttgtgaaatctcatcatggaaccttgaatcaagttcagctcattaaagggtttgaatctgctctcagtacattggaggatgctgttaatgatgctcccagagcagcagagtttcttggccgaatttttgcaaaagccataacagagaatgtagtttcttcgaaggagattggtcagttaatacatgatggttgagaggagccaggtagtctcttagaagttggacttgcagctgatgctcttggatgcacttttgaggtaattcaaagcgagtatggggacgtggttctaaacgagatgcgttcaaactctaacttgaggttggaaactttccggcaacctaatgctaatacatcaaggtagttggaaa

SEQ ID NO: 51019 - DNA, 400 bp, Glycine max
  Clone ID: LIB3109-021-Q1-K3-E5
ggtggaaaaactgaagattatgatcatgaagataaacaaagtggtgtcactttcttcagctgcagctcttaaatctgtgtgttccaaaactttttgaggtaaagtctcaaaactttctctcttttctcattaatcacattcttgcttaattagctcttcttttacaaattcttcttcattatattcagctgcagctcttaaatctgcgtgctccaaaactttttgaggtgaagtctcaaaactttctctcttttctcattaatcacattcttgcttaattagctcttcttttacaaattctccttcattatattcagctgcagctcttaaatctgtgtgttccaaaactttttgaggtaaagtctcaaaactttctctcttttctcattaatcacattct

SEQ ID NO: 51020 - DNA, 399 bp, Glycine max
  Clone ID: LIB3109-021-Q1-K3-E6
gggggaaggtcgagtagtgtgccagataaatcctgccagcgttcctctcgcagcatgtctgtcagtcctgatcgtgttcgtgtgagggggcggtctccagcctttaatgctctagcagctaattttgagaaccctaattctaggaacctttcaaccccacctccagtaattagaaagctgtatcctaaatctgtgacaacagattctgcaatactggcgccaaaatcttctgccatagctgcacttagttcttcttttgaacaaccaccttcagcacgagaaaccatgatacctcgctcacttaaagtgagtccagtaatgcccaaatcataccctgagaaaaatgacaaggagaattctgtgagcaccagagtggaatctcttaccatacaggaagat

SEQ ID NO: 51021 - DNA, 417 bp, Glycine max
  Clone ID: LIB3109-021-Q1-K3-E7
ggatgactgatgaagaatttgcaagagaaacgattgctggtttaaatccaaatgtcattaagattatagaggagttcccactaagtagcaagctagatactcaagcctatggtgatcatacctgtataatagcaaaagaacatttggagcctaacttaggtgggctcactgttgagcaggctatccaaaacaagaagttgttcatcttagatcaccatgactatctcattccttatttgaggaaaataaatgcaaataccacaaagacttatgctacaagaaccatatttttcttgaaagatgatggaactttgacaccattggccattgagttaagtaagccacatcctcagggtgaagaatatggtcctgttagcgaagtctacgtgcctgccagcgaaggagtggaagcttata

SEQ ID NO: 51022 - DNA, 402 bp, Glycine max; identical to SEQ ID NO: 50943
  Clone ID: LIB3109-021-Q1-K3-E8

SEQ ID NO: 51023 - DNA, 364 bp, Glycine max
  Clone ID: LIB3109-021-Q1-K3-E9
ggtctgtttaagtgtgaatccctttccctctctacttttttgtggactttccatttccattctcattttttctggttcactttctcgatggcctccgataaccccaccgtctacgacgccgtctacgtgcttcaagcggccggtaatgttctcggaaaacctagccgtcgccgtctacgcctacgtccgccacgtgttcctttgcttcaatagaaacctgctctggtccccgatcatcgtgaccttcgactcctatcccttttccttgtgcgttttcaccatcttcatagcccgttagatctactttgcccttatgtcgtatattacctttatctaagttcattatggaggctgtcttcctctt

SEQ ID NO: 51024 - DNA, 409 bp, Glycine max
  Clone ID: LIB3109-021-Q1-K3-F1
ggagcctgagtgtgacaagctcataatggcttcacttaacaagaactacgttgacatggatgagtatcctgtcaccactgagctccagaaccggtgtgttaatatcatagcaaatctattccatgctcctataagtgatgatgagactgcagtaggtgtgggaactgtggggtcatcggaggcaataatgttggcaggtctagcttttaaaaggaaatggcagacaaagagaaaagcagaaggcaaaccatatgataagcccaacatagtaactggggctaatgtgcacgtttgttgggaaaaatttgcaaggtactttgaggtagagctcaaggaagtgaaactcatagaaggatactatgtgatggacccttgcaaagcagttgaaatggtagatgagaacaccatc

SEQ ID NO: 51025 - DNA, 416 bp, Glycine max
  Clone ID: LIB3109-021-Q1-K3-F10
gacacacagagacatttttctttcttagaagcgtgcaccacacggaacctcgcaattccttcacacccaccataataataatatcttcattgttcttttcttctttgttaccattaaaaacacacacacacacacaacaacactctgaaactaacaacaacaataaaagaccatgtcggtgaaggagtgcgagcaccacaaggggaagaagaggaagatcttccggcaagtgttctggtgcttagtggtgttccttttcatcgtgctggtcacaattcttttgatatgggcaatccttagacccaccaaacccaccttcacgctccaagacgtcaccgtctacgccttcaacgccaccgtggcgaacttcctcacttcgaattttcaggtcacgctcatctcgcgtaacccgaacg

SEQ ID NO: 51026 - DNA, 248 bp, Glycine max
  Clone ID: LIB3109-021-Q1-K3-F11
ggagttagggtgcgttgcaagcagtgacatctggcctttggcgactagatgaccatgccacttccccatcggccgttattcatagacagatactggaaagtgcccgtcctcaagaatcggatttcgattatcaacccttacaccctacacctaatcatggatatcccatttcctactaatgaagacgtagatctcgctgtcgctgtcgccaaagctgaactttccctcttcaaggacacgggttgggc

SEQ ID NO: 51027 - DNA, 245 bp, Glycine max
  Clone ID: LIB3109-021-Q1-K3-F12
ggagaattgttctacgtcgtcaaagaccccgatttagggggtaaaaaatatcgattaacctctgatatttctcttaactgcagcctgcagtgagactaagaaaatcttcgaacccgctacttcctattttctatcctttcaaaagagaaaccggaaaagttagcttaacgtcatatcttgatcgtcgaacaaaacgaaaagaaaagcggtgaaaatggctcaagagtcactctcagaaacccctg

SEQ ID NO: 51028 - DNA, 364 bp, Glycine max
  Clone ID: LIB3109-021-Q1-K3-F2
ggtgagacgagggtaatgtcgcgttgtggtgccgcgtgtcgggctctgcctctgtgtgtggcgtttgtgtttagagaccacactctatctgcgtatcggacccatgtagaccaaacagggtggaagatctgactctttgaagacacccaagtgtgataacagggatcacgacgagggtgacatggctaacattcaaaagaaacaggaagaggagagcgctctaagagacttgagcgccagggcacaacaaaagggaatctttagaggctgtgggctcaaaaaaagtggagagatataggggctctatatcaagagtgtatacatactatattgacccctggagtatattaccatgatcacttgt

SEQ ID NO: 51029 - DNA, 335 bp, Glycine max
  Clone ID: LIB3109-021-Q1-K3-F3
gtatgttaaaagtgttcaaagaactgtcatttggatgggaaaaagacaggaaactgtggaagatgtcccctgtggtaacactgttgctatggttggtttggatcagttcataacaaagaatgctactttgactaatgaaaaggaagttgatgcccatcccattcgagctatgaagttttctgtctcacctgttgttcgtgttgctgttcaatgtaaggttgcatcagatcttcccaagcttgttgaaggtcttaagcggttggccaagtcagatcctatggtcgtttgtaccattgaggagtctgttgaacacattgttgctgatgcttgagagc

SEQ ID NO: 51030 - DNA, 417 bp, Glycine max
  Clone ID: LIB3109-021-Q1-K3-F5
ggtcaacttaggctggagaaccgatatcaaaatgtaatgcacacacaacacaacacaacagcgtggaacgagacaactaagtacgaaaatcgttatccgccgcaacagccactaagatgttctttgagtcttggcacgccacgtgtcagaactgccaacagatagccccatctctttctccttctccctaaacctcgaactcagcacccccatccactggtgattgtttgattgagccttgaagaaatggaccacagcgctgatgcacatcgcacggacttgatgaccataacgcggttcgtgctgaacgagcaatccaagcaccccgagtcacgcggcgatttcaccatcttgctcagtcacattgttctcggttgcaagttcgtttgttccgctgtcagcaaggctggtcttgct

SEQ ID NO: 51031 - DNA, 396 bp, Glycine max
  Clone ID: LIB3109-021-Q1-K3-F6
gaagtacaagcagagagttacagcacatatttctttttcttttccctttttcctaggcacagcacacgccctctcaaatagaaactgagagatgaattctgatcagtttcagaagaacagcatgttcgtagaaacccctgaagatggtggcaaaaacttcgacgatgatggacgagtcagaagaacgggtacatggataactgcgagtgcccatatcataacggcagtgatagggtcaggagtgttgtcacttgcatgggcaattgcacaaatgggttgggtggctggccctgccgttctctttgccttctctttcatcacttacttcacttccactcttcttgccgactgttatcgttcacctgatcctgttcatggcaggcgaaactacaccta

SEQ ID NO: 51032 - DNA, 364 bp, Glycine max
  Clone ID: LIB3109-021-Q1-K3-F7
ggtatcgcttcagagttgagaccaagacacactcgttcatatatctctctgctcttctcttctcttctacctctcaagtgtttgaagtataaagatggcagagacattcctattcacctcggagtccgtgaactagggacaccctgataagctctgcgaccaaatctcctatgctgtcctcgacgcttgcctcgaacaggacccagacagctaggtttgctgctattcatgcaccaagaccaacttggtcatggtcttcggagagatcaccatcaaggccaacggtgactactagtagatcgtgcgtgacacctgcaggagcatcgtcttcatctcatacgatgcgggacttggttcttgtcaa

SEQ ID NO: 51033 - DNA, 256 bp, Glycine max
  Clone ID: LIB3109-021-Q1-K3-F8
gacacaaaaacggctaaaaccataacaagaatggggtttggctcaaaaaaaaagaagaagaagaaatgttagggttaggatgcttaaacctcaatcgattctctcacttcccatccccttcctctctaccatcctctcgttccgatttacttaaggttgcgtctcgtagattcgctttatcagtgactaaaacgcaacaatctccagtcactaagccacaatccaccttcaccgctataattgaaatagattaccc

SEQ ID NO: 51034 - DNA, 423 bp, Glycine max
  Clone ID: LIB3109-021-Q1-K3-F9
ggattccagaaagtttgataaatgagtgattgtgtgtctccaaaagtttatgcactttggaaaggaattttctgtctcataaactctgttcaaaggattttaataatttgtttctggcttagaccattccatgattgctctcctttcttgggggtccatttttttttctcagtttataattataataattgaagcttttgaaccctctcatgtttcattaaattctgtgccctcaaaggggtactgttgaaccattttttttaatctatatacttggctgcggattgtccactcaaaatctttacaaagctttatctccaatggatttgattaccacttttattgtcttcctttatgatgctttaacttctttcatgtcttatccgagttaacaagaccaaattctaaaattaaaatattgga

SEQ ID NO: 51035 - DNA, 422 bp, Glycine max
  Clone ID: LIB3109-021-Q1-K3-G1
ggtccgttgcaatatcggcagaagagagacaccaacaaccttccattggttgatgacacatcggatggagcatttgtccagtttagggggcggtttaaggtcacgccggcagatctcagtccaatgggtccttcaaacagcacatctggcccacttgttagtcctaccagtccaccaaatccaaatttcctgtctgtagctattcttccatcactgcagtgcatcttgcaacagaacggtttgcagagggaagagattattaaattaataaaatatgcagagcaatcttctggcaagaatacagaatcaatggaggcagggatagttgatattttgcaggcaccacctgcatcaactagggagcgagagctgcattttcaggtgattcaactccagcagagcaatggaatcctttttgagga

SEQ ID NO: 51036 - DNA, 427 bp, Glycine max
  Clone ID: LIB3109-021-Q1-K3-G10
ggaaaagaaggtagagaaggtgttgtgaaaggttaagatcgagaaattagggtgaagtgaaggagaagctcttgagaaggtatagttcttgttcttgctcatgctcccttgtgttttgtgtgactcgttgttcttgttcttgctacatttttatctttaatttacgtgcttctaatcatgttaacattagtgttttgtttcaccttctacacatttacacatttatcgtctcaaatctcaaatacaaagcacctatactttctttctcccaaaataattgatcgtctcaaatctcaatttaataaatgtattataaagtcttttaacataagattcttttttaaaaaagacaaaacaaaacattaatataaaccagaagatcgttatcacttatggtaattaataagtgataacgatttatatttct

SEQ ID NO: 51037 - DNA, 391 bp, Glycine max
  Clone ID: LIB3109-021-Q1-K3-G12
ggaagaaggcatggagcagtggtggatgtgggggggtaggagcactagagatgggaagctgcccgggacccatagagacacccgctcttctcctatctactcgtaaagggcttcctcactttatctcccctgacctactcacttctctcccttcccccgattcccatctccttcaaatttctccactccactttttggaaggacttgcttcaaccactatatcaaaattaggagggcttcaccaaatgcttggtttgcaccaatatggaatggcggctgtagccagggattccattcaatgccttcctgagtctaagggagctaccaaactcggagcctcttttgaaactccttgtggtcggcttgtgtttaaacccaaagattatgttga

SEQ ID NO: 51038 - DNA, 367 bp, Glycine max
  Clone ID: LIB3109-021-Q1-K3-G2
gacaagaagaagaagaagaagaagaagaagaagggttggttggtcccattccataggaagagatcaaagagaagagaaaagatgtttgagccgcagcagctatacactcgagcgaagaccgaggaattcgacctcgaatcaggggaaaccctctacccagggctgagcgtcggcgagaaccagctccgatggggcttcatccgcaaggtctacggcattctcttcgcccagatcgtcctcaccaccctcgtctctgtcaccaccgttttctatactccaatcaatgacctcctcaagggcaatttcaccctcctcctcatccttctcttccttcctttcatccttttgattcccctgttgaagtacc

SEQ ID NO: 51039 - DNA, 289 bp, Glycine max
  Clone ID: LIB3109-021-Q1-K3-G3
ggtggttggcttgctttcactctcttctctgcaaatgcttcattccaagatgcttaggactctgtatgctgatgaagacaacactcataccgtgggaaagaaagatgctgctggccatgtggcttaatttagttcgtgcttcctttgtcttcttgagttttatcagatacaggagtgcagggatcactagctctttcattgggtcagagtggtcggcagtagacattccccttgatcatgaagcatgttgctgaccaaagggttataatgcaccttattcaagtgcaca

SEQ ID NO: 51040 - DNA, 326 bp, Glycine max
  Clone ID: LIB3109-021-Q1-K3-G4
ggaggaagaggaggagtaacaaaacaagtatgtcagaatcaaacgcaattgcaaatggtttggctggtgcaggtggtggaattattgctcaaatcataacttatcctcttcaaacggtaaacacgcgccagcaaactgagagaacactcaagaggaacaagcaaagtttgcccttcaactcaaccactggtcctggcactcttcttcagatctttcaggtcattggaactgaaggttggggtggactctatagtggcctcaagccttctcttcttggaactgctgcttctcagggaatttactactatttctatcaaggttttaag

SEQ ID NO: 51041 - DNA, 396 bp, Glycine max
  Clone ID: LIB3109-021-Q1-K3-G5
gagtgagagacggaaagtgcaaagccaccgtcttctcttctcagagcttggctttgcttatcgattctctctcctctcatctttctcattcaaggtttgtaaaagatggccgatgctgaggatattcaaccccttgcttgtgacaatggaactggaatggtcaaggctggatttgctggtgatgatgctcccagggctgtctttcccagtattgttggccgacctcgacacactggtgttatggttgggatgggtcaaaaggatgcctatgttgctgatgaagcccaatcaaaaagaggtattcttactctcaagtatcccattgagcatggtatagtcagcaactgggatgacatggaaaacatctggcatcacacattttataatgaacttcgt

SEQ ID NO: 51042 - DNA, 290 bp, Glycine max
  Clone ID: LIB3109-021-Q1-K3-G7
ggtacaagcagagagttacagcacatatgtctctgtctcttccctttttactatgctctgaacacgccctctcaaatagaaactgagagatgaattctgatcagcttcagaagaacagcatgttcgtagaaacccctgaagatggtggcaaaaacttcgacgatgacggacgacgtaaaagaacgggtacatggataactgctagtgcccatatcatatcggcagcgatatggtcacgaacgctggcacttgcattggccatttgccacatgggctgggtggctggccct

SEQ ID NO: 51043 - DNA, 261 bp, Glycine max
  Clone ID: LIB3109-021-Q1-K3-G8
gggatggagaaagtgaaggtgctccggggactcctggagacaccaggggctcaccaggggtcagcctgttttgacgctgtgggtgcgaagctcatagtattcgctggctttctctactgcgtcaccagtggcttgtccatcgccgcttccaggttggctatgacggacaccgtgttcttctactacggcgatgtgctggagcatgttctactcatctctcaagccgtttgcattgacgtcattggcgacgcctacaacggc

SEQ ID NO: 51044 - DNA, 393 bp, Glycine max
  Clone ID: LIB3109-021-Q1-K3-G9
ggaagagaatggctcccaagggtttaacctttctggctgtgttaatatgcgtttcagcactgtcactgagtccttctgttgcgggggaagggcaaaataatggccttgttatgaacttctacaaggaatcatgccctcaggctgaagacatcatcacagaacaagtcaagcttctctacaagcgccacaagaacactgctttctcctggctcatgaacatcttccatgactgtgctgttcagagttgtgatgcttcactgttgctggactccacaagaaggagcttgtctgataaggaaacagatagaagctttgggttgagaaatttcaggtacattgagaccatcaaagaaactttggaaagagaatgccctggagttgtttcatgtgctg

SEQ ID NO: 51045 - DNA, 418 bp, Glycine max
  Clone ID: LIB3109-021-Q1-K3-H1
gacacagagtgagatatagaatcactgaagagcttccttcaatggcggtttcttctctctctgttactcctctttcgctctcaaattcttccccctctctatcttccaagccaaagtttccatctttgtgttttctctctggcaacaacaccacattgagggtaacatgcccaaaacctctgcactcatccactgttgttcatgttgctaccgaagcgttggattcatcccctgatcccttggacccacctccagaaacccttgatgatgactctgacgccaccacctttgaggttggtgacttggggactcctagcacttcagcaattagcattggtggcgatgcagatacaatggcaccaaagcagaagattagaatcaagcttaggtcttactgggtgcccttgatagaggattc

SEQ ID NO: 51046 - DNA, 368 bp, Glycine max
  Clone ID: LIB3109-021-Q1-K3-H10
gaagaaggaaaggatgggatgcaagattccccaccacacgggttaacgatggcctcttctatcgaaaagctcctagaaagtggtcgtcccttccttcgcggtgatctggagtccatcgtcaagaacttacctcggctggttgccgtcctgcatagtgtgcgtgccggagagtgctgtcacaaacacggtagttttcgtcaccacctcgtcgacgtatttggcattctcaagctctggaaagcccgtcactctgtctgtctctgtggactcttccactcaggctactccaatgcttacgttaacctcgccatcttctaccctttaaccgaacgagaagaggttcgtgcactccttttctaggaagctga

SEQ ID NO: 51047 - DNA, 52 bp, Glycine max
  Clone ID: LIB3109-021-Q1-K3-H11
aaactccacttagggtgagacaggaaccgaaataaagctagatcacacaacg

SEQ ID NO: 51048 - DNA, 195 bp, Glycine max
  Clone ID: LIB3109-021-Q1-K3-H12
aactcagctttcaacattttccttttcactttatgtgtgagcctactcgtttctcaatgagaagcacttatccctgcaaagcgcacttttgctctttggcgtcccttgctccttgttatcaccttctgctatgctacttctactgctgctgcaacaactcaagctttagtgaatgagaatctgccactgacaaac

SEQ ID NO: 51049 - DNA, 402 bp, Glycine max
  Clone ID: LIB3109-021-Q1-K3-H2
ggcatccaaaatggcgcattcttctgttatagtcttcctctgcactctccttctcttcttttctccgtcaattcgtgcctccgacgatgacgtggcgctgcacgcgaagaagctcatcagagacctcaacttgttccccgacgctgacgtcaacatcgttcccgttgctaattgcacccttcaaccccgcaggatcgtcgagaagcgcctgaggttcccgaagctgctagcttcggattccgagccttcggttgaggatttgggtcaccacgctggctattaccccattcagcattcacatgccgcaaggatgttctactttttcttcgaatcacgcaataggaaggaggatcctgtcgtaatttggctgactgtgggacctgggtgtagcagtgaattggc

SEQ ID NO: 51050 - DNA, 404 bp, Glycine max
  Clone ID: LIB3109-021-Q1-K3-H3
tccgaggggggcatccaaagtggcgcattcttctgttatagtcttactctggactgtgcttctattcttttctccgtcaattcgtgcctccgacgatgacgtggctctgcacgcgaagaagctcatcagagacctcaacttgttccccgacgctgacgtcaacatcgttcccgttgctaattgcacccttcaaccccgcaggatcgtcgagatgcgcctgaggttcccgaagctgctagcttcggattccgagccttcggttgaggatttgggtcaccacgctggctattaccccattcagcattcacatgccgcaaggatgttctactttctcttcgaatcacgcgataggaaggaggatcctgtccgaatttgggtgactgtgggacctgggtgtatcagtg

SEQ ID NO: 51051 - DNA, 259 bp, Glycine max
  Clone ID: LIB3109-021-Q1-K3-H4
agtggaggattgataggcctcagaagaacaagggagtggtctttaaacaatggcctctgccactgtttcaatttcaactttatgcgctacttttcgaacccattgcgccatttgccacatcccagatcctctattctctcaacctttcaatctcaatcacttttcttataactcttactagctcgctttttcggctgggtcacctgtttcaccctttgctaaggcctttgaatgcgccgtagccgaaacctaacccggt

SEQ ID NO: 51052 - DNA, 81 bp, Glycine max
  Clone ID: LIB3109-021-Q1-K3-H5
ggtgcaattcatgagagatgcgaaacatggggctatcttcatgccagcgtgactatgccccaaacatatcactgatcacta

SEQ ID NO: 51053 - DNA, 201 bp, Glycine max
  Clone ID: LIB3109-021-Q1-K3-H6
atgcgcgagtacacctgagagggggcgccacctgaggagatgatggctacataccatgtaaccttcatgcatgtgttgatctcccctagaccactgagacaggatcctgacgatgctgaccatgcgtataggaagttaccatggtggcctttgacgcagattcgctcagtcacgctcttcacctcagcacattccgcgatc

SEQ ID NO: 51054 - DNA, 411 bp, Glycine max
  Clone ID: LIB3109-021-Q1-K3-H7
agggagagcgaacagtgaagagaatggctcccaagggtttaacctttctggctgtgttaatatgcgtttcagcactggcactgagtccttatgttgcggagcaagggcataataatggccttgctatgaacttctacaaggaatcatgccctcaggctgaagacatcatcacagaacacgtcaagcttctctacaagcgccacaagaacactgctttctcctggctcaggaacatcttccatgactgtgctgttaagagttgggatgcttcactgttgctggactccacaagaaggagcttgtctgagaaggatacagatagaagctttgggttgagacatttcaggtacattgagaccatcatagaagctttggaaagagaatgccctgcagttgcttcatgtgctgata

SEQ ID NO: 51055 - DNA, 258 bp, Glycine max
  Clone ID: LIB3109-021-Q1-K3-H8
gggggccgtgtgtggaagagttgccagcgtcagaaagtcagaaacaacttgacttcttctccttcttcttcttcttcttctctttgaacagaacaacaactcaactcatctcacgattcattcagctttttaaataaataaaattcctttcttcctcacaatcacaatgctcttctacccttcaaacccaacatcacacccctctttcttccttccttccctaatactataatttggtacgtcacggagcccaaatgt

SEQ ID NO: 51056 - DNA, 410 bp, Glycine max
  Clone ID: LIB3109-021-Q1-K3-H9
gggttgttaaaggagcagttgatgtagacattggtgcaaacccttctgctgagggtggaggagaagatgagggagttgatgatgcaactgttaaggttgttgacattgttgacacattcagacttcaggagcaacccgcattcgataagaagcagtttgttaccttcatgaagaggtttatcaagaatttgactcccaagctcgatgcagagcatcaggagttgtttaagaagcacatcgagggagcaactaaatacctgctctctaagattaaagatttccaattttttgttggtgagagcatgggtgatgatgcttgcttggtctttgcctactacaaggacggagctagcgatccaacattcctgtactttgcatatgccttaaaggaggtcaagtgctaagtgact

SEQ ID NO: 51057 - DNA, 335 bp, Glycine max
  Clone ID: LIB3109-041-Q1-K1-A1
ggaattgagatggtgaccgaggagggacaaagagagttatcagctaaagatactgctttgtgcacttcctgtcagatgcttgtggtttggattcagaatcaactaaaacaaaagaagaccaaggagatagtattcaactatgtaaatcagctgtgcgagagcttgccaagtccaaatggagagtcagtagtagactgtaatagcatttatggattgccaaacatcacgtttactgttggagacaaacctttcaccctcacccctgagcagtatattctgaaaactggagaaggcattgcagaagtttgccttagtgggtttattgcttttgacat

SEQ ID NO: 51058 - DNA, 199 bp, Glycine max
  unsure (1)..(199): unsure at all n locations
  Clone ID: LIB3109-041-Q1-K1-A4
gatctcaaagaaaataaaatcctcaattttctgagcagccatacgctctctctctggctctcgaaaattctcattttgcatagaaaatctgaatcatgttttggcaagcgtatgtctacnatcaccttctgtgtgacatcnaaggtaaccacctttctctttctgctatcatcggccaagacggcatcttttgtgctca

SEQ ID NO: 51059 - DNA, 296 bp, Glycine max
  Clone ID: LIB3109-041-Q1-K1-B1
gggaagttgaagatctgaaacccgaattatccagtcgatcgatctggtgtggagggtgtgaattgtgaatttgtgattgtgggaaaaagatgccgcagaggcactcgaagaacaacaacgatcttgcgttcttcacgtacgatgagaagcgaaaactaggttatgggacccagaaggagaggttgggcaaggactccattaagcccttcgatgcttgctctctctgtctcaaatccctaattgatcctatgagctgccagaaaggccatctcttttgcaaagagtgcattcttcag

SEQ ID NO: 51060 - DNA, 407 bp, Glycine max
  Clone ID: LIB3109-041-Q1-K1-C1
gggtgtgctgatgtaacaacgaggcagaattgggaaattcgtggtgtggtgctacctgatgtgccagaaattctcaagggcctcgatgaggttggattgactagtcttcagagtggaatggacaatgtgagaaaccctgttggtaaccctcttgcaggcattgacccagatgagattgttgatacacgaccttacaacaacttgttatctcaattcatcactgccaattcacgcggcaacccagccatgtcaaacttgcctaggaagtggaatgtgtgcgtggttggatcccatgatctgtttgagcatccccacattaatgatctggcttacatgcctgcaaacaaggatgggcgttttggattcaacttacttgttggtggtttcttcagtgccgagagatgtgc

SEQ ID NO: 51061 - DNA, 407 bp, Glycine max
  Clone ID: LIB3109-041-Q1-K1-D5
gggtgtgcaaaagtaaaaatgtgggttcttgggtggaaaggggcatcagggttctcagcctcttccacagccgaacaagtcactcaagggattgatggaaccgccctcaccgccatcgtcacaggagcaacaagtggccttggtctggagaccacccgggttcttgcattgcgcggtgtccatgttgttatggcagtaaggagtctggacagtggtaaaaatgtcaaaaaaaccatacttaagggaatcccctccgctaaaaatgatgtcatggaattagatctaaactctatggcatccgtaaagaaatttgcaacaaattttaattcttctggtcttccactcaatattctaatgttagaacctttaactctatctggtttagatatcttaagtgatattttttg

SEQ ID NO: 51062 - DNA, 144 bp, Glycine max
  unsure (1)..(144): unsure at all n locations
  Clone ID: LIB3109-041-Q1-K1-D6
ggttaaagagatttacagangtactcctnctctgtcttattgttaagatttcaattcancattacaacccttatnncattatcttanctgtttcatatttaagatagaatcctacttataatctgcatcttagatttctacatc

SEQ ID NO: 51063 - DNA, 325 bp, Glycine max
  unsure (1)..(325): unsure at all n locations
  Clone ID: LIB3109-041-Q1-K1-E2
ggcgtanttcggggaagtgagaagccaagcatatttgtcccggcnaatgaccctgggtcttcccagtggttctatgttgatgttcctggcatagctcgtgcttgtggccttccagaaaataccatctattttgaagatactaacgaaaatgtgaatccaagtaatccttaccctgtgcccaaggatgtgaataccttgattcgaagttcagtcatgcctagggaccacctaaactatacattgacatggtattctctttctgcagcagttacatttatggcttttaagagacttagacagaaaaataagcggagatggcaaagtc

SEQ ID NO: 51064 - DNA, 345 bp, Glycine max
  Clone ID: LIB3109-041-Q1-K1-F2
ggaccatgtcggggttttttcttggctagtacgggttcccaaagcgtctgtcctccttatgttgaaccggtgatgatgttggttcagggtctttgtcatgctctacaggagtggaatcctgtaacaagggaaaacataacaactcagggatctcagcttctagactactctccctctgaagcggaggactagtgaagaaagactctgtttcatgaaaagtgacatccttggaaacatagacacgacgactttgagggtgataacatttgtacccctttttgtttgaggcataacctatgaagacacatttgatagcccgaggatctaactttccctgatggggac

SEQ ID NO: 51065 - DNA, 399 bp, Glycine max
  Clone ID: LIB3109-041-Q1-K1-F3
gactaaggaatggtacaagaaaacgacctggatgtatctggctattcccatcaccatttatgcattggaaagactggttagagcattcagatcgagcattaagtccgtcaaaatattgaaggtgactctttatcctggaaacgtgttatcacttaaaatgtcaaagccgcaggggtttagctacaaaagtggacaatacatgtttgtgaattgtgctgctgtgtctccatttgaatggcatccattttccataacttccgcccctgatgatgattaccttaccgttcacataaaaatacttggtgactggactcgaagtctgaaagccaaattcacacaggcttgccagcaacccttaaatggacagagtggacttctaagacctgaatgcttgaaagg

SEQ ID NO: 51066 - DNA, 161 bp, Glycine max
  Clone ID: LIB3109-041-Q1-K1-F5
tgacgaataagggtatcacatcgcttaatcaggaacatgtttacgcgaatttttgttaaacctaaacaggaagccgatactctaaccactttggataagttaaatgagacacttgaaatgttgaaaaaaaagaagaaggcactcctaaaaatggcttctgc

SEQ ID NO: 51067 - DNA, 203 bp, Glycine max
  unsure (1)..(203): unsure at all n locations
  Clone ID: LIB3109-041-Q1-K1-G5
gagtgggacacgaactcaaaccgtttaagcttcgccgattttggacctacaacactctcnaatcccctcttgtgtgttgtaaaccccccgtgactatcaatggcggaaactgctgtcgacaaatcccaatctctcgctgaggaatattatgtgaaggataagcaaacagctgtagttgaaaaaacctgttgaggtcaaagaag

SEQ ID NO: 51068 - DNA, 224 bp, Glycine max
  unsure (1)..(224): unsure at all n locations
  Clone ID: LIB3109-041-Q1-K1-G8
gactttccagtggacattatgcgcttgttacagaacaaccagttagaggaagggccaagcagggaggacaactgttaggcgaaatggaggtttgggccttggaaggatttggtgttgctcatatnttacaagagatgcttacttataaatctgatcatattaaaactcgtcaagaagtactcgggactactatcattgtaggaacaatacctaatcctacagat

SEQ ID NO: 51069 - DNA, 251 bp, Glycine max
  Clone ID: LIB3109-041-Q1-K1-H2
gagacatagtctgaggaatctgcggcataacagaatcagcaacaaatatccataaaaaagggaaaaataaagaaggagaaggagaaggagaaggagatttctgttgaatgatgaggaacctaccctcttgtgctgattgaggagaagaagatgaatcacactcgcttggagtcttgtcatgaatctccccttaaagtatacaaattctgttttgtcccagaaaaaactggtgatatggttatactcttaat

SEQ ID NO: 51070 - DNA, 420 bp, Glycine max
  Clone ID: LIB3109-041-Q1-K1-H7
taatgagattgatcctaaaacaaatccaacagaagatcagcgacttgcttttatagcaactttttttgctgggattactcaagcaacacttggtgttcttaggttaggattcttgattgacttcctatcacatgctgctattgttggttttatggggggagctgctatcacaattgccctccaacagcttaagggtttccttggcattaaaactgcacacttcacaacggacactgatattgtccatgtgatgcgttcagtattctcagaagcccatcatggatggaactggcaaactatactcatcggagctagctttttgggttttcttctggttgccaaatatattggaaagaaaaacaagaaattcttctgggtgccagcaattgctccattgatatccggtaatttatccacttt

SEQ ID NO: 51071 - DNA, 161 bp, Glycine max
  unsure (1)..(161): unsure at all n locations
  Clone ID: LIB3109-041-Q1-K1-H8
gattgtgagagagaattatcaaaggtgaaacgagagaaccctaactacgcacgcattcntgagaaaactcaatattcgtcgctcatggcactctcttctcgtctctttttcaaattcaaattgatctatggcagtcaaatacttctacaaaaggagcatgc

SEQ ID NO: 51072 - DNA, 297 bp, Glycine max
  Clone ID: LIB3109-001-Q1-K1-A1
ggaaagaaagaaggaaagcaaagtagacgagtgagtgcgttgcgattgacgacgacgaggaatcatgtcttccggcggcggcggtggtaagccgttcttctgccacgtgtgcagtcagaggattacgtgctccgatgagtcggaaccattctgcccgatgtgtatggaaagtttcgtagaataatgcaaccctaacaataccaaccctaatctcttgcccgacagtgatgaatctttagatcccgaactacacttgcaccgcttctcacttgtccctctctagctctcatgagtctc

SEQ ID NO: 51073 - DNA, 296 bp, Glycine max
  Clone ID: LIB3109-001-Q1-K1-A11
ggcacacccaacccttcaccagatctcactttgttgcgttcagtgcagagaagaaaatggcggtgatggccgttcaccaattcgcgcaatgcatcacttgccacgcttggagccccgatcaatccatggtggctttatgtccaaacaataatgaagtgcacatctataggttggttgaagacaaatgggaaaaggtgcatgttcttcaaaagcatgaccaggtaatttctgggatagactggagcacaagatcaaatagaatagttactgcatcccatgatcggaattcatatgtc

SEQ ID NO: 51074 - DNA, 221 bp, Glycine max
  Clone ID: LIB3109-001-Q1-K1-A3
ggttatcggtggaggtgatggaggggtcatggcgaggagtgcacaccattcttgagttggaaagatagacatttgtgaaattgacaagatggttgttgatgtctccaaacaatacttccctgatgtagctgctgggtatgatgatcctcgtgtgacacttcatattggtgattgagttgcattttctgaaagaagttccttgaagaacttatgatgctgtt

SEQ ID NO: 51075 - DNA, 397 bp, Glycine max
  Clone ID: LIB3109-001-Q1-K1-A4
gatgggtaggagtactgaaatgggaatccgggaagaagaaaaagaagaagagcttctgaagaagatagaacggctagaagctggtcacgctcacctcaagcaagaaatgtccaacttcaagctcttccaaaacaacaagtctcgttccaggttcggtgctgccacgtgtaacaaaccctcttcttctctgcatcaaaatggaaacaagtatctcaatatcttgcagtcaatgggccacgctgttcatgtgttggatcttcaatgtcgtatcatgtactggaaccctagtgcggagagtatgtatggttatgccgctgaagaagttctagggcaggatgggattgagatgcttgtggatcccagtgatttggcttagccaatgatgtgttcaaccatg

SEQ ID NO: 51076 - DNA, 487 bp, Glycine max
  unsure (1)..(487): unsure at all n locations
  Clone ID: LIB3109-001-Q1-K1-A6
accgggtaggaacngccgggacgacccattcgttccggttgcaaaagaacaacaaagggggaaatcaaaagagttaagtgaattaaaaacccaagggaggttcatggccaaaggtggagatatccgagtaattgttattttggaatgtaccggttgtgataaaaagagtgttaataaggaatcaacgggtatttctagatatataactaaaaagaatcgacagaatacgcctagtcgattggaattgagaaaattttgtccccgttgttgcaaacatacaattcacgcagaaataaagaaatagatcaaattgatcgcttgtgtgttacccttcgaaccaaagaacttaacatgtaaaatgatctatttttcttatctatatagatagatctatctgtattctatcatttacagttgaatatatacaaatatcagtatataacaacatatattaaaaaaataacaacatatattaaaaagtcagaat

SEQ ID NO: 51077 - DNA, 420 bp, Glycine max
  Clone ID: LIB3109-001-Q1-K1-B1
gggaatggggagacatgactttgacaaccgcgttttgtggttcgctcgccgctgcttctctctccaccgccgccagtttccgccggaataaatgcaccaccagcaagatttttcattcctcttccacgtgcatgccctctttcttgcatgatcatcactaccactctttcttattgcgagttgccaatgatgctgatagaagtgaagtgtcatctgatactgcaatcaagacatcgtattcagaagccgataagatggttgatggtatggactttggtgagctttgcaatgagtttgagtgcatcagcagtcccttggtagaatccactgcaagacaacttgcacgagatatacttgagctaaaggagggaaatcgagcacttggaatctttgcttgttctgtcgcatacaaggatccta

SEQ ID NO: 51078 - DNA, 399 bp, Glycine max
  Clone ID: LIB3109-001-Q1-K1-B10
gttcaaagcaaggagcttttcgagacgatggtgaggcacccttgcttcaaagacacccctttggtgctagtccttaacaagtatgatatctttgaggaaaagattagcagggtgtccctaaatacatgtgaatggttcagcgatttttgtccagttcgtgcacaccataataaccaatcactggcccatcaagcctacttctatgttgccatgaaattcaaggacctttatgcatccctcacagggaaaaaactctttgtggcacaagccatggcaagggaccgagtaactggtgatgaggcattcaagtacataaaagagatcctgaaatgggatgaaaagaaggaggagaatttctatggtccacctgaggattcattttacagcacagacataagc

SEQ ID NO: 51079 - DNA, 412 bp, Glycine max
  Clone ID: LIB3109-001-Q1-K1-B11
tgggtaagttggaaagcaaacctatttggagaaagatcttccttcattaccagccttgggagacaggcaagatgcattcagcgtttattttgaatgggataatgattttggaattccaggagcattttacatcaaaaattttatgcaatctgaatttttcctcgtgagtgtcactcttgaagacattccaaatcatggaaccattcactttgtttgcaactcatgggtttacaatgcaaaaagttacaaaagggatcgcattttctttgctaataagacatatcttccaaatgaaactccaactccactagtgaagtacagaaaagaagaattggaaaatctaaaaggagatggaaaaggagagcgcaaggaatatgataggatctatgattatgatgtctataatgatttg

SEQ ID NO: 51080 - DNA, 225 bp, Glycine max
  Clone ID: LIB3109-001-Q1-K1-B12
gtgggatgacaaaactattaggaaacagtggtttattaaatagcggggtgagaaaacaagcaagatacatacagcgaggattggattggttatcttcttcctttactctaaagagacatctaatctcaatcctcattacacatttcttcattcctctctcaagctttactcttttcccccttccacatcctcgatccctccactacaaaaacaactaatattttt

SEQ ID NO: 51081 - DNA, 405 bp, Glycine max
  unsure (1)..(405): unsure at all n locations
  Clone ID: LIB3109-001-Q1-K1-B3
ggggggaaaaaaaaccacaaagggggaaaaaaagggttaaaaatttaaaatttcggtgggaggtgtgagtgttctgcgcgcaccgattcaccattattttttcaaccagggttgtaaaagaaccacattagattaggcaattacctatggctggccattctgattcggttcattccgagaagaaatcaaccattggagtgaatgagttgctgatttttaatgctgagaacattgcaagcaacatgtaaaattatctattacagccgaacatttntatctataattggtggagttggtgctggtattttgggatttacaggcttgaaaggatttgtgttttacttacttctcatggcatttacttcacttgngctcgttgccaaagcaagttttcaccacacatac

SEQ ID NO: 51082 - DNA, 361 bp, Glycine max
  Clone ID: LIB3109-001-Q1-K1-B7
ggagattggcagaataaggtcggaggattgagtgagaatcgttcgagactgcaaaatccaaaaccaaacacaacgcacaacattcgtcattcaccgccttgtcttgtcttcttctgtctccgaatcacggaatctctctgaatcgcgggattaagagaggaatatgcaacagaggctaaagttgcagcaacaacaggccctcatgcagcaagctttgcttcaacagcagcagatgtaccaccctggcatgctcgccgctgctatgtctcagatggagcctgttccaagtggaaatgtgcctcctggttttgatacgtctgcatgccgtagtgtttatgtaagaaatattcatgtaaatgtc

SEQ ID NO: 51083 - DNA, 384 bp, Glycine max
  Clone ID: LIB3109-001-Q1-K1-B8
gacacaccatccgttctagtctcaacttctggggttccaactcctacaacgcttttctctgcactcatgggcaaggtcaagatcggaatcaacggatttggaagaattggccgtttggttgccagagtcgctctgcaaagagacgatgttgaactcgttgccgttaacgaccctttcattaccaccgattacatgacatacatgtttaaatacgacagtgttcacggacactggaagcatcacgatgtcaccgttaaagacgagaagacccttctcttcggtgacaaggcagtcactgtttttggacacagaaaccctgaagagatcccatgggggtcaactggagctgacatcattgttgagtccaccggagttttcaccgat

SEQ ID NO: 51084 - DNA, 405 bp, Glycine max
  Clone ID: LIB3109-001-Q1-K1-C1
gagcaaagagtgaagagcgaacagaatggctcccaagggtataatctttatggctgtgttatgcttttcagcactgtcactgaatctatgacttgcagaggataatggactctttatgaacttctacaaggaatcatgccctcatgctgaagacatcatcaaagaacatgtcaagcttctctacaagcgccacaagaacactgctttctcctggctcagaaacatcttccatgactgtgctgctcagagatgcgatgcttcactgttgctggactccacaagaaggagcttgtctgataaggaaacagatagaagctttgggttgagaaatttcatgtacattgagaccatcaaagaagctttggaaagggaatgcccaggagttggttcctgtgctgatattct

SEQ ID NO: 51085 - DNA, 319 bp, Glycine max
  Clone ID: LIB3109-001-Q1-K1-C10
gagaacagagtgtgataatagtaagacagagcacctgctcactcgtaaatggcgaggaagaagatcagagagtaccactccaagaggcttctcaaggagcatctcaaacgtctcgcctctatcgacctccaaatcctctcagctcaggtgacagaatctacggatttcactgagctgacagaccagcatccatggctttcgtcaaccagattggtcgtcaagccagacatgctgttcgggaagcgcggcaagagtggcttagttgctctcaatttagacatagctcatgtcgccgagttcgtcaaagcacgcctcggcg

SEQ ID NO: 51086 - DNA, 363 bp, Glycine max
  Clone ID: LIB3109-001-Q1-K1-C11
gacaccataaatcacacttaactaccaactacgtaagaaactaacaaaagtgttagtggttgtgataacatggctcttacacttcaacgtgcattatctgaactactcaccctaatagctattctctcaatattcctagtgatcccttccttttgtttcaaccccaaaaagctttataatgcttcatattattctccatctagttcagattggtcacctgcagtggccacttggtatggacctgccaatggagatggaagtgaaggtggagcttgtggatatggtaacgctgttgggcaacctccattttcttctttaatatccgcgggaagccctcttatatatgactctggcaaaggatgt

SEQ ID NO: 51087 - DNA, 372 bp, Glycine max
  unsure (1)..(372): unsure at all n locations
  Clone ID: LIB3109-001-Q1-K1-C12
gcnacacacaaataccatctgcggttttttaaaaaaactaggtcactacacaacatatcatcattctcacactaatacctcctttattcttactactcaccctaatatcaaattcctcaatatatcttatctaccatttcctttgcaaaaaccccaatacaccttattctccaaactattccttatcatctaaattcattaccacacccccatttttcctctccaatctccctcaccacctacacttattttaagtgaacctttctcttctttttcaccctttttaccaacctcctcattttatttaatctatacaacacaacctctcttattaaaatacctcttctctacaaaattatttcatttttcctt

SEQ ID NO: 51088 - DNA, 436 bp, Glycine max
  Clone ID: LIB3109-001-Q1-K1-C2
aaacaccacagagggggtttcgggtttgggcccagaaaatccctccttggaatctgccttaaaaagtttggggtaaagtggccattgtcaatcttcgacctgaccctgaaccagatgaagtatatccacaaataactttgcttcctgaagcaaatcaaagtgaggtgacaagccctgatgatcccctgcctgaatctccaaggtgtacagtccattcattttgcaagacactcactgcttctgacactagcactcatggaggtttctctgttcttcgaagacatgcagatgattgtttgccaccactggatatgactcagcagcccccatggcaagaattagttgcaactgatctgcatgggaatgaatggcattttagacatatttttcgagggcaacccaggcgccacttactgaccacttgggtgagtgtctt

SEQ ID NO: 51089 - DNA, 398 bp, Glycine max
  Clone ID: LIB3109-001-Q1-K1-C5
gtccgcccgcccgtccgaacggatccaagaggacaacataaggggtacccaaagtcattgaaacggtgataacattttaaggagcggtggttatgactctgtacaaaggccctgccttccaaatcataaagggtggaggagccatcagcaaccatagcaactctagcagtactagtaccaccgaaccctctgaccagcactggatagttggaactgtttatctcatatcaagttgtgctagttgggctggcttcttcattttgcaatcattcactttgaagaagtacccggcagagctctcactgacagctcggatttgtgtgatgggtattattgaaggttcaatcgcatcccttatatttgaacgagacttcagtgtatgggccataggctgggac

SEQ ID NO: 51090 - DNA, 419 bp, Glycine max
  unsure (1)..(419): unsure at all n locations
  Clone ID: LIB3109-001-Q1-K1-C8
ggtggactagatagtagaaacacaaagagaagacgagtcctcgagaggcctaggccaactttgcaatcgcacctcgaatcaatcgacactcagcggaaaccctagaaagtaataataataataataacaatagaatgcgaatttattagagattgcaaaaggtgggaagaggaatggcgaagcattcggtggcaatggcgaagaagcggtggctgataatgttggcggcattcctgtccgtctcaacagtgacggtgctcttaatgagatccaacaactccgattcctgcaacaccaaccattttactattgcacaagataataaccagattcgttcccctgtccaactcactaatgccgcttncagcccccttaatttcatgaagtccaagctagttctcatgggttcgcacgagctt

SEQ ID NO: 51091 - DNA, 78 bp, Glycine max
  Clone ID: LIB3109-001-Q1-K1-D1
ggacccgtggacggtcaaggcactgatgggggggatgctgtaaaagggatggcacgacaaccggcggccgatgtaaaa

SEQ ID NO: 51092 - DNA, 330 bp, Glycine max
  Clone ID: LIB3109-001-Q1-K1-D10
ggaggagaggaagaggggtgagttgttcattatcatcatttcattgtttcttttcttttccagacatcaaaccaaacactagctacgcttctctctctttccttcccagagcttcctgtggctgtggaatcatcgtatcttcttacgtccgaagcaagcctttgtcttgcgtgtgttcttcccccttccgtcaggttcgcttttcttcatttacatttccacaatatcaaaatacccttacctctgtttcttttattatttgatctatttgttgtcaagaaatactttcgatgcatatgtctctgtgatttaattcgaaatagtggacag

SEQ ID NO: 51093 - DNA, 372 bp, Glycine max
  Clone ID: LIB3109-001-Q1-K1-D11
agccgtccgaacacctccgaaaggacttctcaaagctctttacagacacatggccgggtttaataatataaacacctgatattatttccaactatacacacatcacacccttcactatctacatatctttataccaccattccatacctatctgtatctcttttatcaccttactttcgtacatacctttgcaacctcacttttgacattgatctttgctctgctaacacattcgcattcatataatcacatatgtatcatgacaactcacccttacctctgattctttaatgacttattctatggatactccacaactacttaccacacatatttctctgacatctaattgaaaatgttcaacttacaaac

SEQ ID NO: 51094 - DNA, 344 bp, Glycine max
  Clone ID: LIB3109-001-Q1-K1-D12
ttttaacgaagcgaaatttccacctacatcgtgggcttatctaagctggtggtggaccgatttgtactgatttgttagtgaagcacatctagtgcaaactgtctaacaggcatggtaagcctgttgacaacatcagccattacctattctcctctcaacaatggttccaaggatttcagaaagtcaggtaattcttctaaaggaaggtgttgcataaaatcaatggtgatagagaaatccttggaggaattgtacaatgtgaatgtggaaagaaatgttttttctgagaaactagctgatcttggagttttaaaatggtctgtttttaagactggtaaaagcaa

SEQ ID NO: 51095 - DNA, 311 bp, Glycine max
  Clone ID: LIB3109-001-Q1-K1-D2
gggcgcctccgagaaggctacaaacgctgatgctggggatgttttacattggagcgctctacttcacttttcggtaaatgtatcacttcgttcactttcatccaactcaacatatatggaattttttcaccgataactactgtcttgatcatgtgtgcaaagactacttcatattatcttattctcagtaaaactatgtggttcacattcttaggcatgtccaccaccatgaatgtaacatcacccatgaaatgactcactactactaactggctcatatttttttttattctaaatcacgcaaattcatt

SEQ ID NO: 51096 - DNA, 247 bp, Glycine max
  Clone ID: LIB3109-001-Q1-K1-D3
ggtactgagagaggtacatatgagtttgcaggggctgtctgacaagaaagtcggataaataaagcaaagctaatcaacatgcttgatgaggtggcgcaaaggttcacgcatatccacaaccagatgaatatagtgatatcatcatttgatcaagctgctgtaatatgctcagcaagaacttacactgcgcttgcactgtaaacaatcttgaaccaatatacgtgtttgaaggatgcaataacagtgc

SEQ ID NO: 51097 - DNA, 126 bp, Glycine max
  unsure (1)..(126): unsure at all n locations
  Clone ID: LIB3109-001-Q1-K1-D4
cttccgaccggttgcaaaagacacccaaangggcccctaagccaggtttatttaccttttaattggggggcgttttttaaggttgggggggcttaccttcatatccttttaaacattgggggtttt

SEQ ID NO: 51098 - DNA, 368 bp, Glycine max
  Clone ID: LIB3109-001-Q1-K1-D5
ggggcaaaaaaaaaaaaatgcacgaggggtcaaaaaaatccgaatcctcttggcctctttgtgtctgaagcttcactcgaaagtggaaacactgctctcatcgactcgaaagcggtttgcggtttccgtcatcggcgagacgccgccgccgtctggaattggaagaccgtcgcagtagtcgcaccatcgcagcacgcattggaaacggaaatgggttcttgtgctacatcatctgttctgactaatcaatttattccgtggtctacaaccaatactgaatctcccttggactccaaattgggcgtcatattttataaaatgtacagaaatacaaacaaaagacaactcagtctttcttttgcttggga

SEQ ID NO: 51099 - DNA, 287 bp, Glycine max
  unsure (1)..(287): unsure at all n locations
  Clone ID: LIB3109-001-Q1-K1-D6
aaaaaccgggncgaacgacaggcttcctgaccgacgggcttgaaagaagctctacggaggggctttaacgaagcgataatttccacctgcatgagggtcaaacctgcgcttcgtttgaaccgatttgtgctgttttgtaagtgaagcacatcgagtgcaaactgtcgaacaggcatggtaagcctgttgacaacatcagccataacctattctcctctaacaatggttccaaggttttcaaaaagtcagggaattcttcttaaggaaggtgtttcataaaaacaatg

SEQ ID NO: 51100 - DNA, 389 bp, Glycine max
  Clone ID: LIB3109-001-Q1-K1-D9
ggttctagtgtgtgattgtttgttgttgtaactcggtcttcttcttttgttgggctgtgtttgtgtttgttttttctctcacctgaaaatgtcttgctgcggtggtaactgtggttgcggaagctcctgcaagtgcggcaacggctgcggaggctgcaagatgtacccagacttgagctacactgagtcaaccaccaccgagaccttggtcatgggagtggcacctgttaaggctcaatttgagggtgctgaaatgggtgtgcccgctgagaacgatggctgcaaatgtggaccaaactgctcctgcaacccctgcacttgcaagtgaggtgttgggagagcaagcttcaagcagagatagcccttaattaggaataatgattaactat

SEQ ID NO: 51101 - DNA, 218 bp, Glycine max
  Clone ID: LIB3109-001-Q1-K1-E10
gattgagagtggcgtcattgagcttgatgataagcagagtgaaagcaagtgtgctcttgtgtatggcaaaataaataacccccttgtgcccctgcccctggttggcctaactggcctaactggggttaaccacttccgggatgttaaaggccagaagctgttttttttcgtaaccacatttttcggtttaaccaaggttaattaaaaggttttggttt

SEQ ID NO: 51102 - DNA, 182 bp, Glycine max
  Clone ID: LIB3109-001-Q1-K1-E11
gaggactacaaaaagatatccacactctcctgagtggggtttctaataaggaccgttgataactctaaatactacacttagaccacatcaatccccttcttataacctttaaacttgtcatcctgatctttctatattgctttcataccataatttgtgttcactttcttgatcctctacat

SEQ ID NO: 51103 - DNA, 370 bp, Glycine max
  Clone ID: LIB3109-001-Q1-K1-E3
aaggtcaggaggtggagtactagaacatggatggggtgccttcgaattcgcatggaaacctcgatgagcagatttctcagctcatgcagtgcaaacccttgtccgagcaagaggtaagggtcttgtgtgataaggcaaaagaaattttgatggaagagagcaatgtccagcctgtgaaaagtcctgttacaatttgtggtgatattcatgggcaattccatgatcttgcagagctttttcgcattggagggaagtgtccagatacaaattacttgtttatgggagattatgttgatcgtggctattattctgttgaaactgttacgcttttggttgcccttaaagtgcgttatcgtcagcgtattactat

SEQ ID NO: 51104 - DNA, 100 bp, Glycine max
  Clone ID: LIB3109-001-Q1-K1-E4
cgaaatacccggccgaccacacccttccttccggttgcaaaaaaacaccaaagggggctttaaaacaagtccaaaaaccctaacaatggggggcattctt

SEQ ID NO: 51105 - DNA, 409 bp, Glycine max
  Clone ID: LIB3109-001-Q1-K1-E5
gttgcttgaaaatgataactttgaagatcaatcttggcatgattttgatcccgctgcttttagtatccatgctgattctgatcctgttagtttggatgaatctctggatgaagctcatttcagttcaccagcttttggcaagagagatcaattacaaactggtacatttgatgctgcacaagcaaaggaaactggcagattaggtgaatttcttgcatgcaaatactttgtcgataaagttggcaatactgcagtaaggtgggttaataaagataatgaaactggacttccatatgatttagtcattggggaggataacagccaagaattcatagaagttaaagcaaccagatctccaagaaaagactggttcaacatatcagcgagagagtggcagtttgcaaatgaa

SEQ ID NO: 51106 - DNA, 316 bp, Glycine max
  Clone ID: LIB3109-001-Q1-K1-E7
aaaaagccttcgaaagggctttctaaagggggaaccttgttgaaaaaccgggtggattttttaaaaaatctggggttttgcaccaaaaagaaaaggaagaaaatgacccatgtccatgaccatcctcctcactattgctgcagctgctattgatcctcatacatccaaccatcatctgcacccttaccttcatcctcatgcctagattttgaatacagcaactatggaacattcttaccaaccccggagccggagccggagccggaaccgccaccacaagagattgccagcctaaactcatcgtatcatcaatata

SEQ ID NO: 51107 - DNA, 358 bp, Glycine max
  Clone ID: LIB3109-001-Q1-K1-E9
ggagacacagtgaggaaactgaacccttttgtttgttttttcagctgaaaattcagaccaatatatattttgagtattttttttcctttgatttcgtggaaagttattatcacagaatctgagggttttgtagacagaacttcacgtttaacaatgaagaaggttcccaagaacagctgcaagtctgcatcacacaggctctttaaggacaaggcaaagaaccgtgtggatgacttgcagctgatgttcctggatctgcagtttgctaggaaagagagccgcacggttgatgccgtggtgcttgaggagcaagtccatcaaatgcttcgcgaagtgaaggccgagctcaatgagccct

SEQ ID NO: 51108 - DNA, 211 bp, Glycine max
  Clone ID: LIB3109-001-Q1-K1-F1
gacacacaactggtttcaaagaaacaggctcgggttggattacctctgggactggtgttaatggtcactcatgtcaaggcatatcggtttggaagatggaccaatgcacatgccaccttatatcgacgtagagatccttctgtcacaatggatggagcatgtcattatggaaatctacatagccaacgatatggaactgatacatcagaac

SEQ ID NO: 51109 - DNA, 422 bp, Glycine max
  Clone ID: LIB3109-001-Q1-K1-F11
gacccgaaaagagaagaggtgtgggaaaggaggaggaagaagagcgagatggcgtcagtggtgaagaacgtactcaaatcggtcagagaaaagggtttcggcgctttcctcagggagctcaaggatgaaggctacctgagatgccttccggatggaaatctcttgcaaaccaagatccacaatattggggcaacacttgttggtgttgataaatttggtaacaagtattatgagaagcttggagacacacagtttggaaggcacaggtgggttgaatatgcagagaagactagatataatgcctctcaggttccagctgaatggcgtggttggctccacttcatcactggtcacacaggagatgagcttcttttactgaaaccgaaaaggtatggtattgaacacaaagaaaatttgtctgg

SEQ ID NO: 51110 - DNA, 329 bp, Glycine max
  Clone ID: LIB3109-001-Q1-K1-F3
gtctgaaagagggtgcatcaccccttgacaatggcaatggtggcggaatcaccggaatctgacagtgacaacaactcctcaaaaaccaacaatactcaaaccctcaatgaaacggcgccgtttcttgactacgctcttgcgcaggcccagctttaccacaaggccttcaacgacgccgtcgattcgacaatcgatactgcaaaatcccgtttctcccaaatccgctcaacttcttccgcccactttcaccagaccttggattctttggatgatctcaaatctcagtacactgcttatgaaggtcttttgtttggaaagatcaaacaagg

SEQ ID NO: 51111 - DNA, 280 bp, Glycine max
  Clone ID: LIB3109-001-Q1-K1-F4
gatcgtaagtggggtcctcgcttgacaaaaccggggggggttcctccagtggctggaaaatttgaagtcattgaccaatattgcattgtacctgatgaggaggatgtgcgaaggaagatgagggtttcattacctgatgactatgctgagaaactgagtgcacaaaagaatggcactgacgagtcagatatggaacttcctgaagtaaaagattacaaacctagaaagcagctaggaaatgaggttatcgagcaagaagtttatggaattgatccttata

SEQ ID NO: 51112 - DNA, 408 bp, Glycine max
  Clone ID: LIB3109-001-Q1-K1-F5
ggaggaagaggaggagtaacaaaacaagtatgtgaggatcaaacgcaattgcggatggtttggctggtgcaggtggtggaattattgctcaaatcataacttatcctcttcaaacggtaaacacgcgccagcaaactgagagaacactcaagaggaacaagcaaagtttgccctccaactcaaccactgctcctggcactcttcttcagatctttcaggtcattggaactgagggttggggtggactctatagtggcctcaagccttctcttcttggaactgctgcttctcagggaatttactactatttctatcaagtttttaagaacaaggcagttgccattgcagctgcacggatggtgaaagggcgtggagatggtactgttgggatgtttggttggcttgttg

SEQ ID NO: 51113 - DNA, 347 bp, Glycine max
  Clone ID: LIB3109-001-Q1-K1-F6
ggagataaagagggaggagagaatcacaaagggtgggctaacacgaatacgcgggcggatcaaaccctctatttctctccaaaactgcgtataatatcttactcgccttacataggtcttatatttcattatactgtgctctttcccatttgagggaacagcacaagagtgcgaggatcggataacccaactgcacaagttgtcactaaaattatggatcctcacgactagactggatgccaggctcctgaacgccccattctttgcattaataattgctgcttctttggaagagcagctaccatgaacatgtgttccaagtgctacaaggacatgctgctttagca

SEQ ID NO: 51114 - DNA, 114 bp, Glycine max
  Clone ID: LIB3109-001-Q1-K1-F8
gtgggggaattccattgccatgccactgtctgctgcactatggctattgttcgacagctttccagcaggcctatacaaactatgacactatgggaaatgcagatggatgtcctc

SEQ ID NO: 51115 - DNA, 324 bp, Glycine max
  Clone ID: LIB3109-001-Q1-K1-G1
gatccaagggaggcacgacctggtatcagggaggtccactttcttccattcaatcctgtggacaagaggactgctctaacttacattgattctgatggaaattggcatcgatctagcaaaggtgctcctgagcagatattgaacctctgcaactgcaaagaggatgtaaggaaaagggttcatggaacgattgacaagtttgctgagcgtggactccgttctttaggtgttgctagacaggaagtacctgagaaaaacaaggatagtcctggtgcaccatggcaatttgttggtctgctaccactttttgatcctccaggcatg

SEQ ID NO: 51116 - DNA, 299 bp, Glycine max
  Clone ID: LIB3109-001-Q1-K1-G11
cagggggaagtgggggatgaaagggagaaggggaagaagtaggaggaagaaaaggggaaaacgcaaagaaaaaaagaggaagattgatcaagatctcccttgcgtttgtctcaattgaagaaattcaagagcagaacgagactaactcaacggtatcagacgtttcaaggtttcagcactttcatttttttttttttcccgatttgagttggaagaagatcaaagaggttcctagttgcttggattgttcctctgggtggtggagactttgtgtatttttaaaatattgacaattcaaa

SEQ ID NO: 51117 - DNA, 326 bp, Glycine max
  Clone ID: LIB3109-001-Q1-K1-G3
ggcgcattgaacgaaaattacggtttgtagtggggcatgaagaagcagcgatggcgcctaagataacacgtaaggttagcagaaaccctgaattgataaggggaatcggaaagtactcgaggtcgcagatgtaccacaagaggggcatttgggctatcaaggccaaaaacggtggcgttttacctcgccacgaccctaaacccaagcctgaagctcctgctgaaaaaccacccaaattttaccctgctgatgatatcaagaagcccctttgtcaacaagcacaaaccgaaaccaccttaactcaagggttagcattacttcccgga

SEQ ID NO: 51118 - DNA, 285 bp, Glycine max
  Clone ID: LIB3109-001-Q1-K1-G5
gatgatgaagtacttcttgcaatggcagaagagttgggagtgttcattccttgtgttgggggagtggaacatgctagtgtgttgctgccaccgctggagacactttgcactgttgaggaaacctgtgtgagagataaagctgcggagtcactttgtagaattggatctcaaatgagggagagtgatttggttgaatattacatcccgttggtgaagagattggcagcaggtgaatggtttactgctcgagtctctgcatgtggactatttcatattgcataccct

SEQ ID NO: 51119 - DNA, 240 bp, Glycine max
  Clone ID: LIB3109-001-Q1-K1-G6
cgatgcacctcgtgacttaacatacttgcactaggaaatgtatttccagataattttcagagattcaaatcttagataatctattgcatgaacagttgaatgctaaactatcagactttgggttatcaaggttgggaccattttattgactgactcatgtcttaccagacggtgtatgaacaatgagatattcagctactgaatatgttcacactggacgtctaacattaaagaatgatg

SEQ ID NO: 51120 - DNA, 305 bp, Glycine max
  Clone ID: LIB3109-001-Q1-K1-G7
aaaaacaccacaaaggggttttgaaattacatttattgtcccacacatacggtgcttttctgtgaagtggagggcccaaaactttttgcccccaccaaatatttcctttatatttataacagattccattttgaaaatccaactgttaggcctggtctctgaaccacattgccaaagtttggtcctgctgttgatgaataaaagccccgcatattcatactgctaaggcggtgtctttttgatagtgatgatgaggttcgagacagagcaacgctttatctgaacacacttggaggtgatggttc

SEQ ID NO: 51121 - DNA, 400 bp, Glycine max
  Clone ID: LIB3109-001-Q1-K1-G9
acatatgaacagtaaaaactagtagtttaattgagactagaactcatagggaagaaaatagatttatgaatggaataaaatatgcagtatttacagacaaaagtattcggttattggggaaaaatcaatatacttttaatgtcgaatcgggattaactaggacagaaatcaagcattgggtcgaactcttctttgatgtcaaagtaatagctatgaatagtcatcgactcccggtaaagggtagaagagtacgacctattatgggacatacaatgcattacagacgtatgattattacgcttcaaccgggttattctattccacctcttagaaagaaaaaaacttaaatcaaaatacttaatagcatggcgatacatttatacaaaacttttaccccaag

SEQ ID NO: 51122 - DNA, 382 bp, Glycine max
  Clone ID: LIB3109-001-Q1-K1-H10
ggctgcaaatgtggaccaaactgctcctggggggcctgcacttgcaagtgaggtgttgggagagcaagcttcaagcagagatagcccttaattaggaataatgataaactattaatgtgtagctaaaaacttatgtattatgtctgtgatggttttcgtgcactctggtgttttgtgttaaacaaacatccttagaataaagtggtcatgtcttgcctttcagcaagttcaagtgttttggacttgtgatgggtgtgttaagctcatggttgcttcttttttttttttttttaatgtctggtaattggtcgcttctgtataaagttcggctaatctgaattatgaatctctgcttataatattaaatactatttcacaaaaa

SEQ ID NO: 51123 - DNA, 278 bp, Glycine max
  Clone ID: LIB3109-001-Q1-K1-H11
gggcgcgggtgaggtacaacccttccactgtggtgactctgcgatgggtgcctacaagtatgtttcagagctatggcgcaagaagcagtctgatgtcatgcgcttcttgcagcgggtgaggtgctgggagtataggcagcaaccttccattgttcgtttgacaaggtctacccgccctgacaaggctcgtcgcttgggcttcaaggctaagcatggctatgtgatttaccgtgttcgtgttacgaggggtggccgaaagaaaccagttcccaaaggta

SEQ ID NO: 51124 - DNA, 270 bp, Glycine max
  Clone ID: LIB3109-001-Q1-K1-H12
ggagacagagagaatgagtacggtgggagaagggaaggttagtagtaatggtcatggatgttgcaaatcagggccaggctatgcttccccactggaagccatttctggtcccagagagtctctcatttatgtaacctctgtctacacagggaccggaatagagaagccagactatttggcgacagtggatgtggatccaaactctccaacttattccaaagtcatccataggcgttctgttccttatttaggtgaacaattgcatcacac

SEQ ID NO: 51125 - DNA, 378 bp, Glycine max
  Clone ID: LIB3109-001-Q1-K1-H2
ggtggccaaatcatggacaatgatgatgccatcacctgtgcagcatataccattaccatcttctctaatgaataatatttccactcacaattcaatcttgtgttgtgactttaactatgtgaatttgagcaaccaaagaggtacaaggcttttgtgttcagcaaggaggcaaattagataccaagatgatggggatgataaagatagtgatgaagagtatgggcacaatgaggagattgccaagttggagtcttatagtcaatcagcagaaggagaagtactccttgtgcatgcacttgtggaccaggaggaagttgatgtgcttatcttcaaggggttctcttcatgcttgagctacagtacctcccctgacccaac

SEQ ID NO: 51126 - DNA, 145 bp, Glycine max
  Clone ID: LIB3109-001-Q1-K1-H5
tcaaatatataacatacactcacttacaacatttgattttctagaaataatcactatactcctacattgtaattatgacaaactctaccctacatcacaaatttcttcgatctttctttaaatctcatcagaactattttaaata

SEQ ID NO: 51127 - DNA, 239 bp, Glycine max
  Clone ID: LIB3109-001-Q1-K1-H6
atgagaacaaccgacgggggaaggaagagagtggtgtacgacactgctgctgcgcactcgatccgatacgtgctgcccgaacatagcagaaccaaacgacgcccaggtttcggaattgtgttctacgtttttgagtttcgattccgatcgaccgacgatgctggccaatcatttgcaaaacggcatcgaaacggcgaggctcgtttggtcgcggattcctaattcggaagaatcgcagc

SEQ ID NO: 51128 - DNA, 354 bp, Glycine max
  Clone ID: LIB3109-001-Q1-K1-H7
gggaaagtttaatgggcggctttccttttccataaaaccctccgctagctagctgcgtttaaagtataaactttaaaggggaaaaaaaaaccgagaaaccagggccatattataattccttccttctcactgagtctggtgcataaacctcatcaacacacttctctaaatttctagggtttgagttttgctcacttatttctcgacttctgcaatggccgcttcctcgctcctgaagatcgcgcttttcgctccttcctcctgcgatcgccccaaggtatataccaatgcctcaagttctaatttaaaatcccagggattacataagcacatttttggtacttcaattcaatg

SEQ ID NO: 51129 - DNA, 335 bp, Glycine max
  Clone ID: LIB3109-001-Q1-K1-H8
gggcgaggatggcgtcaagcagcaggcatacagcaaggcaggactgtgtttgaaaatgtgcatcttttcttgggcccaaatgcaataattgtggtcctgtttactaccgttgaggcttctttctatcagctaagctaagcagtccaaagggcacaccacaacagagaaagaaaagagtaagagtatgggaggctcatggtcatggcagctcacatgtgccctcttgctactcttcttcgtcgtagtcaccgacactgaccacattgtgggtgcgaatcgaggctggaaccctggctttaactacactctttgggccaacaaccacactttttatg

SEQ ID NO: 51130 - DNA, 349 bp, Glycine max
  Clone ID: LIB3109-001-Q1-K2-A10
gatgggtggtggtactgaaatgggaatcccagaagaagaaaaagaagaagagcttctgaagaagatagaacggctagaagctggtcacgctcacctcaagcaagaaatgtccaacttcaagctcttccaaaacaacaagtctcgttccaggttcggtgctgccacgtgtaacaaaccctcttcttctctgcatcaaaatggaaacaagtatctcaatatcttgcagtcaatgggccacgctgttcatgtgttggatcttcaatgtcgtatcatgtactggaaccctagtgcggaaagtatgtatggttatgccgctgaagaagttctagggcaggatgggattgagatg

SEQ ID NO: 51131 - DNA, 436 bp, Glycine max
  Clone ID: LIB3109-001-Q1-K2-A11
ggcacacccaacccttcaccagatctcactttgttccgttcagtgcagagaagaaaatggcggtgatggccgttcaccaattcgcgcaatgcatcacttgccacgcttggagccccgatcaatccatggtggctttatgtccaaacaataatgaagtgcacatctataggttggttgaagacaaatgggaaaaggtgcatgttcttcaaaagcatgaccaggtaatttctgggatagactggagcacaagatcaaatagaatagttactgcatcccatgatcggaattcatatgtctggaaccttgaaggatcagaatgggtgcctactcttgttatccttagactaaaccgtgctgctctttgtgttcaatggagtccaaaagaaaacaaatttgcagtgggaagtggagccaaaacttgttgtatatgctacta

SEQ ID NO: 51132 - DNA, 415 bp, Glycine max
  unsure (1)..(415): unsure at all n locations
  Clone ID: LIB3109-001-Q1-K2-A12
ggaggtgaaggggaaaaaaaaagagtagagtggataatggctgcgttatcgctttgcatagccatgagagcacccactccctcagcttctctcattctcactaccccaaaaccatcttcactctctttgaaccttacccgcacttgctccagcgctcgctctccgctcctccattgctccttcctctcttctccttcccatctctcttccccttcctccgtttcaggcttgtcacttggattggatttgacatctaatgttgggaccagaagaggaaaaggttctggcctagttgtgagggcaggcaaggctgctctttgtctgactaagagaagcagatcaagaaaatcattggcacgcactcatggtttccgcaaaagaatgagcacaccangtggaagagctgttttaaggc

SEQ ID NO: 51133 - DNA, 435 bp, Glycine max
  unsure (1)..(435): unsure at all n locations
  Clone ID: LIB3109-001-Q1-K2-A3
ggttatcggtggaggtgatggaggggtcatacgagaagtagcacaccattcttcagttgaaaagatagacatttgtgaaattgacaagatggttgttgatgtctccaaacaatacttccctgatgtagctgttgggtatgatgatcctcgtgtgacacttcatattggtgatggagttgcatttctgaaggaagttcctgaaggaacttatgatgctgttatagtggattcatccgatcctattggtcctgcccaagagctttttgaaaagcccttcttttcgtcagttgcaaaggctcttcgtccaggtggagttgtgtgcactcaggcagaaagcatatggcttcatatggatataattgaggacattgtggctaattgtcgccagaattttaaaggctctgtcaactatgcttggactactgntnctacata

SEQ ID NO: 51134 - DNA, 417 bp, Glycine max
  Clone ID: LIB3109-001-Q1-K2-A4
ggcagagtgaggaattgaagcatgggaagagggaagggggttctggagagaatacagaacaagatcaatcgccaagtaaccttctcaaagcgcagaaatggtttgctcaagaaagctttcgagctatctgttctatgcgatgctgaaatcgctctcgtcatcttctccagccgtggcaagctttttcagtatagtagcactgaaatcattgagaagtatcgtcaatgctgcttcaacatgtctcagactggcgatgtagctgaacatcaatcggagcagtgcttataccaggagcttttggtattaagagtcaagcatgagtcactccagcggactcaaaagaatcttctgggagaagaactagagccacttagcatgaaagaaatgcatagtttagagaaacaaactgatagaacg

SEQ ID NO: 51135 - DNA, 351 bp, Glycine max
  Clone ID: LIB3109-001-Q1-K2-A5
aatctccaagttaccttctcaaagcgcataaatggtttgctcaagaaagctttcgagctatctgttctatgcgatgctgaaatcgctctcgtcatcttctccagccgtggcaagctttttcagtatagtagcactgaaatcattgataagtatcgtcaatgctgcttcaacatgtctcacactggcgatgtagctgaacatcaatcggagcagtgcttataccaggagcttttggtattaacagtcaagcatgagtcactccagcggactcaaatgaatcttctgggagaagaactagagccacttagcatgaaagaattgcatagtttagagaaacaactggatagaacg

SEQ ID NO: 51136 - DNA, 436 bp, Glycine max
  Clone ID: LIB3109-001-Q1-K2-A6
gataccaaaaaagttaagtgaattaaaaacccaagggaggttcatggccaaaggtaaagatatccgagtaattgttattttggaatgtaccggttgtgataaaaagagtgttaataaggaatcaacgggtatttctagatatataactaaaaagaatcgacagaatacgcctagtcgattggaattgagaaaattttgtccccgttgttgcaaacatacaattcacgcagaaataaagaaatagatcaaattgatcgcttgtgtgttacccttcgaaccaaagaacttaacatgtaaaatgatctatttttcttatctatatagatagatctatctgtattctatcatttacagttgaatatatacaaatatcagtatataacaacatatattaaaaaaataacaacatatattaaaaagtcagataaaaaaacaa

SEQ ID NO: 51137 - DNA, 199 bp, Glycine max
  Clone ID: LIB3109-001-Q1-K2-A7
ggcaaaaatattctactaattattattttacaatgcaccatttgttatctaaagaatgctaataagcaatctacgctattctatacatatataactaaaaataatttatacaatactcctaatctatttcaatttagaaacttttaactcatttataacaaacatacattctactcaaacatatataaatctatcaaat

SEQ ID NO: 51138 - DNA, 410 bp, Glycine max
  unsure (1)..(410): unsure at all n locations
  Clone ID: LIB3109-001-Q1-K2-A8
ggtgataagaattagcaaaagacaatgattcttcagaggagaaaaatcaagttcaaccagggcttantggtcctctgaaaaagagaattcagcagcttgttgactctaatcctgtcatgctcttcatgaaaggaactcctgaagagccaaaatgtggatttagcaggaaagttgttgttgtgttgaacgaagagagagtcaagtttggaagttttgatgtcctatcagactcagaggttcgtgaaggcttgaagaagttttccaattggcccacatttcctcagctttactgtaaaggagaacttcttggtgggtgtgacatagcaattgctatgcatgagagtggggaactgaaggaagtttttaaagatcatggaattgatactactaattgaagcaaagagaaagaa

SEQ ID NO: 51139 - DNA, 412 bp, Glycine max
  Clone ID: LIB3109-001-Q1-K2-A9
caatgtcggtggatgtaattcgcaaggcactccaagcaacagaagaggggtttatttcagtggttgccagacagttttctctgtcaccacaaattgcggctgttgggtcatgctgtcttgttggtgttatttgtaatggaaccctttacatagcaaaccttggggattcccgggctgttttgggaagagcagtcaaggcaactggcgaggttttagccatgcaattatcagcagagcacaatgcatcgatagagtctgtaagacaggagctgcatgcttcgcatcctgatgacccaaatattgtggttttaaagcataatgtatggcgtgtgaaaggtcttattcaagtttctagatctattggtgatgtatatttgaaaaaggccgagttcaatagagaaccactatatgc

SEQ ID NO: 51140 - DNA, 309 bp, Glycine max
  unsure (1)..(309): unsure at all n locations
  Clone ID: LIB3109-001-Q1-K2-B1
ccgccgccagtttccgccggaataaatgcaccaccagcaagatttttcattcctctttcacgtgcatgccctctttcttgcatgatcatcactaccactctntcttattgcgagttgccaatgatgctgatagaagtgaagtgtcatctgatactgcaatcaagacatcgtattcagaagccgataagatggttgatggtatggactttggtgagctttgcaatgaagttgagtgcatcagcagtccctttgtagaaatcactgcaagacaactngcacgagatatacttgagctaaaggagggaaatc

SEQ ID NO: 51141 - DNA, 412 bp, Glycine max
  Clone ID: LIB3109-001-Q1-K2-B10
gtacaaagcaaggagcttttcgagacgatggtgaggcacccttgcttcaaagacacccctttggtgctagtccttaacaagtatgatatctttgaggaaaagattagcagggtgtccctaaatacatgtgaatggttcagcgatttttgtccagttcgtgcacaccataataaccaatcactggcccatcaagcctacttctatgttgccatgaaattcaaggacctttatgcatccctcacagggaaaaaactctttgtggcacaagccatggcaagggaccgagtaactgttgatgaggcattcaagtacataaaagagatcctgaaatgggatgaagagaaggaggagaatttctatggtccacctgaggattcattttacagcacagacataagctcctcttccttta

SEQ ID NO: 51142 - DNA, 424 bp, Glycine max
  unsure (1)..(424): unsure at all n locations
  Clone ID: LIB3109-001-Q1-K2-B11
tgggaaagttggaaagcaaacctatttggagaaacatcttccttcgttaccaaccttgggagacaggcaagatgcattcagcgtttattttgaatgggataatgattttggaattccaggagcattttacatcaaaaattttatgcaatctgaatttttcctcgtgagtgtcactcttgaagacattccaaatcatggaaccattcactttgtttgcaactcatgggtttacaatgcaaaaagttacaaaagggatcgcattttctttgctaataagacatatcttccaaatgaaactccaactccactagtgaagtacagaaaagaagaattggaaaatctaagaggagatggaaaaggagagcngcaggaatatgataggatctatgattatgatgtctataatgattggggtaacccagac

SEQ ID NO: 51143 - DNA, 410 bp, Glycine max
  Clone ID: LIB3109-001-Q1-K2-B12
ggtgtgtgggatgagaagatgatgaggaaacattggtagaagaaattgaagagagagagagagagagagagagagagagagagggttggattggttttcttcttccttttctctaaagagaatctaatctcaatcctcattacagatttcttcattcctctctcagtcttttctgttttccccctttgacatcctcgttttcgccgaaacaaaaacaactaagattttttgtttgttttgtttttcttctccttgttgttatttgactcggttgtctgaataggttgttgcagcagggtcgggagccacagctatgcagagccaagttgtgtgcaatggttgtaggagccttctgctttacccaagaggggcaaccaatgtttgttgtgcattgtgcaacacaaatacct

SEQ ID NO: 51144 - DNA, 364 bp, Glycine max
  Clone ID: LIB3109-001-Q1-K2-B2
agaggggtataaatgttatgggtgcaagggttatgtgaaggcatggaaacgtctcacagtgaaacgagctccaaatattctcacaattgcgttgaaaagatttcagagtgggaggtttggaaaacttaacaagagagtaactttccctgagactgtagatcttagcccttacatgagtgaagctggagatggatctgatatttataagctatatgctgttgtagtacatattgatatgctgaatgcttcattttttggccattacatatgcttcatcaaagatttatgtggaaactggtatagaattgatgattggaaggtctcgagtgtggaattagaagaggtgctttcccagggtgcatac

SEQ ID NO: 51145 - DNA, 406 bp, Glycine max
  Clone ID: LIB3109-001-Q1-K2-B3
gagaaaaaagggttaagaagtaaaagtttggtgtgaggtgtgagtgttctgcacgcaccgaatcaacaataatttctcaaacagcgttgtaaaagaaacacattagactaggcagataactatggctgtacattctgattcggcttcatccgagaagaaatcaagcaatggagtgaatgagttgctgacttttaatgctgagaacatgcaaagcaacatgaaaattatctattacagccgaacatttttatctataattggtggagttgttgctggtattttgggatttacaggcttgaaaggatttgtgttttacttacttctcatggcatttacttcacttgggctcgtggccaaagcaaagttttccacccacacatactttgactcctggaatcgagtgcta

SEQ ID NO: 51146 - DNA, 398 bp, Glycine max
  unsure (1)..(398): unsure at all n locations
  Clone ID: LIB3109-001-Q1-K2-B4
ggaagcagtggaacanagcaaggaagagaaagagatttgtttctctctaaagagtctccgctgaactttttggtttcttgaagatgtcgttactctccgatcttatcaaccttaacctctccgacatcaccgataaggtgatcgccgagtacatatgggttggtggatctggcatggatatgaggagcaaagcaaggactctctcgggactggttaatgacccttccaagcttcccaagtggaactatgatggttccagcactggtcaagctcctggacaagatagtgaagtgatcttatatccacaagcaatttttcgggatccattcangaggggtaacaatatcctggntatgtgtgatgcttacactcctgctggggaacccattcctaccaac

SEQ ID NO: 51147 - DNA, 153 bp, Glycine max
  Clone ID: LIB3109-001-Q1-K2-B5
atcgattcacggggaggtaccaggggacaacgagttgcaactcgagcgagtcaacgtctattacaatgaaacgagttgcggaaggttcgtgccgagggcggtgctcatggatctagagccagggaccatggacagggtcagatctggccctac

SEQ ID NO: 51148 - DNA, 345 bp, Glycine max
  Clone ID: LIB3109-001-Q1-K2-B6
ggcagccaaagaaaagaaaatcctcaattttctgagcagccaaacactctctctctgtctctcgaaaattctcagtttgcagagaaaatctgaatcatgtcgtggcaagcgtatgtcgacgatcaccttctgtgtgacatcgaaggtaaccacctcactcacgctgctatcatcggccaagacggcagcgtttgggctcagagtaccgacttccctcagttcaaacctgaggagataactgccatcatgaatgactttaatgagcctggatcacttgctccaactggattgtatctcggtggcaccaaatatatggtcatccagggtgaaccccgtgctgtcatt

SEQ ID NO: 51149 - DNA, 422 bp, Glycine max
  Clone ID: LIB3109-001-Q1-K2-B7
ggagattggcagaataaggtcggaggattgagggagaatcgttcgagactgcaaaatccaaaaccaaacacaacgcacaacattcgtcattcaccgccttgtcttgtcttcttctgtctccgaatcacggaatctctctgaatcgcgggattaagagaggaatatgcaacagaggctaaagttgcagcaacaacaggccctcatgcagcaagctttgcttcaacagcagcagatgtaccaccctggcatgctcgccgctgctatgtctcagatggagcctgttccaagtggaaatgtgcctcctggttttgatacgtctgcatgccgtagtgtttatgtaggaaatattcatgtaaatgtcaccgataaacttcttgcagaagtttttcagagtgctggtcctcttgctggctgcaagctca

SEQ ID NO: 51150 - DNA, 369 bp, Glycine max
  Clone ID: LIB3109-001-Q1-K2-B8
gacacaccatccgttctagtctcaacttctgctcttccaactcctacaacgctgttctctgcactcatgggcaaggtcaagatcggaatcaacggatttggaagaattggccgtttggttgccagagtcgctctgcaaagagacgatgttgaactcgttgccgttaacgaccctttcattaccaccgattacatgacatacatgtttaaatacgacagtgttcacggacactggaagcatcacgatgtcaccgttaaggacgagaagacccttctcttcggtgacaaggcagtcactgtttttggacacagaaaccctgaagagatcccatgggggtcaactggagctgacatcattgttgagtccacc

SEQ ID NO: 51151 - DNA, 407 bp, Glycine max
  unsure (1)..(407): unsure at all n locations
  Clone ID: LIB3109-001-Q1-K2-B9
ggaggtaaagagaaggagtgaccgaagcgaagatgttacccacagcttccaaaggacgttcttcttcctcctcctcttcctctcgacctaacaatcccatgctgcttccctacctccgcagaatcatcaagtggcaacaaatggatattgaatatactttttggcaaatgcttcatctatgtacgtccccgaaagttgtctatcagcatactaaatatcacaaacaaaccaagaatcaatgggcacgtgatgatcctgcatttgttgtgatctgcagtcttcttttggcagttgcaactttggcttattgtgcggcgtatgaccatagtactgcacatacacttcttgntatcttctcagtgttggttttccactttatattgactggtgtatttcttgcaacattt

SEQ ID NO: 51152 - DNA, 338 bp, Glycine max
  Clone ID: LIB3109-001-Q1-K2-C1
gtttaatctttttggctgtgttatgcttctcagcactgtcactgagtcgttgtcttgcggaggataatggacttgttatgaacttctacaaggaatcatgccctcaggctgaagacatcatcaaagaacaagtcaagcttctctacaagcgccacaagaacactgctttctcctggctcagaaacatcttccatgactgtgctgttcagagttgtgatgcttcacttgtgctggactccacaagaaggagcttgtctgagaaggaaacagatagaagctttgggttgagaaatttcaggtacattgagacccatcaaagaagctttggaaagggaatg

SEQ ID NO: 51153 - DNA, 436 bp, Glycine max
  unsure (1)..(436): unsure at all n locations
  Clone ID: LIB3109-001-Q1-K2-C12
gttagaagtggcttcagagttagagcagcttaggttgagtaggtggactacattgggagacaacaattgtgcaacctcgacggaattgtcctcctgttcttcctcgtcaagtgaatgtgagaaaccactaagcattgcaacgaggaattttggggcaaagggtaaaggccacctcaagctccaaactgggcctattaatttaaagtcattacaaaggcccaatagtaactcaccagtctcggtgcaagaccaagacttgtggttgagtgagcagagctctccttcgtcaagtagttttccaagcaagtcatttgattgatccaatacaactatcttttttatggaatagtttgtttgtaaatcatttgaattacctcgaaggaggcaaacaaacaaacangcaaacatgaattaatttctcactaaggtgttcggg

SEQ ID NO: 51154 - DNA, 418 bp, Glycine max
  Clone ID: LIB3109-001-Q1-K2-C2
gaatcaagtattggagcaacaaatgccttcctttaatcggccttctaaaattgtatgtagagtggtcaatgttcatcttcgagctgaacctgaaacagatgaagtatatgcacaaataactttgcttcctgaagcagatcaaagtgaggtgacaagccctgatgatcccctgcctgaatctccaaggtgtacagtccattcattttgcaagacactcactgcttctgacactagcactcatggaggtttctctgttcttcgaagacatgcagatgattgtttgccaccactggatatgactcagcagcccccatggcaagaattagttgcaactgatctgcatgggaatgaatggcattttagacattattttcgagggcaacccaggcgccacttacttgacacttggtggagtgtc

SEQ ID NO: 51155 - DNA, 296 bp, Glycine max
  unsure (1)..(296): unsure at all n locations
  Clone ID: LIB3109-001-Q1-K2-C5
tgaccagcacnntggataagttggaacctgtttaatctcataatcaaagttgtgcctagattgggctggctttcttcatntttgcaatcattcacttntgaaagaagatactccggcagagcttctcaacttgacagcttcggaattttgtgtgaaatgggtattatttgaagggttcaaatcgcattcccttaatatttgaaccgagactttcagtgtatggggccataggcttgggactcaagacttcttgcttggtgttactcttgngtgatttgttcttggatggcatacta

SEQ ID NO: 51156 - DNA, 352 bp, Glycine max
  Clone ID: LIB3109-001-Q1-K2-C7
gacactaaacaagttaaaagaagagcatcactggactaacaaagcagccctatgtcgaatgtggtttgtgtcaccggagccagcggctccatcggatcatgggtggtcctactcctcctccagcgtggttacaccgtccatgccaccgtccaagatatcaaggatgaaaatgagacgaaacatttggaggaaatggaaggagcaaagagtcatctccatttttttgaaatggatcttcttgacatcgactacattgccgctgccataaagggttgttccggcgtaatccaccttgcatgtcctaacatcatgggtcatgtcgaagatcccgagaaacagatattggaaccgg

SEQ ID NO: 51157 - DNA, 328 bp, Glycine max
  Clone ID: LIB3109-001-Q1-K2-C8
tctataacaccacatattgggatactaaacaagttaaaaaaacaacgtcactgttctatctaaacagcgcctacgtcaaaattaattttaatcacctaaaccatcttctccatcatatcatacctagtactactcctcctccatcttttttacacctttcataccaccttccaacatatcatctattaaaattaaactaatcactttgatctaatataatgatcatacatttatcttcatttttttcaaatgtatcttctttacatctactatatttccacttccataaaagtttattccttcctaattcaccattcatatcctaaca

SEQ ID NO: 51158 - DNA, 326 bp, Glycine max
  Clone ID: LIB3109-001-Q1-K2-D11
actgctgagagcgctttacagagacatggccgggtataatcagatggaaacccgatatgaggcccaagaagaaacagggcggaaacttgatcatggagatatctttaggccaccagtccatacatatctgttttgcgtttatgaccgtactggtgttcagatctttgcaacgacacttgtgacattgatatttgctctgctagggcatttgtattcatataatcgtggaggtctcatgactgctaccgctcagctgtgggtctataaggacttattaactggctactcctcaacacgtttgtacacgatgttcactgacacagaat

SEQ ID NO: 51159 - DNA, 432 bp, Glycine max
  Clone ID: LIB3109-001-Q1-K2-D12
ggaaacgaagcgaaatttccacctgcatcatgttcaaacctgcgcttcttttgaaccgatttgtgctgttttgttagtgaagcacatcgagtgcaaactgtcgaacaggcatggcaagcctgttgacaacatcagccatcacctattctcctctcaacaatggttccaaggatttcagaaagtcagggaattcttctaaaggaaggtgttgcataaaagcaatggggatagagaaatccttggaggaattgtacaatgtgaaggtggaaagaaaagtgtctcctgagaaactagctgagcttggagtttcaaaatggtcggtgtggaagactgggaaaagcaagttgccctgggactggcaggtagaccaactggtgtacattgaagaaggcgaagtgagagttgtgcctgaagggagcaaccgtttcatgc

SEQ ID NO: 51160 - DNA, 162 bp, Glycine max
  Clone ID: LIB3109-001-Q1-K2-D3
gcttcacgttgggtgcaaatatctcaataatgggactgggtatttctgtaagtggggttgagctactcacactctttcaatacaattgtcccaaatttagaatctgttacttttaaataaatcgtctgctcatatttctccactttttacaaattaaatgct

SEQ ID NO: 51161 - DNA, 432 bp, Glycine max
  unsure (1)..(432): unsure at all n locations
  Clone ID: LIB3109-001-Q1-K2-D5
aaaaggacaacaaatgggggggaaaaaaaaaaaaaatacagcgggggtcaagaaaatcctaatcctcttgggctctttgtgtctgaagcttcactcgaaagtggaaacactgctctcatcgactcgaaagcggtttgcggtttccgtcatcggcgagacgccgccgccgtctggaattggaagaccgtcgcagtagtcgcaccatcgcagcacgcattggaaacggaaatgggttcttgtgctacatcatctgttctgactaatcaatttattccgtggtctacaaccaatactgaatctcccttggactccaaattgggcgtcatatnttataaaatgtacagaaatacaaacaaaagacaactcagtctctcttttgcttgggatagttataaaatcaggagtattggtgcgataaatcatacaaagatg

SEQ ID NO: 51162 - DNA, 431 bp, Glycine max
  Clone ID: LIB3109-001-Q1-K2-D7
ggacctggggttggtcaaggcactgctgcagggcaagctgtagaagggattgcacgacaaccggaggcagagggaaaaatacgaggtactttattgcttagtttggcttttatggaagctttaacaatttatggactggttgtagcattagcacttttatttgctaatccttttgtttaatcctaaaaaaatagaaatacatatccttttttccgtggacttgctttaccggtcttgctttttcgaattctatttatattaatatttcactcctataattctttatccgttcggacaagaacacaggggaaggactaattgaaaggtgaagaattcacatactgattcgccctctttcttctcttttttagtccaatgacccccccttttttttaagataatttttctcaagtttaaaactagagagattt

SEQ ID NO: 51163 - DNA, 348 bp, Glycine max
  Clone ID: LIB3109-001-Q1-K2-D9
ggttctgaaaaacgtaaatacgagttggcaagggctgactgacaagaaattcggataaataaagcaaagctaatcaacatgcttgatgaggtggcgcaaaggttcacgcattaccacaaccagatgaaaatagtgatatcatcatttgagcaagctgctggaatatgctcagcaagaacttacactgcgcttgcactggaaacaatcacgaagcaatatacgtgtttgaaggatgcaataacagtgcagattagagctgcaaacaagagtttgggagaagaggattgttttggtgctaaaactgaaggatctaggctcaaatatgaggaccatcatctaatgcaacag

SEQ ID NO: 51164 - DNA, 435 bp, Glycine max
  unsure (1)..(435): unsure at all n locations
  Clone ID: LIB3109-001-Q1-K2-E1
ggttctattgtgggatggttggtggttgaaactcgtggttcttctttggtggttctgggtttgcgtttgttttttctctcacctgaaaatgtcttgctgcggtggtaactgtggttgcggaagctcctgcaagtgcggcaacggctgcggaggctgcaagatgtacccagacttgagctacactgagtcaaccaccaccgagaccttggtcatgggagtggcacctgttaaggctcaatttgagggtgctgaaatgggtgtgcccgctgagaacgatggctgcaaatgtggaccaaactgctcctgcaacccctgcacttgcaagtgaggtgttgggagagcaagcttctagcagagatagcccttaattaggaataatgattaactattaatgtgtagctaanaacttatgtattatgtctgtgatggttttcg

SEQ ID NO: 51165 - DNA, 239 bp, Glycine max
  Clone ID: LIB3109-001-Q1-K2-E11
acccgtccgaacacgtccgagaggactacaaaaggggaaccacaagctacggagaggggtatctaatagggaccgctgataactctaaatactacaaatagaccacatcaatccccttcttctaacctttagagatgtcatcctgatctttctatatcgctggcataacataatttgtgtccactttcttgaacctttacataaaacttctcaactatgatgcgtcatattcaaatcta

SEQ ID NO: 51166 - DNA, 373 bp, Glycine max
  Clone ID: LIB3109-001-Q1-K2-E12
gccgccagaaaatattaaaatcctaggggctgggttggatttggtgaatggtttaatgcaaatgaaaccaccattctcacattctacttcccttctaagaggcaaagcacgcctctctccctacctttttaccctcatagatttcatcctctttgtcgctatcctctatggcgaagacttcatgtgcatcttcggtcaacagatccaaaactactataattaccctcacaaactcttctccacaaccggtgagttcatagttcactcactttttttcatttgaattactcagactcagttacatttctagttcatatgattatcatcatgcgattatgtatgctaattcaattcgtcaagcttttgtctcatt

SEQ ID NO: 51167 - DNA, 355 bp, Glycine max
  Clone ID: LIB3109-001-Q1-K2-E2
ccgggcgaccacgcgtcgtacggtgtaagaaagcttcgaaggggcctccaaatgggggaacctgtaaaaaagggtcggtgttttagaaacgtgggtgttacaaaagaaaggaggaaaagacccatggtcatgagcatgctactcactattgctgcagctgctattgttgctcatacatccaaccatcatctgcacccttacctgtatgctgacgcattgattttgaatacagcagctatcgaacattcttaccaaccccggagccggagcctgagccggaaccgcaaccacaagagattgccagcctaaactcatcgtatcagcaatatatcgtatcagttatcgaacctgttta

SEQ ID NO: 51168 - DNA, 344 bp, Glycine max
  Clone ID: LIB3109-001-Q1-K2-E6
gctgccgaaaaggtcaatgaactttttaatcgggttgaggccactctggaaactctgcttcttatactcatctcactggggattcctttgcgaattatggataagctctcgtgcagatatgtgttataatcaataacatcggcgttctgattgtttacatgattataattggtgatgtgctctctggaacatctgtcagtggagatcatcactatggaatccttgaatgattgtttggtgtgcaatggtggacaggccggacatttagtgaactttttactacacttgccatatgtgtacctcttgcgagcagtaagctaattgattcattgagattcacgttc

SEQ ID NO: 51169 - DNA, 298 bp, Glycine max
  Clone ID: LIB3109-001-Q1-K2-F1
cccttccgaccggttgctttagacaacagaaggggaaaacacagtgaggaaactgaaccctgttgtttgttttttcacctgaaaattcaaaccaatatatattttgagtattttttttcctttgatttcgtggaaagttattatcacagaatctgagggttttgtagacagaacttcaggtttaacaatgaagaaggttcccaagaacagctgcaagtctgcatcacacaggctctttaaggacaaggcaaagaaccgtgtggatgacttgcagctgatgttcctggatctgcagttt

SEQ ID NO: 51170 - DNA, 406 bp, Glycine max
  unsure (1)..(406): unsure at all n locations
  Clone ID: LIB3109-001-Q1-K2-F10
ggagataattcaccacacaccgtttcactccatttcccacgtctttctagggtttccctgctatcttcctcaattcgaacccttcgcctttccacccttcgatttcttatcttccaattcgtcaagcgtatccgcgagtctcgatttccttctctgcaagcggattggtcgcttgtgaaggaggaacatgtattcaagagggagcggcggttacggccaatcgtacactggtcaatccgcatatggccagaacctgngtggcaattattctgggagttctgttggagggcatgatgtgggtcagcattctgtggcttctaggcattcaacaattttaggtggttctcacgacgttgatgttggtgggtataggccttcggctgcgacccagtatgggggacagtat

SEQ ID NO: 51171 - DNA, 348 bp, Glycine max
  Clone ID: LIB3109-001-Q1-K2-F12
ggctgcatagtgagagtgagagatggagcagtggttgtggagggtgttgcctttgcttacaatccttgcttcctttggagcgttcttctacttgcatgattcttacacagcacagttatttcctctcataaagttaccgcgggataagtgcagccttcttccccatcgccacttatggatatccagcaaacgtattgcgaccccacaagggatcatttctggttcagtggagataaatgatgggaaaataatatctgtcgttgagggacatgctattcatgggaagcctcagcatgaagaacttattgattatggagatgctgttatcatgcctggcttgattgattt

SEQ ID NO: 51172 - DNA, 171 bp, Glycine max
  Clone ID: LIB3109-001-Q1-K2-F2
aaaattcataccaatttatatttttattatattttttcctttaatttcttttaaagttattatcacataatctcatctttttctacacataacttcacctttaacaattaacaattttttcttatacattttttaattctcttttacacattctttttaattttcaattct

SEQ ID NO: 51173 - DNA, 408 bp, Glycine max
  Clone ID: LIB3109-001-Q1-K2-F7
gacacacaacttgtttcaaggaaaatggctcgggttggatttcttctgggacttttcttaatggtcactcatgtcaaggggtatggttttggaggttggaccaatgcacatgccaccttctatggaggtggtgatgcttctgggacaatgggtggagcttgtggttatggaaatctgtatagccaaggttatggaactgatacaacagcactgagcactgctctgttcaacaatggcttgagctgtggtgcatgctatcaaattaaatgtgtgaatgatccacagtggtgcctttctggctccatcatagtcactgccacaaacttctgtccacctggtggttggagcgaccctgccaatcaccactttgatctgtctcaaccttgtttccagcacattgcttaatac

SEQ ID NO: 51174 - DNA, 305 bp, Glycine max
  Clone ID: LIB3109-001-Q1-K2-G12
ggttgtggtgtaataaaagtaaggtcaaggtcggtcaaagcgagactcaaaccaaaaggtttattgctattaatatttggctctgtttttcagtgtcaaattgcattattgcaataatcaaatgcactaaccacactccatcacccccatatataccccttctcctctcacactaattaacacactcatcaaaaaacccttctttctttcaggttcattacttgatcagtgtcagaagggtagttgcaaattgcaatggctaagcatgatgttgaaggtggttccttctcaacaaaagactacca

SEQ ID NO: 51175 - DNA, 355 bp, Glycine max
  unsure (1)..(355): unsure at all n locations
  Clone ID: LIB3109-001-Q1-K2-G4
cttgacgagtctctggcttgaaagggttccatccctcagttatcaggcactgtcttgcaaaacttgggcaaattatttgtagtcctctgcaagattaataatagtttggatgggaaacagttccctaacctctctgagctcactcttgatcactgtgttgatctaactcaatttccctcaagcatttgtggaataaagtcactacaaaacttgagtctcaccaactgccacagtttgagtcaactacctgttgaatttggcaaactaagatcactagagatcctnncgttatatgctngtccatatctagaaacactnactnctagcatgtgtgacatgaagagattgaagtata

SEQ ID NO: 51176 - DNA, 369 bp, Glycine max
  unsure (1)..(369): unsure at all n locations
  Clone ID: LIB3109-001-Q1-K2-G6
ccggaggggcattccaattggggaacaaccatttatctaacggatgagagactcctntccctgggggtacgagattaacaatacctcgcgatgcacctagtggcttaacatacctgcactaggaaatggatttccagataattttcagagatttcaaatcttcaaatattctattgcatgaacagtggaatgctaaactatcagactttgggttagcaaggttgggaccatcatattgactgactcatgtcttaccagcgggtgtaggaacaatgagatatgcagctactgaatatgtgcaaactggacgtctaacaataaagaatgatgtatggagctaccgtgtcttccttttatgaactcataact

SEQ ID NO: 51177 - DNA, 382 bp, Glycine max
  unsure (1)..(382): unsure at all n locations
  Clone ID: LIB3109-001-Q1-K2-G7
gatccaaaggaggcacgagctggtatcagggaggtccactttcttccattcaatcctgtggacaagaggactgctctaacttacattgattctgatggaaattggcatcgatctagcaaaggtgctcctgagcagatattgaacctctgcaactgcaaagaggatgtaaggaaaagggttcatggaacgattgacaagtttgctgagcgtggactccgttctttaggtgttgctagacaggaagtacctgagaaaaacaaggatagtcctggtgcaccatggcaannttgtggtctgctaccactttttgatccttcaaggcatgacagtgcggaaaccatcacaagagctctgaaccttggtgtgaatgtaagatgatcac

SEQ ID NO: 51178 - DNA, 214 bp, Glycine max
  unsure (1)..(214): unsure at all n locations
  Clone ID: LIB3109-001-Q1-K2-G8
tgtggaccaagaaggacctgcatctatacttacnacttgattctgtatggaatattggcatctgatcttagctaaaggtgctttccttgagcatgatattgaactctctgcaacttgcaaacgaggatgtataggataaagggttcaatggaaccgattgacacagtttgcttgagtcgtggacttccgttactttaaggtgtttgcttagaca

SEQ ID NO: 51179 - DNA, 380 bp, Glycine max
  unsure (1)..(380): unsure at all n locations
  Clone ID: LIB3109-001-Q1-K2-H1
ggttgcaaaagacaacggatggccatatgaccagtaaaacctggtatgttaattgaaactggacctcatagggaagaaaatagatttatgaatggaataaaatatgcagtatttacagacaaaagtattcggttattggggaaaaatcaatatacttttaatgtcgaatcgggattaactaggacagaaatcaagcattgggtcgaactcttctttgatgtcaaagtaatagctatgaatagtcatcgactcccggtaaagggtagaagagtacgaccctatatgggacatacaatgcattacagacgtatgattattacgcttncaaccggttattctattccacctcttagaaagaaaaaacttaatcaaatacttat

SEQ ID NO: 51180 - DNA, 376 bp, Glycine max
  Clone ID: LIB3109-001-Q1-K2-H10
ggctgcaaatgtggaccaaactgctcctgcaacccctgcacttgcaagtgaggtgttgggagagcaagcttcaagcagagatagcccttaattaggaataatgataaactattaatgtgtagctaaaaacttatgtattatgtctgtgatggttttcgtgcactctggtgttttgtgttaaacaaacatccttagaataaagtggtcatgtcttgcctttcagcaagttcaagtgttttggacttgtgatgggtgtgttaagctcatggttgcttcttttttttttttttttaatggttggtaattggtcgcttctgtataaagttcggctaatctgaattatgaatctctgcttataatattaaatactattacc

SEQ ID NO: 51181 - DNA, 344 bp, Glycine max
  Clone ID: LIB3109-001-Q1-K2-H11
ggggctgcgaggtgaggtcacaacaccttccgactgtggtgactcatgcggaggggtgccgtagcaagtatgatttcagcagctatgcgcgcaatgaagcagtcttgatgtcatagcgcttcattgcatcaggggtgaggtgctagggagtaataggcatgcagaccttccattggttcgtttgaccaaggtctacctcggcctgacaaaggctcgtcgcttgggcttcaaggctaagcatggctatgtgatttaccgtgttcgtgttacgaggggtggccgaaagaaaccagttcccaaaggtattgtttatgggaagcccacaaaccaatggagtacccaac

SEQ ID NO: 51182 - DNA, 424 bp, Glycine max
  Clone ID: LIB3109-001-Q1-K2-H12
atgccagaagacggcggaagggggagacagagagactgaactccgtggtagaagcgtaaggtgagtagtaatggtcatggatgttgcaaatcaacgccaggctatgcttccacactggaagccatttctggtcccagagagtctctcatttatgtaacctctgtctacacagggaccggaatagagaagccagactatttggcgacagtggatgtggatccaaactctccaacttattccaaagtcatccataggcttcctgttccttatttaggtgacgaattgcatcacacaggctggaattcatgcagctcttgccatggagacccctcagcagaccgacgatttctcatcgtacctgcactcgtatcaggtcgagtatatgtggttgatgtgaaaacaaatccaagggctccatctttgc

SEQ ID NO: 51183 - DNA, 353 bp, Glycine max
  unsure (1)..(353): unsure at all n locations
  Clone ID: LIB3109-001-Q1-K2-H6
ggggaaggaaaagagtggtgtacgacactgctgcttcgcactcgatccgttacccctgcccgaacatagcanaaccaaacgacgcccaggtttcggaattgtgttctaggtttttgagtttcgattccgatcgaccgacgatgctggccaatcatttccaaaacggcatcgaaacggcgaggctcgtttggtcgcggattcctaattcggaagaatcgcagctcctcgacgacgccgttggcatccttaagaagaacgacggaggcggtgtcgagagccttgactatgaagtcattgagaattttgcttatcgtgaggaacaggcgcagagagggaagctgtatgtgagctat

SEQ ID NO: 51184 - DNA, 414 bp, Glycine max
  Clone ID: LIB3109-001-Q1-K2-H7
ggagatgggacttgtaataatgggcagttctatgaatgcctgaacatggcagctctgtggaaattgccaattgtgtttgtggtggagaataatttgtgggctattgggatgtcgcatctcagagcaacctcagatcctcagatatggaagaaagggccagcatttggaatgccaggggttcatgtagatgggatggatgttttgaaggtcagagaggtggcaaaggaggcagttggaagggctagaagaggtgagggaccaactctagtggaatgcgagacctatagatttagagggcattcattggctgatcctgatgagcttcgtgaccctgctgagaaggaacactatgctcgtagggaccccatcactgcattgagaaataccttttgagaacaattagccaatgagcaa

SEQ ID NO: 51185 - DNA, 410 bp, Glycine max
  Clone ID: LIB3109-001-Q1-K2-H8
ggtggccaaatcatggacaatgatgatgccatcacctatgcagcatataccattaccatcttctctaatgaataatatttccactcacaattcaatcttgtgttgtgactttaactatgtgaatttgagcaaccaaagaggtacaaggcttttgtgttcagcaaggaggcaaattagataccaagatgatggggatgataaagatagtgatgaagagtatgggcacaatgaggagattgccaagttggagtcttatagtcaatcagcaaaaggagaagtactccttgtgcatgcacttgtggaccaggaggaagttgatgtgcttatcttcaaggggttctcttcatgcttgagctacagtacctcccctgacccaacaagaagcattcttccagctagggcagtgatag

SEQ ID NO: 51186 - DNA, 307 bp, Glycine max
  Clone ID: LIB3109-001-Q1-K4-A1
ggtaagatcagaggaaagcaaagtagacgagtgattgcgttgcgattgacgacgacgaggaatcatgtcttccggcggcggcggtggtaagccgttcttctgccacgtgtgcagtcagaggattacgtgctccgatgagtcggaaccattctgcccgatgtgtatggaaagtttcgtagaagaatgcaaccctaacaatgccaaccctaatctcttgcccgacagtgatgaatcttcagatcccgaactacccttgcaccgcttctcacttgtccctctcttgctctcatcagtctctatgtcccga

SEQ ID NO: 51187 - DNA, 304 bp, Glycine max
  unsure (1)..(304): unsure at all n locations
  Clone ID: LIB3109-001-Q1-K4-A3
ggttatcggtggaggtgatggangggtcatacgagaagtagcacaccattcttcagttgaaaagatagacatttgtgaaattgacaagatggttgttgatgtctccaaacaatacttccctgatgtagctgttgggtatgatgatcctcgtgtgacacttcatattggtgatggagttgcatttctgaaggaagttcctgaaggaacttatgatgctgttatagtggattcatccgatcctattggtcctgcccaagagctttttgaaaagcccttcttttcgtcagttgcaaaggctcttcgt

SEQ ID NO: 51188 - DNA, 407 bp, Glycine max
  unsure (1)..(407): unsure at all n locations
  Clone ID: LIB3109-001-Q1-K4-A4
ggcagagttaggaattgaagcatgggaagagggaaggtggtgctggagagaatacagagcaagatcaatcgccaagtaaccttctcaaagcgcagaaatggtttgctcaagaaagctttcgagctatctgttctatgcgatgctgaaatcgctctcgtcatcttctccagccgtggcaagctttttcagtatagtagcactgaaatcattgagaagtatcgtcaatgctgcttcaacatgtctcagactggcgatgtagctgaacatcaatcggagcagtgcttataccaggagcntttggtattaagagtcaagcatgagtcactccagcggactcaaaggaatcttctgggagaagaactagagccacttagcatgaaagaattgcatagtttagagaaacaact

SEQ ID NO: 51189 - DNA, 393 bp, Glycine max
  Clone ID: LIB3109-001-Q1-K4-A6
gataacaaaagagttaagtgaattaaaaacccaggggaggttcatggccaaaggtaaagatatccgagtaattgttattttggaatgtaccggttgtgataaaaagagtgttaataaggaatcaacgggtatttctagatatataactaaaaagaatcgacagaatacgcctagtcgattggaattgagaaaattttgtccccgttgttgcaaacatacaattcacgcagaaataaagaaatagatcaaattgatcgcttgtgtgttacccttcgaaccaaagaacttaacatgtaaaatgatctatttttcttatctatatagatagatctatctgtattctatcatttacagttgaatatatacaaatatcagtatataacaacatatatt

SEQ ID NO: 51190 - DNA, 403 bp, Glycine max
  unsure (1)..(403): unsure at all n locations
  Clone ID: LIB3109-001-Q1-K4-A8
ggtgtaagaattagcaaaagacaatgattcttcaggggagaaaaatcaagttcaaccagggcttagtggtcctctgaaaaagagaattcagcagcttgttgactctaatcctgtcatgctcttcatgaaaggaactcctgaagagccaaaatgtggatttagcaggaaagttgttgttgtgttgaacgaagagagagtcaagtttggaagttttgatgtcctatcagactcagaggttcgtgaaggcttgaagaagttttccaattggcccacatttcctcagctttactgtaaaggagaacttcttggtgggtgtgacatagcaattgctatgcatgagagtggggaactgaaggaaagttttaaagatcatggaatngatactactaatgaagcaaaagag

SEQ ID NO: 51191 - DNA, 388 bp, Glycine max
  Clone ID: LIB3109-001-Q1-K4-B1
gggaatgttgagacatgactttgacaaccgcgtgttggtgttcgctcgccgctgcttctctctccaccgccgccagtttccgccggaataaatgcaccaccagcaagatttttcattcctcttccacgtgcatgccctctttcttgcatgatcatcactaccactctttcttattgcgagttgccaatgatgctgatagaagtgaagtgtcatctgatactgcaatcaagacatcgtattcagaagccgataagatggttgatggtatggactttggtgagctttgcaatgagtttgagtgcatcagcaatcccttggtagaatcactgcaagacacttgcacgagatatacttgagctaatggagggaaatcaagcacttggaatct

SEQ ID NO: 51192 - DNA, 377 bp, Glycine max
  unsure (1)..(377): unsure at all n locations
  Clone ID: LIB3109-001-Q1-K4-B2
aaaaggacaccggagggggtttaaatggaatgggtccaggggttatgtaaaggcttggaaccgtttaacagggaaacgagctccaaatattctcacaattgcgttgaaaagatttcagagtgggaggtttggaaaacttaacaagagagtaactttccctgagactttagatcttagcccttacatgagtgaagctggagatggatctgatatttataagctatatgctgttgtagtacatattgatatgctgaatgcttcattntttggccattacatatgcttcatcaaagatttatgtggaaactggtatagaattgatgattggaaagtctcgagtgtggaattagaagaggtgctttccagngtgcatacat

SEQ ID NO: 51193 - DNA, 406 bp, Glycine max
  unsure (1)..(406): unsure at all n locations
  Clone ID: LIB3109-001-Q1-K4-B3
gagaaaaaagggttaagaagtaaaagtttggtgtgaggtgtgagtgttctgcacgcaccgaatcaacaataatttctcaaacagcgttgtaaaagaaacacattagactaggcagataactatggctgtacattctgattcggcttcatccgagaagaaatcaagcaatggagtgaatgagttgctgacttttaatgctgagaacatgcaaagcaacatgaaaattatctattacagccgaacatttttatctataattggtggagttgttgctggtattttgggatttacaggcttgaaaggatttgtgttttacttacttctcatggcatttacttcacttgggctcgtggccaaagcanagttttccacccacacatactttgactcctggaatcgagtgcta

SEQ ID NO: 51194 - DNA, 433 bp, Glycine max
  unsure (1)..(433): unsure at all n locations
  Clone ID: LIB3109-001-Q1-K4-B4
ggaagcagtggaacaaagcaaggaagagaaagaaatgggtttctctctaaagagtctccgctgaactttttggtttcttgaagatgtcgttactctccgatcttatcaaccttaacctctccgacatcaccgataaggtgatcgccgagtacatatgggttggtggatctggcatggatatgaggagcaaagcaaggactctctcgggactggttaatgacccttccaagcttcccaagtggaactatgatggttccagcactggtcaagctcctggacaagatagtgaagtgatcttatatccacaagcaattttttcgggatccattcangaagggtaacaatatcctggttatgtgtgatgctaacactnctgctggggaacccatttctaccaacanngagaataaagctgcaaagatattcagtaatc

SEQ ID NO: 51195 - DNA, 401 bp, Glycine max
  Clone ID: LIB3109-001-Q1-K4-B5
gacggacgagggtttcgtttcgggtttgacgttgttcacaatcactttctgcgcttcactcactcccttcgtgcggttttctttctttgtcgaactcgtgcgaaaatgcgtgagattcttcacatacagggagggcaatgcggaaaccagatcggagcgaagttctgggaggtggtgtgcgcggagcacgggatcgattccacggggaggtaccagggggacaacgagttgcaactcgagcgagtcaacgtctattacaatgaagcgagttgcggaaggttcgtgccgagggcggtgctcatggatctagagccagggaccatggacagcgtcagatctggtccctacggtcagattttccgacctgataacttcgtttctgccagtccggcgccggaaac

SEQ ID NO: 51196 - DNA, 427 bp, Glycine max
  Clone ID: LIB3109-001-Q1-K4-B6
ggcagccaaagaaaagaaaatcctcaattttctgagcaaccaaacactctctctctgtctctcgaaaattctcagtttgcagagaaaatctgaatcatgtcgtggcaagcgtatgtcgacgatcaccttctgtgtgacatcgaaggtaaccacctcactcacgctgctatcatcggccaagacggcagcgtttgggctcagagtaccgacttccctcagttcaaacctgaggagataactgccatcatgaatgactttaatgagcctggatcacttgctccaactggattgtatctcggtggcaccaaatatatggtcatccagggtgaacccggtgctgtcattcgagggaagaagggtcctggtggtgttactgtgaagaagaaccgtgcggccttgaccatggcatttatgatgaccaatgact

SEQ ID NO: 51197 - DNA, 414 bp, Glycine max
  Clone ID: LIB3109-001-Q1-K4-B7
ggagattggcagaataaggtcggaggattgatgtgagaatcgttcgagactgcaaaatccaaaaccaaacacaacgcacaacattcgtcattcaccgccttgtcttgtcttcttctgtctccgaatcacggaatctctctgaatcgcgggattaagagaggaatatgcaacagaggctaaagttgcagcaacaacaggccctcatgcagcaagctttgcttcaacagcagcagatgtaccaccctggcatgctcgccgctgctatgtctcagatggagcctgttccaagtggaaatgtgcctcctggttttgatacgtctgcatgccgtagtgtttatgtaggaaatattcatgtaaatgtcaccgataaacttcttgcagaagtttttcagagtgctggtcctcttgctggct

SEQ ID NO: 51198 - DNA, 383 bp, Glycine max
  Clone ID: LIB3109-001-Q1-K4-B8
gacacaccatccgttctagtctcaacttctgcggttccaactcctacaacgcttgtctctgcactcatgggcaaggtcaagatcggaatcaacggatttggaagaattggccgtttggttgccagagtcgctctgcaaagagacgatgttgaactcgttgccgttaacgaccctttcattaccaccgattacatgacatacatgtttaaatacgacagtgttcacggacactggaagcatcacgatgtcaccgttaaggacgagaagacccttctcttcggtgacaaggcagtcactggttttggacacagaaaccctgaagagatcccatgggggtcaactggagctgacatcattgttgagtccaccggagtttcaccgat

SEQ ID NO: 51199 - DNA, 378 bp, Glycine max
  Clone ID: LIB3109-001-Q1-K4-C1
gtagtgtgcaagagtgaagagcgaagagaatggctcggaagggtttaatctttgtggctgtgttatgcttctcagcactgtcactgagtcgttgtcttgcggaggataatggacttgttatgaacttctacaaggaatcatgccctcaggctgaagacatcatcaaagaacaagtcaagcttctctacaagcgccacaagaacactgctttctcctggctcagaaacatcttccatgactgtgctgttcagagttgtgatgcttcactgttgctggactccacaagaaggagcttgtctgagaaggaaacagatagaagctttgggtgagaaatttcaggtacattgagaccatcaaagaagctttggaaaaggaatg

SEQ ID NO: 51200 - DNA, 416 bp, Glycine max
  unsure (1)..(416): unsure at all n locations
  Clone ID: LIB3109-001-Q1-K4-C5
gtagccaaagtcattggaacggttataacagtttcaggagctatggttatgactctgtacaaaggccctgccttccaaatcataaagggtggaggagccatcagcaaccatagcaactctagcagtactagtaccaccgaaccctctgaccagcactggatagttggaactgtttatctcatatcaagttgtgctagttgggctggcttcttcattttgcaatcattcactttgaagaagtacccggcagagctctcactgacagcttggatttgtgtgatgggtattattgaaggttcaatcgcatccctgatatntgaacgagacttcagtgtatgggccataggctgggactcaagacttcttgcttgtgtttactctgaggtgatttgttcttgaatggcatactatgtaca

SEQ ID NO: 51201 - DNA, 119 bp, Glycine max
  Clone ID: LIB3109-001-Q1-K4-C6
actacagaaggggtagataatgcaataggatcggacataagagagtcatgtgctatagatctgaatgtatacatatgtgatgcataatatgtgagtatatagagtgggatccttaactg

SEQ ID NO: 51202 - DNA, 417 bp, Glycine max
  unsure (1)..(417): unsure at all n locations
  Clone ID: LIB3109-001-Q1-K4-C8
ggtggactagaaagtagaaacacaaagagaagacgagtcctcgagattcctaaaccaactttgcaatcgcacctcgaatcaatcgacactcagcggaaaccctagaaagtaataataataataataacaatagaatgcgaatttattagagattgcaaaaggtgggaagaggaatggcgaagcattcggtggcaatggcgaagaagcggtggctgataatgttggcggcattcctgtccgtctcaacagtgacggtgctcttaatgagatccaacaactccgattcctgcaacaccaaccattttactattgcacaagataataaccagattcgttccnctgtccaactcactaatgccgctttcagcccccttaatttcatgaagttcaagctaagtctcatggtttcgcacgagc

SEQ ID NO: 51203 - DNA, 131 bp, Glycine max
  Clone ID: LIB3109-001-Q1-K4-D3
gcttcttgaggggtgcaaatatctcagtaatgggtgggattatttctgtatctgggggccaggtactcacactctctcaatcaaatgtaccaaattaagaatctgatactcttaacgaaatcgtctgcaca

SEQ ID NO: 51204 - DNA, 335 bp, Glycine max
  Clone ID: LIB3109-001-Q1-K4-D4
ctcctattgcaggtttattttactctgtgtttcgccgcggttgctgcggctgttggggcttaccttcatgtcctcttgaacattgggggttttcttactacattggcatgcgtgggaagcagtgttcggttactctcgacacctccttttgaagagaggaaaagagtgactttgttgacggccgaatgactgtttcagggtgcctctattggacccttgatagatttggctattcaaatcgatccaagccttatctttagtgcatttgtgggaacatgcttggcctgtgcatgcttctcatgagcatacttggttgctaggcgtaaggagtacct

SEQ ID NO: 51205 - DNA, 415 bp, Glycine max
  unsure (1)..(415): unsure at all n locations
  Clone ID: LIB3109-001-Q1-K4-D5
ggggcaaaaaaaaaaaaatacagcaggggtcaagaaaatcctaatcctcttgggctctttgtgtctgaagcttcactcgaaagtggaaacactgctctcatcgactcgaaagcggtttgcggtttccgtcatcggcgagacgccgccgccgtctggaattggaagaccgtcgcagtagtcgcaccatcgcagcacgcattggaaacggaaatgggttcttgtgctacatcatctgttctgactaatcaatttattccgtggtctacaaccaatactgaatctcccttggactccaaattgngcgtcatattttataaaatgtacagaaatacanacaaaagacaactcagtctctcttttgcttgggatagttataaaatcangagtattggtgcgattaaatcatacaaagatg

SEQ ID NO: 51206 - DNA, 431 bp, Glycine max
  Clone ID: LIB3109-001-Q1-K4-D7
ggacctggggttggtcaaggcactgctgcagggcaagctgtagaagggattgcacgacaaccggaggcagagggaaaaatacgaggtactttattgcttagtttggcttttatggaagctttaacaatttatggactggttgtagcattagcacttttatttgctaatcctttagtttaatcctaaaaaaatagaaatacatatccttttttccgtggacttgctttaccggtcttgctttttcgaattctatttatattaatatttcactcctataattctttatccgttcggacaagaacacaggggaaggactaattgaaaggtgaagaattcacatactgattcgccctctttcttctcttttttagtccaatgacccccccctttttttaagataatttttctcaagtgttaaaacttgagagatt

SEQ ID NO: 51207 - DNA, 275 bp, Glycine max
  Clone ID: LIB3109-001-Q1-K4-D8
tgagggctgtaccgagaagactacagaagctgatgctggggatgtattacattgaagcactctagtttacttttgggtacatgtatcgtttcgtttagtttcatcccactcaacgtatttggtattttttcaccgttcactaatgtcttgttaatgtgtgcaaagactactagatattatcttattctaagtaagtttttgtggttcacattcttaggcatgtacaacgcattgaatgtatcatatcccatgaaatgtctaattactgctaactt

SEQ ID NO: 51208 - DNA, 424 bp, Glycine max
  unsure (1)..(424): unsure at all n locations
  Clone ID: LIB3109-001-Q1-K4-E1
ggttctagtgtgtgattgtttgttgttgtaactcgtgcttcttcttttgttgttctgtgtttgtgtttgttttttctctcacctgaaaatgtcttgctgcggtggtaactgtggttgcggaagctcctgcaagtgcggcaacggctgcggaggctgcaagatgtacccagacttgagctacactgagtcaaccaccaccgagaccttggtcatgggagtggcacctgttaaggctcaatttgagggtgctgaaatgggtgtgcccgctgagaacgatggctgcaaatgtggaccaaactgctcctgcaacccctgcacttgcaagtgaggtgttgggagagcaagctttcaagcagagatagccctttnttaggaataatgattaactattaatgtgtagctaataacttatgtattatgtctg

SEQ ID NO: 51209 - DNA, 336 bp, Glycine max
  Clone ID: LIB3109-001-Q1-K4-E2
cccggtcgacgacgcgtcgacgcgtcgacactccgaaggactacttagggggacacttgatgaaaaacgtgatcggaagttttaaaaaactcgagttgtggtccaaaaagaataggaagaaaatgacccatggccatgagcatgctcctcactattgctgcaactgctattgatcctgatacatccaaccattatctgcacccttaccttcatcctaatgccttgattctgaatacagcaactatggaacattcttaccaacctcggagccatgacctgagccggaaccgcaaccacaagagattgccagcctaaactcatcgtatcatcaatata

SEQ ID NO: 51210 - DNA, 55 bp, Glycine max
  Clone ID: LIB3109-001-Q1-K4-E4
gcttcataagcagttcttgcatcctatcaattggtgggattacttctgtctctgg

SEQ ID NO: 51211 - DNA, 428 bp, Glycine max
  Clone ID: LIB3109-001-Q1-K4-E5
gttgcatgaaaatgataactttgaagatcaatgttgtcatgattttgatcccactgcttttagtatccatgctgattctgatcctgttagtttggatgaatctctggatgaagctcatttcagttcaccagcttttggcaagagagatcaattacaaactggtacatttgatgctgcacaagcaaaggaaactggcagattaggtgaatttcttgcatgcaaatactttgtcgataaagttggcaatactgcagtaaggtgggttaataaagataatgaaactggacttccatatgatttagtcattggggaggataacagccaagaattcatagaagttaaagcaaccagatctccaagaaaagactggttcaacatatcagcgagagagtggcagtttgcaaatgaaagatgccaatcttttagca

SEQ ID NO: 51212 - DNA, 340 bp, Glycine max
  Clone ID: LIB3109-001-Q1-K4-E6
gttgccagagaagtcaattgagcttttgattgggtttacccaccctgggaggtctgctttttatactgatataatggcgcattcctttgacaattatggatacgctctcgtgcacatatgtgctataatcaataacatcagcattctgattgtttacatgattataattggtgatgtgctctctggaacatctgccagtgtagatcatcactatggactccttgactgactgtttggtgtagcaatggcggacaggccggacatttgttgtactttttactacactcgtcatatctgtacctatagcaagcagtaatctaattcattcatcgagattcac

SEQ ID NO: 51213 - DNA, 299 bp, Glycine max
  Clone ID: LIB3109-001-Q1-K4-F1
ggagacacagtggggaaactgaacccttttgtttgttttttcagctgataattcagaccaatatatattttgagtatatcttttcctttgatttcgtggaaagttattatcacagaatctgagggttttgtagacagaacttcacgtttaacaatgaagaaggttcccaagaacagctgcaagtctgcatcacacaggctctttaaggacaaggcatagaaccgtgtggatgacttgcagctgatgttcctggatctgcagtttgctaggaaggagagccgcacggttgatgccgtggt

SEQ ID NO: 51214 - DNA, 324 bp, Glycine max
  unsure (1)..(324): unsure at all n locations
  Clone ID: LIB3109-001-Q1-K4-F3
aaaaaaaaaaaaaaaaaaaaaaaaaaaaaaaaaaaaaanaaagaaaaaaaaaaaaaanaaaaaaaaaaaaaaaaaaaaaaaaaaaaaaaaaaaaaaaaaaaanaaaaaaaanaaaaaaaaaaaaaanaaaaaaaaaaaaaaaaaaaaaaaaaaaaaaaaaaaaaaaaaaaaaaaaaaaaaaaaaaaaaaaaaaaaaagggaaaaaaaaaaaaaaaaaaaaaaaaaaaaaaaagaaaaaaaaaaaaaaggaagaanaagaaaaaagaaaaaaaaaaaaaaaaaaaaaaaaaagaaaaaaaaaaaagaaaaaaaaaaaaaaataaa

SEQ ID NO: 51215 - DNA, 425 bp, Glycine max
  Clone ID: LIB3109-001-Q1-K4-F4
gatcgagagtggggtgctcgcatgacaaaagcaggtctggttcctccagttactagaaaatatgaagtcattgaccaatattgcattgtagctgatgaggaggatgtgcgaaggaagatgagggtttcattacctgatgactatgctgagaaactgagtgcacaaaagaatggcactgacgagtcagatatggaacttcctgaagtaaaagattacaaacctagaaagcagctaggaaatgaggttatcgagcaagaagtttatggaattgatccttatacgcacaatcttttgcttgattctatgccagaggagttagattggtctttgcaggagaagcatttgtttatagaagacacactccttcgaacattgaataagcaagttaggaattttactggagctggaagtacttcaatgagcta

SEQ ID NO: 51216 - DNA, 311 bp, Glycine max
  Clone ID: LIB3109-001-Q1-K4-F6
gttatagaaagagtgaggagagaattacaggggggtttccaacacgattacgcgaccgaatcaaaccctctctttctctccgaagctgcgtttaatatcttactcgccttagattgttcttctctttcattatactgttctcttttcgatttgagggaacagtacatgagtgtgaggatcggttaacccaactgcacatgttgtcactaaaataatggatccttacgatgagactggatgccatgctcctgaacgccccattctttgcattaataattgtggcttcttcggaagaacatctaccatgaaca

SEQ ID NO: 51217 - DNA, 342 bp, Glycine max
  Clone ID: LIB3109-001-Q1-K4-F7
gacacacaacttgtttcaaggaaaatggctctggttggatttcttctgggacttttcttaatggtcactcatgtcaaggggtatggttttggaggttggaccaatgcacatgccaccttctatggaggtggtgatgcttctgggacaatgggtggagcttgtggttatggaaatctgtatagccaaggatatggaactgatacaacagcactgagcactgctctgttcaacaatggcttgagctgtggtgcatgctatcacattaaatgtgtgaatgatccacagtggtgcctttctggctccatcatagtcacttgcacaaatttctgtccacctggtggt

SEQ ID NO: 51218 - DNA, 217 bp, Glycine max
  Clone ID: LIB3109-001-Q1-K4-G1
cgagagggcagcagatgtgggaaggggtaacattgcaacagatgcgatattttccttgaagacagcccatcaggaacatgcctcatagatggatactcagatgccttatatagacggatgagcagctacacaatgaatcacgtagattgtagattgcgggacacgaaattattcatggacagactatgaaaatattacacactgacatgtacccatt

SEQ ID NO: 51219 - DNA, 377 bp, Glycine max
  Clone ID: LIB3109-001-Q1-K4-G2
gattgtgaattcacttatttgtccacacagatactgcacttcctgggagttgaaggaccaaaaacttctgaccccagcaaatatattcgttatatttataacagagtacatcttgagaatgcgactgttagggctggtgctgtgagcacattggcaaagtttggtgctgctgttgatgaattaaagccccgcatattcatactgctaaggcggtgtctttttgatagtgatgatgaggttcgtgacagagcaacgctttatctgaacacacttggaagtgatggttcagttgttgagacagataaagatgtcaaagattttctctttgggtcatttgatatcccacttgtcaatctggagactaagttgaaaaacta

SEQ ID NO: 51220 - DNA, 304 bp, Glycine max
  Clone ID: LIB3109-001-Q1-K4-G3
gaggacaacaagaagagattctagtgtgtaatggcaagatggagggaccatgtcgaatggttgtggtcactagtatatgtgttggctcttacgctcagcatgagactgtcttgctgctctgatatccgtgatatatgaagcatctgctagtgcatattcaattgaagagactactagcagcaccgagcctagagcggcactgaatcatccaacgacgaaaccttggtcatgagagaatcccctgcaagagctaactccgagggagctgatcagagcgcacacactgagaactaaagatggctat

SEQ ID NO: 51221 - DNA, 364 bp, Glycine max
  Clone ID: LIB3109-001-Q1-K4-G4
gataatattaaaccacagtacctcacatgcccggctggaaaatgtttcaggtttgatgaatttgaccaacttgaagagtctctggcttgaaaaggtttccatccctcagttatcaggcactgtcttgcaaaacttgggcaaattatttgtagtcctctgcaagattaataatagtttggatgggaaacagttccctaacctctctgagctcactcttgatcactgtgttgatctaactcaatttccctcaagcatttgtggaataaagtcactacaaaacttgagtctcaccaactgccacagtttgagtcaactaccttgtgaatttggcaaactaagatcactagagatccctccgttatat

SEQ ID NO: 51222 - DNA, 351 bp, Glycine max
  Clone ID: LIB3109-001-Q1-K4-G5
gatgatgaagtacttcttgcaatggcagaagagttgggagtgttcattccttatgttgggggagtggaacatgctagtgtgttgctgccaccgctggagacactttgcactgttgaggaaacctgtgtgagagataaagctgcggagtcactttgtagaattggatctcaaatgagggagagtgatttggttgaatattacatcccgttggtgaagagattggcagcaggtgaatggtttactgctcgagtctctgcatgtggactatttcatattgcataccctagcgcaccagatacatcaaagacagagttgagatcaatatacagtcagttatgtcaggatgacatg

SEQ ID NO: 51223 - DNA, 366 bp, Glycine max
  Clone ID: LIB3109-001-Q1-K4-G6
gttacagaagtgtggaacaccatttatctcacggatgagagactcctctcccatggagtacgagattaaaaatagctcgcgatgcacctagtgggttaacatacctgcactaggaaatggattcccagataattatcagagatttcaaatcttcaaatatcctattgcatgaacagcggaatgctaagctatcagactttgggttagcaaggttgggaccatcagatggactgactaatgtcttaacagcggttgtcggaacaatgagatatgcagctcctgaatatgtgcacactggacgtataacatcaaagaatgatgtatggagctaccgtgtcttcctttatgaactcataactggcaggc

SEQ ID NO: 51224 - DNA, 389 bp, Glycine max
  unsure (1)..(389): unsure at all n locations
  Clone ID: LIB3109-001-Q1-K4-G7
gatccaaaggaggcacgagctggtatcagggaggtccactttcttccattcaatcctgtggacaagaggactgctctaacttacattgattctgatggaaattggcatcgatctagcaaaggtgctcctgagcagatattgaacctctgcaactgcaaagaggatgtaaggaaaagggttcatggaacgattgacaagtttgctgagcgtggactccgttctttaggtgttgctagacaggaagtacctgagaaaaacaaggatagtcctggtgcaccatggcaatttgttggtctgctaccactttttgatccttcaaggcatgacagtgcggaaaccatcacangagctctgaaccttgtgtgaatgttaagatgatcacttgtgat

SEQ ID NO: 51225 - DNA, 274 bp, Glycine max
  Clone ID: LIB3109-001-Q1-K4-G8
ccactttcttccattcaatcctgtgtacaagaggactgctctaacttacattgattctgatgtaaattgtcatcgatctatcaaaggtgctccttatcagatattgaacctcttcaactgcaaacaggatgtaatgaaaagtgttcatggaacgattgacaagtttgctcatcgtggactccgttctttatgttttgctatacattaagtacctgataaaaacaatgattgtccttgttcaccatggcaatttacttggtctactaccactttt

SEQ ID NO: 51226 - DNA, 368 bp, Glycine max
  unsure (1)..(368): unsure at all n locations
  Clone ID: LIB3109-001-Q1-K4-H1
acatatgaacagtaaaaactagtaggtaaattgagactagaactcatagggaagaaaatagatttatgaatggaataaaatatgcagtatttacagacaaaagtattcggntattggggaaaaatcaatatacttttaatgtcgaatcgggattaactaggacagaaatcaagcattgggtcgaactcttctttgatgtcaaagtaatagctatgaatagtcatcgactcccggtaaagggtagaagagtacgacctattatgggacatacaatgcattacagacgtatgattattacgcttcaaaccgggttattctatttcacctcttagaaagaaaaaaacttaaattaaaatacttaatagcat

SEQ ID NO: 51227 - DNA, 398 bp, Glycine max
  Clone ID: LIB3109-001-Q1-K4-H2
acgacgggctcatttgtgatacatgacgttgaaacctgagaggaaagtttaattggcagcattgcatttccataagaacctccgctagctagctgcgtataaaatataaaatataaaggggaaaaaaaaaacgagaaaacagtgtcatattattattccttccttctcactgtgtctggtgcataaacctcaacaacacactcttcaattttctagggtttgagttttgctccctttttcttcgccttcttcaatggccgcttccttgctcctgagatccgcgcttctcgctccttcctcctgcgatcgccccaaggtatataccaatgcctcaagttctaatttaaaatccaagggattacatagcaacaatttttgtacttcaattcaatgtgact

SEQ ID NO: 51228 - DNA, 304 bp, Glycine max
  Clone ID: LIB3109-001-Q1-K4-H4
cggcccacgcgtccgcccacgcgtccgcggacgcgtgggcggacgcgtgtatgcggagagtggtgtacgacacgggggcggctgactcgatcggttgcccctgcccgaacatagcagaaccaaacgacgcccaggtttcggaattgtgttctaggtttttgagtttcgattccgatcgaccgacgatgctggccaatcatttccaaaacggcatcgaaacggcgaggctcgtttggtcgcggattcctaattcggaagaatcgcagctcctcgacgacgccgttggcatccttaagaagaacga

SEQ ID NO: 51229 - DNA, 112 bp, Glycine max
  Clone ID: LIB3109-001-Q1-K4-H5
acgcgtccgaagactacagaacgggcttactaacatactaatgccattcaattgaaggtttaattaccccgtttccatgtctatcataataaacattcccacactttacatc

SEQ ID NO: 51230 - DNA, 402 bp, Glycine max
  Clone ID: LIB3109-001-Q1-K4-H7
ggagatgggacttgtaataatgggcagttctatgaatgcctgaacatggcagctctgtggaaattgccaattgtgtttgtggtggagaataatttgtgggctattgggatgtcgcatctcagagcaacctcagatcctcagatatggaagaaagggccagcatttggaatgccaggggttcatgtagatgggatggatgttttgaaggtcagagaggtggcaaaggaggcagttggaagggctagaagaggtgagggaccaactctagtggaatgcgagacctatagatttagagggcattcattggctgatcctgatgagcttcgtgaccctgctgagaaggaacactatgccggtagggaccccatcactgcattgaagaaatacctttttgagaacaat

SEQ ID NO: 51231 - DNA, 351 bp, Glycine max
  Clone ID: LIB3109-001-Q1-K4-H8
ggtggccaaatcatggacaatgatgatgccatcacctatgcagcatataccattaccatcttctctaatgaataatatttccactcacaattcaatcttgtgttgtgactttaactatgtgaatttgagcaaccaaagaggtacaaggcttttgtgttcagcaaggaggcaaattagataccaagatgatggggatgataaagatagtgatgaagagtatgggcacaatgaggagattgccaagttggagtcttatagtcaatcagcaaaaggagaagtactccttgtgcatgcacttgtggaccaggagtgaagttgatgtgcttatcttcaaggggttctcttcatgct

SEQ ID NO: 51232 - DNA, 377 bp, Glycine max
  Clone ID: LIB3109-002-Q1-K1-A1
gacttcaaagtggagaaaaacacacacgggtgggtcattctctctcttgtctttttcctcaaaaagttgaaaaagaataaagggggaacaatcgagtgaagttgttgctcttcaatagtaaacttacctatggaagagggaagggttgtgagtgggtacacaaaagatggaactgtggatcttaaagggaaacccattctcaaatccaaaagtggtggttggaaagcatgctcctttgttgttgggtacaagatatttgaaagaatggcttattatggaatatcatcaaatttgatactgaatctgactaggaagcttaaccaaggcactgtgaccttttccaacaacgtgaccaattgggttggcaccatttggat

SEQ ID NO: 51233 - DNA, 427 bp, Glycine max
  Clone ID: LIB3109-002-Q1-K1-A10
gggagaaaaggggaagacagaagtggaagcagtgagaactgagaactcttatcattcttttttccacttgacattgccgacgccaccaaatacacaaccttaactttcccacaacactacccatccatcattcgttttctctctagattttttcagttagttattgctgtcttctttttgtgtgtgccaacaacacagaaagagagagaaagacatggctctgaaccaatcaaaggccgtgttgttgagggtgagtttggtggtggtggcgctgtgtatagcacgatacatagtgggtccccctctctactggcatttcgttgcggtgaacaaccactcttcatcttctacttgtgcaccctgcatctgcgattgctcttcacaacccattctatctattccacagggacttatcaacactttcttc

SEQ ID NO: 51234 - DNA, 240 bp, Glycine max
  Clone ID: LIB3109-002-Q1-K1-A11
ggtctcgtgataccatttaatttcacagcgattaattatgtatagttaagtgtggagtgcagtgcaggtcaaggcctgagattcggttctttacttgttgggttgttctgatcttctctcatagcaatcaaatcacactcacatcttctcatctcgtaaaccctaaaccccgttttcagtgacatcgagatcgatcgaacatggatgaggagtacgatgtgatcgtgttgagcacgggtc

SEQ ID NO: 51235 - DNA, 453 bp, Glycine max
  Clone ID: LIB3109-002-Q1-K1-A12
gagttcagacggtgatgctgctgcatccccacctatgggtgttgcttcttgtgttacaacagtttctgaggttgcttcctcttcctattccagtgagtttgaagccaggcttaagaatttgttgggttctcattctgataaccctaaccttacccctgaggaggttgtggaggcttcaaaagctgcagcagtggctgcatctaaagctgcaaaggctgcaagagctgcggccaaggagaaggccgagactgcagcataggcagttgcagctgccaagagggctttggatttagtttcctccttctctgaagaggcagtgagcagcatggagaggaacctaacgaagaacatgctcatgaagcacctaccagttcatctcttgtacaaaacataccagcccattgaaaattgtgggactgatgaagaattggccaggaagtacatcgcgccatg

SEQ ID NO: 51236 - DNA, 393 bp, Glycine max
  Clone ID: LIB3109-002-Q1-K1-A2
ggaagaaaggcagagttattgccattgcgtctgcctcttgcaacaccaaactgatacacacttaataatattatagtaaaaattagccaccaaagtacactaaccccttttttcatacaactcaatagctggattggagcaaggtgaaagtaaaatcatttgcaaccaatgccgttgaacatatttcaggacaaagatggattgccacggattatattgactgagccaaagggttcatcagctgaggttcttctttatggagggcagattatttcttggaagaatcatcgaaaggaagaacttctttttatgagcagtaaggctaacaagaaacagcataaagcaatcagaggaagaatatcagcttgcctagcacggtttggtgatctcagt

SEQ ID NO: 51237 - DNA, 341 bp, Glycine max
  Clone ID: LIB3109-002-Q1-K1-A3
gtagtgctctattggaaatgatgatatggcatgtaccctctccatcaacagcccataagtatcgtgtggagaacttgtatgagggtcctcttgatgatcaatatgcttctgctatcagaaattgtgatcctgaaggtcctctgatgctctatgtctccaagatgattccagcatctgataaggggagattttttgcctttggccgtgtattctttggcagggtttcaactggtttgaaggtgaggattatgggacctaattatgtccctggggagaaaaaggatttgtatgttaaaagtgggcaactaactgtcatttggatgggaaagaggcaagaaact

SEQ ID NO: 51238 - DNA, 383 bp, Glycine max
  Clone ID: LIB3109-002-Q1-K1-A4
gacactaaacaagttggaagaagagcatcactgaactaacaaagcaaccctatgtcgaaggtggtttgtgtcaccggagccagcggcgccatcggatcatgggtggtcctactcctcctccagcgtggttacaccgtccatgccaccgtccaagatatcaaggatgaaaatgagacgaaacatttggaggaaatggaaggagcaaagagtcatctccatttttttgaaatggatcttcttgacatcgactccattgccgctgccataaagggttgttccggcgtaatccaccttgcatgtcctaacatcattggtcaagtcgaagatcccgagaaacagatattggaaccggcgataaaaggaacggttaatgtgttgaaggc

SEQ ID NO: 51239 - DNA, 372 bp, Glycine max
  Clone ID: LIB3109-002-Q1-K1-A5
tttacttggttatcattagattggggggggcggatcttttcgagagtaggttcggatcgctcggtctcgctaggtcaccgctgaccataatttgaacttctcgtcactactaagccgttatttagctaaagcttgtgttgggagaaagcatagagcatctagtttgttaacaatggaagatgatctgttggacacagaagacaggaacaacaatggcagtttcaccttatagaaatcgaatcactggcgaacgaggtatgagttcatggttgactatgatggccaagttggggccccagagaagctggcaaatagaatcttggtatctctgactaaggccttcctatgctttgggaattgggtcccaaacct

SEQ ID NO: 51240 - DNA, 351 bp, Glycine max
  Clone ID: LIB3109-002-Q1-K1-A6
gacggacgagggtttcgtttcgggtttgacgttgttcacaatcactttctgcgcttcactcactcccttcgtgcggttttctttctttgtcgaactcgtgcgaaaatgcgtgagattcttcacatacagggagggcaatgcggaaaccagatcggagcgaagttctgggaggtggtgtgcgcggagcacgggatcgattccacggggaggtaccagggggacaactagttgcaactcgagcgagtcaacgtctattacaatgaagcgagttgcggaaggttcgtgccgagggcggtgctcatggatctagagccagggaccatggacagcgttagatctggtccctacggt

SEQ ID NO: 51241 - DNA, 350 bp, Glycine max
  Clone ID: LIB3109-002-Q1-K1-A7
gggttctagtgtgtgattgtttgttgttggaactcgttcttcttcttttgttgttctgtgtttgtgtttgttttttctctcacctgaaaatgtcttgctgcggtggtaactgtggttgcggaagctcctgcaagtgcggcaacggctgcggaggctgcaagatgtacccagacttgagctacactgagtcaaccaccaccgagaccttggtcatgggagtggcacctgttaaggctcaatttgagggtgctgaaatgggtgtgcccgctgagaacgatggctgcaaatgtggaccaaactgcttcttgcacctctgcacttgcaagtgatgtgttgggagggcaagcttc

SEQ ID NO: 51242 - DNA, 426 bp, Glycine max
  Clone ID: LIB3109-002-Q1-K1-A9
gatgaggagggaggtgtaagaaactgggaagagaaggtggtggtcttgttgccattctgatctaaagcttgtgtctttctgcttcgtttgcatcttctgctgcgtaaagttgattcttttctgattcttccgtagatttcatctctgaaactagttctaatactttatctacagatctctatattctaggtgaaggtttgcttttgatccggcttgggagttttgatagacttgattctaactctttaagagccatatgctcacagtggtcggatatagtacatcagaagttcacacaagagatatatataattattcttgggtaccacctgcagaatgtcattccgcagcatagttcgtgatgtaagggatagtttcgggagcttatctaggcgtaattttgatgtcagacttactgtgcatcat

SEQ ID NO: 51243 - DNA, 88 bp, Glycine max
  Clone ID: LIB3109-002-Q1-K1-B1
gtcaatccaatccattattaaagggataggccggggccttacaacgcagctcagccaaaattcgctacttgtaaagggctgcactata

SEQ ID NO: 51244 - DNA, 288 bp, Glycine max
  unsure (1)..(288): unsure at all n locations
  Clone ID: LIB3109-002-Q1-K1-B10
tgaaagaaagtgtatttcgccacttgtcataacattttatgtcgtcgtgaggcttttcaacctgcaagtccttgagtgaggagtgcccccatcatntgatgatgnttgatgacggtgattgcttcatgaggttagtaagccaagttactggagaaacatnaagcacattgccattgcccattgatgagaaggtttttaccttggcatacatctcctgcaacaaagggaactgtatgtcactcacagtcacacaatggcaccacatgcaacggttgtagtangtgatga

SEQ ID NO: 51245 - DNA, 449 bp, Glycine max
  Clone ID: LIB3109-002-Q1-K1-B11
ggtcgcgtgataccatttaatttcacagcgattaggtatggatagttaagtgtggagtgcagtgcaggtcaaggcctgagattcggttctttacttgttgggttgttctgatcttctctcatagcaatcaaatcacactcccatcttctcatctcgtaaaccctaaaccccgttttcagtgacatcgagatcgatcgaacatggatgaggagtacgatgtgatcgtgttgggcacgggtctcaaggagtgcattctcagcggtcttctctccgtcgatggcctcaaggttctgcacatggacaggaatgactattactgaggagaatccacttcgctcaatcttattcagctttggaagagattcaggggagatgactagcctactccacatttgggagctagcatggactataacatcgatatgaaccctaagttaatatggctaatg

SEQ ID NO: 51246 - DNA, 344 bp, Glycine max
  Clone ID: LIB3109-002-Q1-K1-B12
cctgaggggggaggctggattccaagaactttccagttagttagggctaatcttgaagaatcattgcattatataatcatattgcatattccagctcaagtgctttgtggatattgctcttcgattctatatatgctttattgcaaccttattattattcttcagtcgctcttctacgctcgattggaaacttttcctatattctatgatgcgattataactggcggtctttacattggtgactgagacatgtgaggatgggttctctctgagtatgatttcagattgatacctcacacatcgcatagtggcatcaagctggactgtcattataagctacttgt

SEQ ID NO: 51247 - DNA, 381 bp, Glycine max
  unsure (1)..(381): unsure at all n locations
  Clone ID: LIB3109-002-Q1-K1-B2
gatgatgaagatgaagaagagcaagttgggtgcagaagcaaagggaagcaattgatggatgatcgaaatgtatctgtaaatttgactcctcttcgctccttaggatatgttgacccagggtgggagcatggtgttgcccaggacgagagaaagaagaaggtcaaatgcaattactgtgagaaaattgtcagtggaggtattaatcggtttaaacaacatttggctagaattcctggagaggtagcaccttgtaaaaatgctccagaagatgtttatctgaaaattaaagagatcatgaaatggcatcgtactgngaggagacttaggcgacctgaggctaatgaattgatgcctatctatgcaaagtcggataatgatgat

SEQ ID NO: 51248 - DNA, 371 bp, Glycine max
  Clone ID: LIB3109-002-Q1-K1-B3
gagagggaaaagagttggagacgtgaagtgaagaaagaaagaattgagaaaggatagggtttagggttggcaaaggaaggaagggatggaagcagctgtggtggacgtctgctctaagcttctcaaagcggactttgcaattcctgaccagactcccgccatgataattcccactcagatgaagcaattgctcgatgatggatcagtcactgatagttcactggctgacaatgtcaccgttgatcccgtcgtgcgaggatttattagagattgggatgccattgaagatttgttgcaccatggtttgtatactggcctcggatgggaaattggcaatgaaggacaaatactatttactgatccacttttgt

SEQ ID NO: 51249 - DNA, 144 bp, Glycine max
  Clone ID: LIB3109-002-Q1-K1-B4
tgttgaagacattgcaaggagcattggggaggtgtacgtacactgtacgggactatgcacaaaccggtttgattgcagcagtgttcttctttaaaatgatggaatggtgtgtccaatctgttgaggagagaatgtcagtttcta

SEQ ID NO: 51250 - DNA, 382 bp, Glycine max
  Clone ID: LIB3109-002-Q1-K1-B6
ggggctgacattcacgaagcttttgaggcggcttttcgcgaaggaggaaatgcgaattctgatggttggtcttgatgctgctggtaagaccactatcctctacaagctcaagctcggagagatcgttactacaattcctaccattgggttcaatgttgagactgtggaatacaggaacattagcttcactgtatgggatgtaggtggccacgacaagattcgtcccttgtggaggcactacttccagaacactcatggtcttatttttgctgcatacagctatgatagggacagaattgttgtagccatacattatttacatatgatgttgaatgaggatgaactgatagatgccgtattgcttgagtttgcataacaaatc

SEQ ID NO: 51251 - DNA, 364 bp, Glycine max
  Clone ID: LIB3109-002-Q1-K1-B7
gggagtcagacagacggacaaactactgctacgttaatcatgggtccaacctctatggccgccggaagagtcacgaggtttttggccaggcactaccctctcgagcaccaccgtgataacgccgatgttgagttcgactttcttgatgatattggagaagccttgttagctcaaagtgctagcagtgatgagtgcggtcaccccaatgaaatggaggaacagttcgaccaagacgaggatcacagagataccgtcgaggagaatagaaccttttgggacaaacaacaccagcttttgcaggccagtatatgcagaactagttcttcggagtcacggataaagcatgccaccaaagaagcgcttc

SEQ ID NO: 51252 - DNA, 307 bp, Glycine max
  Clone ID: LIB3109-002-Q1-K1-B8
ggaccaagagattaagtcttggcttgcgtttgcagcacaaaaagttgttgaagtaaatgccttggccaaggcattgtctggacagaaggatgaggttttcttttctgctaatgctgctgccttggcttcaaggaagtcctccccaagggtgataaatgaggctgtccaaaaagccgctgctgctctgaagggctctgatcatcggagggccacaaatgttagtgccaggttggatgctttacagatgaaattgaatctttctgttcttccaacaactacaattggatctttccctcatactggcgat

SEQ ID NO: 51253 - DNA, 463 bp, Glycine max
  unsure (1)..(463): unsure at all n locations
  Clone ID: LIB3109-002-Q1-K1-B9
gtaccctctaatttacaatattaaaacagctgtacgagactagttcatgataccggtgcaccacatttattgagtgtatggtggaaattaggaagagaaataaatcaataaactaatatatgtaataaagagaggaataagaagaaaaattgggtgtatgtttagcatttttctttgttgaggttacgtgcttcgttttatttattttcaaaaaaactaataattccttgttatcttttagagagagctggtaaaaaaaaaagatctttttttttccaactaaacaaacatgtcatgttttgtgtaaactcagttttttcatggagaatagcacgtaagaacttatgagagaaggtcaaaactcanaaggggtagaaagaaggggaaaaccggaaaagtgtgactttatttataaagtangtaatggcccatccgtccccacactagcctcaatattttttta

SEQ ID NO: 51254 - DNA, 365 bp, Glycine max
  Clone ID: LIB3109-002-Q1-K1-C1
atcaacaaacagggggtgcaatagcaccagctcaatggcttgccattgggactcctgggatatcagcctctcctttattggcagaattcagtgctcctgatggtgcgcatggtaatgctttagctgccacttctgggaagtcaactgttacagagcagcctcttgaacgcctaattaatgcggtgaaatcaatgtcaagtaaagcattaagtgctgcagtcatggatattggttcagttgtcagcatgaatgatagaattgcatgatcagctccaggtaatggatccagatcggctgttggtgaagatttggtttccattgacttatttgtcgtctacaggcttgaaatttcattactctaagat

SEQ ID NO: 51255 - DNA, 307 bp, Glycine max
  Clone ID: LIB3109-002-Q1-K1-C11
gcatttcaggaggagaatataatggttgaaaactaaagcgagcctctgaaagtgattaaattccgctgtctgtcttgattcctccatctcagtcccctgtcatttgcagactcatctctgtgaatcgctgatattcattgatcaactttaaaagggatatgatggttaagacataactgatagtgatcagatcttagctacttaaccgttctatctatgacttgaggtaaacacatgaatgaaggaccagattgaatagctacacaggtgccaaagaaaagagtcggcatctgtgctgatagacgga

SEQ ID NO: 51256 - DNA, 431 bp, Glycine max
  unsure (1)..(431): unsure at all n locations
  Clone ID: LIB3109-002-Q1-K1-C12
gtacaaagtgatgtgaagagtcgaacccaagagcttcgtcggatctcaaaagctggatggaaatcaaaaccatcatgattgggccactaaaagactagttgaggatgaactgaagagacttttatttggtttggagcacaattacacaagttttggaagccatttaaacagccaatggtgcttttaaacgtactcagttcaacagtgttatcttcatgttagaattgaagatgagcttattggttagtgaacatttgaatgctcagcagtgcagttaaacgtcccatgctacgttgataagatttagctactgactgtgtgcatttaaatgtcgtccaacgggacatttaaacgtactcagtttacttaggttgatgcaaaaaatgttcctaactntgtagacttttgataggtggaaaacactatgtaac

SEQ ID NO: 51257 - DNA, 393 bp, Glycine max
  Clone ID: LIB3109-002-Q1-K1-C2
gacagggaaagcaaaatatctgatctttcgccctcccttgcactgagtaggcaatggcggaggaagcacagtactcatcgggacccgattccgcgcccctcaagcgcaagtacgaagaccaaccctccggcatcgagcttgccaagcagcgtgctcaggaagtcgccgcacgcctcctcaacgccgctcctcctccgccactcgacgccaagcgtcccaaacccgacaccggcttcgattctctcgatttgaagcctctgtattccgcatctcctcctcccgtctcctacggtcaccaaggttccagcaagaagattgatatccctaatggcagggttggtgtgattattggtaaaggcggagagactattaagtatctccaggtgcagtctg

SEQ ID NO: 51258 - DNA, 374 bp, Glycine max
  Clone ID: LIB3109-002-Q1-K1-C3
caagggtttggggtttaacaacaaattcgaccgcgctttgtccctcttcgacttcatccgtacccgaaacgaccgcgtttcgctcctgaacggttccgtgatcgccgtgatcgtctccattctcgggaaaacgggtagggtttcccgcgcggcgtcgatgctgcacaatctagaagccgatgggtttgaggtagatgtgtatggctacacctttctcataactgcttatgctaataatataaaattctcagatgcacttaaggtgtttgggaaaatgaaagaagtggggtgtgaacctactatgattacttacaatgcaattttgaatggtttatggtaagatgggcatgcccagggctaagatcattgctctt

SEQ ID NO: 51259 - DNA, 394 bp, Glycine max
  Clone ID: LIB3109-002-Q1-K1-C4
gaagaaagaagtgagaatacgaaagaagggggtttattgccaaatgaagaaggctcacgagacacgcatggggtcagccacatgctatccctcctcctcctccttctctctccggtggtggtgactcgccggaaaacacccactgccacctctaacgccgccgccggcgaacacccttctcaaaatctcacccgacccaattcacctttctcctctctcttctcaattccccatctgggtatccctgtttccctaaaagttctcttctttttcgtgattcagaagtgctcagtgatacccttttcttagaacaatgaaagcgggggaaagggagtcaggaagaggatgagttcgatgaaaaagagtttggttctttcaaaaaacagggcacttc

SEQ ID NO: 51260 - DNA, 387 bp, Glycine max
  Clone ID: LIB3109-002-Q1-K1-C5
gttctgagcagaaaccaatttagtggccgcattcctcaaaatattggaaacatttcaaagcttaggcagcttgatttgtcactgaataatcttagtggagaaattccagtcgcctttgataatctgcgtagtcttagttgcttcaacgtttctcataacaacctatctggtccagttccgaccctacttgcccaaaaatataactcgagctcatttgtggggaatattcaactatgaggctatagcccttcaaccacatgttgctgactagctccttctggttcacctcctgaaatatcagaacaccgtcatcataataaattaggcaccaaagacataattctcatagtagcaggagtgctccttgtagtcctggtaacaatttgc

SEQ ID NO: 51261 - DNA, 310 bp, Glycine max
  Clone ID: LIB3109-002-Q1-K1-C6
ggagcgcggaaccaaatgaaatgattgagaagagagagcgaagaaaaaaaagagagccaaaccaaacctttcccgaaacggttcgttttgcccttcttcggaaccctcccttctgcgccgctgctgctgctccggtcgccgtcggcgactctccggtaaccgaagaccactgccgatccgtcagaaacctcggatctcggatctgaacgagcgaaacgatgccgtctcacgcggatctggaccggcagatcgagcatctgatggagtgcaagcctctgccggaggccgaggtgaaggcgctgtgcgatca

SEQ ID NO: 51262 - DNA, 382 bp, Glycine max
  Clone ID: LIB3109-002-Q1-K1-C7
ggatccagcacataacaatggaaacgcagctttacgtgttttctctctagattctgctcttaaacgccgtcgttttcaaactctttttttccccttcgcttctctgtctttgtaaccgaaaggggggaaaatataattaacaccgatttcgcgaccaattcttcttctgcgttgaattgggacaacgagaaattggatctcagtttttggcaggaaataaaaattgcatttgagtgtaaaataacagagtatagtgtagggccttgttcttgatactgtgctaaatttgttggatggcggagaaatcatgcatcaagcgccttcagaaggaatatagagccctttgtaaagagccaagttctcatgttgtggctcgtccttc

SEQ ID NO: 51263 - DNA, 390 bp, Glycine max
  Clone ID: LIB3109-002-Q1-K1-C8
gcattacctacatccattcactgtgaaccaattggacagtttaaggtaccaagctatgaacattgtggtggttaggcttgggagagcagaaccaccccttaggaaagaggttgtggagtacatgcttgatgtggactctcacatatggagcatgagaagaagcaaagccaatttcttcagaattgtgtcactcttttctggtgcaatatctatgagcaagtggcttggtgaggtacaacagtggaagaatccagtgaccacaatcctagtgcatgtcctctttttcatcttgatatgttaccctgaactgatcctccccacaatgttcctctacatgtttctcattggaatatggaactttaggtttaggccaaggcaccctccacacat

SEQ ID NO: 51264 - DNA, 411 bp, Glycine max
  Clone ID: LIB3109-002-Q1-K1-C9
gaacaaaaaaaagtagagaatttgctttgcgaggaagtaagtaggagatgctctgaactttcaaatttgtacaacccctaggaagagaagaagaaggttcaaaatccaatccatttttcatttcgaaagatcgtgatcgcaatgtccctctccaccgtgaggcagcggcgctcggagccgtctgatccgtcgccatcagaaccgtacacgaagctggacaagcccgagaaagcggaggagaaagacgaagggttggggtgggttttcccgttcgtggctcttgggttattgaggtacatgagtgccaccttcaacatcatccacgattgcgacgaggtcttcaattactgggagcctcttcatttccttctctacaaatctggattccagacatgggaatacagttcacag

SEQ ID NO: 51265 - DNA, 356 bp, Glycine max
  Clone ID: LIB3109-002-Q1-K1-D1
ggaggataatggacttgttatgaacttctacaaggaatcatgccctcaggctgaagacatcatcaaagaacaagtcaagcttctctacaagcgccacaagaacactgctttctcctggctcagaaacatcttccatgactgtgctgttcagagttgtgatgcttcactgttgctggactccacaagaaggagcttgtctgagaaggaaacagatagaagctttgggttgagaaatttcaggtacattgagaccatcaaagaggctttggaaagggaatgcccaggaattgtttcctgtgctgatatcctccgtctctctgccaaagatggcattgtttcgctaggagggccccata

SEQ ID NO: 51266 - DNA, 362 bp, Glycine max
  Clone ID: LIB3109-002-Q1-K1-D2
ggtatcaagaaattttgactgatcctagggatgctggccagtttgtgctcatgacaaacccacatattgggaatactggcataaattttgatgatgaggaatcaatacagtgtttccttgctggacttgtaattagaagtttgagtatcagtacctctaactggagatgtaagaagcctctgggggattacctagctgaaaggaatattatgggaatgtatgatgttgatactcgcgcaatcacgctgcgattgctgctagatggctgtcttattggtgttttgagcactttcaattcctaaatggatgaggaactgctttacatgtctaagttatggaacatttgtggtaatgatctaata

SEQ ID NO: 51267 - DNA, 384 bp, Glycine max
  Clone ID: LIB3109-002-Q1-K1-D3
gggtgcacggttcagtatgtttgagatgagagttaagatagctttggcagagaaaggaatcaaatatgagtacatggaacaagatctcaccaacaagagtactttgcttcaagaaatgaacccaattcacaagaagattccagttctcatacatcatggaagacctatctgtgagtccctcataattgttgagtatattgatatggtttgggacaacaattgtcctttgcttccctctgatccctaccacaaagctcaagccaggttctgggctgattttgtagatcagaaggtgtatcatgcttctaagagagtttggatttcaaagggagatgagaaagaggtggcaaaaaaggacttcctagagagcttaaaacaattgga

SEQ ID NO: 51268 - DNA, 282 bp, Glycine max
  Clone ID: LIB3109-002-Q1-K1-D4
ggtgtgagttcattaacatatacaaatggtctgtgttgtgttgtgtacttgtgttaattgtgttgttgttgtaggaaatttaagtgaagagagaatgatgatgaagtctgctatgtgtgcattggtgcttgtggcactggttgtggttgaagtagtggcccatggctgaagctgttgtgacttgcaacccaacacagttgacttcttgtcttccggcaattaattcaggttctgcaccttctattgcttgttgccagaagctgaaagagcataatccatgct

SEQ ID NO: 51269 - DNA, 373 bp, Glycine max
  Clone ID: LIB3109-002-Q1-K1-D5
gatgatattcattgttatcgtaagcatagggcctatgtaaatgtcaaatatgtgttcacatgccacatgtgctatcaacaacgtctattaaaactgggttctccatttgaagcacttgtatactgaccaagggctatgcaccaaactctgaactggatacattgcatgatggttatatatatctatacactatgcattctgaaagtatgtgatgctaagcacaacatgatgaaaagagttaagtatggatgaaaagtcgctttccatgcgatcttattcaatacaaaacccaatctgatgtatatacgcgttatatctctctatgtatgatggattatgctacaggcattgataactcaaaatcataacacaa

SEQ ID NO: 51270 - DNA, 340 bp, Glycine max
  Clone ID: LIB3109-002-Q1-K1-D7
gtgagaagcatatgaaggtcacgataagtgagtcggctattgtcttcaatgaagctaaggggacatttcatgttcaggacaatccattgtatgctgcttcctttgcagctaatggcaatgttgaatatgtggtactctatcatgaatatggatacgtctaaatcctttattcacacttcttaacactttatacagagatggatgctgctgttcttcacaaattcatatatcacatccttaagaaccttgctgttgcaaaggacgacatgccagatgcattaacagcagctagtaacaccgtctgtttagatttagacgctctgaacgggttttactgtac

SEQ ID NO: 51271 - DNA, 376 bp, Glycine max; identical to SEQ ID NO: 8655
  Clone ID: LIB3109-002-Q1-K1-D8

SEQ ID NO: 51272 - DNA, 429 bp, Glycine max
  Clone ID: LIB3109-002-Q1-K1-D9
cgctcaagttgggagcgaagtcaggactcatatccggtttaatcagccaacacttcacgtcaacatttcagaagccacctccgcgaccagcagatgttaatataaattctgctgtctatccgggcggccctcctgttcctgtgcaagctcctaagcttctcaaatttgttgacacaactgagatgaccagaggaccacaagagtctcctggctattgggttatctctggagcaaagcttgttgttgataagggcaagatttctctccgggttaagtattctttgttgaccatggtattaccagatgaagaagagatgttggatgatcagtagctgattccttgcctccagcaaacaagtgctcatttttaaagtgtggtaggtcgggaaataagaaagaaggtagagggtactactagttatcacttgg

SEQ ID NO: 51273 - DNA, 452 bp, Glycine max
  unsure (1)..(452): unsure at all n locations
  Clone ID: LIB3109-002-Q1-K1-E10
gggttctagtgtgtgattgtttgttgttgtaactcgttctgcttcttttgttgttctgtgtttgtgtttgttttttctctcacctgaaaatgtcttgctgcggtggtaactgtggttgcggaagctcctgcaagtgcggcaacggctgcggaggctgcaagatgtacccagacttgagctacactgagtcaaccaccaccgagaccttggtcatgggagtggcacctgttaaggctcaatttgagggtgctgaaatgggtgtgcccgctgagaacgatggctgcaaatgtggaccaaactgctcctgcaacccctgcacttgcaagtgaggtgttgggagggcaagcttcaagcagagatagcccttaattaggaataatgataaactattaatgtgtagctaanaacttatgtattatgtctgtgatggttttcgtgcactcttgtgtttt

SEQ ID NO: 51274 - DNA, 427 bp, Glycine max
  Clone ID: LIB3109-002-Q1-K1-E12
ggtggtagctgttacgagtcagcaagagagaaataggtcggtgagttgatttctgatcccaaattgagtttgagtttcagccatggtatctgtttctctgctcttattcctatctttctttgccttctttgcaccctctgaatctcacgacaaagtctcgtcggaattgtactacgaaagcttatgcccctacagcgccaacttcatcgtgaatcacctgccaaaaatcttcaccccagatcttgccccaatcgttcacctcaaactcgttccttggggcaatgccaaactccgtgccaacgccacctttgactgccagcatgggccatatgagtgcttgctgaacacagttgaagcctgtgcaattcacatctggcctcaactcagcaaacattgtcctttcatctactgtgttgaagatctggtg

SEQ ID NO: 51275 - DNA, 297 bp, Glycine max
  Clone ID: LIB3109-002-Q1-K1-E2
tgggccgaggaaatgatagaaatacaaaaagaagggcattacacatcgtccgtagatttcctattctctgcttcggaagaaagagaaaacatacaaaacaatgtctttcgcttctttccttttcagagtcctatttgctactgtcttcatactctctgcttaccaacaatttaatgaatatagagttgatggaggacctgctacataagcactcatacctaagtttgatgcctttacacatctgtagcattctcaagtgggctttcatattccagatattaatcttaaatttataat

SEQ ID NO: 51276 - DNA, 343 bp, Glycine max
  Clone ID: LIB3109-002-Q1-K1-E3
gaaggaaggaagaagcagagggaatctttgacagacagaagaaaatgggaagcagatgtccacctcaatcccatccatattccgctgccatttccaagggttacaacttcactttcacttgggaacagaatgctcctctgacagagcagtaacaattctcgattgtatcgctttctcacgcctattctgatctaccgttgcctctcaagttggctcaagagaatgcgtctgtacaagacaattccttgtctgtttaaacgaatgatagtttcctttgatgactcttgtactattgagactgttatggtcaataccaatcatttctacaaatggtttacagatc

SEQ ID NO: 51277 - DNA, 378 bp, Glycine max
  Clone ID: LIB3109-002-Q1-K1-E4
gacacagaacaatagtagcaagcagaggcccgagatctgtgcttgaaccttcacttgtgtttccttccttctgcagacgagcttcaccttgcgccgaagggccacagatggttgaaaccgatatggatgccgaaactgttgcaaatgtggttccaccaaaggagactccaaacagtgttcccatctcttatcattcctcacactcacaccctcctcttaatgagaggattatttcatccatgaccagaagatctgttgctgcacacccgtggcacgaccttgagataaggcctggtgcttcaacgatccttaattgtgtgattgagatttggaaagggagcaaggtgaaatatgaactggactaaaaatcgggtctta

SEQ ID NO: 51278 - DNA, 118 bp, Glycine max
  Clone ID: LIB3109-002-Q1-K1-E5
actcttcaaataccactttaggattcaactactccaccatctcaacatgcgatagtactttcatttgtcttaatcccagctcccaaatcaatctccactaccactcctcatatcttat

SEQ ID NO: 51279 - DNA, 381 bp, Glycine max
  Clone ID: LIB3109-002-Q1-K1-E6
ggactgaagacagatgatggtgctcatcaattacccaccattgcaatagttgcttcatatgacacctttggggctgctcctgcattatcagtgggaagcgatagtaatggaagtggcattgtggctcttcttgaagtagctaggttgttttctctcttatattctaatccaaagacaagaggacaatacaatctgctgtttgggctaacgtctggtgggccttataactacaatggaacccataagtggcttatgagctttgatcaacgtctgcgtgagagcattgactatgctatttgcttggatagtattggctcttgtgaaaatgaattgtggattcatgtatctaagccttcagaaaatgcctttattaagaaaatt

SEQ ID NO: 51280 - DNA, 388 bp, Glycine max
  unsure (1)..(388): unsure at all n locations
  Clone ID: LIB3109-002-Q1-K1-E7
ggtcttggtgatggatagacacaaatgcgaggctttgttcaaggtctttcagcaatggcagagcccttggtgggcacatgaaggctcaccttgcttctctccctctccctctccctccaaagcttcactcttgtttctcttcctctgactcagaacaagaacaatctttaagggagaatcctaagaaaaccttgaggattctggatcctgaagacagagagagcgagacagagtctaataagaacccgactcgtcaacgatccaagcgcaactggaaatctaccatgcccaagctcagcctcggacaccccgaagccgaacctctcagctccgtctccgacacctnccccgaagaagacctcgccatgtgcctcatgatgctctcccg

SEQ ID NO: 51281 - DNA, 387 bp, Glycine max
  Clone ID: LIB3109-002-Q1-K1-E8
ggcagatgagggtgctatttctctatggagaggaaacactgctaatgttatccgttatttccccacccaggctttgaactttgcatttaaggattacttcaagaggcttttcaactttaagaaggatagagatggctactggaaatggtttgctggcaactcggcctctggtggtgctgctggtgcatcatcccttttgtttgtttactctcttgactatgcccgtacccgtcttgccaatgatgcaaaggctgcaaaaaagggtggagagagacaattcaatggtctcgttgatgtctacaggaagacattggcatctgatggtgttgccgggctctaccgtggtttcaacatctcatgtgttggaatcatcgtgtatcgtggtct

SEQ ID NO: 51282 - DNA, 421 bp, Glycine max
  Clone ID: LIB3109-002-Q1-K1-E9
ggagagtgagtgagatagagagagacgcttcgcgggtctgaatcgaatctcagaaaaatgagagaaatcatcagcattcacataggtcaggccgggatccaggtcggaaactcctgctgggaactctactgcctcgaacatggcatccagcccgacggcatgatgccttctgactccaccttcggtgtagcccacgacgccttcaacaccttcttcagcgaaaccggatctggcaagcacgtgccccgtgctgtcttcgtcgacctcgaacccaccgtcatcgacgaggtccgctgcggcacctaccgtcaactcttccaccccgaacaactcatctccggcaaggaagacgccgtcaacaacttcgcccgcggccactacaccgttggcaaagagatcgtagatctgtgcttggatcgcg

SEQ ID NO: 51283 - DNA, 300 bp, Glycine max
  Clone ID: LIB3109-002-Q1-K1-F1
gacactgttgaagtggatgctataacacaccgaatgacatgtaaaacaggggtagtgaatataccatatggtggtaccaaaggagggataggctgttacccagcagaattaacaatatctgaattagacagacttactagagattttacactgactaatcacgatcagattggttctcacacagatgttccagcacctgatatgtgaacaggaccacagaccatgtcatgggatactatatcaattttccaaatttctacgttacttttctgcagtagtttactggaaaacctttatata

SEQ ID NO: 51284 - DNA, 418 bp, Glycine max
  Clone ID: LIB3109-002-Q1-K1-F10
gaggtgcagagagaggaattgaagcatgggaagagggaaggtggttctggagagaatacagaacaagatcaatcgccaagtaaccttctcaaagcgcagaaatggtttgctcaagaaagctttcgagctatctgttctatgcgatgctgaaatcgctctcgtcatcttctccagccgtggcaagctttttcagtatagtagcactgacattaacagaatcattgagaagtatcgtcaatgctgcttcaacatgtctcagactggcgatgtagctgaacatcaatcggagcaggagcttttggtattaagagtcaagcatgagtcactccagcggactcaaaggaatcttctgggagaagaactagagccacttagcatgaaagaattgcatagtttagagaaacaactggatagaacg

SEQ ID NO: 51285 - DNA, 386 bp, Glycine max
  Clone ID: LIB3109-002-Q1-K1-F11
acagatgatgggagtgtacacacagaggaattgcagcgatgggtcgagccatagtcgtgctgtatatattaccgaacaagatcaatcgtcaagtatccttctcaaagcgcataaatggtttgctcaataaagctctcgagctatctgttctatgcgatgctgaaatcgctctcgtcatcttctccagccgtggcaagctttttcagtatagtagctctgacattaacagaatcattgagaagtatcgtcaatgctgcttcaacatgtctcatactggcgatgtatctgaacatcaatcttaacatgagctattggtattaagagtcaagcatgagtcactccatcggactcataggaatcttctggtagaagaactagagccactt

SEQ ID NO: 51286 - DNA, 417 bp, Glycine max
  Clone ID: LIB3109-002-Q1-K1-F12
gcagtgagcgagagtgaacagcgaacagaatggctcccaggggtttaatctttttggctgtgttatgcttctcagcactgtcactgagtcgttgtcttgctgaggataatggacttgttatgaacttctacaaggaatcatgccctcatgctgaagacatcatcaaagaacatgtcaagcttctgtacaagcgccacatgaacactgctttctcctggctcagaaacatcttccatgactgtgctgatcagagttgtgatgcttcactgttgctggactccacatgaaagagcttgtctgagaaggaaacagatcgaagctttgagttgagaaatttcaggtacattgagaccatcatagacgctttggagagggaatgcccattagttgtatcctgtgctgatatcctagttctct

SEQ ID NO: 51287 - DNA, 213 bp, Glycine max
  Clone ID: LIB3109-002-Q1-K1-F2
gagggcgaggaagccggatggagacacaatacagagtgagttgttgctccttcgtcacaactctctgccaacatgggtatctccagagattctatgcacatgaggctttccactggtggcaagaagaaggcctggaggaaaaagagtaagtatgatcttggtcgccagcctgctaacactaagctgtctagcatcaagacagtcaggaggatc

SEQ ID NO: 51288 - DNA, 396 bp, Glycine max
  Clone ID: LIB3109-002-Q1-K1-F4
gggagagagagggagaaagagaaggagatcgcacttaacacatcacacagcaagagaaagagtaatagaatcgtggttcgtttgcagaagaagaggttaagagaaggagtgaccgaagcgaagatgttaccaacagcttccaaaggacgttcttcttcttcctcctcctcctcctcttcctctcgacctaacaatcccatgctgcttccctacctccgcagaatcatcaagtggcaacaaatggatattgaatatactttttggcaaatgcttcatctatgtacatcaccgaaagttgtctatcggcatactaaatatcacaaacgtaagtctctgtctcattaatatctttgttcttctgatttattgatacacatttctgaacagtgattggtt

SEQ ID NO: 51289 - DNA, 394 bp, Glycine max
  Clone ID: LIB3109-002-Q1-K1-F5
tactgatggtgggggtaaaaattggattaaatccatgggccttacagcatcactgttcccattcatgtgctttggaattggttctattttaaacacaattgctatattctatggatctctagctgcaatcccctttggtactatggttgttgtctgtgttatatgtgcttatatctatttgcctctagcacttcttggcacagttgttggaagaaacttgactggtactgcatataatccatgctgtgtgaagaccattcctagtcccattcctgagaagaaatgttacctcacaccatctgtagtttcgctgatgggacgactgctttcctttggcagcatattcatcgagatgtagtctgtattcacttgcttctggaattacaaggtgtac

SEQ ID NO: 51290 - DNA, 169 bp, Glycine max
  Clone ID: LIB3109-002-Q1-K1-F6
tactactcacagtctggttaaaaattggattaaatcggaggggtttacaatatatctgcagatactaatgaactatggaattgaggctactgttctcacatatcttatattctataaatcgatcgatgaaatcctgaacgcctcgattgatatcgaattttttacatct

SEQ ID NO: 51291 - DNA, 371 bp, Glycine max
  Clone ID: LIB3109-002-Q1-K1-F7
gggagaatggaggtggtgtgtcggggaatgttgaaacccagaaagttcatgcagaggaggaggaaattcgaggttttcaaggattctgcagatgaagctgaccagaagaattggaggagaatcatgactgaaatcgaagaatccggttctgctgtctctgtgctctctgctgagaagattaataaccaaaatattcctaaagacctcgttgttggtaccttgattaggtttaaacaactcaaaaagtggaaccttgttgttgagattctcgaatggcttcggactcagaactggtgggattttggtaagatggatttcttcatgcttatcacggcttatgggaagctaggagacttcaatggtgccgagaa

SEQ ID NO: 51292 - DNA, 392 bp, Glycine max
  Clone ID: LIB3109-002-Q1-K1-F8
gatttaaatgaagggttcaatgcagatgatggggaatgtagtgagatgcctgggtctacacctgctgcacgattggtcagtcctgttccattttctgcttcatccatgtcttttggtattctctcgatcacagtagctgctgctgcaaagagcccctttgtggcacctgaagatttattgaaaagtaaaaaggagcttggttggaagggatctgctgctactagtgcatttcggccagctgagcccaggaaagttatggaaattcctcttgatatgtcaactacccctattcctaatgatgaagctagaaagcagagccgggcaccattggattttgacttgaatgtttctgatgaagtaatacttgatgatgtttcttcccaaaattgtgc

SEQ ID NO: 51293 - DNA, 456 bp, Glycine max
  Clone ID: LIB3109-002-Q1-K1-F9
ggtgttattgaagagtagggataatagaatccgtatcgtagcaaaacgcacgagttaggggcggcgatgggaggttcatcggaggatttctcggtggtggtgctggcgtcggacctcggcgtcgatgcgcgacctttcctcgaacacgatcaacagcaagaagaagagaattggcacgactgttcccagtacctctcccccgacgaggacttctccgatctcgatcagttgcaattcctccgcctccaaggctccgacaagaactccaatcgcattctccgcatcgtcggcaagtactttcccgcaactgttgtgagtgcggagcggctcaagcggtatgtgttcaacaaaatttgcagtgagttgcctgaggggcccttctgtattgcttacatgcacagcaccgttcagaaggaggataattcccctggcatcaccatcttgaggtggatctat

SEQ ID NO: 51294 - DNA, 302 bp, Glycine max
  Clone ID: LIB3109-002-Q1-K1-G1
ggagtgagagggtatcaattgagtgatcagtcggggcgaaagccgtactcggagaagaaacgcgactcaaattggcggatgatcgtctcatccaatccgtagttccatccgaggtgggtcttttaatcggaaagttcagctcctttttgggccggtccttcctcttcgatctcattcccaccccacacaacgactacggcgagcccgcctgctccctcaccgagtcctacaagactaatgtccccaaatttaaatccaaattctagctcgttgattcctctttctttttcatcgtcaaggac

SEQ ID NO: 51295 - DNA, 423 bp, Glycine max
  Clone ID: LIB3109-002-Q1-K1-G10
ggtggtggtggtgccaatattgggactggcaccaccaattattggaacctcaatatgtgccaagaagtgaataatcctgcaaagaagggtgtgatcaacgtggctgatcatgatgatgagaagggtgtgatggagagtgaggaaaacggggtctatgggcctgactttagggtgtgccaagattgtggcaacatgcgctaagaaagattgcgtctttagaagatgcatgacttgctgcatgggacgtgggtatgattgcaacactcacgtgaagagcacgtggatccgctacgttcgacgactctagcgcgatatcacggtggctctcggtggctgtgttagcggatatggtggtctgtagatgccaatatctgtgctggggtcatctcataatgccacttttcatagttacaactctaatgc

SEQ ID NO: 51296 - DNA, 447 bp, Glycine max
  Clone ID: LIB3109-002-Q1-K1-G11
ggaggaaaagtgtgagaacgaaaatggagcattgtagctgctacatgttcacgctgagccttcttcttcttcttcttcttactccgccttctctctccgacgatctcggattcgattttccggcgaagaagctgataagagaccttaacctttttccttctgaagatgtcaacatcgttcctcgccactccaattctcacgccaacaaaatcgtcgagaaaccgcttaggttcccaaacttagtgccttcagactccggcatttccctcgacgacttggctcaccgagctggctattatcttattcctcattctcatgctgccaagatgttctacttcttctttgaatcaaggaacagcaagaaggatcctgatgtgatttggttgactggtggaccaggttgcagcagtgaatcggctgagttttatgagaatggccctttcaaga

SEQ ID NO: 51297 - DNA, 438 bp, Glycine max
  Clone ID: LIB3109-002-Q1-K1-G12
gactgacaagatgcatgatacaagactctaatcctaaatctaaggagagaaaaaatttcacaagataatcagcaaataaaatttgtaatgaattttgagtaattcttagtttagaaaaaagtgaaggacacttgagtctagaattacttatattaatttgattctgtcgagaagcttgagcgagtagagttgaggattgagtaacggagatgtagcagagtcacccggctattcaacaggactttccgttttattcatttcacttttgaatcttcgaatcacatccgatgggtagcagagggcacactctcttggaggttggacccgacgacggtgttgccgtcatcaccatcgtcaaccctcccgttaattcactctcatttgacgtattgcgcagtttaaaggagagttttgatcaggcgatacatagagatgatg

SEQ ID NO: 51298 - DNA, 393 bp, Glycine max
  Clone ID: LIB3109-002-Q1-K1-G2
gacgttagatcatgtgtttatcgcaagaaaacacggcgtgggtcatcaacattcatggaaaaacagataccttttactggaatattaagcaataatgttgaagataatccagattttttcaactggaacagagtgaaaattcgttattgtgacggtgcctcttttgctggggatggtgaagataaggctgcgcaactgcaatttggaggacagcgtatttggtcggcagcaatcgaagatttgatgtcaaagggaatgcgatttgccaggcaagctcttctttctggatgctcggctggtggtttggctactaatatacaactgtgatgaattcagaaggttttttcccacagactacgaaagtgaagtgtcttaatgatgcaggattatttt

SEQ ID NO: 51299 - DNA, 342 bp, Glycine max
  Clone ID: LIB3109-002-Q1-K1-G3
ggccatcaaaaggaatagtttgattggaggagatgactttaagagtggtcagaccaaaatgaaatcggtgttggtggatttcctagtatgggccggcatcaagccaacatctatagtgagttacaaccatttgggaaacaatgatggcatgaatctctcagcccctcaaaccttccgctcgaaggaaatttccaagagcaatgttgttgacgatatggtcaacagcaacgccatcctctatgagcctggtgaacattcggaccatgtggttgtcattaagtatgtaccttacgtttgtgacagcatgatggccatggatgagtacttctttgagatattcat

SEQ ID NO: 51300 - DNA, 153 bp, Glycine max
  Clone ID: LIB3109-002-Q1-K1-G4
agataagacttccgactgttggttctgaatatatatttctgttttcggcaaggagtgtgtgttatcgagatagctcctttgactcatctatcagaatctgatggcccaaaatctagggtattctgttcctctttgtggatctgaattacattc

SEQ ID NO: 51301 - DNA, 390 bp, Glycine max
  Clone ID: LIB3109-002-Q1-K1-G5
gatatcaggtggcaacaacactgcctcagggaacccaactttccgccctaattctcagtttatgggcttgcaccacccaagaccaatgcctgccatgggagccacccatagcttcataaataggatgtacccaagcaaactatatggtcaatatgggaacactgtcagatctggaatgggttatggtacacatgggtatgattctcgcactaatggacgggcttggttagctgttgacagtaaatacaaaactaggggaagaagtggtggctactttggctatggcaatgagaacgcagatggtttgaacgaactgaacagagggcctagggccaagggtggcaaaaaccaaaaaggttttgcaccaactattctggcagtcaaagggca

SEQ ID NO: 51302 - DNA, 372 bp, Glycine max
  Clone ID: LIB3109-002-Q1-K1-G6
gaatcaagtgaaagctctgatgaagacaatgatgcataacccgccgtaactgatgtgtcaaagccttctgctcttgcaaagaagaaggttgacagctctgattctgatgatagcagctctgatgaagataaggggaagatggatattggtgatgatagttctgatgaaagtgaagagccacaaaagaaaaagactgtgaaaaatccataagaaagcagtgatagttccgaagaagacagtgaggatgaaagtgaggaggaaccctccacaactcctcagaaaagagacagggatgtggagatggttgatgctgcctcgtctggaaagaaagcgcctaagaccccagttacacccaaagaaaaaactggcgct

SEQ ID NO: 51303 - DNA, 369 bp, Glycine max
  Clone ID: LIB3109-002-Q1-K1-G7
gatacaaaaagttcttatcagtgacagagtaaaggaggcataccgatgacgatggcgatgacggcgtcgcagttgcggtgcggttgggggtggaggccaacgccgaatcagcagcagcaacgacgtcgtatggttccggtggtgtgttccatcgctatagagaacgcgaagaacaaagagagagcgaaactgaagaagctcttcgatgaagcgtacgagaggtgccgcactgctcccaccgaaggcgtttccttcactctccaacaattcaccgacgctctcgacaagtacgacttcaacgccgaaatgggcaccaaggttaagggcactgtttttgccacggataacaatggagcttatgttgacatt

SEQ ID NO: 51304 - DNA, 387 bp, Glycine max
  Clone ID: LIB3109-002-Q1-K1-G8
ggagagaaagagtgaggagagaattacagagcattttccaacacgattacacgaccgaatcaaaccctctctttctctccgaagctgcgtttaatatcttactcgccttagattgttcttctctttcattatactgttctcttttcgatttgagggaacagtacaagagtgtgaggatcggttaacccaactgcacaggtagtcactaaaataatggagtctcacgatgagactggatgccaggctcctgaacgccccattctttgcattaataattgtggcttctttggaagagcagctaccatgaacatgtgttccaagtgttacaaggacatgctgttgaagcaggagcaggacaattttgcagcatcgtcggttgaaaacatt

SEQ ID NO: 51305 - DNA, 371 bp, Glycine max
  Clone ID: LIB3109-002-Q1-K1-G9
gcttggcaatgggactgagtcagtgaaaccctagcggtgggactgacactctccgaagcaatggaagttccttatgaagcgccgtctaccgacatagacgacgagaccataagctaaaatgcgctgaagcgcgaactcatgaacaaacagaaagaagaagataggaaacgcaaggaggaggacaaggccaaaaaggcagctgacatgcagaaggctaacgataacacatctgcacctgctgatgaagatgatatggacccaactcaataccttgagaagaggcataaagtatcttgcagttcataaggcagaggggaataacctatatcatgacaaatactatgtcactatgtctattgatcaatacatca

SEQ ID NO: 51306 - DNA, 381 bp, Glycine max
  Clone ID: LIB3109-002-Q1-K1-H1
gaaaaaatttgaatctattggtatatgcgaatcaatcctactacttctggtcctgaggtttctgcgcttgaaaaaaaaaatctgggacgtatcgcccaaataattggtccggtactagatgtagcttttcccccaggtaagatgcctaatatttacaacgctctgatagttaagggtcgagatactgttggtcaacaaattaatgtgacttgtgaagtacagcaattattaggaaataatcgaattagagctgtagctatgagtgcgacagaaggtctaatgagaggaatggaagtgattgacacaggagctgccctaagtgttccagtaggtggagcaactttaggacgaattttcaacgtgctgggaaagcccattgat

SEQ ID NO: 51307 - DNA, 446 bp, Glycine max
  Clone ID: LIB3109-002-Q1-K1-H10
gaacatacggatgaacattatattgggaactgcaagaggattggcctatcttcatgagggtcttgaaccgaaagttgtccaccgagatgtgaaatcaagtaacatacttattgatcgccaatggaactccaaggtttccgattttggacttgctaagcttttgtgttctgagaatagttacgtcacaactcgagtgatggggacatttggttatgttgcaccagaatatgcatgcactggaatgctgactgagaagagtgatatttatagctttgggatacttatcatggagataatcaccggaagaagtcctgttgattatagtagaccgcatggagaggttaatttaatagaatggttgaagactatggttgggaatcgaaaatccgaggaagtagttgatcctaagctccatgagatgccattttcaaaggctcttaaacgtg

SEQ ID NO: 51308 - DNA, 377 bp, Glycine max
  Clone ID: LIB3109-002-Q1-K1-H11
ggcagcgcttgagaccaagccccactcaaccaccacaccactctctctgctcttcttctacctttcaagtttttaaagtattaagatggcagagacattcctatttacctcagagtcagtgaacgagggacaccctgacaagctctgcgaccaaatctccgatgctgtcctcgacgcttgccttgaacaggacccatacagcaaggttgcctgcgaaacatgcaccaagaccaacttggtcatggtcttcggagagatcaccaccaaggccaacgttgactactagaagatcgtgcgtgacacctgcaggaacatcggcttcgtctcaaacgatgtgggacttgatgctgacaactgcaaggtccttgtaaacattg

SEQ ID NO: 51309 - DNA, 218 bp, Glycine max
  Clone ID: LIB3109-002-Q1-K1-H12
ggtacctaatcgaaacaggtactcccaatattcaggacgctgagactggttcaatgggaattttattatagactgtgacggcgttcattctatcaacaaccgaagacatctaagatcgtaagggatacacaatacacagtagatttaaagccttggtgctaaaacaatgtggatctgatacataccgctgcataattcccgatgatgaagataggtgc

SEQ ID NO: 51310 - DNA, 283 bp, Glycine max
  Clone ID: LIB3109-002-Q1-K1-H2
gacgataaagggtttttgttttgtttccttgggggctgcatgcactttcactcgaagaaccttgaagcgagtctgggccacagcaaccagcgacaacaactcaatcagctagggttgctttgcttgctatcttgttggaggattttctgttcaagagaagatggtaactagaattgtggatcttcgttcagacacagttacaaagccaactgaagcaatgagagctgctatggcaagtgctgaagttgatgacgatgttctaggctatgatccaactggtttt

SEQ ID NO: 51311 - DNA, 396 bp, Glycine max
  Clone ID: LIB3109-002-Q1-K1-H3
ggatgaagataggatgcttctgaaattccgatgcgtcaataaggtccttaagtaaaaaatactactgtcgtcacagatctgaatctggtcccctctggtatcgtgtagtactagtattttagttgcatctaataaatgaggatacccaagaagttgatttaataaatgttcaccaacttaacataagctatttgattttgctgacaaatacagaggcaaatatgacagcagcatcacggttgcccaaaagtattacagatccatcagtggttacaatgatgaattgctctgggctgctgcttggttgtatcaagcatctaacaaccagtattacttggattaccttggaagaaatggtgattccatgggtggaactggttggagcatgactgaatt

SEQ ID NO: 51312 - DNA, 386 bp, Glycine max
  Clone ID: LIB3109-002-Q1-K1-H5
ggggagcgaagtgaattgaaattgaagtgactcggggtgagttgactcagcaatggcggaagaggtgactcgggtgatggtggcggtgaacgagtcgagcattaagggataccctcatccttcgatcagcagcaaaggggctttcgactggaccatcaacaagatcgttcgcgacaacgtctctgccttcaaccttctttttcttcacgttcaagtccccgatgaagatggttttgatgacatggatagtatctttgcttctcctgacgattttaagaacatgaatcagagagatagaattagaggagttcatctgctggaatacttcatcaataggtgtcatgaaattggggtggtttgtcaagcatggataatgcatggtgatc

SEQ ID NO: 51313 - DNA, 367 bp, Glycine max
  Clone ID: LIB3109-002-Q1-K1-H6
gaggaaggaaatgtgcagttagatgcaaaacatgaatgcaaagatgcaactctttttcaggcccctgaagattgtgcacttgccataacaagcattattcgtcaccatgaaacagagtaccttgcttctcttgaggcatcatatctaaaccttcctgattctactttcaaggatcttcggagaaagcttcctgtcacccgcacgttatttccatggcataatactttgcagttcagcttgacaagagacatctcaaaagaacttggcattggaaaagtaatacactacattcacacagaacaaataaaagtttgtgtttactcggtggtgacaagttcctcatatattcactacatgtcatttgatc

SEQ ID NO: 51314 - DNA, 281 bp, Glycine max
  Clone ID: LIB3109-002-Q1-K1-H7
gctgcgtgagtgagtagtgtgacggacgaacgaactgctgctgcatcgagtgccgttgcaggctatagcgccgtggtcagatgctcctgggttttgtcaaaacgatagccttaagagtgtcattgcgatccagtacacggtaaactcgactcaattgatggtttactttaacgcttgttagctcaacgatctacgctcgattagtgccgtcactctaaccgactaaactatcaaattgaactacagcagctatcactagatgtcaagttaggattatatgc

SEQ ID NO: 51315 - DNA, 383 bp, Glycine max
  unsure (1)..(383): unsure at all n locations
  Clone ID: LIB3109-002-Q1-K1-H8
ggaggagactgagaaaacagaagaaaacaaaatggaagacacagtttctgcgttgaggtctttgatggtttctcactctccgccgctggatgccttagtggtgccctctgaagattatcacctgagcgaatatgtgtctgcacgagacaagcgccgcgaattcgtttccggcttcactggaagtgccggcttggcacttataacaaagaaagaagcactgctgtggacggatggacggtattttttgcaggctgagaaagaacttantgctgggtggaagctaatgcgaattggtgaagatcctgctgtaaatatctggatggccgataatttgccaaaagaagcattcgttggggttgatccctggtgcatttcaattgata

SEQ ID NO: 51316 - DNA, 428 bp, Glycine max
  Clone ID: LIB3109-002-Q1-K1-H9
gccggatgagcagaggaatccaattcaagaatatcaggttgctcacattcctggtgcccttttctttgatgtagatggaatagcagatcggactacaaaattaccacacatgctgccatcagcggaagcgtttgctgctgctgtttctgctcttggcatagagaacaaagatgatttggttgtttatgatggaaaaggattatttagtgcagctcgtgtttggtggatgttccgagtatttgggcatgacagagtttgggtattagatggtggcctgccgagatggcgtgcatcaggttatgatgttgaatccagtgcttcaagtgatgctattcttaaagccagtgctgctactgaggctatagagaaagtatataagggacaaacagttggcccactcacatttcagactaaatttcagccacatc

SEQ ID NO: 51317 - DNA, 413 bp, Glycine max
  Clone ID: LIB3109-002-Q1-K2-A2
ggaagaaaggcagagttattgccattgcctctgcctcttgcaacaccaaactgatacacacttaataatattatagtaaaaattagccaccaaagtacactaaccccttttttcatacaactcaatagctggattggagcaaggtgaaagtaaaatcatttgcaaccaatgccgttgaacatatttcaggacaaagatggattgccacggattatattgactgagccaaagggttcatcagctgaggttcttctttatggagggcagattatttcttggaagaatcatcgaaaggaagaacttctttctatgagcagtaaggctaacaagaaacagcataaagcaatcagaagaagaatatcagcttgcctagcacggtttggtgatctcaagtcacttgaacaacatggatt

SEQ ID NO: 51318 - DNA, 420 bp, Glycine max
  Clone ID: LIB3109-002-Q1-K2-A3
gtagtgctctattggaaatgatgatatttcatgtacccgggccatcaacagcccagaagtatcgtgtggagaacttgtatgagggtcctcttgatgatcaatatgcttctgctatcagaaattgtgatcctgaaggtcctctgatgctctatgtctccaagatgattacagcatctgacatggggagattttttgcctttggccgtgtattctctggcacggtttcaactggtttgaaggctaagattatgggacctaattatgtccctggggagaaaaaggatttgtatgttaaaagtgtgcaacgaactggcatttggatgggaaagaggcaagatactgtagaggatgtcccctgtggtcatacactggctatggttggtcttgaccaagtcatcacatagcatgcaacattgacaa

SEQ ID NO: 51319 - DNA, 286 bp, Glycine max
  Clone ID: LIB3109-002-Q1-K2-A4
gtcgaccacgctccgacacgcgttcgaacacatcgaaggactacacattttacacttacaatttaaaagggagctgtatttttaacggagcaaccgtatgtctaaagtagtttggtcaccctaccatgacactatccatcatgtatagtactactctcctcatcgtgcttacactttccatgcctcctttcaagatatcacttatgataacgagacataacatttctaataaattgaatgctcatatactcatctacattttttttaaatgtatcattattgacat

SEQ ID NO: 51320 - DNA, 326 bp, Glycine max
  Clone ID: LIB3109-002-Q1-K2-A5
gtcgctggaaggcggtggcttgtaggcggcggagcttcgcgagattaggttcggatcgctcggtctcgctaggtcaccgctgacgagaatttgaacttctcgtcactactaagccgctatttagctaaagcatgcgttgggagaaagcaaatagcatctaatttgttaacaatggaagatgatctgttggacacagaagacaggaacaacaatggcagttccacccgaaagaaatcgaagcagcggcgaaagacgaaggagtacatggtggacgaggatgggcaggttggggcacgagaaaagctggcaaaaagaatcttgatatc

SEQ ID NO: 51321 - DNA, 414 bp, Glycine max
  Clone ID: LIB3109-002-Q1-K2-A6
gtcggacgagggtttcgtttcgggtttgacgttgttcacaatcactttctgcgcttcactcactcccttcgtgcggttttctttctttgtcgaactcgtgcgaaaatgcgtgagattcttcacatacagggagggcaatgcggaaaccagatcggagcgaagttctgggaggtggtgtgcgcggagcacgggatcgattccacggggaggtaccagggggacaacgagttgcaactcgagcgagtcaacgtctattacaatgaagcgagttgcggaaggttcgtgccgagggcggtgctcatggatctagagccagggaccatggacagcgtcagatctggtccctacggtcagattttccgacctgataacttcgtcttcggccagtccggcgccggaaacaactgggccaaa

SEQ ID NO: 51322 - DNA, 423 bp, Glycine max
  unsure (1)..(423): unsure at all n locations
  Clone ID: LIB3109-002-Q1-K2-A7
gggttctagtgtgtgattgtttgttgttgtaactcgttcttcttcttttgttgttctgtgtttgtgtttgttttttctctcacctgaaaatgtcttgctgcggtggtaactgtggttgcggaagctcctgcaagtgcggcaacggctgcggaggctgcaagatgtacccagacttgagctacactgagtcaaccaccaccgagaccttggtcatgggagtggcacctgttaaggctcaatttgagggtgctgaaatgggtgtgcccgctgagaacgatggctgcaaatgtggaccaaactgctcctgcaacccctgcacttgcaagtgaggtgttgggagggcaagcttcaagcagagatagcccttaattaggaataatgataaactattaatgtgtagctaanaacttatgtattatgtct

SEQ ID NO: 51323 - DNA, 353 bp, Glycine max
  Clone ID: LIB3109-002-Q1-K2-A8
gacccacgcgtccgacgggttccaaaaaacccccaaagggggtttctagcgtgcgatagactgtagttctagcgcctacttattcttaggtcaaccatctctttatatcacctattaatctcacctgaaaatgcctctctactctaataacttaattctctcaagctcctgcacttccatcaacaaatgcgacagcttcacaatgtacccaaacttgatctacactaagacaaacaccacctagaccttcctcatgttatatcaacctcttaaaactcaatctgattgaacacaattaccaattccccctaataacaacagctgcacatatgaaccaaactactcctgcaacc

SEQ ID NO: 51324 - DNA, 397 bp, Glycine max
  Clone ID: LIB3109-002-Q1-K2-B1
tagtaacggcgagccactctgctggactgctgccttaagaccacagaaggggacaaccacttgcatcattaaagggataagccgtaatctggcaaccaaacacaaccaaaatacgctactcgttaagggctgcactataccagaatgtctcacggaagaggctgcgcatatatgcctaatgtggtcactggggtgtcacaactgtgcctaacgtaacgcgcttacgcaacatcttacttctctggacgacctgtaggatggaccattaacactaatgcttgacccaatggaaaaagactttgagctggtgatatcctaatcataaactatgactaaacgacctacaatgatgcagctgaagacagaaattgaaacaacagctagaagacaacaacat

SEQ ID NO: 51325 - DNA, 398 bp, Glycine max
  Clone ID: LIB3109-002-Q1-K2-B2
tgggatgatgaacatgaagaagagcaagtggggtgcataagcaaagggaagcaattgatggatgatcgaaatgtatctgtaaatttgactcctgttcgctccttaggatatgttgacccagggtgggagcatggtgttgaccaggacgagagaaagaataaggtcaaatgcaattactgtgagaaaattgtcagtggaggtattaatcggattaaacaacatttggctagaattcctggagaggtagcaccttgtaaaaatgctccagaagatgtttatatgaaaattaaagagaacatgaaatggcatcgtactgagaggagacttacgcgaccttaggctaaagaattgatgcctttctatgcaaagtcggataatgatgatgatgatgatgagta

SEQ ID NO: 51326 - DNA, 420 bp, Glycine max
  Clone ID: LIB3109-002-Q1-K2-B3
gagagggaaaagagttgaagacttgaagtgaagaaagaaagaattgagaaaggatagggtttagggttggcaaaggaaggaagggatggaagcagctgtggtggacgtcggctctaagcttctcaaagcggactttgcaattcctgaccagactcccgccatgataattcccactcagatgaagcaattgctcgatgatggatcagtcactgatagttcactggctgacaatgtcaccgttgatcccgtcgtgcgaggatttattagagattgggatgccattgaagatttgttgcaccatgttttgtatactggcctcggatgggaaattggcaatgaaggacaaatactatttactgatccactttgtacccctaaggcgaacaaagaacagctggtgcaactaatgtttgaaacatt

SEQ ID NO: 51327 - DNA, 386 bp, Glycine max
  Clone ID: LIB3109-002-Q1-K2-B4
cggttgaagtcattgcaaggagcattgctcagctgtacggacactgtacttgactatgcacaaaccggtttgattgcagcagtgttcttctttaaaatgatggaatggtggtaccaatctgctgaggagagaatgtcagctcctacagtatatccttctacacctccttcgtcttcaccaaaggtagccaaagaagggataccactaccaccagacagaacaatttgccccttatgctcgcaaaagcgtgcatatccatctgtagttactgtttcagggtatggctactgctatgcttgcatatttaagcatattactcaagataagctctgaccaattacgttaatgcctttaacagttgacctgattaggagactttttcatga

SEQ ID NO: 51328 - DNA, 392 bp, Glycine max
  Clone ID: LIB3109-002-Q1-K2-B5
ggcgcattgaacgaaaattagggtttgtagtgtagcaggaagaagcagcaatggcgccgaagataacacgtaaggttagcagaaaccctgaattgataaggggaatcggaaagtactcgaggtcgcagatgtaccacaagaggggcatttgggctatcaaggccaaaaacggtggcgttttacctcgccacgaccctaaacccaagcctgaagctcctgctgaaaaaccacccaaattttaccctgctgatgatatcaagaagccccttgtcaacaagcacaaaccgaaaccagctaagctcagggctagcattactcccgggacagtgttgattcttcttgccggtagatttaagggaaagagggtagtctttttgaagcagcttccttct

SEQ ID NO: 51329 - DNA, 418 bp, Glycine max
  Clone ID: LIB3109-002-Q1-K2-B6
ggggctgacattcacgaagcttttcagccgggttttcgcgaaggaggaaatgcgaattctgatggttggtcttgatgctgctggtaagaccactatcctctacaagctcaagctcggagagatcgttactacaattcctaccattgggttcaatgttgagactgtggaatacaagaacattagcttcactgtttgggatgttggtggccaggacaagattcgtcccttgtggaggcactacttccagaacactcagggtcttatttttgttgtagacagcaatgatagggacagagttgttgaggccagagatgagttacataggatgttgaatgaggatgaactgagagatgccgtattgcttgtgtttgcaaacaaacaagatcttcctaatgcaatgaatgctgctgagattact

SEQ ID NO: 51330 - DNA, 402 bp, Glycine max
  unsure (1)..(402): unsure at all n locations
  Clone ID: LIB3109-002-Q1-K2-B7
gggagtcagacagacaaacagactactgctacgttaatcatgggtccaacctctatggccgccggaagagtcacgaggtttttggccaggcactaccctctcgagcaccaccgtgataacgccgatgttgagttcgactttcttgatgatattggagaagccttgttagctcaaagtgctagcagtgatgagtgcggtcaccccaatgaaatggaggaacagttcgaccaagacgaggatcacagagataccgtcgaggagaatagaaccttttgggacaaacaacaccagcttttgcaggccagtatatgcagaactagttcttcggagtcacggataaggcatgccaccaaagaagcgcttcangaaattcaaagcgcggaaactgtgtgcggttgtggc

SEQ ID NO: 51331 - DNA, 420 bp, Glycine max
  Clone ID: LIB3109-002-Q1-K2-B8
ggaccaagagattaagtcttggcttgcatttgcagcacaaaaagttgttgaagtaaatgccttggccaaggcattgtctggacagaaggatgaggttttcttttctgctaatgctgctgccttggcttcaaggaagtcctccccaagggtgataaatgaggctgtccaaaaagccgctgctgctctgaagggctctgatcatcggagggccacaaatgttagtgccaggttggatgctcaacagaagaaattgaatctttctgttcttccaacaactacaattggatctttccctcaaactgccgatcttagaagagttcgtcgtgaattcaaggctaacaagatctccgaggaagattatatccgtttcattaaggaggaaatttacaatgttgtaaagctccaggaagaacttgacat

SEQ ID NO: 51332 - DNA, 272 bp, Glycine max
  Clone ID: LIB3109-002-Q1-K2-C1
ctagtaacggcgcgccagtctgctggaattcgcccttccgagcggccgaccggccaggtacgcgtgcaggcattcatactcaatgtctagggggtatcacaactggtaatctagccaactaaaaacgggcacaactcaaagctaatgatggagctcatggtattgctcaaacatgagagcctgaacaagagtcatatggacagcatctgtccttatcctatcatctgtgtcggctgccatatgtcctgtaccatatcatccgttgctgcctg

SEQ ID NO: 51333 - DNA, 383 bp, Glycine max
  unsure (1)..(383): unsure at all n locations
  Clone ID: LIB3109-002-Q1-K2-C2
cgacagggaaagcaaaatatctgatctttctccctcccttgggctgagtaggcaatggcggaggaagcacagtactcatcgggacccgattccgcgcccctcaagcgcaagtacgaagaccaaccctacggcatcgagcttgccaagcagcgtgctcatgaagtcgccgcacgccttctcaacgtcgcttctactacgtcactcgacgccaatgcgtccaaacccgacaccggcttttattctctcgatttgaagcctctgtatttctgatgtnctccatccgtcttctacggtcaccaaggatccagcaagaagattgatatccctaatggcatggttggtgtgattattggtaaaggctgaaagactattaagtatcttca

SEQ ID NO: 51334 - DNA, 426 bp, Glycine max
  Clone ID: LIB3109-002-Q1-K2-C3
catgggtttggggtttaacaacaaattctacggcgcttggtccctcttcgactttatacgtacccgatacgaccgcgtttcgctcctgaacggttccgtgatcgccgtgatcgtcttcattctcgggaaaacgggtagggttttccgcgcggcgtcgctgctgcacaatctagaagccgatgggtttgaggcatatgtgtatggctacacctctctcataactgcttatgctaataataaaaaatacagagatgcactcaaggtgtttgggaaaatgaaagaagtggggtgtgaacctactttgattacttacaatgcaattttgaatgtttatgggaagatgggcatgccctgtgctaagatcattgctcttgttcaggacatgaattgccatggccttgcccctgattcgtgcacttataatac

SEQ ID NO: 51335 - DNA, 414 bp, Glycine max
  unsure (1)..(414): unsure at all n locations
  Clone ID: LIB3109-002-Q1-K2-C4
gaagatagaagtgagaatacgaaggaaggggtttagttgccgaatgaagaaggctcacgagacacgcatggggtcagccacatgctatccctnctactactacttctctctccggtggtggtgactcgccggataacacccactgccacctctaacgccgtcgccggcgaacacccttctcaaaatctcacccgacccaattcacctttctcctctctcttctcaattccccatctgggtatccctgtttcccttaaagttctcttctttttcgtgattcagaagtgctcagtgatacccttttcttagaacaatgagagcggtgaaagggagtcaggaagaggatgagtacgaggaaaatgagtttggttcttccaagaacagggcactttctttgccctaacaccataagat

SEQ ID NO: 51336 - DNA, 416 bp, Glycine max
  Clone ID: LIB3109-002-Q1-K2-C5
cgttctgagcagaaaccaatttactggccacatgcctcaaaatattggaaacatttcaaagcttaggcagcttgatttgtcactgaataatcttagtggagaaattccagtcgcctttgataatctgcgtagtcttagtttcttcaacgtttctcataacaacctctctggtccagttcccaccctacttgcccaaaaatttaactcgagctcatttgtggggaatattcaactatgtggctatagcccttcaaccacatgttcctccctagctccttctggttcacctcctgaaatatcagaacaccgtcatcataagaaattatgcaccaaagacataattctcatagtaacaggagtgctccttgtagtcctggtaacaatttgctgcattctgctattctgcttgataaaaa

SEQ ID NO: 51337 - DNA, 417 bp, Glycine max
  Clone ID: LIB3109-002-Q1-K2-C6
ggagcgcggaaccaaatgaaatgattgagaagagagagcgaagaaaaaaaagagagccaaaccaaacctttcccgaaacggttcgttttgcccttcttcggaaccctcccttctgcgccgctgctgctgctccggtcgccgtcggcgactctccggtaaccgaagaccactgccgatccgtcagaaacctcggatctcggatctgaacgagcgaaacgatgccgtctcacgcggatctggaccggcagatcgagcatctgatggagtgcaagcctctgccggaggccgaggtgaaggcgctgtgcgatcaggcgagggcgattctcgtcgaagagtggaacgttcagccggtgaagtgccccgtcaccgtctgcggcgacattcacggccagttctacgatctcatcgagctctttc

SEQ ID NO: 51338 - DNA, 418 bp, Glycine max
  Clone ID: LIB3109-002-Q1-K2-C7
ggatccagcacataacaatggaaacgcagctttacgtgttttctctctagattctgctcttaaacgccgtcgttttcaaactctttttttccccttcgcttctctgtctttgtaaccgaaaggggggaaaatataattaacaccgatttcgcgaccaattcttcttctgcgttgaattgggacaacgagaaattggatctcagtttttggcaggaaataaaaattgcatttgagtgtaaaataacagagtatagtgtagggccttgttcttgatactgtgctaaatttgttggatggcggagaaatcatgcatcaagcgccttcagaaggaatatagagccctttgtaaagagccagtttctcatgttgtggctcgtccttctccaagtgatattcttgagtggcattatgtgttgga

SEQ ID NO: 51339 - DNA, 417 bp, Glycine max
  Clone ID: LIB3109-002-Q1-K2-C8
gcattacctacatccattcactgtgaaccaattggacagtttaaggtaccaagctatgaacattgtggtggttaggcttgggagagcagaaccaccccttaggaaagaggttgtggagtacatgcttgatgtggactctcacatatggagcatgagaagaagcaaagccaatttcttcagaattgtgtcactcttttctggtgcaatatctatgagcaagtggcttggtgaggtacaacagtggaagaatccagtgaccacaatcctagtgcatgtcctctttttcatcttgatatgttaccctgaactgatccttcccacaatgttcctctacatgtttctcattggaatatggaactttaggtttaggccaaagcacccttcacacatggacaccaaactttcttgggcagaagc

SEQ ID NO: 51340 - DNA, 414 bp, Glycine max
  Clone ID: LIB3109-002-Q1-K2-D1
ggaggataatggacttgatgtgaacttctacaaggaatcatgccctcaggctgaagacatcatcaaagaacaagtcaagcttctctacaagcgccacaagaacactgctttctcctggctcagaaacatcttccatgactgtgctgttcagagttgtgatgcttcactgttgctggactccacaagaaggagcttgtctgagaaggaaacagatagaagctttgggatgagaaatttcaggtacattgagaccatcaaagaggctttggaaagggaatgcccaggagttgtttcctgtgctgatatcctcgttctctctgccagaaatggcattgattcgctaggaggtccccatatccctcttaaaacaggaagaagggatggtagaaggagcagagccgatgtggtagagca

SEQ ID NO: 51341 - DNA, 423 bp, Glycine max
  Clone ID: LIB3109-002-Q1-K2-D2
ggtatcaagaaattttgactgatcctagttatgctggccagtttgtgctcatgacaaacccacatattgggaatactggcataaattttgatgatgaggaatcaatacagtgtttccttgctggacttgtaattagaagtttgagtatcagtacctctaactggagatgtaagaagcctctgggggattacctagctgaaaggaatatcatgggaatttatgatgttgatactcgcgcaatcacgcggcgattgcagcaagatggcagtcttattggtgttttgagcactgacaattccaaaaaggatgaagaactgcttcacatgtctaagtcatggaacatttgtggtaaggatctaataagtggagtatcatgcaaaacttcacatgaatgggttgataaaacaaaacaacaatgggagt

SEQ ID NO: 51342 - DNA, 429 bp, Glycine max
  Clone ID: LIB3109-002-Q1-K2-D3
gggtgcacggttcagtatgtttgagatgagagggaagatagctttggcagagaaaggaatcaaatatgagtacatggaacaagatctcaccaacaagagtactttgcttcaagaaatgaacccaattcacaagaagattccagttctcatacatcatggaagacctatctgtgagtccctcataattgttgagtatattgatatggtttgggacaacaattgtcctttgcttccctctgatccctaccacaaagctcaagccaggttctgggctgattttgtagatcagaaggtgtatcatgcttctaagagagtttggatttcaaagggagatgagaaagaggtggcaaaaaaggacttcctagagagcttaaagcaattggaggagtttcttggagacaagccttattttgggggtgacacatttgg

SEQ ID NO: 51343 - DNA, 281 bp, Glycine max
  Clone ID: LIB3109-002-Q1-K2-D4
ggtttcacgattcagtatgtgagacaagagagggtatatggctagagcacataaaggaatcacatattagtacatcgaacatgatcttacctactacagaactttgcttcaagaaatgaactgaattcacaataagactccagttcatatacatcatgtaacacctatctgatactccctcataaatgtcgcgtatattgatataattttgatacaaccaaagtactttgcttctctatcattcctaccaaaaagctcaaatcaaccatatgaactcattc

SEQ ID NO: 51344 - DNA, 421 bp, Glycine max
  Clone ID: LIB3109-002-Q1-K2-D5
gatgatagtcattggtattgtgagcggggtacgtatgcaaatgtcaaatctgcctccacatgccagatgtgctatcaacaacgtcgatgaaaacttggttctccatttgaagcacttgtctcctgcccaaggcctctgcaccaaaagctgagatggagacattcctgtatgtttatatatatttatgcactatgcagtctccaattttgtgatgctaaatacaacaggatgaaaggagtaaggcatggaagaaaggttgctctccatgcgctcctattcaatacaaaacccaatttgatgtatatagtgttctatctctttatgtatgaggttttctgctacaggcatttgtaactcaatatcataacacaacagatgttggagaatggagatgaacacaaatgtgcttgtttgtgacaac

SEQ ID NO: 51345 - DNA, 284 bp, Glycine max
  Clone ID: LIB3109-002-Q1-K2-D6
tgtatggggttgcgcggaaccaaatgaaatgagtgataagggagagcgtagaaaaaaaagagagccaaaccaaaccttttccgaaacggttcgttttgcccttcttcggaaccctaacttctgtgccgctgctgctgctccggtcgccgtcagcagactctacggtaaccgaataccactgccgatccgtcagaaacctcggatctcggatctgaacgagcgaaacgatgccgtctcacgcggatctggaccgtcagatcgagcatctgatggagtgcaagcct

SEQ ID NO: 51346 - DNA, 394 bp, Glycine max
  Clone ID: LIB3109-002-Q1-K2-D7
gagaaaagcaaaagaaggtcacgataagtgatttggctattgtcttcaatggggctaaggggacatttcatgtggaggacaaaccattgtatgctgtttcctttgcagctaatggtaatgtggaatatgtggtactttatcatgaatatggaaatgtggaattgttttattcagacttgttaaaactttgtacagagatggatgctgctgatcttcacaaattcatatatgacaaccgtaagaaccttgctgctgtaaaggacgaaataccagatgcattaagagcagctactaacaccgtctgtttagatttagactctctgaacgtgttttactgtacagaagtgtcaaatcacgacgtagagaaggatgctaacttactggatgttcgtcg

SEQ ID NO: 51347 - DNA, 406 bp, Glycine max
  Clone ID: LIB3109-002-Q1-K2-D8
ggcacaagtgagtttgttgatcgagataactagaaacagtgtgatgaaaatgaaggtccttgttttcttcgttgctacaattttggtagcatggcaatgccatgcgtacgatatgttccctctccgaatgaacactggctatggtgcccgtactccggaggtgaaatgcgcaagttggaggcttgctgtggaagcacacaacatctttggctttgagaccattcctgaagagtgcgttgaagcaacaaaggaatacatccatggcgaacaatatagatcagactccaaaacagttaaccaacaagcttacttttatgccagagacctcgaagtccatcccaaggacacatttgtgttcagtatagatggcaccgtactctctaatattccatactacaaaaaacat

SEQ ID NO: 51348 - DNA, 363 bp, Glycine max
  Clone ID: LIB3109-002-Q1-K2-E2
ggctcgaggaaaagaaggaaatagaaaaagaaggacatggcacagcagtcctagatatcctattctctgcttcggaagaaagagagaacatactgatcaatggcgttcgcttctttccttggcagagtcctatttgctactgtcttcatactctctgcttaccaacagtttaatgaatatagagatgatgggggacctgctacaaaagcactcagacctaagattgatgcctttacacatcaggtgcattctcaagtgggctattaaattccagagattaatctgaaatctataattgctggagctattgctctgaaagatcttgcaagggttcttttcatattaggcagatcttttggagct

SEQ ID NO: 51349 - DNA, 412 bp, Glycine max
  Clone ID: LIB3109-002-Q1-K2-E3
gaaggaaggaagaagcagagcgaagcggtgacagacagaagaaaatgggaagcagaggtccacctcaatcccatccaaattccgctgccatttccaagggttacaacttcgcttccacttgggaacagaatgctcctctgacagagcagcaacaattcgcgattgtatcgctttctcacgccgtttctgagcgaccgttgcctctcaagttggctcaagagaatgcgtcggtacaagacaatgccttgtctgttaaaacgaaggatagttccgttgatgactctggtactattgagactgttatggtcaataccaatcagttctacaaatggtttacggatcttgaatctgccatgaaatcagagacagaagagaagtatcaacattacgtgaacactctaacagatcgcat

SEQ ID NO: 51350 - DNA, 427 bp, Glycine max
  Clone ID: LIB3109-002-Q1-K2-E4
gacacagaacaatagtagcaagcagagccccgagatctgtgcttgaaccttcacttgtgtttccttccttctgcagacgagcttcaccttgcgccgaagggccacagatggttgaaaccgatatggatgccgaaactgttgcaaatgtggttccaccaaaggagactccaaacagtgttcccatctcttatcattcctcacactcacaccctcctcttaatgagaggattatttcatccatgaccagaagatctgttgctgcacacccgtggcacgaccttgagatagggcctggtgctccaacgatcttcaattgtgtgattgagattgggaaagggagcaaggtgaaatatgaactggacaaaaaatcgggtcttatcaagatcgaccgtgttctttactcatcagttgtgtatcctcacaatta

SEQ ID NO: 51351 - DNA, 408 bp, Glycine max
  Clone ID: LIB3109-002-Q1-K2-E5
gatggaacggagaagctgagggcaccggacacagacagaagaaaacgggaagcagaggtccacctcaatcccatccaaattccgctgccatttccaagggttacaacttcgcttccacttgggaacagaatgctcctctgacagagcagcaacaattcgcgattgtatcgctttctcacgccgtttctgagcgaccgttgcctctcaagttggctcaagagaatgcgtcggtacaagacaatgccttgtctgttaaaacgaaggatagttccgttgatgactctggtactattgagactgttatggtcaataccaatcagttctacaaatggtttacggatcttgaatctgccatgaaatcagagacagacgagaagtatcaacattacgtgaacactctaacagatc

SEQ ID NO: 51352 - DNA, 395 bp, Glycine max
  unsure (1)..(395): unsure at all n locations
  Clone ID: LIB3109-002-Q1-K2-E6
ggactgaagacagatgatgatgctgatcaattacccaccattgcaatagttgcttcatatgacacctttggggctgctcctgcattatcagtgggaagcgatagtaatggaagtggcattgtggctcttcttgaagtagctaggttgttttctctcttatattctaatccaaagacaagaggacaatacaatctgctgtttgggctaacgtctggtgggccttataactacaatggaacccataagtggcttaggagctttgatcaacgtctgcgtgagagcattgactatgctatttgcttggatagtattggctcttgggaaaatgaattgtggattcatgtatctaagcctncagaaaatgcctntattaagaaaattcatgaagatttttc

SEQ ID NO: 51353 - DNA, 411 bp, Glycine max
  Clone ID: LIB3109-002-Q1-K2-E7
ggtcttggtgatggatagacacaaatgcaagcgtttgttcaaggtctttcagcaatggcagagcccttggtgggcacatgaaggctcaccttgcttctctccctctccctctccctccaaagcttcactcttgtttctcttcctctgactcagaacaagaacaatctttaagggagaatcctaagaaaaccttgaggattctggatcctgaagacagagagagcgagacagagtctaataagaacccgactcgtcaacgatccaagcgcaactggaaatctaccatgcccaagctcagcctcggacaccccgaagccgaacctctcagctccgtctccgacaccttccccgaagaagacctcggcatgtgcctcatgatgctctcccgcgacacgtggcatgaacacaaac

SEQ ID NO: 51354 - DNA, 417 bp, Glycine max
  Clone ID: LIB3109-002-Q1-K2-E8
ggcagatgagggtgctatttctctatggagaggaaacactgctaatgttatccgttatttccccacccaggctttgaactttgcatttaaggattacttcaagaggcttttcaactttaagaaggatagagatggctactggaaatggtttgctggcaactcggcctctggtggtgctgctggtgcatcatcccttttgtttgtttactctcttgactatgcccgtacccgtcttgccaatgatgcaaaggctgcaaaaaagggtggagagagacaattcaatggtctcgttgatgtctacaggaagacattggcatctgatggtgttgccgggctctaccgtggtttcaacatctcatgtgttggaatcatcgtgtatcgtggtctgtactttggattgtatgattctgttaaacc

SEQ ID NO: 51355 - DNA, 396 bp, Glycine max
  Clone ID: LIB3109-002-Q1-K2-F1
gaccctgatgaagggaatgctttagcacaactaagggcatggaaaacagctgtagcaaatataccatatggtggtgccaaaggagggatagggtgtgacccagcagaattaagtatatctgaattagaaagacttactagagtttttacacaaaaaattcatgatttgattggaactcacacagatgtgccagcacctgatatgggaacaggaccacagaccatggcatggatactatatgagtattccaaattccacgggtactatactgcagtagtgactggaaaacctatagatcttggcggatctcttcgtagagacgcaggtacaggacaaggagtactctatgcaacagaagctatgcttaatgagcatgggaagagtgtatctggacaa

SEQ ID NO: 51356 - DNA, 417 bp, Glycine max
  Clone ID: LIB3109-002-Q1-K2-F2
gagggcgaggaagccacatagagacacaatacagagtgagttgttgctccttcgccacaactctctgccaacatgggtatctccagagattctatgcacaagaggcgtgccactggtggcaagaagaaggcctggaggaaaaagagaaagtatgagcttggtcgccagcctgctaacactaagctgtcaagcaacaagacagtcaggaggatccgtgttggaggtggaaatgtgaaatggagggcattgagattggatactggaaattactcctggggaagtgaagctgtaactcgcaagactcgtgtactggatgtggtttacaatgcctcaaacaatgagcttgtgcgtactcaaactcttgtcaaaagtgctatcgttcaagttgatgctgctccattcaaacagtggtatctt

SEQ ID NO: 51357 - DNA, 426 bp, Glycine max
  Clone ID: LIB3109-002-Q1-K2-F4
gggagagagagggagaaagagaaggagatcgcacttaacacatcacacagcaagagaaagagtaatagaatcgtggttcgtttgcagaagaagaggttaagagaaggagtgaccgaagcgaagatgttaccaacagcttccaaaggacgttcttcttcttcctcctcctcctcctcttcctctcgacctaacaatcccatgctgcttccctacctccgcagaatcatcaagtggcaacaaatggatattgaatatactttttggcaaatgcttcatctatgtacatcaccgaaagttgtctatcggcatactaaatatcacaaacgtaagtctctgtctcattaatatctttgttcttctgatttattgatacacatttctgaacagtgattggtttaacaatgtttattaagcttctgttttact

SEQ ID NO: 51358 - DNA, 416 bp, Glycine max
  Clone ID: LIB3109-002-Q1-K2-F5
gggggtaaaaattggattaaatccatgatccttacagcatcactgttcccattcatgtgctttggaattggttttattttaaacacaattgctatattctatggatctctagctgcaatcccctttggtactatggttgttgtctttgttatatgggcttttatctctttccctctagcacttcttggcacagttgttggaagaaactggagtggtgctccaaataatccatgccgtgtgaagaccattcctcgtcccattcctgagaagaaatggtacctcacaccatctgtagtttcgctgatgggaggactgcttccctttggcagcatattcatcgagatgtattttgtattcacttccttctggaattacaaggtgtactatgtctatggcttcatgctacttggtttttc

SEQ ID NO: 51359 - DNA, 294 bp, Glycine max
  Clone ID: LIB3109-002-Q1-K2-F6
gtttgtataaattggattaaatccaggatcctgacagtttcactgttcccattcatgtgctttgtaattggttttattttaaacacaattgctatattctatggatctctatctgcaattcacttaggtactattgatgatgtctttgttatatgtgcttttatctctttccctttatcacttctagacacagctgttttaataaactcgaatgatgctctaatatatccatgctgttttaagaccatactttggttcataccttatattaattcatatctcacaccattttta

SEQ ID NO: 51360 - DNA, 397 bp, Glycine max
  Clone ID: LIB3109-002-Q1-K2-F7
gggagaatggaggtggtgtgtcggggaatgttgaaacccagaaagttcatgcagaggaggaggaaattcgaggttttcaaggattctgcagatgaagctgaccagaagaattggaggagaatcatgactgaaatcgaagaatccggttctgctgtctctgtgctctctgctgagaagattaataaccaaaatattcctaaagacctcgttgttggtaccttgattaggtttaaacaactcaaaaagtggaaccttgttgttgagattctcgaatggcttcggactcagaactggtgggattttggtaagatggatttcttcatgcttatcacggcttatgggaagctaggagacttcaatggtgccgagaaggtcttaggcttgatgaataagaatg

SEQ ID NO: 51361 - DNA, 427 bp, Glycine max
  Clone ID: LIB3109-002-Q1-K2-F8
gatttaaatgaagggttcaatgcagatgatgggaaatgtagtgagatgcctgggtctacacctgctgcaagattggtcagtcctgttccattttctgcttcatccatgtcttttggtattctctcgatcacagtagctgctgctgcaaagagcccctttgtggcacctgaagatttattgaaaagtaaaaaggagcttggttggaagggatctgctgctactagtgcatttcggccagctgagcccaggaaagttatggaaattcctcttgatatgtcaactacccctattcctaatgatgaagctagaaagcagagccgggcaccattggattttgacttgaatgtttctgatgaagtaatacttgatgatgtttcttcccaaaattgtgctcgtcagactgattgtggaactcattcagacaatg

SEQ ID NO: 51362 - DNA, 415 bp, Glycine max
  Clone ID: LIB3109-002-Q1-K2-G1
ggagtgagagggtagcaattgagtgatcagtggtggcgagggccgtagtcggagaagaaacgcgactcaaattggcggaggatcgtctcagccaatccgcagttccatccgaggtgggtcttttaatcggaaagttcagctccgctttgggccgggccttcctcttcgatctcattcccaccccacacaacgactccggcgagcccgcctgctccctcaccgagtccgacaagaagaagggccccaaatctaaatccaaatccgagctcgctgattcctcttcccttttcatcgacaaggactgggtcgccgaacatgtccgccaggtttctagaatgctcgtcggcggcatcaaggtcgttggcctatacgtttgggttagcgacgccgcgttcaagaattcaaccataatgct

SEQ ID NO: 51363 - DNA, 427 bp, Glycine max
  Clone ID: LIB3109-002-Q1-K2-G2
gacgttagatcatgtgtttatcgcaagaaaacacggcgtgggtcatcaacattcatggaaaaacagataccttttactggaatattaagcaataatgttgaagataatccagattttttcaactggaacagagtgaaaattcgttattgtgacggtgcctcttttgctggggatggtgaagataaggctgcgcaactgcaatttggaggacagcgtatttggtcggcagcaatcgaagatttgatgtcaaagggaatgcgatttgccaggcaggctcttctttctggatgctcggctggtggtttggctactattatacactgtgatgaattcagaggttttttcccacagactacgaaagtgaagtgtcttagtgatgcaagattatttcttgatgcgattgatgtctccaggggacataccatca

SEQ ID NO: 51364 - DNA, 400 bp, Glycine max
  Clone ID: LIB3109-002-Q1-K2-G3
ggccatcagaaaggaatagtttgattggaggagatgactttaagagtggtcagaccaaaatgaaatcggtgttggtggatttcctagtaggggccggcatcaagccaacatctatagtgagttacaaccatttgggaaacaatgatggcatgaatctctcagcccctcaaaccttccgctcgaaggaaatttccaagagcaatgttgttgacgatatggtcaacagcaacgccatcctctatgagcctggtgaacatccggaccatgtggttgtcattaagtatgtaccttacgttggggacagcaagagggccatggatgagtactcttctgagatattcatgggcggaaagaacacaattgtgttgcacaacacttgtgaggattcactgttagctgc

SEQ ID NO: 51365 - DNA, 427 bp, Glycine max
  Clone ID: LIB3109-002-Q1-K2-G4
gggtgctaaattgagataactgtgtgtgacagagagagagagtaatcaagatagctcctttgaattttctatcagaatctgagggcccaaaatctagggttttctgttcttctctggggatctgaagacatgcagtccaagtctgaaactgcaaatcgactgagatcagatcctcattcctttcaacctggcagtgtttattctgagccttggtggcgtggtattgggtacaatcctgtggcccagacaatggctggggcaaatgcatccaattcatcgtctcttgaatgccctaatggtgattctgaatccaatgaagaaggtcagtctttgtccaatagcgggatgaatgaggaagatgatgatgccactaaggattcacagcctgctgctcctaatggaacaggaaattatgggcaagaacagc

SEQ ID NO: 51366 - DNA, 415 bp, Glycine max
  Clone ID: LIB3109-002-Q1-K2-G5
gatatcaggtggcaacaacactgcctcaaggaacccaactttccgccctaattctcagtttatgggcttgcaccacccaagaccaatgcctgccatgggagccacccatagcttcataaataggatgtacccaagcaaactatatggtcaatatgggaacactgtcagatctggaatgggttatggtacacatgggtatgattctcgcactaatggacgggcttggttagctgttgacagtaaatacaaaactaggggaagaagtggtggctactttggctatggcaatgagaacgcagatggtttgaacgaactgaacagagggcctagggccaagggtggcaaaaaccaaaaaggttttgcaccaactattctggcagtcaaagggcagactttgcctgcaactttaggcaca

SEQ ID NO: 51367 - DNA, 405 bp, Glycine max
  Clone ID: LIB3109-002-Q1-K2-G6
gaatcaagtgaaagctctgatgaagacaatgatgcataacccgccgtaactgatgtgtcaaagccttctgctcttgcaaagaagaaggttgacagctctgattctgatgatagcagctctgatgaagataaggggaagatggatattgatgatgatagttctgatgaaagtgaagagccacaaaagaaaaagactgtgaaaaatccaaaagaaagcagtgatagttccgaagaagacagtgaggatgaaagtgaggaggaaccctccaaaactcctcagaaaagagacagggatgtggagatggttgatgctgcctcgtctggaaagaaagcgcctaagaccccagttacacccaaagaagatactggcgcttcaaagacactatttgttgagaacttgccattt

SEQ ID NO: 51368 - DNA, 390 bp, Glycine max
  Clone ID: LIB3109-002-Q1-K2-G7
gatacaaaaagttcttatcagtgacagagtaaaggaggcataccgatgacgatggcgatgacggcgtcgcagttgcggtgcggttgggggtggaggccaacgccgaatcagcagcagcaacgacgtcgtatggttccggtggtgtgttccatcgctatagagaacgcgaagaacaaagagagagcgaaactgaagaagctcttcgatgaagcgtacgagaggtgccgcactgctcccaccgaaggcgtttccttcactctccaacaattcaccgacgctctcgacaagtacgacttcaacgccgaaatgggcaccaaggttaagggcactgtttttgccacggataacaatggagcttatgttgacattactgctaagtccacggcctac

SEQ ID NO: 51369 - DNA, 409 bp, Glycine max
  unsure (1)..(409): unsure at all n locations
  Clone ID: LIB3109-002-Q1-K2-G8
ggagagaaagagtgaggagagaattacagagcgttttccaacacgattacacgaccgaatcaaaccctctctttctctccgaagctgcgtttaatatcttactcgccttagattgttcttctctttcattatactgttctcttttcgatttgagggaacagtacaagagtgtgaggatcggttaacccaactgcacaggtagtcactaaaataatggagtctcacgatgagactggatgccaggctcctgaacgccccattctttgcattaataattgtggcttctttggaagagcagctaccatgaacatgtgttccaagtgttacaaggacatgctngtgaagcaggagcaggacaattttgcagcatcgtcggttgaaaacattgtgaatggcagttccaatggca

SEQ ID NO: 51370 - DNA, 410 bp, Glycine max
  Clone ID: LIB3109-002-Q1-K2-H1
gaaaaaatttgcatctatgcgtatatgcgaatcaatcctactacttctggtcctgaggttcctgcgcttgaaaaaaaaaatctgggacgtatcgcccaaataattggtccggtactagatgtagcttttcccccaggtaagatgcctaatatttacaacgctctgatagttaagggtcgagatactgttggtcaacaaattaatgtgacttgtgaagtacagcaattattacgaaataatcgaattagagctgtagctatgagtgcgacagaaggtctaatgagaggaatggaagtgattgacacaggagctgccctaagtgttccagtaggtggagcaactctaggacgaatgttcaacgtgcttggagagcccattgataatttaagtcctgtagatactcgcacaac

SEQ ID NO: 51371 - DNA, 408 bp, Glycine max
  Clone ID: LIB3109-002-Q1-K2-H2
gacgataaagggtttttgatttgtttccttgggtgctgggtgcactttcactcgaagaaccttgaagcgagtctgggccacagcaaccagcgacaacaactcaatcagctagggatgctttgcttgctatcttgttggaggattttctgttcaagagaagatggtaactagaattgtggatcttcgttcagacacagttacaaagccaactgaagcaatgagagctgctatggcaagtgctgaagttgatgacgatgttctaggctatgatccaactgcttttcgcttagaaacagagatggcaaagacaatgggcaaagaagctgctctttttgttccatctggcactatgcggaaccttgtatctgtacttgttcattgtgatgtcatgggatgtgaggttattct

SEQ ID NO: 51372 - DNA, 416 bp, Glycine max
  Clone ID: LIB3109-002-Q1-K2-H3
ggatgaagataggatgcttctgaaattccgatgtcaataaggtccttaagtaaaaaatactactgtcgtcacagatctgaatctggtcccctctggtatcgtgtagtactagtattttagttgcatctaataaatgaggatacccaagaagttgatttaataaatgttcaccaacttaacataagctatttgattttgctgacaaatacagaggcaaatatgacagcagcatcacggttgcccaaaagtattacagatccatcagtggttacaatgatgaattgctctgggctgctgcttggttgtatcaagcatctaacaaccagtattacttggattaccttggaagaaatggtgattccatgggtggaactggttggagcatgactgaatttggttgggatgtcaagtatgct

SEQ ID NO: 51373 - DNA, 419 bp, Glycine max
  Clone ID: LIB3109-002-Q1-K2-H4
gcgagcatcaatatctttacgtgtgcagttactcatgagatttcttcctattctttgctcagacggggagtcttctgcaaggagcatgagatacatgcttgcctctgtacttcttcgtctccttggcagccgggttgtgcatgaggatgcaacggtgaatcccatgcactatactccattgagaagggaggcagagtcacatgctgaagcttcttttgtagattcttctgctgaaggcctgtttgatcatctgctgttgattttgcatggattgttgagtagttctcctccaagttggctcaggtcaaaacctgtttcaaagacaactaatgaacctacaagggaattttctggatttgaacgtgagccattggaggcattgcagaatcatcttgataatatgcaactgccagacacta

SEQ ID NO: 51374 - DNA, 411 bp, Glycine max
  Clone ID: LIB3109-002-Q1-K2-H5
ggggagcgaagtgaattgaaattgaagtgactcggggtgagttgactcagcaatggcggaagaggtgactcgggtgatggtggcggtgaacgagtcgagcattaagggataccctcatccttcgatcagcagcaaaggggctttcgactggaccatcaacaagatcgttcgcgacaacgtctctgccttcaaccttctttttcttcacgttcaagtccccgatgaagatggttttgatgacatggatagtatctttgcttctcctgacgattttaagaacatgaatcagagagatagaattagaggagttcatctgctggaatacttcatcaataggtgtcatgaaattggggtggtttgtcaagcatggataatgcatggtgatcccaaagaagtaatatgtcatgaagt

SEQ ID NO: 51375 - DNA, 402 bp, Glycine max
  unsure (1)..(402): unsure at all n locations
  Clone ID: LIB3109-002-Q1-K2-H6
gaggaaggaaatgtgcagttagatgcaaaacatgaatgcaaagatgcaactctttttcaggcccctgaagattgtgcacttgccataacaagcattattcgtcaccatgaaacagagtaccttgcttctcttgaggcatcatatctaaaccttcctgattctactttcaaggatcttcggagaaagcttcctgtcacccgcacgttatttccatggcataatactttgcagttcagcttgacaagagacatctcaaaagaacttggcattggaaagtaaatacactacattcacacagaacanataaaagtttgtgtttactcggtggtgacaagttcctcatatattcactacatgtcatttgatcaagtcaatcattctttgggttgacgttcgttatat

SEQ ID NO: 51376 - DNA, 312 bp, Glycine max
  Clone ID: LIB3109-002-Q1-K2-H7
gcttcgtgagtgagtagtgagacggacgaacgaactgctgctgcatcgagtgtccttgcaggctatagcgccgtggtcagatgttactgggtttactcaaaactatagccttaagcgtgtcattgcgatcccgtacacggtaaacttgtctctcttgatggattactttaacgctgtttagctcaacgatctacgatcgattagtgccgtcactctgaccgactaaactgtccaattgaactactgcatcttcacttgatgtccagttgggattatatgctttcgattgcatttattcacgcagatttcgac

SEQ ID NO: 51377 - DNA, 423 bp, Glycine max
  Clone ID: LIB3109-002-Q1-K2-H8
ggaggagactgagaaaacagaagaaaacaaagtggaagacacagtttctgcgttgaggtctttgatggtttctcactctccgccgctggatgccttagtggtgccctctgaagattatcacctgagcgaatatgtgtctgcacgagacaagcgccgcgaattcgtttccggcttcactggaagtgccggcttggcacttataacaaagaaagaagcactgctgtggacggatggacggtattttttgcaggctgagaaagaacttagtgctgggtggaagctaatgcgaattggtgaagatcctgctgtagatatctggatggccgataatttgccaaaagaagcatccgttggggttgatccctggtgcatttcaattgatactgctcaaagatgggagcgtgcttttgccgaaaaacagca

SEQ ID NO: 51378 - DNA, 433 bp, Glycine max
  Clone ID: LIB3109-002-Q1-K3-A1
gacttcaaagtggagaaaaacacacacggttggggcattctctctcttttctttttcctcaaaaagttgaaaaagaataaagggggaacaatcgagtgaagttgttgctcttcaatagtaaacttacctatggaagagggaagggttgtgagtgggtacacaaaagatggaactgtggatcttaaagggaaacccattctcaaatccaaaagtggtggttggaaagcatgctcctttgttgttgtgtacgagatatttgaaagaatggcttattatggaatatcatcaaatttgatactgtatctgactaggaagcttcaccaaggcactgtgacctcttccaacaacgtcaccaattgggttggcaccatttggataactcctatcttaggagcctacgttgccgatgctcatcttggtcgcttttggactt

SEQ ID NO: 51379 - DNA, 361 bp, Glycine max
  Clone ID: LIB3109-002-Q1-K3-A10
gggagaaaaggcgaagacaggattggaagcagtgagaactgataactcttatcattcttttttccacttgacattgccgacgccaccaaatacacaaccttaactttcccacaacactacccatacatcattcgttttctctctagattttttcagttagctattgctgacttctttttgtgtgtgccaacaacacagaaagagagagaaagacatggctctgaaccaatcaaaggccgagttgttgacggtgagtttggtggtggtggcgctgtgtatagcacgatacatagtgggttcccctctctactggcatttcgttgcggtgaacaaccactcttcatcttctacttgtgcaccc

SEQ ID NO: 51380 - DNA, 356 bp, Glycine max
  Clone ID: LIB3109-002-Q1-K3-A11
ggttgcgtgataccatttaatttcacagcgatggattatttatagttaagtgtggagtgcagtgcaggtcaaggcctgagattcggttctttacttgttgggttgttctgatcttctctcatagcaatcaaatcacactcccatcttctcatctcgtaaaccctaaaccccgttttcagtgacatcgagatcgatcgaacatggatgaggagtacgatgtgatcgtgttgggcacgggtctcaaggagtgcattcttagcggtcttctctccgtcgatggcctcaaagttctgcacattgacaggaatgactattacggaggagaattcacttcgctcaatcttattcagctttgg

SEQ ID NO: 51381 - DNA, 408 bp, Glycine max
  Clone ID: LIB3109-002-Q1-K3-A2
ggatgaatggcagagttattgccattgcctctggctcgggttacaccaaactgatacacacttaataatattatagtaaaaattagccaccaaagtacactaaccccttttttcatacaactcaatagctggattggagcaaggtgaaagtaaaatcatttgcaaccaatgccgttgaacatatttcaggacaaagatggattgccacggattatattgactgagccaaagggttcatcagctgaggttcttctttatggagggcagattatttcttggaagaatcatcgaaaggaagaacttctttttatgagcagtaaggctaacaagaaacagcataaagcaatcagaggaggaatatcagcttgcctagcacggtttggtgatctcagttcacttgaacaacat

SEQ ID NO: 51382 - DNA, 389 bp, Glycine max
  Clone ID: LIB3109-002-Q1-K3-A3
gtagtgctctattggaaatgatgatatttcatgtgaccctctccatcaacagcccagaagtatcgtgtggagaacttgtatgagggtcctcttgatgatcaatatgcttctgctatcagaaattgtgatcctgaaggtcctctgatgctctatgtctccaagatgattccagcatctgataaggggagattttttgcctttggccgtgtattctctggcagggtttcaactggtttgaaggtgaggattatgggacctaattatgtccctggggagaaaaaggatttgtatgttaaaagtgtgcaacgaactgtcatttggatgggaaagaggcaagaaactgtagaggatgtcccctgtggtaatacagtggctatggttggtcttga

SEQ ID NO: 51383 - DNA, 417 bp, Glycine max
  Clone ID: LIB3109-002-Q1-K3-A4
gacactaaacaagttaaaagaggagcatcactgaactaacaaagcaaccctatgtcgaaggtggtttgtgtcaccggagccagcggcgccatcggatcatgggtggtcctactcctcctccagcgtggttacaccgtccatgccaccgtccaagatatcaaggatgaaaatgagacgaaacatttggaggaaatggaaggagcaaagagtcatctccatttttttgaaatggatcttcttgacatcgactccattgccgctgccataaagggttgttccggcgtaatccaccttgcatgtcctaacatcattggtcaagtcgaagatcccgagaaacagatattggaaccggcgataaaaggaacggttaatgtgttgaaggcggccaaagaagcatgggtggaacgcgtggtggcc

SEQ ID NO: 51384 - DNA, 368 bp, Glycine max
  Clone ID: LIB3109-002-Q1-K3-A5
gtcgctgtaaggcggtggcttgttggcggcggagctgcgcgagattaggttcggatcgctcggtctcgctaggtcaccgctgacgagaatttgaacttctcgtcactactaagccgctatttagctaaagcttgtgttgggagaaagcaaagagcatctagtttgttaacaatggaagatgatctgttggacacagaagacaggaacaacaatggcagttccaccgcaaagaaatcgaagcagcggcgaaagaggaaggagtacatggtggacgaggatgggcaggtgggggcacgagagaagctggcaaaaagaatcttgttatctctgacgaggccttcctatgttttgggattgggtcccaaacc

SEQ ID NO: 51385 - DNA, 406 bp, Glycine max
  unsure (1)..(406): unsure at all n locations
  Clone ID: LIB3109-002-Q1-K3-A6
gacggacgagggtttcgtttcgggtttgacggtgctgacaatcactttctgcgcttcactcactcccttcgtgcggttttctttctttgtcgaactcgtgcgaaaatgcgtgagattcttcacatacagggagggcaatgcggaaaccagatcggagcgaagttctgggaggtggtgtgcgcggagcacgggatcgattccacggggaggtaccagggggacaacgagttgcaactcgagcgagtcaacgtctattacaatgaancgagttgcggaaggttcgtgccgagggcggtgctcatggatctagagccagggaccatggacagcgtcagatctggtccctacggtcagattttccgacctgataacttcgtcttcagccagtccggcgcccgaaacaact

SEQ ID NO: 51386 - DNA, 423 bp, Glycine max
  Clone ID: LIB3109-002-Q1-K3-A7
gggttctagtgtgtgattgtttgttgtggggactcgttcttcttcttttgttgttctgtgtttgtgtttgttttttctctcacctgaaaatgtcttgctgcggtggtaactgtggttgcggaagctcctgcaagtgcggcaacggctgcggaggctgcaagatgtacccagacttgagctacactgagtcaaccaccaccgagaccttggtcatgggagtggcacctgttaaggctcaatttgagggtgctgaaatgggtgtgcccgctgagaacgatggctgcaaatgtggaccaaactgctcctgcaacccctgcacttgcaagtgaggtgttgggagggcaagcttcaagcagagatagcccttaattaggaataatgataaactattaatgtgtagctaaaaacttatgtattatgtct

SEQ ID NO: 51387 - DNA, 329 bp, Glycine max
  Clone ID: LIB3109-002-Q1-K3-A8
tttgggtactagtgtgtgattgtttgttgttgcagcgttttattcttcttttgtccctctctctttctctttgttttttctctcacctgaaaatgtcttgctgccgtggtaactgtggatgcggaagctcctgcaagtgcggcaaccgctgcggaggctgcaagatgtacccagacttgagctacactgagtcaaccaccaccgagaccttggtcatgggagtggcacctgttaaggctcaatttgagggtgctgaaatgcgtgtgcccgcttaaaaccatggctgcaaatgtggaccaaactgctcctgcaacccctgcactttcaag

SEQ ID NO: 51388 - DNA, 388 bp, Glycine max
  Clone ID: LIB3109-002-Q1-K3-A9
gatgaggagggaggtgtaagaaactgggaagagaaggtggtggtcttgttgccattctgatctaaagcttgtgtctttctgcttcgtttgcatcttctgctgcgtaaagttgattcttttctgattcttccgtagatttcatctctgaaactagttctaatactttatctacagatctctatattctaggtgaaggtttgcttttgatccggcttgggagttttgatagacttgattttaactctttaagagccatatgctcacagtggtcggatatagtacatcagaagttcacacaagagatatatataattattcttgggtaccacctgcaaaatgtcattccgcagcatagttcgtgatgtaagggatagtttcggagcttatc

SEQ ID NO: 51389 - DNA, 418 bp, Glycine max
  unsure (1)..(418): unsure at all n locations
  Clone ID: LIB3109-002-Q1-K3-B1
gacaaccaattccattattaaagggataagcctgaaccttgcaacccaacacaaccaaaattcgctacttgttaagggctgcactataccagaatgtctcagggaagaggcagtgcatctttgcctattgtggtcactgtggtttcactactgtgccttttggaacgtgctaacgcagcaacttactccgttggaggacctgggggatggaccttcaacactaatgcttggcccaatggaaaaagattcagagctggtgatatcctaatcttcaactatgactcaacgacccacaatgtggttgctgtggacagaagtggatacaacagctgcaagacaccagggggtgctaaagtgttcagttcagggaaggaccaaatcaaactagcangagggcagaactacttcatatgtaact

SEQ ID NO: 51390 - DNA, 385 bp, Glycine max
  Clone ID: LIB3109-002-Q1-K3-B10
gtctgtcaatgaagcatatcaatttgcgcgtgatcaagcgattgtggttctaggttctacatattcaatatatatcctctcatgtgaaaaaagttgatcaagtgatcattcacaccatgggtggcgtcttctaccatgaagaaaagccaccaaaccataccaagagatgcaaattcattgcaggcactctgaaagaagtgttttcccactgtcacacttttagtcgtgtgaggctttcaactgcacgccttgaggaggagtgccccatcattgatgacgatgctgacgtgattgtttcagaggttacaagccaagttattgagaaacaaaagctcataccaagcccattgagagaaggtctttccttggcatactcgactgcaac

SEQ ID NO: 51391 - DNA, 401 bp, Glycine max
  Clone ID: LIB3109-002-Q1-K3-B12
tgtggttgctggatttcaacaactttccaggggggggtctcttatcttgaagaatcattttattatataattatattgcatattccagctcaagtggcttgtggatattgctctttgattctatatatgctttattgcaaccttattattattcttcagtcgctcttcttcgctcgattggaaaaccatcctctcttcttttatgtgattttaactggcggactttaaattggtgactgagacatgtgaggataggttctctctgagtatgattatagattgatacctcacacaacgcatagagccatcaagctggactttcattataagctactctgtctgtggtcgactttggtaatgatacgaggctcttatcccatgttgctatacatatctttata

SEQ ID NO: 51392 - DNA, 376 bp, Glycine max
  Clone ID: LIB3109-002-Q1-K3-B3
gagagggaaaagagttgaagacttgaagtgaagaaagaaagaattgagaaaggatagggtttagggttggcaaaggaaggaagggatggaagcagctgtggtggacgtcggctctaagcttctcaaagcggactttgcaattcctgaccagactcccgccatgataattcccactcagatgaagcaattgctcgatgatggatcagtcactgatagttcactggctgacaatgtcaccgttgatcccgtcgtgcgaggatttattagagattgggatgccattgaagatttgttgcaccatgttttgtatactggcctcggatgggaaattggcaatgaaggacaaatactatttactgatccactttgtacccct

SEQ ID NO: 51393 - DNA, 412 bp, Glycine max
  Clone ID: LIB3109-002-Q1-K3-B4
ggttgaagacattgcaaggagcattgctcagctgtacgtacactgtacttgactatgcacaaaccggtttgattgcagcagtgttcttctttaaaatgatggaatggtggtaccaatctgctgaggagagaatgtcagctcctacagtatatcctgctccccctcctgcgtcttcaccaaaggtagccaaagaagggataccactaccaccagacagaacaatttgccccttatgctcgcaaaagcgtgcaaatccatctgtagttactgtttcagggtatgtcttctgctatgcttgcatatttaagtatattactcagtataagcgctgcccaattacgttaatgccttcgacagttgaccagataaggagactctttcatgatgtctaggcctgttggagctggggttg

SEQ ID NO: 51394 - DNA, 375 bp, Glycine max
  Clone ID: LIB3109-002-Q1-K3-B5
ggcgcattgaacgaagattagggtttgtagtgtagcaggaagaagcagcaatggcgccgaagataacacgtaaggttagcagaaaccctgaattgataaggggaatcggaaagtactcgaggtcgcagatgtaccacaagaggggcatttgggctatcaaggccaaaaacggtggcgttttacctcgccacgaccctaaacccaagcctgaagctcctgctgaaaaaccacccaaattttaccctgctgatgatatcaagaagccccttgtcaacaagcacaaaccgaaaccagctaagctcagggctagcattactcccgggacagtgttgattcttcttgccggtagatttaagggaaagagggtagtctttt

SEQ ID NO: 51395 - DNA, 406 bp, Glycine max
  unsure (1)..(406): unsure at all n locations
  Clone ID: LIB3109-002-Q1-K3-B6
ggggctgacattcacgaagcttttcagccggcgtttcgcgaaggaggaaatgcgaattctgatggttggtcttgatgctgctggtaagaccactatcctctacaagctcaagctcggagagatcgttactacaattcctaccattgngttcaatgttgagactgtggaatacaagaacattagcttcactgtttgggatgttggtggccaggacaagattcgtcccttgtggaggcactacttncagaacactcanggtcttttattttgttgtagacagcaatgatagggacagagttgttgaggccagagatgagttacataggatgttgaatgaggatgaactgagagatgccgtattgcttgtgtttgcaaacaaacaagatctntctaatgcaatgaatgc

SEQ ID NO: 51396 - DNA, 378 bp, Glycine max
  Clone ID: LIB3109-002-Q1-K3-B7
caggggggaagtgcagacaagacgggacaggactgactggctacgttaatgcatggagtccaacactctatggcgcgcctggaagtagtcacagaggtgttcttggcgcaggcacctacctctcttcgagccaccaacctgtgataaccgcgcgagtgttgagtatcgacttctcttgatagatatgtggaagaacgccttgttaagcttcaaagtgctaagcagtgatgaagtggcgtcacacccaatgaacatggaggaacatggtcgaccaagacgaggatcacagagataccgtcgaggagaatagaaccttttgggacaaacaacaccagcttttgcaagccagtatatgcagaactagatcttcggagtcac

SEQ ID NO: 51397 - DNA, 350 bp, Glycine max
  Clone ID: LIB3109-002-Q1-K3-B8
tggggaccaagagattaagtcttggcttgcatttgcgagcacaaaaagttgttgaagtaaatgccttggccaaggcattgtctggacagaaggatgaggttttcttttctgctaatgctgctgccttggcttcaaggaagtcctccccaagggtgataaatgaggctgtccaaaaagccgctgctgctctgaagggctctgatcatcggagggccacaaatgttagtgccaggttggatgctcaacagacgaaattgaatctttctgttcttccaacaactacaattggatctttccctcaaactgccgatcttagaagagttcgtcgtgaattcaaggctaacaagatc

SEQ ID NO: 51398 - DNA, 367 bp, Glycine max
  Clone ID: LIB3109-002-Q1-K3-B9
tgggtaccctctaatttacaatattaaaacaggtggacagactattcatgataccggtgcaccacatttattgagtgtatggtggaaattaggaagagaaataaatcaataaactaatatatgtaataaagagaggaataagaagaaaaattgggtgtatgtttagcatttttctttgttgaggttacgtgcttcgttttatttattttcaaaaaaactaataattccttgttatcttttagagagagctggtaaaaaaaaaagatctttttttttccaactaaacaaacatgtcatgttttgtgtaaactcagttttttcatggagaatagcacgtaagaacttatgagagaaggtcaaaactcaa

SEQ ID NO: 51399 - DNA, 409 bp, Glycine max
  Clone ID: LIB3109-002-Q1-K3-C1
atcaacatacagggggtgcaatagcaccagctcaatgccttgccattgggactcctgggatatcaccctctcctttattggcagaattcagtgctcctgatggtgcgcatggtaatgctttagctgccacttctgggaagtcaactgttacagagcagcctcttgaacgcctaattaatgcggtgaaatcaatgtcaagtaaagcattaagtgctgcagtcatggatattggttcagttgtcagcatgaatgatagaattgcaggatcagctccaggtaatggatccagagcggctgttggtgaggatttggtttccatgactaattgtcgtctacaggctagaaatttcattactcaagatggttccaatggaattaagaggatgaaacgttacaccagtgctatacc

SEQ ID NO: 51400 - DNA, 348 bp, Glycine max
  Clone ID: LIB3109-002-Q1-K3-C11
ttttgcttttcaagaagagaatatgatggttggggagttaagcgagcctctgagagtgattaaattccgctgtctgtcttgattcctacatcttagtcccctgtcatttgcaaactcatctctctggatcgctcatattcattgatcaactttgaaagggatttggttgttaagacatcaattatactgatttgatattttcttcttaaccaaactatctataacttgaggtaaacacatgaaaaaaagaccagaatgaatactacacaggtgccaaagaaaagagtggcatctgtgctgatagacggattggccgatgtgtcactgccaaagcttggatacaagact

SEQ ID NO: 51401 - DNA, 365 bp, Glycine max
  Clone ID: LIB3109-002-Q1-K3-C12
gtacgaagtgatgtgaagagtcgaacccaagagcttcgtcggatctcaaaagctggatggaaatcaaaaccatcatgattgggccactaaaagactagttgaggatgaactgaagagacttttatttggtttggagcacaattacacaagttttggaagccatttaaacagccaatggtgcttttaaacgtactcagttcaacagtgttatcttcatgttagaattgaagatgagcttattggttagtgaacatttgaatgctcagcagtgcagttaaacgtcccatgctacgttgataagatttagctactgactgtgtgcatttaaatgtcgtccaacgggacatttaacgtactcagtttac

SEQ ID NO: 51402 - DNA, 371 bp, Glycine max
  Clone ID: LIB3109-002-Q1-K3-C2
gacagggttagcaaaatatctgatctttctcccgcctggcactgagtaggcaatggcggaggaagcacagtactcatcgggacccgattccgcgcccctcaagcgcaagtacgaagaccaaccctccggcatcgagcttgccaagcagcgtgctcaggaagtcgccgcacgccttctcaacgccgctcctcctccgccactcgacgccaagcgtcccaaacccgacaccggcttcgattctctcgatttgaagcctctgtattccgcatctcctcctcccgtcttctacggtcaccaaggttccagcaagaagattgatatccctaatggcagggttggtgtgattattggtaaaggcggagagactatta

SEQ ID NO: 51403 - DNA, 427 bp, Glycine max
  Clone ID: LIB3109-002-Q1-K3-C3
catgggtttggggtttaacaacaaattcgaccgcgtggtgccctcttcgacttcatccgtacccgaaacgaccgcgtttcgctcctgaacggttccgtgatcgccgtgatcgtctccattctcgggaaaacgggtagggtttcccgcgcggcgtcgctgctgcacaatctagaagccgatgggtttgaggtagatgtgtatggctacacctctctcataactgcttatgctaataataaaaaatacagagatgcactcaaggtgtttgggaaaatgaaagaagtggggtgtgaacctactttgattacttacaatgcaattttgaatgtttatggtaagatgggcatgccctgggctaagatcattgctcttgttcaggacatgaagtgccatggccttgcccctgatttgtgcacttataatactc

SEQ ID NO: 51404 - DNA, 351 bp, Glycine max
  Clone ID: LIB3109-002-Q1-K3-C4
gaagatagaagtgagaatacgaaagaaggggttttagtgccaaatgaagaaggctcacgagacacgcatggggtcagccacatgctatccctcctcctcctccttctctctccggtggtggtgactcgccggaaaacacccactgccacctctaacgccgccgccggcgaacacccttctcaaaatctcacccgacccaattcacctttctcctctctcttctcaattccccatctgggtatccctgtttccctcaaagttctcttctttttcgtgattcagaagtgctcagtgatacccttttcttagaacaatgagagcggggaaagggagtcaggaagaggatgagta

SEQ ID NO: 51405 - DNA, 411 bp, Glycine max
  unsure (1)..(411): unsure at all n locations
  Clone ID: LIB3109-002-Q1-K3-C5
cgttctgagcaganaccaatttagtggccacatggctcanaatattggaaacatttcaaagcttangcagcttgatttgtcactgaataatcttagtggagaaattccagtcgcctttgataatctgcgtagtcttagtttcttcaacgtttctcataacaacctctctggtccagttcccaccctacttgcccaaaaatttaactcgagctcatttgtggggaatattcaactatgtggctatagcccttcaaccacatgttcctgcctagctccttctggttcacctcctgaaatatcagaacaccgtcatcataagaaattatgcaccaaagacataattctcatagtagcatgagtgctccttgtagtactggtaacaatttgctgcattctgctattctgcttgat

SEQ ID NO: 51406 - DNA, 415 bp, Glycine max
  Clone ID: LIB3109-002-Q1-K3-C6
ggagcgcggaaccaaatgaaatgattgagaagagagagcgaagaaaaaaaagagagccaaaccaaacctttcccgaaacggttcgttttgcccttcttcggaaccctcccttctgcgccgctgctgctgctccggtcgccgtcggcgactctccggtaaccgaagaccactgccgatccgtcagaaacctcggatctcggatctgaacgagcgaaacgatgccgtctcacgcggatctggaccggcagatcgagcatctgatggagtgcaagcctctgccggaggccgaggtgaaggcgctgtgcgatcaggcgagggcgattctcgtcgaagagtggaacgttcagccggtgaagtgccccgtcaccgtctgcggcgacattcacggccagttctacgatctcatcgagctctt

SEQ ID NO: 51407 - DNA, 353 bp, Glycine max
  Clone ID: LIB3109-002-Q1-K3-C7
ggatccagcacataacaatggaaacgcagctgggcgtgttttctctctagattgtgctcttaaacgccgtcgttttcaaactctttttttccccttcgcttctctgtctttgtaaccgaaaggggggaaaatataattaacaccgatttcgcgaccaattcttcttctgcgttgaattgggacaacgagaaattggatctcagtttttggcaggaaataaaaattgcatttgagtgtaaaataacagagtatagtgtagggccttgttcttgatactgtgctaaatttgttggatggcggagaaatcatgcatcaagcgccttcagaaggaatatagagccctttgtaaagag

SEQ ID NO: 51408 - DNA, 344 bp, Glycine max
  Clone ID: LIB3109-002-Q1-K3-C8
gctttacctacatccattcactgtgaaccaattggacagtttaaggtaccaagctatgaacattgcggtggttaggcttgggagagcagaaccaccccttaggaaagaggttgtggagtacatgcttgatgtggactctcacatatggagcatgagaagaagcaaagccaatttcttcagaattgtgtcactcttttctggtgcaatatctatgagcaagtggcttggtgaggtacaacagtggaagaatccagtgaccacaatcctagtgcatgtcctctgtttcatcttgatatgttaccctgaactgatcctccccacaatgttcctctacatgtttctca

SEQ ID NO: 51409 - DNA, 354 bp, Glycine max
  Clone ID: LIB3109-002-Q1-K3-C9
gaacaaaaaaaagtaaagaatttgctttgcgaggaagtaagtaggagatgctctgaactttcaaatttgtacaacccctaggaagagaagaagaaggttcaaaatccaatccatttttcatttcgaaagatcgtgatcgcaatgtccctctccaccgtgaggcagcggcgctcggagccgtctgatccgtcgccatcagaaccgtacacgaagctggacaagcccgagaaagcggaggagaaagacgaagggttggggtgggttttcccgttcgtggctcttgggttattgaggtacatgagtgccacctccaacatcatccacgattgcgacgaggtcttcaattactgggag

SEQ ID NO: 51410 - DNA, 275 bp, Glycine max
  Clone ID: LIB3109-002-Q1-K3-D10
ttctatctccaccgtccacaatttcctccgaaataaatgcaccaccaacaatatatttcattcctcttccacaagcattccctctttcttgcatgatcatcactaccactctttcttattatatttgccaatcattctcatccaaattaattgtcatctaatactcccatcaaaacatcatattcacaagccgaaaagatctctcatcatatccacttttgtgagctattcaattaatttaaatacatcagcattccctttttataaaccacttc

SEQ ID NO: 51411 - DNA, 424 bp, Glycine max
  Clone ID: LIB3109-002-Q1-K3-D3
gggtgcacggttcagtatgtttgagatgagagtgaagatagctttggcagagaaaggaatcaaatatgagtacatggaacaagatctcaccaacaagagtactttgcttcaagaaatgaacccaattcacaagaagattccagttctcatacatcatggaagacctatctgtgagtccctcataattgttgagtatattgatatggtttgggacaacaattgtcctttgcttccctctgatccctaccacaaagctcaagccaggttctgggctgattttgtagatcagaaggtgtatcatgcttctaagagagtttggatttcaaagggagatgagaaagaggtggcaaaaaaggacttcctagagagcttaaagcaattggaggagtttcttggagacaagccttattttgggggtgacaca

SEQ ID NO: 51412 - DNA, 319 bp, Glycine max
  Clone ID: LIB3109-002-Q1-K3-D4
tcaaatattactacatggaacaagatctcaccaacaagagtactttgcttcaagaaatgaacccaattcacaagaagattccagttctcatacatcatggaagacctatctgtgaatccctcataattgttgagtatattgatatggtttgggacaacaattgtcctttgcttccctctgatccctaccacaaagctcaaaccaggttctgggctgattttgtagatcagaacgtgtatcatgcttctaagagaagttggatttcaaagggaaatgagaaagaggtggccaaaaatgacttcctaaagagcttaaaaca

SEQ ID NO: 51413 - DNA, 406 bp, Glycine max
  Clone ID: LIB3109-002-Q1-K3-D5
gatgatagtcattggtattgtgagcattgtaccgatgcaaatgtcaaatctgcctccacatgccagatgtgctatcaacaacgtcgatgaaaacttggttctccatttgaagcacttgtctcctgcccaaggcctctgcaccaaaagctgagatggagacattcctgtatgtttatatatatttatgcactatgcagtctccaattttgtgatgctaaatacaacaggatgaaaggagtaaggcatggaagaaaggttgctctccatgcgctcctattcaatacaaaacccaatttgatgtatatagtgttctatctctttatgtatgagggtttctgctacaggcatttgtaactcaatatcataacacaacagatgttggagaatggagatgaacacaaatgtg

SEQ ID NO: 51414 - DNA, 386 bp, Glycine max
  Clone ID: LIB3109-002-Q1-K3-D6
ggttcgcggaaccaaatgaaatgattgagacgagagagcgaataaaaaaaagagagccaaaccaaaccttttccgaaacggttcgttttgcccttcttcggaaccctcccttctgcgccgctgctgctgctccggtcgccgacggcgactcttcggtaaccgaagaccactgccgatccgtcagaaacctcggatctcggatctgaacgagcgaaacgatgccgtctcacgcggatctggaccggcagatcgagcatctgatggagtgcaagcctctgccggaagccgaggtgaaggcgctgtgcgatcaggcgagggcgattctcgtcgaagagtggaacgttcagccggtgaagtgccccgtcaccgtctgcggcgacattcac

SEQ ID NO: 51415 - DNA, 388 bp, Glycine max
  Clone ID: LIB3109-002-Q1-K3-D7
gagagaggcggaggaaggtcacgataagtgattcggctattgtcttcaatggggctaaggggacatttcatgtggaggacaaaccattgtatgctgtttcctttgcagctaatggtaatgtggaatatgtggtactttctcatgaaaatggaaatgtggaattgctttattcagacttgttaaaactttgtaaagagatggatgctgctggtcttcacaaattcatatctgacaaccttaagaaccttgctgttgtaagggacgaaataccacatgcattaagagcagctactaacaccgtctgtttagagttagactctctgaaggggttgtactgtacagaagtgtcaaatcacgacgtaaagcaggatgcttacttactgggtgt

SEQ ID NO: 51416 - DNA, 410 bp, Glycine max
  Clone ID: LIB3109-002-Q1-K3-D8
ggcacaagtgagtttggtgatcgagataactagaaacagtgtgatgaaaatgaaggtccttgttttcttcgttgctacaattttggtagcatggcaatgccatgcgtacgatatgttccctctccgaatgaacactggctatggtgcccgtactccggaggtgaaatgcgcaagttggaggcttgctgtggaagcacacaacatctttggctttgagaccattcctgaagagtgcgttgaagcaacaaaggaatacatccatggcgaacaatatagatcagactccaaaacagttaaccaacaagcttacttttatgccagagacctcgaagtccatcccaaggacacatttgtgttcagtatagatggcaccgtactctctaatattccatactacaaaaaacatggat

SEQ ID NO: 51417 - DNA, 430 bp, Glycine max
  Clone ID: LIB3109-002-Q1-K3-D9
aaaaaacccggcccgacccacgcatccgcccacccctccgtacacctgcgagtttactacacaaagccccacaaattactttcgtgggctatataactaaaaacagccgcctcaaaattaaccttctttttttcttctctgctacaatttttttagcactacacagccatgcctacgatattttccctctccgaataaacactatctatggtaccctcactccctatgtgaaatgctcaaattttatacttgctttctaatcacacaacatctttttcttctataccattccttaacattttcatttaaacaacaaatcaatacctccactgctaacaatattcatctcactcctttataattaacctacactcttacttttaatccatataccttctattccattccaatgacacatttctttttcata

SEQ ID NO: 51418 - DNA, 297 bp, Glycine max
  Clone ID: LIB3109-002-Q1-K3-E1
ttctaatcctaccctctgcgcttctcagagcgagccaattcttctccagcactgacatctcatattgttggttatacacacatgctacccactagacaccttaagttgctatggaatctttctgacacggaaagagtagcgctcaagagctgcacaaggctgctgaacaccttatgtcatccatatggaagcagatggctgatgctgtactaaagtatattcctaactgcaccatctctctttactatcaagtactggacacaacacccatgctcggggcaagtccatctagatata

SEQ ID NO: 51419 - DNA, 398 bp, Glycine max
  Clone ID: LIB3109-002-Q1-K3-E10
gggttctagtgtgtgattgtttgttgttgtgactcgttcttcttcttttgttgttctgtgtttgtgtttgttttttctctcacctgaaaatgtcttgctgcggtggtaactgtggttgcggaagctcctgcaagtgcggcaacggctgcggaggctgcaagatgtacccagacttgagctacactgagtcaaccaccaccgagaccttggtcatgggagtggcacctgttaaggctcaatttgagggtgctgaaatgggtgtgcccgctgagaacgatggctgcaaatgtggaccaaactgctcctgcaacccctgcacttgcaagtgaggtgttgggagggcaagcttcaagcaaagatagcccttaattaggaataatgataaactattaatgtgt

SEQ ID NO: 51420 - DNA, 418 bp, Glycine max
  Clone ID: LIB3109-002-Q1-K3-E11
ggaggcggtggtgatggtgttgtgtggggcaatgctcacccctccaaatccaaagtcgtcggagaatattcttattagtattaattaattaataataatgagacgagtgcttggcttcttattcttgttctgtaagtttgcaacttttttcctttcattcattattcttctcttgccttgagttgaggatgggcaatgtgaacgtgactcctgaagaagaagaagtttctgcaagtgcaagggcaaccgatgagaacgccatgcctcagtctcctcccacctctcctacggctatccatttccccctcatattcgctcctcaggttccggtggttccgctacaaagacctgatgagatgcatgttccaagttgttcctggatggagacaacttcagggtatgaagatgtgtaccgcga

SEQ ID NO: 51421 - DNA, 350 bp, Glycine max
  Clone ID: LIB3109-002-Q1-K3-E12
tgtggtggtagctgttacgagtcagcaagagggaaatatcttgttgagttgatttctgatcccaaattgagtttgagtttcagccatggtatctgtttctctgctcttattcctatctttctttgccttctttgcaccctctgaatctcacgacaaagtctcgttggaattgtactacgaaagcttatgcccctacagcgccaacttcatcgtgaatcacctcccaaaaatcttcaccccagatcttgccccaatcgttcacctcaaactcgttccttggggcaatgccaaacttcgtgccaacgccacctttgactgccagcatgggccatatgagtgcttgctgaaca

SEQ ID NO: 51422 - DNA, 413 bp, Glycine max
  Clone ID: LIB3109-002-Q1-K3-E3
gaaggaaggaagaagcagagcgaagcggtgacagacagaagaaaatgggaagcagaggtccacctcaatcccatccaaattccgctgccatttccaagggttacaacttcgcttccacttgggaacagaatgctcctctgacagagcagcaacaattcgcgattgtatcgctttctcacgccgtttctgagcgaccgttgcctctcaagttggctcaagagaatgcgtcggtacaagacaatgccttgtctgttaaaacgaaggatagttccgttgatgactctggtactattgagactgttatggtcaataccaatcagttctacaaatggtttacggatcttgaatctgccatgaaatcagagacagaagagaagtatcaacattacgtgaacactctaacagatcgcata

SEQ ID NO: 51423 - DNA, 405 bp, Glycine max
  Clone ID: LIB3109-002-Q1-K3-E4
gacacataacaatagtagcaagcagagccccgagatctgtgcttgaaccttcacttgtgtttccttccttctgcagacgagcttcaccttgcgccgaagggccacagatggttgaaaccgatatggatgccgaaactgttgcaaatgtggttccaccaaaggagactccaaacagtgttcccatctcttatcattcctcacactcacaccctcctcttaatgagaggattatttcatccatgaccagaagatctgttgctgcacacccgtggcacgaccttgagatagggcctggtgctccaacgatcttcaattgtgtgattgagattgggaaagggagcaaggtgaaatatgaactggacaaaaaatcgggtcttatcaagatcgaccgtgttctttactcat

SEQ ID NO: 51424 - DNA, 321 bp, Glycine max
  unsure (1)..(321): unsure at all n locations
  Clone ID: LIB3109-002-Q1-K3-E5
cttgaacctgcagtcgtgtctccttccttctacaaacaaacttcaccttgcgccgaatggccacagatggtagaaaccgatatggatgccgaaactgtttcaaatgttgatccaccaaacgagactccaaacactgttcccatctattatcatttctcacactcacactctcctcttaatgagaggattatttcatacatgaccacaacatcatgtgctgcacacccgtggcacgaccttgagatagggcctgatgctccaacgatcttcaattgntcgaatgaaattgttaaaggcagcaaagtgaaatattaaccgtac

SEQ ID NO: 51425 - DNA, 391 bp, Glycine max
  unsure (1)..(391): unsure at all n locations
  Clone ID: LIB3109-002-Q1-K3-E6
ggactgaagacagatgatgatgctgatcaattacccaccattgcaatagttgcttcatatgacacctttggggctgctcctgcattatcagtgggaagcgatagtaatggaagtggcattgtggctcttcttgaagtagctaggttgttttctctcttatattctaatccaaagacaagaggacaatacaatctgctgtttgggctaacgtctggtgggccttataactacaatggaacccataagtggcttaggagctttgatcaacgtctgcgtgagagcattgactatgctatttgcttggatagtattggctcttgcgaaaatgaattgtggattcatgtatctaagcctncagaaaatgcctttattaagaaaattcatgaagatt

SEQ ID NO: 51426 - DNA, 420 bp, Glycine max
  Clone ID: LIB3109-002-Q1-K3-E7
ggtcttggtgatggatagacacaaatgcaggcgttgttcaaggtctttcagcaatggcagagcccttggtgggcacatgaaggctcaccttgcttctctccctctccctctccctccaaagcttcactcttgtttctcttcctctgactcagaacaagaacaatctttaagggagaatcctaagaaaaccttgaggattctggatcctgaagacagagagagcgagacagagtctaataagaacccgactcgtcaacgatccaagcgcaactggaaatctaccatgcccaagctcagcctcggacaccccgaagccgaacctctcagctccgtctccgacacctcccccgaagaagacctcgccatgtgcctcatgatgctctcccgcgacacgtggcaggaacacaaactcgccaatgc

SEQ ID NO: 51427 - DNA, 408 bp, Glycine max
  Clone ID: LIB3109-002-Q1-K3-E8
ggcagatgagggtgctatttctctatggagaggaaacactgctaatgttatccgttatttccccacccaggctttgaactttgcatttaaggattacttcaagaggcttttcaactttaagaaggatagagatggctactggaaatggtttgctggcaactcggcctctggtggtgctgctggtgcatcatcccttttgtttgtttactctcttgactatgcccgtacccgtcttgccaatgatgcaaaggctgcaaaaaagggtggagagagacaattcaatggtctcgttgatgtctacaggaagacattggcatctgatggtgttgccgggctctaccgtggtttcaacatctcatgtgttggaatcatcgtgtatcgtggtctgtactttggattgtatgattc

SEQ ID NO: 51428 - DNA, 424 bp, Glycine max
  unsure (1)..(424): unsure at all n locations
  Clone ID: LIB3109-002-Q1-K3-E9
tggggagagtgagtgagatagagagagacgctgcggaaatctcaatcgaatctcagaaaaatgagagaaatcatcagcattcacataggtcaggccgggatccaggtcggaaactcctgctgggaactctactgcctcgaacatggcatccagcccgacggcatgatgccttctgactccaccttcggtgtagcccacgacgccttcaacaccttcttcagcgaaaccggatctggcaagcacgtcccccgtgctgtcttcgtcgacctcgaacccaccgtcatcgacgaggtccgctgcggcacctaccgtcaactcttccaccccgaacaactcatctccggcaaggaagacgccgncaacaacttcgcccgcggccactacaccgttggcaaagagatcgtagatctgtgcttggatcgcg

SEQ ID NO: 51429 - DNA, 299 bp, Glycine max
  Clone ID: LIB3109-002-Q1-K3-F10
gaggtgcagagagagggattgaatcatgggaagagggacggtggttctgcagagaatacagaacaagatcaatcgccaagtaaccttctcaaagcgcacaaatggtttgctcaagaaagctttcgagctatctgatctatgcgatgctgaaatcgctctcgtcatcttctgcagccagggcaagctttttcagtatagcagcactgacattaacagaatcattgagaagtatctgcaatgctgcttcaacatgtctcatactggcgatgtatctgaacatcaatctgagcaggagcttt

SEQ ID NO: 51430 - DNA, 352 bp, Glycine max
  Clone ID: LIB3109-002-Q1-K3-F4
gggagagagagggagaaagagaaggagatcgcgcttaacacatcacacagcaagagaaagagtaatagaatcgtggttcgtttgcagaagaagaggttaagagaaggagtgaccgaagcgaagatgttaccaacagcttccaaaggacgttcttcttcttcctcctcctcctcctcttcctctcgacctaacaatcccatgctgcttccctacctccgcagaatcatcaagtggcaacaaatggatattgaatatactttttggcaaatgcttcatctatgtacatcaccgaaagttgtctatcggcatactaaatatcacaaacgtaagtctctggctcattaatatcttt

SEQ ID NO: 51431 - DNA, 406 bp, Glycine max
  Clone ID: LIB3109-002-Q1-K3-F5
gggggtaaaaattggattaaatccatgatcctgacagcatcactgttcccattcatgtgctttggaattggttttattttaaacacaattgctatattctatggatctctagctgcaatcccctttggtactatggttgttgtctttgttatatgggcttttatctctttccctctagcacttcttggcacagttgttggaagaaactggagtggtgctccaaataatccatgccgtgtgaagaccattcctcgtcccattcctgagaagaaatggtacctcacaccatctgtagtttcgctgatgggaggactgcttccctttggcagcatattcatcgagatgtattttgtattcacttccttctggaattacaaggtgtactatgtctatggcttcatgctac

SEQ ID NO: 51432 - DNA, 285 bp, Glycine max
  Clone ID: LIB3109-002-Q1-K3-F6
aaattggattaaatccataatcctgacggcttcactgttcccattcgtgtgctctggaattgcttttattttaaacacaattgctatattctatggatctctagctgcaatcccctttggtactatggttgttgtctttgttatatgggcttttatctctttccctctagcactccttggcacagttgttggaagaaactggagtgttgctccaaataatccatgccgtgtgaaaaccattcctcatcccattcctgagaataaatggtacctcacaccatctgt

SEQ ID NO: 51433 - DNA, 390 bp, Glycine max
  unsure (1)..(390): unsure at all n locations
  Clone ID: LIB3109-002-Q1-K3-F7
gggagaatggaggtggtgtgtcggggaatgttgaaacccagaaagttcatgcanaggaggaggaaattcgaggttttcaaggattctgcagatgaagctgaccagaagaattggaggagaatcatgactgaaatcgaagaatccggttctgctgtctctgtgctctctgctgagaagattaataaccaaaatattcctaaagacctcgttgttggtaccttgattaggtttaaacaactcataaagtggaaccttgttgttgagattctcgaatggcttcggactcagaactggtgggattttggtaagatggatttcttcatgcttatcacggcttatgggaagctaggagacttcaatggtgccgagaaggtcttaggcttgatgaat

SEQ ID NO: 51434 - DNA, 400 bp, Glycine max
  Clone ID: LIB3109-002-Q1-K3-F9
ggtgttattgaagagtagggataatagagtccgtatcgtagcaaaacgcacgagttaggggcggcgatgggaggttcatcggaggatttctcggtggtggtgctggcgtcggacctcggcgtcgatgcgcgacctttcctcgaacacgatcaacagcaagaagaagagaattggcacgactgttcccagtacctctcccccgacgaggacttctccgatctcgatcagttgcaattcctccgcctccaaggctccgacaagaactccaatcgcattctccgcatcgtcggcaagtactttcccgcaactgttgtgagtgcggagcggctcaagcggtatgtgttcaacaaaatttgcagtgagttgcctgaggggcccttctgtattgcttacatgcaca

SEQ ID NO: 51435 - DNA, 415 bp, Glycine max
  Clone ID: LIB3109-002-Q1-K3-G1
gttgtgggagggtaccaattgagtgatcagtcgtggggaaggccgtagtcggagaagaaacgcgactcaaattggcggaggatcgtctcagccaatccgcagttccatccgaggtgggtcttttaatcggaaagttcagctccgctttgggccgggccttcctcttcgatctcattcccaccccacacaacgactccggcgagcccgcctgctccctcaccgagtccgacaagaagaagggccccaaatctaaatccaaatccgagctcgctgattcctcttcccttttcatcgacaaggactgggtcgccgaacatgtccgccaggtttctagaatgctcgtcggcggcatcaaggtcgttggcctatacgtttgggttagcgacgccgcgttcaagaattcaaccataatgct

SEQ ID NO: 51436 - DNA, 56 bp, Glycine max
  Clone ID: LIB3109-002-Q1-K3-G10
ggcggaggctgttccacgcttgtttttaccacgaccctggttgataacattaaaat

SEQ ID NO: 51437 - DNA, 357 bp, Glycine max
  Clone ID: LIB3109-002-Q1-K3-G11
tttatgaaaagtgtgagaacgaaaatggagcgttgtaactgctacatgttcacgctgagccttcttcttcttcttcttcttactccgccttctctctccgacgatctcggattcgattttccggcgaagaaactgataagagaccttaacctttttccttctgaagatgtcaacatcgttcctcgccactccaattctcacgccaacaaaatcgtcgagaaaccgcttaggttcccaaacttagtgccttcagactccggcatttccctcgacgacttggctcaccgcgctggctattatcttattcctcattctcatgctgccaagatgttctactttttctttgaatcaaggaac

SEQ ID NO: 51438 - DNA, 288 bp, Glycine max
  unsure (1)..(288): unsure at all n locations
  Clone ID: LIB3109-002-Q1-K3-G12
gaggggactgacaagatgcatgatcgagaactctaatcctaaatctaaggagagaaaaaatttacaagataatcagcaaataaaatttgtaatgaattttgagtaattcttagtttagaaaaaagtgaaggacacttgagtctagaatacttatataatttattctgcnagaagcttgagcgagtgagttgggattgataacggagatgagcagagtcacccggctattcacaagactttccgttttattcatttcacttttgaatcttcgaatcacatccgatgggt

SEQ ID NO: 51439 - DNA, 396 bp, Glycine max
  Clone ID: LIB3109-002-Q1-K3-G3
ggccatcaaaaggaatagtttgattggaggagatgactttaagagtggtcagaccaaaatgaaatcggtgttggtggatttcctagtaggggccggcatcaagccaacatctatagtgagttacaaccatttgggaaacaatgatggcatgaatctctcagcccctcaaaccttccgctcgaaggaaatttccaagagcaatgttgttgacgatatggtcaacagcaacgccatcctctatgagcctggtgaacatccggaccatgtggttgtcattaagtatgtaccttacgttggggacagcaagagggccatggatgagtactcttctgagatattcatgggcggaaagaacacaattgtgttgcacaacacttgtgaggattcactgttagc

SEQ ID NO: 51440 - DNA, 402 bp, Glycine max
  Clone ID: LIB3109-002-Q1-K3-G4
gggtgctaaattgagataactgtgtgtgacagagagagagagtaatcaagatagctcctttgaattttctatcagaatctgagggcccaaaatctagggttttctgttcttctctggggatctgaagacatgcagtccaagtctgaaactgcaaatcgactgagatcagatcctcattcctttcaacctggcagtgtttattctgagccttggtggcgtggtattgggtacaatcctgtggcccagacaatggctggggcaaatgcatccaattcatcgtctcttgaatgccctaatggtgattctgaatccaatgaaaaaggtcagtctttgtccaatagcgggatgaatgaggaagatgatgatgccactaagggatcacagcctgctgcttctaatgga

SEQ ID NO: 51441 - DNA, 371 bp, Glycine max
  Clone ID: LIB3109-002-Q1-K3-G5
gatatcaggtggcaacaacactgcctcaaggagcccaactttccgccctaattctcagtttatgggcttgcaccacccaagaccaatgcctgccatgggagccacccatagcttcataaataggatgtacccaagcaaactatatggtcaatatgggaacactgtcagatctggaatgggttatggtacacatgggtatgattctcgcactaatggacgggcttggttagctgttgacagtaaatacaaaactaggggaagaagtggtggctactttggctatggcaatgagaacgcagatggtttgaacgaactgaacaaagggcctagggccaagggtggcaaaaaccaaaaaggttttgcaccaacta

SEQ ID NO: 51442 - DNA, 373 bp, Glycine max
  Clone ID: LIB3109-002-Q1-K3-G6
gaatcaagtgaaagctctgatgaagacaatgatgcataacccgccgtaactgatgtgtcaaagccttctgctcttgcaaagaagaaggttgacagctctgattctgatgatagcagctctgatgaagataaggggaagatggatattggtgatgatagttctgatgaaagtgaagagccacaaaagaaaaagactgtgaaaaatccaaaagaaagcagtgatagttccgaagaagacagtgaggatgaaagtgaggaggaaccctccaaaactcctcagaaaagagacagggatgtggagatggttgatgctgcctcgtctggaaagaaagcgcctaagaccccagttacacccaaagaagaaactggcgctt

SEQ ID NO: 51443 - DNA, 372 bp, Glycine max
  Clone ID: LIB3109-002-Q1-K3-G7
gatacagagggttcttatcagtgacagagtaaaggaggcataccgatgacgatggcgatgacggcgtcgcagttgcggtgcggttgggggtggaggccaacgccgaatcagcagcagcaacgacgtcgtatggttccggtggtgtgttccatcgctatagagaacgcgaagaacaaagagagagcgaaactgaagaagctcttcgatgaagcgtacgagaggtgccgcactgctcccaccgaaggcgtttccttcactctccaacaattcaccgacgctctcgacaagtacgacttcaacgccgaaatgggcaccaaggttaagggcactgtttttgccacggataacaatggagcttatgttgacattact

SEQ ID NO: 51444 - DNA, 382 bp, Glycine max
  Clone ID: LIB3109-002-Q1-K3-G9
ggttggcaatgggactgagtcagttaaagcgtggttgttgtactgacactgtcccaagcaatggaagttccttatgaagcgccgtctaccgacatatatcgacaaaaccataagcaaaaatgcgctgaagcgcgaactcaagaacaaacataaagaagaagataggaaacgcatggaggaggacaaggccaaaaaagcagctgacatgcagaaggctaacgataacacatctgcacctgctgatgaagatgatatggacccaactcaataccttgagaataggctaaagtatattgcaggtcataaggcagaggggaataacctctatcctgacaaattctatgtcactatgtcttttgatcaatacatcaaggaatatgga

SEQ ID NO: 51445 - DNA, 412 bp, Glycine max
  Clone ID: LIB3109-002-Q1-K3-H1
gaaaaaaattgaatctatttggatatgcgaatcaatcctactacttctggtcctgaggtttctgcgcttgaaaaaaaaaatctgggacgtatcgcccaaataattggtccggtactagatgtagcttttcccccaggtaagatgcctaatatttacaacgctctgatagttaagggtcgagatactgttggtcaacaaattaatgtgacttgtgaagtacagcaattattaggaaataatcgaattagagctgtagctatgagtgcgacagaaggtctaatgagaggaatggaagtgattgacacaggagctgccctaagtgttccagtaggtggagcaactctaggacgaattttcaacgtgcttggagagcccattgataatttaggtcctgtagatactcgcacaacat

SEQ ID NO: 51446 - DNA, 288 bp, Glycine max
  Clone ID: LIB3109-002-Q1-K3-H10
gaacatacggatgaacattatattgggaactgcgggaggattggcctatcttcatgagggtcttgaaccgaaagatggccaccgagatgtgaaatcaagttacatacttattgatcgccaatggaactccaaggtttccgattttggacttgctaagcttttgtgttctgagaatagttacgtcacaactcgagtgatggggacatttggttatgttgcaccagaatatgcatgcactggaatgctgactgagaagagtgatatttatagctttgggatacttatcat

SEQ ID NO: 51447 - DNA, 342 bp, Glycine max
  Clone ID: LIB3109-002-Q1-K3-H11
tgttcagcgcttgagaccaagccccactcaacgacgcggaccactctctctgctgttcttctacctttcaagtttttaaagtattaacatggcagagacattcctatttacctcagagtcagtgaacgagggacaccctgacaagctctgcgaccaaatctccgatgctgtcctcgacgcttgccttgaacaggacccatacagcaaggttgcctgcgaaacatgcaccaagaccaacttggtcatggtcttcggagagatcaccaccaaggccaacgttgactactagaagatcgtgcgtgacacctgcaggaacatcggcttcctcttaaacgatgtggg

SEQ ID NO: 51448 - DNA, 194 bp, Glycine max
  Clone ID: LIB3109-002-Q1-K3-H12
ggtacctaatagaaacaggaactactgcgagggcagacgcaaagacgggatcattggccattctattataaactgtgatggccttcattctatcaacaaccgaagacatggaaaatcgtaaggtttaaacaatacacagtagatttaaagccttggtgctaaaacaaagtcgagcgtatacataccgctgcata

SEQ ID NO: 51449 - DNA, 413 bp, Glycine max
  Clone ID: LIB3109-002-Q1-K3-H2
gacgataaagggtttttgttttgtttccttgggggctgcatgcactttcactcgaagaaccttgaagcgagtctgggccacagcaaccagcgacaacaactcaatcagctagggttgctttgcttgctatcttgttggaggattttctgttcaagagaagatggtaactagaattgtggatcttcgttcagacacagttacaaagccaactgaagcaatgagagctgctatggcaagtgctgaagttgatgacgatgttctaggctatgatccaactgcttttcgcttagaaacagagatggcaaagacaatgggcaaagaagctgctctttttgttccatctggcactatggggaaccttgtatctgtacttgttcattgtgatgtcaggggaagtgaggttattcttggag

SEQ ID NO: 51450 - DNA, 415 bp, Glycine max
  Clone ID: LIB3109-002-Q1-K3-H3
ggatgaagataggatgcttctgaaattccgatctcaataaggtccttaagtaaaaaatactactgtcgtcacagatctgaatctggtcccctctggtatcgtgtagtactagtattttagttgcatctaataaatgaggatacccaagaagttgatttaataaatgttcaccaacttaacataagctatttgattttgctgacaaatacagaggcaaatatgacagcagcatcacggttgcccaaaagtattacagatccatcagtggttacaatgatgaattgctctgggctgctgcttggttgtatcaagcatctaacaaccagtattacttggattaccttggaagaaatggtgattccatgggtggaactggttggagcatgactgaatttggttgggatgtcaagtatgc

SEQ ID NO: 51451 - DNA, 338 bp, Glycine max
  Clone ID: LIB3109-002-Q1-K3-H4
gcgagcatcaatatctttacgtgtgcagttactgatgagatttcttcctattctttgctcagacggggagtcttctgcaaggagcatgagatacatgcttgcctctgtacttcttcgtctccttggcagccgggttgtgcatgaggatgcaacggtgaatcccatgcactatactccattgagaagggaggcagagtcacatgctgaagcttcttttgtagattcttctgctgagggcctgtttgatcatctgctgttgattttgcatggattgttgagtagttctcctccaagttggctcaggtcaaaacctgtttcaaagacaactaatgaaccta

SEQ ID NO: 51452 - DNA, 325 bp, Glycine max
  unsure (1)..(325): unsure at all n locations
  Clone ID: LIB3109-002-Q1-K3-H5
ggggagcgaagtgaattgaaattgaagtgactcggggtgagttgactcagcaatggcggaagaggtgactcgggtgatggtggcggtgaacgagtcgagcattaagggataccctcatccttcgatcagcagcaaaggggctttcgactggaccatcaacaagatcgttcgcgacaacgtctctgccttcaaccttctttttcttcacgttcaagtccccgatgaagatggttttgatgacatggatagtatctttgcttctcctgacgattntaagaacatgaatcagagagatagaattagaggagttcatctgctggaatac

SEQ ID NO: 51453 - DNA, 356 bp, Glycine max
  Clone ID: LIB3109-002-Q1-K3-H6
gaggaaggaaatgtgcagttagatgcaaaacatgaatgcaaagatgcaactctttttcaggcccctgaagattgtgcacttgccataacaagcattattcgtcaccatgaaacagagtaccttgcttctcttgaggcatcatatctaaaccttcctgattctactttcaaggatcttcggagaaagcttcctgtcacccgcacgttatttccatggcataatactttgcagttcagcttgacaagagacatctcaaaagaacttggcattggaaagtaaatacactacattcacacagaacaaataaaaagttgtgtttactcggtggtgacaagttcctcatatattcactacat

SEQ ID NO: 51454 - DNA, 282 bp, Glycine max
  Clone ID: LIB3109-002-Q1-K3-H7
tggggtgcgtgagggagtaaagagacggacgaacgaagtggtgctgcatcgagtgcctttgcaggctatagcgccgtggtcagatgttactgggttttctcaaaacgatagccttaacggtgtcattgcgatcacgtacacggaaaactttactcaattgatggattactttaacgcttgttagctcaacgatctacgcttgattagtgccgtcactctcaccgacggaactgactaattcaactacagcaactacactgtatgttcagttcggattaaatg

SEQ ID NO: 51455 - DNA, 422 bp, Glycine max
  Clone ID: LIB3109-002-Q1-K3-H8
ggaggagactgagaaaacagaagaaaacaaaatggaagacacagtttctgcgttgaggtctttgatggtttctcactctccgccgctggatgccttagtggtgccctctgaagattatcacctgagcgaatatgtgtctgcacgagacaagcgccgcgaattcgtttccggcttcactggaagtgccggcttggcacttataacaaagaaagaagcactgctgtggacggatggacggtattttttgcaggctgagaaagaacttagtgctgggtggaagctaatgcgaattggtgaagatcctgctgtagatatctggatggccgataatttgccaaaagaagcatccgttggggttgatccctggtgcatttcaattgatactgctcaaagatgggagcgtgctttttgccgaaaacagc

SEQ ID NO: 51456 - DNA, 420 bp, Glycine max
  Clone ID: LIB3109-002-Q1-K3-H9
gccggatgagcagaggaatccaattcaagaatagtcaggttgctcacattcctggtgcccttttctttgatgtagatggaatagcagatcggactacaaaattaccacacatgctgccatcagcggaagcgtttgctgctgctgtttctgctcttggcatagagaacaaagatgatttggttgtttatgatggaaaaggattatttagtgcagctcgtgtttggtggatgttccgagtatttgggcatgacagagtttgggtattagatggtggcctgccgagatggcgtgcatcaggttatgatgttgaatccagtgcttcaagtgatgctattcttaaagccagtgctgctactgaagctatagagaaagtatataagggacaaacagttggcccactcacatttcagactaaatttc

SEQ ID NO: 51457 - DNA, 253 bp, Glycine max
  Clone ID: LIB3109-003-Q1-K1-A1
ggtgaaaggagaaaacaaaagggggaaaaattgacttgtgtagcttctaatgtgtggacattaaactcactttctctgtagccatagaaattcacattttatcttttgcattgtgcaacttcctcgcgccatggctgctaccatcatcacatgcaagctcttactgcttttaagccttctctcaagttcactattgctgggtgtgagttcatcagatacccttcagaatgtaggggcaattcccccaacatgc

SEQ ID NO: 51458 - DNA, 467 bp, Glycine max
  Clone ID: LIB3109-003-Q1-K1-A11
ccgccagactgctggaattaggcttaccgaggtcgcttccgaggtacttgagccctggcttgatgaggatcatctgcagcagcctgtggttgaagtcggacaccccgatggacttggccaatcctgcatctttacactactccatggcctcccatgtggcacagagatccactgtgtcaaatagtatttttccattttcatcttttgggatcacttactcacctggctttatagacactggaaaatgaataagatagaggtcaacatagtccaattgaagatttttcagtgacctttccaaggctggtcggaccaactctggtcgatgggaattgctccaaagctttgaagtgtagaatatgtcttctctcttcacactgccatctgcaatcttgcttcggatggccagtccaacctgctcctcattattgtaaacatgtgcagaatcaatatggtggaacccggct

SEQ ID NO: 51459 - DNA, 79 bp, Glycine max
  Clone ID: LIB3109-003-Q1-K1-A2
attatagatttataatggtacatgtccaaatttacatatgtaaatctattcatattctatcttactatcacttatactt

SEQ ID NO: 51460 - DNA, 252 bp, Glycine max
  Clone ID: LIB3109-003-Q1-K1-A3
ggaactggaggcaaaagtatatatggtcgtactttcaaagatgagaattttaatttgtctcacactggaccgggtgttgttagcatggcaaatgcaggacccaacacaaatgggagtcagtttttcatatgcactgtcaagacaccttggctggatcagagacatgtagtatttgggcaagttttggaaggcatggatattggtaggttgatcgaatcacaggagacagataggggtgaccgtcctacaaag

SEQ ID NO: 51461 - DNA, 427 bp, Glycine max
  Clone ID: LIB3109-003-Q1-K1-A4
cagacatgaggttgtcaaacctgaagctactatctgcatctcatcaccaagatggaaagaatagaggggctgatatgaagaagacaatgaaaaaatcaaggtcaataaagctttccgatcttgaggctcttcaaccatcatcatcatcatgaccttaaaggagaagcttgccttttaacactccaacaactgcaacatcagcatcaccacagatgcaacaacctttgttcagaacggtagatggttcaccaaattacaggaagccaacaagcatttcacatgcaaaaaaggaccttttcctggtaagccaaaggaacactgaacctggttcagattataagaatcttcctagaaaaatttccagtgattccaaagctgcatgtgttaagaaacctgcaaaagccttgacaagaccatctaatagttt

SEQ ID NO: 51462 - DNA, 289 bp, Glycine max
  Clone ID: LIB3109-003-Q1-K1-A5
ggtgaaaggagaaaacaaaaggagaaaaaattgacttgtgtagcttctaatgtgtggacattaaactcactttctctgtagccatagaaattcacattttatcttttgcattgggcaacttcctcgcgccatggctgctaccatcatcacatgcaagctctcactgcttttaagccttctctcagattcactattgctgggtgtgaggtcatcagatacccttcagaatgtaagggcaatttccccaacatgcaagcgcatagagtgtcccagctatgatgtcattcac

SEQ ID NO: 51463 - DNA, 254 bp, Glycine max
  Clone ID: LIB3109-003-Q1-K1-A6
tggtgaaaggagaaaacaaaaggagaaaagattgacttgtgtagcttctaatgtgtagacattaaactcactttctctgtagccatagaaattcacattttatcttttgcattgtgcaacttcctcgcgccatggctgctaccatcatcacatgcaagctctcactgcttttaagccttctctcagtttcactattgctgggtgtgagttcatcatatacccttcacaatgtaagggcaattcctccaacatgc

SEQ ID NO: 51464 - DNA, 361 bp, Glycine max
  Clone ID: LIB3109-003-Q1-K1-A7
gaattgggaatttttctaataggggatcaaaatggttttccctggagatggaaaattcgtccgccaggttttatcaatttgcaaattcttcctcaattagttaaaagaatgaaattggccgatattatgacaatactaggtagcatagatattattatgggagaagttgatcgttgaaatgataatttatttaacagagatacaagatatccatttttttttcagattggaatcttttaaagagatatatggaattatatgggtatttgcccctattttgattcttatattgggaattacgataagtgtactagcaattgtatggttagaaagggaaatatccgcagggatacaacaacgt

SEQ ID NO: 51465 - DNA, 429 bp, Glycine max
  Clone ID: LIB3109-003-Q1-K1-A8
gaattgggaatttttctaatacgggatcaaaatggttttccctggagatggaaaattcgtccgccaggttttatcaatttgcaaattcttcctcaattagttaaaagaatgaaattggccgatattatgacaatactaggtagcatagatattattatgggagacgttgatcgttgaaatgataatttatttaacagagatacaagatatccatttttttttcagattggaatctttcaaagagatatatggaattatatgggtatttgcccctattttgattcttatattgggaattacgataagtgtactagcaattgtatggttagaaagggaaatatccgcagggatacaacaacgtattggacctgaatacacaggtccttttggagttcttcaagctctagcagacggaacaaaattaccttt

SEQ ID NO: 51466 - DNA, 309 bp, Glycine max
  Clone ID: LIB3109-003-Q1-K1-A9
gctgcatatgacgacagagggcggcagcgtctttgctgatatcgctcttagcgaaggataatgatttcatcattaagtgtaatgcggtcggacagaagatccttgataacgtacgcttatatgctatcgaatagaacggctttagcattgccagtgatttggtccactaggcttatattgacaaggttgcatatgaaaatacgctctgatgaccccatgaactgcatcttgcagaggattgaacgagcgaagtgagcacaatcctgcctgaatgagtctgaacccgctgacctgattgaaacgagtctg

SEQ ID NO: 51467 - DNA, 293 bp, Glycine max
  Clone ID: LIB3109-003-Q1-K1-B1
ggcacaagtgagtttgttgatcgagataactagaaacagtgtgatgaaaatgaaggtccttgttttcttcgttgctacaattttggtagcatggcaatgccatgcgtacgatatgttccctctccgaatgaacactggctatggtgcccgtactccggaggtgaaatgcgcaagttggaggcttgctgtggaagcacacaacatctttggctttgagaccattcccgaagagtgcgttgaagcaacaaaggaatacatccatggcgaacaatatagatcagactccaaaacag

SEQ ID NO: 51468 - DNA, 418 bp, Glycine max
  Clone ID: LIB3109-003-Q1-K1-B3
ggttgttaccattaccagcaagttaaagagtgtttattcagagtacttgaattgaggttccgaatggcacactctctgagttttgctcctatttgttccttcaagtcctcttgcacacaaggggcaatttccggtaattcggttgcccgaaaggcttttcagataaatgaggcatgtcaggattctaaggctcgaaactttcaatctttgaaggccgcggatggtaatccaagcaccaaaacaaagagtatagtttgtcctgattgtgaaggaaatggtgcaatattatgcactcaatgcaaaggtactggagttaattctgtagatcacttcaacggacaatttaaagctggtggataatgttggctatgcaggtatgtgcactaaatatcacatttctggttttggctctaaattt

SEQ ID NO: 51469 - DNA, 417 bp, Glycine max
  Clone ID: LIB3109-003-Q1-K1-B4
gggttgaaagtgagcaatgtcgttcgcagtggcattgtgtacaacgtcgtcgttcttcccttcccgttttgaaattcgcaatccaaagcagcttcagcttccacctctcctttcaatgtcactgtcgtcgaagctaccgttgcatttctccggcaatgccatattcaaccgcaaccacccaaccatgttcaaaattcgagcctcaaactcttcatccaaactcgtcttattgagctccactatcgtcgtcacaacagcggtagcgaatcgcgtgctctacaaattggcccttgttcccatgaaagagtaccccttttttctcgctcagttcataacttttgggtatgttgttatatatttctcgatcttgtatttccggtaccgggcgagaattgtgaccgatgagatgctggcaat

SEQ ID NO: 51470 - DNA, 412 bp, Glycine max
  Clone ID: LIB3109-003-Q1-K1-B5
ggctcaactggtgagtagaattggggtcatcggagttactgtcatggctgtgctatctggttttggtgctgtaaacctcccatacagttacttgtcacttttcatcagagagattgaggaaacagaaatcaaggccttggaaagacagctaatgcaatcgattgagacttgtgtatcaaagaaaaagaaaattattctttgccaaatggagatggataacaagcaaggatctgaagagaagttaaatgctagatctttaattaaacgaattgttggtacggttgttcgatccgtgcaagaggatcaaaaagagcacgatattaaaggcttggaagcagaagttctggccttagaagagctttcgaagcaattggtcttagagatctatgaacttcgtcaagcaaaagaagct

SEQ ID NO: 51471 - DNA, 382 bp, Glycine max
  Clone ID: LIB3109-003-Q1-K1-B7
ggtggaagtgcagaagaagaagaagaagaagaaaaagggaaaaacgcaggaaaaatagaggaagatcgatcgagatctccctcgcgtttgtctcagttgaagaaattaaaacgcagaactagagtaactcaacggtctcagaattttcagggttttcagtacttccatattttttcttccggatttgagttggaagaagatcgaagaggtttctagttgcttcaattgttcctctgggtggtggagacttgctatatttttaaaatattgacaattcgaaatgccaaagagagaagggatagatctttgtcacatgaaagtagcagagcatcaccttacccaagtagctctagtcgtgtttggaaatctgctcttaaagagt

SEQ ID NO: 51472 - DNA, 298 bp, Glycine max
  Clone ID: LIB3109-003-Q1-K1-B8
gaagcagtggtacatagcaaggcagagaaagaaatttgggtctctctaaagagtctccgctgaactttttggtttcttgaagatgtcgatactctccgatcttatcaaccttaacctctacgacatcaccgataaggtgatcgccgtgtacatatgggtcggtggatctggcatggatatgatgagcatagcaaggactctcgggactggttaatgaccctttcaagcgttccaagtggaactatgatggttccagcacgtgtcaagcttctggacaagatagtgtagtgatcttata

SEQ ID NO: 51473 - DNA, 413 bp, Glycine max
  Clone ID: LIB3109-003-Q1-K1-B9
gaaagcaagcagggtaactgctgaaggaaggatcggttcttacatccatgacagcaggataggtgttttggtagaagtaaactgtgagacagattttgtctcacgaggtgaaatttttaaagagcttgtcgatgatatagccatgcaagtggctgcatgccctcaagtagagtttcttgatactgaggatgttcccgaggaaattgtgaacaaagaataagagatagaaatgcataaagaagatcttttgtcaaaaccagagcagataagatcaaagattgctgaagggcggattagaaaaagacttgaggagctggcattgcttgagcagtcctacattaaggatgataaggtagcagtaaaggacttcttcaagcatactattgcaactattggaggaaatattaaagtta

SEQ ID NO: 51474 - DNA, 267 bp, Glycine max
  Clone ID: LIB3109-003-Q1-K1-C1
gggccacagactatggttgttcagaaaaggaggaagaatttcattggctgatcaagtactcaccattgcataacgtccggagaccttgggaacagcatcccgatcagtcaattcagtacccatcaacaatgctattgactgctgatcatgatgatcgtgttgagccattgcattcgttaaagctgttggcgaccctgcaatatgtcctcgttaccagccttgataaaagtccgcatacaaactccaataattggtcgcattgaatgc

SEQ ID NO: 51475 - DNA, 358 bp, Glycine max
  Clone ID: LIB3109-003-Q1-K1-C11
ccacgcgtccgtgcgctcgaattacgactttcaagcagacgcccgaacgcgtactacaagctggatttgcttgtgactggatagttaacgaagcaatttcataacatgcatactacaagttctttgtgcacatttcatgtacaatgcatctacatttgccatttacagttgacactttgtagtatgaagcgacaactgtccttacatcctcaaaacttaataggctatcagccactcaaatttagcatgaaacgcctcagatccctgccttgcactgtaccgaaatctgaatcaacggctcagctgtcctgagatatgaactggacttaatacactactaccttcactacttggaaaa

SEQ ID NO: 51476 - DNA, 428 bp, Glycine max
  Clone ID: LIB3109-003-Q1-K1-C2
ggagtgagagaaagagatcacatagcagaatggcttgtactcaatgtttcttgcaccaccatgctcttaccacccctgccagatccccatcacaacgcatcatggttagcaccaagcctaaccagcttgtttgcaaggcacagaagcaagaggatattgatgtcagcccaatctctcgccggttagctctaaccgtgctcattggtgctgctgctgttggctccaaagtccaacctgctgatgcagcttatggggaagctgccaatgtgtttggaaagccaaagacagacacagatttcctgccatacaatggagatggattcaaactatcgattccctcaaagtggaacccaagcaaagaagttgagtacacaggtcaggttgttagatatgaggataactttgattcaaccaccaacgtggctgtc

SEQ ID NO: 51477 - DNA, 425 bp, Glycine max
  Clone ID: LIB3109-003-Q1-K1-C3
ggacacagtgagagtgtgagataatggacgaaattttacgacgtctttctgcggtggccgagtatcgaagaaagttttacctttgtcaaataatccattacagaatccgagcagccaaaagggttttgcgggatgcaaagaaggaatatgcgacaactcagtccctgaggaggggtggccaactcgttactcttgttgaagggccttataatgatcacaatcaacgctttatagtaaaatcaagcagtggagcagatagacatatagttggcattcatagtaaggtggagaaggagaagctagttccaggcacaagagttagcctggataggactaccatgaccattatgagaattcttccgtcccaagttgacccttttgtgtataacatgattcatgaagaccctataaatgctaattactct

SEQ ID NO: 51478 - DNA, 421 bp, Glycine max
  Clone ID: LIB3109-003-Q1-K1-C4
gaatcgaagagagagtattgttcttaatttcttaatcctccgtcgtgggtggcgatgttgttcttctccggagcggattctcagatccatggagcaggctcatattattaagccaaagcctctcagatccgcggtggcggcgtgacggaaatgaagtcctcaagccgtctcttcacgatcggactggtgtcggcgtggtactcctccaacattggggtactgctcctcaacaagtaccttctcagcaactatggcttcaagtatcctatcttcctcaccatgtgccacatgaccgcctgctccctctttagctacgttgccatcgcctggctcaagatggtccccatgcagaccatccgctcccgcctccagttcctcaagatcgccgccctcagcctcgtcttctgcgtctccgtcgtct

SEQ ID NO: 51479 - DNA, 311 bp, Glycine max
  Clone ID: LIB3109-003-Q1-K1-C6
ctgctagaagaccacagattgggaatcgaatagaggttatagttcttaaggtctgggtcctccttcgtgggtggcgatgatattcttctccttagcggatactcagatccattgagcaaactcatattattaatccaaaacctctcagatcctcggaggcggcgttacttaaatgaagtcctcaagccgtctctttacgatcggactgttgacgtcgttgtactcctgcaacattgatgtactgatgctcaacaaggaccttctcagcaactatggcttcaagtatcctatcttactcaccatgtgccaca

SEQ ID NO: 51480 - DNA, 311 bp, Glycine max
  unsure (1)..(311): unsure at all n locations
  Clone ID: LIB3109-003-Q1-K1-C7
ggtatccccattcagttggccaatcctcttcacttgttctctctctctctcctcagtgtctcttctctctggttgcaacttggtctgtgtgtgtgaaagcaccaaaaataagaattttctgcaaaagaaatcaatcccctctctcccaaaagaaatgctaaagtgtgggagaaaagggtattaaaaaagataagtgccaaacctcanagttgtgctttttacctncctcagntaaagaaaaaaccaggaccaaaaggaataaaaaataaggtagagagagaaggcattaaggtaagagttaagactagtta

SEQ ID NO: 51481 - DNA, 422 bp, Glycine max
  Clone ID: LIB3109-003-Q1-K1-C8
gctgcgttgtgcgtcggagctgtgtctggggaaagttgcgttgctttttgcggtacagctcacacacactgaacggtaagtatggcggacaaggctgttacaatccgaacccgaaagttcatgaccaacaggcttctttccaggaagcagtttgtgcgttgatgttcttcatccagggagggcaaatgtttccaaggctgaacttaaggagaagctagctaggatgtatgatgtgaaagaccctaatactgtatttgtcttcaaattccgaacacattttggacgttgcagatccactggatctggtttgatttatgacacagtggaaaatgctaaaaagtatgagcccaaatacaggcttatcaggaacggtcttgacactaacggagaaaagtcatggaagcaaatgaaagagagaaaga

SEQ ID NO: 51482 - DNA, 432 bp, Glycine max
  Clone ID: LIB3109-003-Q1-K1-C9
gacacgcagtcgtattgtagaactgaacaagggtttctctgtctctatctctgtctgcttcttcactttctctcgtttcaatcgaacaaaatcatgggcagaaaattcttcggcggtggcaactggaaatgcaatgggaccactgaggacgtgaagaagattgctactactttaaatgaagctaaagtccctggagaagatgttgtagaagttgacgcgagccctccttttgagttccttccttttgtaaaaagtttgctgcgccctgatttccatgtctcggcccagaattgctgggttcgcaaaggcggtgcttatactggataggttagcgctgaaacgcttgtgaatttgggaattccttgagtgattattggtcactctgaacggatgcagctgttgaatgaatcaaatgagtatgtgggagataaa

SEQ ID NO: 51483 - DNA, 317 bp, Glycine max
  Clone ID: LIB3109-003-Q1-K1-D1
gaatcgaatagagagtattgatcttaggggctgggtcctccgtcgtgggtggcgatgctgttcttctccgaagcggattctcagatccatggagcaagctcatattattaagccaaagcctctcagatccgctgtgtcggcatgacagtactgaagtcctcaagccgtgtcttcacgatcggactggtgtctgcgtgatactcctccaacatttcggtactgctcctcaacaagtaccttatcagcagctatggcttctagtgtcctatcttactgaccatgtgccacatgaccgcctgctccctctttagctacgt

SEQ ID NO: 51484 - DNA, 67 bp, Glycine max
  Clone ID: LIB3109-003-Q1-K1-D11
ggcccacaggttaatcactaactcactgagagagagaaaggaaaaataaaacaagaaaataaaagca

SEQ ID NO: 51485 - DNA, 419 bp, Glycine max
  Clone ID: LIB3109-003-Q1-K1-D2
gaagtataatacttttgtccaggattcaagtgcggatgatcttaccgatgtcggcgatgtggagtccttgcagttcgacttggctacagttgaagctgccacagacagattctcagatgaggacaagattggccaatgtggatttggggtggtttataagggtgtcttccctaacggacaggagatagctgtgaagaggttgtcagtaacctccttgcagggtgctgtagagttcaggaatgaagctgctcttgtggccaagcttcaacatagaaatttagtgagactattgggattttgcttggagggacaagagaagatccttatctatgaatacataccatacaaaagccttgatcgctttttatttgaccctgttaagcaaagagagttagattggtcaagacgctacaagatta

SEQ ID NO: 51486 - DNA, 303 bp, Glycine max
  Clone ID: LIB3109-003-Q1-K1-D3
cggaaccaaacaagctactctcaaggttaatcaaagcttgggttttcatttcaccatcttctacgtctcttgtttctgaagcattgaaagatgagaatggttttttggtgttggtgatttgtgaaaacattgatttggtaaagatggcgtggagaaaagggtctgaggaagtggctaatatcaatcctctgttccttacgatctacactgttttcatcattggcatcgtggtttcttctttctacgtcttctctggtatatacttaaccaaccctgcttctgctcaatcttctgcatggctct

SEQ ID NO: 51487 - DNA, 412 bp, Glycine max
  Clone ID: LIB3109-003-Q1-K1-D4
gcttcttcaaaagtacgttgcattccacgaatttcttctctctcgaagagggtaaactcgtaatgttggttccgattttttcggaaaaacgccttcgtttctttcccagcgaatttttcttttgttcgacgaaccttggattcatttcagtagcatagttcaggttcgtagatctcgaatttcactcaatcgcgtgttgttttccacttttccttttttgaagagccgtgagcatgttgaattaagtgccgttttctgttgttaaaaactccgatggttttattgtaattttgacaccaatatttagggctttgattcttgctttatactgattctgaagttaatctcctcttaatttaaccctgagcttagttcagatgctgagaatttgtcaatagatcaagattgcagt

SEQ ID NO: 51488 - DNA, 398 bp, Glycine max
  unsure (1)..(398): unsure at all n locations
  Clone ID: LIB3109-003-Q1-K1-D6
ggaacagaagaagaagaacatggaaggtataagtggtggctggagaaattagctgacataagcttgcgacaaagtgctgcatatggagtttggaattttagctttaacattctttatcattcaactcaggttattgctgtgctatttggaggaatgtctattctagcaggtcatatcacagccgagaaacttaccaagtttatattatacagtgaatggttaatttattctacctggtgggtgggagacaatatatccaatttgatgcaatcangttgggctagtgaaaaagtattccacttaatggatctcttaccgagcagccaattcatagaaagaggggtaacattgcanaggttaacagggcgtattgaggttctaaatgtatcttttcacta

SEQ ID NO: 51489 - DNA, 354 bp, Glycine max
  unsure (1)..(354): unsure at all n locations
  Clone ID: LIB3109-003-Q1-K1-D7
tgcaaaaggacacgaaaggggaacccaaccaagctaactctcaaaagttaaatcaaaatctttggtttttcatttcaccatcttctacgtctcttgtttctgaagcattgaaagatgagaatggttttttggtgttggtgatttgtgaaaacattgatttggtaaagatggcgtggagaaaagggtttgaggaagtggctaattcgaagcctctgttcctcacgatctacactgttgtcatcattggcatcgtggtttcttctttctacgtcttctctgctatatactcagccaacccttcttctgctcaatcttctgcatggctctcttncatttcgagtgatgcaactcatg

SEQ ID NO: 51490 - DNA, 427 bp, Glycine max
  Clone ID: LIB3109-003-Q1-K1-D8
gagattggatggtggaaatggaatcggcagctgagaaccctaattacccggcggtggactacaagcgaccttccatcttgtcatttcctcggaggcccgccctcagagttacatccgagttcgatagtgaaagcgcagtcttcttccataagatttcctgcaagttgttggacagccttgccaagttcaagttttcgttcaaccacagcggtaagggcggcgacatctccgaacctcaattcagctttgtctccaagcaccttagcctccactacgacctcgaagaccataatgctctcgttaagacctccatcgatcttgctcccagtttgcaactcactgcttctcatgatctcaaggctcaacaaggagaggttaccgtgcttgcaaacctaggcgatcctgcctattcacttcaactatctac

SEQ ID NO: 51491 - DNA, 318 bp, Glycine max
  Clone ID: LIB3109-003-Q1-K1-E1
gctggaatagaagaaaaggtgcttgctagaagtgacagtatgctgaagtgtgtcagatggtaggggactcaactacttcttcgtaactactccctttcatcttatcgagcttatgtatcacgagactaactacatttagtaactaattgcgtgcatatacaatggctgtacatacaggatatggctggaagttgtatagcatattaagctaaccatatagcagcatccgggtcatgactagttacatgactagcactagtagtacttagctgatgtcagtgtatagggattgtagcatgatacttgattgttaagtga

SEQ ID NO: 51492 - DNA, 377 bp, Glycine max
  Clone ID: LIB3109-003-Q1-K1-E2
aggcgtgcgaacacctcagacaggacagcagtagaagaatgggagcatgctgctagcgccagtaagctgtcaaccatcaaatggtaagtgcctcaaccacaggctacctactccactagttcatctgagtggagccatgtatccacacactatctacctctatatcatgatctggatctgatacactggcattacacacaggtgacggacatacgtccaaggacatattcgaatcatcgtattacagcgttctgagaattacttgactaatcactcgcattcactaaacacagtttatgtcagcgtaaatgtatcgtcgctagatactagaggattagttcgaaccttatgtattgagtggatagatcatacctgca

SEQ ID NO: 51493 - DNA, 416 bp, Glycine max
  Clone ID: LIB3109-003-Q1-K1-E4
gacactaaacaagttaaaagaagagcatcactgaactaacaaagcaaccctatgtcgaaggtggtttgtgtcaccggagccagcggcgccatcggatcatgggtggtcctactcctactccagcgtggttacaccgtccatgccaccgtccaagatatcaaggatgaaaatgagacgaaacatttggaggaaatggaaggagcaaagagtcatctccatttttttgaaatggatcttcttgacatcgactccattgccgctgccataaagggttgttccggcgtaatccaccttgcatgtcctaacatcattggtcaagtcgaagatcccgagaaacagatattggaaccggcgataaaaggaacggttaatgtgttgaaggcggcgaatgaagcatgggtggagcgcgtggtggc

SEQ ID NO: 51494 - DNA, 365 bp, Glycine max
  Clone ID: LIB3109-003-Q1-K1-E5
ggaaaggcgaagggataaggtgtacattggctgtggagctgggtttggtggtgacaagcccttggctgctcttaagttgcttcaaagagttcaagaactaaattatctggttcttgaatgcttggccgagcgaactcttgctgatcgttatcaaatcatgatgtctggtggtgatggttatgattctcagatttctaactggatgcatatgctgctgcctctggctttggaaagaggaacttgcataattaccaatatgggtgcaatggatcctctgggtgctcaacagaaggtcttagaaatagctaacagcctgtgtctcaatgtttctgatgctgtggctcacgtagtgtctggcactaata

SEQ ID NO: 51495 - DNA, 429 bp, Glycine max
  Clone ID: LIB3109-003-Q1-K1-E6
gtacttgaagggtttcactgaagggacgatgattgttggggaatttgctgggagaagagttcaggaagctaagcccttgattaggaacaagcttttagaaacaggccaggctattatctacagtgaaccagagaaacgggtgatgtcaagatctggcgatgagtgtgtggtagccctcacagatcagtggtacattacatatggagaatcagaatggaagaagctagctgacgagtgcctttctaacatgaacctgtattctgatgagacacgacatggatttgagcacactttaagctggttgaaccagtgggcttgctcacgatcatttggtcttgggactcgcataccgtgggatgaacagttcctagttgagtctttatcggattccaccatttacatggcgtattacacttgtgcacaccattt

SEQ ID NO: 51496 - DNA, 422 bp, Glycine max
  unsure (1)..(422): unsure at all n locations
  Clone ID: LIB3109-003-Q1-K1-E7
ggttctagtgtgtgattgtttgttgttgtaactcgttcttcttcttttgttgttctgtgtttgtgtttgttttttctctcacctgaaaatgtcttgctgcggtggtaactgtggttgcggaagctcctgcaagtgcggcaactgctgcggaggctgcaagatgtacccagacttgagctacactgagtcaaccaccaccgagaccttggtcatgggagtggcacctgttaaggctcaatttgagggtgctgaaatgggtgtgcccgctgagaacgatggctgcaaatgtggaccaaactgctnctgcaacccctgcacttgcaaagtaagtgtttggagagcaagctttaagcagagatagcccttaattaaggataattgataactattaatgtgtagctaaaaacttatgtattatgtct

SEQ ID NO: 51497 - DNA, 422 bp, Glycine max
  Clone ID: LIB3109-003-Q1-K1-E8
ggagtcagacagacaaacaaactactgctacgttaatcatgggtccaacctctatggccgccggaagagtcacgaggtttttggccaggcactaccctctcgagcaccaccgtgataacgccgatgttgagttcgactttcttgatgatattggagaagccttgttagctcaaagtgctagcagtgatgagtgcggtcaccccaatgaaatggaggaacagttcgaccaagacgaggatcacagagataccgtcgaggagaatagaaccttttgggacaaacaacaccagcttttgcaggtaacaattcattacttaatccaaccaataccttcctcaatttaattactaatttgctagctactgtacgcctatctaagaaacttgcatgcaccctgttaatttattttgatttttttaaat

SEQ ID NO: 51498 - DNA, 386 bp, Glycine max
  Clone ID: LIB3109-003-Q1-K1-F1
gcttctgaaggagacactgaacttgctggaagaggatctttactgaactgactaagctaccatatgtcgaaggtagtttgtgttaactgcgccagcgcagccatcggatcatatgtggcactactcctactacatcgtggttacacattaccatgccaaggccacggatatacatgacgaatatgagacgaaccatttttacgtaatggtatgagcatatagtaatatccatttaattgctagggaccttactggcatctgctgcattgacgttatcataaaggattggtactgcgtcatgaatcttgaatgttctgacatcagtggtctactgatagattaggtgatacagattttggtgctcactatgaattgatcggatgctg

SEQ ID NO: 51499 - DNA, 424 bp, Glycine max
  Clone ID: LIB3109-003-Q1-K1-F2
gcatacaaaaagattgagcctaagccactagtcattgcaccaggaggtttctatgatgcaaactggttcaacaaatttataagcaaatcaggaaaatctattgatgtggtcactcaccgcatttataaccttggaccaggagttgatgaacaccttgtggaaagaattctggacccttcctatcttgataaagaggttagcacattcagtggcctaaaaaatatacttgcaggtacaggaacctcagcaacagcatgggttggtgagtccggaggggcctacaatagtggccatcatcttgtatccgatgcatttgtttacagtttctggtatttggatcagcttggcatgtcagctgcttatgacactaaaacatattgcagacagactttgataggaggaaactatggtttactcaatacta

SEQ ID NO: 51500 - DNA, 421 bp, Glycine max
  Clone ID: LIB3109-003-Q1-K1-F3
ggcgaggcaaggcaatagcctcatcctgttcaactcagagagagcgaaacgaagcgtctaaggttaaaaaaaactaaaaagggaaccacaaatactaccaccaggtttctctctatctattcctcactctagtctcttcattgctaattgtctgtaacgcttacatattttgattctttcactcactttgttgttgcgtgggctagatttcagcgttctcgtttctactctttattttaatgcactttgttcttgtgtttggaattaattttatttcttatgccatgtgattttcggtgtttttttggtttctggtgtacgaaacttgaatagtttgcaattcattcctaagttcacttggcaattcgatagttttttttttgctggtctggtattttcttatatatatttttaatatctt

SEQ ID NO: 51501 - DNA, 432 bp, Glycine max
  Clone ID: LIB3109-003-Q1-K1-F4
ggcacaagtgagtttgttgatcgagataactagaaacagtgtgatgaaaatgaacgtccttggtttcttcgttgctacaattttggtagcatggcaatgccatgcgtacgatatgttccctctccgaatgaacactggctatggtgcccgtactccggaggtgaaatgcgcaagttggaggctatgctgtggaagcacacaacatctttggctttgagaccattcctgaagagtgcgttgaagcatcagaggaatacatccatggcgaacaatatagatcagactccaaaacagttaaccaacaagcttacttttatgccagagacctcgaagtccatcccaaggacacatttgtgttcagtatagatggcaccgtactctctaatattccatactacaaaaaacatggatatggggtggagaaatttaact

SEQ ID NO: 51502 - DNA, 415 bp, Glycine max
  Clone ID: LIB3109-003-Q1-K1-F5
gggcacgagtcatttacaaacctaaggtctcggggttcaggtctatgtgatattgcaattttggttgttgacattatgcatgggttagagcaacaaacaatagaatccctaaatctattaaaaatgaggaatacggaattcattgttgccttgaataaggttgacaggctttatgggtggaaaacatgtcggaatgctccaattgttaaagcattgaagcagcagactaaggatgttcaaaatgagtttaatatgaggctcactcagattattactgaattcaaagtacaagggctgaataccgagttgtattataaaaacaaagaaatgggagaaacgttcagcattgtgcctacaagtgcaataagcggtgaaagaattcccgatttgttattactattgattcaatggaccc

SEQ ID NO: 51503 - DNA, 395 bp, Glycine max
  Clone ID: LIB3109-003-Q1-K1-F6
ggaacaccacagtgatgaacgaacacccatttgaggactgggaacgttccatattaacatctttgttggttacacttgaagttagaagcctcaagtgaagtgtacttgcatcttgttcttggaaaagttcagttgaatggggactcaaagaggaatagctcttctcagtttcacattcttcttgttggtgagctcagcaaatgctttgctttctcctaagggagtgaactttgaagtgcaagccttaatgggcataaaagattctttagaggatccacatggtgttctagataattgggatggggatgcagttgatccatgtagctggactatggtcacttgttcttctgaaaacttggtcattggactgggcactccaagtcaaagtttatctg

SEQ ID NO: 51504 - DNA, 418 bp, Glycine max
  Clone ID: LIB3109-003-Q1-K1-F7
gggagcgtgatgttggggtaggtggtggtggcgccgaaccgcaatggagaagccatcgtcgtcgtcgtcgtcgcgaagaaaatcgagcacgaaggtgaaagcttcaaccgatgcgaacacgaacctgagcatgctcaacgaggaccttctccagaacattctagcgaggcttcctgctctgcatttcgcttccgcagcttgcgtcagcaaatcatggaactctctctgcaatcgcatcctcactcgccccaaactctcttccgcgatttctctcaacccttcgctccccgatgctttcaacgaggttgttcacaaggttctttcggagccaattcgaccccatttcgctattgccaatatcggaactggattcagcactgccaagactttgtgccttattagacaagtcgtgggatcc

SEQ ID NO: 51505 - DNA, 405 bp, Glycine max
  Clone ID: LIB3109-003-Q1-K1-F8
gtgaagctgatgatgttaaagcaagaccagcaaatgcagcaaaggcaccagaaaatctgggttctgaagctcagttggatgaaatgaccatggctgctgctagtcttgaaagaaatcaatctgttagtggcttagatcaacttgatgataactctcagcataagccaagttcttttgattctgattgccaacaagatggggacagtgctgcaactgagagacagttctcccctgataaactttatcgagctgctgtattgaagaaacgatttcttgataccatcttgaaagctcgagaaaagacactgacacagggtgaaaagggggatcctgagaaattgcgccaggaaagggagaaactggagatggagcaaaagaaagaaaaggctaagctacaagcagaag

SEQ ID NO: 51506 - DNA, 190 bp, Glycine max
  Clone ID: LIB3109-003-Q1-K1-G1
cggggcgcggcaacgcaatagtcatcaatctgtgtaggtgccgcttaaccaaaatgaacgtctcatgtttattaaaagttacaatgatcgaatcatgctagcatcaggcagtctttatttaagctctcactatcctcactttatttatcgctgacagtctcgataacatattctcatgctttaattcact

SEQ ID NO: 51507 - DNA, 397 bp, Glycine max
  Clone ID: LIB3109-003-Q1-K1-G2
ggaagctaagcgaagcaaaatgggtggatcagtgagggacgtgaagtcgaagggcgaggtcgacgaggtggtggcgagtggctctccggttatcctccacttctgggcgtcgtggtgcgaagcttccaagcacatggaccaactcttctctcacctttccactgatttccccaacgcccgcttcttaagggtcgaggccgaagagcaacccgagatttctgaggcttactccgtctccgctgttcctttctttgccttctgcaaggatgggaagacctttgatacattggagggagctgatccgtcaagcttaaccaataaggttgctaaagtagcaagctcaattaaccctggagaatctgcatcttctggcagtcttgggatggctgcaggggct

SEQ ID NO: 51508 - DNA, 380 bp, Glycine max
  Clone ID: LIB3109-003-Q1-K1-G3
gaaattgatgtggatgaacttgagaagaggatgtggagggacaaaatgcgtcacaagcgattgaaagaacaaaccaagtccaaggaagggactgatgcaacaaagcaaaggcaatcccaagagcaggcaaggaggaaaaagatgtcaagagctcaagatggaatactgaagtacatgctgaaaatgatggaggtttgcaaggcacaagggtttgtttatgggataattcctgagaaggggaagccagtgactggagcatcagacaatcttcgtgaatggtggaaggacaaggtcaggttcgatcgaaatggtcctgctgccatagtgaagtatcaagctgataatgcaatccctggaaagaatgatggatgcaattccat

SEQ ID NO: 51509 - DNA, 422 bp, Glycine max
  Clone ID: LIB3109-003-Q1-K1-G4
gagaacagagtgtgataatagtaagacagagcacctactcactcgtaaatggcgaggaagaagatcagagagtaccactccaagaggcttctcaaggagcatctcaaacgtctcgcctctatcgacctccaaatcctctcagctcaggtgacagaatctacggatttcactgagctgacagaccagcatccatggctttcgtcaaccagattggtcgtcaagccagacatgctgttcgggaagcgcggcaagagtggcttagttgctctcaatttagacatagctcaagtcgccgagttcgtcaaagcacgcctcggcgttgaggttgagatgggaggttgcaaggcgcctataaccacttttattgtcgaaccgtttgttcctcacgaccaagagttttatctgtctattggttctgaaag

SEQ ID NO: 51510 - DNA, 404 bp, Glycine max
  Clone ID: LIB3109-003-Q1-K1-G5
ggtggaagtgcagaagaagaagaagaagaagaaaaagggaaaaacgcaagaaaaatagaggaagatcgatcgagatctccctcgcgtttgtctcagttgaagaaattaaaaagcagaactagagtaactcaacggtctcagaattttcagggttttcagtacttccatattttttcttccggatttgagttggaagaagatcgaagaggtttctagttgcttcaattgttcctctgggtggtggagacttgttatatttttaaaatattgacaattcgaaatggcaaaggagagaagggatagatctttgtcacatggaaattgcagagcatcaccttacccaagtagctctagtcgtgttggaagatctgctcttaaagagtcagaagagaatggtaaagaat

SEQ ID NO: 51511 - DNA, 416 bp, Glycine max
  Clone ID: LIB3109-003-Q1-K1-G6
attacaaagagaaataatcgaaatgtagatgaatccagttctgctctcaatcatgctgatgagagtttgtttcaagtatgatctgattccaatggtgaaattggatgtgaaaatgagaaggatttacgtttgaacccaggagttgcttcaaataaaatgtatttttgatgaaagtggcataaatgcttccggtgattgttccgagactgttctggtctaacagaatgactaagttctgtactgcccgtgatactctccttaagttttttttttccagagcttcattgccttgtaagcaagtcaattttcaaggcatttgaagcttctgcgatgtgctttgatctgggtattatgaataagttttattgatgttgggggaaatattgtttggtcccttgtcatttgagtggattttt

SEQ ID NO: 51512 - DNA, 429 bp, Glycine max
  Clone ID: LIB3109-003-Q1-K1-G7
gactgagggagaggggaatttgcccaagcttgtgctcacttccccggccggtaggtgcgtaatttgctataaagctatttttcccttaacaatcacaaccacaaccatgtgagtgcgtactttgattgattgaatatgtgggtgtgcagtgaggctgagatatacccggttggaaggttcattacttcttggaaagttcccagtggtaaggacctcctctttgttcgccccgacgctgttttcaatgggaacaaaccgataagtggtggtgttccgcattgttttccacagtttggtcctggtccaattcagcaggtacgtgtgcatctttaatccacgctattttctgcacttcttcttgatcttttttcctgtatattttactttttttatggtatatctgctgaattaaaatacaaaaatctgagt

SEQ ID NO: 51513 - DNA, 437 bp, Glycine max
  unsure (1)..(437): unsure at all n locations
  Clone ID: LIB3109-003-Q1-K1-G8
gggagcttctatcagtagcagtgcaccggctgctaaggcgcaagttgttggttggcctcctataagatcatttaggaaaaactcattggccaccacttcaaagaacaatgatgaagtagatggaaaaccaggtgcagctgcaatctttgtgaaggtcagcatggatggggctccctatctgaggaaggtagatctaacaaattatacaacgtaccgggaactgtcttctgcacttgagaaaatgttcagctgtttcactctaggtcaatgtggttcccatggagctccaggaagagaaatgttgagtgagagcaagctgaaggacctnctgcacggttcggaatatgtactcacttatgaagataaagatggtgactggatgcttgttggagatgtaccatgggatatgttcatcgacacatgcaaacgactgaaaa

SEQ ID NO: 51514 - DNA, 412 bp, Glycine max
  unsure (1)..(412): unsure at all n locations
  Clone ID: LIB3109-003-Q1-K1-H3
gaggcaattgcaaaggaaaaattgccaaagatggtttatgacttctatgcatcaggggctgaggatcagtggactttgaaagagaaccgaaatgcgttctcaaggattctgttccagccgcgtattcttattgatgtaagcaagatagacttgactacaactgtaatgggcttcaaaatatcaatgcctatcatgattgctccaacagccatgcaaaagatggctcaccctgaaggagaattagctactgctagagcagcatcagcagctggcacaatcatgacactatcctcaactgcgacttccagtgtcgaggaggttgcttcaacaggtcccggcattcgnttttttcaactttatgtgttaaaagacagaaatgtggttgctcaggttgtgagaagagctgaaaaag

SEQ ID NO: 51515 - DNA, 298 bp, Glycine max
  Clone ID: LIB3109-003-Q1-K1-H6
ggcagaagaagcgagagagagagaagaaagaatcaagcttagtcaaagtgtctgtgactgtcacacacagtctttaagatctggaagcgcttctcacttgcccacaacaacaattcctctcaatttcaaaattttcagcttcaaaataataaaaccctaagagaggggttgcaagcaaaatgagaagcgcaaagatgtggacggttttgatgtgtctgatggtgagcttcttcgctcgcattgaatcgctgtctgtgacggtgaacgacgtcgagtgcgtctacgagtacgtgcttta

SEQ ID NO: 51516 - DNA, 397 bp, Glycine max
  Clone ID: LIB3109-003-Q1-K1-H7
ggagagatggagggaagtatccggtgctctgccaactacgttcctctcactccaatcagcttcttggaccgcgccgacgtcgtttaccgcgacagactttctcttgtctccggtgacgttacctacacgtggacccagacacaccaacgctgtatcaaacttgcttcttccatttctcaacttggtgtccgtctttctcccctcgatgtgggtgctgtattggcccctaatgttccagctatgtatgagctgcattttggctgtcccatgtcaagggcttgtctctgcacgctaaatacacgtcatgattctgcaatggtttccttgttgctaaaacattctgaggccaaacttgcttttgctgattatcaattacttgatattgctaaggagcact

SEQ ID NO: 51517 - DNA, 430 bp, Glycine max
  Clone ID: LIB3109-003-Q1-K1-H8
gcagatgatggcagacaaattgttgccagggctaagtctgaagctactaactatgacagcgtatatggcgaaccaattcctgttaaggaacttgctgaccgcgtggctagttatgtgcacctctgtacgctatattggtggctcagaccttttggatgtggtgtcatactaggaggttatgacagggatggaccacagttgtacatggttgaacctttcggtgtttcctatagatatctcggtgctgcaaatgggaaaggcaggcaagctgctaaaacagagattgaaaagttaaagcttgctgatatgacatgtcgacaaggggttattgaagtggctaaaattatatatggagttcatgatgaggcaaaggacaaagattttgaactagacatgagcttcgtgtgtgatgagtcacaaccgacacatg

SEQ ID NO: 51518 - DNA, 446 bp, Glycine max
  unsure (1)..(446): unsure at all n locations
  Clone ID: LIB3109-005-Q1-K1-A1
ggcagccaaagaaaagaaaatcctcaattttctgagcaggcgaacactctgtctctgtctctcgaaaattctcagtttgcagagaaaatctgaatcatgtcgtggcaagcgtatgtcgacgatcaccttctgtgtgacatcgaaggtaaccacctcactcacgctgctatcatcggccaagacggcagcgtttgggctcagagtaccgacttccctcagttcaaacctgaggagataactgccatcatgaatgactntaatgagcctggatcacttgctccaactggattgtatctcggtggcaccaaatatatggtcatccagggtgaacccggtgctgtcattcgagggaagaagggtccttgtggtgttactgtgaagaagaccggtgcgngcctgatcnattggcattatgatgaaccaatgactccaggtcaatgcaacat

SEQ ID NO: 51519 - DNA, 431 bp, Glycine max
  Clone ID: LIB3109-005-Q1-K1-A10
gatggacttgatcattttcgtctatctccgacacaactccgtgcagagttcacaaggcgcaatgcggatgctgtgtttgccttccagctccggaatcctgttcacaatggccatgctttgctaatgactgacacccgaaagcgccttcttgagatgggctataagaatcctgtcctcttgcttcatccacttggaggctacaccaaagctgatgatgtcccacttgattggcgaatgaagcaacatgagaaggtacttgaggatggtgttcttgatccagagacaactgtggtatccatattcccatctcccatacactatgctggacccacggaggtgcagtggcatgcaaaggctaggatcaatgcaagggctaacttctatatcggtggtcgtgaccccgcaagcatgagccatccagttgagaaaaa

SEQ ID NO: 51520 - DNA, 420 bp, Glycine max
  Clone ID: LIB3109-005-Q1-K1-A11
gggtggagtgtgcaaaagagcgtcgtagtcgcaagcctaatcagaagaagcgcagcttcaagcgagtgacagccaccagccatgggtcgtatgcacagccgcggtaagggtatatcctcttctgctttgccctacaaaaggacacctcctagctggctcaagatctcttcgcaagatgtcgaagaaaatatctgcaagtttgcgaagaaaggtttgaccccgtctcagattggtgtcattctcagagattctcacggtattgctcaggtcaatagcgtcactggcagcaaaatccttcgcatcctcaaagctcacggacttgcgcctgaaattccagaggacctgtaccatttgattaagaaggcagtttcaattaggaagcatcttgagaggaacaggaaagacaaggactccaagttc

SEQ ID NO: 51521 - DNA, 360 bp, Glycine max
  Clone ID: LIB3109-005-Q1-K1-A2
ggagcatgaatgaagagcgatcagaatggctcccaagggcttaatgtttttcgctgcgttatgcttgttatcactgccactgagtcggagccttgccgaagataccggactcggtatcaacctctacgatgaatcataccctcacgctgatgacattatctgcgaacacgtcaagcttctctacaagcgccacaataacactgatttctcctggctcataaacatcttacatgactgtgctgttcagagccgtgatactctactgatgctggactccacatgacagagcttgtctgagaacgaaacctatagaagctctcggctgagaaatttgaggttcattgagaccatcaaacaatc

SEQ ID NO: 51522 - DNA, 448 bp, Glycine max
  unsure (1)..(448): unsure at all n locations
  Clone ID: LIB3109-005-Q1-K1-A3
tcatgaagaactcaggaaacaattgcctaatcacaggttccgtacaggaagtgattgtgatgttattgctcacctgtatgaggagcacggagaaaactttatggacatgcttgatggtatattttcatttgttctgctggatactcgtgacaacagttttatagtggcacgggatgcaattggggtcacttccttgtacattggttggggtttagatggctctgtctggatttcctctgaattgaaggggttgaatgatgattgcgaacattttgagtcttttccacctggtcacttgtattctagcaaagagagagcgttccgcagatggtacaatcctccatggttctctgaggctattccatctgccccttatgatcctctngctttgaggcatgcctttgagaaagctgtggtaaaaaggttgatgactgatgtgccctttggt

SEQ ID NO: 51523 - DNA, 332 bp, Glycine max
  Clone ID: LIB3109-005-Q1-K1-A4
tcatgtagaacgcaggtagcaattgcctaatcacacggtacatacaggaagtgattgtggagccatagctcatctgcattaggagcacggccaaaactttctggacatgcttgatggtatctctttatttgttcttctgcgatactcgagaccccagttctatagtggcactggatgcaatctacggcactttcttgtacattgattggggtatagatggctcctactggatatcctctgaatatgaaggggttgaatgaccgattgctaacatattgcacctttcacaccttgtcactcgtattctagcatatagagagcattccgcagat

SEQ ID NO: 51524 - DNA, 396 bp, Glycine max
  Clone ID: LIB3109-005-Q1-K1-A5
gggagaagaaggaagcatcataaccggccaaagcttcgctctcttccatttatcccccataaataaaactaggtgaaaaaaatatactctgtgcttctcatgatgatagtgtagctgaagctgcttctgctgcagcattggtgatttggacacaaaacaagtatcaaacttttcagttctctgagcttctggcttatcaatcttgaaggagttcaatactttaccctattagttggttccctgaaatttgtattggtattgctgtatcacaaattcttctgaacaatctctctaatcaaccatgtcattattggctaaactacgctgtgacaccatagatgttactggtaccctaatggcttacaaaggtgagctcggtgactaatattgcatggc

SEQ ID NO: 51525 - DNA, 409 bp, Glycine max
  unsure (1)..(409): unsure at all n locations
  Clone ID: LIB3109-005-Q1-K1-A6
gattcagatacgtttcagtgggaaatgaagtgaaacgggaacactcatttgcacaatttctagtgcctgcattggaaaacattcagagggccatttctaatgctggccttggaaaccaagtaaaagtttccactgccattgatactggtgccttggcagaatcattcccaccatcaaagggttccttcaaatctgattatagaggagcatatcttgatggtgtcatcagatttctagtgaacaataatgccccattaatggttaatgtgtactcttacttcgcttacaccgcaaaccctaaggacattagtcttgactatgcancttttaggtctncttcggtggtagtgcaagatggttcacttggttacccgaacctctttgatgcttccggtgatgctngttatgc

SEQ ID NO: 51526 - DNA, 396 bp, Glycine max
  Clone ID: LIB3109-005-Q1-K1-A7
ggagccaaagagagagaaagagaagaggaagaagaggaagaagaagctctggattccacctcttcccgtccttcgagacggttgttgtgctgcttgctcttcaggttgacctgggattgaatctaaagaatcttgatttacattttgagatatggagggagtttgtttctggacaaattgctaccagtatcggttttttgcattccaagaagtgcttgattggcgagttttcatccttggagattttcttcgggtttcctttgttaattgcacttagggttctgctccgctttaatgatcagcacagggtacgtgatgctacattcttctgatacaggtgctgcatcttaagtgcacttgtacaatgcattgctgacccaacattcagttaaaact

SEQ ID NO: 51527 - DNA, 446 bp, Glycine max
  Clone ID: LIB3109-005-Q1-K1-A8
ggcacaagtgagtttgttgatcgagatggctagaaagagtgtgatgaaaatgaaggtccttgttttcttcgttgctacaattttggtagcatggcaatgccatgcgtacgatatgttccctctccgaatgaacactggctatggtgcccgtactccggaggtgaaatgcgcaagttggaggcttgctgtggaagcacacaacatctttggctttgagaccattcctgaagagtgcgttgaagcaacaaaggaatacatccatggcgaacaatatagatcagactccaaaacagttaaccaacaagcttacttttatgccagagacctcgaagtccattccaaggacacatttgtggtcagtataaatggcaccgtactctctaatattccatactacaaaaaacatggatatggggtggagaaatttaactcgaccctggatgatg

SEQ ID NO: 51528 - DNA, 379 bp, Glycine max
  Clone ID: LIB3109-005-Q1-K1-A9
gactgtcaaacctatgtttactcatgggcttgatgggactgaacttccaggcattgctgggtggctagataagctgctgtctattgcttttgaacagacccttgttgagcccaacatgctcgctgttgatgttgagaaatttgtttcaccacaacaagagtcttggttcaaagtgaatgagaaggagcctgttgcttatgcaaaagtggaagttattgaagcatctgagatgaagccatctgatctaaatggattagcggatccttatgtgaaaggtcaaatgggtgtatacagattcaggacaaagatacaaaggaaaacacttactccaaaatggcacgaggaatttaaagttcccatcataacattggagtctgat

SEQ ID NO: 51529 - DNA, 424 bp, Glycine max
  unsure (1)..(424): unsure at all n locations
  Clone ID: LIB3109-005-Q1-K1-B1
ggaggaagaaagggtcgaagagaatgtgggaatcaggtgttttgacggtggttgccaccgccggcaacaacatcggcaaaatccttcagaagaagggcaccgtcattcttccccctctctctttcaagctcaaggtcataagggcatatgctttgaacaaaacctgggtgataggttttctaatggatatatttggggcactgttgatgttaagggcattagctcttgcgcctgtctctgtcatccaaccagtttctggctgtggactggcaattctctcagtcttttctcatttttatctcaaagaagtcatgaatgttgttgattgggtgggcattaccttggcaggttttggcacaataggagttggtgctggaggtgangagcaagaggctgctgctctatctattttccacataccatg

SEQ ID NO: 51530 - DNA, 315 bp, Glycine max
  Clone ID: LIB3109-005-Q1-K1-B10
gaagcataagaatctgcaacaaatagtcatggctgcgcttggggaacaatcagaagaacaagccatggctgcccaacctaaacctcagaaccgacgacccatttctaacatcgtcatcgtcgttgctatgcagacggaggcacttcccattgtcaacagatttcagctcaccgaggaccctcactctccgtttccgcgaggggttccttgggttcgttatcaagggacatacaaagatcttaatataagcttgatttggcctggaaaagatccaactttgggggttgatagtgtaggcacgatatcatctgctct

SEQ ID NO: 51531 - DNA, 396 bp, Glycine max
  Clone ID: LIB3109-005-Q1-K1-B11
tataggggcttccatagagaatatacagtaaacagaaaatgtgaagctcgagtggctggtgagaggcagcgactgctaaggaagggaagcatatttaactacaaatccaatggcggatacctcaagccgatcaagagacctcgacaagctgcttctccgacctggcaatctcgtcggtcctaggttctaacctgggcctgagttgccagatgaccttcaagccttcgccaattcttgttcagacttggagatgttggcaaacccaaagccgaagtagctgccaagcgtgtcatggagagaattagtggtgtggaaatcgtgccgcactttttcaggatcgaggacaaaggaattgaattctacaacaattttaacaatattgcccttggtcttgat

SEQ ID NO: 51532 - DNA, 419 bp, Glycine max
  unsure (1)..(419): unsure at all n locations
  Clone ID: LIB3109-005-Q1-K1-B2
gagaagaagaaggttggttgattggtcccattgattcgcgaagagaaaagaaaagatgtttgagccacaacagctatacactcgcgcgaagaccgaggaattcgacctcgaatcaggagaaaccctctacccagggctgagcgtcggcgagaaccagctccgatggggtttcatccgcaaggtctacggcatcctctccgcgcagatcgtgctcaccaccctcgtcttcgtcaccaccgttttctatactccaatcaatgacctgctcaagggcaattccaccctcctnctcatactcctattccttcccttcatctttttgattcccctgttgaagtaccagcagaagcatcctcataattacatcttgcttgcactcttcaccgtgtcgatcagttccaccatcggagtcacctgtg

SEQ ID NO: 51533 - DNA, 412 bp, Glycine max
  Clone ID: LIB3109-005-Q1-K1-B3
ggtacacagcctcaacaaccctaacgcgtgcagagcggagagagacgcagccatggggcgaagacccgcgaggtgttataggcacattaagaacaaaccataccccaagtcacggttttgccgtggtgttcctgatcccaagatcaggatttacgatgttggtatgaagaagaagggtgttgatgagtttcctttctgtgtccatctggttagttgggagaaggaaaacgtttctagtgaggccctggaagctgctcgtattgcttgcaacaagtacatggccaaatttgctggaaaggatgctttccacttgagagtcagggtgcacccattccatgttcttaggatcaacaagatgctttcgtgtgctggagctgataggctccaaactggaatgagaggtgcttttgga

SEQ ID NO: 51534 - DNA, 451 bp, Glycine max
  Clone ID: LIB3109-005-Q1-K1-B4
ggagacagagagaatgagtacggtgggagaagggaaggtgagtagtaatggtcatggatgttgcaaatcagggccaggctatgcttccccactggaagccatttctggtcccagagagtctctcatttatgtaacctctgtctacacagggaccggaatagagaagccagactatttggcgacagtggatgtggatccaaactctccaacttattccaaagtcatccataggcttcctgttccttatttaggtgacgaattgcatcacacaggctggaattcatgcagctcttgccatggagacccctcagcagaccgacgatttctcatcgtacctgcactcgtatcaagtcgagtatatgtggttgatgtgaaaacaaatccaagggctccatctttgcacaaagttgtcgagcctgccgatatcatacataagactggattagcttat

SEQ ID NO: 51535 - DNA, 351 bp, Glycine max
  Clone ID: LIB3109-005-Q1-K1-B6
gggactaactaatctccataaaataagctgagtgacgctcctcactttgtggccatggcttcactcacgtgcctacgcccaacccaccctcatcttcatcgcggttcagtgcttctcgccatttcgaaccgctgcttcaaccattcctccttgctgaactggattctctccgtaaaccctcctcgaaccgctcctacacgcgcaatggccaagccctgttcctcacctgcccaagacctagtcggatctcctggcgattttgaatttgtgctgcctctgaaaatcgtggagtatccggatcctagattgaaggccaggaattagcgcatagatgccttcgatgatagtctg

SEQ ID NO: 51536 - DNA, 451 bp, Glycine max
  Clone ID: LIB3109-005-Q1-K1-B7
ggttctagtgtatgtgattgttgtgagtcgttcttcttcgtcgttatcttcttcttttgttgtttgtgtgtttgttctttctctcacctgaaaatgtcttgcttcggtggtaactgtggttgctgaagcgcctgcaagtgcggcaacggctgcggaagctgcaagatgtacccagacttgagctacaccgagttaaccaccaccgagaccttggtcatgggagtggcaccagttaaagctcaattctagagtgctgaaatgggtgttcccgctgagaacgaatgcttgaaatgtggagctaactggacctgcaacccctgcacttgcaagtgaagtgttcgagagctaaagctttaagcataaattgcccttagaaataatgattaaaactatatgtagcttcaaaacttcaaaattatgtaatatgtattatggtgcactctggtgtttt

SEQ ID NO: 51537 - DNA, 396 bp, Glycine max
  unsure (1)..(396): unsure at all n locations
  Clone ID: LIB3109-005-Q1-K1-B8
tgcaccgtactcggtccgtgaatnntcccgggtcgagcccacgtcgtctcgtcggcttggtcgagaagaaacgtacagaaggggggccccgcagaagttgaagttcgaacggaaaaaagagagcctcttggagaaagtcctaannaaatcccaacccggcagaagggtaagggaaggaccttgcnttaaatctgatnaccagaaagaagagaaccaaagaagggcttaatannaacctgaaagaaatctgttttctccaatgtgaataagtgactcaatgcannaagaacataaaannnacctaactttaacatcnnagataataccaaggggatgtnnctgatcatnnntgtttgaaagaagcccagcaannagtagaaattctagnnntagtag

SEQ ID NO: 51538 - DNA, 338 bp, Glycine max
  Clone ID: LIB3109-005-Q1-K1-B9
gagagcagaggagagagagagagatacacagtcacacacacaacgcaaaacacaaagggtctgtgtttgttcttctgaaaagtccagctttctccaccacctctctagggttcctttgctttcaatttttgcttaaaaatattatttttatagtttttctgaaaaaagcaacagaccccttttccttaccgatcttgtcctctctctgtatttcttgccgtatgctgaatttgcagaactgaactaaagcttccttcatcatattgtccaacagcttattcaagagcaaaagtagaagcagtttaaagatgggttacttatgtgatttttgtggagac

SEQ ID NO: 51539 - DNA, 292 bp, Glycine max
  Clone ID: LIB3109-005-Q1-K1-C1
gaagtaagaaagtaagaaagtaggaaagatgacaggtgggatgtttggaaggaaggggcaaaagataaaggggacagtggtgttgatgcctaagaatgtgttggacttcaacgccataaccttcgtcagataaggcagtgttaacgacaccgtctccgatttcttgggcatatgcttgtactcattatgtcatgcatttgatgctgttactgctttaactggtcaaagcatctgcttgcaacttatcatggctactcagactgatagtagcggataaggaaaaggtggaaac

SEQ ID NO: 51540 - DNA, 420 bp, Glycine max
  Clone ID: LIB3109-005-Q1-K1-C10
ggagaaaggggtgcattctgttctgtgtttcggggttacgctttgcgagtgagaattgataaacaaatcgttagggttttttggttgtgcgagtgagagtgagagagaacaatggaagacataacagagggagtgaacaacatcaacatctctgattcgtataagaaaaatcgcattcaggtctctaacaccaagaagcccctcttcttctacgttaatctggccaagagatatatgcaacagcatgatgaggtcgagctctcagctctaggaatggctattgccacagtagtaactgttgctgaaattttgaaaaacaacagacttgctgttgaaaagaaaatcaggacatcaactgttgacataaaggatgactctagaggtcgacctgttcaaaaggccaagattgaaatagtacta

SEQ ID NO: 51541 - DNA, 351 bp, Glycine max
  Clone ID: LIB3109-005-Q1-K1-C11
gatggcagggaagaataaaggggtggcgccggaagacgccataagggccattggcttgggttacgatctcaccaacgatctgaagctcaaatcctgcaagaaccactccagattgatcgctattgacgatgacaaccttcgaactgtcgaactccctcctcggatttccatccctaatgtccccaaatccatcaagtgcgataaaggtgaccgcatgagattgtgctccgatgtcctctcttttcagcagatgtcagagcagttcaaccaggacttgtcactgtctggtaagattccaacgggccatttcaactctgcgtttgggtttaaaggagtttggcaaaaagatgc

SEQ ID NO: 51542 - DNA, 386 bp, Glycine max
  Clone ID: LIB3109-005-Q1-K1-C12
ggcggccaaacgtttcctagccgaaaccctagctagctctttcttaatccataatctctcttatcttcttctctttctatctgcaaaacacaaatgtctcacttcggacgttcgggtcccccagacatttacgacacttactctcttctcgatctcaacatcaccttccgtaccaccgacgacgacctattccctctcttcgacaagtacgggaaggtcgtcgacatcttcatccccaaggatcgaacaactggtgagtcacggggttttgcattcgtgcgttacaagtatgctgatgaggctcagaatgccgttgagaggctcgacgggagaatggctgatggtcgcgaaataactcgccagtatgcgaaatatgggcctaatgc

SEQ ID NO: 51543 - DNA, 248 bp, Glycine max
  Clone ID: LIB3109-005-Q1-K1-C2
gaggttgaaaattttaaaggtgtggaataagactactcagtcacctggaatttcaatgccaatccttattttgaggatcctaaacttgcaaagacctataccttacttgaatatggaacacctaaagtgactgctacacccatatgctggaaagagggcttgggcatacccaatggagtctctcatgagaaaacaaggtacacgcgtacttctactgatgtcagcttctttagactgcttactgacac

SEQ ID NO: 51544 - DNA, 413 bp, Glycine max
  Clone ID: LIB3109-005-Q1-K1-C3
gagaagaagaagagagaaggtataagcagccgtttggtctgttggtatatgaaggtggtgaagagagaagaagaaggagaatggtgacggaccaggatatagcgaaaggggtggagtctctactgcgtcactctgacccaaactccataactacggttaacggtgtcgttcagcagctggaggccaaactagggttagacctctctcacaaggccagtttcatcagagaccagatcgaccatcttctccggtcacagccacaggcatttggtcctcaccctcctccactttacaaagactattttgcccctcacccccaaccgcactttccgaccacccactttccttcccattttgccctccatgacgagatcaacttccagcagcacccccgcgctccttcaccgtgcaaa

SEQ ID NO: 51545 - DNA, 449 bp, Glycine max
  Clone ID: LIB3109-005-Q1-K1-C4
ggggaaagagacagaaccgaaaatggttgcgactttgagtcttccgatcatagacctctcttctccccatcgtctttccacagccaattccattcgtcaggcatgcgtggaatatggtttcttttaccttgtgaaccatggggtggacaccgattttgtgagcaaagtcttcgaccaaagttgcaagttcttctcgcttccggtccaacgcaaaatggacctggcccgcaaggaatatagaggctacactcctctctatgctgagacacttgatcctacttcactctccaaaggtgatccaaaagagacctattacattggtcctatagaaagtacctctattgctcatctgaatcaatggccttctgaagaattactgccaaactggagacctacaatgaaatccttatattggaaactactggctgctggaaaaagtctgctgtctc

SEQ ID NO: 51546 - DNA, 267 bp, Glycine max
  Clone ID: LIB3109-005-Q1-K1-C5
ggcgcactcagagaggaagcttatagagagagagagagagagagtgaggagagcgtattggctcttcatcaagattggtatttatagggattccatgcacaagaggcgtgccactggtggcaaggacaaggcttggagattgaagagcaagtatcatctatgccttaaggcatgcaaacacctacttatcaagcatcaagtcactctagaggattcgtgtaacatatcactgcttctcatacaggtcattgaggctaaatactggct

SEQ ID NO: 51547 - DNA, 389 bp, Glycine max
  Clone ID: LIB3109-005-Q1-K1-C6
ggtgatagcacgtagattagagccatggtaaaggaagtcaacacccaaaccgaggttagtgtgagattggaagccctctgggcagttctgtccaaggatttcgtcaccgtagctccaaaggtactccccaatattgtgaaggatgtgcaagtgattgaaggtgatggaggggttggtacaatcctcatctttaattttttgtctgatgtgtccccaagttaccaaagggagaagatcacagagtttgatgaaatttcacatgaaattgggctgcaagtgattgaaggaggttatctgagtcaaggattgtcatactacaagacaacttttcagttatctgcaataggataggatcagaccttggactacgtggaaattttttatgacca

SEQ ID NO: 51548 - DNA, 274 bp, Glycine max
  Clone ID: LIB3109-005-Q1-K1-C7
gggaactggggtacacagaatgatgacattgctgtggttactgaggaagtggtgtatgaaactgaaaagaattttgctgatgagaagcctgcatgcgaggaagatgcacctgaaggaaacaaggactgtcctgccaatgaaaatgaataaaaggagtctgaagacaaggagatgacactggaagagtatgagaaggtgcttgaagagtaaagaaaggccctgcaggcacaaatgactgaagttagaaaggtggacattaaggagtttgcattca

SEQ ID NO: 51549 - DNA, 449 bp, Glycine max
  unsure (1)..(449): unsure at all n locations
  Clone ID: LIB3109-005-Q1-K1-C8
gggagagagagaggctgaaacaaagaagtgaaaatggcagcaaaaagtaggagctgcagcagctcccccgaagcttatctcagcggcagactctgaaagctgtttgagtagcctcaacccggagaatagcaccaatgggagaggaggaaaacaaaccagaggaacccatggcaaaggagaaaaacccagaggaagaagcaacccaagagaaaaaaccggagcaagagtccaaagaggaagttgctgctgctgctgctgctccgccaccgccaccgncaccgccaccgnccgagattgtgctcaaagtgttcatgcattgcgagggttgcgcccgcaaggttcgtcgctccctcaaaggattcccaggtgtcgacgatgttgtcaccgattgcaaatctcacaaggtggtcgttaagggagagaaagcggatccgctcaaggtttggaga

SEQ ID NO: 51550 - DNA, 445 bp, Glycine max
  unsure (1)..(445): unsure at all n locations
  Clone ID: LIB3109-005-Q1-K1-D1
gatatccaaaggaacaaaaatattattaagatgatcgacattattggagcacttgttctactctttgcatttctcttcctcagttgtgtgtatgcacaagacacaacaacccttgtgcctgcaatcataacttttggtgattctgctgtggatgtagggaacaatgactatcttcccacccttttcaaggctgattaccctccttatgggagggactttgttaaccaccaacctactgggaggttttgcaatggcaaattagctactgatttcactgctgacacattgggtttcaagacctatgctccagcatatcttagcccacatgcatcanggaaaaacctccttattggagcaaactttgcttcagctgcatctgggtatgatgaaaatgctgctactttgaatcacgcgattccgttgtcccaacagttgagttatttca

SEQ ID NO: 51551 - DNA, 369 bp, Glycine max
  unsure (1)..(369): unsure at all n locations
  Clone ID: LIB3109-005-Q1-K1-D10
ggaagcagagctgaagaggtgaagtgaagatgatgtccggaaaatatacgtcgattgacgcgcagcagcttcagggatctgttcctgccgttccagattcacgacccgccaccgtcaatttcgcagattcaaatcttcagacttttcctccttctggagctcagggcaagatcaccgctgcttccgggccttctcgtgacgctgatgattcattttcaaaacctgtatctggttctgatgaaccgcagcagggtggttggtttcagacttttacaattgctgcttacaaaccatactttgatgttgacacttcagatgttctagagaggattatcgactcactatttccatttagaggatctntcaatg

SEQ ID NO: 51552 - DNA, 260 bp, Glycine max
  Clone ID: LIB3109-005-Q1-K1-D11
gattgcgaagacaaacacgattatgcctatgagttggcaaactgtactgttcatcgtctgagacggtgcttgtggtgaggaggaggccacacgtggtgaatggtgggggttttgtagtcatggattgtagtgcccagagggttgtgttcagggtcgatggttgtggtgttcgtggcaaacagggagacttgattctaagagaatgagatggatacgctttgcttcttatgcgtctaatggaaggcatggttgaggcctta

SEQ ID NO: 51553 - DNA, 196 bp, Glycine max
  Clone ID: LIB3109-005-Q1-K1-D12
gaatatggagcgtgtgactcaggctgtaatggtgggttgatgaacaacgcatttgagtacatacttcaatctgggggagtacagaaaggaaagggctatccatacaccgggagaaattgcacctgcaaatttgaccaaaccaaagttgccgctactgtatctaattacagtgtggtttcccttgatgaagaacaaa

SEQ ID NO: 51554 - DNA, 201 bp, Glycine max
  Clone ID: LIB3109-005-Q1-K1-D2
gacgacaaactttacggtgtgaacattgttatagttgtaggtacataagagtttattagatgccttatttacaattttttagatgtttttggtattgttcttcaatcaaagtcatagagtttttgtgtttttatttaccagtccaatgttaatcattagtttttgttagaatattaatgggaatttttccttttaactctc

SEQ ID NO: 51555 - DNA, 418 bp, Glycine max
  Clone ID: LIB3109-005-Q1-K1-D3
gaagaaggcacagttgcaaactatactttccacaaatacaaggctggctacattcatcactgtcttattgaaggccttgagtatgagactaaatactactatagaattggaagtggtgattcttctcgagaattttggttcaaaacacctctcaaagttgatccagattctccctacaaatttgggatcattggtgatttggggcaaacgtttaattctctttccacccttgagcattatatacaaagtggagcgcagactgtcttatttgttggagatctttcttatgctgataggtaccagtacaatgatgttggattacggtgggatacatggggacgatttgttgaaaggagtacagcatctcatccatgggtatggtctgctggaaatcacgaaatagactatatgcgctaca

SEQ ID NO: 51556 - DNA, 435 bp, Glycine max
  Clone ID: LIB3109-005-Q1-K1-D4
ggtggtattgcgtgttggtgtgaatgaagaaccggtctgctgtggctgctctgcaatacttggaatcgctgcgtaattcgcaccctgagctctccgattggtacaattcgctggcggatctgtaccagaagaagctctggcaccagctcactctcaagctcgagcagtttgtggctctcgccgtcttccaggctggtgatgctttaatacaattatatcacaatttcatcacagactttgagacgaaaatcaaccttctcaagcttgcacattttgctgttatagtttctcggcagtattctgaaaaagaagctgctgttggttatcttggaggggtcattcagaaacttcaagacactatggagcagcgcatagaagaacctattctttacattaagatgcaaatagcaatattcaagcttgagcaaggtgatc

SEQ ID NO: 51557 - DNA, 315 bp, Glycine max
  Clone ID: LIB3109-005-Q1-K1-D5
tatggggaggttgaattaggtttttaggtattgagacctaggggacacactattacgcatcattcatatttctcaaaactgaactatgctcatcaagtgatgccaagatcttcccagctaaggacatcacttttgctagtattgattctcatgctctgatgtaatcagtatctttacgcactttgtaaagcttcatactcttgttgtcataactgctctcgttgccatcaatctactgcgatgttctgaattgggacattggctaatgatttcactgtgttcacattcggtcttaagaactatcctacaacatat

SEQ ID NO: 51558 - DNA, 417 bp, Glycine max
  Clone ID: LIB3109-005-Q1-K1-D8
gagggcagtgaggagtaatgagattgaattgaggttgaagtgtgttgtgttgtggcaaagctcagaaaaagagagagagattgaagaagcgatttttttatatgaaattttgaagagtgaatgaaaaatctcaatcccatggatgagcaattgaatttgagctgaatcggcgtcgtttcgatttctctcagtcacacactactgactcggccagattcaagtaaacgcttcttctcagcaaaccctagtgtttcggtttccgatcgttgactaaaccgaaaatctcttcttcttttcttcgttcccccctttcgtgatggccatatattggagattgatgtgatgacctctttacctacctatcttcatgcagtgcttaattgatacctttgggttttatctcatgctattttaatt

SEQ ID NO: 51559 - DNA, 391 bp, Glycine max
  Clone ID: LIB3109-005-Q1-K1-D9
tcagctgaagaactatctatactccttagagtctctcttggatgataacagctggagagcttctgttcacagatatcagagcggtaagacaaggggtgctcattaccgtcagtctgatgacttattggcggatgctggttggcattgcagcttttgcttccgctatatcagcgatttcctctttaagatgaaagcctacagtcataatgacagagtcagactctctcattatttaaatcccagacgaattcaagatgtaatctgcacaggggctgattgatttgacatgctaccagatgagtacaccttcaaggaaatcattggtcaaatggggccgataccccattcctattctgcagctcatcttactgcttatctactggaaaatgct

SEQ ID NO: 51560 - DNA, 371 bp, Glycine max
  unsure (1)..(371): unsure at all n locations
  Clone ID: LIB3109-005-Q1-K1-E1
ggaagaggaaaaactagaaaagatcccaacagtgaggagccgagcgattttgtttaccttccaagagatgaagcatttggtcacttgaagtcatcagattttctcgcttatggaatcaaatctgtatcccaagatgtcttgcctgtcttgactgatgcattcgatggaaatattttgagccttgagtttgataattttgctgaagtgcacaaactctatgaaggtggagttacactacctacaaactntcttagcaagatcgcccctataccagtgatcaaggaaatttttcgaactgatggcgaacagtttcctcaagtatccaccacctaaagtgatgcangttgataagtctgcatggatgactgatg

SEQ ID NO: 51561 - DNA, 357 bp, Glycine max
  Clone ID: LIB3109-005-Q1-K1-E10
atcgacctttcctttaacaacctctccggccccataccaagctcgcttggtaaactgcctaaactcgcgtatctagatttgagccgcaacaagctcacgggctcaattccggcctcatttggatccttccaaaagcccgggccggctattatgctctctaaaaaccagctttcagggcgccttcctgcttctttggccaacttagactcggacaggatagacttgtcaaggaacaagctcgaaggcgatgcctccatgcttttcgggagcaataaaaggacgtggtctcttgacctttcaaggaacaatttcgcgtttgatctatctcgcgtggagattccccacaagaccctggca

SEQ ID NO: 51562 - DNA, 399 bp, Glycine max
  unsure (1)..(399): unsure at all n locations
  Clone ID: LIB3109-005-Q1-K1-E11
gaaaataattggaaaaaagcacaaccaaaatgaacatatatataaaaaacgactcaggtttgaacgcatctgaatgagaacggagaataacataccaaatagtagagcaattttcgattttgcaagctattgcacgacactaaaggaggaatcacggtgcgtacaaacgggtggaggcgctctctctcacacacacgtttggcaagcacgagcagtctgaactcaatgattgggtgctctaagtagaactcaacatggccattgatttctggcccaataagaagacatttggatatgcacctnctaactttgtatcttgcaactcccattttatttgtgtggataaaaatatctctttcagtaggaatctccattccgaaaggtattttttaccttttg

SEQ ID NO: 51563 - DNA, 196 bp, Glycine max
  Clone ID: LIB3109-005-Q1-K1-E12
gtagatagttgggaaatagcgcgattaattggtacatatatgtcagaagacggctcaggtaatgatctgcatgcgagtgagagcaagtggtagcatagcaaatagcacatcatttcttagacgctcaagctatagcacgatacttatagaggaatcaaggtccgtacaaatcagaggtggcgctctctctcacaca

SEQ ID NO: 51564 - DNA, 392 bp, Glycine max
  unsure (1)..(392): unsure at all n locations
  Clone ID: LIB3109-005-Q1-K1-E2
gatctttatgagaaagaagggcagagtccatggtatgataatctcggcagacctgttacagaccttcttcctcttatagcaagtggtgtcagaggcgtcactagcaaccctgcgatttttcagaaagctatctcatcatcgaatgcttacaatgatcagttcagggaacttgtgcaagcagggaaagacattgaaagtgcatattgggaacttgtagtgaaggatatccaagatgcttgcaaattatttgaaccaatctatgatcaaacagatggtggtgatggctatgtttctgctgaagtatctcccaggctcgctgatgacactgagggaaccatagaagctgcaaaatggcttcatanagtggttgatcgcccaatgtgtatattaag

SEQ ID NO: 51565 - DNA, 448 bp, Glycine max
  unsure (1)..(448): unsure at all n locations
  Clone ID: LIB3109-005-Q1-K1-E3
ggtgtgtgtttgtgttgggaggattgggattgggatgggaatcagcgaccccatgagacctcagagaacgtcgatccacgccgtcacgacatgggtgaggcgacagcccccaaaggtgaaggcttttctcgccgtcgtttccggcatggcggccctcgtcctccttcgcttcatcgtccacgatcacgacaacctcttcgtcgctgccgaggctgtccactccctcggaatttccgtcctcatctacaagctcatgaaggagaggacatgtgctgggttatcactcaaatcccaggaattaacggctatctttttagctgttacgctgtactgcagttttgtcatggaatatgatatccacaccttacttgatttcgctactttcgtaacaacgctctgggttatatacatgattcngtttaagctgaaagctagctacatggaagag

SEQ ID NO: 51566 - DNA, 442 bp, Glycine max
  Clone ID: LIB3109-005-Q1-K1-E4
ggtagacgactgcgaagtgcgaagttgttgaaaacgcgacaggggaaagcgcaaagcatggacaacaaaaccgatttttcaactcctcttctccccacaagctacggtcccgttgactctcaggggaaaggccataccggaccttcttcttcttcttcttctttttcttccataccaactactcttatactcactaccctcgtcgctgtttttggttcttacgtttttggctccgctattgggtattcatcacctactcaagctagaatcatgcgtgacctcaatctcggagtggcccagtactcaatttttggttcaatattgacgattggagcgatgattggtgccgttgtgagtggtagaatagcagattatgctggtcgtcgagttgccatgggattctcccaggttttctgcatcttgggatggcttgccataacat

SEQ ID NO: 51567 - DNA, 416 bp, Glycine max
  Clone ID: LIB3109-005-Q1-K1-E5
tggggtgttcgaggtagccattgatattctggtaatgactgtggtgttcaaaaacacaaaccagttagaggaaagtatggattccacttatgacaggaaggctgaagtgaaagcctttgatgattcaaaagctggtgttaaaggtcttgtagagtctggattgacaaagatccctcgcatgttccattctggcaggttggatatcattgaaacctcagtcagtgactctaaaatcggtattcccatcatagacgctcaaaatattcactcctatcctgctcttcattcaaaatgaattggcaaagttcgaaatgcatgccctgactggggatttttccaggggaataatcatggaattcctatcagtgtggtggatgaggataatgattgaattcgtagattcaatgacaagacac

SEQ ID NO: 51568 - DNA, 387 bp, Glycine max
  Clone ID: LIB3109-005-Q1-K1-E6
ggcgctaggggaagagagactctctctgctcttccgtctacacgtttagagagagaaagtgtgtctcatttttcaatcttgcccgcatctttttgcgatttctcatttttctcctgttcctttcctttccgtttctctgctactacttccaactccttccattctcaactttctttcaatctctagggtttaattcgccactcatcgaatggaacctcgggttgcgaacaagttccgtcttggccgcaagattggtagcggatccttcggcgagatctatctcggtacgaatactcagacaaatgaagaggttgcagttaagctcgaaaatgtcaaaactaagcattctcaattgttgtacgaatcaaagttgtataaaatacttca

SEQ ID NO: 51569 - DNA, 356 bp, Glycine max
  Clone ID: LIB3109-005-Q1-K1-E7
ggacacaaccaattgcattattagagggataagcctcaaccttgcaacccaacacaaccaaaattcgctacttgttaagggctgcactataccagaatgtctcagggaagaggcagtgcatctttgcctattgtggtcactgtggtttcactactgtgccttttggaacgtgctaacgcagcaacttactccgttggaggacctgtgggatggaccttcaacactaatgcttggcccaatggaaaaagaatcagagctggtgatatcctaatcttcaactatgactcaacgacccacaatgtggttgctgtggacagaagtggatacaacagctgcaagacaccatggggtgctaa

SEQ ID NO: 51570 - DNA, 438 bp, Glycine max
  Clone ID: LIB3109-005-Q1-K1-E8
gacgaaaaaaatagacacaaatcaaatgtaatcaggtgagatcacgatcccggcgtttgttgcagtccaaacgcatctgtcgtgtctggcgcgcactctctgtttattattagggttttgttttaaatctcttttttattttaccacccaaaattcccatctctctccccagtccaggcttagaaatggcacgctctctctgttctgcaagtggaatctctaatttttagggtttcgtttcgggaatttctcatttccttcaataatgaccgaattgcactctcatgacaatgccgcggttgctactgattccaagccggaggtttcttcgacggaagaatttagggttagtgtttgctccgacgctaacacatcatcattcaccgtcgataccgataagtttcacggtttcgatagcaaatcgctgttaccggaatt

SEQ ID NO: 51571 - DNA, 402 bp, Glycine max
  Clone ID: LIB3109-005-Q1-K1-E9
ggcacaagtgagtttgttgatcgagataactagaaacagtgtgatgaaaatgaaagtccctgttttcttcgttgctacaattttggtagcatggcaatgccatgcgtacgatatgttccctctccgaatgaacactggctatggtgcccgtactccggaggtgaaatgcgcaagttggaggcttgctgtggaagcacacaacatctttggctttgagaccattcctgaagagtgcgttgaagcaacaaaggaatacatccatggcgaacaatatagatcagactccaaaacagttaaccaacaagcttacttttatgccagagacctcgaagtccatcccaaggacacatttgtgttcagtatagatggcaccgtactctctaatattccatactacaaaaa

SEQ ID NO: 51572 - DNA, 385 bp, Glycine max
  unsure (1)..(385): unsure at all n locations
  Clone ID: LIB3109-005-Q1-K1-F1
ggaagcgtgaaagaaagataatgggtgcttattgcagcggatacgtttcgttgccaccatcctacgacgtcgcttcaggagaagatcccagggtctgcaagcacgttcgcgacaacgtccatggcaacatttatctcgattccctcagtttgaagttcattgacactgagcagtttcagaggcttcgcgagttgaaacaactaggttttacgaacatggtttatccaggtgctgtgcattccagatttgagcattctcttggtgtgtattggcttgccagtcaatgtgtggaaaagcttaaaacttatcaaggcttggagcttggtataaatagatttgatattcaaacagtgaaacttgcangacttctgcatgatgtgngaca

SEQ ID NO: 51573 - DNA, 294 bp, Glycine max
  Clone ID: LIB3109-005-Q1-K1-F11
atggtgagaagtgcaagaagaggaagaagttgagttgagttgaggttggagctgaaagaaaattgagtgagaattcaatgacacagaatctgaagcataccgtggatttggaatgcagtgataatagcaggccgtcaaagatatcaaaaatcgagtatccgagtgacagtgacattgacgaagaagaagaaggaatgagccaaaaccctatgaatgggattcagcgctatttggttgcaatcgagtatattgggactctcttctccggttctcagaagcagctcaatgtccgta

SEQ ID NO: 51574 - DNA, 398 bp, Glycine max
  unsure (1)..(398): unsure at all n locations
  Clone ID: LIB3109-005-Q1-K1-F12
ggaactaatgggctcctaacgtgttgcatacgccgtagcagcatttttgggcctggtgataggctgttggtgccttccctagttgatgctgccagaaaagggaagtctaagttcattattggtgatggcaataatgtttatgatttcacatatgttgaaaatgtggctcatgcccatatatgtgctgatcgagctctagtttcagaaggaccaatttcagaaaaagctgcaggagaggcatatttcataacaaatatggagtctatgaaattttgggagttcgtgtcagtggtagtggaaggtcttgggtatgaagggccaagaataaagatccctacctttgntatcatgccaattgcacatttggtggagtggatatataggctactaagcccata

SEQ ID NO: 51575 - DNA, 343 bp, Glycine max
  Clone ID: LIB3109-005-Q1-K1-F2
ggagatggatgtgagtaggagaagacttggagttagatgcagtgtggttgcagggtcagtgtgggagagcagaatgaagagtgatgaagttggtggtggagttaaggtcttcactggagaacaaagtgctgaagaaggaggcaatggtggcacctgcagattgaagagaagccaaattgggagtgtggttgccactggaaagagaaaaacttggaaatcagaagggttagaaaacaaccatattcaaatagccataggaaaatcagaaccccataagaatggtggtaatagtagtagtagtcagcaatgcaagggatctaacatatcttctgattcaatcaag

SEQ ID NO: 51576 - DNA, 428 bp, Glycine max
  Clone ID: LIB3109-005-Q1-K1-F3
gacaacttttaccagaatcatcgacggtatgttaaaagccgaaatgatgatcagctgagggattctggaaaagcaagctcagtaagtggttgtgaacctgaaaataatgtaaatggaatggcaattttaccttgcggtcttatagcttggagcttgttcaatgatacgtacagcttctcacgcaacagcaataatttaacagtgaacaagacaggcatctcatggaagagtgacagggaccacaaatttggaagtgatgtttttcctaaaaatttccaaaatggtcctataataagtggtggtggcctcgatgaaaatgtacctttgagtctgcatgaggatcttattgtttggaatcgaactgctgctttgccaacttttaggaagttgtatggaaagattgaggtggatctaaaaaaaggcgatgt

SEQ ID NO: 51577 - DNA, 400 bp, Glycine max
  unsure (1)..(400): unsure at all n locations
  Clone ID: LIB3109-005-Q1-K1-F4
gcaccaactagggagcttgctcagcaaattgaaaaggttatgcgggcactcggagattatcttggtgtgaaggtgcacgcatgtgtgggaggtaccagtgttcgtgaagaccaacgcattctatcaagtggtgttcatgttgttgttggtactcctggtcgtgtatttgatatgctgcgcagacagtcacttcggccagactatatcaagatgtttgtattggatgaggctgatgaaatgctttcccgtggttttaaagatcagatctatgatatattccagttgcttccatctaagattcaagtgggagttttctctgctacaatgcctnccgaggcacttgagatcacaaggaagttcatgaacaaacctgtgaggatccttgtgaagcgtgatgagc

SEQ ID NO: 51578 - DNA, 314 bp, Glycine max
  Clone ID: LIB3109-005-Q1-K1-F6
gacacaccgaatggggacttgagacaatgccagcagtgctggtgcttctgagtataatccttcggctcgcagcgctacggtcaaatccatataatcaaaagatgcagcttacaacatgacacttaactttaagaatcctgtgaatgactatcatgctgccaaagacagcacagattgccatgaattatacgcagacattgttctagctctttgcaaacttgttgatcgtaagaattataccactgactgacgaccagttagactattgtacagctaaaatactaggcattcagctgcatttatatgacgcttgc

SEQ ID NO: 51579 - DNA, 385 bp, Glycine max
  unsure (1)..(385): unsure at all n locations
  Clone ID: LIB3109-005-Q1-K1-F7
ggacacagagagcatagtaatacttactgagtgcttgcagttgctgcgtcgcaaggtaccggcggcgacggagagctatcttctcaatttccgatcactgcattggttctgttgacgagggttttgttctacttgacttgcatacttgatggcgtcaaagttgcagaagttgcagtccgcagcatgtcaagcatctcaatttgtatccagtcgtggaactaactactacaggcaattgctggaacagaacaagcaacacattcaggagcctnctacagtagagaaatgcaacctgcttgcaaagcaattgttttacacccgccttgctagtattccgggtcgtaatgagtccttttggaaggaacttgattatgtcaagaattta

SEQ ID NO: 51580 - DNA, 261 bp, Glycine max
  Clone ID: LIB3109-005-Q1-K1-F8
tgggaagggtttcaagttattgttagcaaggaaagattgggagtgaaataactgaaaagaagaaaaaatgccgtgcctcaaccttagcaccaacgtgtccctcgaatgcgtctacacctcttgcattctcgccgaagccactctgcttcgtcgccagcataatcggcaaacccgaagcctatgtgatgattgtactgaaaggatcagtacccataacttttggtgggaattaaccgccagcagcttattgagaatttgttt

SEQ ID NO: 51581 - DNA, 314 bp, Glycine max
  Clone ID: LIB3109-005-Q1-K1-F9
gatccacacgctcacaataacacactgtcaccgttccgttccgttttgctctgttttttttttctttctttcaaatccccgcttcgtggaaatcccgaaccagaaaccatgcttcttcgaaccgctgctgcttctgcttcgtccctcttcctcttcagcccgaacgccgaaccttcccgttcggttcccgctcgtggattggtggttcgcgcagcgaaaggatccacgaaccaccgcgccctgaccggagtgatttttgaaccgttcgaagaggtgaagaaggagctcgatctcgttcccaccgttccgcaagc

SEQ ID NO: 51582 - DNA, 444 bp, Glycine max
  Clone ID: LIB3109-005-Q1-K1-G1
tataagggagagttttgtcggctactggttggatgcatgatcagagactcgtggaggtttcaagtggcttcgtgaaggtgctgcaacttccttggagatggggaatgaagtatttctgggacacccttttggatgcagatcttgagagtgatgctcttggttggcagtacatatctggcactctccctgatggtcgtgaacttgaccgaatagataatccacagtttgaggggtacaaatgtgacccaaatggagaatatgtgcgacgatggcttcctgaacttgctagattaccaactgaatggatacaccatccatggaatgcaccggaatctgtactccaagctgcttgaattgaacttggttcaaattatcctctttccattgtgggaatagattccgcaataagtttaacttcaagaagcacttattcaaatgtggcaa

SEQ ID NO: 51583 - DNA, 398 bp, Glycine max
  Clone ID: LIB3109-005-Q1-K1-G10
gctggacaatgggcaaagggcttgggtacttgcactttggattggtgtgatgttaggtctttatgcctataaatttgtgcaatataggagaaaagcagcctatgaggtgatgggccattgtgtatgcatggcaaaaggtgcagccgagacacttaaattgaacatggctcttatcttgttacctgtttgccgcaacaccatcacctggctgaagaataagaccaagttaggtgttgtagttcctttggatgacaacatcaacttccacaaagtgatagctgtggcaatagcagttgctgttgctgtacattccatctatcatcttacttgtgattttactcgccttcttcatgcaagtgatgaaaagtacaagctgatgcaaccttttttcggagaca

SEQ ID NO: 51584 - DNA, 426 bp, Glycine max
  Clone ID: LIB3109-005-Q1-K1-G11
gagtgctatgaggatattgctgctggaagtgagattcgcagtgttgtcgtggctgggcggcgcttttatgagaaagagggtctgcctgcatttcccatgggtaaaattgatcagacccggatgtggaaggttggtgagcgtgtccgttctacaaggccagctggtgatctaggtccattatacccatttactgctggggtctacgtggcattgatgatggcccagattgagatcctgaagaagaaggggcattcttactctgaaattattaacgagagtgtcattgagtctgttgattctttgaatcctttcatgcatgctcgtggtgtttcattcatggttgataactgttcaaccacggcaaggttgggttcaaggaaatgggctccccgatttgattacatcctaacccagcaggccttggtg

SEQ ID NO: 51585 - DNA, 288 bp, Glycine max
  Clone ID: LIB3109-005-Q1-K1-G12
ggatgtagcgatctcttatagcgctgaaaatcgcgtgagaggagtaaatcgactaatcatacattaataacaggttctgtatgcattactgacagacaatatagatctaaccccattattgaacatcgtagtgagagttaggacttcacatatagagaatatactactcatgctgttctcactgattgttgagctctacctgcaaaaggacctagtccagattaagatgctgatgaagaatgtctaatcgcacatgtcaagtttttgacaaactgatattgactgtat

SEQ ID NO: 51586 - DNA, 74 bp, Glycine max
  Clone ID: LIB3109-005-Q1-K1-G2
gagactttaggtcaagcggggctacccagctgagttgaagcacagagtacctagactatgtggttaaaagaact

SEQ ID NO: 51587 - DNA, 448 bp, Glycine max
  Clone ID: LIB3109-005-Q1-K1-G3
gagtgtgtgagttcattaacatatacaaattctctgtgttgtgttgtgtacttgtgttaattgtgttgttgttgtaggaaatttaagtgaagagagaatgatgatgaagtctgctatgtgtgcattggtgcttgtggcactggttgtggttgaagtggggcccatggctgaggctgcggtgacttgcaacccaacacagttgactccttgtcttccggcaattaattcaggttctgcaccttcgagtgcttgttgccagaagctgaaggagcaaaagccatgcttctgtggctacctcaaaaaccctagcttgaagcagtatgttaactctcctaatgccaaaaaaaccgttagttcttgtggtattgcctatccaacttgttaagcacctcttatatatatatatataaaatgtgtgaacaatatatatatattgattaaaaaatat

SEQ ID NO: 51588 - DNA, 417 bp, Glycine max
  Clone ID: LIB3109-005-Q1-K1-G4
ggcgtaaaaattggagcaattggtggaactcgctgggaacattcaaaatccaaaggagagagccgacagagtggggtcaagtgtgaatgaaaatgctgaaactgaaaccgacatatgcaccctaaattgcttgtgtcagtcaacacttgcaagtgagaaagacaaaacactcaaacagggtgatgttatgtgccactcccactactactgctctgctgtgtctcactctatctgtctctttgaatactgtgccaaaattccacacacaaacaaacagataacataacagaagaagaactcaagagatggagagtggcggtaatgggaagagagcacatgaagaagcggggccttcatctgggattgatggaaggaaacttgaaatgactgaaaaagcgagtgatgatgataaagaag

SEQ ID NO: 51589 - DNA, 422 bp, Glycine max
  Clone ID: LIB3109-005-Q1-K1-G5
gagatacggagttacattgggaatgcgcggactccggccaccgcgacaatcgtgttcaaggggacaaggctaggggttaggccagcacctgtggtggcatcattttcagcaagagggccaaaccctgagtccccagagattttgaagcctgatgttatagctccaggattgaacattcttgcagcttggcctgatcatgttggaccctctggggtaccctctgatgggcgtaagactgagtttaacatcctctctgggacttcaatggcttgtcctcatgtttctggtttggctgctttgttgaaagcagcacatcctgattggagtcctgctgccattaggtctggcttgatgaccactggttacactggggacaacaagggggatcccatgttggatgagtccactgggaatgtttcatc

SEQ ID NO: 51590 - DNA, 418 bp, Glycine max
  Clone ID: LIB3109-005-Q1-K1-G6
gcaaccaaacaacagatattcatggggttctttatgctctcctttctcttccttcttcctgtttcatctgccactgcttgtgatcgctgcttgtatcaatccaaggcttcctatttctccaaagcttctgctctttcatctggggcatgtgggtatggctctttggcactagacataagtggtggacaccttgcagctggtgtggattctctcttcaaaaatggagcacgttgtggtgcctgctttcagataagatgcaagaacccaactctatgtagcatagaacgtaccaaagtggtattgactgatcttaatcacaacaatcaaactgattttgtgctaagcagcatagcctttgcggtcatggctcataagggtatgggccaacaaatactgaagcttggcattgctgagattg

SEQ ID NO: 51591 - DNA, 291 bp, Glycine max
  Clone ID: LIB3109-005-Q1-K1-G7
gacccgaaggaatgaggaccacatggagcagataacagcgtatcccattcctataatgaggagccacaagaatgccagcatggactaccaactcaaccagaatccaccactatattattgagtctcggacttggattgcatcccttctcgtgattggaaccaaaaggaagacgtaaattaaattatgcatccatataacacgacaaacaagtgccctgatatgtagaacagcacatgggtatggcagtgcaagccaaggtacgggcatgcaacccaattcgaataccacaa

SEQ ID NO: 51592 - DNA, 440 bp, Glycine max
  Clone ID: LIB3109-005-Q1-K1-G8
gacactaaacaagttaaaagaagagcgtcactgagcgtaacaaagcaaccctatgtcgaaggtggtttgtgtcaccggagccagcggcgccatcggatcatgggtggtcctactcctcctccagcgtggttacaccgtccatgccaccgtccaagatatcaaggatgaaaatgaggcgaaacatttggaggaaatggaaggagcaaagagtcatctccatttttttgaaatggatcttcttgacatcgactccattgccgctgccataaagggttgttccggcgtaatccaccttgcatgtcctaacatcattggtcaagtcgaagatcccgagaaacagatattggaaccggcgataaaaggaacggttaatgtgttgaaggcggcgaaggaagcatgggtggagcgcgtggtggcgacttcatcgatttcgtcgatta

SEQ ID NO: 51593 - DNA, 340 bp, Glycine max
  Clone ID: LIB3109-005-Q1-K1-H1
gccttccattgtgctttatacctgaggaggtaaccagagccgttcacacccccctctctgttcttcaaaacgcaccttattcttccccctattttgcatcgcatttgttcttgaatctctttggtattcctcctcagagcctctaatcagagagagagagagagagaaagtgagagatggagagaatgttccctcccaagaagccctctactatgaattcccatgacagacccatgtgtgttcaaggagactcgggtcttgtcctcaccactgaccctaaacctcgccttcgttggactgttgagctccatgaacgctttgttgatgcctgtactcagct

SEQ ID NO: 51594 - DNA, 430 bp, Glycine max
  Clone ID: LIB3109-005-Q1-K1-H10
ggggttaaggaagataaactatgcgcgagagtgaagcgagagaggggcacagttgagtagcaaagcaatgagcgcagtgggtgggtttactctcactctcagtcccatcaatttgaaactcccccttctcccttccaatcgcctctttaaccgcactcccttcaaatcttccatttccttctccctacgctccaacgacgagcaacaacccctcggcctcgacatcgccgcactaaggtaccgtactactctctctctctatttcactcatctcgttcgttgcaagcatagcatttatggattcgattgttcaagagcactttggttacgggaacaggtcagctttcgtgaagctcattgatgggaaatagatcatggtcggagttgtgttcagactctggcccgtcaaatggcccaggattctgaactc

SEQ ID NO: 51595 - DNA, 408 bp, Glycine max
  Clone ID: LIB3109-005-Q1-K1-H11
ggaagtaggcgaggatcgttcacataaaatatcgagagagatcgacgagaaaaagctaagcgaacaatgtggagctccaaaacgacgatgatgctggccattgcagccattgctctgatgatgtttctctcatcggcttcagccgacgacgtcgttgcactcacagaggaaaccttcgaaaacgaggttggcaaggatcgcgccgctctcgttgagttttacgctccctggtgtggacactgtaaaaggcttgccccggagtacgaacagctcggagcgagttttaagaaaacgaagtccgttttgattgccaaggtggactgtgatgaacataaaagcgtttgcggtaaatatggggtatctggttaccctaccattcaatggtttcctaagggatctctagaacct

SEQ ID NO: 51596 - DNA, 283 bp, Glycine max
  Clone ID: LIB3109-005-Q1-K1-H12
ggcacacaacatttttagtgaaactgaaatggggacggagatcgtgaaatgggggagctttacgcgttggacttctatggaatcatatttgatatctgcattgaaagctttctttttgctatgaaggcttccaaagtgtgatggcctgatttgtttgatgtggtggatgtaacctcagaaaattgggttattgaccatatgcacactttgcgaccagttttggatacttggtatggacactgtttacttgttagactggtgcttgaaagcatagcaccaacca

SEQ ID NO: 51597 - DNA, 442 bp, Glycine max
  unsure (1)..(442): unsure at all n locations
  Clone ID: LIB3109-005-Q1-K1-H2
gacacatacaaagcttcagagtctttactctctctgtctctctcgctctctctctctgcgtaaatcgcgtcttccaccaatcagcttgcttgcttgctacctgatctgtcaatactgcgtcgtttaggaccaatccctcaccctccaaggatatggcaatgccggagacaatccctcccactactcccagtgctcaagttgtcggcaatgcctttgtggagcaatattatcacattctgcatcaatccccagaattggtgcacagattttatcaggattcaagtttcttaaccagatcagacagcaatggtgtgatgacaactgttgcaactgtacaagatatccatgaaaagattatttcccttgaatatgaagattatacagcagaaataaaaactgcagacgctcangagtcacataanggaagtgtgatagttttagt

SEQ ID NO: 51598 - DNA, 438 bp, Glycine max
  Clone ID: LIB3109-005-Q1-K1-H3
gaatctgagaagcaatggtcaaaagcagctcaaatgctcagtggtattgaccttgattcaggaatgagggtgattgatgatggattcaggctgtcaaagtgtgtccaaattgcttgtttatatcttgaggacgatgatgctgtcaatgctgaagcttttattaataaagcatcattcttggtcagcaacagtcagcatgaagttctgaatttaaagtacaaggtttgctatgcaaggattttggatttgaagaggaagtttttggaagcagcattacgatattatgatatatctcaaattgagaaaaggcaaataggagacgaggagattaatgaggaagcacttgaacaagctttatctgctgctgttacatgcacaatattggcagctgcaggacctcaacgttcccgtgttcttgccactttgtacaaggatgag

SEQ ID NO: 51599 - DNA, 426 bp, Glycine max
  Clone ID: LIB3109-005-Q1-K1-H4
gacacaaaaataagtgcgtccaacggaatataaagcatgagaaaaatgccctcccctctggtgtctctgatgcggttgggagtggggacagggagggtttgccattaggtaaaggtaaagcagcacaagtgtcattcatttctctgcaatggatatggatctctagcattcgcattcatcccctccttttctccatgcctccgtcttcacccgttattttcttgtcctgaatgcattcccagaatgttgtagagatggaaggcaagacagaaattcgtatgacatcagctgctgcctttgttgaaggggggattcaagaatcctgtgatgatgcttgcagcatatgccttgaggagttttgtgcaagtgatccttcgacggtcactacctgcaagcatgagtttcacctgcagtgcattctcgaat

SEQ ID NO: 51600 - DNA, 225 bp, Glycine max
  Clone ID: LIB3109-005-Q1-K1-H5
taatgggagatacggagttgcggggcgaatgcaccgacttctgtcatcgtgacaatcgagctcaatggtacacggctatgggataggccatcacctgtaatggcatcatttttagcaagatggccactctcagagtccccagagattttgaagcctggtgatatagctacaatattgaacattcatacagcttgtactgatcatgtccgacactgtcccataccc

SEQ ID NO: 51601 - DNA, 406 bp, Glycine max
  Clone ID: LIB3109-005-Q1-K1-H6
gattgctgatagatgttacttacagaggcgtgtacggcaatgtctcaagaggtcctgcagttcgtgcattacgtgctcagaccgataaaagggactatgccattcaaatgaaaagtgtagtagaaagcactccaaacctttctattcgagaggctatggtcacagatattttactagggaagaatgataacgtggaaggtgtttgtacattctttggaatgaaattctatgctccgtctgttattctcaccacagggacttttatgagtggtaaaatttgggtcggtagaacttctatgcctgcaggaagagcttgcgagtctgcttcacttggattaacagaaaacttacaacgacttggttttgaaactgatcggttgaaaactggaaccccttgccgagtgga

SEQ ID NO: 51602 - DNA, 389 bp, Glycine max
  Clone ID: LIB3109-005-Q1-K1-H7
gggtttaacagcaaacccaattgtcaaggtctccggcgttgtaggaactaatgtacttgcccttggtactgatgtttcttttgacaccaagattggggagttaactaaattcaatgctggattgaacttcaccaaagatgatttggttgcctcattgactgtgaataacaaaggtgattccctgaatgcttcatactaccatacagtcaatcgcttgaccaacacagctgttggtgctgaggtaactcaccaattctcaaccaatgagaacaccctcacacttggcacccagcatgcattggatccattgacgactgtgaaggctcgtgtcaacaacttgggcaaggcaaatgctctcatccagcacgagtggcgtcccagatcgttct

SEQ ID NO: 51603 - DNA, 446 bp, Glycine max
  unsure (1)..(446): unsure at all n locations
  Clone ID: LIB3109-005-Q1-K1-H8
ggagttgaacaagaaagaaaagaaaagatgatgaggaggagagtggacaggaagaaaaggattgaagttgttgctgtgagaaagagaaagagtgaaatcggagtttgggaaggaattgcaatcaatggatgtgataaagacgcagcaaatctcatctcgaccaatctagaaggtggtggttcaccctctcgtgcttctcagcatcgtcgacaactacaacagagtcgccaaagacactctcaagcgcgtcgtcggcgtcttgctcggctcctccttcaaaggcaccgtcgacgtcaccaacagctacgccgtgccctttgaagaagatgacatggatcctagcatctggtttcttgaccacaattaccatgaatctatgttatccatgtttaaaagaataaatgcanaggatcatgttgtggggtggtatagcactggtccaaagc

SEQ ID NO: 51604 - DNA, 291 bp, Glycine max
  Clone ID: LIB3109-005-Q1-K1-H9
gggtaaagcattgatgaagcgtgtcatgcaaacctggctttcagcaagtagtgctctattggaaatgatgatatttcatctacccttttcattaacagcccagaagtatcgtgtggagaacttgtatgaaggtcctcttgatgatcaatatgcttctgctatcagaaattgtgatcctgaaagtgctctgatgctctatgtctccaagatgattccagcatctgataaggggagattttttgcctttggccgtgtattctctggcagggtttcaactggtttgaaggtgag

SEQ ID NO: 51605 - DNA, 275 bp, Glycine max
  Clone ID: LIB3109-006-Q1-K1-A1
gaagaagaagaagaaaaagctcccgattccgctaaacccgttactgaatctggcaagaagggttatgttggcatccatagttcgggatttcgagacttactgttgaaaccagagcttcttcgagccattgtagattcaggatttgagcatccttcagaagtgcaacacgaatgcatacctcaagcaatcttaagaatggatgtcatttggcaagcgaaatctgggatgggaaagactgctgttttgttttgtctacactttagcaagatgatcct

SEQ ID NO: 51606 - DNA, 424 bp, Glycine max
  Clone ID: LIB3109-006-Q1-K1-A10
ggattcggcaaagttgatttcaattcaatttgaggtccccctttttcttctccacgtttgtgcctgcaacctcaaataccgattagggttcatgctacactgaacttggtttcggtgttccaagttagttagaggcattgttgcttgcatagatctctgatctgaaaatgagtgcgtcgaggttcattaagtgcgtcaccgtcggcgacggtgctgtcggcaaaacctgcttgttgatttcctacaccagcaacacttttcccacggactatgtgcccaccgtttttgacaatttcagtgctaatgtggtggtggatggaagcaccgtaaacctaggattgtgggatacagcttgtcaggaggattacaatagattaagacccttgagctatcgaggagctgatgtcttcatacttgccttttc

SEQ ID NO: 51607 - DNA, 312 bp, Glycine max
  Clone ID: LIB3109-006-Q1-K1-A11
tcataatgaaatgatccagagcaattccactgaggctgttttgtctgaagtgttcacctcttctgggtcgacagcttctacaattgccaagacatcagagactgctctccttgatgaaaaatcattattagcttgtattgtacgcactattccagctggtggccgaattcgaattagttcaacgctccctaacaggctgggcaagatgcttgcacctctacattggcatgattacaaaaagaagtatgggaagctggatgactttgtagctagccatcctgaattatttttgattgaaggtgactatattca

SEQ ID NO: 51608 - DNA, 423 bp, Glycine max
  Clone ID: LIB3109-006-Q1-K1-A12
ggtggtaacgttgttgtgcgtgcggttcatcatgcacaattccacatcctgataactatacaacacaagcacgaacacccccttaccaaaacggcacttgtttattgtcgtttagatcccatggatcacacgcctgctgcgcaacgtcgtctcaaagccattcacgcccacctcaccgccaccgccgatgaatctccctcccacctccgatccaatcccaccgccggcgagttcttctccgctttgatctttacttctgggcagaacaagggtatagtgttgtactcccagagaaattacaaacaggaaagtggaacgtttacagatctgtacgatctcctctgcagctggtgaccaagtttactaatcatcctgaaattggtaccctgcacgataattttgtgcgctcagttgacacctttc

SEQ ID NO: 51609 - DNA, 200 bp, Glycine max
  Clone ID: LIB3109-006-Q1-K1-A4
ggacaacataacatacaggaggtgaacaacgagcgagtgagtgatttataacccccggagtggcgaacgagaaccgcttatcaggcttaagaatattaagaggggcttgtacttgtgcatattgaacaacaacgatttcaaatggtgtatagagcatttacatcgaaacggagacaaactctacattgggcacatgatgc

SEQ ID NO: 51610 - DNA, 339 bp, Glycine max
  Clone ID: LIB3109-006-Q1-K1-A5
ggaccacataggattcatcattttccaaacgagcatctgcgtagtttcttaagtcaagagaagaagtgaagtgctgcttcaatggcttcaagtcaggaagaggtgatccttttgggggttattggaagcccatttctgcacagggtgcagattgctctcaaattgaagggagttgaatacaaatatttggaagatgatttgaacaacaagagtgatttgctcctcaagtataacccagtttataaaatgattccagtgtttgttcacaatgaaaagcccatatccgagtcccttgtgattgttgagtacatcgatgacacatggaaaaacaaccccatc

SEQ ID NO: 51611 - DNA, 347 bp, Glycine max
  Clone ID: LIB3109-006-Q1-K1-A6
ggtgcgcattttgtgaaaaaaaataaaaaatggggataggggtactatttgttgggtttttcttgctatcttgtgttgtgtgtgtgaagggtgtggagccaaaagcctcacccacttgtacatttccggcagtttacaactttggggactcaaactcagacactggaggcatatcagcttcatttgtgccaattcctgcaccttatggcgagggcttctttcacaagccttctggaagggactgtgatggccgtctcattgtagattccatagctgagaagctaaacttgccatacttaagtgcttatctgaattcccttggaaccaattaccggcatggggcaaat

SEQ ID NO: 51612 - DNA, 298 bp, Glycine max
  Clone ID: LIB3109-006-Q1-K1-A7
ggagagaagcaagtgaaacactcaatcacctaggctaaaatcgtctcgtcttcattccttttttttccggtttagagaattgaaaagatttcattgataattgagcaaacacaatgagtgctccacctcatcatgatgatgacgacgacaacgaagaagttttccttgatgagtctgacatcatccatgaagttgccatggataatgaagatcttcctgacgctgatgatgattctgaactcctcgaagaggatgaggatggtgattttgtgcacaaattcactgctcataccgggga

SEQ ID NO: 51613 - DNA, 276 bp, Glycine max
  unsure (1)..(276): unsure at all n locations
  Clone ID: LIB3109-006-Q1-K1-A8
acacacaagttcattcacagagagatagaatcactgaagagcttcaatggcggtttctctctctgttactcctctttctctctccaattcttctccttctctatcttccaagccaaagtttccatctttgtgctttctctctggcaacaacaccttgagggtcaaatgcccaaaaccttcgcactcaacaactgttgttcatgttgctccaaaagcgttggattcttcacctgatcccttagacccacctncagaaacccttgatgatgactctga

SEQ ID NO: 51614 - DNA, 209 bp, Glycine max
  unsure (1)..(209): unsure at all n locations
  Clone ID: LIB3109-006-Q1-K1-B1
gggcttacgtagcanattcttatgttgggtcgattctggactttcactctctcatctctcggttatgtcttggtaaactataaactcttatctctttccaacctaaaatcaagaatctaattctctatattttctccatgaaaaaatccgcctaccatcatcatctttttattcccagaggaagaaaccttgctttttatatataaaac

SEQ ID NO: 51615 - DNA, 109 bp, Glycine max
  Clone ID: LIB3109-006-Q1-K1-B10
gatccccaatcagagagaaaagttagggttcacaacttttccttttccttttgcttgccaatcttaatcaaataatcaatcatccattcattattcatatgtcgtccgc

SEQ ID NO: 51616 - DNA, 367 bp, Glycine max
  Clone ID: LIB3109-006-Q1-K1-B11
ggcagcgttttatagtgctcggagaatccccttgattgcaacaccaacccaactcgaagaacaccgtcgccgttcgccgccgtttcctgaagccgagtaaaattttctccgcgctactctccgagttcaacattgctcagaagaaaccaccatgtctccgaaactgctattattggcgaattagggtttgtaaattaggttttaatggcgaacgacactggttccggtcgcgtcgtcacagagaaaggactggctacgaggtcttcgagagagacattaaggaagaatgcgcttgcgagcggttccgccacgaacgccactccgaatcgcaagtcggaacggctcgagaagcggacgccgccgtcgc

SEQ ID NO: 51617 - DNA, 341 bp, Glycine max
  Clone ID: LIB3109-006-Q1-K1-B12
ggagagacacgtgagatagcacagtggcagggcgtgtcaatccgagagaaagaggcaaccaacttcccattttgttatttccattttccattcccaatcgtaaaaacaacaaatcataatcagtcatagcttcggcgacttctcgatattattttttctgacagagccaccgacagagccggcggttcccgtggcggtttgagaatggccgacaagtacaacctgaagaaccccgccgtgaagcggatcctccaggaggttaaggagatgcagtccaacccttccgacgatttcatgagccttcctctcgaggaaaatatatttgagtggcaatttgcgat

SEQ ID NO: 51618 - DNA, 319 bp, Glycine max
  Clone ID: LIB3109-006-Q1-K1-B2
ggcagtagtttattgaaacagattccctttgacccgtgacattttaagtggtgactactagaccaatggaatggagtgcaaagaacatttcagttacctctgctaaatgggtcactactactctgtctctgctctccctgttttggctcttgtccctgcaccaagcaagagctgcaaagttccacaatgtgagtggcttgagagggaaaaagccagttgtagtaaatgggtgcaatttgttcctgggaagttgggtggttgacacgtcttatcctctctatgactcttcaacatgccccttcattgatcccgagtttga

SEQ ID NO: 51619 - DNA, 236 bp, Glycine max
  Clone ID: LIB3109-006-Q1-K1-B4
gggcaatgtgcaattcatatgcatgacaatgtatcagagagtgctaatagtcctgctgagttgataacaagatgctttaatggcattaaagttttgcaagagcaatatgaaactggaaatattgctcagcaaggagttgaattgctatatgtaactttgacaaagatatgtagttcactgcaagatgcatataatggtcaaatcgatggaattatctactgtcacgtggctactac

SEQ ID NO: 51620 - DNA, 391 bp, Glycine max
  Clone ID: LIB3109-006-Q1-K1-B5
ggagagaaaaaatggccaaatcaatcaaattctttgagttgaacacaggggccaagattccttctcttgggttagggacttggcaagctgaacctggtgttgtagctgaagctctcaccacagccattcaggttggatacaggcatattgactgtgctagtgcgtataagaatcaagcagagattggttctgctcttaagaagctttttgatgatggtgtggtgaagcgtgaggacttatggatcacttccaaactctggtgttcagatcatgcaccagaagatgtgccaaaagcattggataaaacattacaggaattgcaacttgactatcttgacctctatctgatccactggccagtccgcatgaaaagtggaacatttggactcaa

SEQ ID NO: 51621 - DNA, 387 bp, Glycine max
  Clone ID: LIB3109-006-Q1-K1-B6
gtgttgaaggcggcgaaggaagcaggggtggagcgcgtggtggcgacttcatcgatttcgtcgattatgccaagtcctaattggccagctgataagattaagggagaagagtgttggacggaccttgaatactgcaagcaaaaggggttgtattatcccattgcaaagactctagcagagaaagcgggttgggactttgcgaaggagacaggttttgatgttgtcatgataaaccctggtacagcattgggccctctgcttcctccaagaatcaattcaagcatggctgtgcttgttagtgttctcaaagggggcaaagagacctacgaggacttttttatgggaacggctcactttcaagacatagcattggcacatattttggca

SEQ ID NO: 51622 - DNA, 157 bp, Glycine max
  Clone ID: LIB3109-006-Q1-K1-B7
ggagcgaaaataggacaatgaaaaggagattcctgtacagtgtacagggatttataggcagagatagttgcgtaatatgaacgcagctgagaagcagttgattttccgatcagaaaatctgaatcatgtcgtggcaagcgtacgtggatgatcacct

SEQ ID NO: 51623 - DNA, 359 bp, Glycine max
  Clone ID: LIB3109-006-Q1-K1-B8
ggaatgaatgagttgtgtaagaaagagatccatgcaatgttgcaagtcaactgagtagtcctgctatgctctgctctgctctcccaaacatctctgacacaacacacaccaaaatgcataattgaaatgacccttttgcccttccttccttccctacttctcctttgactctccgcaacgccaccgcccacaatggacggcaccaccaactccggcgaaccccgctccagttcggtgctccaaaatactggggcatccgaggatccgaatcgaagcgggtcgggtcagaattcgatggcgaggtacaagctgatgtcaccggcgaagcttccgatctcgaggtcgccgtgcatcgcgat

SEQ ID NO: 51624 - DNA, 276 bp, Glycine max
  Clone ID: LIB3109-006-Q1-K1-B9
gggaggaaagtggtaaaggaacatggaagcacgctgctttccatgttgcccccactattgccacccctgctgcttatgcccctttgcccttcgctcttgcttctctcggttggcctcttggtgtgactagtctggtgagtgcaacactagtcacctggtactctagctttttgatcgcttcgcttgggaaatggaacggggagaagcaccttacctatagacatcttgcacataatattttcggattctgggggtactggtctattgccttttttc

SEQ ID NO: 51625 - DNA, 430 bp, Glycine max
  Clone ID: LIB3109-006-Q1-K1-C1
gatatagatgatgtgtcttctaaatgagtttgctattggtttgtgtacaaggataaattactgcatggtcattgtctaggacaatctctacgtgacacataatcacatttatgaaagaaaaaaaaaagttaatattgtgttacatgaagaagagtcaaaatcatatgattccagaccatgtaataatttctccaaacacatgaatgttggctttgtcaagagccccatcatttgcttcctaaatcctgtggttatgttttattttgtttttaagcttgggccataatttgcttcagcacccaactctgaattttccttcaatctcaattgtactggttcacatttttttcttctgtatcaataccttgagggagtggatatctactccattagttattgccgggtggatcttgttgatgtaattattact

SEQ ID NO: 51626 - DNA, 428 bp, Glycine max
  unsure (1)..(428): unsure at all n locations
  Clone ID: LIB3109-006-Q1-K1-C10
ggtacacagcctcaacaaccctaacgcgtgcagagcagagagagacgcagccatggggcgaagacccgcgaggtgttataggcaaattaagaacaaaccataccccaagtcacggttttgccgtggtgttcctgatcccaagatcaggatttacgatgttggtatgaagaagaagggtgttgatgagtttcctttctgtgtccatctggttagttgggagaaggaaaacgtttctagtgaggccctggaagctgctcgtattgcttgcaacaagtacatggccaaatttgctggaaaggatgctttccacttgagagtcanggtgcacccattccatgttcttaggatcaacaagatgctttcgtgtgctggagctgataggctccaaactggaatgagaggtgcttttggaaagccacanggtactt

SEQ ID NO: 51627 - DNA, 393 bp, Glycine max
  unsure (1)..(393): unsure at all n locations
  Clone ID: LIB3109-006-Q1-K1-C11
ggcctcaagaaggagaacatggggtttgaggaaactgagttaaggcttggactgcctggaaacggaggcactgaagaagtgctcatcaggaagaggggtttctctgagactgaaactggtcatgaagatgagtctgccaccactgtggatttgatgcttaatctttcttctaaggaggccgcaaccactgctgctgctgctgcagatccaactgataagcacaagactttgcctaaggagaagacccttctgccagcagatcctgctaagcctccagccaagacgcangtggtgggttggccacctgtgcggtccttccggaagaacatgttggctgtgcaaaaaagcgttggagaagagagcgagaagaacaagcagccttatgcaagcttt

SEQ ID NO: 51628 - DNA, 406 bp, Glycine max
  Clone ID: LIB3109-006-Q1-K1-C12
ggaggcgaaccgaacgagtgttttcaagctgcggggtgtggtctttctctccgtgacacagcacaaacaaattctcagtgttggagacttgagctcatagagaaatcatagtttgtttaatttcaattctgagcaaaggtcaacatgcaagttttttccattgaaggcgaaagtgctttgtcagttgttggtccaaggccaatggaatggtctactgttccatacaatgcccctcaagctcctgggccaaatggaaagcagcggacctcaagtttggaatcaccgatcatgttgctgtcaggtcaccagagtgctatatataccatgaagttcaatccagcaagatcagtcattgcatctggatctcatgacagggaaattttcctctggaatgtgcatggggatt

SEQ ID NO: 51629 - DNA, 362 bp, Glycine max
  Clone ID: LIB3109-006-Q1-K1-C3
atacgccctagcagcatttttgggcctggtgataggctgatggagccttccctagttgatgctgccagaaaagggaagtctaagttcattattggtgatggcaataatgtttatgatttcacatatgttgaaaatgtggctcatgcccatatatgtgctgatcgagctctagtttcagaaggaccaatttcagaaaaagctgcacgagaggcatatttcataacaaatatggagtctatgaaattttgggagttcgtgtcactggtagtggaacgtcttgggtatgaagggccacaaataaagatccctaccttcgttatcatgccaattgcacatgtggtggagtggatatataggctact

SEQ ID NO: 51630 - DNA, 410 bp, Glycine max
  Clone ID: LIB3109-006-Q1-K1-C4
gggatatgaagattttgtttacttcatactatcagaagaggataaatcatctgaaccaagtcttgagtactggttcaagtgcatagatttggatggaaatggagttctaacaaggaatgaactgcaatttttttatgaggagcaattgcatcggatggaatgcatggcccaagagcctgtgctctttgaggacatattgtgtcagataattgacatgattaaacctgaggatgagagtgttataactttgcgggacctgaaaggtggtaaactttcaggaagtgttttcaacatcctgttcaatctaaataagttcatggcctttgaaactcgtgacccatttttgatccgtcaggaacgtgagaacccaacattgacagagtgtgatcgatgtgctcatcgagaatata

SEQ ID NO: 51631 - DNA, 395 bp, Glycine max
  Clone ID: LIB3109-006-Q1-K1-C5
gggcccgtggagcttgctgctgcaggagtgtccattgctttgttcaaccaagcttcaaggattaccatcttccctttggttagcatcacaacttccttcgtagctgaggaaaataccattgaaaaaatcaatacagaaaagaagttaagtgataaggctaagtccaaagaacaagtaatgctcgatgatcattcccttcaagacatagagaaagttgcatccaaagagaacaatgagactgagaatgtggaaatgaatgattgcaatacaagtatatgcaagtctacctctgatactagtagtagtagcagtaacaagagtgtgccaaaagatggaagggaagaagcgacacgttgcttcagcatccacagcattactttttggcacaatccttg

SEQ ID NO: 51632 - DNA, 355 bp, Glycine max
  Clone ID: LIB3109-006-Q1-K1-C6
gtacgaaaattgagcctgatgacccaaatgggtacataccggagaggttaattggtgaaatagagtttcatgaagtgcatttcgcgtaccctgctaggcctaatgtggccatctttgaaaatttctccatgaaaatagaggcgggaaaatctacggcaatggtgggacaaagtgggtccgggaaatcgacgatcattggtctaatagagaggttttatgatccacttaaagggatggtgacaatagatggcatggacataaaatcgtataacctaaagtcactaaggaagcacatagcactagtgagccaagagccaacgttgttcggtgggaccataagggagaacattgcata

SEQ ID NO: 51633 - DNA, 350 bp, Glycine max
  Clone ID: LIB3109-006-Q1-K1-C7
gaaggagagggagtgctgaggttgaagcgggaaacaatggcaattcccatgttgagggctgcaatgatttctcattctcaatctcaaccactcattcattccatatctgctatttatgaaaccgctaagaggaggaagagagtggtgttctcttcttcttcttcagaacttaaccctgtaattcggtgagttacacttcattttctgattctttttgtttttttggcctttcttaaacatggtttttggcttgctttctgttgctgaggttgtaagtcagaggtatcattttgtgttgggacttgcctcattccacatccaaaaaaggttaacacaggtggggaagatgc

SEQ ID NO: 51634 - DNA, 440 bp, Glycine max
  unsure (1)..(440): unsure at all n locations
  Clone ID: LIB3109-006-Q1-K1-C8
ggtccggaattacccggggtcggacccaaacgcgtccgtaccggctntgtcgagaagaacgaacagaaggggggtgttgatgtgatgaagnntaatcggaatgggacaaatgggtgtacggtgtgggcggaaactgcggataannagtcgggaaactcttttttgaatgcaaagtagacgcctgagtaccttcgacttacagggnnggagggaagcttcgtagaccagcctcgcttccccgcatagcatggagggtctaaggtaagatcggaggactgaaaggaaggcataatatgagtactcgctcgctgaagaggtaatcatataaaaggcaaaggaagaagatcatgttctcgcttcccttatctgtttggcctggaagcgtatctcccgatggtcgactgaaggcttattaccgattaacctttttgctactaaag

SEQ ID NO: 51635 - DNA, 309 bp, Glycine max
  Clone ID: LIB3109-006-Q1-K1-C9
ggaaaaactgtagcagaatgggaatctgcccttgaaacttataaaagaattcccagtaatgaaatcttaaagattctagaagtaagctttgatgctttggaggaagaacaaaagaatgtttttcttgacattgcttgttgcttcaaagggtataaatggacagaggtttatgatatattccgtgctctttatagtaactgcaagatgcatcatattggggtgttggttgaaaaatctctcttattaaaagttagctggcgtgataatgttgaaatgcacgacctgattcaggacatgggtagagacatt

SEQ ID NO: 51636 - DNA, 403 bp, Glycine max
  Clone ID: LIB3109-006-Q1-K1-D1
ggtgcacaagtgagtttgttgatcgagataactagaaacagtgtgatgaaaatgaaggtccttgttttcttcgttgctacaattttggtagcatggcaatgccatgcgtacgatatgttccctctccgaatgaacactggctatggtgcccgtactccggaagtgaaatgcgcaagttggaggcttgctgtggaagcacacaacatctttggctttgagaccattcctgaagagtgcgttgaagcaacaaaggaatacatccatggcgaacaatatagatcagactccaaaacagttaaccaacaagcttacttttatgccagagacctcgaagtccatcccaaagacacatttgtgttcagtataaatggcaccgtactctctaataatccatactacaaaa

SEQ ID NO: 51637 - DNA, 201 bp, Glycine max
  Clone ID: LIB3109-006-Q1-K1-D11
gagacacagagcgagagagaatcgtaacagaaacggtcactggaagttgtctctaccaccctctcagccatggcaacaattccccctagccgatcatcatcacacgcgtttgttgccatggcaaccttcacgactctgtttgtgtgcacggcggcggcgaaagaaaacgtgtacgaaatactccccaagtacgggctcccg

SEQ ID NO: 51638 - DNA, 238 bp, Glycine max
  Clone ID: LIB3109-006-Q1-K1-D12
ggaccatagaggacatgtgccagctgttcgaccatattggtttcactttggtcttcttcaccctgttagggtttgcatcagattcccccaattcttgtttgattttgcgctttcactagtttttcttcgacatgactcaagatctcgagatgagggatcgctcaacgccttccaactctgtttctttgcctgctccatctactttgcagcatttgaaggagatagcgtctcttatcga

SEQ ID NO: 51639 - DNA, 384 bp, Glycine max
  Clone ID: LIB3109-006-Q1-K1-D3
ggagaaaaacgagccaattcatcattttctctcttctctgcttcttcttgttcaaatcttaagagctgaggagaatcaatcgagagaaatatgtctggtatcgctcgtggacgccttgctgaggaacgaaagtcatggcgcaaaaaccatccacacggtttcgttgccaagcccgagactctacctgatggcaccgtaaatttgatggtctggcattgcactattcctggcaagaccgggactgattgggagggtggatatttcccactgacaatgcacttcagtgaagattaccctagcaagcctcccaagtgcaaattccctcaaggtttctttcaccctaatgtgtatccatctggaactgtttgcttgtctatacttaat

SEQ ID NO: 51640 - DNA, 384 bp, Glycine max
  unsure (1)..(384): unsure at all n locations
  Clone ID: LIB3109-006-Q1-K1-D4
ggagaaaaacgagccaattcatcattttctctcttctctgcttcttcttgttcaaatcttangagctgaggagaatcaatcgagagaaatatgtctggtatcgctcgtggacgccttgctgaggaacgaaagtcatggcgcaaaaaccatccacacggtttcgttgccaagcccgagactctacctgatggcaccgtaaatttgatggtctggcattgcactattcctggcaagaccgggactgattgggagggtggatatttcccactgacaatgcacttcagtgaagattaccctagcaagcctcccaagtgcaaattccctcaaggtttctttcaccctaatgtgtatccatctggaacttgttgcttgtctatacttaat

SEQ ID NO: 51641 - DNA, 403 bp, Glycine max
  unsure (1)..(403): unsure at all n locations
  Clone ID: LIB3109-006-Q1-K1-D6
ggaccaaggggcgtgtggttcgtgttggtctttcagtacgacgggagcgttggaaggagctcattatctggccactggtgagctcgtgagccttatcgagcaacagcttgtggattgcgatcacgtgtgtgatccagaagaatatggagcgtgtgactcangctgtaatggtgggttgatgaacaacgcatttgagtacatacttcagtctgggggagtacagaaagaaaaggactatccatacaccgggagagatggcacctgcaaatttgacaaaaccaaagttgcggctactgtatctaattacagtgtggtttcccttgatgaagaacaaattgctgcaaacctagtaaagaatggccctcttgcaggtgctatcaatgcagtttttatgcagacatat

SEQ ID NO: 51642 - DNA, 354 bp, Glycine max
  unsure (1)..(354): unsure at all n locations
  Clone ID: LIB3109-006-Q1-K1-D7
gacaccgagtcgcagaaaaagaaaaaagcgatcatagtttcacttcggccttatccagtttagggtttcggttctctaccctatctttcacgtatcgaaaccttaaatttacgatcaggtctgagcaatctggttggtagaacctttggtcttagtgagtcaagttttatgtctgaattagacgatcaaattcctactgccttcgatccttttgctgatgcaaatgctgatgactcgggtgctgggtcaaaggagtatgtgcatattcgtgtacagcagcgaaatggtaggaaaagcctgacaaccgttcanggattgaaaaaggaattcagctataacaagatacttaaagac

SEQ ID NO: 51643 - DNA, 409 bp, Glycine max
  Clone ID: LIB3109-006-Q1-K1-D8
ggcacaagtgagtttgttgatggagataactagaaacagggtgatgaaaatgaaggtccttgttttcttcgttgctacaattttggtagcatggcaatgccatgcgtacgatatgttccctctccgaatgaacactggctatggtgcccgcactccagaggtgaaatgcgcaagttggaggcttgctgtggaagcacacaacatcttttgctttgagaccattcctgaaaagtgcgttgaagcaacataggaatacattcatggcgaacaatatagatcagactccaaaacagttaaccaacaagcttacttttatgccagagaccttgaagtccataccaaggacacatttgtgttcagtataaattgcacccgactctctaatattcatactacaaaaacatggata

SEQ ID NO: 51644 - DNA, 402 bp, Glycine max
  unsure (1)..(402): unsure at all n locations
  Clone ID: LIB3109-006-Q1-K1-D9
ggagcaagagtgaagagcgaagagaatggctcccaagggtttaatctttttggctgtgttatgcttctcagcactgtcactgagtcgttgtcttgcggaggataatggacttgttatgaacttctacaaggaatcatgccctcaggctgaagacatcatcaaagaacaagtcaagcttctctacaagcgccacaagaacactgctttctcctggctcaaaaacatcttccatgactgtgctgttcaaagttgtgatgcttcactgttgctggactccacaagaaagagcttgtctgagaaggaaacggatagaactttgggttgaaaaatttcangtacattgagaccatcaaagagctttgaaagggaatgcccagagtttgttctggctgatatctcgtc

SEQ ID NO: 51645 - DNA, 316 bp, Glycine max
  Clone ID: LIB3109-006-Q1-K1-E1
tttaatggcctttggatataccaatgctaacacctatgccagataagttttattttctggctctgttatgcttcaatgactacaaatactaacagtttgaaactttgaatatactatttcatatgggatttgggctggtgaaaagaattctatattttggttggtttttagaaatgttaaagcagccaaattcacaattaatcttaaattatgtgttctgtttgttttcttataatgagactttgtgctggtgtgagaattttgtcacagccttaagcccctaatttttaagcagatagccatgcgtatttatttt

SEQ ID NO: 51646 - DNA, 396 bp, Glycine max
  Clone ID: LIB3109-006-Q1-K1-E12
gatgacaaactttttgaggctcacagggactggggtaggcgatttatgagactatattcacagttcacatcatgggacaactcaaaagatcctgaacggcctcttgtgataggatatgtctctcctgattattttacacattctgtgtcatatttcatagaagctccccttctctatcatgactataccaattataaagtggttgtttattcagcagttgtcaaggcagatgcaaaaaccattcggtttagagagaaagtcttaaagaaaggtgggatctggaaagatatttatggaactgatgaaaagaaggttgccgacatggttagagaagatcaagttgatattgtaatagagcttactggtcacactgcatacaataagctgggaatgatg

SEQ ID NO: 51647 - DNA, 307 bp, Glycine max
  unsure (1)..(307): unsure at all n locations
  Clone ID: LIB3109-006-Q1-K1-E2
aaaagtggaaaagcctgtaatgcttataggaaattaacagactcctggatactggaagtatcgcaacattatggatatgaatgctggatgngtagtttgctgctgatattcatcatcaagttgggcatgaatgtggcctactatgctgaaaaagtcattgggtgtcattatgacgaggcttatgcatctatcatgattgggtgaaccttcttcatacccaagacatatgacctattcatagtgatagctctttagtctttataggataatgtgatacaaagacatttttggagatgaccgaatttac

SEQ ID NO: 51648 - DNA, 366 bp, Glycine max
  unsure (1)..(366): unsure at all n locations
  Clone ID: LIB3109-006-Q1-K1-E3
cgggtccgaacggttgaaaaaagacgattgaggggggaaccaaaaaacaaaaaaccgtgcttagaaaaaaaaatggagtactctaatggattccctagaaaaagagatgtttctcttcaggaacttagcacatggcttgctgagtttgctgaagtaagaggatgggatcaatatcacagtcccagaaatcttcttttagctcttgtgggagaggtgggagagccttctgagatcttacagtggaagggagaggttgcaaagggattgcccaattggagttctgatgataaggagcacttacacgaaaagctntcagatgttttgctttatttagtgcgtcttgctgatgtttgtgggctaaatctt

SEQ ID NO: 51649 - DNA, 393 bp, Glycine max
  unsure (1)..(393): unsure at all n locations
  Clone ID: LIB3109-006-Q1-K1-E4
gaggaggagtgaggcanagctgatagctccggcgaagcccacccctcgtgaagtgaagctactctcagacatagatgaccaagatgggttacgtttccaaattccggtgatacagttctatcgccacgacccatcaatggcagggaaagaccctgtcgatgtgataagaaaggctgtggccaaaacgcttgtgttttactatccttttgcaggtaggcttagggaaggacttggtcggaaactgatggtggattgtactggggaaggtgttttgttcattgaggctgatgcagatgtcactcttaagcaatttggtgatgctcttcaacctcctttcccgtgctgggaggaactcctttatgatgtacctggttctcaaggagtgcttaacac

SEQ ID NO: 51650 - DNA, 414 bp, Glycine max
  Clone ID: LIB3109-006-Q1-K1-E5
gagtaggtttgaggcagagctgatagctccggcggggggcacccctcgtgaagtgaagctactctcagacatagatgaccaagatgggttacgtttccaaattccggtgatacagttctatcgccacgacccatcaatggcagggaaagaccctgtcgatgtgataagaaaggctgtggccaaaacgcttgtgttttactatccttttgcacgtaggcttagggaaggacttggtcggaaactgatggtggattgtactggggaaggtgttttgttcattgaggctgatgcagatgtcactcttaagcaatttggagatgctcttcaacctcctttaccgtgctgggaggaactactttatgatgtacctggttctcaaagagtgcttaacaactcccttctgcttattcaagt

SEQ ID NO: 51651 - DNA, 372 bp, Glycine max
  Clone ID: LIB3109-006-Q1-K1-E6
ggaggcaagaagttgtattttggcatccccgtggcttcaagaagagaatctcaatggaggcccaggagctgaagcgcgtgttccagatgttcgaccgcaacggcgacgggagaataacgaagaaggagctgaacgactcgctggagaacctgggcatcttcatctctgacaaggacctgagccaaatgatccagaggatcgacgtcaacggcgacggttgcgtggacatggacgagtttggggagctgtatcagaccataatggacgagcgcgacaatgaggaggacatgagggaggccttcaacgtcctcgaccagaacgccgacggcttcatcaccgtcgacgagttgaagaccgtcttgtcctccctcg

SEQ ID NO: 51652 - DNA, 387 bp, Glycine max
  Clone ID: LIB3109-006-Q1-K1-E7
gagagaaatgggtggtatcctcattgagcacacagaaagcaaagtgtctctctaacctctgcaaaagtccaaggttgcacggttttaactgcttaggcttttgtcttcaaaattaaaactgtgcaactttggttgcagagtcataagtgttaagttgtgtatgcatgaaagtgggcttgagttaattgtgcctcttgtatgatggaatccctttggaaactgttgtacttgctagagcctgcgcctgtcacacttatcattacagctgtggctgtgacatttggcgcagcatttcgagctctaaactatgggaaagaaatggagcataatcgtgacttatgtgaagcatcgattacattggataggtcacaggcattgatgatcccg

SEQ ID NO: 51653 - DNA, 110 bp, Glycine max
  Clone ID: LIB3109-006-Q1-K1-E9
gctccgaaaaagacaaaaaaaggggattggttattggaaaaaccaaaaaaaagggaaatatcaggaggtgcaagtcccggacccaaacccggtttttttttttgttaagg

SEQ ID NO: 51654 - DNA, 248 bp, Glycine max
  Clone ID: LIB3109-006-Q1-K1-F10
aggatagcattagcatcgtttgcgtttgctctgctgttccacagatttgcaagtgctggttttcatgggcactcgataaataacttggacaaggaagttggtcatgacagaggagctctcgttgagttctatgctccttggtgaggaacatgtaaactgctcgctccagaatatgctattatagcagattcctttgctggacgtttttggaccattaccgctgcttctgtcatttatgaactgggatt

SEQ ID NO: 51655 - DNA, 322 bp, Glycine max
  Clone ID: LIB3109-006-Q1-K1-F11
tggggaaaaaaaagatgaataaaaaagagaggttgcggatttaacgcactataattgcaacttcatcaattgcttatactctcatcctacactctgcctcatgaaactacatattcattctctatcattataacttcgagatcgtaatcattctcgacaaaggacctctaaataagttctatgctatttattctaaacactgaaactatctttctctaaacattcaaacattcattatcaactatcataaagccaaatctcttttaatttgcaaggaccactgtgatactcattacagtaaatgcagctacattggacattc

SEQ ID NO: 51656 - DNA, 341 bp, Glycine max
  Clone ID: LIB3109-006-Q1-K1-F12
ggtagtagaaagggaaagagggttgataggggagaagggtttaggattttgcacaactcactcatggaggaggaagaagccccagacgttatatgcgagctggaaaacgttcaaggcttagtggacgccctcaccgccgttcggtggaagcgccggcaggacgccgtgttggagttgtccgaacacggcattgttttgatcgtcgaagaaagcggttgcctccaagccaaggtttatctcaaacgagagttattcattcgttacgattacaacgcacgaggaggacgacctcgttttggagtgagtttggggcatttcgtaaattgcttgaacgccttctc

SEQ ID NO: 51657 - DNA, 357 bp, Glycine max
  Clone ID: LIB3109-006-Q1-K1-F2
gggatattggcgcggctcaatcaccaactttctcccattgggaagccttttcagagggctgctttttatttcaaagaggccttgcaattacttctccattcaaatgccaacaacagttctttcaccttttcacccaccggccttctgctcaagattggtgcttacaaatcattctcagaaatctcaccagttctgcagttcgctaattttacttgtaaccaagcactgcttgaagctgtgaaagggtttgatcgcattcacataatagattttgatattgggcttggtggacagtggtcttctttcatgcaagagttagcactcaagaatggcggtgcacctgaactcaagatcact

SEQ ID NO: 51658 - DNA, 360 bp, Glycine max
  Clone ID: LIB3109-006-Q1-K1-F3
ggagcagagaaggagtttaggaagtgtttggttacttctgagattctgctgttccttagagagcgagcgatgacggtagcagcaggaatgggttacgctctgctagcgttaggaccctctctctccatcttcgtttctgtcatttacaaaaaacccttcctcattctcaccgttctctccagcacactgctgtggcttataagtttgattgtgctgtctggaatatggaggggggttttgcctgtcaacacaacagcttggtggccttttggaatactcattgtatgatctgttgcttttcaagaagccctcatgcttttctccttgaaaatatataagcaagcttatattgctcttttc

SEQ ID NO: 51659 - DNA, 291 bp, Glycine max
  Clone ID: LIB3109-006-Q1-K1-F4
ggagaagaagaagaagaagaagatggagaagtatcagatctggagcaggagaatagcgttggcagcgtttgcgtttgctctgctgttccaatcggcctcagcagacgacgtcgttgtgctctctgaagataacttcgagaaggaagttggtcaggacagaggagctctcgttgagttctatgctccttggtgtggacactgcaaaaagcttgctccagaatatgaaaagcttggtagcagcttcaagaaagccaaatctgttttaattggcaaggttgactgtgatgagca

SEQ ID NO: 51660 - DNA, 409 bp, Glycine max
  Clone ID: LIB3109-006-Q1-K1-F5
gcggaaataggagagaaagaagagaagaagaagaagcagcatcgacgaggaggcatcagaacattacctttcattcttgcaaatgaagtgtgtgacagatttgcaagtgctggttttcatggtaacttgataagttacttgacccaagagctgaacatgccattggtagctgcctcaaacacactgacaaactttggaggaacatctagcttcacccctctcattggggctattatagcagattcctttgctggacgtttttggaccattaccgttgcttctctcatttatgaactgggattgattagcatcactgtatcagctatactgccacaatttcgtcccccaccatgcccaacacaagctaattgccaagaagccacatgctcacaactgtggatactctaca

SEQ ID NO: 51661 - DNA, 362 bp, Glycine max
  Clone ID: LIB3109-006-Q1-K1-F6
cgcctactgaaattatataatggacgagaatcaaaccagttctcacctgaagaagagaagtatgaatgggttccgttgagtgttgaatttgggatgccactattcagtccaaagttgtgtaatgatatatgtcaaagggttgtttcatctgaattacttcaatctggctcatttgaaaaacaccatcatgcaatgcaaagtttaaggaaaaacttgcgtgacatttgtgctgagtaccaagcaacaggtcctgctgcaaagattctttaccagaaggagaaagctaaggaatcctctcgacaacttatgagttatgcaagtggaaggtggaatccgctcatggatccttcttctccaatttc

SEQ ID NO: 51662 - DNA, 396 bp, Glycine max
  Clone ID: LIB3109-006-Q1-K1-F7
tgagcagcagcgcataccggattctcggcatggcggagatcggaatattacctaagtttttcggagttcggtctaagtggttcgatacgccgtggctggggattttgatttcgaccatcataacgattggtgtgtcgtacatggacttcaccgacatcatttcctcggcgaatttcttgtacagtttggggatgttgttggagttcgcctcgtttctttggctgaggtggaaatctccctccattaagaggccttatcgtgttccgttgaagcttccacttttggtggtaatgtgtttggttccgtctgggtttctggttttgattatggttattgctacgaaaactgtttatttggtgagtggggttatgaccgtggctggggatggtttttttg

SEQ ID NO: 51663 - DNA, 161 bp, Glycine max
  Clone ID: LIB3109-006-Q1-K1-F8
ggtgtgagttcattaacatatacaaattctctgtgttgtgttgtgtacttgtgttaattgtgttgttgttgtaggaaatttaagtgaagagagaatgatgatgaagtctgctatgtgtgcattggtgcttgtgggacttgttgggggtgaaatgggggcca

SEQ ID NO: 51664 - DNA, 356 bp, Glycine max
  unsure (1)..(356): unsure at all n locations
  Clone ID: LIB3109-006-Q1-K1-F9
gatgatagaggcggttccttcgtcgctgtgagaagaatttcgcagggtcttgatcgaagcaacacgtgccattcaagttccgctgagtttgtgacaggatcaacagcatggcttggcagaagtctgtcctgtgtctgtgcacagagaagagaaagtgatgcccgaccctcttttgatttaactccagcccangaagagtgcttgcagagactacaaagtcgcattgatattccatacgatggttctgtccctgagcaccaagatgccctaagagatttatggaatgcagcatttgccgaagaagactccatggtttgatttctgagcagtggaaggacatggggctgcaagggaag

SEQ ID NO: 51665 - DNA, 383 bp, Glycine max
  Clone ID: LIB3109-006-Q1-K1-G1
acctgactcttgggaagctagagaatctgagggttgttgctcttcataacaacaacttctatgggtcaattccaccagagttgggaaattgcactgaattggagggaatatttttacagggtaattaccttagtggagcgattccaagtgaaataggaaacctttcacagcttcaaaatttggatatatcaagcaattccctcagtgggaatattcctgcatcacttgggaagttgtataatctcaaaaatttcaatgtatcaaccaattttctggtcggacctataccttctgatggtgtccttgccaactttactggaagctcctttgttgggaatcgtggtttgtgtggagtgaaaataaattcaacatgtagagatgat

SEQ ID NO: 51666 - DNA, 393 bp, Glycine max
  Clone ID: LIB3109-006-Q1-K1-G10
ggggtagagataattaaattgttgtaaatggggcgtgcattacagatgattgcaatctagttttgatccttgctgagaaaagagtgagaatatggtaggaactgaaaattaggatataaaataggaagaccaagcaccttacaaacagaagtagccctctgttaatactaaaatatggaagaaaacaggaagataactatggagattgtgcagcagaacagaatacttcatcagtttagcccacccgagcctttcaacctcactcaattcttacttttacacttttccttccccctctttaccctcatgcccacagttcaggtaccaccactcaacatgtgacaactatctgtgtgtgtacagcctttccacagttcaggtaaaattttaaat

SEQ ID NO: 51667 - DNA, 411 bp, Glycine max
  Clone ID: LIB3109-006-Q1-K1-G11
gatacaaagttacaactcaaatttctattttcatacaaagttacaatttgttacttacactactacactttagttgttccaacacaagtgtttgtggcaacaactttgatttgaggttctacttttttttgtgtaatcaagaatatttaaggtttttatttgatattcgtcgagtcagtccattttttgtttttttgagtaaagtgatatcctctgcttcttcattcttaactccaaactttagacgctccaccgtgtttttttgttacctatactacaccctttaagtgtttgtagcaaggacttttgtgtgaggtttgtcataatcaagagatatctaatccttctatttgatactcaattactcttctggtcagcctattttgaggtaaagtgatatctttaatcgca

SEQ ID NO: 51668 - DNA, 405 bp, Glycine max
  Clone ID: LIB3109-006-Q1-K1-G2
ggagagcgagagagagagagaaacaaagcagcacccatttggatcctctcttctcttctttgatctccgttaccctttttgttttctcaacagagagagagagagagaatctttcgaagttcgtttgcgtgtgttgtgtggtcagtcaccgatggcagcaccacctgcgagggcacgtgccgattacgattacctcatcaagcttcttcttattggcgatagcggtgtgggaaagagttgtctgcttttgcgattttctgatggttccttcacaaccagttttatcaccaccattggcattgattttaagataagaaccattgaacttgatggcaaacgcattaagttacaaatctgggatacagctggtcaggagcgatttcgaactattaccacagcttatta

SEQ ID NO: 51669 - DNA, 89 bp, Glycine max
  Clone ID: LIB3109-006-Q1-K1-G3
gagacctcaggccaagcggcgcttcccgttgaatctaaacatatcaatgagcggataaaagaaagcaaacatacttgatcaggtccgcc

SEQ ID NO: 51670 - DNA, 372 bp, Glycine max
  Clone ID: LIB3109-006-Q1-K1-G4
gatggctcagatgcataccctttttgtgaagcatggtactactcttgacagacacctcggaagctttaaaattcccccatcaagattggctgcatttgttactgtagccttgcttgttagcattgagctctatgatcgcttctttgagaagatcatgcaaaggttgaccaagaaccccagatgcattacccttattcagaggatgggaattggacttgtaatgcacacactgatcatgatcattgcatactgggactgaaagctatagactcattgttgcaagagaacatggtgtaggtgaaagcggagggcatgtgcctttgagcatattcattacgctctctcaacttatactgatgggaactgctgatg

SEQ ID NO: 51671 - DNA, 342 bp, Glycine max
  Clone ID: LIB3109-006-Q1-K1-G5
gatgctgtagattatcttacgtggacattcatgtacaggcggctcacacagaatcccaattattacaacttgcaaggagttagtcacagacatctttctgatcacctctcagagatggtggaaaatactttgagtgatttagaagcgggcaagtgcattacaattgaggatgatatggagcttgctcctctcaatcttggaatgattgcatcctattattacatcagttacacaacaattgaaaggttttcatcatctgtgacttcaaaaactaaaatgaagggtcttttggagattctgtcttcagcttcagagtatgctcagcttccaatacgacctgga

SEQ ID NO: 51672 - DNA, 359 bp, Glycine max
  Clone ID: LIB3109-006-Q1-K1-G6
ggggcacttgtcttggaaagaacggacagctacatttgtcgccttatcagcacaccgggtcttctttttactttcctgctggaagctgtgcatggccacaaaaagagttacattgcatacttgggagctcattctcatggtcctagccctacctgttttgacctagaaacagctacccattctcattatgattgactatcttcagacttgggaagtgaggagaaagcgctagaagcaattattgactcatattataaacacatcaatggctcgtctgcgctacttgcagaagaagaagcagcagatgttgcaaaaaacccagatgtggagaatgtggtcttgatcaaaaaacataaact

SEQ ID NO: 51673 - DNA, 392 bp, Glycine max
  unsure (1)..(392): unsure at all n locations
  Clone ID: LIB3109-006-Q1-K1-G7
gattagtgggagcaatacatatcattcattcagaggcaacaaaggagttgtaaattaagagcatggctgcacaagctcttgtatcatcatcatctcttaccttctcagccgaggctacaagacaaagtcttggaccaagatcactccaatctccatttggcttctcaagaaaagcctcctttcttgttaaggcagctgctactccccctgtcaagcaaggatcagacagacctttgtggtttgcatcaaagcaaagtctttcctacttggatggcagccttccgggtgactatggatttgaccctctgggactttcggaccctgaaggaacaggagggttcattgagccgaaatggctagcatatggtgagataatcaatggtcngtatgca

SEQ ID NO: 51674 - DNA, 420 bp, Glycine max
  Clone ID: LIB3109-006-Q1-K1-G8
ggtgcaagagtttgttgtgagctataagctggtggatcgtgaggagaatatgaagttgtttgttttctttgttgctgcagtagttttggtagcatggccatgccatggcgcaggctaccaaaggttccctctccgaatgaaaactggctatggtgagcgttcttcggaggtagaatgcgcaagttttaggcttgctgtggaagcacacaacatccgagcctttaaaaccattcctgaagagtgcgttgaaccaacaaaggactacattaatggcgaacaatttagatcagactctaaaacagttaaccaacaagctttcttttatgctagtgaacgcgaagtccatcacaacgacatatttatattcggcatagataacaccgtactctctaatatcccatactatgaaaaacatggata

SEQ ID NO: 51675 - DNA, 384 bp, Glycine max
  Clone ID: LIB3109-006-Q1-K1-G9
ggcggaagaggcccagaaaatagcctttctccgccgattcatcttctcgcaagcaatttgaacaatattctggacggacatttgcatttacgggggaagtgaattttatgcaagatgatgatgatcgtctggagattacccgaactaaatttggaagtttgcttaaaagacacggagatttgacagagcgtcctgctagggattctgacaagataatatttgagcgtctacagaaggagtttgaagctgcacgagcttctcaaactgaagagatatgtttagacggggaagagtggaatgatggactactagctacaataagagagcgggtgcatatggaggcagacagaaaagcaatgcatggggatgctgacatattagcat

SEQ ID NO: 51676 - DNA, 345 bp, Glycine max
  unsure (1)..(345): unsure at all n locations
  Clone ID: LIB3109-006-Q1-K1-H1
ggtttaataaggatatagtcatagagtcacanaggaggcggcgagtgttgggttgagaatcctatcttgttcgtctttctcgtcttctttcttttcttttgtttttcttgtggatgtgaaacagaatctatgacgagtcaatcggcgaagaacctattggttttgttggggctgggtttagctggaatagttctaatcaccagaaagctcaagaagtctgtcagaaaggatttgggggctttcattgagaagcttcagctgcttactcctacccagcctgctcctcccaaggctccccatcccctcaccgcactcaccttcgcacttttcgacctatttgacatc

SEQ ID NO: 51677 - DNA, 209 bp, Glycine max
  Clone ID: LIB3109-006-Q1-K1-H10
ctttaacactttattactaatacaaacagcggtaggacttgaaatcctgctcatgcacccaatggaacatactatgctataacattgcctaatacataaacatcaatgccctaatctcaaagacgaacggtgacggaagaaaaaccaacgtttgtcgattatagtgggaaattgtagaccaatggtgctggtgtcgttacaacacattt

SEQ ID NO: 51678 - DNA, 396 bp, Glycine max
  unsure (1)..(396): unsure at all n locations
  Clone ID: LIB3109-006-Q1-K1-H11
ctttgtcactttattactaatacaaacaatggaaggcttccaatccctgtccatagacccaatgggacaaacaatgctggaacattaccttctacatcaacatcaatgccccaatctcaaagtcaaacggtagtggtagaaaatccaatgtctgttgattcaagtgggaaattggtgagcaatgttgttgttggcgttacaacggataagaaataacatcatcacatataaaaggtacagttcacgtcatgacgcatcaccacaagtgctgtcacaagaagatattgnttgtgtatatgaatatatatatgatattgcagcctgcaatggtttaattgaaatcaacatttttccaatataagaagttgacgaatatcatgtatgtatgaatgtata

SEQ ID NO: 51679 - DNA, 221 bp, Glycine max
  Clone ID: LIB3109-006-Q1-K1-H12
ggtaatagaaggtgtcaaaacacttcaactttaggctccatctcaaaaaaatgggtggtttagctagcaatcttcctctaattgttatggtgggtctgcaaattcattatgcagcacttgctatattcacaagaaccgctttgttagatggattgagtacgacggtctttgtagtgtacaagcaaagcatatccactttggctttggcgcctatgtttttc

SEQ ID NO: 51680 - DNA, 343 bp, Glycine max
  unsure (1)..(343): unsure at all n locations
  Clone ID: LIB3109-006-Q1-K1-H2
gggtgaaggagattgttaaagaggtaaatgccggtctcgagtgtggacttgggttagaagactttgatgattgggaagagggtgacattcttgaagtcttcaacacagttcagaagaggaggacccttgaagaggcctcagcatcaatggcagctgctgtggagggagtaggagttgcattgtagaatgaaccatgatgtattccactatgagattggttcctatcttgtgtttgagcacagtgcaaatgcattccangttccagttgaaaaaacaatgtattctctccaattgatgttatgaaagtggaaaggtaacaattccctcatcattatattgatat

SEQ ID NO: 51681 - DNA, 412 bp, Glycine max
  Clone ID: LIB3109-006-Q1-K1-H3
ggaagtaggaaatagcagagtttagactttagactttagagtcagtgtacgcagaagagtaaaatcgattggcgatgatggagttgaaagagattcagagactcgaaggccacaccgataaggtttggagcttggcctggaacccgaccaccggtcacgccggtatcccactcgtcttcgcttcttgcagcggcgacaaaaccgtccgaatctgggagcagaacctctcctctggcctctgggcctgcacggcggttctggatgaaacgcacactcgaactgttcgatcttgtgcttggtcaccgtcgggtaagctattggccactgcaagcttcgatgccaccactgccatttgggaaaatggtgggggggattttgaagtgggttctactttggaagggacaacgaaaat

SEQ ID NO: 51682 - DNA, 316 bp, Glycine max
  Clone ID: LIB3109-006-Q1-K1-H4
ggtggtgatggcaaagtattctctccctcttctgcaaatacagctgtgtcccagcccaacacctctcagaaaagaactgctcctgctccagtggtggggtggcccccaattcgttccttcaggaagaaccttgcaagcagcagcagtgcttctaagccacctcctgagtctcaggctgagcagcacaacaaggttgctggtaaaaaacctgttgacaactatgctaataataaaggtttgtttgtcaagatcaacatggatggtgttcctatagggagaaaagtggacctcaatgcctatgacagctatgaaaatc

SEQ ID NO: 51683 - DNA, 347 bp, Glycine max
  Clone ID: LIB3109-006-Q1-K1-H5
gggcagaataaggtcggaggattgattgagaatcgttcgagactgcaaaatccaaaaccaaacacaacgcacaacattcgtcattcaccgccttgtcttgtcttcttctgtctccgaatcacggaatctctctgaatcgcgggattaagagaggaatatgcaacagaggctaaagttgcagcaacaacaggccctcatgcagcaagctttgcttcaacagcagcagatgtaccaccctggcatgctcgccgctgctatgtctcaaatggagcctgttccaagtggaaatgtgcctcctggttttgatacgtctgcatgccgtagtgtttatgtaggaaatattcatg

SEQ ID NO: 51684 - DNA, 294 bp, Glycine max
  Clone ID: LIB3109-006-Q1-K1-H6
ggaagcaaaacaacattaccagagtgggtctagtaattcagtgctgctagaagatggaaactagtgaatggcatatcgagcgaagatctagcttcggctctgaatcccccttagcaagagaggcaggaaatgtgcctgaaactgggtcactctctattgtggtgcttggtgcttctggtgatcttgctaagaaaaagacgtttcctgcacttttccacctatacctgcagggattcttaccaccagatgaagttcatatttttggctatgcaaggacaaaaatctctgatgatg

SEQ ID NO: 51685 - DNA, 375 bp, Glycine max
  unsure (1)..(375): unsure at all n locations
  Clone ID: LIB3109-006-Q1-K1-H8
ggcggtggtttgtggtgaaaatttgcataataatcttttgcagaaagcaagcaagaaagaaaaagggccatggaggccctgcacttgcaccgcgtgcttctcatgcctgtttcccaaaaaacctcaatctttttgcgcgccagtggcaccccattatccacacttgcaaggccaccattgcgttggagctctcaaacttgcagtgccaaaacaaggtggtttttgggtcttggagcagacagcaagaagaccaatttacctgataccgtcaaagccggtgaccccgttctgcacgagccagcccangatgttgatcctaacgaaataaagtcggagagagtgcagaagattattgatgacatgatccangtcatg

SEQ ID NO: 51686 - DNA, 330 bp, Glycine max
  Clone ID: LIB3109-006-Q1-K1-H9
agttttttgtgatttgtggtgaaaatttccatccgcgggttttgcaaaaagcgcgcgggaaacaaaaaaggccatggatgcccttcacttgcacccagtgcttctcatgcctgttttccaaaaaacctcaatctttttgcacgccagtggcaccccattatccacacttgcaaggccaccattgttttggagctctcaaacttgcaccgacatagcaagctggcttttgcttctttgttcagacaccacacaaaccaatttacctgataccatcaaaaaccattgaccaccttctgctcgatcccaccccactatatttatctctaacct

SEQ ID NO: 51687 - DNA, 406 bp, Glycine max
  Clone ID: LIB3109-007-Q1-K1-A1
ggggagagaatagagaagagagatggatccagacgcgttggcaaaggcattcgtggagcactactacagcaccttcgacaccaacaggaacggcttagcgaatctctaccaggagggttccatgctcactttcgaagggcagaagatccaaggcgcttccaacatcgttgccaagctcacctccctcccttttcagcagtgccaccactcaatctccaccgtcgactgccagccctccggcgtcaacgccggcatgctcgtcttcgtcagcggaaaccttcagctcgccggcgaacagcacactctcaagttcagccagatgttccatttgataccaacacctcagggaagctattatgtgttgaatgacatattccgtttaaactatgcatgaagatgtcatatg

SEQ ID NO: 51688 - DNA, 426 bp, Glycine max
  Clone ID: LIB3109-007-Q1-K1-A2
ggatcgcagtgggtatagtagatgaagggaaagggacagcagccagcttcgggactcacggaaccttctaggctatatataaaaaaaaaaatattgcacgctcctccgggctcctggcatttcaaattcaaggcctcttttcaatcttcaaagcagctactgcggcagctccattttccaattgaagttagcagagcagccatctgtgtgtgaaggggacatgatggatgattcccaaaagcatagaatcctgatggtctcagattttttctatcccaactttggaggtgtggagaatcacatatattatctctcacagtgtttgctcaagttaggccacaaggtggtggttgcaactcatgcttatggaaatcgatctggggtccgatatatgaccggtggtctgaaagtctactatattccatg

SEQ ID NO: 51689 - DNA, 316 bp, Glycine max
  Clone ID: LIB3109-007-Q1-K1-A3
ggggtgtaagtgagtcttgggagtgagtcactcttcctgcttaacccacatctgtagacaatatgggaagcactggtttgctacatttgatatgccttgacattgctttagtaagtgagtcgcttgtgcaagcacaacatgcgtataagtatttcacatggacggtgacttatgggactctttatcccttggctagtccccagcaagttattcttatcaatggtcagattgctgggcctagacttgacttggtaactaatgaaaatgtaattctcaaccttatcaacaagctggacgaaccatttttactcacttg

SEQ ID NO: 51690 - DNA, 413 bp, Glycine max
  Clone ID: LIB3109-007-Q1-K1-A4
ggatgtgggaagtgatgcatgaatgccacaaacttcagtttcagatcatgtcagcagcatataacaacagccatgctagaatcaccatgcattcagaattacgtagacagattacttcctatcttgaaaatgaactccaatttctatcatcaagctttaccaagtggattggagctcagaaattctatctggaggctataaacggatggcttctcaaatgtgttcgtcatgaagaaaaatcatccaagagaaaaaggaagcctcaatctggccctagccgttatgatcttccaatatatgtcacctgtgcagtctggttggataaacttagtgacttacctgtaaaggatgttgccgattcaattaaaagtttggcgacagatactgcccagttcttaccacaccaagacaag

SEQ ID NO: 51691 - DNA, 392 bp, Glycine max
  unsure (1)..(392): unsure at all n locations
  Clone ID: LIB3109-007-Q1-K1-A5
gatgagagagagagagagatgagggaggtgtaagagactggaaggagtaggtgttgttggcattctgacctaaagcttgtgtctttctgcttcgtttgtatcttctgctgcgtaaagaggatccctttctgattcttccgtaaatttcgtctctgaaactagggctaatacttcatctaccgatctctatattctggatgaaggtttgcttttgatccggcttgggagttttgatcgacttgattttaactccaacttttaagaaatgtcattccgcagcatagttcgtgatgtaagggatagtttcgggagcttatctangcgtagttttgatgtcagacttactgggcatcatagaggaaaatctcaaggatcagtgcaggatttgcatg

SEQ ID NO: 51692 - DNA, 418 bp, Glycine max
  Clone ID: LIB3109-007-Q1-K1-A6
gggagcgaagtgaattgaaattgaagtgactcggggtgagttgactcagcaatggcggaagaggtgactcgggtgatggtggcggtgaacgagtcgagcattaagggataccctcatccttcgatcagcagcaaaggggctttcgactggaccatcaacaagatcgttcgcgacaacgtctctgccttcaaccttctttttcttcacgttcaagtccccgatgaagatggttttgatgacatggatagtatctttgcttctcctgacgattttaagaacatgaatcagagagatagaattagaggagttcatctgctggaatacttcatcaataggtgtcatgaaattggggtggtttgtcaagcatggataatgcatggtgatcccaaagaagtaatatgtcatgaagtgaaacgac

SEQ ID NO: 51693 - DNA, 425 bp, Glycine max
  unsure (1)..(425): unsure at all n locations
  Clone ID: LIB3109-007-Q1-K1-A7
ggggaaaaagaagagtaattggcaaattgattttggcttgctcggcaacacggtgggagcattcttcacttgtccttggttttggaacgacgacagccgagctatctctcattccattttcatccatcaatggctccagtagcagcagcatcttcagattcaatcaagccaagagatgtttgcattgttggtgttgcacgtacaccaatgggtggatttcttggtaccctgtcatctctatctgccaccaagctaggctctatagctattgaagctgctcttaaaagggccaatgttgatccatcccttgtggaagaagtatttttcgggaatgttcttagtgctaatttggggcaagctcctgcaagacaagctgctcttggagcangaatatccaattcagtaatctgtactactgttaacaa

SEQ ID NO: 51694 - DNA, 348 bp, Glycine max
  Clone ID: LIB3109-007-Q1-K1-A8
ggaacgaggagggactttacaaattagtggtattttgttgaacatgttgggggagatgcgtaggatgggacgtttattagcaaaaggtatcaaggtttgaagggtggaggggagactggtaaataggtttggaatagaaacaggtaaagagttggcaggttaccgggtgggttaattactctccacccgcgatctcaaacgaagggaagctcacaccgccaagaagaacaacctcgtcatgggaccttcattccaaatggggaaatagatggtcaagaattgctcgcaagctaccagggcgaactgacaatgaaattaagaattattggaagactcacatgaggaaaa

SEQ ID NO: 51695 - DNA, 438 bp, Glycine max
  Clone ID: LIB3109-007-Q1-K1-B1
ggagccacaacacaaccaaaagcctattcacttgggcaatcattctctcacttagcaaacaaacactgtgtgtagctgcaatggaagagtattactaccagagacatcacgtgccagcatttgggagctgggattggaatgataatcttccttttacacaatgctttgagtctgcaagacaggctggtttgctaagatatggttactctgagtctgaagatagagatctttatgtcactggagacttgtatgagaatgattttgtcaaacccgctgtgatcgttgttcctcgcagaagggaaaaggtacgttgccagaatgaaaaagacgaaaaaaagcagaattgggtgagtaatgtgaaggagctacctagcccaactagtccaattcaaagaccaaaaccaaagccggtggatgaggacttgtacaagatctcac

SEQ ID NO: 51696 - DNA, 422 bp, Glycine max
  Clone ID: LIB3109-007-Q1-K1-B2
ggagccacaacacaaccaaaagcctattcacttgggcaaacattgtctgacttaacaaacaaacactgtgtataactgcaatggaagaatattactaccagagacatcacgtgccaacatttgcgagctgagattggaatgataatcttccttttacacaatgctttgagtctgaaagacagactggtttactaaaatatgaatactctgagtctgaacatatatatctttatgtcactggagacttgtatgagaatgattttgtcaaacccgctgtgatcattgttcctagcataatggaaaaagtacgttgccagaatgaaaaagacgaaaaaaagcagaattgggtgagtaatgtgaaggagctacctatcccaactagtccaattcaaaaaccaaaaccaaagccggtggatgacgac

SEQ ID NO: 51697 - DNA, 412 bp, Glycine max
  unsure (1)..(412): unsure at all n locations
  Clone ID: LIB3109-007-Q1-K1-B3
gggaggccataaaaaagatgcgatgctacacgcagacaagtagtacaagtccaataagaaaagcaagatagaaagattggctagttcacacacctcaattaatacaacaacaccctgttgctgatagttattatagagagagttcgatcaattcaagcttgcaagcttaaccatggaacggtatgagataattaaagatattgggtcanggaaactttggtgtggcaaagctggtcaaggaaaaatggagtggtgaattatatgctatcaagttcattgagagaggcttcaagattgatgaacacgtgcaaagagagattataaatcataggtccttgaagcatcccaatatcattagatttaaagagttgttgcttactccaactcatcttgcaatagtcatggaatatgc

SEQ ID NO: 51698 - DNA, 431 bp, Glycine max
  Clone ID: LIB3109-007-Q1-K1-B5
ggcagccaagaaaagaaaatcctcacgcattttgttcgtagccaaacactctgaaattctcagttatgtcgtggcaagcgtatgtggatgatcacctactgtgtgaaatcgaaggtaaccacctcactcacgccgctatcatcggccaagacggaagcgtttgggctcagagcaccaacttccctcagttcaaacctgaggaaataactgccatcaataatgactttaatgagcctggatcacttgctccaactggattgtatatcggtggcaccaaatacatggtcatccacggtgagcctggtgctgtcattcgagggaagaagggtcctggtggtgttactgtgaagaagaccggtgcggccttgatcattggcatttatgatgaaccaatgactccaggtcaatgcaacatggtagttgaaaggctt

SEQ ID NO: 51699 - DNA, 383 bp, Glycine max
  Clone ID: LIB3109-007-Q1-K1-B6
gggagtcagaggtttgtgtcacacacacggaaagggaaagagaaaacacagagagaagcaaaacattacttctttgaacttgatgtgtattgtaacaaatgtctttcccaatattgttcgtaatgtaaggaccgaatttgaaacttaataaaggcgaacttttaatgtaaggctttctggtgggggcaagtcaaatagtttggtccatgaggagcacgaatgcctgtcagttgtacagaacatacagtgggctagccttccacctgagcttcttcgtgatgttattaaaagattggaagaaagtgagactacatggcctgctcgtaagcacgtggttgcgtgtgcttctgtatgcaagtactggagaggaatgtgcaaagaaa

SEQ ID NO: 51700 - DNA, 417 bp, Glycine max
  unsure (1)..(417): unsure at all n locations
  Clone ID: LIB3109-007-Q1-K1-B7
gaaggtgcaagagtttgttgtgagctataagctagtttatcgtgaggagaatatgaagttgtttgttttctttgttgctgcagtagttttggtagcatggccatgccatggcgcangctaccaaaggttccctctccgaatgaaaactggctatggtgagcgttcttcggaggtaaaatgcgcaagttttaggcttgctgtggaagcacacaacatccgagcctttaaaaccattcctgaagagtgcgttgaaccaacaaaggactacattaatggcgaacaatttagatcagactctaaaacagttaaccaacaagctttcttttatgctagtgaacgcgaagtccatcacaacgacatatgtatattcggcatagataacaccgaactctctaatatcccatactatgaaaaaca

SEQ ID NO: 51701 - DNA, 188 bp, Glycine max
  unsure (1)..(188): unsure at all n locations
  Clone ID: LIB3109-007-Q1-K1-B8
ggagcaagagtgaagagcgaagagggtggctcccaagggtttaatctttttggctgtgttatgcttctcagcactgtcactgagtcgttgtcttgcggaggataatggacttgttatgaacttctacaaggaatcatgccctcangctgaagacatcatcaaagaacaagtcaagcttgtctacaagc

SEQ ID NO: 51702 - DNA, 424 bp, Glycine max
  Clone ID: LIB3109-007-Q1-K1-C1
ggtgtgtgaaattgagtgacttggttttgtagatgtctggtatcccaagtgggcgatcctacagcgatattctcttctctcctcctatgcgccttatctcatcccaagtggtcattctctttttctctatcactgctgcctgcaaacaaaagatatttatattgcattaaaaagatgaaaaaaaagggcaagagtgtgtggtccttttaagttgaacatgatggaatggccgtctttctcttttgggtatcttcccaaatcaggaaacactttctcatcttccctttcccagtttcacaccctacctcatggaaggctctgtcaacgaacgtcttcattttgggaagattggatatgggagaagatgcaggattcgtgctccctgctgcaacgagatctactcatgccgtcactgtcataacga

SEQ ID NO: 51703 - DNA, 428 bp, Glycine max
  Clone ID: LIB3109-007-Q1-K1-C2
gtgttaatatcatagcaaatctattccatgctccgataagtgatgatgagactgcagtaggtgtgggaactgtggggtcatcggaggcaataatgttggcaggtctagcttttaaaaggaaatggcagacaaagagaaaagcagaaggcaaaccatatgataagcccaacatagtaactggggctaatgtgcaagtttgttgggaaaaatttgcaaggtactttgaagtagagctcaaggaagtgaaactcaaagaaagatactatgtgatggaccctgcgaaagcagttgaaatggtagatgagaacaccatctgtgttgcagccattttggggtcaactatgaccggagagtttgaggatgtgaagcttctcgatgaacttcttactaaaaagaacaatgagacaggttgggataccccaattcat

SEQ ID NO: 51704 - DNA, 422 bp, Glycine max
  Clone ID: LIB3109-007-Q1-K1-C4
ggttctagtgtgtgattgtttgttgttgtaactcgttcttcttcttttgttgttctgtgtttgtgtttgttttttctctcacctgaaaatgtcttgctgcggtggtaactgtggttgcggaagctcctgcaagtgcggcaacggctgcggaggctgcaagatgtacccagacttgagctacactgagtcaaccaccaccgagaccttggtcatgggagtggcacctgttaaggctcaatttgagggtgctgaaatgggtgtgcccgctgagaacgatggctgcaaatgtggaccaaactgctcctgcaacccctgcacttgcaagtgaagtgttgggagagcaagcttcgagcagagatagcccttaattaagaataatgataaactattaatgtgtagctaaaaacttatgtattatgtct

SEQ ID NO: 51705 - DNA, 423 bp, Glycine max
  Clone ID: LIB3109-007-Q1-K1-C6
gattgagaggtccaccaaccttgactggtacaagggaccaactctccttgaggctcttgaccaaatcaatgagcccaagaggccctcagacaagccactcaggcttccattgcaggatgtctacaaaattggtggtattggtaccgtgccagtgggacgtgttgagactggtgtcgtgaagcccggtatggtggtgacttttggtcccactgggctgacaactgaggttaagtctgttgagatgcaccatgaggctctcacagaggctcttccaggtgacaatgttggctttaatgtgaagaatgttgcagtcaaggatctcaagcgtggttttgttgcatccaactccaaggatgaccctgccaaggaagctgccaacttcacatctcaagtcattatcatgaaccaccctggccagattgg

SEQ ID NO: 51706 - DNA, 385 bp, Glycine max
  unsure (1)..(385): unsure at all n locations
  Clone ID: LIB3109-007-Q1-K1-C7
ggggtacaaaaaatatctgcctttacttgttttggttaggatgaaatgtgaaaatgcatgtgttgatattatttgcttcattgctttagcacttatccaatgggttatggttctggtgaaaagctctgtgattgttcaatgggtttctagaatgaatgttctatggaattatcattcaacccaatgaccagtttagttagtgattctcatttttatggctcttgccctgaagtcaagttgcttcttgcaattgaagaaacctgaagctggtttcaatgtttgtttttcatctaagaaagctataatctccgtgaaacgacacactcccgtggctgctatcangaccatggaaacagtgggactctctgcaacattcaccacgttg

SEQ ID NO: 51707 - DNA, 404 bp, Glycine max
  Clone ID: LIB3109-007-Q1-K1-C8
ggggcgagggttttgtcttgtgattatccttgcggcacacattgtcttgtcggcaaaatcttccaccaacaacacacagccatggcaggctcaaacattctttctcactctccttcccttcccaaaacctacagccactccttaaaccaaaacgcgttatcccaaaagctttttttttctgcccctcaaattcaaagccaccacaaaaccacgtgctctcagagcggttctctcgcagaacgctgtcaaaacctcggtggaggacacaaagaacgctcattttcagcactgtttcaccaaatccgaagatgggtatctgtactgtgagggcctcaaggtgcatgacatcatggaatctgttgagagaagacctttgtatttgtacagcaagccccaaataacta

SEQ ID NO: 51708 - DNA, 409 bp, Glycine max
  Clone ID: LIB3109-007-Q1-K1-D1
gacggctaaaagctaaaaatcatcgaagtactcaaattagcatggctgtcacggttgcattcttgaatttgatcatcatgttttcagtagtctctacaagcaagtcactgagcttaaactactattcaaaaacatgccctgatgtggaatgcattgttgccaaggcagtgaaggatgccactgctagggacaaaactgttccagctgcacttctgcgaatgcacttccatgactgtttcgttcgggggtgtgatgcctctgtgctgctaaattcaaaaggaagcaacaaagcagaaaaagatgggccaccaaatgtttctttgcatgcattctatgtcattgatgcagcgaagaaagcactagaagcttcatgcccaggtgtggtctcttgtgctgacatccttgctct

SEQ ID NO: 51709 - DNA, 425 bp, Glycine max
  Clone ID: LIB3109-007-Q1-K1-D2
ggaactaaaaaatgaactgtcttcagaatctttctcgattctctgttttgcccttcgatacacttgttacgcgccaccgcaagaaccttcccctttccctgggtttcgtcaataattctcatcaaaatctaactatggcactcaaggctgcctcaggttctataccgagtgcagacacaagtagtgccgataaggaggaagaaaagtctgagacatatagtcatagcatgacagaagccatgggtgctgttttgacttataggcatgaattaagaatgaactataatttcatccgtccagacttgattgtgggatcatgcctacagactcctgaagatgtagacaagttgtgtagaattggagtgaaaactatattttgcttacaacaagatccagaccttgaatatttcggagttgatattaat

SEQ ID NO: 51710 - DNA, 432 bp, Glycine max
  Clone ID: LIB3109-007-Q1-K1-D3
gacagagaaaatgagtacggtgggagaagggagggtgagtagtaatggtcatggatgttgcaaatcaaggccaggctatgcttccccactggaagccatttctggtcccagagagtctctcatttatgtaacctctgtctacacagggaccggaatagagaagccagactatttggcgacagtggatgtggatccaaactctccaacttattccaaagtcatccataggcttcctgttccttatttacgtgacgaattgcatcacacaggctggaattcatgcagctcttgccatggagacccctcagcagaccgacgatttctcatcgtacctgcactcgtatcaggtcgagtatatgtggttgatgtgaaaacaaatgcaagggctccatctttgcacaaagttgtcgagcctgccgatatcatacaaaa

SEQ ID NO: 51711 - DNA, 413 bp, Glycine max
  Clone ID: LIB3109-007-Q1-K1-D4
gacggagaaaacgaattcaattgtgtgtttggcttgcttgaaggtccacatcatttctcaacccacattgcatcccacttactccttgtagtaagggaataatgtaaattactgcataattaagcactatcctttaaatctatcaaggcaataatgactgattaggtacagtgcattatcatattatctgcaccattttactgtatttaagtatttgcatactttgcttaatgaagcagacaacaaaaccagcgggtatatatatagatatacatatctagggttaatgttatcagcgacgaaattaattgcaattaagtggcatagatcttgaagctgagaatcgcgtgcgccatgaatagaggtgaaagttcaagtggtggacaaaactcgttggggtacctatttgggtc

SEQ ID NO: 51712 - DNA, 389 bp, Glycine max
  unsure (1)..(389): unsure at all n locations
  Clone ID: LIB3109-007-Q1-K1-D5
gacgagtaaactgggatatatattttgttcctgcgaacccaaaatcaaaatccctctcctgtgagcatgctgaaaggaacaacaaaaggaggtgaaatgggaggagaaggagggagagaaggggattgggagtgcagcagttgcaacaacaggaactacgccttcagatcattctgcaaccgatgcaagcaaccccgcctcctcgtcgacaccaaaaccccctctgattccaagtggctccctcgtattggcgattggatctgcaccggttgcactaacaacaattatgcattaagagagaagtgcaagaagtgcggacaaccaaaagaggtagcagccatgccagcaatngcgatgaccggagcatctttcccnccttattcacacta

SEQ ID NO: 51713 - DNA, 321 bp, Glycine max
  Clone ID: LIB3109-007-Q1-K1-D6
ggatcaagaacgagaacagcaaagtggcgtcaaagagagagagatggaggttattgtgcctagggtggatttgcaaaagctttcatatgaagatgaacgcaagattgtgatacaaacatttgagtaacgattgtgttatagagacatacactacgaaagttcactaacactcttggatgacatgtagatagtggttaaattcttgcatgatgttcacacggtaatgagaatgcatatcataccgttctgtccctaaagtggatatagtgcgtcatcttcaacaaatcctatatacgagggcatggtaatatatgatatgca

SEQ ID NO: 51714 - DNA, 407 bp, Glycine max
  Clone ID: LIB3109-007-Q1-K1-D7
gacgcgtggaaatgatatgcacgcacgcttctgtgggagaggaagtaggaaatagcagagtttagactttagactttagagtcagtgtacgcagaagagtaaaatcgattggcgatgatggagttgaaagagattcagagactcgaaggccacaccgataaggtttggagcttggcctggaacccgaccaccggtcacgccggtatcccactcgtcttcgcttcttgcagcggcgacaaaaccgtacgaatctgggagcagaacctctcctctggcctctgggcctgcacggcggttctggatgaaacgcacactcgaactgttcgatcttgtgcttggtcaccgtcgggtaagctattggccactgcaagcttcgatgccaccactgccatttgggaaaatgttgg

SEQ ID NO: 51715 - DNA, 425 bp, Glycine max
  Clone ID: LIB3109-007-Q1-K1-D8
gaatgaatggaaaaggatctaattagacaatgacgttatctcggactgtgaatgagtgaacagcataaaagcacaacttgactgacatacgcaaccaaactaaagataaacaaaatttagaaacaaaaacatgttggtgaaggtgtacggtccaacctatggagcccccaagagggtgctggtgtgtctgattgacaacgaaattgagtttgaaacaacacatattgatctcttgaagggagagaataacgaacctgagttgctaaagctgcacccatttggatcacttgctgctattcaagatggtgattatactctctatgaatctcgggcaataatcagatactttgcacagaagtataaataccaagggacagactcgttggtaaagacaatagaataaaaaagtctagtggaacaatggc

SEQ ID NO: 51716 - DNA, 238 bp, Glycine max
  Clone ID: LIB3109-007-Q1-K1-E1
ttttacccattcattacgaccacaaaaaaatggcacactccgctctttttttaaaaaaaattgtaataacacacattattatttttatttataacaaaaatgctcttttaaatttaacaaaatggccacttatttaatctaatatataaaaaaaaccgtattttctcccccataataattacactttgtctggtaaccccccacaaaaaaacacccaatactcctcctatttggttta

SEQ ID NO: 51717 - DNA, 398 bp, Glycine max
  Clone ID: LIB3109-007-Q1-K1-E2
ggacgaagaatgaaattgaaaagtgaaaagtagagatggaagaagaaaaagcagcggcatactacgacgagctgagccgtaagggcgagggagccgcgaggttcaagcaaggtctcggcttttcctcttccgcgccaaacgacgacgttccaaaaccctcctccttcctctccaaattcgtcaaagcctcctccactgcgccttcaaactctgagaagcaagcgcagcttcaatccatccaccacaagctcaagaaaaagccctcttccgagtctagggtttcgagcagcgatagcgatagaagtagaagacgaagcagagatagatacagggaatcgcggaggcgaagtaggagtagagaaagacatcggcatatggagagagggagacggaggagt

SEQ ID NO: 51718 - DNA, 436 bp, Glycine max
  Clone ID: LIB3109-007-Q1-K1-E3
gttaaagaactgtgaagaagagggtaactgcaaacaaagcaagcaaaacaaaagacgcagtgatggagaggatgaagagggtgcttctgctgcttctggccttcactgttcttctcatgttgccagaagcttctgctacaaagtttactgttggaaacaaccagttttggaaccccaatattaactacactgagtgggctaaaggcaaacatttctaccttggtgactggctctattttgtgtacgataggaaccaagcgagcgtgttggaagtgaacaagacagattatgaaacatgtaactctgatcatccactcacaaattggactacgggagctggaagagacgtggttccattgaatgtaacaaaaacttactacattatcagtggccgagggttctgcttcagcggcatgaagaaagcagttcatgttga

SEQ ID NO: 51719 - DNA, 421 bp, Glycine max
  unsure (1)..(421): unsure at all n locations
  Clone ID: LIB3109-007-Q1-K1-E4
gaacgcagccaagaaaagaaaatcctcacccattttcttcgtagccaaacactctgaaattctcagttatgtcgtggcaagcgtatgtggatgatcacctactgtgtgaaatcgaaggtaaccacctcactcacgccgctatcatcggccaagacggaagcgtttgggctcagagcaccaacttccctcagttcaaacctgaggaaataactgccatcaataatgactttaatgagcctggatcacttgctccaactggattgtatatcggtggcaccaaatacatggtcatccanggtgagcctggtgctgtcattcgagggaagaaaggtcctggtggtgttactgtgaagaagaccggtgcggccttgatcattggcatttatgatgaaccaatgactccaggtcaatgcaacatggg

SEQ ID NO: 51720 - DNA, 356 bp, Glycine max
  unsure (1)..(356): unsure at all n locations
  Clone ID: LIB3109-007-Q1-K1-E5
gttttgtggaggtgttcatcanaaaatagcttctgggttgtttgagcctttcgtttctcatctcaaattcctcaaagatgagatctccaaaggtggatactcaattaagcttctgcctcccaacaacggtgccttctggttcaccagagccacgtttgagagatttgtgcgctttgtcagcacacccgctattctggagaggtttgctagccttgaaaatgaaattcttcagatcgaaagttcttttcaagctaatgctctatcgatgtccattgcaactccagatgaaggatccgtaccacaagccaatggcatcacaaagaggttaagtgattctacaaagttaaatgatgtac

SEQ ID NO: 51721 - DNA, 370 bp, Glycine max
  Clone ID: LIB3109-007-Q1-K1-E6
ggcatgtccaaaggaacaaaaatattattaagatgatcaacattattggaacacttgttctactctttgcatttctcttactcagttgtgtgtatgcacaagacacaacaacccttgtgcctgcaatcataacttttggtgattctgctgtggatgtagggaacaatgactatcttcccacccttttcaaggctgattaccctacttatgggagggactttgttaaccaccaacctactgggaagatgtgcaatggcaaattacctactgatatcactgatgacacattgagtttcaagacctatgctccagcatatcttatgccacatgcatcacggaaaaacctacttattggagcatactttgcttc

SEQ ID NO: 51722 - DNA, 424 bp, Glycine max
  Clone ID: LIB3109-007-Q1-K1-E7
ggggccataggatcactgatcaacaccactattcggtacccccttgacacctgcaagaccaagtaccaagctgaggcacgttcctcacgtcgaacaaaatacaggaatctcactgatgtattattggaggcaatatctaaccgtcaggtgctttcactttaccagggccttggaacaaagaatcttcaatccttcatttcacaatttgtctacttctacggatacaggtattttaaaagactgtatctagaaaaaagtggttataaatccattggaacaaaagcaaacttggttattgctgctgctgctggggcttgcacagccattgcgactcaacctctggatacagactcttcaaggatgcagacaagtgaatttggaaagtctaaagggctactgaagacccttacagaaggaaactgga

SEQ ID NO: 51723 - DNA, 422 bp, Glycine max
  Clone ID: LIB3109-007-Q1-K1-E8
ggttctagtgtgtgattgtttgttgttgtaactcgctcttcttcttttgttgttctgtgtttgtgtttgttttttctctcacctgaaaatgtcttgctgcggtggtaactgtggttgcggaagctcctgcaagtgcggcaacggctgcggaggctgcaagatgtacccagacttgagctacactgagtcaaccaccaccgagaccttggtcatgggagtggcacctgttaaggctcaatttgagggtgctgaaatgggtgtgcccgctgagaacgatggctgcaaatgtggaccaaactgctcctgcaacccctgcacttgcaagtgaggtgttgggagagcaagcttcaagcagagatagcccttaattaggaataatgataaactattaatgtgtagctaaaaacttatgtattatgtct

SEQ ID NO: 51724 - DNA, 430 bp, Glycine max
  Clone ID: LIB3109-007-Q1-K1-F1
ggagattggtgcaattattttaaaatgcacatgtgcgactaactccctttcttctatttattgccttcgcagacacaaaaatcgccatcggaaaccaacaatgcctcctttgactttgtggctggtgctgccttttctcgtgttgctagcggcggcaacaacgtctccaacacgcgccacgacggtcgcctcgtcgttccacggtcaacgagagtttgactatttcgctttcgcgttgcaatggcccggtacttactgcaaacgcacccgcagttgctgccccaccaacggttgctgcagaggctccaattttccaacagtgttcaccatacatggactctggcctgactataatgatggaacctggccgtcctgttgctctggatctagtttcgatccaaaagagatattgacattgactaatagttta

SEQ ID NO: 51725 - DNA, 433 bp, Glycine max
  Clone ID: LIB3109-007-Q1-K1-F2
gaacgaaacaaagtggacgaatcacaaccaaaaaacaaagaaacagaggcagagatatatgattatgaatttctcaacagaaccctctgcctcacgcttaccattctgatctccacttcttcgctgtgcgacgaagtgaaatttcgttgctgcaaatagtgagaatttgctgtctttggtcagagttgctccgagtgatcgcttcccctggtgcgacgaagtgaaatttcgttgctgcaaatagtgagaatttgctgtctttggtcagagtggctccgagtgatcgcttcccctggtgcgacgaagtgaaatttcgttgctgcaaatagtgagaatttgctgtctttggtcagagtggctcacagtgatcgcttcccctggttccccgtcttctcatatgagttcgtctgtcttaacatctcaaggaatattt

SEQ ID NO: 51726 - DNA, 431 bp, Glycine max
  Clone ID: LIB3109-007-Q1-K1-F3
ggaagaatgaggttgtcaatggcagggtttcgaagctcattgcccttttctgcactaatgagacaggttgagcaagagatggaaactgtgatcaaggtgctgcagcctggacccttgggaattatagaacacaagttttccgctgacgaaattcgcaaggctaatgctacggtttctaaagcagtggccaattggcgaaccaatgcaatcctccaagatagcaatcacgttttaaaagattatattcacaacaagtgaagcaaattttagtttcaccccccgaattttgacccaaggttacttcaattttcctttggtttgtgtgtgtgcgcgcctatttgtttaaatgtattatcgttattgagatgtttcagtgttgtaaatgctggttacttgattataaagttgtatagaatgattcaataatatct

SEQ ID NO: 51727 - DNA, 426 bp, Glycine max
  Clone ID: LIB3109-007-Q1-K1-F4
ggcagggcagaggagaaggccttgtgattcatcatgacgaatgaacccaacaacaagtacgatgtttttctgtgtttagttggcccagatacccgctacaccttcgctggtaatctctataatgctttgcgccgcaacagaatcaatacctttttcacagaagataatcatcatgatgagctactactcatgaatggcgaccaaatttcaccctttgctctaagagcaattaaagaatcaaacttgttaattgttgttctctctccaaactacgcatcatccccaaggaatcttgatgaatttgtggccatcgttcggtgtataaagaggaagaagcaactgctgctttccgtcttttacaaagtggaacgaggggaaataatggatgcaatatttagtggacctgatcaacaagcgctctgtgta

SEQ ID NO: 51728 - DNA, 413 bp, Glycine max
  Clone ID: LIB3109-007-Q1-K1-F5
ggtggtagtgtggcagcgacacgtatcaacttcaataatcgcatcgcagaagcagtttccggtgcatctcatcgtctccgaaaatgaacgacgcagatgtctcgaagcaaatccagcagatggtgcggttcatccgccaggaagctgaggaaaaggccaacgagatctctgtctccgccgaagaggaattcaatatcgagaagctgcagttggtcgaagccgacaagaagaagatcaggcaagaatacgaacgcaaagagcgccaagttgaaattcgcaagaagattgagtactcaatgcagctgaatgcttctcggattaaagttcttcaagctcaagatgacgtgatcagttccatgaaagaagctgcatgcaaggaacttttgactgtgagtcatcatcatgatgatcat

SEQ ID NO: 51729 - DNA, 413 bp, Glycine max
  Clone ID: LIB3109-007-Q1-K1-F6
ggagcaagagtgaagagcgaaaagaatggctcccgagggttgaatctttgtggctgtgttatgcttataagcactgtcactgagtcgctgtcttgcggaggataatggacttgttatgaacttctacaaggaatcatgccctcaggctgaagacatcatcaaagaacaagtcaagcttctctacaagcgccacaagaacactgctttctcctggctcacaaacatcttccatgactgcgctgttcagagttgagatgcttcactgctgctggactccacaagaaggagcttgtctgagaaggaaacagatagatgctgtgggttgagaaatttcaagttcattgagaccatcaaagaagctttggaaagggaatgcccacgagttgtttgctgcgctgatatcctcgatctct

SEQ ID NO: 51730 - DNA, 412 bp, Glycine max
  unsure (1)..(412): unsure at all n locations
  Clone ID: LIB3109-007-Q1-K1-F7
ggaacaagaaggacagggagctcttctgcttggtggaggacttctttgaaaatagcctccagacattggaattctgcaatgctcttgataaatgcttgaatcgagcacgcgaaaggcatgttatagttaagtctgcaattacctgttttgaggaagaggtgcaaaatggggttgaagggtccacttatttgaagacattgcaagagcttaagggtttcaaggaagccggggaccccttcaccgaagagttttattcctttgttcagtcagtttatcaacagcaggcatcaatgctgaagaaattgcaaatcagaaagcaaaagcttgataagaaactgaaatccctgaaaacattgaaaaaggtgtcaaatgccattttcngggctgcttttgtgtctggtttgattttctc

SEQ ID NO: 51731 - DNA, 430 bp, Glycine max
  Clone ID: LIB3109-007-Q1-K1-F8
gatgcatgtcatggcattggcaacatcaaggaacgggtccacgcccactcccactcccactcccactcccacggacactcccactcccacatcgaagatggagaagatactgacgttcgacacgtcgtcgtttctcaggtgttggagcttgggattgtatcacattctgttataattgggttgtccttaggagtttcgcaaagtccttgtaccataaggccattaattgcggcgttatcttttcatcagttttttgaagggtttgcgcttggaggttgcatttcccaagcgcagtttaaagcctcgtcagcaactataatggcttgtttttttgcactgactacacccttgggtgttgggattggaatggctatctcttcggggtataacccttacagccccggtgcactcatcgccgaaggtatcttgg

SEQ ID NO: 51732 - DNA, 353 bp, Glycine max
  Clone ID: LIB3109-007-Q1-K1-G1
gaaggacactggaactgtgtatgcattgaaaatcatggacaagggatttattaccaaaaaaaataaaacagcttatgtgaaattggaacgcattgtgctaaatcaattggatcgtccaggcattgtgcggttatatttcacatttcaagactcattttctctatacatggctcttgaattctgtgaaggtggagaacttttgatcaaataaccacgaaagggcgtctatcaagggatgaagcacgattctatgcagctgaaattgttgatgctctcgaatacatacataatttgggagtcatacatcgggatattaagccagaaaacttattacttacagattgaggacatat

SEQ ID NO: 51733 - DNA, 385 bp, Glycine max
  Clone ID: LIB3109-007-Q1-K1-G2
gaaggacactggaactgtgtatgcattgaaaatcggggacaagggatttattaccaaagagaataaaacagcttatgtgaagttggaacgcattgtgctagatcaattggatcgtacaggcattgtgcggttatatttcacatttcaagactcattttctctatacatggctcttgaatcctgtgaaggtggagaacttttgatcaaataaccaggaaaggtcgtctatcacgggatgaggcacgattctatgcagctgaagttgttgatgctctcgaatacatacataatttgggagtcatacatcgtgatattaagccagagaacttattacttacagctgaaggacatattaaaatagccgattttgggagtgtgaagccta

SEQ ID NO: 51734 - DNA, 423 bp, Glycine max
  unsure (1)..(423): unsure at all n locations
  Clone ID: LIB3109-007-Q1-K1-G3
gaaggacactggaactgtgtatgcattgaaaatcggtgacaaagaatttattaccaaagagaataaaacagcttatgtgaagttggaacgcattgtgctagatcaattggatcgtccaggcattgtgcggttatatttcacatttcaagactcattttctctatacatggctcttgaatcctgtgaaggtggagaacttttgatcaaataaccaggaaaggtcgtctatcaggggatgaggcacgattctatgcagctgaagttgttgatgctctcgaatacatacataatttgggagtcatacatcgtgatattaagccagaaaacttattacttacagctgaaggacatattaaaatagccgattttgggagtgtgaaacctatgcangatagccaaataactgttctttcaaatgcagca

SEQ ID NO: 51735 - DNA, 440 bp, Glycine max
  Clone ID: LIB3109-007-Q1-K1-G4
ggggaattgggagtttcattttcattaatttttatttctccccgtttctcaatgcttttcttaatgttgaatccttcacaaatcgtcaagagttagcccacccagaacaacaacgcgtttcagctggccacacacattcttaatttttttggctggcctatagtaaaaactcatatcaatgtcctcaagaacgttgaggagaagactccatcatggggatgttgatggcaaaaggcaggagcatttggagacttcgggattagattcgttgagtgagcccttgctggcagatgatgattatattgagaataagaagatatgtactcttgaagatctatgggatgatgagaggaagaaggcccaggttcattggacattcatattctcaaacctcattgcacaatgggcacagcggttagcaaatgttgtactaagatctg

SEQ ID NO: 51736 - DNA, 416 bp, Glycine max
  Clone ID: LIB3109-007-Q1-K1-G5
atagatcaggtggaacagaaaccactgggtaaccggtatgttaaccgtgccccgtttgctggaaatggagttcaagtctcacctgttactccatctgctgatgttactgcttacttcagctctgagcattcgaacagctcgattgattattctgacctcggatggggtgaacaagtgcccaagacacccgagatctcatccatgctttctgctgctcctttggacggtgaatctcagtttgtgcagggtgctgctgatcagaatcagaagaagaacaacctgctggatatggcatctgtgcaagatgattctgcaaaaactctttctgaggagcttgcagacattgaataccagctgaagttctttgagaccccttcttttcttgatgaaacctggactgatgctgcattggcgtc

SEQ ID NO: 51737 - DNA, 425 bp, Glycine max
  Clone ID: LIB3109-007-Q1-K1-G6
ggccctaattcaggacattaaaccatagctagcgtgtccttgcgaaaaatgaccataagcttacagtttaagggctttgtgaggatatgatctatggcacttgtgtcacagcttccaagtcactgattttcagagcgttagtgttgcagaagccattaaattttcaagtaaaattctcctccaagtgttttcctacgaagataagaatggaaagtaatcttaatcatagcatagagggcaacaataaagcgtctaggggtgccttggttgtcctagaaggcttggatcgttctgggaagtcttctcagtgtagcagactagtgtccttcttggagggacaagggatctctgctgaattatggagatttcccgacagaactacaaatgttgggcaaatgatatctgcctatctaactaacacatct

SEQ ID NO: 51738 - DNA, 247 bp, Glycine max
  Clone ID: LIB3109-007-Q1-K1-G7
gccgacccacgcgttcgacaagaccacagaaacggaatgacactggaactgtgtatacattgaaaatcggcgacccgggagtttttaccaaacacaataaaacagcttatgtgaacttggaacgcattgtgctatatcaattgaatcgaccattcattttaccgttatatttcacatttcaagactcattttctctatacatggctcttgaatcctgtgaaggtggaaaactttagatcaaataacc

SEQ ID NO: 51739 - DNA, 433 bp, Glycine max
  Clone ID: LIB3109-007-Q1-K1-H1
ggtgacaaatggagggtccttagttctgtttctctgtcttctctctgttctctcaaccaagttctcaattcaatcttcttcacccttttgatctgctaattctcaaggcacagaaacgattctatgacagatgttgttacttgttattgtttgataaggtattcaaaattgggaggttttcgtttgaattgtgatgtccaagccactgctaggcataggggaggaggaaggtcaaagcaatgtcactttgttggtttcttcctcagtcatcatggaaagtgtgtgcctgaatagctcaaaattgaaagagcgcaactacatggggttatctgattgttcatctgtggacagctccgcgccgtccttctcagatgagactaaaagcaatctgaaccttaaagctactgagctgagactggggcttccgggattg

SEQ ID NO: 51740 - DNA, 257 bp, Glycine max
  Clone ID: LIB3109-007-Q1-K1-H10
atttcattattcattaaggggttgcaagcaccaactggaataacactggcttaagtaatggcagtataaatcacatgttggtaaaatgaaagatgcctttctaccaacacgttataatggccacttcatgccaacatggcaatgggttacttaaaccatatatcaatcaacacagaagcgacttaaccaaaatgtttttaccatcatttatagaaaattatgaatttcatgccacccggattaattgcattgctttt

SEQ ID NO: 51741 - DNA, 427 bp, Glycine max
  Clone ID: LIB3109-007-Q1-K1-H2
gatagaaacaaagtgctttgctactaagcaaacgggaacaatatgggtaatcacagtaccaacatctccctgtttgcttattgatttgcttcttccgatcccatcacgaagtgcaaatagcaattccgctactcacaaaaaaccttttcctattccctttctctttcctgaacccaacacaacaacacaacacaggataaataaattaaattaaaaactagctaaattcctctctctctctctttctcttcgagggtttgggtttctcttcctcccttggagaaaaagaagagccaccgctgcgacgccgttcgtgcatttttgaagtgccgctgtcatgtttgggcgtggtggaccaaggaagagtgataactccaaatattatgatattctcgggatttgcaaaaatgccagtgaagatgaaatc

SEQ ID NO: 51742 - DNA, 431 bp, Glycine max
  Clone ID: LIB3109-007-Q1-K1-H6
atcactgaaagcgaagatggcatgattagtttggcgctgatttgctcgtttaatcgaatgcgaaagcaccttaatttgggtgatgtaaagcccgaagaagtggcccaagataccgtgaatgctgttgctcaaactttgagaaattcagctacactcaaggtctccgaagatgggaaaaaagttggcaggaaaactgaacttccaaagctagaagaggttgagcaggtggagataagaacacttgctgtatcgccatttgaacatgatctgaagcttgaagatgtggagaaactctttggtcaatatgccaaggttaatagtgtccggcttccccatcatgttggagacaaaaagttcttctgtggcactgctcttgtagaattttcttcagaggaagatgtagaaaaggtcatgaaggaaaaattggtata

SEQ ID NO: 51743 - DNA, 93 bp, Glycine max
  Clone ID: LIB3109-007-Q1-K1-H7
tttcttacctgctacaattctaggaacatgaaaatgccattcgcacgatatgttccctcttctaatgaacactggctatcaaacccgtactcc

SEQ ID NO: 51744 - DNA, 437 bp, Glycine max
  Clone ID: LIB3109-007-Q1-K1-H8
gagaaagagcgtgagaagaatgttgaggaagcaagggaggctctgcagtttcttgagaatgagataaaggacaagaagttctttggaggagaggagattgggttggtagatattgctgctgtctacatagcattttgggtccctatggttcaagaaattgcagggttggagttattcacaagtgagaaatttcctaagctccacaattggagccaagaatttttgaaccatccaattgtcaaagaaagtctgccccctagaggtcctgttttctcctttttcaagggtctctatgaaagcctttttggttcaaaatagatttgatgatgtggtgtgagacttagtatttctaagaattatgtgtttgttaaaggcttctatgaaagcctcactgcttcaaaatagattcatgtatgtgagactcagaatctctgggg

SEQ ID NO: 51745 - DNA, 320 bp, Glycine max
  Clone ID: LIB3109-009-Q1-K1-A1
ggagggtggagagagagagaagtgagagtgtgagagggagcacagtgaagaagagaacgaaggaacgaagatggagactcctcctccgcaacaaggcgtggtgaagaagaaggagacaaggggccgaaaacccaagccgaaagacgaacacgccaaggcgttgaaggaagggagaaaaacacagcaacaacaacatgatcagcagcaacaacaacaacagcaacatcaaccttcggtggacgagaaatacacgcagtggaagtcccttggtcctggcctctacgactggctcggtaaccacaaccttgtctggccctctc

SEQ ID NO: 51746 - DNA, 349 bp, Glycine max
  unsure (1)..(349): unsure at all n locations
  Clone ID: LIB3109-009-Q1-K1-A10
ggtgggcaaatttagttaaagacttcattcccaatggtgttgatggtatatggaatgatatgaacgaaccagctatctttaaggttctaacaaaaacaatgcctgagagcaatgttcatagaggagatactgaacttggaggttgtcagaatcattttttctatcataatgtctatggtctactgatggcaagatcaacttatgaaggcatgaaactagctaatgaaaagaagcgtccttttgttcttacgagagctggattttctggcagccaaaggtatgctgcaacatggactggagataatctttctacatgggagcatcttcacatgagtatctncatggtact

SEQ ID NO: 51747 - DNA, 298 bp, Glycine max
  Clone ID: LIB3109-009-Q1-K1-A12
ggttctagtgtgtgattgtttgttgttgtaactcgttcttcttcttttgttgttctgtgtttgtgtttgttttttctctcacctgaaaatgtcttgctgcggtggtaactgtggttgcggaagctcctgcaagtgcggcaacggctgcggaggctgcaagatgtacccagacttgagctacactgagtcaaccaccaccgagaccttggtcatgggagtggcacctgttaaggctcaatttgagggtgctgaaatgggtgtgcccgctgagaacgatggctgcaaatgtggaccaaac

SEQ ID NO: 51748 - DNA, 382 bp, Glycine max
  Clone ID: LIB3109-009-Q1-K1-A2
gacacaaaaggagcatcgagtaggtttcctactcccttctcatcgttggcaagatgagtgccatgaaattttgccgtgaatgcaataacattctgtaccctaaggaagacagagaccagaaagttcttctcttcgcttgccgcaactgcgaccatcaggaggttgctgataacttctgtgtgtataggaatgagatacatcactctgttggagagcgcactcaggtgttgcaagatgtcgctgcagatccaacgcttactcgaaccaagtctgttcgctgcagtcaatgcaatcatggtgaagctggctttttccaggcaactgccagaggggaagaaggaatgacactttttttcggttgctgcaacccaaactgtggaca

SEQ ID NO: 51749 - DNA, 342 bp, Glycine max
  Clone ID: LIB3109-009-Q1-K1-A3
gggtatcatgtgaatgacacacacatttggtgtgggaatttagggactgataacgggaaggacgtgtttggttctgcttgtgagaacccttcacagtatataagttgggacagtgttcattatgctgaggctgcaaaccattgggttgcaaatcgtatactcaatggctcttacactgacccaccgacacccatcacccaagcatgttacaggcattaagcatcatagtcagaaaatcatttctgattggacattaattcctaaaggaacttatatatcagaaattgtaatattgcttgagacttttatttattcctgtgctagatgagaaccactagtttg

SEQ ID NO: 51750 - DNA, 343 bp, Glycine max
  Clone ID: LIB3109-009-Q1-K1-A4
gtcaacaacagcagtccaagaaatttggatcatgatggaagaattgacaatgaaagttctgggacaagtacttcattacaacaaaatgctaccagtcatcaaaaaagtttccaagtggttctttactacctgataattgtctttttcccaaaaagattgttactgatggggacagggattatctacaaacaaagtattcttcagacaggaatcacagtggtccgttgcaatatcggcagaagagagacaccaacaaccttccattggttgatgacacatcggatggagcatttgtccagtttaaggggcggtttaaggtcacgccggcagatcttatccaatg

SEQ ID NO: 51751 - DNA, 208 bp, Glycine max
  unsure (1)..(208): unsure at all n locations
  Clone ID: LIB3109-009-Q1-K1-A5
ggagggtggagagagagagaagtgagagtgtgagagggagcacagtgaagaagagaacgaaggaacgaagatggagactcctncttcgcacaaggcgtggtgaagaagaaggagacagggggccgaaaacccaagccgaaagacaaacacgccaaggcgttgaaggaaggaggaaaaccacagcaacaacaacatgatcaggaacaac

SEQ ID NO: 51752 - DNA, 364 bp, Glycine max
  Clone ID: LIB3109-009-Q1-K1-A6
ggaagaagaagaaggttggttgattggtcccattgattccgaagagaaaagaaaagatgtttgagccacaacagctatacactcgcgcgaagaccgaggaattcgacctcgaatcaggagaaaccctctacccagggctgagcgtcggcgagaaccagctccgatggggtttcatgcgcaaggtctacggcatcctctacgtgcaaatcgtccttaccacccttgtctgcgtcaacaccggtttctatactccaatcaatgaccttcttaagggcaattccagccttctacttatactgctcttacttgccttcatccttttgaatcccctggtgaagtaccagcagaagcattctcataatta

SEQ ID NO: 51753 - DNA, 245 bp, Glycine max
  Clone ID: LIB3109-009-Q1-K1-A7
gagggtggtgagtagtgaccaaagcaaacgcactcactctattattgaagggaagatgaaagatgaagatggcacaccccaaagtgcacgtaaaggacagtacaagttgtgggtgttgggtgctatcattcttcttgctctttggtccatgttcactgcttctcttactctcaaatggtcagctgtgaactctaaccgtgacttcgattctgccactctcaacgatttccatgtcctggaagtgg

SEQ ID NO: 51754 - DNA, 366 bp, Glycine max
  Clone ID: LIB3109-009-Q1-K1-A8
tgcataatgggtcaacaacagcagtccaagaaatttggatcatgatggaagaattgacaatgaaagttctgggacaagtacttcattacaacaaaatgctaccagtcatcaaaaaagtttccaagtggttctttactacctgataattttctttttcccaaaaagattgttactgatggggacagggattatctacaaacaaagtattcttcagacaggaatcacagtggtccggtgcaatatcggcagaagagagacaccaacaacctttcattggttgatgacacatcggatggagcatttgtccaggttaaggggccggttaaggtcacgccggcagatcttaatccaaagggttctttaaac

SEQ ID NO: 51755 - DNA, 311 bp, Glycine max
  Clone ID: LIB3109-009-Q1-K1-A9
ggcggcagagagtggttgtaagaaaaggaaatgaataagaaggaaataatggtgatggttccgtatccggcacatggacacgttagtgccatgcaaaagctaggctgggaatttgtgaggcacttgttcgaggctgtgattgtgatccccaaatttattcacaggcagatagcagagcttcagaaaaatgatgagaatgagatgataaagtgggtggctctgccagatcatgaagaagaagaaggaagcaacccaccagaagatttcttcgccatagaatcggccatggagaacagcagcatcacaactca

SEQ ID NO: 51756 - DNA, 298 bp, Glycine max
  Clone ID: LIB3109-009-Q1-K1-B1
ggttctagtgtgtgattgtttgttgttgtaactcgttcttcttcttttgttgttctgtgtttgtgtttgttttttctctcacctgaaaatgtcttgctgcggtggtaactgtggttgcggaagctcctgcaagtgcggcaacggctgcagaggctgcaagatgtacccagacttgagctacactgagtcaaccaccaccgagaccttggtcatgggagtggtacctgttaaggctcaatttgagggtgctgaaatgggtgtgcccgctgagaacgatggctgcaaatgtggaccaaac

SEQ ID NO: 51757 - DNA, 323 bp, Glycine max
  Clone ID: LIB3109-009-Q1-K1-B10
gagcgaaacagagagtgatttcagtgagtgatcggtgttcacttgatctcatcataatcgtcagcgtcaattgaagaagatgccgatcagaaacatcgccgtcggaaggcctgaagaggcgactcaccccgacacgttgaaggcggctttggctgagttcatctcaaccttcatcttcgtgttcgccggctcaggctccggcatcgcctacaacaagctcaccgacaacggcgctgccacccctgccggcctcatctccgcctgcatcgcccatgcattcgccctcttcgtcgccgtctccgtcggcgccaacatctccggcg

SEQ ID NO: 51758 - DNA, 380 bp, Glycine max
  Clone ID: LIB3109-009-Q1-K1-B11
gacctaaacagagggtaacaaaacaagcaaacaccatggtgattaagtctgtgttgttcagcttcattttccccccgccaccttctctggtggtttgggggttgactgtgacaagcttcctgatactggctaatgctttcttgtcagaaattagagggaagcatttgaactattcaaagttttggaatgctaatccctctgcagaaaagcaggtcaagttgtctagcaaagctggcatgcttttgctgtacactcctgcttttcttgctggccttgcatccttctgggtctttcctcatcaagggctcagattcaccatccttcaatctgctgttactctgcactacttcaagagggtctttggagttctgtttattcac

SEQ ID NO: 51759 - DNA, 338 bp, Glycine max
  Clone ID: LIB3109-009-Q1-K1-B12
gaagaaaacaagggaagccacatggtgtttgaggttgatcagggtttggatagaaaagatgaggaggcagagaagagttgtgattgttctgtgtgtgatgctagtgtggagatactgcgtgatgaaatttgcaagttggatttgggtgtggagaaaggaaaagaaacaattgacgaggaaagtttgaatgtccctaatcctaaggttgatgatggtgatgatgatgttggtggtgctgatgatgatgatcaagcttgcgagaaattcagtgctcaagttgattgcactagagagataactgtggagactttcaccatacatgttgaatttttcattca

SEQ ID NO: 51760 - DNA, 240 bp, Glycine max
  Clone ID: LIB3109-009-Q1-K1-B2
ggaaacaaacgaggtttgatttcatgtctggttgttccaatgaggaggaggagatttcgttctcagaatccgatcgtcacggttacgaaggaggcagtgacgatgacgattccgaaatcggaaagaatgaacatcgcagcagcagaagaagaagaatgggtagtggttttggaaaggtggtggtgcaccaattcacgaaagcgaagaagcaagtgcgcaggatcagtagcagaaagagtc

SEQ ID NO: 51761 - DNA, 374 bp, Glycine max
  Clone ID: LIB3109-009-Q1-K1-B3
gaagaggaagctcagaaagaggctagccagaggtataatggaaagcagtttcatttaagccaggatcctgacgttcttgatacatggttttcttctggtctgttcccattatctgtgctgggatggcctgatgacacagaggacctgaagacattctatccaacttctgttctggaaactggccatgatatcctctttttctgggttgcccgaatggtgatgcaaggattgaagttgggtggtgatgtgccttttacgaagatttatttgcatcctatggttcgtgatgcacatggacgcaagatgttcaaagtcttatggaatgttattgatcccattgaagtgataaatgggatatcacttgaaagtctaca

SEQ ID NO: 51762 - DNA, 410 bp, Glycine max
  Clone ID: LIB3109-009-Q1-K1-B4
ggggaattgggagtttcattttcattaatttttatttctccccttttctcaatgcttttcttaatgttgaatccttcacaaatcgtcaagagttagcccacccagaacaacaacgcgtttcagctggccacacacattcttaatttttttggctggcctatagtaaaaactcatatcaatgtcctcaagaacgttgaggagaagactccatcatggggatgttgatggcaaaaggcaggagcatttggagacttcgggattagattcgttgagtgagcccttgctggcagatgatgattatattgagaataagaagatatgtactcttgaagatctatgggatgatgagaggaagaaggcccagtttcattggacattcatattctcaaacctcattgcacaatgggcac

SEQ ID NO: 51763 - DNA, 369 bp, Glycine max
  unsure (1)..(369): unsure at all n locations
  Clone ID: LIB3109-009-Q1-K1-B5
ggacacaactgcgacttagttcatcccttctcaagccaccgaagcctcactttttgaaattacttgcatagatagataatcatggctatgatgaaacgtgctgcttcctctgcgcttcgctctcttattgcctcatcctccaccttcaccagaaaccttcatgtaagcccaatcaaatgttacaaattaattgcatgtttttttttaaaaacattattattttctcaaactcatgatttttgtgtcaattatattaatttaacttaacatttcttctgggatttggtcctgtgaagtttttggtgtactttctctctcttgcatgctngatccatcatgatcacgggatgccaaagnttctctctcttt

SEQ ID NO: 51764 - DNA, 330 bp, Glycine max
  Clone ID: LIB3109-009-Q1-K1-B6
gaaagaacttgtatctgagcctttaattagtcgttatggtaacgatgaaggtattcctgaactcagagcagcattagtcaaaaagttgcgtgatgaaaataatttgcacaaatcttcagtaatggttacatcaagtgccaatcaggcatttgtgaatctagttcttactctctgtgatccgggtgattccgtggttatgtttgctccttactacttcaatgcctacatgtccttccagatgactggcgttaccaatattctagttggtcctggtagctcaggcacactccatcctgatgcagattggttggaaagaatattatcagaaac

SEQ ID NO: 51765 - DNA, 333 bp, Glycine max
  unsure (1)..(333): unsure at all n locations
  Clone ID: LIB3109-009-Q1-K1-B7
ggtaggaaaacatggtaagttcgcagatgttaagaatgtgcgagtgacatgcacacacacatgttctttgtttgattgaggcttctgaacagtttctgacaccgaaattcagccacaaagttgaccatcttgggatggatgagaatatcatcatgttccaccatttccccacattgatacaacaaggagattccaacaattgaaaactccttatcatctntctcttgcaacatcgtttcgcggttcctttgccgtgatttcaatngtgcatangaaacatcactcactacttcttttctctnctttttcattcaatttctctgattgacacaa

SEQ ID NO: 51766 - DNA, 400 bp, Glycine max
  Clone ID: LIB3109-009-Q1-K1-B8
ggagaaaaaagattgtttgttgctgtgttgtgtgcatagagggggagagagagtgtggaggctgctatggggaacagagctatgttaacgctgctactcttcttcttctcgaccaaattgtttccttccgctctggctatctggctgtcgttacccaccactggcaccaagtgcgtctctgaagaaatccaacacaacattgtcgttttggccgattacgtcgttatccccagtgatcacacccacaaccccaccatcgccgtcaaggtgacatcaccatatggaaacaatcttcatcacaaggagaacacaacacatggtaatattgcatttacgactcaagaggctgggaactaccttgcatgcttctgggtgggtagccatagtcaaggagttggtg

SEQ ID NO: 51767 - DNA, 376 bp, Glycine max
  Clone ID: LIB3109-009-Q1-K1-B9
gatggtggtaataataaaggtgaaggtgaagtcagttcaggaaagcctgcggagcaaagcgctaagccagcttcggagcctccgaagcaagactacattcacgttcgagccaggaggggtcaagccactgatagtcacagtcttgcagaacgagtaattttttgtttttattgtacttgagagggttgtgtttggaaaaatgaagtgaaaatgtgatgttattgtgagtttaccttttctgagttaaaggggtaattttgaggttattgatttgtttggattaaagttgttgactgtgattgatttctgattgggatgtttgtggatgctggacaggctcgaaaggaaaagattagtgaaaggatgaaaattcttc

SEQ ID NO: 51768 - DNA, 400 bp, Glycine max
  Clone ID: LIB3109-009-Q1-K1-C1
gacagtgagtgtgggaggagagtcacaactcacaactaccagtccttgctttgcatcgtgtgagtttgggagaggaaggaagctactcggaaagtgattccttcctcggcgaaaaaaaaccaaaccattcctttataaccataaagtgccttcttttttcttcaccaccactccattactctcttcacactccacacacacacatacacacctctaccttgtgtttgagattgaggaatatcagaaaatgaaaatgggtaaagggatgatttttattgctgctctggtggtcatttgcctcggtgggaaatgggtggaagcgcaggtgcaccatgtggtcggagcagaccgtggttgggatcaaacctcagacctcgattcctgggctgcaggcacggtc

SEQ ID NO: 51769 - DNA, 390 bp, Glycine max
  Clone ID: LIB3109-009-Q1-K1-C11
ggagagagagagagagaaagttttgagtgacacatcttttctcctcctcacacagcaggaacacaatggattcttcttcatcagcaagtgttagtcagcatgccaaggttgttccaaaacaatttgacatcttcttccatgcaggaaggtacccttcatctcgcaggactcattcctcttcctcctcttcctcctttgaatcattctatttcccagaggatcctcttcttagtcctgcatcccctcttagattctctggtgttccattttcttgggaacacttgcctggaattcccaagaaacaaaattctaaaaagaagctgcaagagtcttccttgaaactactaccatttgccccttcaactaccacacactgttcttctaaaaagc

SEQ ID NO: 51770 - DNA, 357 bp, Glycine max
  Clone ID: LIB3109-009-Q1-K1-C12
gggggaaaagcgtagtcatcagtttgccgatagaagtagaaaatggaatcttgatcgtattatctttgttgctcatccattactccttctgcagtagaataatatataaagagagaagagtgcaatctagaaccacatagttattttactgtgtgagtgagagagagaaaattaacatgggaagaggaagggttgttctggagagaatagagaacaagatcaaccgtcaagtaacattctcaaaacgcagaagtgggttgctgaagaaggcctttgagctttctgtgctatgtgacgctgaagttgcccttatcatcttttctagccgtggcaagctttttcagtacagcagcactg

SEQ ID NO: 51771 - DNA, 360 bp, Glycine max
  Clone ID: LIB3109-009-Q1-K1-C2
gtagtgaaaggcaccaaaatccaaccacatcaatagccatgaaaaccacactctcactctctcctttacttctcttcctactcttctccctagtccaaggactcacccccaaatgtgacacccaagaccatggctcaacccttgaagttttccatgtgttcagcccatgttccccatttaggccatcaaagccactctcatgggcagagagtgtcctccagctgcaggccaaggaccaagccaagctacagttcctggctagcatggtggctgggaagtcaattgtgcccattgcctcaggaaggcaaattattcaaagcccaacttacattgtgagggccaaaatagggaccccaccac

SEQ ID NO: 51772 - DNA, 325 bp, Glycine max
  Clone ID: LIB3109-009-Q1-K1-C3
tgggatcacacgatggcatatttaaaggaactgccagaaagtaattggctttgttgcaatgattgcacaagaatacactctactttggagaatcttttggttaaggtggctgagagactccctgaatctatcttgggtgttataaagaagaagcaagaggatgaaggattagaaccgatcattgatgtaagatggaggcttcttaatggcaacattgcttatcctgaaactagaccattgcttctggaggctgcttgaatctttgatgaatgctttaatcctatagtcgatgcaactagtggacgtgaccttattccagccatgg

SEQ ID NO: 51773 - DNA, 390 bp, Glycine max
  Clone ID: LIB3109-009-Q1-K1-C4
ggaggaggatgaagaagaggaggaggggttgaaggaagaggtggatgcaaatggggacgtgaagatgggtgagattgatgaggggcaggttcaggagttggaggagcaccgcattgagttgagtctcgggcaagataataatgttgagagggttgaagttgagaaggagcagggtggagaggagcagatgatggatgtgggttttgagcagtctaaggaggaggatatgcctggaatgtggcttttggatcagaagaactgtgtgggggagccatttttgcggccttgtcatggtggtgatgtgaagggtgtggaagttgaacaagtgagagaggacgatggagaaagtgtgcatgaacaagaggaggtggaggaagatgaagaagagga

SEQ ID NO: 51774 - DNA, 398 bp, Glycine max
  unsure (1)..(398): unsure at all n locations
  Clone ID: LIB3109-009-Q1-K1-C5
ggtcgtcgcaggcgcagagtagagcagcacagaagagggaaaacggcaccgccgccgtagaagaaaacaaccatggtgcacgtctccttttacaggaactatgggaagacattcaagaagccgcgtcgtccgtacgagaaggagcgtctcgacgcggagttgaagctggttggtgagtacgggcttcggtgcaagagagagctgtggagggtgcagtacgcgctcagccgcatccgcaacaacgcgcggaacctnctcaccctcgacgagaagaacccgcgccggatcttcgagggagaggcgctgctccgaaggatgttccgttacggtctcctcgatgagacacagaacaagcttgattacgtcctcgccctcaccgtcgagaactttctcgagcg

SEQ ID NO: 51775 - DNA, 268 bp, Glycine max
  Clone ID: LIB3109-009-Q1-K1-C6
gacaccaatgtgaatgcattaactagagaccacaaaacagctcttgacattgctgaagaccttgccctcttcgaagaggcatcagatataaaggactgtctttctcgatatggagcacttagagctaacgagctcaaccaaccaagggacgaactgaggaaaactgttactcaaatcaagaaagatggttacacccaacttgaacggaccaagagaaccaacagaaatgttcacaatatttacaaagagctaatgaaactccacaggg

SEQ ID NO: 51776 - DNA, 372 bp, Glycine max
  Clone ID: LIB3109-009-Q1-K1-C7
gatcgtgagaaaagagaaaggaaggaaaaatggagttgttcttctacgcggtgttcggcggtttgggagcggttgttgcagtgacggagctgagcaagagcaacaaggaccgaatcaacacctcttccgcattcaattccttcaagaacaactacctcatcgtctattccctcatgatggctggagattggctacaaggtccatatgtctactacctttacagtacatatggatatgggaagggagacataggacaactcttcattgctggttttgggtcttccatgctctttggaacaattgtcggatctctagctgacaaacaaggccggaagagggcttgtgtgacttactgcataacctacattttga

SEQ ID NO: 51777 - DNA, 396 bp, Glycine max
  Clone ID: LIB3109-009-Q1-K1-C8
gggtgacagagagagagaagttttcagtttcagaaagaaagcaaaagcaatagcaatgggttggatcggtgagactgttgattccatcaaatctcttcagatccgccaggtcctcacccaggctgtgagcctaggcatgattgttacgtctgcactgataatatggaaggcattgatgtgcgttactggcagtgaatctcccgttgttgttgttctttctggaagcatggaacccggattcaagcggggagacatcttggtcttgcacatgagtaaagatcctattcgggcaggggagattgttgtgtttaatgttgatggacgtgagattccaattgttcatcgtgtaattaaggtacatgaaagggaagatactggggaggttgatgttctcac

SEQ ID NO: 51778 - DNA, 329 bp, Glycine max
  Clone ID: LIB3109-009-Q1-K1-C9
cgggtgacagagggcgagaagttgtcagcgtcaggaagatagcattagcgctatccgcgggtcggatcggtgagactgttgatagcatcatatatgttcagatccgacaggtcctcacacaagctgtgcgcctaggcatgattgttacgactgcactgatactatgtatggcattgatgtgcgtatctggcactggatcttacggtgttggcgatctttctagaagcatctagcccatattcaagctgcgagacatgatggtcttgcacatgagtaaagatcctattatgccactagagattgtcgagcataatgtacatcgacgttag

SEQ ID NO: 51779 - DNA, 406 bp, Glycine max
  unsure (1)..(406): unsure at all n locations
  Clone ID: LIB3109-009-Q1-K1-D1
ggtggtggaatagtccaattcggacattgaaaccatcaccagtcaccacctttctcgcatcgcttgttggatttcaaactctgccatttcgattccttcgttcactcgttattttgcatgactattgtagaggctgcagcctggatgattggtggactttaagcttgtgaaagaataattgccgaatggaacttgcaagacctgcctcaagtagaagaaaattgaaagatttattgcttcagagtgataatcgtctttgtgctgattgtaatgctccagatcctaaatgggcgtctgccaacattggagtttttatatgcttaaaatgttgtggtgtgcacagaagccttggtactcatatatcanaggttntgtctgtgacattggatgattgggcagaggatga

SEQ ID NO: 51780 - DNA, 406 bp, Glycine max
  unsure (1)..(406): unsure at all n locations
  Clone ID: LIB3109-009-Q1-K1-D10
ggggaatggcgagagtacgagacagagagcgaaagtgacggtgtgattagcaagtaaagacatggatggtgttaggaactgataaagctaccactctggcttagttagctaagtttggttttggttttggatgagaagaaaagtggaggaatcgacacgagtgagtgagaacaagacagtgcacttgtcatcagtcaacatacacgcatgcattcattcagttatgaggactgaataaaagattcaattttctatgacgtcgatcaaatcattgagatggctgatgagaaaaaagagtggattgtctgatggnggtaaatcaagtttcaagatgaaacagctgccttttcttgcagttttgtgcacattattgttattcattgtgtatagaactacaaagtatcag

SEQ ID NO: 51781 - DNA, 398 bp, Glycine max
  Clone ID: LIB3109-009-Q1-K1-D11
ggagaacaaaacaagtgtttcgaatagattatcctaagtctttgggaatagtgctgcaatggcttcaagtcaggaggaggtgacccttttgggagctactggaagcccatttgtgtgcagggttcatattgccctcaagttgaagggagttcaatacaaatatgtcgaagaaaatttgaggaacaagagtgaactgcttctcaaatccaacccagttcacaagaaggttccagtgtttattcacaatgagaagcccatagcagagtctcttgtgattgttgaatacattgatgagacatggaagaacaaccccatcttgccttctgatccttaccaaagagccttggctcgttctggtccaaaatcattgatgataagggttttggtgctgcatggaa

SEQ ID NO: 51782 - DNA, 356 bp, Glycine max
  Clone ID: LIB3109-009-Q1-K1-D12
gatagtcagcaattctgaattgtcaaattgacccgctaccttttcccgtgtacgaacgaatccaatccaccaaatcggcggcgacgcctccgctctgtctcgaaaccacagatctgcggcggaaccgccgtctccgactatctccgattgatcttccggtaaagtggaccggagatgccggttgccgcttccgccatttacttcctcaacctccgcggcgacgttctcatcaaccgcctctatcgcgacgatgtcgggggaaatatggtggatgcttttaggacgcatattatgcaaacgaagggagctggtacttgcccagtgaggcagattggtggatgctctttcttttacat

SEQ ID NO: 51783 - DNA, 421 bp, Glycine max
  Clone ID: LIB3109-009-Q1-K1-D2
ggagctgaaggcaaaaaggacacaccgtttcatagtttttaagattgaggagcagcatatgcaggtcattgtggagaagcttggtgagcctgaccagggctatgaagatttcactgccagccttcctgctgacgagtgccgttatgctgtttatgattttgagtatctgactgaagggaatgtccctaacagcagaatttttttcattgcgtggtccactgacacatcaagggtgaggagctagatgatttatgcaagctccaaagacagattcaagagggagctggatggaattcaagtagagttgcaagcaactgatcctactgagatgggtcttgatgtgttcaaaagccgtgccgactaaaatgattatataaaatactaagctttctggtgggagcagcacccctgaagccttatt

SEQ ID NO: 51784 - DNA, 308 bp, Glycine max
  Clone ID: LIB3109-009-Q1-K1-D3
ggagcgaagagtgaagagaatggctcccaaggggttaacctttctggctgtgttaatatgcgtttcagcactgtcactgagtccttctgttgctggggaagggcaaaataatggccttgttatgaacttgtacagggaatcatgccctcacgctgaagacatcatcacagaacaagtcgagcttctctacaagcgccacaagaacactgcattctgctggctcaggaacatctttcatgactgagctgttcagagttgtgatgcttcactgatgctggactccacatgaaggagcttgtctgagaagg

SEQ ID NO: 51785 - DNA, 398 bp, Glycine max
  unsure (1)..(398): unsure at all n locations
  Clone ID: LIB3109-009-Q1-K1-D5
gatactaaataataataatagatttatgactagacccatgagactcttgctagctatataaatactttcatcttgacatttctaaaaccatagcccactcatatccataaacacaaataagcactggtgaccttggagagaaaaaaaattaagatcaaaatgcctgtgttcatccctaggattgagtacaagactctgggtccgaatacaatcgtcaccgaagatcaaataagggaaatattgagaaaagcagatagtaatggagacggtcgtttgagcaaagaagaacttaagaaagctttcaaagaatttggatccaagatngcccgatggagagcatgtcgtcttctaaagaaagctgacaccaaccacgacggagtactcaccatggaaagaac

SEQ ID NO: 51786 - DNA, 396 bp, Glycine max
  Clone ID: LIB3109-009-Q1-K1-D6
ggatagtgagagtgagagatggatcagctttcggggagggtgttgcctttgcttacaatccttgcttgctttgaagtgctcttctactagcaggattcttacacagcgcagttatttcctgtcataaagttaccgcgggataagtgcaaccttcttacccatcgacacttctggatatccagcaaacgtattgtgaccccacaagggatcatttctggttcagtggagataaatgatcggaaaataatatctgtcgttgatggacatgctattcatgggaagcctaagcaagtagaagtaattgactatggaaatgctgtgatcatgcctggcttgattgatggtcacgtacatcttaatgagcctggaacaactgagttgggaggatttgatact

SEQ ID NO: 51787 - DNA, 396 bp, Glycine max
  Clone ID: LIB3109-009-Q1-K1-D7
ggttgcaacagagagacagaaaaaggactcacaatcacgaaggagaagaaacccaataagtgattctcatttttatggctcttgccctgaagtcaagttgcttcttgcaattgaagaaacctgaggctggtttcaatgattgtttttcatctaagaaagctataatctgcgtgaaacgacacactcccgtggctgctatcaggaccatggaagcagtgggactctctgcaacattcaccaggttgaaaaaagaaggaaaagtagctttcatcccgtatgtcactgctggtgatcctgacctttcaaccacagcagaagcactgaaagtgcttgattcatgtgggtctgacataattgagctaggtgttccatactctgatcctttagcagatggtc

SEQ ID NO: 51788 - DNA, 414 bp, Glycine max
  Clone ID: LIB3109-009-Q1-K1-D8
ggttgcagggtggtggatggtgtaataatattagaacatgtgtttatcgcaagaaaacccggcgtggatcatcagatttcatggaaaaggagataccttttactggaatattaagtaataaggctgaagaaaatccagattttttcaattggaatagagtaaagcttcgttattgtgatggcgcctcatttactggggatagtgaagatgagactgcagaactgcaattcagaggacagcgtatttgggcagctgcaatggaagatttgatgtcaaaaggaatgcgttttgccaatcaggttatagacatatataatgctatttcagtaatctttcatctcatgctatgtacatctcattttgcttcaggctcttttttcgggatgctctgcgggtggcctggctactattatt

SEQ ID NO: 51789 - DNA, 347 bp, Glycine max
  unsure (1)..(347): unsure at all n locations
  Clone ID: LIB3109-009-Q1-K1-D9
gaagattcagagggaagaactgctttgcattttgcctgtggatatggtgaggtgaaatgtgctcaagttctccttgaggctggagcaaaagtggatgctttggataagaataagaacactgctctccattatgcagctggttatggcagaaaggaatgtgtggcccttctccttgaaaatggtgctgcagttactctccagaatatggatggtaaaactccaatagatgttgcgaagctaaacaatcaaaatgaagtcctgaagctacttgagaaagatgcttttctgtaattgcaatgcatgatgccatgctgtcaccaacaagcaaaggggaaactgangggaag

SEQ ID NO: 51790 - DNA, 203 bp, Glycine max
  Clone ID: LIB3109-009-Q1-K1-E10
gttcctaaaattaaagaaacctttaccccattttaaggagggtccaatttttatttagattaaagattttgaatatctatccggatatatatatattttggttttaattaattattattagaaccttcctttttcttaaaaaaaaaaaaagttaattaaaagatttgatataatcgcgatttccattccaatatatatattcc

SEQ ID NO: 51791 - DNA, 380 bp, Glycine max
  unsure (1)..(380): unsure at all n locations
  Clone ID: LIB3109-009-Q1-K1-E11
ggtgggcgaggtagccagagagtgatacaatacagagtgcgttgttgctccttcgccacaactccctgccaacatgggtatctccagagattctatgcacaagaggcgtgccactggtggcaagaagaaggcatggaggaagaagagaaagtatgagcttggtcgccagcctgctaacactaagctgtcaagcaacaagacagtcaggaggatccgggttagaggtggaaatgtgaagtggagggcactgagattggatactggaaattactcctggggaagtgaagctgtaactcgcaagactcgtatactagatgtggtttacaatgcctcanacaacgagcttgtgcgtactcagactcttgtaaaaagtgctattg

SEQ ID NO: 51792 - DNA, 360 bp, Glycine max
  Clone ID: LIB3109-009-Q1-K1-E12
ggagaaaaacgagccaattcatcattttctctcttctctgcttcttcttgttcaaatcttaggagctgaggagaatcaatcgagagaaatatgtctggtatcgctcgtggacgccttgctgaggaacgaaagtcatggcgcaaaaaccatccacacggtttcgttgccaagcccgagactctacctgatggcaccgtaaatttgatggtctggcattgcactattcctggcaagaccgggactgattgggagggtggatatttcccactgacaatgcacttcagtgaagattaccctagcaaggcctccaagtgcaaattccctcaaggtttctttcaccctaatgtgtatccatctgga

SEQ ID NO: 51793 - DNA, 342 bp, Glycine max
  Clone ID: LIB3109-009-Q1-K1-E3
gagaattagatatacatattttatttatttgcttaggatattgtcctaaaacttacttgcttggaccccagtagttgagttgaggaagtgatggaagcagtttacaggttgaaacctcttttggatgtggttagagttgggaacgctaccacttctgagatgcgtcttgactcaacggctaattgttacctgcagctagaagctcctcaacctcaagagaataataatgtaaccgactcatcatcagatatgtcggatcggataatcaagatccagatcgccaatcaccctctttatccagatttactctctgcatatattgaatgccaaaaagttggagca

SEQ ID NO: 51794 - DNA, 340 bp, Glycine max
  Clone ID: LIB3109-009-Q1-K1-E4
gcagaagaaatagcagcattggacaccattgatgggggaaagcttttcagttggtgtaaggctgtggatgttcctgaagcatccaacatcctacgttactatgccggtgctgctgataaaattcatggagatgtgttcaaaacatctcgcaacctccacttgtattctctgatggaacctgttggtgttgttggacacattatcccttggaatttccctaccgtcatgtttttcgccaaagttgccccggccttggctgctggctgcaccgtggtcatcaagccttctgagcaaacacctctgtcatcactcttttatgctcatctttctaagttggctg

SEQ ID NO: 51795 - DNA, 294 bp, Glycine max
  Clone ID: LIB3109-009-Q1-K1-E5
ggagggtgtgaattctaaaaggaaagaacagctgatctggtcagaaaatcaatggcatcatccttgggttttgagttcctgacgaagaagccttacagtccttcatcctgggcattccatctccaccctttacctttccacttcttctctcttgcccatcttgccactccaattcacagatggaaccttgcctatctgcccatcaataccgagctgtggatcaagcgagacgaccttttcggaatgcatctgagtggtaacaaagtgaggaaattgggagtcctgatggccgat

SEQ ID NO: 51796 - DNA, 159 bp, Glycine max
  Clone ID: LIB3109-009-Q1-K1-E6
gtattgatgaattgctagatacattctctacctgggcgaatttgggctttagtgacataaactgcaatctaagataatctgtctgataatcggtactgtgagtctgcatattcactagatgcaatcatggtatgctggtcatattctctcttatgcata

SEQ ID NO: 51797 - DNA, 54 bp, Glycine max
  Clone ID: LIB3109-009-Q1-K1-E7
taagcatatcaataagcggaagagaaactatagaattatgatgaccataataat

SEQ ID NO: 51798 - DNA, 414 bp, Glycine max
  Clone ID: LIB3109-009-Q1-K1-E8
gattgagtaatagagaatatgataaaatattatgagttttatgttatctcagagacttagacagttagacataatgcatatggtttaatctggttatataatagtatgaatgataatactagtattagtaatatgtataattgaggatactttcctatcctaatatgattatgagattcagttatagtgtaagagaatattcttctctttatattgtcttttactgtattcttctcttgtcagttataactgtcactgtcagacagttacaactgactcctcctatgttagctggtcctgatagtatatatagggttgtaactcagtgacttttgtactttccatataagatcaatgtaagttttgtttctattttctctgtaaatctaatatatagcaatttaaattttattt

SEQ ID NO: 51799 - DNA, 360 bp, Glycine max
  unsure (1)..(360): unsure at all n locations
  Clone ID: LIB3109-009-Q1-K1-E9
ggagaagagaaggttacagaaaaacaaaaacctgtctctgtttctccgtcgtggcaattgaaggaagcactgtctgtctctgcaactttagtcacattcacatggcagcaacaacatcagggaagattatccaaaatgtttttgtttcacactgccaccaacagaatacacggggtcgaagggactattattggtttggcccttctccgctagggaagttggcatggactgactcttccatgcaattgcgcactntattcaaaccccagaatcattntagtttccagagaaattttcactgcaatgcttctgcatctgctactgctgtgccatatctagacaagacagattttctaaagc

SEQ ID NO: 51800 - DNA, 359 bp, Glycine max
  Clone ID: LIB3109-009-Q1-K1-F1
acatgaagcccttgacttcacagcaggaggaacttttgtcttctgatgaccataataatgaaataactgaacaagggaatgttgacaacacggtggaacaaggaaatggtaaaatggaaggagacgtgcccaactatgatgatgctaagccactacaccttaatactgagcaacatgatgaaataaccagttcaagtggaagtgtctccgctgagggaaatgagccttcctttgaagagcggagcattcctggaaatgacctgtttgaaaaatcatctatttcaacatcaggcaatacattggtagatgagcaggttagaaatgataattatgaggttgatgaagttaaatctgaatct

SEQ ID NO: 51801 - DNA, 391 bp, Glycine max
  Clone ID: LIB3109-009-Q1-K1-F11
gggagggcgtgggcgagggatatctatcttcattttcgtcgtcgttcatttttttatttttttttctgttttccattcgcttcttctctcagaaaagctcgccaatcgatcttgctctcttctacgcttttcgaattccttccattccattatggacgcagattagattcacgttcacattcacttctcttcgtttgcttcaaccactctgctctgctctgctctactctgagatccgatcgcattttcattcagaaaggaaactcgtgtgactgatttatgcgctaattgcaattgcactgcgagcgtccctgtgccgaatcggaagatgggattagtgtttcccaaattgttttcctctcttttcggtaacaaggaagctcgaatcctc

SEQ ID NO: 51802 - DNA, 381 bp, Glycine max
  Clone ID: LIB3109-009-Q1-K1-F12
tgagaggaagaattaaattatgcttagggaaacctgcagatcaaagtattgtattggtgaaattccttggcacgtttggtgggctgggagatgcagagaggcttcataaatatctttcagataataattgcagtagagctgaatatgagagagtaaaatctgaaggtattaaaagctgcaacacgggagagacagatgagggagacaaagtggagaatattctttatggttacgtggggatcgcagaggacttggacaaactagatttcaatagtaagaaatggagtatggtaaagagtaggaaagagatcgacgacctagataaagctcctgttaaaaccgatgaaaagcgatagttacagtatcggttcaggagtttca

SEQ ID NO: 51803 - DNA, 389 bp, Glycine max
  Clone ID: LIB3109-009-Q1-K1-F2
gaaagaagttcaggataaaagtagtgtagaatatcaaaggttaacgtgggatgctttgagaaagagcattaatgggcttgtaaataaggttaatgctactaatataaaaaatataattccagaattgtttgcggaaaacctgattaggggaaggggactcttttgtcgttcatgtatgaagtcacagatggcatctccaggatttacagatgtttttgctgctttggttgctgtcgttaatactaagtttcctgaagtgggggatcttttgctaagaaggattgttttgcagcttaagagagcttataagcggaatgacaagcctcaattactagcagctgttaaatttatagcgcatctggtgaatcagcaagtggctcatgagatca

SEQ ID NO: 51804 - DNA, 161 bp, Glycine max
  Clone ID: LIB3109-009-Q1-K1-F3
tataacacaggatacgctcgctggttcattttgccactctgatataaagctggatcagactctgtagaacagattgttcgtacaaacctgggacaatggcggcacatactaaaacgactattgactagtcaaagcacgggtacagaggaagctgctagtgc

SEQ ID NO: 51805 - DNA, 394 bp, Glycine max
  Clone ID: LIB3109-009-Q1-K1-F4
ggggaggaaggacgcactttgtgcttgccattgttaggaaacttgatgagcttcaggaattaccttcagtttttatcacttttcttgcatggagcatgggggaggtcattagatattcacattatgctttcggttgtttgggaaattgtccttcttggatgacctatctcaggtacactgcgtttattgtgctgtatcctttgggagtgggtcctggtgaaatatgggctatgtaccaggctcttccagttataaaggagaagaatctctatgcagattccttttcaagcctcccatttagttattatgatttccttaaggtggtacttatagattatccatttctctggttcaaactttacctgcatatgttcaagcaacgacgtacaaaact

SEQ ID NO: 51806 - DNA, 254 bp, Glycine max
  Clone ID: LIB3109-009-Q1-K1-F5
tggggccgacgcggtgcacgttagccgagctgcacgaatccctacatatataacacaccgtttccctgtactgattatttttgccactctgctgcacagctgcttcatactttgtctcgcctattaaatgtccgtcactgcttcactctgcgccactttcagaacaactttcttatcatcgaaacccgtctcgagaagaagctgcttcgtcacggataccaaaattgcgtttaacaagcttcgattcaaacccg

SEQ ID NO: 51807 - DNA, 288 bp, Glycine max
  Clone ID: LIB3109-009-Q1-K1-F6
ggatgtggagggtggcaaagaccctcttagtaacggtttatcatctgtgattcctgggtggttctctgaaattagttcaatgtggcctggataggctcactccttgaaggtggaaaagattttgtttcaaggaaagtctgaataccagaatgtcatggtcttccagtcatcaacatatggcaaggttcttggtttagatggagtaattcagctaacagaaagggatgaatgtgcctaccaagaaatgatcactcatcttgctctttgctctattccaaaccccaaaaa

SEQ ID NO: 51808 - DNA, 390 bp, Glycine max
  Clone ID: LIB3109-009-Q1-K1-F7
gaagtacaagcagagagttacaacacatatttctgtttcttttccctttttcctaggcacagcacacgccctctcaaatagaaactgagagatgaattctgatcagtttcagaagaacagcatgttcgtagaaacccctgaagatggtggcaaaaacttcgacgatgatggacgagtcagaagaacgggtacatggataactgcgagtgcccatatcataacggcagtgatagggtcaggagtgttgtcacttgcatgggcaattgcacaaatgggttgggtggctggccctgccgatctctatggcttctctttcatcacttacttcacttccactcttcttgccgactggtatcggtcacctgatcctggtcatggcaagcgaaactt

SEQ ID NO: 51809 - DNA, 400 bp, Glycine max
  Clone ID: LIB3109-009-Q1-K1-F8
ggagcaagagtgaagagcgaagagaatggctcccaagggtttaatctttttggctgtgttatgcttctcagcactgtcactgagtcgttgtcttgcggaggataatggacttgctatgaacttctacaaggaatcatgccctcaggctgaagacatcatcaaagaacaagtcaagcttctctacaagcgccacaagaacactgctttctcctggctcagaaacatcttccatgactgtgctgttcagagttgtgatgcttcactgttgctggactccacaagaaggagcttgtctgagaaggaaacagatagaagctttgggttgagaaatttcaagtacattgagaccatcaaagaagctttggaaagggaatgcccaggaagttgttcctgtgctgat

SEQ ID NO: 51810 - DNA, 369 bp, Glycine max
  Clone ID: LIB3109-009-Q1-K1-F9
gatcccaagttcaatattgtctctcctggagctgatatgtcaatatatttcccctactctgaaaagcagaacaggcttacagccctgcatggttcaattgaaaagctgttatttgatcctgagcagactgatgaatacattggttcattgaaagacaagtcaaagcccataattttctccatggcaaggctagacagagtgaaaaacataactggattggtagaatgctttggtaagaacagcaaattgagggaactggtcaaccttgttgtagtagctggttatattgatgtaaagaagtcgagtgacagagaagaaattgcagaaattgagaagatgcacgagctcatgaaaaagtataatttaaat

SEQ ID NO: 51811 - DNA, 384 bp, Glycine max
  Clone ID: LIB3109-009-Q1-K1-G1
gaagaagaagaaactgcctccgaaaccctaaccgaactcaagaacaacctgaagcagttagagcaagagattaagaccttcaaagacagcacaaaagatgttaccctaaaatcagagaagaagaagcagaagatgagcttgttcgctgtgtttaccaataagcagagggaaccgaaaccaaaggaggagtcactcgctgctgctaagaagctctcccccgatgtggcggtgttcgtgcagtacttgttcaagaaggggtatttcaacgacgccaatttcgctaaggggaggaagaactttaatcctgattggttctccaatgtcttcgccttaggctatatcaagtttgccgccaacaaattcgccagagatcatcgagaaatc

SEQ ID NO: 51812 - DNA, 383 bp, Glycine max
  Clone ID: LIB3109-009-Q1-K1-G10
cgtcggctggcagagacacagagggggagtagtgagaagagtgttatattgggtggcgaagaagaaaaggagcagcggtccatacaattcaggagcagctataagaatccttcaacacaagagcatcgcctacaacaatggcagataattcaactgctcaggaagcaacaccctatttctccttacaagatgcctaaattcaacctctctcatagggtggttttggctccgatgacaagatgcagagcgttgaactggattccccaggaagcacttgctgaatactacgctcaaagatcaacaccaagaggatttctcatcagcgaaagcaccttgatctctctcactgctactgggttttcacatgtgcctgggatatattc

SEQ ID NO: 51813 - DNA, 378 bp, Glycine max
  Clone ID: LIB3109-009-Q1-K1-G11
gtagaagaagaagggaagcaataatggagaaatacaagaagcagcatcagcaagtagaagcagtggttggaaatgaaggaaatgacaaggatgcagacattcctaatgacatctctgaagcatgtgatggtaagactgatgatgctgattatgtggagccatcatttgctgttgggaaatctcctgaaaatgtgaatgttgcttctaagaagatatctcctgctggaggcctgggtgagggtactccaaagagtgaaaggtcagaggacaagttttgtgatgatatatttggtgagacgccaacgggagttcggaaatcaggaaaaggagatggtttgctgattgagagggttggcctacatgacaattgggacgatg

SEQ ID NO: 51814 - DNA, 359 bp, Glycine max
  Clone ID: LIB3109-009-Q1-K1-G12
gggatatagatagtgtatgtgctgatatctatgagtggcaaccaaatcttgtaagttatgacatgcaagcttctggcaaagtcagaagtcctgtgagaccaaaagcacatttgtcatgtggccctggacaaaaaatctcatcaatcaagtttactagctttggcactccagtagggtcttgtggaaactaccgcgaaggaagttgtcatgctcacaagtcatatgatgctttccaaaagaattgtgttggccagagctggtgcgcagtgacagtgtctcctgaaatttttggaggagatccttgtccaagtgtcatgaagatactctcagtggaagccatttgcacctgatcatttcaa

SEQ ID NO: 51815 - DNA, 394 bp, Glycine max
  unsure (1)..(394): unsure at all n locations
  Clone ID: LIB3109-009-Q1-K1-G3
gagagaagagctgcggaagagtggtctcctgctccgacatcactgccctcactgcacgagatgctgttttccttaatttgataaaaacagtcaggaggaccagactatgagattcctttgggaaggagagacgggctaacctttgccacaagacaagtgacattggacaacctttcaccaccttcaagcaacgcctcaaccatcctaagctccctcgtcaccaaaaacctcgacccaaccgatgtcgtagccctctcaggtggccacaccatatgcatcagccactgcggttccttcaccaacaggctctaccccacccaagaccccgtcatggacaagaccttcggcaacaacctcagacgcacgtgccccgncgncaacaccgacaacacca

SEQ ID NO: 51816 - DNA, 397 bp, Glycine max
  Clone ID: LIB3109-009-Q1-K1-G4
gtttgcagattggtgtaatgatgaagcattttgacctggggggtttcacttgtgcgcaaaaggttttcatcattacttccttttcgtttctttctttttctctgatcaagttatgatggtgttttgttgtcaggggggtgtaactacctttttcttcgttcatcattagccagagatcttctcccaagtatgttttcctgtatccgatctgtctgtttctgctatgttttctcagatctggccacctttgaaactcagctaaacattctcctctttttcaagcccctcctcttcctcccccttaatttttttttcattctacctttctctctctatttagggtttcctggcctatgttctgtctctaatctctactaagatttatttatgtgataat

SEQ ID NO: 51817 - DNA, 302 bp, Glycine max
  Clone ID: LIB3109-009-Q1-K1-G5
ggaccttcatttgtcattgggaattgattcctaaaattcgacgaaaagagattacagggaaagtgggaaacagtagatgatcccaatgggaattggccaaattggagatcatcgaccatagatatcaaggtctgaagttgtaccaatggattgtacagctgcaaggaaaacacaaaaggctgaccgataaatgctaatgagggatcgattcaatgtacagcttggagaactgggtaacattttagaccctgataggcccaaaaatgacatatcaatcattctaggggatacaattcaattgc

SEQ ID NO: 51818 - DNA, 406 bp, Glycine max
  Clone ID: LIB3109-009-Q1-K1-G6
ggcacaagtgagtttgttgatcgagataactagaaacagtgtgatgaaaatgaaggtccttgttttcttcgttgctacaattttggtagcatggcaatgccatgcgtacgatatgttccctctccgaatgaacactggctatggtgcccgtactccggaggtgaaatgcgcaagttggaggcttgctgtggaagcacacaacatctttggctttgagaccattcctgaagagtgcgttgaagcaacaaaggaatacattcatggcgaacaatatagatcagactccaaaacagttaaccaacaagcttacttttatgccagagacctcgaagtccattccaaggacacatttgtgttcagtatagatggcaccgtactctctaatattccatactacaaaaaacat

SEQ ID NO: 51819 - DNA, 397 bp, Glycine max
  Clone ID: LIB3109-009-Q1-K1-G7
gaagaaggcacagttacaaactatactttccacaaatacaagtctggctacattcatcactgtcttattgaaggccttgagtatgagactaaatactactatagaattggaaggggtgattcttctcgagaattttggttcaaaacaccttccaaagttgatccagattctccctacaaatttgggatcattggtgatttggggcaaacgtttaattctctttccacccttgagcattatatacaaagtggagcgcagactgtcttatttggtggagatctttcttatgctgataggtaccagtacaatgatgctcgtttacggtgggatacatggggacgatttgttgaaaagagtacagcatattatgcatgggtatggtctgctggaaatcacg

SEQ ID NO: 51820 - DNA, 264 bp, Glycine max
  Clone ID: LIB3109-009-Q1-K1-G8
gacgacggatcgcggatacagagaatggtgaagcatgtcgacctggggagtctgacttgtgcacatatggtgcccatgattacttccttgtcgcatatttcttaagatctgatcaagtcatcatggcgccttcttgtacagttgagatgactacctcgttcttgattcatagatagccagcgatcttatcatgaggatctcgtcctggctgctatctgtctgtacaaagtctagcctatccgatctgttcatatttgaaactca

SEQ ID NO: 51821 - DNA, 360 bp, Glycine max
  Clone ID: LIB3109-009-Q1-K1-H1
gatgaattagggtgggtagagagacaaagtaagagagagagaggcgtttgtgttgtgttgtgtctcataaacctcacactctccctcactattctccagcctccactcgctgaaagagactcctactcgtcaatcattgtgaagaaaagaagtgaacactgactctgttattggtctgaatttcctcaccctatacaactagttttaacgaacatggaaactgaaaagtctaatgtttcaaaggctgaagaatttaaactccttgccaatgaagcattcaatgctcgaaaattcttccaagccattgatctatatacacaagcaattgagctgaacagtcaaaatgcagtttacttttct

SEQ ID NO: 51822 - DNA, 344 bp, Glycine max
  Clone ID: LIB3109-009-Q1-K1-H10
gacttcaaagtggagaaaaacacacacggttggttcattctctctcttttctttttcctcaaaaagttgaaaaagaataaagggggaacaatcgagtgaagttgttgctcttcaatagtaaacttacctatggaagagggaagggttgtgagtgagtacacaaaagatggaactgtggatcttaaagggaaacccattctcaaatccaaaagtggtggttggaaagcatgctcctttgttgttgtgtacgagatatttgaaagaatggcttattatggaatatcatcaaatttgatactgtatctgactaggaagctttaccaaagcactgtgaccttttcaac

SEQ ID NO: 51823 - DNA, 352 bp, Glycine max
  unsure (1)..(352): unsure at all n locations
  Clone ID: LIB3109-009-Q1-K1-H11
gggagacttaaatgaaaaggaaataatcttaagtggaaccttctgcgaaattagccttccttcgtcccttgattgaagtataaattaggggtgttgaaattcaaagccatatccgtcattaaccaaatttgtgtttctccgattgcaagcaatggactccttcaattccttcttcgattcaacaaaccgatggaattacgatactctcaaaaacttccgtcaaatttctccggtcgttcagaatcacctcaagcaggtttattttactctgtgtttcgccgtggttgctgcggctgttggggcttaccttcatgtcctcttgaacattgnnggttttcttactacagtggca

SEQ ID NO: 51824 - DNA, 199 bp, Glycine max
  Clone ID: LIB3109-009-Q1-K1-H12
aagacgacagaagggggagaaagcaatgggcattgatagcgaatacgtgatatctgacaaggcctatgcgaaggtgggaatgcttgggaacccgagccatgtctactccggaaaaccaatagcgtaaacggtggccaattctttggcaacggtaaccttgggtccttcgacccagttattcttcaaacccaaccccttc

SEQ ID NO: 51825 - DNA, 411 bp, Glycine max
  Clone ID: LIB3109-009-Q1-K1-H2
gagcaagagtgaagagcgaagagaatggctcccaagggtttaatctttttggctgtgttatgcttctcagcactgtcactgagtcgttgtcttgcggaggataatggacttgttatgaacttctacaaggaatcatgccctcaggctgaagacatcatcaaagaacaagtcaagcttctctacaagcgccacaagaacactgctttctcctggctcagaaacatcttccatgactgtgctgttcagagttgtgatgcttcactgttgctggactccacaagaaggagcttgtctgagaaggaaacagatagaagctttgggttgagaaatttcaggtacattgagaccatcaaagaagctttggaaagggaatgcccaggagttgtttcctgtgctgatatcctccgtctc

SEQ ID NO: 51826 - DNA, 413 bp, Glycine max
  Clone ID: LIB3109-009-Q1-K1-H3
ggagcaagagtgaagagcgaagagaatggctcccaagggtttaatctttttggctgtgttatgcttctcagcactgtcactgagtcgttgtcttgcggaggataatggacttgttatgaacttctacaaggaatcatgccctcaggctgaagacatcatcaaagaacaagtcaagcttctctacaagcgccacaagaacactgctttctcctggctcagaaacatcttccatgactgtgctgttcagagttgtgatgcttcactgttgctggactccacaagaaggagcttgtctgagaaggaaacagatagaagctttgggttgagaaatttcaggtacattgagaccatcaaagaagctttggaaagggaatgcccaggagttgtttcctgtgctgatatcctcgttctct

SEQ ID NO: 51827 - DNA, 370 bp, Glycine max
  Clone ID: LIB3109-009-Q1-K1-H4
aatctaagaacaaaaaaattataaaatttgataactttaaccaaaccttttgttcatcttgtacaaaatggatcataaatgcaatttttataattgatactttggaggatgtagtatatcttatttattgttttaaattgcacgttgcaattagcaacatcatgggaaattgcttacgaatatggccacaatgctttgtggagacctcaaaatattgtggtcgcaattgtgattgtggactatagtttaaaaccgctaacaacctgatgttgcttgaaacctataatttccgctaagtgattaatataagagcaacttctataaaatgggtgttgaattggatttgatcattattataacattgaaaaag

SEQ ID NO: 51828 - DNA, 321 bp, Glycine max
  Clone ID: LIB3109-009-Q1-K1-H5
gtctcaaaaggctgttactgctgccacaaattataataatagggttgttgaatgccatttggcttctattgtgctcgctataaagctagggatggatccaaaagaggcaatatcaaaagtgagcacactgtctgatgttgaagggttatgcgtatcatttgctggtatttataactcatctgatcctgtacttgctgtaaaggtaattgtacctcgtatgatgtcatccttagaattagccttgtgtgacactatctttctatttgcattgagaacatttcatttcaattgatatggatttctttgaactttaatattctc

SEQ ID NO: 51829 - DNA, 296 bp, Glycine max
  Clone ID: LIB3109-009-Q1-K1-H6
ggcatcaaaccagactaaactccgacgatgcctcccgtcgctcctcgatccggtgatgccatattcgccaacgtcgaacgcgtcaatgcggagctgtttactttgacgtatggcgcaattgtgcgtcaattgctcacggatctggaagaggctgaggaggttaacaagcagcttgatcaaatgggttacaatattggaatccgtttgattgatgagtctttagccaagtctaatgtcttcagatgcaacgatttcagagagacgactgatgttattgcaaaagttggttttaaaat

SEQ ID NO: 51830 - DNA, 400 bp, Glycine max
  Clone ID: LIB3109-009-Q1-K1-H7
gttgcttgagttggaataaatgtgctaagaatcaaatagctagtagtgattatgaaggaattgtgactgtttgggatgtaaccactcggaaggtaaatgttgaattcaaatggtcagtttgttcttgtatcagatctttgggtatcttcattcattaatattgttttgattgtcatgtgcttgcttaagttttctacagattatttacgcatggctatcattttaactttggcagagtttaatggaatatgaagagcatgaaaagcgtgcatggagtgtagacttttcaagaacagatccctctatgcttgtatctggtagcgatgactgtaaggtcaaaatttggtgcactaatcaagaagctagtgttctaaatatagacatgaaagcaaacatatgt

SEQ ID NO: 51831 - DNA, 368 bp, Glycine max
  Clone ID: LIB3109-009-Q1-K1-H8
ggaggatacactatactccggtagccgctgtgttggtgagtgagttgtggtgcttttgaaagatgaggccgattctgatgaaaggtcatgagaggccattgacgttcctgaaatacaacagggacggcgatctcctcttcttctgcgccaaggaccacaaccctaccgtctggtttgccgacaacggcgaacgcttgggcacttatcgcggccacaacggcgccgtttggacctgcgacgtctcaagagattcggcttgactcatcacgggaagtgccgatcagaccgccaagctatgggacgtgcaaagcgggctgcaattatacaccttcaacttcgatttcccggccaggttcgtcgatttctct

SEQ ID NO: 51832 - DNA, 413 bp, Glycine max
  Clone ID: LIB3109-009-Q1-K1-H9
gggatttccaaagtttttaatagagggtaagtctcaaaaaatcgaggaattacagacgaatatgcaaaaaaaactgaattgtgtgaatcgaaaactaaacattgctattgtaaaagttgcaaatgcttataaacaccctaatattattgcagaatttatagctggacaattaaagaatagagtttcgtttcgtaaagcaatgaaaaaagctattgaattaactgaacaggcggtacaaaaggagttcaagtacaaattgcaggacgtatcgacggaaaagaaattgcacgtgttgaatggatcagagaaggtagagttcctctacaaaccattcgagcgaaaatcgattattggtgctatacagttcgaactatttatggggttttaaggatcaaaagttggatattttctaa

SEQ ID NO: 51833 - DNA, 354 bp, Glycine max
  unsure (1)..(354): unsure at all n locations
  Clone ID: LIB3109-010-Q1-K1-A1
gggtcttcagcaagaagggaagaaaactaaaggtccacttaattcaagtgacaagctttttaaggagatacgagatctcaactttgaagttgttgtccagattttgcgccaaaaagctacttccatgaagcaagactacacagaaatgacaactactacgcagacagtttccgagttgaaggactttgtgaaaaagctgaactcattgccagagatgaccaggcacataaatcttgctcagcatctatcaacattcacatcaaagccttcatttcttgggcaacttgatatggaacatacaattgtagaggcccagagttatgatatatgctntgagtatattgaagaactgat

SEQ ID NO: 51834 - DNA, 380 bp, Glycine max
  Clone ID: LIB3109-010-Q1-K1-A10
ggaactatatgaagactctccaggcagttcggaatacagtacaggatcaactctcctgcctcattcagctggtgaggatttggaacactcactgcatcaggatattggaaccgaactgaatatacaaattgaagattcagaaggagttaggggatgtgaccaaggggttctttctagtgcaactctggatcaagatttattcccatcttgtgaggaacagataaacaatgatgcaattgtttctgccttatcaagttcagcggagttcagttcacctcttcaagttacccctctgtttagatccttagctgctggaattcctagcccacaattttcagaaagtgaaaggagcttccttatgaaaacactcggaatggagt

SEQ ID NO: 51835 - DNA, 339 bp, Glycine max
  Clone ID: LIB3109-010-Q1-K1-A12
tcagcaaagaggtgacaaagcatgaggatgcagcagagagtgaatggaaggggtggaattggaggtcagaaggggacttgttagtaaacggtgcgtttttcacggcatcgggggctggagcctcctctagttatgcaagagcttctagcttgagtgcaaggccatcttcactggtggggtccataaccactggtgcgggtgcactcacctgtaggaagggttcccgctgctgattatgacccctccagcaagcaactgtatctgcaggccgctccattaattccaaaaaaatggaatggaatcaaaaaatcaagggggaggggaaggggaaagagaatg

SEQ ID NO: 51836 - DNA, 375 bp, Glycine max
  Clone ID: LIB3109-010-Q1-K1-A2
tgtcttcagcgcgaagggaagaaaactaaaggtccacttaattcaagtgacaagctttttaaggagatacgcaatctgaactttgaagttgttgtccagattttgttccaaaaagctacttccatggagcaagactactcataaatgacaactactacgcaaacagttggcaaggtgatggactttatgaaacagctgaactcattgccagagatgacctggcacataaatcttgctcccgatgatcaacattcacatggtaggcttcatttcttgcgcaacttgatatgtgacatacgggaggattggcccagagttatgatatatgctgcgagtatattgaataactgatccatgttcacgatcttttgacaa

SEQ ID NO: 51837 - DNA, 401 bp, Glycine max
  Clone ID: LIB3109-010-Q1-K1-A5
gagggaaaaaaggagatatatgaagaaagaagagaaaaactttatagcaactgaataaaaacaccattatgaggctttacatggcacaatggcattgcctctcatcatctctttaatactatctctctcccgctggttttagaaccccaagaacaagattttgaactaagattcgcggttgtttgtgtgttggttaggttgttgggatctgtgttgttcctttctctttctccctctccctctccctctctctattttctcagacacacacacacttagatacacaaaggccattatacgtgtagtagacacaaaattttcggtatctctctatatttggggtcacacatacataggtaatggcacagttaccttctaaaataccaaccacaccccaaaat

SEQ ID NO: 51838 - DNA, 408 bp, Glycine max
  Clone ID: LIB3109-010-Q1-K1-A6
ggcgagaaagagaagaagaatcagagagagaaaatagagagagaaacgaaaaccccttttgaccattgcgcctcgattccatttgccccattgattattctcccaccaaaacctcttctgtatttttttccttcttcttgtgatcattcctctcatttgggggcacggttctgtttgtgatcaacctcaaaattctgatctttttcccttcctgattcggattcggataccctgttgcgtttttctttctgggtgtgttttatttcggccaaagtttctgttttgcatagtgggaagtttaaaaagggattaattctatgtgggcatcgttcatattggcaaatcaatgttaactctatcatcagtgtggttatgaagtaatatggaagtgctccttgcgcgcatagc

SEQ ID NO: 51839 - DNA, 397 bp, Glycine max; identical to SEQ ID NO: 7408
  Clone ID: LIB3109-010-Q1-K1-A7

SEQ ID NO: 51840 - DNA, 303 bp, Glycine max
  Clone ID: LIB3109-010-Q1-K1-A8
gcgcgagttggtgtctagatctacatatctagaagcagtgtcaggaaactgaaagtactggctctgtctgttgctcaatgctgtagcatggcaatgccatgcgttactatatatgcgctctccattgaacactgctatactgccagataggccttgaaatgctcaagttgtgcgcttgatgcgtacgaacacaatatcttggggtacgataccatagctgaataatgcattgaagcaactccggagtacattgatgccgaacaatgtctatcagactacggaacacctaagcaacacgcttac

SEQ ID NO: 51841 - DNA, 164 bp, Glycine max
  Clone ID: LIB3109-010-Q1-K1-A9
accttttaaaattccttcccacgcgttcgttccacccaattaggacaaatccacaatgcggtcttgtgtcctctttaccaaacattttcctcattttactccttcttcccttcccggctaccctgaactcctcctaccactccttcacaaataatctctacatc

SEQ ID NO: 51842 - DNA, 409 bp, Glycine max
  Clone ID: LIB3109-010-Q1-K1-B1
ggtgctacaagagtttcaagcattagttatgaggaagaaatttatggaatctgtcagtggagggaattccgagttgcagtatggactaagctttcgagatatgagcattgaagatctttgtcttgattttactcttcctgggtttcctgatattgttcttgcttcagggaccgatcataccatggtaaatatgagaaacttggaggattatgtttctcttattgtcgatgcaactgtgaggtctggagtttcaagacaagtggaagcttttaaatctggctttaaccaggttttctccattgatcatcttcggattttcaatgaagaagaacttgagcgaatgctttgtggagagtatgactcttgggctgtcaacgagtttgggagatcacattaaagttgatcatgg

SEQ ID NO: 51843 - DNA, 358 bp, Glycine max
  Clone ID: LIB3109-010-Q1-K1-B10
gatcgaacgagaaaaattgaatttaattaatgcaatttatacgactttggaacaattagaaaattacaaaaacgaagccattcattttgaacaacaaagagtgattaatcaagtccgacaacgggttttacaacaagccttacagggagctctaggaactctaaagagttgcttgaacaacgagttacatttacgtactgtcagtgctaatattggcatgtttgggacgatgaaagaaaaaataactgattagtctttctattataaaaatagagtatatggcattatttttttcttctaaaaaataaaattaagaaattttcatggtaaccattcgtgcagatgaaattagtaaaat

SEQ ID NO: 51844 - DNA, 418 bp, Glycine max
  unsure (1)..(418): unsure at all n locations
  Clone ID: LIB3109-010-Q1-K1-B11
ggggaaagcctgagaagaagaaagaaagatggtgaaagtggcgacgtacttcgcgatgacgcttggagccttcgtgttctggcagtccatggacaaactccatgtctggatcgctcttcgtcaagacgaaaagaaagagaggttggagaaggaagcggggatcagaagggttagagaagaattattgcagcagcaggccagtcagaaggattctctttcttgaattcgaattatgttgtaattttgctttgtaatttccccttgcttctgtttttccaatgcaatgtcttgtgctcaaataaaatctgctactcccgagcacttcaaatttaattgcgtggatttctattgtgttcctctacacatgcactngtttcattaactgctatgtgtcagtaattgttggaacacttctatc

SEQ ID NO: 51845 - DNA, 238 bp, Glycine max
  Clone ID: LIB3109-010-Q1-K1-B12
gaaggtgaaggtgaaggtgatgatggaattggaagtcgacgagaacgacttgaaagccgccggtgctgagctcttcgtcgacggtggtcggcgcggcattcgcatcaatggctgggtgatcgagactcggaggcactccatactcaactcttccacactccaagagtgggaacagaatctcgatacgtctcatttaccagaaatggtttttggggaaaacactttgattctaaaacac

SEQ ID NO: 51846 - DNA, 393 bp, Glycine max
  unsure (1)..(393): unsure at all n locations
  Clone ID: LIB3109-010-Q1-K1-B2
gccggatctcgttcaaagaacaatgtgaatgagtcatatgttgttaatcacggtggcctacctgatgttgattacttggagagaaaaaatccaaaggatgaaacttttagagtaaagcccttctacaataatgcaaatccacctgcttatacaagagaggaacaatttgaaggtggtttcaatcagcatgatagttgggggaatgccagacgtgtaaaagaaagccaggacactgcaacctctaggaagtctcctggtcatgcaggatctcattcaaagaacaatgtgaacaagccatttgctgttaatcatggtggcctacctgacgttgataactctgagagaagaactcanaaggatgaaactcctagggcaaagcccttctacaataat

SEQ ID NO: 51847 - DNA, 405 bp, Glycine max; identical to SEQ ID NO: 9625
  Clone ID: LIB3109-010-Q1-K1-B3

SEQ ID NO: 51848 - DNA, 419 bp, Glycine max
  Clone ID: LIB3109-010-Q1-K1-B4
taccaaaagaggcacaaggaaaagttgcaaaatttgatttccatgggcagccagcagagctcaagcatggcagtgttgtgattgctgcaatcacaagctgtacaaatacatcaaacccaagtgtaatgcttggtgctggtcttgttgcaaaaaaggctcatgagcttggtttgaaggtcaagccttgggttaaaacaagtcttgctccaggctctggagttgttacaaaatatctactccagagtggactgcaaaaatatctaaatgaacaaggttttcatattgttggatttggctgtactacatgtattggcaattcaggagagctggatgagtccgttgcttctgccatctcagaaaatgacgttgtagcagctgctgtgttgtctgggaaccgtaaatttgagggtcgagtacat

SEQ ID NO: 51849 - DNA, 289 bp, Glycine max
  unsure (1)..(289): unsure at all n locations
  Clone ID: LIB3109-010-Q1-K1-B5
ggaagtgaagtgggaaagagacaggaccgaaaatggttgcgactttgagtcttccgatcatagacctctcttctccccatcgtctttccacagccaattccattcgtcaggcatgcgtggaatatggtttcttttaccttgtgaaccatggggtggacaccgattttgtgagcaaagtcttcgaccaaagttgcaagttcttctcgcttccggtccaacgcaaaatggacctggcccgcaaggaatatagaggctacacntctctctatgctgagacacctgatcctac

SEQ ID NO: 51850 - DNA, 404 bp, Glycine max
  unsure (1)..(404): unsure at all n locations
  Clone ID: LIB3109-010-Q1-K1-B6
gggcgtagctggtcagcactgacctccgatgtttctcggcaggagaagagccaatacaaaaatgcaataccatcaccaattaatcatcctaaaattaaccaganaaataaaatagaaatatttttcgaaactaattttgtggagatctgtcggagaagaaagcanataattatcctctttccattcattcgctgttcacttggttctggtgagcgcagcagaggggaagaaagaagctgatgagaggagctcgttggatgaatatataatataaattggtttgtttgatgggcaacacttgccgcggatctttgaaaggtaaatattctcagggcttgagccagcccgaagaccattcaaagcccaccaccacccattctgatccctcctncgaccacccctct

SEQ ID NO: 51851 - DNA, 357 bp, Glycine max
  Clone ID: LIB3109-010-Q1-K1-B7
ggagagaaaattgtgagaggagttttcacgtctttgagaaatgggtgcttcgctatcggtctcggaaaaatccatccatgaattcatggtcaaggtatacttgaatctcaacaacagaaaacctcaatttttttattatttcattttttgaagaatgattatagaaatctcttattatattggtcatggttgacacaggatgctaagggcagagacgtgaacctcagcatctacaaagggaaggttcttcttgtagtaaatgtcgcttcaaaatggtatttttacacacaccctttttttctaacccaactttttccatatgcttgctgtaaaaatccaaatcttctttctttttat

SEQ ID NO: 51852 - DNA, 272 bp, Glycine max
  Clone ID: LIB3109-010-Q1-K1-B8
tgagagaagattgtgatgaggagagttcacgtggctgagaaatgcgtgcttcgctatcgttctcgcaaacatccatgcatgaattcatggtcaaggcataccctaatctcaacatcagaaagcctcacttagattattatcacaaatggtcaagaatctttgtagaaagctcttaccatatggttcaacaatgactcatcaagcttatggcatagtcaccaacctcatcatctacaacggcctcgggaattttttaattgaacatggtttta

SEQ ID NO: 51853 - DNA, 422 bp, Glycine max
  unsure (1)..(422): unsure at all n locations
  Clone ID: LIB3109-010-Q1-K1-B9
gagggcgcaatagaaaatacaagccgtagaagagggctcgctctttcgtgtttttgttcgcgaaggaaactctatccttagctatcgcgatggatcggtaccagaaggtggagaagccaagagctgaaactccaatcgatgaaaacgagatccggattactagtcagggaaggacgcgcaactacattacttatgccatgagcttgcttcaagagaaaggttctaatgaaattgttttcaaagcaatggggagagctatcaacaaaaccgtgacaattgtggagttgatcaagaggagaatngtgggcctncaccagaatacagcaattggatccactgatatcactgatccctgggagcccctagaggaaagcctccttcctttggagacgacaaggcacgtgtcaatgataacaataacc

SEQ ID NO: 51854 - DNA, 246 bp, Glycine max
  Clone ID: LIB3109-010-Q1-K1-C1
gatagcgaaacagagagtggtttcagtgagtgatcggtgttcacttgatccttcataagtcgtcatcatcatcatcatcatcaccgttgattgaagaagatgccgatcagaaacatcgccatcggaaggcctgaagaggctactcaccccgacacgttgaaagcggggttggctgagttcatcttcaccttgatcttcgggttcgccggttcacgtttcggcatcgcctacaacaagctcaccgac

SEQ ID NO: 51855 - DNA, 229 bp, Glycine max
  Clone ID: LIB3109-010-Q1-K1-C10
gaaatcaaagaggtcgaagaaaaacaagagcaaattgggatcgaagaatttgaagaacaccacaagcaagatgcatgttgttgtggtgctcaacacgcaatcctactgcagaggcctagaacctccttcatcttctccttccgtcgtttccaacaagggaacaaggactttgagtttcaggaggctgctgctgcgtccttctcttgggattcatttatcgcgtagcttt

SEQ ID NO: 51856 - DNA, 217 bp, Glycine max
  Clone ID: LIB3109-010-Q1-K1-C12
ggggtgggtcgcgagcatcgaatttcaagggttaccggaaggccggattgatagtatactctctcgcactaacccgagcgacgtgcttatgctttgcgtaccatcaaagatcttacgataaggcgtttaatctgacactttgtggaaaccgtttctcacttgtgattaccactgcatcatttgggagagtccttggtctctcaactattcttccaag

SEQ ID NO: 51857 - DNA, 270 bp, Glycine max
  Clone ID: LIB3109-010-Q1-K1-C2
gggactcggatgaatcatgtttggttaggacaaaattgccctccatcactttccttgttagagttggtttctgcaacctaccatgcaattcctcacctgaatccgctttctattgccacgttgtggaagcgtaacgaagatgaatggcattgggaaactcaaatcgtcgagttctgaattggaccttcacattgaagattacctaccttctggatccagtgttcaacaagaacggcatggcaagctccgactgtgtgatttgctagacat

SEQ ID NO: 51858 - DNA, 410 bp, Glycine max
  Clone ID: LIB3109-010-Q1-K1-C3
ggcggcatgaaagtggcaaggcagctatgcatgcaggaccatctgtacaaaagccagaaaaagtatcagttgggaaagagattcgagaaaaattctctggtgctgttgaagctttctcccggaggaacccaacaagtcctagtcctcgtggtgatcactccaaacgtaggagttttgaggaagtagcagtacacaaagatgtgtatcatgatcaagagaagggacgcaattcgtcccgatatggcagcagttcaagaagacccataatctcatcgtcaaccatgccaagttcctctggtgatcatactgacagtcgtactggccggctaacctcaagtggaagccgacaatctgccacacatagagatattcaacctatgcacgagacaaaacaaccaacttacacacgc

SEQ ID NO: 51859 - DNA, 394 bp, Glycine max
  Clone ID: LIB3109-010-Q1-K1-C4
tgtagtgcaaattgagagtgctgtatgtttctccacctcaaccaccgtctccagtcccagaaggttcggaggaaggatcctcacctagaggttctgtttcagagaatggaaatgccaatggttctgacttcacacaagcggcaagaggatttactgagcgacctgaatctcaagacagatctgcagaggctagagctcttatctcaaggctgactgaagaaaagaataatgcaattcaacaaaatagcaagctctgccaggaactggtgagaatttacagtatgtcattgataattttatttacttatttgtctaatctatatttattttccttttggtgatggaggattttaatctggaatatgagctcccttctatagaaagagaatgattc

SEQ ID NO: 51860 - DNA, 405 bp, Glycine max
  Clone ID: LIB3109-010-Q1-K1-C5
ggttgtgtgtaagtgtgaagagaagagaatggtagtaggattgaatgtgcctcagccatttctgtcaccagtttgcaagacggcaccttacccacttgatctcatcgccaccgccgcgtccctccacttcggccaccttctccgccgccgcgcgacccaccatctccgccttggggttcttcttcactcctgtttcaagaaactcgctcctttaactcacatttttagattgaacgataagtggtgtcaaagatgctttcaactcaatgggttgaactatcttcaactgtcaaccggtgatttgacttcctcatggtcaactagtttctctttctttaatgggggaggagatggaggccgccgctatggaaaggctgggatgtccaactccaaaatgtctggaaa

SEQ ID NO: 51861 - DNA, 218 bp, Glycine max
  Clone ID: LIB3109-010-Q1-K1-C6
ggatgaagagttgatgaaattttttggagaatatggtaccattactagggctggaataatgaaggacccagaccgtaaatcaaggggttttggctttgtcaattttgaaaacccagatgatgctgccaaagctgttgaaggacttaatgggaagaaagttgatgataaggagtggtatgttggaaaagcccagataaaatctgagcgtgaacaagaac

SEQ ID NO: 51862 - DNA, 369 bp, Glycine max
  Clone ID: LIB3109-010-Q1-K1-C9
ggaagagtgaagagaatggctcccaagggtttaacctttctggctgtgttaatatgcgtttcaacactgtcactgagtccttctgttgcgggggaagggcaaaataatggccttgttatgaacttctacaaggaatcatgccctcaagcttgagacatcatcacagaacaagtcaagcttctctacaagcgccacaagaacactgctttctcctggctcaggaacatcttccatgactgtgctgttcagagttgtgatgcttcactgttgctggactccacaagaaggagcttgtctgagaaggaaacagatagaagcttgggttgagaaatttaggtacattgagaccatcaaagaagctttggaaag

SEQ ID NO: 51863 - DNA, 326 bp, Glycine max
  Clone ID: LIB3109-010-Q1-K1-D10
gcaaaaaaaagaggtgaaaaaaatttgtctggtaaattgttaattctgttgttttgcgtgtttctggactcaggagctgcgctgttcccggggaaaagcatgtacagtatgaacactaaatgcagtgctggggattgccaattgatgtcatggtcttcaccattgccaccacagtttctttgaaactgctcaaggtctatggttctatttaacttctgcacctgagcttttatatttaagagtgtttatagatattgggctagttgatagaaatggaagcaaaaatcgcaaaggcattggatagggttgcactcaatctgaagcgc

SEQ ID NO: 51864 - DNA, 225 bp, Glycine max
  Clone ID: LIB3109-010-Q1-K1-D11
gggacacagagaggggaactctgtatttcacctctttccgcgctttttgacagtgctcttccttttaccacattagggggagcacgggttgaaaattaaagggcttgttatattttttgagacacggaaagaaattgtttcttgtcaagatgctttcacaaatgggtgctttcattccaagaaaaactttatcgccgggtcttcatactcggagagtatcttctg

SEQ ID NO: 51865 - DNA, 226 bp, Glycine max
  Clone ID: LIB3109-010-Q1-K1-D12
gaggcgggtttttctagggtttggaggctatgccgtaagcgggttgaataagctcatgtgaataaaatgactttcacaaagccagaccgatgcatacactgagctagctgtcaatgtactaaaaggcattgaagtgaagatgtgatattcttagtatttcataatttgaattggaatcccaagctaattgctactctatcatgtgtgtgcaaatggtatgatgatc

SEQ ID NO: 51866 - DNA, 360 bp, Glycine max
  Clone ID: LIB3109-010-Q1-K1-D2
gacggtgacagcgctcgacggcgacagcactctgtttcagcgttctaacttactgcacacattccaatcccctctgttttcgtttggattgattaaaggtgtcacagcaatcaagttagcactacacaaccacactcactttttctgcttaactaaacaaaaatgttatcctttggtagaaattgctgcttcaaatattctggtacctacttcatgagggggaatgcctcaaatcatactaatactatactcttcacaaactcattttgccccaaattttctgaccccaattaccccttttgaaaaaatccacggggtactcatttctttcaccatgcccacaaactttacctcttttta

SEQ ID NO: 51867 - DNA, 385 bp, Glycine max
  Clone ID: LIB3109-010-Q1-K1-D3
ggaaaaagggtttttataatttttcaagatattaaacatttcaagcagttggaagacattcgagaactaactaagcagcttggttctggcagcaaagtcatcattacagctcaagataagcatttgcttgatagatatgggattggatttgaaagtatatgtgaaataaaagggtttagtgattcagaagctgatcgattgcttgaattcaaagttcttaattctgcaactgttagtcctaagtatgtgaacattctaaaccgaatcaagtcttatgcccttggtcatccatggactttggaagtaatgtgttccaacttgagtggaaaatcaatagaagaatgtgaatctgcattactcaagtatgaatctataacagatagag

SEQ ID NO: 51868 - DNA, 367 bp, Glycine max
  Clone ID: LIB3109-010-Q1-K1-D4
gggagctgagctgagaaaacccccaaccccaacctcaaccttaacctctcctcactttcttttcaaccagaactatgattaagctttttaaagtaaaggaaaaacagagagaactggcagaaaatgcgagtggcggaccacccgttaagaagcaaagtgccggcgagttgcgtcttcacaaagatataagcgagctgaatctaccaaaatcatgtaccatgcaattccccaatggcaaagatgacctgatgaactttgaagtttcaattcgacctgatgatggatattacttaggtggcacatttttggtgtcctttcaagtgtcgtccatctatccacatgaagcaccaaaggttaaatgcacgac

SEQ ID NO: 51869 - DNA, 334 bp, Glycine max
  Clone ID: LIB3109-010-Q1-K1-D5
agggattggtaatactgatgctggctttgtgctgggaactgggaaacttctgcttaaggtgcccccaactttgagatttgtaatggatggagaaatgcctgattatttgctttctaaggatttgattctgcaaattattggtgaaataactgtggctggtgcaacatataaatcgatggagtttgtcggtacaactgttgaaagtttaactatggaagaacggatgacattgtgcaacatggttgttgaagctggtggaaagaatggtgttgttcctgctgacagcactacatttaaatatcttgagggcctgacatctctgccatatgaacct

SEQ ID NO: 51870 - DNA, 350 bp, Glycine max
  Clone ID: LIB3109-010-Q1-K1-D6
gatgacatgggattgattgagattgccagagggtgttcgagactggttaggtttgagcttcagggttgcaggcttgtgacggagcgtggactgaggaccatggcttgtttgctcgccaggactctgattgatgtcaaggtttcttgctgcgtcaaccttgacaccgcagcgactctccgagccttggagccaattagggagcggattgagcggctccatgtggattgtgtgtggaatgggttgaaggagagtgatggcctgggacatgggtttcttaattttgatttgaatggtttggatgaaccgggtgatggtggtgaattgatggattactttgggggtggagaatg

SEQ ID NO: 51871 - DNA, 405 bp, Glycine max
  Clone ID: LIB3109-010-Q1-K1-D7
ggagtaactaagatggcgcaagtgaggaacaagcaagtgcttctaaaggactatgttaccggttttcccaaagaatccgacatgaatattgtcgaaagtaccataacattgaagcttccacaaggttccaatgatgtcttgctcaaaaatttgtacttgtcttgtgatccgtatatgaggaatctcatgaacaagcccgaaggccctcccaatagtcgtgcttacactcctggctctccattaataggatatggtgtgtctaaagtcctggaatctgggcacccagattataaagaaggtgatttagtgtggggctttaccaaatgggaagagtatagcttgttaccctcagctcaaatactcttcaaaattgagcacactgatgttccacttacctactacact

SEQ ID NO: 51872 - DNA, 384 bp, Glycine max
  Clone ID: LIB3109-010-Q1-K1-D8
gggaaacgcgaaagcaaatcgtgtctgggaagcagaattacctccaaatgatgatagagccggaattgagaatttcattcgcgcaaagtatgatgaaaagagatgggctccaagagatgggaattcaaaaacaccttctggatttcgggaagagaaaaggccttgacattggcagatgcctgttgagagaagcggttatgccggtgcttctgaaaataaatctgacgataggaagtatatccaaccatcaactgcaattcctgccgcacgaattaatgttcctgctacttccagagcaccttgacaggtaactgctattaccaaacctcagcatgtgtagaaagtggaatcagtagcaccacatccacaagcttgaccaccact

SEQ ID NO: 51873 - DNA, 422 bp, Glycine max
  Clone ID: LIB3109-010-Q1-K1-D9
cacactcaaaaccctaatagcaataatgctattgatcaaggccaagatctcaattgggcttttccatcctccaccccagatttcagaaaaatctctgaattggtccaacaaaacaacaacaacaacaatagtagcaacaacagcatgtcagcttcagcttcttcttcttcaaccacaactacaacttccacttctcacctttctgcattggagcttcttactgggatcacttcaagttccagtgctggtttgacttctttcatgcctgtgccggttccatctgatccaaattctatctacacatgtgggtttcctctgcaagatttcaagccaaccttgaatttctctttggatgggatcggaaacgggtacacaagccttcagaatgttcaaagtgggaggctcttgtttccatctgatga

SEQ ID NO: 51874 - DNA, 340 bp, Glycine max
  unsure (1)..(340): unsure at all n locations
  Clone ID: LIB3109-010-Q1-K1-E1
gttccaacatattcctcaccaaagacaacaacattcggcttggtgactttggtcttgcaaagcgacttaatgcagaagaccttgcttcctcggttgttggaaccccaaattacatgtgtcctgagctcctcgctgatataccttatgggtataaatctgatatgtggtctcttggttgctgcatgtttgagattgctgcacatcaaccagcttttcgtgctccagacatggctggacttatcaataaaataaacagatcctgcatttctncactgccaattgtttattcttccacactgaaacaacttatcaagagcatgcttaggaaaaacccagaaca

SEQ ID NO: 51875 - DNA, 286 bp, Glycine max
  Clone ID: LIB3109-010-Q1-K1-E11
agaagacgacagaagggggaggtaggagtaatttaagagagagaaagagagagtgggagagggagacccatccacttttttcattttcacacctttacacaacacaacataacacaaaagcgctctctctaatatctaaagacaggattttcaacacactcaccttttaaagcgcgtgcccctcaaacatgaacatcatcgtcttctttctaagacccggttcaaaatcttcggagaagagtactaaggctgatcactggatccttcaaaattggaatgatttgat

SEQ ID NO: 51876 - DNA, 179 bp, Glycine max
  Clone ID: LIB3109-010-Q1-K1-E12
ggagttgaaacatataactgtgggggggtcattgggtgttgccactcttctctcttgttgtacacttgttccttttggttttgagaaagggacatggaagctgggtgtgctttttctgttggctcacttctcataccaacagcgcatgaaacatcaaactcctttaggaaatccatatt

SEQ ID NO: 51877 - DNA, 115 bp, Glycine max
  Clone ID: LIB3109-010-Q1-K1-E2
cttccaacatattcctcaccaaagacaacaacgttcggcttggtgacttacgtcttgcaaagctacttaatgcattagaccttgctttctcgcatggtgtaacccaaaattacat

SEQ ID NO: 51878 - DNA, 375 bp, Glycine max
  Clone ID: LIB3109-010-Q1-K1-E3
ggagacaaatgggtttgggaatgagaagagagtagaaacaaccgagagaaacacatagaaaaaggaggcatagccaacctattcaaaccatgatgcaaggctgtgaggttgatgccattggcataaactacacgatccacacacacaaatcggagcacccttttaaaatcttcagcaacaaatctgcacatcttgacactgaacaagatggtaaagagccagaagaggaagcagaagttgaacaaagttgcagtggagtaaggcatgtgctgaagaatgtgagtttccaagccaagccatgggagatcctagcaattgttgggccaagtggagctggcaaatcatcactgcttgagattcttgctggtaaacaca

SEQ ID NO: 51879 - DNA, 406 bp, Glycine max
  Clone ID: LIB3109-010-Q1-K1-E4
gcgagactaatgaagctgattactgataaggagagtgctaagcgcctcgagagaaacacatagatgacggtggcgttgcccacctattcaaaccatgatgcaaggctgaccgggtgatgccattggcatatactacacgatccacacacactaatcggagcacccttttaaaatcttcagcaacaaatgtgcacatcttgacactgaacatgatggttaagagccagatgaggaagcagaagttgaacaaagttgcactggagtaaggcatgtgctgaagaatgtgagtttgcaagccaagccatgggagatcctagcaattgttgggccaagtggagctgtcaaatcatcactgcttgagattcttgctggtaaacacagccctcaaagtggaactgtgtttctg

SEQ ID NO: 51880 - DNA, 393 bp, Glycine max
  Clone ID: LIB3109-010-Q1-K1-E5
gaacgtattgtttgaaagaagttaagtaaagagagagtagtgggttgtggctcggtggagaaagtagtaaagtaatggaggaatcgttagggcagaaatggaagcagcgagagttcgctttggcatcagtttccgacctctcttcggctccttcttcggcttcgccgggaattgctcgcttcgactctgacggtctccaaattcatcatcaatctcaccagattccattcaatgtcgatcctcgaactgttcagctattcaaggtgagtcctgttcaatcggtttgcgtggtggaaggatctgatgttggtaaaaagacattgtattccaggggagtcacaatccagtttagaaatgatgaggagagtgcagcctttcattgtgtagtccaac

SEQ ID NO: 51881 - DNA, 388 bp, Glycine max
  Clone ID: LIB3109-010-Q1-K1-E8
ggaagagagtgatgtagtgagtagtgagtgtaaacaaggtttggtctttgctgctgatgttcatcactgcaaggtttccgcatttgggtttctctccgattgaaaaaagtaggtggctttacactaaatttgtctgctttcacttctcaccaatctgatgcattcttggattttttttttctattttaagtttgcttctcctaatgtgtatgagtggtttcggagttcactgtataggaatgtgtaatgggtttttatgaaagaaatcttttctttttttgggtaaataatcagagacccttttcaagcttttgctagattgctcgatcagattttgttctgggtaataaccagatcatgtgtaagttgatctcactggtgaattttg

SEQ ID NO: 51882 - DNA, 399 bp, Glycine max
  Clone ID: LIB3109-010-Q1-K1-E9
gggctccattaaattaaagaaaatataaatatgcgtatgattctccagatctgtttatccaccttaggttgaattcatcgccgagcatcagatccgaaatgtcgatcggagatgcttttctgtgcttactgttcatcgcaacttgttggatttccgctgcttctgctgattccatctatggctgcggtggatttgtcgaggcgagctcatcgttggtgaagtcgaggaaacaaactgatgccaaattggactattccgatgtcacggttgagcttcaaactgtggatggactggtaaaggatagaacacaatgtgctcccaatggatactattttattccagtatatgacaagggttcctttgtaataaaattaatggacctcaagatggacatgggat

SEQ ID NO: 51883 - DNA, 388 bp, Glycine max
  Clone ID: LIB3109-010-Q1-K1-F1
ggatgaggaaacattggtagaagaaattggagagagagagagagagagagggttggattggttttcttcttcctcttcctaaagagaatctaatctcaatcctcattacacacatatctacagatttcttcattcctctctcaatcttttctggtttcttttcccctctttgacatcctcgttttcgccgaaacaaaaacaactaagattttgttttttgttgtatttttcttcctgttgttatttgactcggttgtctgaatcagttgttgcagcagggtcgggagccacagctatgcagagccaagttgtgtgcaatggttgtaggagccttctgctttacccaagaggagcaaccaatgtctgttgtgcattgtgcaacacaatt

SEQ ID NO: 51884 - DNA, 304 bp, Glycine max
  Clone ID: LIB3109-010-Q1-K1-F10
ggtggtgtggtgtggtggaggaggaatacacgaagcatatgcaatgaaatgaggcgttttgactgaccttcttggatctgatcgaatccaaacccaaaccctaatctaatcccaaaaagcttattagtctctctcgatcaatcgaaccagcgagcaagattgtctctctcctaggccatgcgaccaccctgttcctccggcatcgacctctgcagagaggtttcctttttcgttttcgccgatttctccatcgattccgtcagccatgactgccgacacccacgccgatcctaatatcaatccc

SEQ ID NO: 51885 - DNA, 347 bp, Glycine max
  unsure (1)..(347): unsure at all n locations
  Clone ID: LIB3109-010-Q1-K1-F11
ggtgttggagaatgaaaactgaaacagagccaaatgaaaccgagtcagattggagcgagttgactcgcgagtgcctcatcaacatcctctctcgactcagcgtcgaggatcgatggcgcggcaccatgctcgtttgcaagtcatggttcagcgtcttcaaggaaccctctcttcacttcgtcttcaacctcgaccctcaattcgactcgcccaccgaatcaactcgctggtggacccncgagttcgaggccaagatcgataacatgcttcgatctgtcgtcgaatgggcccaatcctctctacccatatacgcattcgcccactgtctgatcgttctctcgccctcg

SEQ ID NO: 51886 - DNA, 316 bp, Glycine max
  Clone ID: LIB3109-010-Q1-K1-F12
ggacggagcagaggacaagatgggtagtgtgagttatagcaatctgaagaacgccatgatagcattcttggtccctctaccctccatcctattctacctctcattccaatcgggcattagtactccttcttcttggtcttctctgtggacatggtgctatcaccaccctctgctattggccaatgtccctttcttcttcaatgtgaatttcctcttctggctcatcggcctaatccaatccagccactggatgattgacccgcattggacagtgatacctgtgatgcttgttcattactattcaactcaccctttg

SEQ ID NO: 51887 - DNA, 406 bp, Glycine max
  Clone ID: LIB3109-010-Q1-K1-F2
ggaggaagatgggtttcaattggtgacggggaagaagaagaaaggggggaaagggaatgtgactccggcagcgacgggttctgaggtggcggcagtggcgccaccgggagttacggtggcaactaaggataagaagacgatggggccgaagtcgaaggttccgtttcatataccaacgattaggaggccgcaggatgagtataatatagtggttaataatgcaaacatgccgtttgagcatgtttggttgcagaggagtgatgatgggttgagcttcattcatccactggaaaagctatctgttttgaattttgctgatacaaatcttggggatgttgtgcctgtgaagcctccctcgatagaaagcaccccttttaagctcgttgaggaagtcaaagatttaaag

SEQ ID NO: 51888 - DNA, 380 bp, Glycine max
  Clone ID: LIB3109-010-Q1-K1-F3
ggagtgagcaagagtgaagagcgaagagaatggctcccaagggtttaatctttttggctgtgttatgcttctcagcactgtcactgagtcgttgtcttgcggaggataatggacttgttatgaacttctacaaggaatcatgccctcaggctgaagacatcatcaaagaacaagtcaagcttctctacaagcgccacaagaacactgctttctcctggctcagaaacatcttccatgactgtgctgttcagagttgtgatgcttcactgttgctggactccacaagaaggagcttgtctgagaaggaaacagatagaagctttgggttgagaaatttcaggtacattgagaccatcaaagaagctttggaaagggaatgc

SEQ ID NO: 51889 - DNA, 392 bp, Glycine max
  unsure (1)..(392): unsure at all n locations
  Clone ID: LIB3109-010-Q1-K1-F4
ggaaactaacaacaacaataaaagaccatgtcggtgaaggagtgcgagcaccacaaggggaagaagaggaagatcttccggcaagtgttctggtgcttagtggtgttccttttcatcgtgctggtcacaattcttttgatatgggcaatccttagacccaccaaacccaccttcacgctccaagacgtcaccgtctacgccttcaacgccaccgtggcgaacttcctcacttcgaattttcaggtcacgctcatctcgcgtaacccgaacgaccgcatcggtgtttactatgatcgcctcgaaaccttcgtgacctaccggagccagcaggtcacgtaccgaaccgncatcccttcgacatatcaaggccataaagagatcaatgtttggtc

SEQ ID NO: 51890 - DNA, 400 bp, Glycine max
  Clone ID: LIB3109-010-Q1-K1-F5
tggaaactaacaacaacaataaaagaccatgggggtgaaggagtgcgagcaccacaaggggaagaagaggaagatcttccggcaagtgttctggtgcttagtggtgttccttttcatcgtgctggtcacaattcttttgatatgggcaatccttagacccaccaaacccaccttcacgctccaagacgtcaccgtctacgccttcaacgccaccgtggcgaacttcctcacttcgaattttcaggtcacgctcatctcgcgtaacccgaacgaccgcatcggtgtttactatgatcgcctcgaaaccttcgtgacctaccggagccagcaggtcacgtaccgaaccgccatccctccgacatatcaaggccataaagagatcaatgcttggtctacgttt

SEQ ID NO: 51891 - DNA, 392 bp, Glycine max
  Clone ID: LIB3109-010-Q1-K1-F7
gaagacaagagataaataataactagttgtagctgctggggagagtggaacataataaacatgacaatgaagctgcttttggtagccgttgttgaagttgcatgcttagtttctgggatcttgtcctttggatctgagacactctctgagctttctttcttagaaaacgatgtcgtctcaacagcaagaccttcctcttcatttcaacctcttatggtcgacctcactctcattcaaggagctgattctaaaggagctgtctgtttggatggaacggtgcctggataccatttggatcgtggatttggatctggtgcagatagttggctaattcatttggagggaggaagatggtgtaataccatcagaaactgtgtctatagaaaaaatac

SEQ ID NO: 51892 - DNA, 387 bp, Glycine max
  Clone ID: LIB3109-010-Q1-K1-F8
gaaccacaggagtagccaagcgattcactcaccctattcaccacctctgtaagctagaagctatctaagaacaggtattacgtaatttctttgcaagtttacatgtttaatgtgtgtgagaaaaatggcatgcattagcatgagcagagcaaagcacttcttcatggctttctttgtggggctactatttgctgcacgggtgagtgctcagaccagtgagatccctcatgcgccagcaccatcaccaacaatggacgctggagctggattcttggtgacttactctggagcattcgtgtgctcctcactgatcgtgtatctgattgccctgctatgccatgaattcttcatgctgcaaggagtgaaacctatctactctattcaatc

SEQ ID NO: 51893 - DNA, 319 bp, Glycine max
  unsure (1)..(319): unsure at all n locations
  Clone ID: LIB3109-010-Q1-K1-F9
gagaatgaggtgggaggattgattgagaatcgttcgagactgcaaaatccaaaaccaaaaccaaacacaacacagcattcgtcattcaccgccttgtctcgtcttcttctgtctccgaacacggaatctctctgaatcgcgggattaagagaggaatatgcaacagaggcttaagttgcagcaacaacaacaagccctcatgcagcaagctttgcttcaacagcagcagatgtaccaccctggcatgctcgccgctgctatgtctcagatggagcctgttccaagtggaaattgcctnctgggtttgatacgtctgcat

SEQ ID NO: 51894 - DNA, 410 bp, Glycine max
  Clone ID: LIB3109-010-Q1-K1-G1
ggaggatattgagcaggaactgtccaaagtttccagggcatcaagaggacctggtgtttctcaacatatagcagttggtagcttggaagatgtactgagaaaaatggagatgagtgaaaggaattcaggatgggaggatttgatttttattccaccaggaaaaagtcgctctcaacacacacaagaacttaatgaatgattcccagggtgcgaatttaagctaaccatgatttcatgtggttttcttgagcaaattggatgttactgttgtcacaatttagtcagctagtgagatactaggacctctgccttcaaatagttgtgttcttccttcttctcaaccgaaattccttctgatgcgaatactgcactaagattctcagtggatataaggtaaatgtgtacgtgag

SEQ ID NO: 51895 - DNA, 335 bp, Glycine max
  Clone ID: LIB3109-010-Q1-K1-G10
gaaagaagggctatacagaaggctacaagtgggaggaactatgtctatctgtataaagtttctctgtcgctggtttttgttttgtggggtctggtcttcctcttcagcttatggacaagccatggccatggttatggagatcatgaatctagagaagttccagttggtgtatcaaattggaatgaagatgaacacagacaatgtaaaaaatctaattctgctgatgaatatttaactaaagagactgatgatgtctacattccttctgagactttctgctctgatggtgctaaaactgatggtttaatcggtgagtcactttccagtggagaaag

SEQ ID NO: 51896 - DNA, 401 bp, Glycine max
  Clone ID: LIB3109-010-Q1-K1-G11
gctctaaaccagtaagttatcttctagtatttttcaagtaacttaaggtttcaaacctaggaagttggaagtcatggcagcaacattgatggcagcaacaagttctggcactcttaaagcaactcctttcctaggccaaggcaagggtgccaatgccaatgctcttagggatgttgtttccatgggaactgggaagtacaccatgggcaatgatttgtggtatggaccagacagagtgaaatacttgggacccttttcagctcagaccccttcatacttgaaaggagaattcccaggggattatggatgggacactgctggcttatctgctgacccggaagcatttgccaagaacagggctcttgaggttatccatgggagatgggccatgcttggagcac

SEQ ID NO: 51897 - DNA, 400 bp, Glycine max
  unsure (1)..(400): unsure at all n locations
  Clone ID: LIB3109-010-Q1-K1-G2
ggaagaaaaaaggaagggtaagtaaattgggaatggtggtggtagtgccaggtgtctgtctgaggagaaaatagaataaaaagctatgaaattttggcacaaggtctgattgtagaattgaagaagatgactggggggggtatcactatgcaatcgacgccgggaagctcaggatacttggatttgtatccagagcggaagatgtcctttttcaaaaatccttacattctcggactggctgctgtcgccggcatcggtggtctcctcttcggctacgacactggtgtgatatcaggggctctnttatacattaaggatgattttgaggaggttagaaacagcaatcttctccaggaaacaatagtcagcatggctattgccggngcaatcgtgggagcag

SEQ ID NO: 51898 - DNA, 411 bp, Glycine max
  Clone ID: LIB3109-010-Q1-K1-G3
gggagggagagaggatgaacccacagcactgaaagtaacgttagaaacgagaaagtttgcattattcacaatttcgaaaactcactcagagtggagaagggagtcccacacatcctagcattaacaagaagaagaaaaaaaaatcaacgctttgggtttttctcttggctgcaacttttggtctctccgcagaatctcgttccaattggagttcatcctctaaaggggaaggtggtgtttggaatctgggaaaatgggtttgttttctgggatttttatgggggtgttgttcggcatcgcattgatggctggatgggcgcgcatgatgaagtaccgaagtgccaaacgaattgcaaaagcagctgacattaaactccttggatcccttaatagagatgatttgaagaaaat

SEQ ID NO: 51899 - DNA, 413 bp, Glycine max
  Clone ID: LIB3109-010-Q1-K1-G4
gggaaagaaatggagcataatcgtgacttatgtgaagcatcgattacattggataggtcacaggcattgatgatcccggtgatgagctcttttagcttgcttttgatgttctacttgttctcatctgtctcgcagcttctcactgcattcactgctgttgcttccgcatcctctcttttcttctgcttgtctccttatgttgcctatttgaaggcacagtttggtttagcggatccatttgtttcacgctgttgctcgaaatcttttacacgactccaagcaatactattgttagtgtgctctttcactgtggctgcttggcttgtttctggtcattggatactgaacaatttgttaggcatatctatatgcatcgcgtttgtaagccatgtgcgtcttccaaacatcaaaat

SEQ ID NO: 51900 - DNA, 261 bp, Glycine max
  Clone ID: LIB3109-010-Q1-K1-G5
ttccacgcttgacccacgcttgccagaagacgacaagaagacttcagatagagagcatgaactcgcacatatgggggactcatgagaaactaccaggtgttcttacatacaatcactaaaactctctcaagagtgaccaaagtataaccacacatactaacattaacactaagtaacaaggatcagtcaacgattctacctttactcttgcctgctactcatactctctaacctaattcttgattccaatggagcccattc

SEQ ID NO: 51901 - DNA, 415 bp, Glycine max
  unsure (1)..(415): unsure at all n locations
  Clone ID: LIB3109-010-Q1-K1-G6
gaaggaagaaacagaaaaaacagtggctgcggaatctcttgttaaggagagagaggctaggcttaactttgagaggtcacagagtacactacaggaggatcttggacgagcacaacgagagctccaaagtgcaaatcagaagatattgtcactcaatgacatgtataagcggttacaggattacataacaagcttgcagcagtacaatgggaaactccattcagagctttctacagttgaaaatgaacttaagagtgtagagaaagagaaagctactgtagtggagacccttaccatgttaaagggtcagcttactttgtctatggcttctcaagaagaggccacanaacagaaggatgcattggctagtgaagttacatctctccgagtagagttgcaacaagtgagggatgat

SEQ ID NO: 51902 - DNA, 402 bp, Glycine max
  unsure (1)..(402): unsure at all n locations
  Clone ID: LIB3109-010-Q1-K1-G8
ggacttttcaaagggaatggtactaattgtgctagaattgtccctaattctgctgtgaagttcttcagttatgagcaagcttctaaaggtatactgcatctgtataagcagcaaactggaaatgaggatgctcagctgactcctcttttacgccttggagctggagcttgtgctggaataattgctatgtctgcaacttatccaatggatatggttcgaggcaggattactgtgcagactgaggcatccccatatcagtacagaggaatgtttcatgctttgtctactgtgctcagggaagaaggtgctcgtgctttatataagggttggcttccttcagttattggagttattccttatgtaggtctcaactttgctgnctatgagtctctgaaagattat

SEQ ID NO: 51903 - DNA, 415 bp, Glycine max
  Clone ID: LIB3109-010-Q1-K1-H1
ggagaacaaaacaagtgtttcgaatagattatcctaagtctttgggaatagtgctgcaatggcttcaagtcaggaggaggtgacccttttgggagctactggaagcccatttgtgtgcagggttcatattgccctcaagttgaagggagttcaatacaaatatgtcgaagaaaatttgaggaacaagagtgaactgcttctcaaatccaacccagttcacaagaaggttccagtgtttattcacaatgagaagcccatagcagagtctcttgtgattgttgaatacattgatgagacatggaagaacaaccccatcttgccttctgatccttaccaaagagccttggctcgtttctggtccaaattcattgatgataaggtttttggtgctgcatggaaatcccgtttcacagct

SEQ ID NO: 51904 - DNA, 285 bp, Glycine max
  Clone ID: LIB3109-010-Q1-K1-H10
gaaggaataatgattcaacaaggagtaggaagggagccggccatgatgcaacatgcacatttcacacatgccaaacagaactctatgatgtctttaaattcctttacttcaggagcagaaagttgttatgcgaatagcattccacgtgctgacaatgggagatcaaatgggaagttactacatactcatagcatactaagtgcgagccacaatgatctggatcatttctgtcaagctacgtatatggaatattctcatttccttggaccagttgactactcatct

SEQ ID NO: 51905 - DNA, 326 bp, Glycine max
  Clone ID: LIB3109-010-Q1-K1-H11
gtccttagaggtgactgaaacagctcaagactgaggaggtaattcagagaaacgactcttctgctttgatctcaacgaagatggtgctgatgatatggctgtttatgtaaaagctacgtctaccccaataccagttgtctctgcttcaaggcctgagccaacttctgggttgcctgtggcccctttgcaggttgagggaacacttgcatggtacgggtcagacggcaccagtgccttccgacctgcatagtcttgtcacaatcgagataacgacaagaatctttctgctgacacgaactctgatgcttccaagcagaggcaggatt

SEQ ID NO: 51906 - DNA, 120 bp, Glycine max
  Clone ID: LIB3109-010-Q1-K1-H12
gaagcgaaaagtgaagagaatggctcccaagggtttaacctttctggcttgggtaatatggcgttcagcactggcactgagtcctttctgtgcggggaaagggcaaaataatggccttgt

SEQ ID NO: 51907 - DNA, 401 bp, Glycine max
  Clone ID: LIB3109-010-Q1-K1-H2
gaaggtggtccagttctcaagtttctggaaatgtttgatagctatcgagttgaacattgtttacgcctgtgccaagaatatggcattatagatgcatcggcgttcttattagaaagggttggtgatgttggtagtgctctttcacttacactttctgatctaaataataagtttgttgatcttgatgcctctgtggaagctgtagttttaaaccatcgcagagatggttcttcacatatggaaatattcaacagtgttttaaaaacaaaggaggtaaatgacatccacaatttattgcgtgcctgtattggtctgtgtcagcggaacacccctcgtctaaatcctgaggagtcagaggcacattggtttaaattacttgactcgttttgtgacccactgat

SEQ ID NO: 51908 - DNA, 413 bp, Glycine max
  Clone ID: LIB3109-010-Q1-K1-H3
ggagagaaagagtgaggagagaattacagagcattttccaacacgattacacgaccgaatcaaaccctctctttctctccgaagctgcgtttaatatcttactcgccttagattgttcttctctttcattatactgttctcttttcgatttgagggaacagtacaagagtgtgaggatcggttaacccaactgcacaggtagtcactaaaataatggagtctcacgatgagactggatgccaggctcctgaacgccccattctttgcattaataattgtggcttctttggaagagcagctaccatgaacatgtgttccaagtgttacaaggacatgctgttgaagcaggagcaggacaattttgcagcatcgtcggttgaaaacattgtgaatggcagttccaatggcaatgg

SEQ ID NO: 51909 - DNA, 403 bp, Glycine max
  Clone ID: LIB3109-010-Q1-K1-H4
gacggctaaaagctaaatatcatcaaagtactcaaattagcatggctgtcatggttgcattcttgaatttgatcatcatcttttcagtagtctctacaacagtaaaggatgccactgctagggacaaaactgttccagcagcaattctgcgaatgcacttccatgattgtttcgttcgggggtgtgatgcctctgtgctgctaaattcaaaaggaaacaacaaagcagaaaaagacgggccaccaaatgtttctttgcatgcattctatgtcattgatgcagcaaagaaagcactagaagcttcatgccctggtgtggtctcttgtgctgacatccttgctctggcagcaagggacgcagtttttctgtcaagaggacctacatgggatgttcctaaaggaag

SEQ ID NO: 51910 - DNA, 391 bp, Glycine max
  Clone ID: LIB3109-010-Q1-K1-H5
gggggtctcattcaagttatggaagctgggcaaatgccttttggttctgggattgatctccgtgacaatccggtgggagattttctgtcgtccagggatgagccccagatgatttctggttcatcactttttggtaatggtcacaagagagacaaccttggcctggataatcatcattctctgaatggcagtaacaagcggctgagaggtgatagcccgtggaactccaagccaatggactttgaaacgtgcatagaacagatggaacattggatggggaaagctagaatgatgtttgcaacaaaagatcaggcttgcgaagaatctacaatgaatcagcaactcttgattaatgagctccagaagcgagataacatgattgagcatttgc

SEQ ID NO: 51911 - DNA, 402 bp, Glycine max
  Clone ID: LIB3109-010-Q1-K1-H7
gaggaaaggagaggagaggaagaggggtcagttgttcattttcatcatttcattgtttcttttcttttccagacatcaaaccaaacactagctacgcttctctctctttccttcccagagcttcctgtggctgtggaatcatcgtatcttcttacgtccgaagtaagcctttgtcttgtgtgtgttcttcccccttccgtcaggaaaatcagatgcatcgtggtaaattttcccttacacccaagaatgaagtcaaggacttgacaggttcaagtttaaccagttacaaacatagcagtcttctggaccccatagatgtttcttcatcttcagatgatgaaaatgaccttcctaatgatgatgtgtctaatcaattagtcctttatgatcctgtggcgaatg

SEQ ID NO: 51912 - DNA, 407 bp, Glycine max
  unsure (1)..(407): unsure at all n locations
  Clone ID: LIB3109-010-Q1-K1-H8
ggtgtgagttcattaacatatacaaattctctgtgttgtgttgtgtacttgtgttaattgtgttgttgttgtaggaaatttaagtgaagagagaatgatgatgaagtctgctatgtgtgcattggtgcttgtggcactggttgtggttgaagtggggcccatggctgaggctgcggtgacttgcaacccaacacagttgactccttgtcttccggcaattaattcaggttctgcaccttcgagtgcttgttgccagaagctgaaggagcaaaagccatgcttctgtggctacctcaaaaaccctagcttgaagcagtatgttaactctcctaatgccaaanaaaccgttagttcttgtggtattgcctatccaacttgttaagcacctcttatatatatatataaaa

SEQ ID NO: 51913 - DNA, 233 bp, Glycine max
  Clone ID: LIB3109-010-Q1-K1-H9
ggatcatgattggtgtgcagcagtgagaaaactgttgaacctactgcttgatggaactgtaaatacaggagatcatccttccttgtatctcgcgctttcagagatgggtctccttcacaaagctgtaaggagaaacagcaagcagttagtggagtgtcttttgagatatgttcctgagaatatttctgataaactaagacctgaagacaaggcactggttgatggcgagaatc

SEQ ID NO: 51914 - DNA, 426 bp, Glycine max
  unsure (1)..(426): unsure at all n locations
  Clone ID: LIB3109-011-Q1-K1-A10
ggcactgagtaacggcaaagtccttgctggttgcggccattcncgatggcgttgcaggagaggctagacaagttcaagaaacagcaagagaagtgccaaacgacactttcgaccattgcagctaccaaggccgccgcggcaacccaaaagtccgccacacatgcctcggcaaatggaagaaacgctgcccctgcggttaagttttccaacgacaccgagaggcttcagcatattaatagcattcgcaaggcccctgtgggtgctcagatgaagcgtgttattgatcttcttctagagacacgancagcttttacaccggagcagataaatgaggcatgctatgtcgacatgaaggctaacanagatgtctntgagaatctgaagaaaaacccaaaagtgaactatgatgggcaacgattatcttac

SEQ ID NO: 51915 - DNA, 134 bp, Glycine max
  Clone ID: LIB3109-011-Q1-K1-A12
gactgaaaatttgaagaaaacactaatctaaatcctgatactgaatcaataacacactggttcaatactaccattctctaacgctatcattatcaacacatctgctcaatacactacttgcatatgatgattac

SEQ ID NO: 51916 - DNA, 371 bp, Glycine max
  Clone ID: LIB3109-011-Q1-K1-A2
ggatgaccagcaagacatcacgagaggaaagggtatggttgattccctcttccaagctccacaggagactggaactcactatgcagtcatgagctcttttgagtaccttagcactggacttaaacagtataacttggataacaacatggacggtttttacattgctcctgcttttatggacaagcttgttgttcacatcaccaagaacttcatgaccctgcctaacatcaaggttcctctcattcttggtatttggggaggcaaaggtcaaggaaaatccttccaatgcgagctcgtctttgccaagatgggaatcaaccccatcatgatgagtgctggagagttggaaagtggaaatgcaggagagccag

SEQ ID NO: 51917 - DNA, 102 bp, Glycine max
  Clone ID: LIB3109-011-Q1-K1-A4
aaccacacaaacggaataaagacaacttaatgagacagaaatgccgggtagggtccaaatattgcatgcgattctgccaaaaatccattcaactctcatatt

SEQ ID NO: 51918 - DNA, 350 bp, Glycine max
  Clone ID: LIB3109-011-Q1-K1-A5
tgcatgcgacacaccacacacattccactttacagggggagtgtaccaaaatcacactggctccctctgtcaacgggttcactattcttcctctctctatatctctctctggacacacacatacttgctggcaaaccattcttcttgtgaaggagtagtgatagcggactaatcttttactgaataacgatacaacagcatgccatgctgactgactaactctactcacgcatacccgacacataaatccctgaatctgtattgcatacgcacactgtgactcttaaactcgtcatgatcataaaaccttctacaatcattttactcatttctttcctggcttgaatcaa

SEQ ID NO: 51919 - DNA, 439 bp, Glycine max
  Clone ID: LIB3109-011-Q1-K1-A6
ggggctttggagtgtgtgttcgggtcttggccgcgaccgacgaagatgttcacttcacgattgtctccatctctcctattccccgcatttcatcacaaactttattcatttctcttctctattcgcaatcatcgctgttaactggtgcattctggaacactggctggttaatgattcatagtgttctaaaagcaagtaggtttcaaaatccacgtagagaagccctcgttttgaccattgctatcagaggttgtgtttgtcgtttagcatttagctcaatgaaagacatcaattgtaaagtggattctagttcatgtactcttgcccccaatagggaaccctgcatcacagagtccttatcagttagtgggaatggtactactacttcatctatgagtgtcaaatccacccctgaaattgaaaagaagtttggtcatca

SEQ ID NO: 51920 - DNA, 440 bp, Glycine max
  Clone ID: LIB3109-011-Q1-K1-A7
ggagaaagcaatgggcattgatagtgaatgcgtggtatctcacaaggcctatgcgagggtgggattgcttgggaacccgagcgatgtctactacggcaaaacgatagcgttaagcgtcgccaacttcttcgccaccgtcacgctgcgtccctccgaccagttaatcctccaaccacaccccctccacgatctccttcatttctcatcgctccctcaattggtcaacaggttgagctcccaaggttactatggaggcgtgcgattgcttatggctatttgcaatgtcttctacgcgtattgcagagagaacgccatcgatcttggcgacgacaatttcactctctgctacgacaccaatatccctcgccaggctggtctttcgggttctagcgggatcgtgtgtgctgcgttgaactgattgttggatttctacaacgtca

SEQ ID NO: 51921 - DNA, 235 bp, Glycine max
  Clone ID: LIB3109-011-Q1-K1-A9
gggtgaaatccacttggctgtgaggtttacttgttcttctttgcttaatatgatgcacatgtattcactacctttgttgccaaagatgcattatattcacccactaactgtcagccagcttgataatctgaggcatcaagctactcagattgtttcaatgagactgagtcgtgccgagccaccgctgagaaaagagatagtggaatatatgctagatgttgggttccacatgttg

SEQ ID NO: 51922 - DNA, 425 bp, Glycine max
  Clone ID: LIB3109-011-Q1-K1-B1
ggaggaagaagaggttgaagaagtggaagaagaggatgcgatgcaaaatcatagcagtgatgaaacaaaggtggaagatgaggatgagaagaaaaaacatgctgaactcctttcaattcctcctcatgggtctgaagtatacattggtggcattcctcatgcctcagatgaggatttgaaatctttatgtgagcgtattggggaagttgcagaggttcgaataatgaagggaaaggattcttccgagaacaagggctttggttttgtgacctttagaagtgtggaattggcttctaaagccattgaggagctaaataataccgaattcatgggtaaaaaaattaaatgttcaaaatctcaagccaagcaccgtctttttattggcaatgttcctagaagctggggtgttgaagatctgaagaaga

SEQ ID NO: 51923 - DNA, 146 bp, Glycine max
  Clone ID: LIB3109-011-Q1-K1-B12
taaaaatcatcaaactactccaatgaacatttctaaaaccggtgcattcttcaatttcatcatcatatctccattatcctctacaaacaattcactaaacttaaactactattcaaaaacattccctcatctttaattcatatctt

SEQ ID NO: 51924 - DNA, 391 bp, Glycine max
  Clone ID: LIB3109-011-Q1-K1-B2
ggtcatgtgggtaatgaaatctatgggaagtttgtgtcagatgtgcttcgtgatgagggcattggtttggttgggatgattactaatgacgatatcgtcaacagctctagtggtagtgcctcttgtgaaacgcttttatgttgggttcttgttgatcctttacaaagacatggtttttgcagtcgggctgatttttgcgaggagcctatattgcattggatgagtaaattgtccagtgaagttaaaatggctattaaaaattcaaaggtcttgttctgtaatggatatggatttgatgagctctctcctggtgcactactctcagcaatggaatatgctgttgaagttggcacatcaatcttctttgatcctggaccacgtggaaagagtc

SEQ ID NO: 51925 - DNA, 419 bp, Glycine max
  Clone ID: LIB3109-011-Q1-K1-B3
ggcggatgagcttgttgctgaattttctgaaccaggcaagagtgaattgccccctgatcagcaacaatatgatgaaaaaaacatccgccgaagggtctatgatgctctgaacgttctcatggcaatggatattatttccaaggacaaaaaggaaattcaatggaggggccttcctcgtactactgtgaatgatattgaagaactaaagacagagcggcttgggctcaggaatagaattgaaaagaaaacagcctatctgcaggagcttgaggagcaattcataggtcttcagaaccttattcaacgaaacgagcagttatatagctcaggaaatcctcccagtggaagtgtatctttaccttttattttggtacagacacgccctcatgcaactgtggaagtggaaatatcagaagata

SEQ ID NO: 51926 - DNA, 444 bp, Glycine max
  Clone ID: LIB3109-011-Q1-K1-B5
ggatgcaatagagaataattactggtttgaattgttcatggatgatctacctttgtggggatatgttggtgagttacatcctgataagaacagtgataatggcaagcatgtcatttatacacacaaaaacattattgttaaatacaacaatgatcagattattcatgttaatctcactcaggatatcccaaagcctttggaagtgggaaaacatttggacatgacatattctatcaaatgggattctaccaatgtcacttttgggcgtcgctttgatgtctacctggatcatcctttctttgagcatcagattcattggttctccatttttaactctttcatgatggtcatcttccttactggattggtgtcaatgatattgatgcgaactctgagaaatgactatgcaaagtatgctcgggaagatgatgatttggaaagtct

SEQ ID NO: 51927 - DNA, 436 bp, Glycine max
  Clone ID: LIB3109-011-Q1-K1-B6
ggtacatgatcagtagttccccaattttgagttggatagattatcacacctcgtgaacacaggttgcatttgctgcggaggatcgatctcgccaatggatttcaacaaggagcaaaagaaaaccatagaccaatccatcttattatgctgcaagttctttgtctccgaatcacgcaacaacgccaccctcaatgcaatagaacgagttgcaaggtcaaacccggaaactgtgattgtgaacatgtttcatgatcgaagttataacagggcaaggtacgaccttgtgtcatatgttttgcacgactgcacaggaaatcccatatacagccccttgcaccaaactgtcatagccatggctgaggctacattcaatgccatcaacctcgaattccatgaaggtgctcaccctcgcttgggcgcactcgacgacattatc

SEQ ID NO: 51928 - DNA, 278 bp, Glycine max
  Clone ID: LIB3109-011-Q1-K1-B8
aaactgcatactgtgaataatccaacctgggaaggcatattgacccacaatatgtcaaaactacaaagtctttactgtggaccaatcatatcttacatgatgaatgtaaaagtacaggccctataccttaaggtgaacgatgaactgttgctggtccagcatataatggatcgctaggtgcaacagatttatagacagacggatcgatctcaagacatcttaccattctcagctgtagaagtcatctcaacatattgttccttgttaggataactcat

SEQ ID NO: 51929 - DNA, 432 bp, Glycine max
  unsure (1)..(432): unsure at all n locations
  Clone ID: LIB3109-011-Q1-K1-B9
gggagagtgctaagcaatcgtcttctcttctcggagcttggctttgcttatcgattctctctcctctcgtttctctaattccaaggtttgtaaaagatggcagatgccgaggatattcaaccccttgtttgcgacaatggaaccggaatggtcaaggcaggatttgctggtgacgatgctcctagggctgtctttcccagtattgttggccgacctcgacatactggtgttatggttgggatgggtcaaaaggatgcctatgttggtgatgaagcccaatccaaaagaggtattcttactctcaagtatcccattgagcatggtatagtcagcaactgngatgacatggaaaagatctggcatcacacattntataatgaacttcgtgttgctcccgaggagcacccagtgcttctcactgangcccccctc

SEQ ID NO: 51930 - DNA, 440 bp, Glycine max
  Clone ID: LIB3109-011-Q1-K1-C1
ggtttctttcaatgaaataatattaatatcaatggaatgagctggtaatgtaaaatactgctaatgttaatatgaagtttggatggtcttattggcagaagatgctaggtggtgttcatcaatattctgaaaggtaaaacgattttggtttttaatgataatataaccatgaatctaacatcagatattgaacgctacacatcaaaaataaatcgagccaacgcatttaattgtaagtgtcttcatattacctgtgttctgtcacatctttttgcataatattggcactaagtcttttttgatagaaattgtgaagatgtactgttatcattgtatcaactatattgtgcccttctttttttatttgatttggcaaacacggctacttttctccaataagatggatcatttgtattgcggctttgtgcacaattatctac

SEQ ID NO: 51931 - DNA, 404 bp, Glycine max
  unsure (1)..(404): unsure at all n locations
  Clone ID: LIB3109-011-Q1-K1-C10
ggcacgcagaagcagaagcagaagcgcaagcgcgtggaaccctaattagggtttgcaagccgatttgggattcgcctttcgcgtgatcgcagcgctggatccgtaccgtgttcctccgtctacggaagcgccttttgctcgatccttcgctgatctcggaagcatgtacggtccccgaggggcaatgttgggaagcggnggggtttcggacgggtacgaggttggctcanagagacaaagaatgatggaatccaatccatacttcgcagtgagcagcggaacaggcaacttacctttatggtatgctggtggcttccagcccccccccttttctgtggttcgtctcaagggggcttcattcaactgcactgacattgacatcttgaagttctttgctggactga

SEQ ID NO: 51932 - DNA, 316 bp, Glycine max
  unsure (1)..(316): unsure at all n locations
  Clone ID: LIB3109-011-Q1-K1-C11
gacagcgaaacgtagagtgatttcagtgagtgatcggtgttcacttgatctcatcataatcgtcagcgtcaattgaagaagatgccgatcagaaacatcgccgtcggaaggcctgaagaggcgactcaccccgacacgttgaaggcggctttggctgagttcatctcaaccttcatcttcgtgttcgccggctcatgctccggcatcggctacaacaagctcaccgacaacggcgctgccacccctgccggcctcatctncgnctncatcngccatgcattcgccctcttcgtcgccgtctccgtcggcgccaaca

SEQ ID NO: 51933 - DNA, 308 bp, Glycine max
  Clone ID: LIB3109-011-Q1-K1-C2
ggtagtagcaagcgagcatggctccgaagaaggtgcttgtcctttgcggggacttcatggaagactatgaagccatggttccatttcaggcattgcaagccttcggtctcgccgtcgacgccgtctgtcccggaaagaaatccggcgatgtctgccgcaccgctgtccatgtacttgccggcgcccagacttatagtgagacggttggtcacaatttttcactcaatgcaacgtttgatgaagttgatgctgcaagctatgatgggttgtgggtgccaggtgggagggctccagagtatcttgctcat

SEQ ID NO: 51934 - DNA, 373 bp, Glycine max
  Clone ID: LIB3109-011-Q1-K1-C3
agagaagagaggagaaagcagggggcattgatagtgaatacgtgatatctcacaaggcctatgcgagggtgggattgcttgggaacccgagcgatgtctactacggcaaaacgatagcgttaagcgtcgccaacttcttcgccaccgtcacgctgcgtgccttcgaccagttaatccttcaaccccacccccttcacgatctccttcatttctcatcgctccctcaattggtcaacaggttgagctcccaaggttactatggaggcgtgcgattgcttatggctatttgcaatgtcttctacgcgtattgcagagagaacgccatcgatcttggcgacgacaatttcactctctcctacgacaccaatatccc

SEQ ID NO: 51935 - DNA, 445 bp, Glycine max
  unsure (1)..(445): unsure at all n locations
  Clone ID: LIB3109-011-Q1-K1-C4
gagccaaatgaacatatctccagctaatggaagggtgtgattatcagatacaggtgcttttggtcttgaaacaagtcacttccttgttggaagtggtgctactgctagcaatgctgcttctgtagatgttgggggattccatcatgaatttggtacaagcagaaatcctactgctccttaaaggttttcataatactcaaactcaaactgctaggggaattagaagcaactattctcagagatccacaccaacttttagggcttcttcaagcttgcgcttgngacaagtgacatctgatgatggattgcctatggtagctgaaagttactcttctagacttccaaagccattgagcaccattggcaggaggaatggtgatagaaatgggaagtcaagaatttctagtgaaagatatcgatcattggctgagagtggtctgcatga

SEQ ID NO: 51936 - DNA, 320 bp, Glycine max
  Clone ID: LIB3109-011-Q1-K1-C5
cgccaacggagggggaataccggacgatcatctcatgactatgctgatgggtacactacgtacggtaccgctggacactacactactcttgcaacgacttatttggatatggatgctacacatatgtcacataaggcgaagcattcactgatgctctccggtctacagtgacaagcatcccatgttcctatcattgcagcttgaaaacacgtcattactactatagcgggcccatgaatgcacttgactctgcactcgtcagatatatcgctaccagctgcgatcgagctgttaatgccaactagacgttttatgatgaa

SEQ ID NO: 51937 - DNA, 368 bp, Glycine max
  Clone ID: LIB3109-011-Q1-K1-C6
agacgtacgcgcgggtgcggcagcacgacgacaacagatggggtctcacggacgtggcattccatgaaggggcatgtgcttcactgggacttcacggcagactctgaagccatggttgcatctgacgcattgcacgccttacgtctcgccatgaccccgtcagtgccggaaagaaatccggcgatgtctgacggaccgatgtccatgtacttgccggcgcccagacttatagtgagaccgtcggccacaattgttcactcaatgcaacgtttgatgaagctgatgctgcaagctatgatgggttgtgggtgccaggtggcagggctccacagtatcttgctcatgttcctggtgttgtggaactggtg

SEQ ID NO: 51938 - DNA, 388 bp, Glycine max
  Clone ID: LIB3109-011-Q1-K1-C7
ggagaaagcaatgggcattgatagtgaatgcgtgagtatctcacaaggcctatgctagggtgggatcgcttgggaacccgagctatttctactaccgcatagctatctgctacaagcgtaaccctacttcttaagccaccgtcacgcttttttcctccgaccagctaagtctcttacaccacttaattctctatcctcatcatctctaatatctccttcatttgttatacattcctagcttggacaactactttagcttctatcgttactatataggcattcgatatgcttatggctattttcaatgtattttactcctttttgcacatataacgccatctatcttttcgacgacaatttcactctcttcttactagcctattttcct

SEQ ID NO: 51939 - DNA, 426 bp, Glycine max
  Clone ID: LIB3109-011-Q1-K1-C8
gatctcaaaccaagcggtgttggattggacaatggcatcaatccaaaaatctgtgattttggaatggcatggatggtagctacagaccacattcaaggatgcaccaatagagttgcgggcacatatggatatatgtctcctgaatatgcactgcatggacaattttctgagaagtctgatgtatacagttatggagttatggctcttgagatcattaatggcaagaacaactcttgttcttttgaatcatgtcgagacgctgacctattgacctatgcatggaataactggagggatgaatcaccatatcaattgctggattcaactctgctagaatcttacgttccaaacgaagtggaaaagtgtatgcatattggtttaacgtgtgtgcaagaaaatccagatgacaggccaacaatgggaaca

SEQ ID NO: 51940 - DNA, 370 bp, Glycine max
  unsure (1)..(370): unsure at all n locations
  Clone ID: LIB3109-011-Q1-K1-D10
gatagcagcatcatacaaagcattgaattcaaaaacttaagttcattccttgtgttttgctttcttcctcaaaaccaaacatgtcgaacacatgcggcaactgcgactgcgctgacaagactagctgcaccaagggaaacagctatggtgttattgtagagactgagaagagttacatcgagactgttgtcatggatgttccagcagctgagcatgatgggaagtgcaagtgtggcactaactgcacttgcacggactgcacctgtggccattaaggaatatgtatganaatgtaattgccatgtgtttggcaatacaaatatccaaataatgtaatcttcgtatgaataaatgtgtgtgctgttatcct

SEQ ID NO: 51941 - DNA, 399 bp, Glycine max
  Clone ID: LIB3109-011-Q1-K1-D11
gatgtctcttagagagaaagaatcccttgaattgcgtatacacagtgaatcttattctgattcttctgacagcgggtgtgaagattcaatcgcaaaaaaggataacatagatgtgactgtggaacaaaactcatgtttggttgttgaaaaaaatgctatgaattcatccacctcagaagtgttgagttcccagtctcttgacggtgaagaatcaattaaagtttccttgttcagtgaatcatctgatgctgttgatgaggatacccatgacatactagctgaagtttcacctgatgcttctgtgtcaagcgaaagacctattatcacaatgacagaacctttatgctccagaaacttcataacttctgacagtctatattcaaagtcactcggaagcta

SEQ ID NO: 51942 - DNA, 310 bp, Glycine max
  Clone ID: LIB3109-011-Q1-K1-D12
ggtcctgtcagaagattgagatcttagtgagtgagggaggaagcattgacagtaggtggaacttaaggaccagaatcctactgatcatcgagtattcacgatatcatggactagcctggaatctcaagcaatgcaccatagaacacgacaaaccttactgtatacgcattctatacagatgcacatacatgctttcatgatagcttccatagctaaagatatacttgtgattgcatctccatctacactgactgcagctgctgacccaattgcttctcttatagacacagcattcatacgtcatttgcat

SEQ ID NO: 51943 - DNA, 441 bp, Glycine max
  Clone ID: LIB3109-011-Q1-K1-D2
gatgttattcaattggaaaatcatgttagcaatgggtttgggttcttatcaaacaaaaagccagaaaattgtgaaagaggagttatatcagcaaatcttaagaatttcacagaaaatgcacacaaagatgtgtcagagaagttcaaagctgaggagttaatagaacaacctgtggaaccagttgtttgcaattttctttccgatgatgattttatttgttcaagttctgactcagattctattagcagttctttggaggaggggtttttgtcagacacagactttggaaccactactgagtatgacacattgggaagaaatgcagcataagaggatttggactttggggatgagaaaagctatgagaatttggatgttggatatgagcctgatgattttactgaaggggatgaagatataatggatgagtttggaaaattg

SEQ ID NO: 51944 - DNA, 444 bp, Glycine max
  Clone ID: LIB3109-011-Q1-K1-D3
gactacaattagagcaagcacacctatgtttctgatgtctcggaagattaaatcacttggtgtcaaatgggttatctcaggagaaggatctgatgagatctttggagggtatttgtacttccacaaggcacccaacaaggaggagttccacagagaaacatgccgcaagatcaaagcacttcaccaatatgattgcttgcgagccaataaatcaacatttgcttggggtctagaagcccgtgtaccatttttggacaaggcgtttatcaatgctgcaatgagtattgaccctgagtggaagatgataaaaagagatgaaggacgaattgagaagtggattctgaggagagcctttgatgatgaagagcatccttatctgccaaagcacattttatacaggcagaaagaacaattcagtgatggagttggctatagttggattga

SEQ ID NO: 51945 - DNA, 298 bp, Glycine max
  Clone ID: LIB3109-011-Q1-K1-D4
gtagaagatggcagacactgaggatattcaacctcttgtttgtgacaatggaacaggaatggttaaggctggatttgctggagatgatgccccacgtgctgtgtttcccagcattgtaggtcgtcctcgtcacactggtgtgatggttggcatgggccaaaaagatgcatatgttggtgatgaggcacaatctaagaggggtattttgactctcaagtaccccattgaacatggaattgtgagcaattgggatgatatggaaaagatttggcatcataccttctataatgagcttcgt

SEQ ID NO: 51946 - DNA, 438 bp, Glycine max
  Clone ID: LIB3109-011-Q1-K1-D5
caccccaagaagaagaaggaggacaactggtggagacaccagagtctcttcacgtgttccccgaccacgctcttgaacggccttgccaggggtgccagaggcatgcttggtctcggtaggtcccgcagttcgtttccttcgcaggttttcgacaacttcagcacgcaccgtaaactcaccctctgtctctcctcgtccaaaggggttgtcctcttgggcaacgtggccacctacgagtccgaggttctcaaatctctcaccttcacaccccttatcaccagcttccccaggcaggaatacatcatcaatgttagctccgtcaaaatcaacggcaataggttgtctttggacacttcatcatcagagtcgtccaatgaacaagatggtagtgtaggggctttaactcttttaagcacaattctgccctacaccaccatg

SEQ ID NO: 51947 - DNA, 255 bp, Glycine max
  Clone ID: LIB3109-011-Q1-K1-D6
ggcacaagtgagtttgttgatcgagatagctaggggcagtgagatgaaaatgaaggtccttgttgtcttcgatgctacaattttggtagcatggcaatgccatgcgtacgatctgtcccctatgcgaatgaacactggctatggtgcccgtactccggaggcgaaatgcgcaagttggaggcttgctgtggaagcacacagcatctatggctttgagaccatacctgaagagtgcgttgaagcaactgaggaata

SEQ ID NO: 51948 - DNA, 426 bp, Glycine max
  unsure (1)..(426): unsure at all n locations
  Clone ID: LIB3109-011-Q1-K1-D7
ggcccaaaatattttcatagcattttcagaggaagatggcgggtacggtttcgacttgtttcttcttcgtgtttcttctttctctccttcttccttttcagatctccgctgaggaatcctcggagaaggagttcgtactcacattggatcactctaactttcacgacactgtcagcaagcacgatttcatcgtcgtcgagttctacgccccatggtgtggtcactgtaagaagcttgctccggagtatgagaaagctgcttctatcttgagtagtcatgatcctcctattgttttggctaaagtagatgccaatgaggagaagaacaaagaccttgcatcacaatatgatgttaagggattcccaacaattaatattctgagaaatgggggaaagaatgttcaggaatacanaggtccccgtgaag

SEQ ID NO: 51949 - DNA, 372 bp, Glycine max
  Clone ID: LIB3109-011-Q1-K1-D8
accggacttgaatttcggggtagacgtacgcgcgcgtgcaagcgtacgaccggatgcgagaagacaacggactgatcaccacagttaatgggggctgatagcctctgcgtggcgttggatgctaacagagcaggagcctaaaacctttgtgacgagaatcttagccatgggtagcaacggaatactggtacgaattatcacaaaccggtcacatcaaattcattcttgacttcgatagacacccatccttcgacgcctacggattatagaccggtcgcatctgcattctatacgacgtcattccgatcagcgaccgccgtacctatcgtacagtctcacatccctgatcttccccagttactgatagctgtc

SEQ ID NO: 51950 - DNA, 328 bp, Glycine max
  Clone ID: LIB3109-011-Q1-K1-D9
tcttaagggggaatacagattgtatatcagaagtaaaattatccacctttttgagagtattcgtctctaatctaaatcgacttgctatcgaatatgtggattcaaaaacaagtcgagtttttgttactttcttttttgtataaaaattgatttaatgtaatcatttcattatatatatctattataattatataattgattcaattttttatttttctttttttctaatatttttaaattcccatttttctactttacaaattctaaatacagagtttaaaatacattgataaaataccgagttaattttcattgacgtctttacttt

SEQ ID NO: 51951 - DNA, 414 bp, Glycine max
  Clone ID: LIB3109-011-Q1-K1-E1
gggagaattttggtgtgtgagcgtcaacaatggcgtgtcttcgtcttcagaatcggcggtgtcggagcgaagaggaataccgggggctcagttcgtagaggatgtccaaacttacctcactcaatcgggtctcgatgttggttcagccctggcttttctccaagagagacttcagcagtacaaggtagtagaaatgaagcttcttgctcagcaaagggatcttcaggcaaagataccagatattgaaaagtgcttagacgtcgttgctacattgaaagctaagaagggtactggtgaggaacttattgctgattttgaggtatcagaaggcatctattcacgagcacgcatagaagaaaccaattccgtgtgtttatggctgggagctaatgttatgctggaatattcattaga

SEQ ID NO: 51952 - DNA, 393 bp, Glycine max
  Clone ID: LIB3109-011-Q1-K1-E11
gacacacacaaattcacacaaacataaaaaaaaaaaaaaaaacacacacacactctcatacacacgttgtcgcgcacacattccttcattccgcagcaacaaacaaacatcttttaccttaaacaacaatggccgatgccgaggatattcaacccctcgtttgcgataatggaaccggaatggtcaaggctggttttgctggagatgatgcaccgagggctgtgttccctagcattgtggggcgtccacgtcacactggggtgatggttgggatggggcagaaagatgcgtatgttggggacgaggctcaatccaagaggggtattttgactctcaaatacccaattgagcatggaattgtgagcaattgggacgacatggagaaaaatctgc

SEQ ID NO: 51953 - DNA, 406 bp, Glycine max
  Clone ID: LIB3109-011-Q1-K1-E12
gggagtgcagcggagaagaatcacattcgcattctcaatcacatccattcattcactcatccatatcccttctttccactaacttctctctctagttgatacaaataaaaaacaaagtttcatactttacgacacccttttctgcaactgatgatggaaggaagctgaaacagtgaaaaacagcaacaacgaccaccctgtctttgttttttgtttgttgagttgaaactttagagaaagtgaatagtgatatggaggcaaagggtgtgcggttcttagcgtatcaatcaatattttcgagcgttggatctggggacttcgatggggtgaagaaactggtggaagaagtgaagaaggaagaatggtcatcgctctctgatgtgatgtctcttcacaacgatgctgg

SEQ ID NO: 51954 - DNA, 444 bp, Glycine max
  Clone ID: LIB3109-011-Q1-K1-E2
ataggagaaagttctaataatctcgatgaaagtgaaaaatataagcatttgtggcttgaatgcgaaaattgttatggattaaattataaaaaattttttaaatcaaaaatgaatatttgtgaatactgtggatatcatttgaaaatgggcagttcagatagaatcgagcttttgattgattcgggtacttggaatcctatggatgaagacatggtttctctggatcctattgaatttcattccgaagaggaaccttataaagatcgtattgattcttatcaaagaaaaacgggattaactgaggctgttcaaacaggtactggtcaactaaatggtattcctgtagctattggaattatggattttcagtttatggggggcagtatgggatccgcagtaggtgagaaaatcacccgtttggtagaatatgctactaatcaactt

SEQ ID NO: 51955 - DNA, 420 bp, Glycine max
  Clone ID: LIB3109-011-Q1-K1-E4
gactcacaggggagagagtgttggtacgaaaaatgtcgaagctgatcttcgtgttcctttcgcttattcctcttctctgcacctccttctccccagagagaccctcagatcgacgcgtcctcgttttgctcgatgacttcgccatcaaatcctctcattctctcttcttcaactccctcaaatctcgcggcttcgatctccaattccacctcgcagacgacccccaaattgcgctccagagatacggccagtacctctacgacgccctaattctcttttcccccaccattgaacgttttggaggatccattgacgcggctgcaattttggattttggtgattcgggtcatgatttgatcgttgctgctgatagcaatgcatctgatttaatcaaggaaatcgccaccgagtgtggagtgg

SEQ ID NO: 51956 - DNA, 409 bp, Glycine max
  Clone ID: LIB3109-011-Q1-K1-E5
gacggctaaaagctaaaaatcatcgaagtgctcgaattagcatggctgtcacggttgcattcttgaatttgatcatcatgttttcagtagtctctacaagcaagtcactgagcttaaactactattcaaaaacatgccctgatgtggaatgcattgttgccaaggcagtgaaggatgccactgctagggacaaaactgttccagctgcacttctgcgaatgcacttccatgactgtttcgttcggcggtgtgatgcctctgtgctgctaaattcaaaaggaagcaacagagcagaaaaagatgggccaccaaatgtttctttgcatgcattctatgtcattgatgcagcgaagaaagcactagaagcttcatgctcaggtgtggtctcttgtgctgacatccttgctct

SEQ ID NO: 51957 - DNA, 371 bp, Glycine max
  Clone ID: LIB3109-011-Q1-K1-E6
gggaccctaaggcaacatgattttcgggaaggggcctctcgtcctccagctggatcgtccgcaccaggagtgtctaaatattcttcttgacttacgaagtggatctaaaaggtcactaagctgatcctactaaacatgtccttgctctaaaatcatgggatattacttcaactagaccacatttgcttctagccgatgggagtgatccctgctcacgcttatacgatagaatgatgctgccgactgttacctcatgttggacaagtatgtctccacctccttgtgtcaattattactgacgaatgcatatctctgatcatggacatacaagcttgcacttaactcatgtgacatacagtactgatggacac

SEQ ID NO: 51958 - DNA, 402 bp, Glycine max
  Clone ID: LIB3109-011-Q1-K1-E7
aagagaaagtatgatgtttcgggggaggatgaagcggtttacgagcagcgtgcggcaaggccggcggcccgaggttataatggttactatgaggctgatattgatgctgaggagatattcaggaacttctttggaggaatggcccctgcagccaattttggaggattcagttttggaccagctggtttcaatgggttcaatggtcacaggcatgctgctgatcatggttctggtggttttaatgttcgcgctttaattcagttgctgcctgtgctgctgattgtgttattgaactttttgccttcatcggagcccttgtactcgctttcgaagagttatccttatgaacatcggtttaccacacccaagggtgttaactattatgtcaagtctacaaacttt

SEQ ID NO: 51959 - DNA, 391 bp, Glycine max
  unsure (1)..(391): unsure at all n locations
  Clone ID: LIB3109-011-Q1-K1-F1
gaaaacaacggtgacaacaacagcaatggctcttcacacacgacaacgttgctcattggctcaaagacgcatcatcattccttttacaaaagtaacaactatccattccctcattcatcatccgcggcatgctagatatatatacatatatatatagttccgagctaatatatatatgtaattaaagataggtgattagtgattattactattagagatcaatcccccatgcaccacatgctttcttatatatatgtatacttcataaatggaaagatcaattcatagagatttttctaatttgttgtaatttattttatatgtaatatatttatggtctatgcgtacattacatatgaataacaatgcanggttatcacatagttcaatc

SEQ ID NO: 51960 - DNA, 430 bp, Glycine max
  unsure (1)..(430): unsure at all n locations
  Clone ID: LIB3109-011-Q1-K1-F10
gggggaatcattgtctgcgtctgtaaattgtaagaggcatcatccctgaagctgaacctcaaaaccctagctgtccgcctgtctgcaacggcgtcgttatgatcagttgagaatccaaaggaatcgagtcgaatcatctgaccggcgacagttatgtacagagagcgaggaggcgtcggatccaaatcggaggtaacttccgttgatcggaagcgaatcaacgacgtcctcgataaacagcttgaacgttcctcgccttccacatccagagccgncgccatcaacggcaaggaccgctcctcctcttccctcttagccgccgccaaggactcccgctccgncttcgtcaccgnccctatctccaagaattccaacgcttccgacgaggaatctgaaacagacagcgaggagtctgatgttagtggctccc

SEQ ID NO: 51961 - DNA, 413 bp, Glycine max
  Clone ID: LIB3109-011-Q1-K1-F11
gaggcgaattgaaagctaagctgtggtaattctaagtgttccccccgggaaaaatagagatgtctcctacgttacccgtaccatgtggaagtagcgacgtaatttcatagagtcattcagtctgaatgctacatgaagaacataagccagatgaaggaacgggaagacctaggatgtagaagatcataacatgagtgattcggcagatttggattcctatatacccactcgtgcggtacttcattgtatgatctatatctatatatctatatctatatatctatctatagatatatagatatataagatccatctgtatagatatcatcatctacatccagaaagccgtatgctttgtaagaagcttgtacagtttgggaagaggttttgattgatccaaaagaagaatctac

SEQ ID NO: 51962 - DNA, 306 bp, Glycine max
  Clone ID: LIB3109-011-Q1-K1-F12
cgaaagcaaacctatttggataaacgtcttccttacaaaccgaccttgggagacaggcaatatgcattcagcgtttattttgaatgggataatgattttggaattccaagaacattttacatcaaaaattttatgcaatctgaatttttcctcgtaagtgtcactcttgaagacattccaaatcatggaaccattcactatgtttgcaactcatgggtttacaatgcacaaagttacaaaagggatcgcattttctttgctaataagacatatcttccaaatgaaactccaactccactaatgaag

SEQ ID NO: 51963 - DNA, 390 bp, Glycine max
  Clone ID: LIB3109-011-Q1-K1-F2
gaagcggaaggggtttggttttgttcattatctgcttcttctgatgcgaaagtgaagactgaagagaaggtaagatcaatccaatgctggcgctacttcagaactgctccatgcccctcgcacgtgcggtacgcctaccacctcgcacgcacgtgcgaccttgtttcactgccgtgggctacgcatccatttccccacgtgccaactcccagtctcaggttctcctcggcttgtccgacaaggaactgcaacaacttgcccttgacctcggtcaggcaacatataggggcaaacaacttcatcattttttataccagaggaagctcagagaaattcaggatttcactcagttgcctcagggatttaggaatactctagaggaagctggat

SEQ ID NO: 51964 - DNA, 441 bp, Glycine max
  Clone ID: LIB3109-011-Q1-K1-F3
gcaagtgatgaagtgatatctcgtagcatcaccggccttaagctttatatggtggccccatttctggcatcattgaaatcgtggatttcaatacaccaccctgcaatggctccaaggcccgatttgcctcttaaaggtaactcctatttccccccaaacactggtcggttttaaatgcctgaggtcatagggtgtagtttagttactcgatgcttggctgtgttgggatgagttaatctccagcagctagttcaatctgttgcactacattatgtgcatcgcagccttgcaggacctaatctcgaccactgaggtaccgttgacttgagaggctgaggcattagaattgagatgtgttagtattgaattgtaagctacgatattgtgcagatttctttgcttggaaagcttttcaatgcaccatttgtcaagggattcaaa

SEQ ID NO: 51965 - DNA, 394 bp, Glycine max
  Clone ID: LIB3109-011-Q1-K1-F4
ggttgtgtgagtgaagaagcagagggagtagcggcattaaaaatgcagatcttcgtgaaaactctgacagggaagactataaccctcgaggtcgagagcagcgacaccatcgacaatgtcaaggccaagattcaagacaaggaaggcattcctccggatcagcagcgtttgattttcgccggaaagcagcttgaagatggaaggaccctggccgattacaacatccagaaggaatcaacccttcatctcgtcctcaggcttcgtggtggcatcattgagccttccctcatggctttggctcgcaaatacaaccaggacaagatgatttgccgcaagtgctatgcccgtctgcatcctaaggctgtgaactgccgcaagaaaaagtgcggtcata

SEQ ID NO: 51966 - DNA, 235 bp, Glycine max
  Clone ID: LIB3109-011-Q1-K1-F5
ctggaggggctggcgtttgcacacccggtggctcgtctctaatacgcgatctctccatatcatgcacttattacgtttgaccgccttttgttcccagtacacggacaggagagactcaatgtcgctgatcatctacttctgcttgtacgctaatacagacattgaactacaggatatacctctacgatcgttggcattggcacttcggaggaccattgactccaaaggactgtag

SEQ ID NO: 51967 - DNA, 279 bp, Glycine max
  Clone ID: LIB3109-011-Q1-K1-F6
agcagggactggctattcagcactatcagcctcatcaataatatgtgatattcgcatatcatgcacaacttacgattgagccactattattccaaggacacgctacaggtgcgacttcacgtgcatgttcaactactactgaatggcctatgctacagacacttatctgcatggaatacctaccacattgcatgcgatacgcacttgggaggagaattgacttctaatgcatgtcgtatatgctgattcacaaggactaatgaacgaacttcctcaaaa

SEQ ID NO: 51968 - DNA, 332 bp, Glycine max
  unsure (1)..(332): unsure at all n locations
  Clone ID: LIB3109-011-Q1-K1-F7
acgcgcgggtgcacgcggacgaccggctgcgatacgacatcagcatggaggagttctaatcanagtntggtctgcaatcggacctcgctatacttcgcacctgactgactgctacggcaccggaaaaccggagatcaactgcttaagcatcatcgttatgggcaccgatttcatgctcactcagctatctcacgaactcaacgaccaacatttgcaactcacgcagagcatgccactgtccaagccacatgaccggagcttatgagagtaggctagagcgattttcacggttgaatggccagggcagactgtaaacaggcctgtgagaattt

SEQ ID NO: 51969 - DNA, 417 bp, Glycine max
  Clone ID: LIB3109-011-Q1-K1-F8
ggagacagatttgtgtgttgagcgcatagaacgatgagtttggttggtagaggagcaagttttgcattgtagtagttgtagcaatagccacacaacaaaagaaaacaaaaaaccaagtcttcgtcatcttcgtatgcagagatttttcttcaacatgatgatgatgattagtttatttaccaaacaatgattgccttgccttccttcgtgagatactggtagcaatttcaaaccttttcgagtaaccaatacgataagaagagaactgacaaaagctagaagatgaagcgcatgaatgagagtaacaacaccgatgatggaaacaatcataactggttggggttctctgtatcggcccacatgaaaatggaagttactttcgcatgcacttgtttcgacaacaatgttccgacaacc

SEQ ID NO: 51970 - DNA, 433 bp, Glycine max
  Clone ID: LIB3109-011-Q1-K1-F9
gccacagaaaaaaccatttatgattttactgtcaaggatattgacagaaaggatgtttctcttagcaagtttaaggggaaggttctattgattgtcaatgttgcttcacgatgtggtttgacatcatcaaattactcggagctgtcacgcttgtatgaaaaatataagaatcaaggtttggagattttagctttcccctgcaatcaatttggtatgcaggaacctggatcaaatgaagatattaagcaatttgcttgcactcgatataaagcagaatttccaatttttgataaggttgatgtcaatggaccatttacaactccagtgtaccagtttctgaaatcgagtgctggaggccttttgggtgatctttataagtggaattttgaagaaattctggttgacaaaaatggtaaagttattgaaagatccc

SEQ ID NO: 51971 - DNA, 353 bp, Glycine max
  Clone ID: LIB3109-011-Q1-K1-G1
ggtgcaaatcaagcattttgcttgttatttcacgggttcgctctccaatttggacctccctttccttcgttcctcactcactgcaacggcgccggagatccgtcgctctcctcctccaccaccaccgcgatgggcgccaattccatgctcgccgagttctctcacgatctcgacgaccagatctcccagctcatgcagtgcaagccactctccgagcaacaggtccgaggtttatgtgagaaggctaaggagattttaacggatgaaggtaatgttcagcctgttaaaagccctgtgacaatttgtggcgatattcatgggcagtttcatgatcttgctgaactgtttcgaaa

SEQ ID NO: 51972 - DNA, 424 bp, Glycine max
  Clone ID: LIB3109-011-Q1-K1-G10
gggagctgagctgagaaaacccccaaccccaaccgcaaccttaacctctcctcactttcttttcaaccagaactatgattaagctttttaaagtaaaggaaaaacagagagaactggcagaaaatgcgagtggcggaccacccgttaagaagcaaagtgccggcgagttgcgtcttcacaaagatataagcgagctgaatctaccaaaatcatgtaccatgcaattccccaatggcaaagatgacctgatgaactttgaagtttcaattcgacctgatgatggatattacttaggtggcacatttttgttttcctttcaagtgtctcccatctatccacatgaagcaccaaaggttaaatgcaagacaaaggtctatcatccaaatattgacttggaaagaaatgtttgtctcaacatcttacg

SEQ ID NO: 51973 - DNA, 303 bp, Glycine max
  unsure (1)..(303): unsure at all n locations
  Clone ID: LIB3109-011-Q1-K1-G11
gaacagaggaaatatccttgcagtnaatcaagattcggaggagtgagtggtccttggtgctgatttggcaacaacaaccacagatgagagtttgagtgtgagtgaatccagatccgagtttcgcacttttgctgagaatagaacaatggagtcggcaacggcatcatcatcggaatcggagatggcgcttcctcttcctctggcgtcggagtcacaacaaccctacgtctccgaactcctctcctttacgctcgatcgcctccacaaggagcccgaacttcttcgcgtcgacgccgaccgcat

SEQ ID NO: 51974 - DNA, 158 bp, Glycine max
  Clone ID: LIB3109-011-Q1-K1-G12
tgttccaaagcgaaacagagatccaaactcagtggttcatctctatgagctcaacttgcacttcagcttcacgagcctattacatcgacaattgctgctccactcaactcatcgactgcgacagctaattcaaactctgcaccctctacaactttttc

SEQ ID NO: 51975 - DNA, 378 bp, Glycine max
  Clone ID: LIB3109-011-Q1-K1-G2
ggaagcaaaaaatgaaaacccgaagtgcttctctcctctgtctttttctctctcttgctatccttttggctagtggcactgctgcaagtgcaactccaagaagcgcagtgccaagccaccatgtttcaacattcaacagaagcctttttccttccacttttctctttggaattggttcttctgcttaccaggcagaaggagcagcaagtgtagatgggagaggaccaagcatatgggacacctacactagacagcatactgaaaagatttgggatcatagcaccggtgacatgggagctgatttttatcatcgatacaagggtgacataaaaatagcgaaaggaatttggcttgactctttcagattctctatctcat

SEQ ID NO: 51976 - DNA, 360 bp, Glycine max
  Clone ID: LIB3109-011-Q1-K1-G3
gagagaagagtgggcaagaatggcgacggagatgggggagctcgtctcctttctttcttccacgtcgcctcagatcacaaaagccgccgttgacatagtccgcggcttaaccggctccatggagggcttgcagtccctggcaaattactcaaacgccctcttacccgctttgtctcgcctcttaacgttacccatggaggtttcggaggctgctgcggaggcgctggtgaacctgtcgcagaattcgagcctcgcggaagcgatggttggaattggtctggtcaaaacgaccatggatgttctgtacaagcccgagtgtagcattgctcgcttgcttgacatgctgttggtcaaccttac

SEQ ID NO: 51977 - DNA, 346 bp, Glycine max
  Clone ID: LIB3109-011-Q1-K1-G4
tgggaggaacacatatgcgtattgaaggacggcaacggaccaataatcttcaccatggcaaggcttgaccgtgtgaagaacatcacggggcttgtcgagtggtacgggaagaacgcacgcctccgcgagttggtgaacctggtggtggtggctggagacaggaggaaggagtcgaaggacttggaagagaaggccgagatgaagaagatgtatggcctcatcgagacctactagttgaacgggcaattcagatggatatccatttagaagaaccgtgtgaggaaccgagagctctaccgggtcatctgtgacacaaggggtgcctttgtgcagcctgcaatttatg

SEQ ID NO: 51978 - DNA, 400 bp, Glycine max
  Clone ID: LIB3109-011-Q1-K1-G5
gatccatcactagttttttatatatatcggactggttgtgcttatccttattgagagaaaaaatggccaaatcaatcaaattctttgagttgaacacaggggccaagattccttctcttgggttagggacttggcaagctgaacctggtgttgcagctgaagctctcaccacagccattcaggttggatacaggcatattgactgtgctagtgcgtataagaatcaagcagagattggttctgctcttaagaagcttttagatgatggtgtggtgaagcgtgaggacttatggatcacttccaaactctggtgttcagatcatgcaccagaagatgtgccaaaagcattggataaaacattacaggaattgcaacttgactatcttgacctctatctgat

SEQ ID NO: 51979 - DNA, 359 bp, Glycine max
  Clone ID: LIB3109-011-Q1-K1-G6
gaggaacacatatgcgtattgaaggaccggacggaccaataatcttcaccatggcaaggcttgaccgcgtgaagaacatcacggcgcttgtcgagcggtacgggaagaacgcacgcctacgcgagttggtgaacctggtggcggtggctggagacaggaggaatgagtctaaggacttggaagagaatgccgacatgaagaagatgtctggcctcatcgatacctacaggctgaacggacaattcagatggatatgctctcatatgaaccgtgtgaggaacggtgagctctaccgcgtcatctgtgacacatggggtgccttcgtgcatgctgcagtttatgaggcctttgggttgact

SEQ ID NO: 51980 - DNA, 246 bp, Glycine max
  Clone ID: LIB3109-011-Q1-K1-G7
cgattgggacacaaggtaattacgttgtctagataactagaggcagggtcatgaatatgaacgtcctggatctgttaattgctacaaaacttgtagcatgttaatgccttgcgtacaatatgttcactcttccaatgatcactgactatagtgcccgtacttccaaagtgaaatacacaagatacatgcttgctgtagaaccgcgcaacatctatgacttatagaccattcatgatcagtgcgttg

SEQ ID NO: 51981 - DNA, 346 bp, Glycine max
  Clone ID: LIB3109-011-Q1-K1-G8
tgggacacagatgaacgagtacagaaagaaggagaaggacacgcatcgcacaggtgtgaaccttctcaaactctctttcgtcaaaacgcgtccatgggatccatcaacgcacgcccaacatttactctttgagagttcacgttggtggatcttatgtcagtcctcagaggaccttcagggattatcacatgggtctgtcaaaagctcgccgctctgtttactaagcaactgcattgacgaactgtgtgatggtgatagcggcgattgagaacaagggttgctacatacgactatggctaaggctcgcgatggcatatctgcgcatggtagctgtcatggtcatgta

SEQ ID NO: 51982 - DNA, 430 bp, Glycine max
  Clone ID: LIB3109-011-Q1-K1-H1
ggcacaagttagtttgttgatcgagataactagagacagggtgatgaaaatgaaggtccttgttttcttcgttgctacaattttggtagcatggcaatgccatgcgtacgatatgttccctctccgaatgaacactggctatggtgcccgtactccggaggtgaaatgcgcaagttggaggcttgctgtggaagcacacaacatctttggctttgagaccattcctgaagagtgcgttgaagcaacaaaggaatacatccatggcgaacaatatagatcagactccaaaacagttaaccaacaagcttacttttatgccagagacctcgaagtccattccaaggacacatttgtgttcaatatagatggcaccgtactctctaatattccatactacaaaaaacatggttattgggtggagaaatttaac

SEQ ID NO: 51983 - DNA, 252 bp, Glycine max
  Clone ID: LIB3109-011-Q1-K1-H10
gggtaagtataaactcctatttggctctacttataaaggtctaagggataattaatctgcttagtctgatacatgttttgacacccaaactctgtttagatcatatacattaggagaataaattaatgtcgtctacagagaaaaaataattttggaatcaactcccattatgagagtgtagagccccatttccagatattacttacattgtgtggtctttcaaagcattacaaagttgttgcaccacacttt

SEQ ID NO: 51984 - DNA, 297 bp, Glycine max
  Clone ID: LIB3109-011-Q1-K1-H11
gattaagaaggttgagaaggatcctggtattcgcgacgattttcccttcaaggagcaggaactcaaggccctctaggctcgaacggctaaggcaattgatgaattggaacaaaagaaagcctaacgcaaggaaaggtctcgcaaaacgaaattgggcttgctagacgatgaagataactccaaattgagtgaaatgaatactctaaaacgtaatactgttggcaagactaaacatagctcagatagggccttttacaaagatttgcttaaggtcattgaaacctctgatgtcttact

SEQ ID NO: 51985 - DNA, 407 bp, Glycine max
  Clone ID: LIB3109-011-Q1-K1-H2
ggatcgaacatggatgaggagtacgatgtgatcgggttgggcacgggtctcaaggagtgcattctcagcggtcttctctccgtcgatggcctcaaggttctgcatatggataggaacgactattacggaggagaatccacttcgctcaatcttattcagctttggaagagattcaggggagatgacaagcctcctccacatttgggcgctagcagggactacaacatcgatatgaaccccaagtttattatggctaatggcaatttggtgcgggttctcatacataccgatgttacaaagtatctctatttcaaagctgtggatgggagctatgtgtttaataaaggttcataaggtgcctgcaaacgacatggaggccttgaagtccccacttatggggctatttg

SEQ ID NO: 51986 - DNA, 369 bp, Glycine max
  Clone ID: LIB3109-011-Q1-K1-H3
ggtaagtggaagaagagaaagtggcatcgcttaggtgcgggtacagacacaacctggtaaaaatcccgaccccagtgccgcacaattttccttcactcgcagcggaggtttacttttgatctagtacctgctatccctatgtataagcatggacttctagcatactattgtttgattaaccaagttcttccatattggttgaggaagcctcgagtcaatatttagtttttgctgccatctgagggtttctgatggatgatgccgggcatcgtgaaaatggaacgcacaaagcagcagatcaatataaatctgctcatggacagtggttgatgcaacatcagccttccctgaagcagattatggcaatta

SEQ ID NO: 51987 - DNA, 438 bp, Glycine max
  Clone ID: LIB3109-011-Q1-K1-H4
ggaattgatgagcaggaaataacatatgccttgggtcagagaaagactttacgacagctgatcaggaatggggacattgatgttgcatttggtaaattacgtgaatggtatccacagattgttgaggacaatacatcagctacatgttttctgcttcattgtcaaaaatttatcgaattagttcgggttggagcacttgaagaggctgtcaaatttggaaagatggaattgtcaagtttttatgacttgcctgtgtttaaggatttagttcaggactgtgttgctttgctggcatatgaacggcctctggaatcctccgtaggttatcttctaaaagactctcagcgtgaagttgtagctgacacagtaaatgccatgatattgtccacaaatcttaatatgaaagattcaaaacattggttgcactcttatcttgag

SEQ ID NO: 51988 - DNA, 444 bp, Glycine max
  Clone ID: LIB3109-011-Q1-K1-H5
gcctcaacttatggtgcaaattgtctgaaaagtggggtactttatgaaagtgatttagctcctttcttcacgcatacaaaatactcactagtcccaattccattgagcagaaaggtatcaaatccaaaaaggtttctgattccgctgctgattcaccaatggattcaacttgtgcaatcctgagtggccgcaatctagctaaagtttgtgagggaattggaagaaacagaagaagtggcttctggggtgagagtacgaggcgaagtgtgaacacaaggcttttgagtgttcaatcatggaagacttcacgtaccagtaggaatcttagaaactccaagcctggaagtggaattgcacacgctggtctcacatcagacattaacgaagattcgatggcattttaaggggtacccacttttgaaaaacccgaactggacccaaaaa

SEQ ID NO: 51989 - DNA, 435 bp, Glycine max
  Clone ID: LIB3109-011-Q1-K1-H6
ggtgcacaagtgagtttgttgatcgagataactagaagcagtgtgatgaaaatgaaggtccttgttttcttcgttgctacaattttggtagcatggcaatgccatgcgtacgatatgttccctatccgaatgaacactggctatggagcccgtactccggatgtgaaatgcgcaagttggatgcttgctgtggaagcacacaacatctttggctttgagaccattcctgaagagtgcgttgaagcaacaaaggaatacatccatggcgaacaatatatatcagactccaaagcagctaaccaacatgcttacttttatgccaaagacctcgaagtccatcccaaggacacatttgtgttcagtatagatggcaccgtactctctaatattacatactagcgaatacatggatatgcggtggagaaattaactcga

SEQ ID NO: 51990 - DNA, 421 bp, Glycine max
  Clone ID: LIB3109-011-Q1-K1-H7
ggagatgatctaaaggaaagcagaatacgggagggtgacatggatatggaagatgatctaggtgatgcattacctccatttcaaggaaaagaagatgagaaagttgctgaccctcctgttggggaagatgcacgttttctaaaggctgggaagaattggcatgctgaagaggaacatccaacagaagtcagggaattcgggtaaaagcaaatggtcagaagattctggtgaagatgacattgatcaaactgaatgcatgaatggcaatcttaatgctctgtctgggttaattcatcaatatggcaaggaacgaaaatctgtacattggggtgatcatggtggcgaaacatgggtttcaataagggctgcaccggaagtaaatgctttgtcgttagcgatcggacctggtgctggatataac

SEQ ID NO: 51991 - DNA, 444 bp, Glycine max
  Clone ID: LIB3109-011-Q1-K1-H8
gatatatagttattttactgtgtgagagagaaagttaaacatgggaagaggaagggttgttctggaaagaatagagaacaagatcaaccgtcaagtaacattctcaaaacgcagaagtgggttgctgaagaaggcctttgagctttctgtgctatgtgatgctgaagttggccttatcatcttttctagccgtggcaagctttttcagtacagcagcactgatattaccaaaatcattgagaggtatcgccaatgtcgttacagcaagtcacacactggtgattcattggaacacgattcacagagcgcataccatgaattcttgaaattaagagcgaaatatgaatctcttgagcggacacaaaggcattttcaaggagaagaccttgagccacttagctttaaagatttgcagagcctggagaagcaactagacataacgct

SEQ ID NO: 51992 - DNA, 235 bp, Glycine max
  Clone ID: LIB3109-011-Q1-K1-H9
attacttgctttatcaggagaactctatatcctaacagaagcagaagcttaaactaatatgtgtggttccattttcactcacttcctcattctcccctcctctactactccttctctttccactctctttccatccaaatttcccaccaaacccatcaatgaatcttttccctttacccttaccttgcaaccaaatttccttccaaactcactatttcacgatcttcccaattct

SEQ ID NO: 51993 - DNA, 319 bp, Glycine max
  Clone ID: LIB3109-012-Q1-K1-A1
gactatagagtgtgataggatgatgatgtagctcatgcttatcatttcgaagatcagtgttggtgcttgcagcttctcgtcacctgaagatggccagatggcttgggaactgccgctgcggatgatactgactgtgcgacaacccatgcagaggctgacacatgtacccgatacttgagctacactgagtcaaccaacagcgaaaccttcatcatgcaagtggcacctagcacggctcaatgagacggtgctgaaatgggcgttcccgatgggaaccatggatgcttatgaacaccaaactgttactgcaatggctgga

SEQ ID NO: 51994 - DNA, 408 bp, Glycine max
  Clone ID: LIB3109-012-Q1-K1-A2
ggtgacatggaatgcaacttattatttctgggtgtcctctcaagtgtcaattcttagttacagcatagagaaatggaagactatgttataaggacaattgttgttggagttgtttcatggacatcagcttttgtcctagtgagaagaatctttcccaagcgttcttttgatttctgcaaccgcgttgtgtccacgctccatgcaactttagcagtcacattggcttggctctctgttgaagattggaagtgtccaatttgtcctgtgggatcaaaatcttcacccatacagatgcaagtcctagcagttagcctttcttatctcatttatgatctagctcgttgtcaattggatgaaagagcgaatctagacaacaccggccaccatttgctaagcattgttggaatt

SEQ ID NO: 51995 - DNA, 404 bp, Glycine max
  Clone ID: LIB3109-012-Q1-K1-A4
gactgcaatggctgatataattgactttcatggatggaaagaggtcattgttgtattcttggatgatgattatggaagaaatggactatctgctttgagtgatgagcttgaaaaaaggaaattgaaaatttcttataaactgcctttaagtattaagtttgatttggatgaaatcactaacttgctcaatcaatccaaggtggttggtcctcgtgtgtatgttgttcatgccaaccctgatccgagattgagaattttttttattgcccataaacttcaaatgatggccaaggattatgtctggcttgtcacagattggctctcagctacactagattcattatctccagtgaatcagacctctttcagtgttctccaagggggtgttggtctacgtcaacaca

SEQ ID NO: 51996 - DNA, 405 bp, Glycine max
  Clone ID: LIB3109-012-Q1-K1-A6
gagagaaagatagagagaataacagcacctctttctctctgtctctctcccctcgttgatcccaaatctactagggattctcattcgatgcgattcggccggaagctttcgttttgcggattttttttaattattatttttcctggctatcaggaaagttgaaaaaaagatggaccatgacaagactggatgccaagctcccccagaaggtcctatattgtgcatcaacaactgcggattttttggaagtgcagctaccttgagcatgtgttctaagtgccacaaagacatgatgctgaagcatgagcatgcaaagcttgtagcatcatccattgggaatattatgaatgggtcatcaagcagcagtggaaatgaacctgtcgttgctaccagtgtggatgtttc

SEQ ID NO: 51997 - DNA, 395 bp, Glycine max
  Clone ID: LIB3109-012-Q1-K1-A7
ggggaacatcatcacattacattagattgggggtaatggcagcgtcactacaagcagcagctactttcatgcaacccaccaagttgagcaggagcaacactttgcagcaaaagtctactcagtccatttccaaggcttttggtttggaacctgttggagctaaaaaggtcacatgctcccttcaggctgatcttaaggacttggctcacaagtgtgttgatgctaccaaaattgcaggattcccccttgccacctctgccctcgttgtctctggggcaagtgctgaaggtgttccaaagaggctaaccttcgacgaaatccagagcaagacctacttggaagtgaaggggacaggaacagcaaaccagtgcccaacaattgatggtggattggac

SEQ ID NO: 51998 - DNA, 379 bp, Glycine max
  unsure (1)..(379): unsure at all n locations
  Clone ID: LIB3109-012-Q1-K1-A8
ggagagagaagcctccatttataaaacatcgtgtgcgcactctctcttctcctaggtttcgctcccatcaacagcaacgatggtgcagaggctcacttatcgcaagcgccatagctatgctaccaaatccaaccagcaccgggttgttaagacccctggtgggaagttggtgtaccagaccactaagaagagagcaagtggacctaagtgccctgtcactggcaagaggatccaagggattccacacttaagacctgctgaatacaagaggtctagattgcctaggaaccgcaggaccgtaaaccgagcctatggaggtgttttatccggnggagctgttagagaaaggattattcgcgctntccttgttgaagagcag

SEQ ID NO: 51999 - DNA, 412 bp, Glycine max
  unsure (1)..(412): unsure at all n locations
  Clone ID: LIB3109-012-Q1-K1-B1
gggagccaaatcgaactgaaacgtttcgaaattcattttttttttctaacatacttaaagagagagagagagagagagagagaggggagggttgcaaattccatgagagcagaagaggtgccccttactcgtctcgtctttcaccgttacgagtgagttcgaccccccctcttgctcttccttctcttctcttctcttctcttctcatatcaaagcaataaccctagaacatggaagagagcttcgttttccagtggagcgtcatcagatctctcttgtccatccttcagtggtgggcgttcaatgtcaccgtcatcatcgtcaacaagtggatcttccagaaattggatttcaagtttcccctatcagtttcctgtgtccactttatctgntcatccattggagcttatgt

SEQ ID NO: 52000 - DNA, 259 bp, Glycine max
  Clone ID: LIB3109-012-Q1-K1-B11
gttggggctggccctcttgggcattgggggtaaaatttgggttaactttcccaagggggaaacaaattttgcctccgaaaaccccctaaaccgctttgggtgggtcttttctggcatcgtaagaagtggcctgctgatgctcctgccagcatttgtcttcattgggctggaacaggattactgctgtggctgctttggccatgaaaactgtggcaaacgatgtgcgatgctttcttctgtattggctgctctcattgga

SEQ ID NO: 52001 - DNA, 379 bp, Glycine max
  Clone ID: LIB3109-012-Q1-K1-B2
gtgtgaaagtagtagtagcagagtcacatgggaaggttgcagcgtcttgctcgacatcaacgacggtgaccgtctcgttttcgctcgtctctcccccgctgcaaaattgaagattgggaataagaactgctctctgcaaccgttaattggctgtcccttcggtactgtttttcaagtcgatggacctttcctctctcccgcacaagttaatggtaataatgctgaagaagtaagagatggtcaagtaagtgtcgagtccagggacaaagttaataatgataataatcctgaagaagtgagagatggtcgagcaaatgttgattcgagggacaatcgtgccttggttgacaataacacggcacagagcctgactggtgag

SEQ ID NO: 52002 - DNA, 378 bp, Glycine max
  Clone ID: LIB3109-012-Q1-K1-B3
ttcgactagaggggaatgatggaagaaaagaaataggataaagtaaataaaaatgcagtagaagagtcctgattccaaacgaaaaaattcaaacttgattgaaaaggatctttctgattattgaagaatgggacaaaggattgatcgcgaaaaagatttcttgttcttattagaagatcgtgattggatccacatatgtttggtaaaaagaaagaaaaatatgcttctttgagaataatagaaaaggaaagtgttcaattggaacatgaaaacgtgacagaattggtcctagttactcttcggaacggaatagaagaaggggagagattctcgaaccgaactaggaaacggatccaatgacttcaaaggaattgaacg

SEQ ID NO: 52003 - DNA, 308 bp, Glycine max
  Clone ID: LIB3109-012-Q1-K1-B4
ggacacagcacatcatgatgactttcatcagcctaactttggtggttcttcaataaaaaaaggtggtccaagggaaccttggcacgacatccattctcgacttgaaggccctattgcttgggatgactggttcaactttgagcagagatggaggaagcagggagtgaaaggacttacttgttccactgagagactcttgaagatgtcattattccatcatacccggtaacttacatagatgatcatgagacatgtaatgtgcaagtattgagatccattgatggtgaagctgctttagagttcccaga

SEQ ID NO: 52004 - DNA, 400 bp, Glycine max
  Clone ID: LIB3109-012-Q1-K1-B5
tgggtcacaagaaagaaaaaaaacatgactgagtcatctttctcaaacatgaagaatgagttatctagtaacctcttctctatcttcttccacttctgtttctccattttttctcaccctttatacttctcctacttcatcttcttctccccttacctactcaggatcctgtctttcctctcccctttgatcatcaccacaactcttctacttgcgacccttctgactttcactcccaacaatcttgatcaggaaaagggtggttctgagctttctgagtccaaatggagcattctgctgtctgttttgcaatcttttctagcatggcttcattccaaagctgatgagatagatgaggaaatggcgctcctaggtgaggtcgaggcatatctagtcatgt

SEQ ID NO: 52005 - DNA, 314 bp, Glycine max
  Clone ID: LIB3109-012-Q1-K1-B6
gatccagaagatgaggaagcggagaatatcaggaaaaagatggagttaacccgagaccaattggcagatgcactgtaccaaaaggggcttgcgctggcagagattgagtctttaaagttggcagacttgacttggtgtatattgtcaaaggacgtagataagtccccgactttggctgccacagaaggggcaaaagaagacatagaaaataaaaaatctacggatggtcgcagtcaaggagatttgtttgaagagaattttaaagaactgaagaaatgggttaatgtgaagtcaactaaatatgggatcctttt

SEQ ID NO: 52006 - DNA, 291 bp, Glycine max
  Clone ID: LIB3109-012-Q1-K1-B7
catgggaagagagtgtcctacagctacaagccaaggaccaagccaggatgcagtacctttctaacttggtggctagaagatccattggtccaattggcttagggagacaaattacacagagccctacatacatagtgagggccaagtttggtaccccagcacagacccttctcttggccatggacactatcaatgatgctgcctgggtcccttacactgtctgtgttgggtgctcaacaaccacacactttgctcctctcaagtgcaccactttcaagagagttggatgtg

SEQ ID NO: 52007 - DNA, 410 bp, Glycine max
  Clone ID: LIB3109-012-Q1-K1-B8
gactggaaagaggatctctactccttcagaggcaatatatcttggccttggaacacactatgtgccatctggaaagttaggttcattcaaggaggccctcttggccacaaacttttcccaggatccacatcaggacatcaaagtacttttagcaagatatgagtccaaccctgagtctgaggcacagttgaaattgcttttaccccagatagtttctacatttggaggaaataaatcagtcactgaaatcattgaggagctaaaaaaacaccagtcaagcactgaccctaatgtcgtggagtgggttaatgaagctctccaaggccttggaaaaggtgctcccttttcccttttcttgaccaacaagtacttctctttgggtgcctctgcagtggggaataatgacggcg

SEQ ID NO: 52008 - DNA, 411 bp, Glycine max
  Clone ID: LIB3109-012-Q1-K1-C1
gatacaaagttacaactcaaatttctattttcatacaaagttacaatttgttacttacactactacactttagttgttccaacacaagtgtttgtggcaacaactttgatttgaggttctacttttttttgtgtaatcaagaatatttaaggtttttatttgatattcgtcgagtcagtccattttttgtttttttgagtaaagtgatatcctctgcttcttcattcttaactccaaactttagacgctccaccgtgtttttttgttacctatactacaccctttaagtgtttgtagcaaggacttttgtgtgaggtttgtcataatcaagagatatctaatccttctatttgatactcaattactcttctggtcaggctattttgagggtaagtgatatctttaatcgca

SEQ ID NO: 52009 - DNA, 391 bp, Glycine max
  unsure (1)..(391): unsure at all n locations
  Clone ID: LIB3109-012-Q1-K1-C2
ggtatgaagatgttttcagttcccaatcaagcaatttcagtttccatgggacatccatccctaaagaatcattttgcaactgttggtcagaatatgaatgttgctactgtgaagcaaccactactcggaggaatacctgttacggtgcctcattcagttcatcccattgttggtgctgttgctggaatgaccgaaacacgcgtgaaaccatccgtacctgctcctaaacttacaatcttctatgcgggcactgtgaatgtctttgaagatatctcccctgagaaggcacaagctatcgtgttgttggctgggaatggcttatcagctggttctaatgaggcatcacccaatgttcaagcgccctgcttgaaagttgcagtangtgatggtg

SEQ ID NO: 52010 - DNA, 404 bp, Glycine max
  unsure (1)..(404): unsure at all n locations
  Clone ID: LIB3109-012-Q1-K1-C3
gcagtgagttggaattgataatctagagagtgactactgatcgccgacagcgagctttttccgtgtaatggcgacctccgtcgcagtcgccggcgctttgacggcgcacgatcgccgggttctgacggcggtgaacgccggagcctcgagcctgtcgttagccggttccagcttcattgtagtgtgctacctcctcttcaaggagctccgcaagttctccttcaagctcgtcttctacctcgctctctctgtatgcttcttttttctctctttccgtgttcctcttcttcagatctaaaacttgcgtttttactttttaacgttccttcgaattgactcattcgttagtttagtaacacttatcagtaatcacgattggcagaaacgatacggntaaacgcgct

SEQ ID NO: 52011 - DNA, 370 bp, Glycine max
  Clone ID: LIB3109-012-Q1-K1-C5
aggcgttcgaagacgactgcaggcggagtcaatatggcatctgagaagtcagatcaaactttagtgacacagatgccatgcggaacgctagaagttggtctgatcagggctaaaggaatgaatgtcatggatatgatgtgtaagcactatactctatatgcatagctgacgtgaatgtcagatgctgcgtatgtcactgatcctgtttcatcaactttgagacgcatcgaaagtgctctgacttcacgatggactgatctagactagatctttcgcgattgaaatctgaggcaattagctcctgtatatgcagattggacatcataaagtacacctgatgctggtttgatctcgttatgtgctgaaagga

SEQ ID NO: 52012 - DNA, 307 bp, Glycine max
  Clone ID: LIB3109-012-Q1-K1-C6
ttatgggggatagtgagagtgagtgattggcgaaaccggctcacaattttggcatgaaattttgaaaagcacacagcacacagcacactttcaagtttcacccttaagcgcgccctctcatcaaactccaatttacattcatttcgagattccctcctttctttctctctatattctaattctaattccaatcacacccagattctattccctcccttacaattctagggtttctctctccgatagggttcccaatttctctcccttttaccaccaaaaacatggccaccgacactctagacgacac

SEQ ID NO: 52013 - DNA, 348 bp, Glycine max
  Clone ID: LIB3109-012-Q1-K1-C7
ggagttgagtagcagaagagaagagaagatgggatctgtatgtatctgagactgtgcatcaccccattccctgttgcggttgattcttgaggacaggcagagataggattaacttaatatgacgacacgacaccattgcaatttaccattctacatttaggcaatgccagccacccaatagataatagcaataagtctttcttcacttcaactcgcactggtatttaaacaagtctgatgggttcaagattcccatctcatcagctcagcaatggcctgtatgtatcaggtcggcctgaacagccgtaagacagaactccaacaatgagctcagttgccatgccttac

SEQ ID NO: 52014 - DNA, 397 bp, Glycine max
  Clone ID: LIB3109-012-Q1-K1-D1
gatgaaagaattgactaaaaggactcaggactgtttagtctcctttggagaatgcatgtcgactaggatctttgctgcatatcttaacaaaataggtgtcaaggcacgccaatacgatgcatttgagattggttttataacaactgatgacttcacaaatgcggacattttggaagcaacttatccggcagtcgccaagagattacatggtgattggctctctgatcctgcaattgcaattgttacaggcttccttggaaaggcccagaaatcatgtgcagtgacaacactgggtagagggggcagtgatttgacagctacagcaattgggaaagcactagggttacctgagatccaggtatggaaagatgttgatggtgtcctaacctgtgatcca

SEQ ID NO: 52015 - DNA, 355 bp, Glycine max
  Clone ID: LIB3109-012-Q1-K1-D2
aggaaagagaaagaataagggttaatttggcctaattgaaattcggagtgaaactcgggatctcgtccaggcttccatggaattgaattaataattcaattccatttctattaataaaagagtgaaagcagaaatttaaatggaatgtatagggggggggcaacaatatcattaaaaatacttagttaaaaaaccgaaattctgtattgcaattggattgcaattcggaacgaaatatagttcgagatcattgattatttttgtactataataatcttaatcttaattggaacgaaaatcttcaaaattggatttctaattcttaattgatattttcgtgttttccgtctttttc

SEQ ID NO: 52016 - DNA, 386 bp, Glycine max
  unsure (1)..(386): unsure at all n locations
  Clone ID: LIB3109-012-Q1-K1-D3
ggcacaaaaatacaatacaaaacaaaacagagcaaagagagagtgtgtgaaaagtgaaacaaaaaacagaacaacaatggcgacacttaaggttcctcagcctcttccccccgttgcagatgattgtgagcagctccgaaaagccttctcaggttggggaactaacgaggagctgattgtatcgatcttggctcataggaatgctgctcagaggaggcttatcagagaaacttatgcccagacctatggagaagatctcctcaaggccttggacaaagaactcacgagtgattttgagaggctggttcatctttggacacttgattctgctgaacgtgatgcatttttggcaaacgaggcgactaanaaatggacttcaagcaatc

SEQ ID NO: 52017 - DNA, 213 bp, Glycine max
  Clone ID: LIB3109-012-Q1-K1-D4
gatttcattttgtctaataatctgttttttcagggttttgctttgtgctttaattttttcttcttctttcgtttgtaccattttctatattgctttctgttcttctctatttttggttttttctttcttcctctaactatggatgcaggatctttgagttcttccttaaccctcacttcacgattcactgtctcctttcaagagctatttatt

SEQ ID NO: 52018 - DNA, 377 bp, Glycine max
  Clone ID: LIB3109-012-Q1-K1-D5
ggacacgatggtgttctacttcaaagcgcgccccgaagccggcgatttcaccatcttcatgggcctagacaagtacgagaacgaggaactcatcaaatacgggtttcccgaagacatgtggatccatgtcgataaaatgtcttcagcccatgtctatgtcaggttgcacaaaggccataccatcgatgacatgagtgagggtttactggatgactgtgctcagcttgtcaaagcagattcaattcatggaaatagagcgaacaatgtctatgttgattacacaccctggactaacttacagataactgctacaacggatgttggccaagatggttatcacagctcacagatggttcgaactgtaagagttgagaaga

SEQ ID NO: 52019 - DNA, 300 bp, Glycine max
  Clone ID: LIB3109-012-Q1-K1-D6
gggcgtcaagattgatagttatccataagtgatgtttatccttaatttcattattgaggagttatatcaatttttttctaacacattttgttaatacattttttctaattagtatatattataatattatgagaaaaatttattaaataaggtgtgagcgtctaaaatcatgtgattttcatacatttcttaataagaaaaaagtgttcttagcacttctatttattacttagtacaggattttaattttaacgcttaaaatgtgacacaatttacatgtgaatctggacaagttcatgc

SEQ ID NO: 52020 - DNA, 145 bp, Glycine max
  Clone ID: LIB3109-012-Q1-K1-D8
ggtggcacataaatacaatacaaaacaaaacagagcaaaaagagaatgggggaaaaggggaaccaaaaaccgaacaacaatggcgacacttaaggttcctcagcctcttccccccggtgcaaaatgattggggcagcttcgaaaa

SEQ ID NO: 52021 - DNA, 386 bp, Glycine max
  Clone ID: LIB3109-012-Q1-K1-E1
ggttgtcgtcgtcatatgttacatgttccaattacctcggtggcaatcagtgaacaacgccaaatcttaaacttgttcttttgtttctcttttgtactactagttctgaacatggagctgttgtctctgagactcaccccttcaccttctgcttcgacttcatcgcttcctgcagcacttgctcactgctccaagctatgtgagtttcaaccgcggaagaagaagaaggtgtgtttcgacgcgcctaggcttgcggtgcggtgtgtgaaagcctcggcgcagcgaaccggtgatactatcgacgatggagagactcggactgggttcaccacacctgccatggaagtcaccacattcaatcgaaccactttcaccgatgctgctga

SEQ ID NO: 52022 - DNA, 412 bp, Glycine max
  Clone ID: LIB3109-012-Q1-K1-E2
gagagtgaatccatgaccgtgaccatggcggctgcgtttacaagtacaagtgcaacactgagactgtcaaatgttggagagagcagaggtttgcagctgcgtaagtgtaaccctaatcctaataagctgaaggttatgggggggtttggaggttgttctggagtggcagtgggtgtgagagaaagaaaaggaattggaagggttagggttcgggttcgggcgagttcttcgtcggacgaggcagtgagtgcgcagtcaaaagtgactcagaaagtattctttgacgtcagtattggaaatccagttgggaagcttgtgggacgtattgtgattggactgtacggcgacgatgtccttcaaacggccgagaactttcgtgccctttgtactggagagaagggctttggctata

SEQ ID NO: 52023 - DNA, 406 bp, Glycine max
  Clone ID: LIB3109-012-Q1-K1-E3
gcattgaagagttctacagtcaagttgttcaaacacatggctcagcaaagaatttgcctacatcctgcacttcaagactcagaccagggctgtgctttttccctcaaaatgtcgtgtcccaaatcagtaccccaatcttctttgtaaatgcagcctatgactcatggcagatcaaaaacattttggcaccaggtgctgctgattcccgtggccaatggcgtgaatgcaagcttgatatcaaaaactgctcacctaatcaactcagtgtaatgcaaggattcaggacagatttcttaagggcatttagtgtggttggcaacgccgcatctaaagggcattttatagatggttgctatgcacactgccaaactggaatacaagagacatggctgagaaatgactcccc

SEQ ID NO: 52024 - DNA, 348 bp, Glycine max
  Clone ID: LIB3109-012-Q1-K1-E4
gggcgcgagttgaaaaccctagtgagttccaatgatctccactcccttaaccccatgcaacacaccatgtgcgtctcgcaatctcctccaattcaattggtttgtgtgttcgttaattgattgaaatgtgtttcagattgggaaggttgcaggatagcaatgcggtgttgtcgcatttcaacgacttctctcagcactgctttgctgagatttccggcgacatcgctagaaacacgcgtgttttgaggtctgtcaagtccgaccttgattatatctttcagaagctcaggtattcttttttaggagggtagtttgtcctgaaaactgcatatttgttgagatgttttt

SEQ ID NO: 52025 - DNA, 361 bp, Glycine max
  unsure (1)..(361): unsure at all n locations
  Clone ID: LIB3109-012-Q1-K1-E5
gatgttgaagtacatagcacgtgataaagagtttcgcagaatccctgttataatgatgcccgcacaagatgaggtatccattgttgttaagtgcttgagacttggagcagcagactatctagtaaagcctttacgcactaatgaactattaaatttgtggacgcacatgtggagacggaggcgcatgcttggacttgtagagaagaacatcttgaattacgattttgatctggtagtatctgaccctagtgatgccaacacanacagtaccaccttgttctctgatgacacagatgacaagtccaagagaagcactaatccagaggcaggaatatcagtccaacaggaacaagagtctact

SEQ ID NO: 52026 - DNA, 369 bp, Glycine max
  Clone ID: LIB3109-012-Q1-K1-E6
ggtgttgaatgggtggaattggaaatcgaagtgaaaagaacggttgaaagtgaaagagtaagatgctattgcaattgcgctgctctcattctcaccacaaactgacacttgcctgcagttgaagatctgatgaattaattgagcatctgagtgcagaaagaatagaggatcgtggtcgatggcgtctgctagccttggaagtggtggggtcggcagttcgaggtctgttaatggtggcttcaggggttcttccagttccgtcgattggcttggcggagagatgcttgagatgaggttgagagaccacgaagacgatagagatagtgagcctgacatcattgatggtgtgggtgctgagacaggtcacgt

SEQ ID NO: 52027 - DNA, 355 bp, Glycine max
  Clone ID: LIB3109-012-Q1-K1-E7
gggttcaagggtatgatgcttgctggattcattctcttgctgaaatgcagtctttctagaaagtttgttcaactgtcccattattggcgttagctatgctacccactggagcataagagacccaattacgtgagagcaacagtcataaggtccatcctcaaccaatagaagaggccatgaatcagaatccagaagcaatggaaaccctaatatctaaagtttttatgaatatctcttccttgaagtcagcttatattgagcttcaagctgctcatactccctacgaccctagtaaaattcacactgctgataaacttgttattagtgagctgaacaatctgcttgaactcaagca

SEQ ID NO: 52028 - DNA, 412 bp, Glycine max
  unsure (1)..(412): unsure at all n locations
  Clone ID: LIB3109-012-Q1-K1-E8
gatatccaaagggacaaaaatattattaagatgatcaacattattggagcacttgttctactctttgcatttctcttcctcagttgtgtgtatgcacaagacacaacaacccttgtgcctgcaatcataacttttggtgattctgctgtggatgtagggaacaatgactatcttcccacccttttcaaggctgattaccctccttatgggagggactttgttaaccaccaacctactgggaggttttgcaatggcaaattagctactgatttcactgctgacacattgggtttcaagacctatgctccagcatatcttagcccacatgcatcanggaaaaacctccttattggagcaaactntgcttcagctgcatctggttatgatgaaaatgctgctactttgaatcacg

SEQ ID NO: 52029 - DNA, 200 bp, Glycine max
  Clone ID: LIB3109-012-Q1-K1-F10
ttgtttgaaattaaactgattggtaacctaatttgtggcctcatgacttttaaggaaaacgtgtgcatacattacacacatcctaaagctagtaagagattgactcgtcattgccttcattccttaaaattaaaaacctacaaaagttggtgttaatgtgtatatgttatttaccttaagatttaaattgaaatctgaac

SEQ ID NO: 52030 - DNA, 358 bp, Glycine max
  Clone ID: LIB3109-012-Q1-K1-F2
tgttagaaagaaagaaggaaagcaaagtagacgagtgattgcgttgcgattgacgacgacgaggaatcatgtcttccggcggcggcggtggtaagccgttcttctgccacgtgtgcagtcagaggattacgtgctccgatgagtcggaaccattctgcccgatgtgtatggaaagtttcgtagaagaatgcaaccctaacaatcccaaccctaatctcttccccgacagtgatgaatcttcggatcccgaactccccttccaccgcttctcacctctccctctcttgctctcatcagtctctaggtcccgatccgaacccgacgtgttcgacccgatggtcttcctccagaaccacct

SEQ ID NO: 52031 - DNA, 327 bp, Glycine max
  Clone ID: LIB3109-012-Q1-K1-F3
ggcacaagtgagtatggtgatcgagataactagaaacagagtgatgaaaatgaacgtccttgttatcttagatgctacactattggtagcatgccaatgccatgcgtacgatatgttagctttacgaatgaacactggctatggtgcccgtacttaggatgtgaaatgcgcaagttggaggcttgcatgtggaagcacacaacatctttggctctgagaccattcctgaacagtgcttataatcatcaaaggaatacatccatggcgaacaatatagatcagactacaacacagctaaccaacaagcttacttttatgccatacacc

SEQ ID NO: 52032 - DNA, 399 bp, Glycine max
  Clone ID: LIB3109-012-Q1-K1-F4
ggatttagtttggagagaaggatcattccaagggctcttgttgtccagtatttagtcgctaaaggcttgaggaaaaagagtgccagcatgattgtcccatttgctgtttctgataaggagtttcttgaaaagtatgtgatgcgatttaaggaggaagaagcggaactattaaagctgtaccagggaaaaatgagtggtcatggaaataaggaggatggtgcagctcctttaaccgtagtgtaatttaaaaaatatctaggtccatatttaatttattccatgttagtggaaataatgtcaagtgaaggcaaagtttgagtgattgatatgtttttcagacgtttagctgggaaatatatcatataacagctttcggatacagcattataggctagagct

SEQ ID NO: 52033 - DNA, 415 bp, Glycine max
  unsure (1)..(415): unsure at all n locations
  Clone ID: LIB3109-012-Q1-K1-F5
ggtaactgaaaatggcagagacttccaacggcaacggcgtctacgtcgatgaagaagaacaagaagtagtaaagttgaagcagaaaacgcaaagagtgaaagaaaccttgccggaggtccttaaccgcatcgcctccgccattctcttcccggaacctgcctactccggatccctacttcgtcggatcaaactctccgtcgccgaccacgctcctctccttcccgaagcttccaaaaactccgcccgcgacgttctcctctggactcgccgcggcactcccttccgcccgctcttcgtcatctccgttgggacggttacttttgttgctttgacagcactgcttgtatntatgctnttctttctagctgcaaccataaatgccattgtcatatcgctgctgatatctttggcagc

SEQ ID NO: 52034 - DNA, 354 bp, Glycine max
  Clone ID: LIB3109-012-Q1-K1-F6
gatgagaagagtgtcttgttcacaccagatgatgctaagaatgatgttggtgttggattaaggtatgactacgggatattctatgcatccaagacgttttatgatcagaataaggagaggagacttttgtggggttggattggagagtctgacagtgaatatgctgatgtagccaaaggttgggcttcagttcagagtattcctagaactgtggagcttgataggaagactggcagcaacttgcttcagtggcctgttgctgaggtggagagtttgagattgagaagtgatgaattcaaaaatttgaaggctaaaccagggtcagtcgtgtcaatagatattgaaacagccaca

SEQ ID NO: 52035 - DNA, 387 bp, Glycine max
  unsure (1)..(387): unsure at all n locations
  Clone ID: LIB3109-012-Q1-K1-F7
gaaggtgcaagagtttgttgtgagctataagctagtttatcgtgaggagaatatgaagttgtttgttttctttgttgctgcagtagttttggtagcatggccatgccatggcgcaggctaccaaaggttccctctccgaatgaaaactggctatggtgagcgttcttcggaggtaaaatgcgcaagttttaggcttgctgtggaagcacacaacatccgagcctttaaaaccattcctgaagagtgcgttgaaccaacaaaggactacattaatggcgaacaatttagatcagactctaaaacagttaaccaacaagctntcttttatgttagtgaacgcgaagtccatcacaacgacatatttatattcggcatagataacaccgt

SEQ ID NO: 52036 - DNA, 419 bp, Glycine max
  unsure (1)..(419): unsure at all n locations
  Clone ID: LIB3109-012-Q1-K1-F8
ttgagcgaagagtgaagagaatggctcccaagggtttaacctttctggctgtgttaatatgcgtttcagcactgtcactgagtccttctgttgcgggggaagggcaaaataatggccttgttatgaacttctacaaggaatcatgccctcaggctgaagacatcatcacagaacaagtcaagcttctctacaagcgccacaagaacactgctttctcctggctcaggaacatcttccatgactgtgctgttcagagttgtgatgcttcactgttgctggactccacaagaaggagcttgtctgagaaggaaacagatagaagctttgggttgagaaatttcaggtacattgagaccatcaaagaagctttggaaagagaatgctctggagttgnttcatgtgctgatatcctcgttctc

SEQ ID NO: 52037 - DNA, 391 bp, Glycine max
  unsure (1)..(391): unsure at all n locations
  Clone ID: LIB3109-012-Q1-K1-G1
ggagagtcttgtgttgttcacctgtaacgtaacaagtaagctccagcactgtcttttattctctttcctttgatccatggaagcctgtgatctcatgtgatagttggtgtgctgcataggaaaggctttctaacgtgtcttctaaggtggtttcactgctccacggttgccgaatctagcttcttgcttctttctccttccaagatatcctttgattcaactttggatcttcacctctgatttcctttcatcgttgggtttatacacccttggggtttaccctcctcacccaactgtgtgcaacaaccacagagtgtataccgagtgttcttcctagaggggagaaaaaatggccacactttcagatattggngttgcagctggcttaaac

SEQ ID NO: 52038 - DNA, 404 bp, Glycine max
  Clone ID: LIB3109-012-Q1-K1-G2
gataaatgaagaggtgaaagaaagagagaaaaaaaatcaatgatatagaattctaatatgtaaaggtctatgggttatctcataaaaggtagtgtaataaagcatcaatctaaatcaattcatatctatttatatatgaattaatttataacgtaaacaaattaagagctctgaatcaataaaaactgagaatattgattcacgaaaaaacaaatcaatattcgaaaaaaaagattattaattttaagatatgagaaaggctccattgtcgaattcagacctaaccattaatcgagaagtgatgggaacgacgaaacctgcaaatacttaagattttattaaaaacatatcttaatgattcattaggtgggatggcggaagaaaccaaaaagcaatcctttttt

SEQ ID NO: 52039 - DNA, 416 bp, Glycine max
  Clone ID: LIB3109-012-Q1-K1-G3
gggtaccaagacaataacgaggtttgtatagagttacttaaaacaaaagacggaatcgattctttagctctatacagctcatctgtcggaaggtttcccaatgctcctggggctttgctttatcctatttatggtgagggagaactaccacaagccttttgtcgccgtgctgctgtcaaaggttgcatttatgttctaagaatgtcggttgtttctctgcttatggataaggttacggggtcttataaaggtgttagattagcttcaggtcaggatttatatagccaccaactaatcctggacccatccttcatgattccatcaccattgtcttcgtctccaagagattttcccagtgaaaagctccaaatgttgggtcagagagatattaaaggaatggtggctaggggaatatg

SEQ ID NO: 52040 - DNA, 268 bp, Glycine max
  Clone ID: LIB3109-012-Q1-K1-G4
acaagaataaatgtgagggccccatgaaaacagggatacggcaagggttgatcagcggatcaggatttggggtttcatttttcttactgttttgtgtttatgcaaccagtttctacgcaagagctagacttgtggatgctgggaaggcaacattctcagatgttttccgggttttctttgcattaactattgcagctattggagtttcccaatcaagcttctttgcttctgacttaagcaaagccaagtcagctactggttccatatt

SEQ ID NO: 52041 - DNA, 400 bp, Glycine max
  unsure (1)..(400): unsure at all n locations
  Clone ID: LIB3109-012-Q1-K1-G5
gaagcaagcaacgtgaagaaaacagcaaacatggcaaataacatggttacgatggtattcctcatattgatgttgatttcatcaatcactccaacagaaattgatgcaaggaatcaagacctcgttgcagccactaaggagatgcaaaaggcaaattactttacatttgtaatgctcatcaacatgtctccacttgacacaattgagggaaatgtgacattcttgatgcccaatgatcgaatgctggctaacatggtcttacaagaagggtccatttcaagcttcttacttaggcattcaatcccatcaccaatgctctntgatgtcttggaacaattccncacagggacaaccattcccacatcactgccaaattgcatgctaagagtctncaacaatg

SEQ ID NO: 52042 - DNA, 412 bp, Glycine max
  Clone ID: LIB3109-012-Q1-K1-G6
gagtgagtgagggaataatgttgcggattgctcccaaattcttcaccacggttcctcttcggaccatttcacccttcgcatgtcgcttctcagtccgttccatcgctgactcttctcctttcaacaaaatccgcattcaaagggatgatactgttagtcataatcacaacccattcaaagggttgctttgctttgccgcattttgtcgttaattttccgtcttctttcgtctgcaaaatagaatttttctaactgtctttactttagtaatgggtttctgagttgaacttggaacgtattgatgagactctgcagtgacaaagagtaaggttagaacttttcagcatcactttggttgtggctattattgactggaaacagtgaattggagctacagcttaaagctgattgt

SEQ ID NO: 52043 - DNA, 394 bp, Glycine max
  Clone ID: LIB3109-012-Q1-K1-H1
gaaagtaatgatgggtacatcgccattgcaatgctattgggtctgttgaaccaaccactttatttgaggagcatagcccaccttgagcagctgctagatttactggatgttatcattgacagtgctggaaacaagtcatctggcaaattcttgatacctactaacccatcatcagctccacaaatttctgctgcggaagccgatgcgaatgcagattctaacaatttaccttctgcggatgatgcatctaaagttgatggttcctccaaaccgacagtctctggcattaatgttgaatgtgagttacatggagtgttgagtaatcttacaaaagcagaacttcgggtcctgtgctcactgcttgctcaagaaggtttgtcagataatgcgtata

SEQ ID NO: 52044 - DNA, 193 bp, Glycine max
  Clone ID: LIB3109-012-Q1-K1-H10
cacaaatccccgctacgttgcgacccccttgaccctccgataaacccatcattctccatttccaacttccaccccatttcagtgacttggtaattcattaaggggttttaatcagcaactctaataacacttgcttatataatagcaacataaatcacattttggtaaaatgaaaaatgcctttctaccaaca

SEQ ID NO: 52045 - DNA, 419 bp, Glycine max
  Clone ID: LIB3109-012-Q1-K1-H2
ggggactgaagcttcacgtggcagagattggaagtggctccaaaacagtggtattcttgcatggattcccagagatctggtacacatggaggcaccaaatgatttctgtggcaaacgctggttatagggctattgcctttgatttcagaggctatggactttctcagcaaccagcagagcctgaaaaggaaaccatgtttgatctggttcatgaaattgtaggccttttggatgctttgaacatctccaaggccttccttgttggaaaggattttggtgccattccaggacatcttactactgcagtgcacccagaaagagtagctggtatcataactttaggcattcccttcatgcttccgggtccctctgctgtggagaaccaccttcagcttcccaaaggggtttatattactaga

SEQ ID NO: 52046 - DNA, 305 bp, Glycine max
  unsure (1)..(305): unsure at all n locations
  Clone ID: LIB3109-012-Q1-K1-H3
gatcacaaaccagacaacttctaacacatacactactctctctctctctcttattgtatggccgccaattccagtagccgagggatcaccgccttagggaagcgagtcgccaaccggatctggacttccaacgcacctnctctcacttcaaggaggggagcatacagtagcggctcagtgtacgacatgaaccctgatgaagagatccagtctgggcaagtcccagacgatgtgaaccaagcggcaacacaatccgggaaatactgggccccacattcacagacttggggtattgggccccccgg

SEQ ID NO: 52047 - DNA, 423 bp, Glycine max
  Clone ID: LIB3109-012-Q1-K1-H4
ggaagaggattgtggatgatttgttgaagaaggggaagatgaagaattgtttggctgtttgtgacgtgtctgggagtatgagtggggtccccatggaggtttctgtcgcattggggttgttggtgtctgagttgtgtgaggagccttggaaggggaaggttgtaactttcagtgaaaaccctcagcttcatttgattgaaggggatgatctcgggtccaagactgaatttattaggaacatggagtgggggatgaacactgattttcagaaggtgtttgatctcttgttggaggtggctgtgagtgggaatctgaagcctgatcagatgatcaagaggttgtttgtgtttagtgacatggagtttgatcaagcatcagcaaacccttgggagacagattaccaagcaatcactagaaagtttg

SEQ ID NO: 52048 - DNA, 395 bp, Glycine max
  Clone ID: LIB3109-012-Q1-K1-H5
ggagagagagagagagaaagtgagagatggagagaatgttccctcccaagaagccctctactatgaattcccatgacagacccatgtgtgttcaaggagactcgggtcttgtcctcaccactgaccctaaacctcgcctccgttggactgttgagctccatgaacgctttgttgatgctgttactcagcttggagggcctgataaggccactcctaaaaccatcatgagggttatgggggtgaagggtctcaccctttaccacctcaagagccaccttcagaaatttaggcttggcaagcagccccacaaggaattcaatgatcactcgattaaggatggtatgagagcttcggctttagaactgcagcgaaacactgcttcgtcttctgccatg

SEQ ID NO: 52049 - DNA, 414 bp, Glycine max
  Clone ID: LIB3109-012-Q1-K1-H6
ggaagaaaactaaggaaggaaggaaggaaggaagagtgagcgtgaaagatgccttcggcgaggctttcagggtcaccaaggctcgacgttgctattgacatgggcaatccatttctcaatctcactgttgatggtttccttaagatcggagctgtcgcagtcacgcgatcagctgctgaagatacttatcatattatccgaaacgggaatatctcaagtcatgatttcgagaaaacgttgaagaagatgtgtaaagaaggtgtatattggggaactttagctggtgtttatcttggaatggaatatggggtagagaggatccgtggcaccagagattggaagaatgccatgattgggggtgcagtaactgcgactctgttatctggtgccaccaccaccatcaaagacaaaatt

SEQ ID NO: 52050 - DNA, 289 bp, Glycine max
  Clone ID: LIB3109-013-Q1-K1-A1
ggaggaaagaaattgatatcgcttacagtaagaggtgagaaagagagacaaatcggcagaagcaaggaggctgagagcgagagagcaactgcacgcactgtaactcctaacttcccagatcgtcttcttcctcttttctctccggtgattgttggaactcagagagcttctttgatggaacagtacgagaaggttgagaagataggcgaaggaacatacggcgtcgtttacaagggtcgcgaccgcgtcaccaacgagaccatcgcgttgaagaagatttcgctcgagc

SEQ ID NO: 52051 - DNA, 315 bp, Glycine max
  unsure (1)..(315): unsure at all n locations
  Clone ID: LIB3109-013-Q1-K1-A10
gaaaggatgcgagaataagaatagctttatagttagacacacttcgtcttgttgctgagacaagagtcataatcttggctgtaacaggttgaacactgcatagcaaattctgaatggaaatgtgtggagccacagctctgacatggtctcacaccatctgtccatcgcttcaccttcctcgatccgtctctccattcattccattttactagaccagggaggctaggangagcttcaggtgttggtgtgtctctgatcaagactccagggganattaaatgatcatatctgtaacttgaacaacaaggtttaatg

SEQ ID NO: 52052 - DNA, 216 bp, Glycine max
  unsure (1)..(216): unsure at all n locations
  Clone ID: LIB3109-013-Q1-K1-A11
gggactgatcgtgtgcatgtggttggagctcgaggtgcttctgggtttgcattacctgttggaattgaggcatttgaagagtcgggtcggtcacttgtacgtggaactttggattatctgcaaggtctcaagatgcttggagtcaagagaattgaacgggtacttccagttggaactttcttgactgntgntggtgaagctgctaaagatgatgtt

SEQ ID NO: 52053 - DNA, 248 bp, Glycine max
  Clone ID: LIB3109-013-Q1-K1-A12
gttagaaaatttgaagaagacagttctggaaatatgagtgctggatctttaatctcttcggaaaatatgactgaagaagatgtcaactttaaggattcatctgctgtagatgcttgtggaattgatgataaccaagttgtttctgaaacaagatcagaaaatggattggaatatgagaattatcagacaggacaaagagctgcaaaaagaattcggagacctacgaagagatatattgaagagctctc

SEQ ID NO: 52054 - DNA, 324 bp, Glycine max
  unsure (1)..(324): unsure at all n locations
  Clone ID: LIB3109-013-Q1-K1-A2
gacttcaaagtggagaaaaacacacacggttggtggattcgctctcttttctttttcctcaaaaagttgaaaaagaataaagggggaacaatcgagtgaagttgttgctcttcaatagtaaacttacctatggaagagggaagggttgtgagtgagtacacaaaagatggaactgtggatcttaaagggaaacccattctcaaatccaaaagtggtggctggaaagcatgctcctttgttgatggtatctctctctctcactataaattgtatatggtcattntcatcttgttatggacattaatttcaaaagcaatttcccaa

SEQ ID NO: 52055 - DNA, 207 bp, Glycine max
  Clone ID: LIB3109-013-Q1-K1-A3
gataaccagcagcaaataaaccctttttaaaaacggattgtcaagtcatgatgcgtctattcaatccccggaaaaccacattgctttttggtatacgtgataaaacaaagaccccacttgaaaatttggagcctattctaagagaagatattcagaagatttgggatggcatttcaaaacccgaagcccatcaacatactcctcttt

SEQ ID NO: 52056 - DNA, 338 bp, Glycine max
  Clone ID: LIB3109-013-Q1-K1-A4
gtatggagaaattaaagagttcccattaccatcaggaggagttgtgataagcggaacaacactgttgactggctaaactatgatggtataattgtgagctctcttgaagccaagagtgccttttcttgctttttgcagggacctttcaagtctatccctcttatatggattgggcatgaaaatgctcttgcttatcgatcaagacaatatactactaatgggcagattgaacttttgaatgaaaagggaatagttttcaatcggtcaacagctgttgtctttccaaactatgccttgccgatgatttactccacatttgatgcttgaaattttaatgt

SEQ ID NO: 52057 - DNA, 369 bp, Glycine max
  Clone ID: LIB3109-013-Q1-K1-A7
ggtacgcaagcactctactgatgccctgcactcgtcacttctcattctctctcttaatatcttcctttctctttctctttctagtttttctctttcactctctttctttcggttttctctgcctttgaaatttgccagcgacgaaccttcggaaccttggaagaattaaacgagtcaaacatgtcgcccaacaacgtggaatctgggacaacggatgatacagaagtagtaggacaacaacaacgtcatagtccaatacatgatattgccttgcagataccgacacaggctccggtggaaacccatgggctataccaaacaaatgatgttcatacgcgttcgatgggcatggccgcgatatgacgcgat

SEQ ID NO: 52058 - DNA, 184 bp, Glycine max
  Clone ID: LIB3109-013-Q1-K1-A8
gacacaagagaaagcagaaaccagagaaccatgaagtctctgaggtccatcttagcaacttttggggttctattatcaatttcactcactatctcactttcaattgaagaagctttcaaccattggctaacacaacacttttagacttcaaaccaatttcccttataaatctacacttacacca

SEQ ID NO: 52059 - DNA, 104 bp, Glycine max
  Clone ID: LIB3109-013-Q1-K1-A9
ggaggagaaagcaatgggcattgatagtgaatacgtgatatctcacaaggcctatgcgaaggtgggattgcttgggaacccgagcgatgtctactacggcaaaa

SEQ ID NO: 52060 - DNA, 290 bp, Glycine max
  Clone ID: LIB3109-013-Q1-K1-B1
ggaggcaagaagttgtattttggcatcgccgtggcttcaagaagagaatctcaatggatgcccaggagctgaagcgcgtgttccagatgttcgaccgcaacggcgacgggagaataacgaagaatgtgctgaacgactcgctggagaacctgggcatcttcatctctgacaaggacctgagccaaatgatccagaggatcgacgtcaacggcgacggttgcgtggacatgaacgagtgtggcgagctgtatcagaccataatggacgagcgcgacaatgaggaggacatg

SEQ ID NO: 52061 - DNA, 350 bp, Glycine max
  unsure (1)..(350): unsure at all n locations
  Clone ID: LIB3109-013-Q1-K1-B10
gactgaaaaaaagtgagaaacacgaacctcaaacctgagacagaaccaaaaacacacttcttctcttcttccattctctaacgctatcagcatcaacacagtgtcacatccattaacgtgctatggtgtttagttaggaaacaccggtggtaaaattgtacgaagcaggaagaacatggctccgtctagcaaggctgagaaaaaggctgccgtggatgcagctgcatggatgttcaatgttgntacatctngtggaatcatcattggaaacaaaagcttgatggcctcttatggcttcaagtttgccacaacattaacaggcatgcactttgctaccacaactttgatga

SEQ ID NO: 52062 - DNA, 248 bp, Glycine max
  Clone ID: LIB3109-013-Q1-K1-B11
ggtggagaagaaggtgaagggaggagttgagtagagccgagtgtgaagcaaaaaccatcccgaagttttcatctttcaatcaaagggtcctcaaagaatgctctgaaccgtcgttatcttcttttccttcttttctaagtccccaatcactctcacacaatgcctcgcccttgtttcgacaagcttgttctccccaccactcttcaatccagacaactgaggattccggataattttctgagaaaata

SEQ ID NO: 52063 - DNA, 265 bp, Glycine max
  unsure (1)..(265): unsure at all n locations
  Clone ID: LIB3109-013-Q1-K1-B12
gacggctaaaagctaaaaatcatcgaagtactcaaatgagcatggctgtcacggttgcattcttgaatttgatcatcatgttttcagtagtctctacaagcaagtcactgagcttaaactactattcaaaaacatgccctgatgtggaatgcattgttgccaaggcagtgaaggatgccactgctagggacaaaactgttccagctgcacttctgcgaatgcacttccatgactnngttcgttcggggtgtgatgcctctgtgct

SEQ ID NO: 52064 - DNA, 206 bp, Glycine max
  Clone ID: LIB3109-013-Q1-K1-B2
tattttgggatcgcctaagcttcaagaagagaatctcaatgtatgcctattagctgatgcgcgatgttcagatgttcgaccgcaacggcgacgggagaataacgaagaaggatctgaacgactcgctggagaacctgggcatcttcaatattgacaaggacctgagccaaatgatccagaggatcgacgtcaacggcgactgttgc

SEQ ID NO: 52065 - DNA, 336 bp, Glycine max
  unsure (1)..(336): unsure at all n locations
  Clone ID: LIB3109-013-Q1-K1-B3
gggcaaggaagagttttaagaactttgaatacctgtgctacctttccccctgccaacgaattntgttactgttcaccagaacttgttggacataaacttgtaccgaattccaagttatggttcatcatcatgttgagctctgatcattcccatccagcttccacaaagaacagaaagaaacactttgtcccttccaccatagtccaacacttctattgtcatcttccactttcatctcccagttactttcatacttcctcagcaaagctctacctccatctattgcatcttctccaaatacttcctccacaaaccctgcttctttcattctctcac

SEQ ID NO: 52066 - DNA, 361 bp, Glycine max
  unsure (1)..(361): unsure at all n locations
  Clone ID: LIB3109-013-Q1-K1-B4
ggcacaacagggggtaggtgaggaaaactttggacaaaaaatggagtgctacacaaggccaaacaggagtgacatccacctctcagcagaggaagaagccaccatagaagcaaagaccagagagtactttgatggagtcgcaccacaacgccacacaaagcctcaacgaagtgactattcagctcaatatgtcgatgctttctccaatgcccatcactcttctttaactataccagaattaacacaattccaactcctncagaatgatccccaagagaaggttggttcctaatatcatctctaatagtttcttcttcataatttcacttttatggaataatacccaaagaagtattaaaaa

SEQ ID NO: 52067 - DNA, 401 bp, Glycine max
  Clone ID: LIB3109-013-Q1-K1-B5
ggtggaagatttgagcagaagaagacatgtagagattggaatcatccgtgtccctctctctcatctctctttctctctcttcccttggtttccttactaattactttaacccaataatccaataactacatacaaagttgaacaataccaccatcatagcgcatcatcatcagaattccaaggggaattgttgatgtggtggtgagaatgatgtatggggagtagaactacctggagggttgttggtgttgaagatgacaagggagctgaaagaggaatgccgagcttcaattctgagttacccaattccaattcatgctatacagaggggaacacagttgattcttttcgtgtttctgactttggagcatttgatcagtcatatcacatagaggatgctg

SEQ ID NO: 52068 - DNA, 375 bp, Glycine max
  Clone ID: LIB3109-013-Q1-K1-B6
ggcagcgcttgagaccaagccccactcaggcacgggaccactctctctgctcttcttctacctttcaagtttttaaagtattaagatggcagagacattcctatttacctcagagtcagtgaacgagggacaccctgacaagctctgcgaccaaatctccgatgctgtcctcgacgcttgccttgaacaggacccagacagcaaggttgcctgcgaaacatgcaccaagaccaacttggtcatggtcttcggagagatcaccaccaaggccaacgttgactacgagaagatcgtgcgtgacacctgcaggaacatcggcttagtctcaaacgatgtgggactagatgctgacaactgcaaggtccttgtaaacat

SEQ ID NO: 52069 - DNA, 425 bp, Glycine max
  Clone ID: LIB3109-013-Q1-K1-B7
ggattggaaaattttcctcttttcttttatgtgagtttaactggcggtctttaaattggtgactgagacatgtggggatgggttctctctgagtaggattttagattgatacctcacacaaagcaaagtggcatcaagttggactttcattataagctacttgtttgatggtcgactttggtaatgatttgaggctcttatcccatgttgctatagatatctttatatttttttcccccaaaaatccaagatccaacctttgcttctaatatctgagatatcaatcttcatatatttgcttttggtaaggatattgattaggagaactcggtgttttttgttttattgggtgtgtcagaaacttgttttaaggagaagctactgagagagcttgtatatgaggttcgaagctttgctatgccatg

SEQ ID NO: 52070 - DNA, 225 bp, Glycine max
  Clone ID: LIB3109-013-Q1-K1-B8
ggagaaaaggaggaagcagagagggaggagggtagtgaggaggaagggcccaaagggtggaagggttattgtctctggggctatgctggttgaggttgagactgttcttcagactcaggaaccagtgataaaaccaatttggaatacatttgctagcagtctcagtggaatttggaagggtgtaggtgctgtgttttctcccatcacagctgaaatggaaccaat

SEQ ID NO: 52071 - DNA, 235 bp, Glycine max
  Clone ID: LIB3109-013-Q1-K1-B9
ggaaagaaagaaggaaagcaaagtagacgagtgatggcgttgcgattgacgacgacgaggaatcatgtcttccggcggcggcggtggtaagccgttcttctgccacgtgtgcagtcagaggattacgtgctccgatgagtcggaaccattctgcccgatgtgtatggaaagtttcgtagaagaatgcaaccctaacaatcccaaccctaatctcttccccgacagtgatgaatct

SEQ ID NO: 52072 - DNA, 366 bp, Glycine max
  unsure (1)..(366): unsure at all n locations
  Clone ID: LIB3109-013-Q1-K1-C10
ggtgggattttgagagagagaaatagagagagaacttcgagtgatggtgagagtgacacaaatctagagagagcactagtactctaaaagtctattatattcttcaaaatatgaccatgcatcgcgagtcttgggcttttgtcttcggcgttatgggcaacatcatctcctttggagtgttccttgctccattgccaaccttttaccaaatctacaagaagaaatccactgaaggtttccagtcacttccttatgttgntgcactggtcagtgcaatgctttggatttactatgctttcgtgaaaagggaaactgcccttcttctcattaccattaacacattttgaaattgtgtggagtcaattt

SEQ ID NO: 52073 - DNA, 410 bp, Glycine max
  Clone ID: LIB3109-013-Q1-K1-C11
ccacacaagtaacggagaacatactaaagctttggagtgtgattttcgggcgctcgagcgaaacccattcttaccccaagcttttaataatatggccgtgatctgtcattaccgaggagaacaggccattcgacagggagactcggaagttgcggagtcttggtttaatcaagccgctgaatattggaaacaagctatagccctaacccctggtaattatattgaagcccagaattgggtgaagatcacaggacgttttgaataagaaccaccttgttttttatttttcttatattttcttcttaaattatatctatctatctataattctatctatatagatagatagatatctataagtatcaaattttggcttggtgttcccatcaatcaaattaaaaactcttttc

SEQ ID NO: 52074 - DNA, 279 bp, Glycine max
  Clone ID: LIB3109-013-Q1-K1-C2
gacagacaagggtttggtccgggttcacgtttcacaatcactttttgcgcttctctcactcactcactcttcttcttcctcttcgtgtggttttctttctcgaactcgaacgaagatgcgtgagattcttcacatccagggagggcaatgcgggaaccagatcggagccaagttctgggaggtggtgtgcgcggagcacgggatcgattcaacggggaggtaccaaggggacaacgagttgcaactcgagcgagtcaacgtctactacaatgaaacgag

SEQ ID NO: 52075 - DNA, 326 bp, Glycine max
  Clone ID: LIB3109-013-Q1-K1-C3
ggaggaggagcaagagatgtttcgttaaggtcatgggatggtggtagctgcaagttgaacttttctgtggcttctgcgtccactagctagaaccatgagaagagcaccttacaaaataataataacgcttctactggtactagaggggaaggtaccgtggattcatggatttgctcttctgaatagactaaaccgggtacagaaacttgttatcattacatggtagaatatgatgctgcaatgaattaagatcgtgatcatgatgatgctgatgatagtgggtggttgctggttagaatttgcagctaacatctttcttcttttct

SEQ ID NO: 52076 - DNA, 399 bp, Glycine max
  Clone ID: LIB3109-013-Q1-K1-C4
acacgtgatcgctcaagaagcttatcaaactcttgaatgagagatttgtaatttactgattgcatttccatgttgttattgcgtgtttctatctggacataagaaaagttattaagaccaaacaaagtaagaatccagtgctttgaaagaactcctacacctgaaattatatcacctagaaaagcaaatagaactgaaatagtgaaatctcattaagcagaaagcaacttcgacagcaccacaaaatggtcactgtagaaataattgtgaccataattcaactttacaaaggtaaaatccaattcatataaatatcattttaaactcaatgaaaattttgggcatgacccaactgtccaaaaactaatttaaaatttaattttaaaggaaattaggaaa

SEQ ID NO: 52077 - DNA, 252 bp, Glycine max
  Clone ID: LIB3109-013-Q1-K1-C6
gggacaacagcatgttgtcttggcagagggctgcgtttcatttccaaccagagaaagactggatgaacgatcccaatggtcctatgtactacaagggatggtatcactttttctaccaatacaacccgaacggtgcagtttggggtgacatagtttggggacatgcagtttcaagggacatgatccattggcttcaccttccactggcaatggtggctgatcaatggtatgacatgcaaagtgtgtggacag

SEQ ID NO: 52078 - DNA, 416 bp, Glycine max
  Clone ID: LIB3109-013-Q1-K1-C7
ggtgaaggcctaggattgctgagtcaaacttgagttgaaggtgaagaaggagatggcagcaacttcttccttgtgttcatcgaccctccaatcccaaatcaatggattctgccttcacaaaacctctctttcccatcctcgttccctcactttctccaggaagaaaatttcaaccacagtgaaggctacatctcgtgttgacaagttttcaaaaaacgatatcattgtttctccatccattctttctgcaaactttgcaaaattgggagagcaggtgaaagcagtggagttggctggttgtgattggattcacgttgatgtaatggatggccgttttgttccaaatattacaattggacctcttgtggttgatgcattgcgccctgtgacagatcttcctttggatgtacacctga

SEQ ID NO: 52079 - DNA, 331 bp, Glycine max
  Clone ID: LIB3109-013-Q1-K1-C8
gacacaaaaatagtgatggaaaggttgtattgtatgagtatattaatgtctctttccatacatagtcatttctgcaagttgggtttggttttctcttcctcgttcgtttcatttcgtttcgttgaagagcaacttttctctctctgtctctgtacaattctcccttttcttccctcgtagatcgaaagggaatattcttccatggcctccaagcggattctgaaggagctcaaggacctacagaaagacccttcaacctcttgcagtgccggtcccgtagcagaagatatgtttcattggcaagcaactataatgggtccccctgatagcc

SEQ ID NO: 52080 - DNA, 236 bp, Glycine max
  Clone ID: LIB3109-013-Q1-K1-C9
gatagacaggagattagagtgcacatctctttcatgggaaagttatctttctaataatccatggtctgttggatcttttggaaagaaatatgcggaggttctcaataattctaaagctaattctgctgttagcccaggatgtacaaagtctgagattcctcagaaagtgttggaatctttgtttaacattcccaaaagcactgaacatgacaaaaataccatgaattggagaaatg

SEQ ID NO: 52081 - DNA, 365 bp, Glycine max
  unsure (1)..(365): unsure at all n locations
  Clone ID: LIB3109-013-Q1-K1-D1
ggatagaaagtgagagagaattacagagcattttgcaacgcgattacacgaccgaatcaaacccctctttctctccgaagctgcttttaatatcgtactggccttcgattgttctcctctttaatacatactgttctctattcgatttgagggaacagtacaagagtctgatcatcggttaacccaactgcacaggtagtctccaaataatggagcctcatgatgagactggatgccaggctcctgaacgccccattctttgcattaataattgtggcttctttggaagagcagctaccatgaacatgtgttccaagtgttacaaggacatgctgntgaagcaggagcaggacaaaattgcagca

SEQ ID NO: 52082 - DNA, 403 bp, Glycine max
  unsure (1)..(403): unsure at all n locations
  Clone ID: LIB3109-013-Q1-K1-D10
ggaggctactgaaatcattacttatactagttttcggcgattattcatagtgaggcaatagtagcaacaattcacactggtctttgcttctcgttactcatttctcacctaactttctattcttctcagtctcagatcagaaccttagccatggcagcgttccagaagatcaaggtcgccaaccccatcgtcgagatggacggagatgaaatgactagggttatctggaagtcaatcaaggacaagctcattttgccctttcttgagttggacatcaagtattatgacttaaggctttcttaccgngatgagaccgatgataaagtaccaattgaagtgcggaagcactctcaagataatgtggcattaagtgccgcactattactccagatgaagctcgtgt

SEQ ID NO: 52083 - DNA, 398 bp, Glycine max
  unsure (1)..(398): unsure at all n locations
  Clone ID: LIB3109-013-Q1-K1-D11
gggggtgtggatgacttgtatatagatttctaaaacgcttttctcttttatccccccgctctcttgttctattcatacctaatttttcttatttcttgttgtttatatagaatgataggatgtagttttctatagccagaaaaagaaatgaaatttgcatcgatcttcaaaacaaaatgaaaaaatgtatagagataaaagatagaatataggaaaaagaaaaaaaatagtcactaaatgaagtaattggactttataatagattaatagattacccctattgaagtactttnttttttaatggttcttaatatttttgattttaatatcatttctttttaataccaactcgctctttattattttcagntactaatcctagntatttgatttatata

SEQ ID NO: 52084 - DNA, 145 bp, Glycine max
  Clone ID: LIB3109-013-Q1-K1-D12
atatatatcaacatacaaaataagaactttataacaactaaataaaaacaccattatgatgctatacatcacacaattacatttcctatcataatctctacaatactatctctcacccgattcacttaaaaccccaacaacaata

SEQ ID NO: 52085 - DNA, 337 bp, Glycine max
  Clone ID: LIB3109-013-Q1-K1-D2
ggggggaaggaaagaaattagaaatatttattcagtgtcgccaaatcttgttccctgcaagagaaagaaagaagggagagaagaagttgttgggttgagttggattggatttctaatctaatctatacctttcttttttcctatgcttttaaggcacaaacccttctttcttccctcttctttcttcttcttattgttattccttgcctttaccctttagggaaggaagaaggaacaactatactactattatccttattattgttattattgtaattaatctttgtattatagttaatcggtgttgttattattcctcaaaatatggattcgttgt

SEQ ID NO: 52086 - DNA, 313 bp, Glycine max
  Clone ID: LIB3109-013-Q1-K1-D4
ggaattgtgaaagtaagcaaagatggctttcacggaatcggctctcctccttccttcggtttcaggaaccaacaagaacaagaacaaggttccagaagacaaatggtatttagcctacattgtgtattttaccctgggtctcggttaccttctcccatggaacgctttcatcaccgacgttgattacttctcctttctctaccctgacgccagcgttgaccgcatcttcgccgtggtttacatgatagtcggactggtggggatctccctcataatcctctacagccacaagtctgacgcctatgtgaggatc

SEQ ID NO: 52087 - DNA, 426 bp, Glycine max
  Clone ID: LIB3109-013-Q1-K1-D5
gacgacaacagataatagaatagtgattttgactgtactttatcttggtactaatccaattcctcgagggaaacgtgaagatgatcatccacaaccacagcatcatttccaaacaaaaccaaatttgatttcccgtttcattggtattgatggatccggagcagactttcatacgcgtgcaggagaggttttctcagatgctgacgcccaaagtcagagttgctttggagtatctctacctgttcatcgccataaccttattctgcattctcgttgttatgcacgccaattacgttcaacagcctgggtgttcaagtgagctatccggagtagtgacatcagaagcccaacttattcagattaagataaccagtgccggcctgtggtctcataatgattctgattcaaacagaatagatccccctg

SEQ ID NO: 52088 - DNA, 111 bp, Glycine max
  Clone ID: LIB3109-013-Q1-K1-D6
gtttatggatgtggtcacagaaactatatgacatgttttctggttttctatgctgtcctatgactttgttataaaggaggagtcaaatgtgggaaggttttttttggtatg

SEQ ID NO: 52089 - DNA, 315 bp, Glycine max
  Clone ID: LIB3109-013-Q1-K1-D7
ggaagagtgaagagaatggctcccaagggtttaaggtttctggctgtgttaatatgcgtttcagcactgtcactgagtccttctgttgcgggggaagggcaaaataatggccttgttatgaacttctacaaggaatcatgccctcaggctgaagacatcatcacagaacaagtcaagcttctctacaagcgccacaagaacactgctttctcctggctcaggaacatcttccatgactgtgctgttcagagttgtgatgcttcactgttgctggactccacaagaaggagcttgtctgagaaggaaacagataga

SEQ ID NO: 52090 - DNA, 110 bp, Glycine max
  Clone ID: LIB3109-013-Q1-K1-D8
gatgtgcgataatgatagaaaagtgcagggggcggatcagatcatcccgcgaacgaaccaggcttggtcacttgcgcttctgactacttgcgagcggaatcaactgcatt

SEQ ID NO: 52091 - DNA, 384 bp, Glycine max
  Clone ID: LIB3109-013-Q1-K1-D9
ggacttcgatgaagatgtagatgggagaacagagagaaatagagtactttcaggttcccttgacaattccattatctaccttcgcaatctccgtaaggtatattttgaggagaagcatcatgggagaaaggttgcagtagattcattaactttctcagttcaggaaggagaatgttttggctttttaggaacaaatggagctggaaagaccacaactatttctatgctatgtggggaagaatgtccttctgatgggactgcttttatttttggcaaagatatatgttcccatccgaaggctgctcgccgatatattggatattgtccacaatttgatgctctattggaattcttaactgtccgagaacatcttgagctttatgc

SEQ ID NO: 52092 - DNA, 361 bp, Glycine max
  Clone ID: LIB3109-013-Q1-K1-E1
gaggctcaagacttacatgtgtcagagaattccgagatccgtgatgcctatgttaagctacagattggtaaccagattttgaagacaagaccagttcaatcaaggactatgattctgcgttgggatcaagagctgatgtttgttgctgctgaacccttcgaggaacctctgattgtttcagtggaaaatcgagttggtcccaacaaagatgagactattggagctgttgttattcctttaaaccaaactgataagcgagctgatgatagacttatccttactaggtggtatcaccttgaagagtccatgccatctgcgatgaatggggaacagggaaaaatgagaaagataaatttttagt

SEQ ID NO: 52093 - DNA, 267 bp, Glycine max
  Clone ID: LIB3109-013-Q1-K1-E11
gaggattgtggtgtgttgttgttgtattgtaggtatgcgtggctgaaatcaaaaaccctagccctcactctcatcactttttttgagctatgtttcaagagagttagttagggataatagggcagggaagaataacagggatgtacaaagaacgagagcgagttggtgtttctgtttccgcttccaaatcggaggatcggaagcgaatcaacgacgttctcgataagcactttgaacgatcctctccttccacttctcgccccatca

SEQ ID NO: 52094 - DNA, 376 bp, Glycine max
  Clone ID: LIB3109-013-Q1-K1-E12
gagggccaagagtgaggaagaggaagatgggttgggcttcagcaacagcatgtgcgtcgctctcctctccgctgtctcgacttccaccgtctcgcactcgcactcgcacgtccattcccagttcgttttcattttcatggctttcttcatttcccactttaactttaagtgcttctcgctcttcctcctccggcataaaccctcccaatccctcacgctcccatgattctttcattcgagctgcctggacccgaagatctcgaggtgaagctgcaaagaaacctaacaggaaatcgtggaagcagaggacagacatgtacatgagaccgttcttattaaatggtttcttctccaaaagatttattcatgcaaaagt

SEQ ID NO: 52095 - DNA, 267 bp, Glycine max
  Clone ID: LIB3109-013-Q1-K1-E2
gggaggtaatgctatgcaacaactttagtttcggggttcagactcactcaccgtcgggatgtcgccggagcccggagcacacgcatcccttctgccgggatccaaagatgttcctccggcaactgtgtccggtgccgggttcaatgtcgccaacagtataatcggcgccggaataattgtctttccggcgattcttaaggtcctcggcgtgattctggcgttggtgctgattctcgtgattgcgtatcttgccgaactatcggtgga

SEQ ID NO: 52096 - DNA, 343 bp, Glycine max
  Clone ID: LIB3109-013-Q1-K1-E3
aatgtaaatgatatgatgcgctgcatctagatttagtgggtatagaccttatacaactatgactgtacatgtatcatattatacatgcttatcataagtatggagactcagatggatagtcatcatgggcaaaatgaattctagaactgaattgagcaattggatcggattatcaagttaattaggtcaatcatccaatgaatattcctactacatattgctcatattgctaatccctgccagttgctctgttctgtctctaaataaagtaatgcatacaaagaatactctgcaccttcatactaggagttagagtttttaagctaggtttgacacaccaaac

SEQ ID NO: 52097 - DNA, 355 bp, Glycine max
  Clone ID: LIB3109-013-Q1-K1-E4
ggcactgttgtttagttatttcagtgttgctggtagttgtattgtagtattatatccgttttgtaaagcataaagctttaagctgataggaaattggaggagcgattggggtgagatgatgatgatggtaaggataggatgttttatggggaactgggttcttctactctttagttatcccatcgctgcaataactctacactttcacatatacacaaacatccctctcctctaatatctccaaactatgctgctactcacactcacaacaaacgattagttgcttctgcttcttcagctccatcagttagcggttcaggtgctgagtattccgagcagatggtgggtgtgggag

SEQ ID NO: 52098 - DNA, 347 bp, Glycine max
  Clone ID: LIB3109-013-Q1-K1-E5
ggggcgagatttgccttgggtgcgctttccgggtgaggtttaataaaaaagtcaagtaggacagcggtgaccgcgaatggctatagttcgtcacttgcggtataaaaagaaaagtcaggagctttgaagatcagccctaagctaaagcgctttctttctagtttgagagatggaaatgcctaatcaagtagccaagaatcatcgatttcggaggggaaatgaatttaggaaggatccgatcccaagtgacattgaatcagttgggggtataagcgctgctatttcagcagttggtgttggaggactgaatgccagtcgaaaggcgcatctatgacttaatacctaat

SEQ ID NO: 52099 - DNA, 388 bp, Glycine max
  Clone ID: LIB3109-013-Q1-K1-E6
gacggctaaaagctaaaaatcatcgaagtactcggattagcatggctgtcacggttgcattcttgaatttgatcatcatgttttcagtagtctctacaagcaagtcactgagcttaaactactattcaaaaacatgccctgatgtggaatgcattgttgccaaggcagtgaatgatgccactgctagggacaaaactgttccagctgcacttctgcgaatgcacttccatgactgtttcagtcgggggtgtgatgcctctgtgctgctaaattcaaaaggaagcaacatagcagaaaaagatgggccaccaaatgtttctttgcatgcattctatgtcattgatgcagcgaagaaagcactagaagcttcatgccccagtgtgggctc

SEQ ID NO: 52100 - DNA, 368 bp, Glycine max
  Clone ID: LIB3109-013-Q1-K1-E7
gatctcgacccgaacgtcacggacgcccagctgtgtgatttgttcaaccaattggggcaagtcgtatccgttagggtttgcagggacttgaccagtaggagatcgctcggttatggttatgtcaactttagcaacccgcaagatgctgccagagctttggatgttttgaacttcactcctctcaataacaggcccatccgtatcatgtattcgcatcgtgatcccagtatccgtataagtgggcatggaaatatatttattaagaatttggatagggcaattgaccacaaggcgttgcatgatactttttctacatttgggaatatcctttcgtgcaaggtagctacagattcatctgggcaatcaaa

SEQ ID NO: 52101 - DNA, 362 bp, Glycine max
  Clone ID: LIB3109-013-Q1-K1-E9
ggacattgggagatgggaaaactgccaaagtttgggagtacccatcgccacgatctactgatggttcattcgtcaccaaccccattattgatggtctggaggacttatcagttgaggctttggtagacccttttcaacaaagtcctggaacaaaattattctaaatgaccttttcacagcagaggatgtcactagaattctttcaatgccaacctatttcagggatgaactagacaagcttacatggatgtttagtagagatggattttacacagtcaaatccgcatactttcatgctacacagagtatggtagacaactcaagtctgcctgaaaaatgaccgtagatggatatattgcaac

SEQ ID NO: 52102 - DNA, 333 bp, Glycine max
  Clone ID: LIB3109-013-Q1-K1-F1
gacacacttttctttcattcttggtgtctgaattcttggattcatctgacaaacatcttcaaccttcaaaaacatcatcctgtttacatctagaaccaggttttaactagtctctggtattactcattcaactaggttagaaaactctgttcaagttctagttaaccctttacatgctttctttctttccaactatccactgatttgaagcttgttattcaaatgaaatcaggggtctgaatttttgtagctgatatatccagaagagaaataggaaattggagaattaagtattctcgttgcatgatcaatgatgaactaaaatatctatat

SEQ ID NO: 52103 - DNA, 318 bp, Glycine max
  Clone ID: LIB3109-013-Q1-K1-F11
ggagttggttaatactgtaaactcgatttctgaatcttaagcttttctctctctttcatttttgaaatccttttaaatgctaaagtaaccctatatatgcttcctattttttttccacttctatgaatatcttctattgttgaactcaattatccatttaaattctttctctctttttccttcttcttatctctttttttgttgctcagatctccaatatatcattctatttcgtccattcttttgtgttggatagttaaacctctaagagaactacttgaatttgatctttagtatctgcatttcagtgttaccatt

SEQ ID NO: 52104 - DNA, 313 bp, Glycine max
  unsure (1)..(313): unsure at all n locations
  Clone ID: LIB3109-013-Q1-K1-F3
gggaggtggaaagaggaagaggcaaaagagagaagcagaggtttgcagaagaaaaaaaaaattatatatataaaagagagaagagaaggtgcagtgagtcacagtcatagaaaagaagcagaggcaccattttcgttttccaacaacctctaccctaacgccgtcataacggtttgtgcttccgcgacgcgacgcttcaactgtgaaacgcacgcgacgtagtttatataaagcgccgtccctttccgtttgagcagtcagcaagacgatgacctgtgccaaattattttccgtcttttctctcagnttctaa

SEQ ID NO: 52105 - DNA, 313 bp, Glycine max
  Clone ID: LIB3109-013-Q1-K1-F6
gatggccgtgtcattgtttggaaggagggcaacggaaaatgaatggactcaagctcatgtgtttgatgaccacaagtcatctgtgaattcggttgcttgggcgcctcacgagttgggtctttgcttggcttgtggctcgtctgatgggaatatatctgttctgactgcaagagcagacggtggctgggacactgtgagaattgatcaggctcatccagttggtgtcacttcggtgtcatggacgccatcgatggcacccggagcccttgtcggtgcaaggttgcttgatccagtacagaagctgtgctctggt

SEQ ID NO: 52106 - DNA, 409 bp, Glycine max
  Clone ID: LIB3109-013-Q1-K1-F8
ggaccttcacctgtgcagcaattctctgtcggcaaagttgatctttctttatttccttctttggcgggaatgacataaacgggggtttctgataatttcaagggcttaatactggcgatgggttctagtgcattcatcgattccagtttcatcttgaagaagaagggtcttaagcgtgctgctgcacgcggtactcgtgcaggagttggtggctatacttatctactagagccgctttggtgggctggtatgttgacaatgattattggggagattgcaaactttgttgcttatatctatgctccggcagttctggttactcccctgagtgcacttagtattattggcagtgctgttttgtctcacttcttgttgaaggaacggctttcgaagatgggggtattggggt

SEQ ID NO: 52107 - DNA, 319 bp, Glycine max
  Clone ID: LIB3109-013-Q1-K1-G1
gggcgcgaacgagttccagacggagatcaagatggtctcgcgcttccgccacgcgcacttggtctcactcatcgggtactgcaacgatggcggagaaatgatcctcgtctacgatttcatggcgcgtgggaccctacgcgaccacttgtacggttcggagctgtcgtgggagaggaggctgaacatatgtcttgaggcggcgcgtgggcttcacttcctccacgcgggcgtggacaagcagagcgtgatacaccgcgacgtgaagagcacgaacatcctgctggacaaggattgggtggcaaaggtgtcggatttgggg

SEQ ID NO: 52108 - DNA, 380 bp, Glycine max
  Clone ID: LIB3109-013-Q1-K1-G10
ttggggcgcattgaacgaaaattagggtttcgagtgtatcaggaacaagcagcaatggctccgaaggtaacacgcaaggttagcagaaaccccgaattgataaggggaattggaaagtactcgaggtcgcagatgtaccacaagaggggcatttgggctatcaaggccaaaaatggtggcgttttacctcgccacgaccctaaacccaaacctgaaacacccgctgaaaaaccacccaaattttaccctgctgatgatatcaagaagccccttgtcaacaagcacaaacccaaacccgctaagctcaaggctagcattactccgggaacagtgtcgattcttcttgctggtagatttaacggaaagagggtagtcttttt

SEQ ID NO: 52109 - DNA, 327 bp, Glycine max
  Clone ID: LIB3109-013-Q1-K1-G11
ggaactgtgaagtgtatttggtcactgacctatcttgggagagatttgaagtttaaaccttcaaattaatcaaaccattttaatttgcctatagattctgagtcactgctgctatggcgctacgcgtacttcttgtgttggggatgttgctgatgttgtgccttgttaaggtttcatctgatccaaagatagaagaagaaatactggaagcagaagaagaactgcagttttccgataacgagccacttatcgtgagagacgcgaacagaaagctaatgcaagatatggattgtggtggggtgtgcaagacgaggtgcaatgcacatt

SEQ ID NO: 52110 - DNA, 355 bp, Glycine max
  Clone ID: LIB3109-013-Q1-K1-G2
ggagtgagacaatatcacacataatataattccaaaatcactcctattgctatagcaatatgatgggtgacactgagatcaaaccatcagttgaagtagtcatatgtgcttccatgaacaataacaatagcgcaaacaaccacaccctcccaaccgacatcaccaagtcatcacaatcacacttaccaatcttgaccaagctccatgctggttactttttcatatgcctttcctttggtgcacaagctttgctctggaagagtttgagtaaacacaacaaggactcacaaactctctggcatggattcaatttgatgccttccattgcggttctactactttggtgtgtggcact

SEQ ID NO: 52111 - DNA, 316 bp, Glycine max
  Clone ID: LIB3109-013-Q1-K1-G3
ggagatcttggatggcaaagaaatagacagatgggttgaaatatagatgagcatactaaacctatacattcactttccaagatccacgtgaagctgcaatacttccatgtttcaaaagacttgagctggggccaaggcattggaagtcctaaattccccggagtgccttacacttctcacacagagacaagggtgtaaggcttctctgtaccaagatgctcatgtcccagacaactttgtccctaaaataccacttgctggaggccacacttaccaacctgatagatgttgtaaagatgtttttgatgaaatcaat

SEQ ID NO: 52112 - DNA, 357 bp, Glycine max
  Clone ID: LIB3109-013-Q1-K1-G4
gggttggtggtggtgcctgccggaagtgaattgaattgaagagagatgttgtttcaggtgggcgggcaaggcagtcgccccaccttcttcgagatggcggcggttcaacaactgccggcgagcctccgcgccgctttgacatactccatcggcgtcttggccttacggagacccttccttcacaaactcctcgacttcgaagacgaatccttcgccttactcatgctcgtcctcgaatcccacaccttacgaaccacagatgcttccttttcggaatctctctacggcctccgaagaaggcccgccaatatcgccctcaggaatgacgacgccactaccaccaacaccagcagcagc

SEQ ID NO: 52113 - DNA, 367 bp, Glycine max
  Clone ID: LIB3109-013-Q1-K1-G5
gatcccaagagagttggaaaagaaaggatagagtgaaagaatgggtgagaaaagcaagattttgatcataggaggcaccggctacatcggcaaacatatagtggaagcaagcgcaaaggctggaaatcccacttttgctttggtgagggaatccacactctctgacccctccaaggcacaactcatccacaattttgaggctttgggcgttaatttggtccgcggggatctgaacgatcatgagaagttggtgaaagctatcaagcaagtagatgtcgtcatatccacgctgggtcacctgcagcttgccgatcagctcaagatcatcgctgccattaaggaagccggtaatgttaagaggtttttc

SEQ ID NO: 52114 - DNA, 388 bp, Glycine max
  Clone ID: LIB3109-013-Q1-K1-G6
ggaggaaggattagacagtctaatgaaatccatgagaagtgcaatctatttaagcctctggatgcaaaacttggtgagccagttggtatctccacaaaaatttcaaagctgactgcaaatactttcatccataagcttcttgcttcatcaattacaataatggcactgcacctgcaatatgttaatggagatccaaattcagtcttaagttggttggagcgctggtcagcatcttacttttggaaaccagttccccaacccaagaaaattcgagactctaaatctcagagaaagcagggtaatgtttcaaatggggaagctcaaattaccaagtcaaaacgcactaccaggaagcttcctattgcaaattttgaaacagccctggagc

SEQ ID NO: 52115 - DNA, 341 bp, Glycine max
  Clone ID: LIB3109-013-Q1-K1-G7
ggttcttgaaattatatgaccatgcgtcggattgggatgctgcactcattctgcgtcgtgctcctgtactgggtctacgtattctcatgaactccctcttaaatccgtgattaattagatctatctccttagtttatccctgtcttttccaataattaattagatctgtagttcctttttggattagtttcttttttggttctgttatcaaatcaaataaaaaatctccttctcggaaatggcatcaccgatccaacaacaacaacgctcgactactacaagttctggatctgaaggaggagatccgcatatcatcgattataggaagcggaagaggatgc

SEQ ID NO: 52116 - DNA, 327 bp, Glycine max
  Clone ID: LIB3109-013-Q1-K1-G8
cgggaagcgaagaaggaccagcacaaccagagcccaggccatagccaccgaaaggctcaacggagcgcaagacaagagcaaaccagactcgaggcacagctccaaacggccgcaaccagcacacccagacgccattacaaaagggtgagcagccacaaggtaacaagcacaggagagagacagaaaaaactccactcccaaaggcagcacgtcagcatcatcaacagcagcacctaagcctgcttcaggaacaaggggcatccagcacaagacggacgcatactggaactacaggaagctccccattgtggacgaccacatcataaa

SEQ ID NO: 52117 - DNA, 265 bp, Glycine max
  Clone ID: LIB3109-013-Q1-K1-G9
ggactctactagtacatcgtaaaaggatgcattgatgagttttacttgttgcccgatgctttcaaggtgatcaagcagattggtgttatcggttgtggatctcagggacctgcgcatgctcagaatctactgtactcacttgctgaagcaaagtctgatattgtgatcaagattgtactcaagaatggtactagttcctttgctgaagcttacgcaattggattttctgaagagaatggcactttatgtgatatatgggaaactg

SEQ ID NO: 52118 - DNA, 251 bp, Glycine max
  Clone ID: LIB3109-013-Q1-K1-H1
agttgtaagaacacgtccgagggggcatgagatgaatgctacaagctacatcaggtagggaatggtccttgtaacttatggatcataaaaaggcttcaattgcaacctcatgatccttcgacgtctgaagttaagatatacctgtgaagctctatgtatcattcacgtgaatatcaagctaatcgtatagtgtggacgttaatgattctacaactagttgtcaggatatgaatcttatgacactcaattgc

SEQ ID NO: 52119 - DNA, 333 bp, Glycine max
  Clone ID: LIB3109-013-Q1-K1-H10
cggtttaagtaattcgaaacaagcaaactagtcaagctgaatgttatgggtttattgagtttaatagtcgtgctggagctgagagaattcttcaaacatataatggggcaataatgccaaatggggggcagagtttcaggttgaattgggcaacttttagtgctggtgagaggtcgcgccacgacgattctccagattacaccatatttgttggtgacttggctgcagatgttactgattatcttcttcaggagacatttagggctcgttataactcggtgaagggtgcaaaagttgtcattgataggctaactggccggaccaagggatatg

SEQ ID NO: 52120 - DNA, 312 bp, Glycine max
  Clone ID: LIB3109-013-Q1-K1-H5
ggttctagtgtgtgattgtttgttgtcgtaactggttcttcttcttttgttggtctgtgtttgtgtttgttttttctctcacctgaaaatgtcttgctgcggtggtaactgtggttgcggaagctcctgcaagtgcggcaacggctgcggaggctgcaagatgtacccagacttgagctacactgagtcaaccaccaccgagaccttggtcatgggagtggcacctgttaaggctcaatttgagggtgctgaaatgggtgtgcccgctgagaacgatggctgcaaatgtggaccaaactgctcctgcaaccc

SEQ ID NO: 52121 - DNA, 204 bp, Glycine max
  Clone ID: LIB3109-013-Q1-K1-H9
gcacattaatctggtatgttcatggttaaccaaacgagtgtcattgttttgtgctgcaaatgtggaattccaatgcaaccaaatgctgctaatatgtgtgttaagtgtctgcgctcggaattcgatattacataatgacttctgaatcttcttatgcttgtgcattgccccgagtgtgatatttactttcaaccaccaagaatt

SEQ ID NO: 52122 - DNA, 414 bp, Glycine max
  Clone ID: LIB3109-014-Q1-K1-A1
gaagccaaagaaaggaacaagaacaagaacaacaaagtggcgtgaaagagagagagatggaggcgattgttccagtggtggatttccagaggctttcagaggaagaggagcgcaagaagctgagaaaaacatgtgagaaaccagggtgtttcagaatcatcaaccactcaattccactaacactcatggctgacatgaagtcagtggttaaatacttgcatgaccttcccacggaaatcaaaatgcgcaacaaaccctccgtccctgagagtggctatagggcggcaatgccaacaagtcctctatacgagggcatgggaatatatgacatgcatgcctcaccacaagcatttgaagatttctgctccaacttgaatgtgtcaccccgtcacaggcaaataataaaggaatatg

SEQ ID NO: 52123 - DNA, 344 bp, Glycine max
  Clone ID: LIB3109-014-Q1-K1-A10
gaatacaagacgtgtctataaaaagttaacatgacctgttccaatgagcaacaaagagagcaaggagagaggagatgtcggtggagcagaaagcagcagggaaggaggaggagggaaaactgcagaagggaattgcagagttctacgacgagtcgtctggcatatgggagaacatttggggcgatcacatgcaccacggcttttatgacccggattccaccgtttctgtttctgatcatcgcgctgctcagatccgaatgatccaagaatctcttcgttttgcctctctgctttctgagaacccttctaaatggcccaagagtatagttgatgttgggtgttgc

SEQ ID NO: 52124 - DNA, 335 bp, Glycine max
  Clone ID: LIB3109-014-Q1-K1-A11
ggaacaaagtttgatgtcattcttgtagatcccccatgggaggagtatgtgcaccgtgcccctggtgttgctgatcacatggagtactggacatttgaagaaataatgaatctcaagattgaggccatagcagatacgccatctttcatcttcctttgggtgggtgatggtgtaggccttgaacaaggtcgccaatgtctaaaaaagtggggctttcgtaggtgtgaagatatatgttgggtaaagacatacaaaagtaatgcaactccaggactgcggcatgattctcatactttatttcaacattcaaaggaacactgcttgatgggcataaa

SEQ ID NO: 52125 - DNA, 402 bp, Glycine max
  Clone ID: LIB3109-014-Q1-K1-A2
ttgtggagagggagaagagtacgacggtgttcaatgccggcgtcaacttcaacgaggacttctccgccgcgatgcagcgcgtggtgaaaaccgtcgacacgtatctcgccgagatcgccgcgtacggcgaactctccatctcgaaattcaacggcatcgcaatcctcattcccaaaggctcgagaaaatccgacgacgatctataccgcgccgtcgatatctacctcaaggtgcacccgaacctggacgagatagagaaggagaaagtgtgcagcgtattggacccgttaaaattgtcctacgaggcgcgtgtgcacgcgtcaaagaacaagcgcttgccgctgcagatcgtgcttcacgcgctgtactacgatcagctacatataaggagcgggacggcgg

SEQ ID NO: 52126 - DNA, 315 bp, Glycine max
  Clone ID: LIB3109-014-Q1-K1-A3
ggagtgagacaatatcacacataatataattccaaaatcactcctattgctatagcaatatgatgggtgacactgagatcaaaccatcagttgaagtagtcatatgtgcttccatgaacaataacaatagcgcaaacaaccacaccctcccaaccgacatcaccaagtcatcacaatcacacttaccaatcttgaccaagctccatgctggttactttttcatatgcctttcctttggtgcacaagctttgctctggaagagtttgagtaaacacaacaaggactcacaaactctctggcatggattcaatttga

SEQ ID NO: 52127 - DNA, 248 bp, Glycine max
  Clone ID: LIB3109-014-Q1-K1-A4
ggtagttccaccgagtagcaacaatgtcgaagcgaggtcgcggaggatcggcagggaacaagttccgcatgtcactgggtctgccggtggcggcgacggtgaactgcgccgacaacaccggcgcgaagaatctctacatcatatcagtgaaggggatcaagggaaggctgaatcggttgccgtcagcttgcgtgggtgacatggttatggccaccgtcaaagaagggaaagcctgatcttccgaaaaa

SEQ ID NO: 52128 - DNA, 387 bp, Glycine max
  Clone ID: LIB3109-014-Q1-K1-A6
ggagtgagacatcactaattccaaaatcacactcctatatatcttcctatagcaatatatatgatgggtgacactgagatcaagccatcagttgaagtagtcgtatgtgctttcatgaacaataataatagcgcaaacaaccacacccttccaaccgacattaccaagccatcacaattaccaatcttgaccaggctccatgctgggtactttttcatatgcctttcctttggagcacaagctttgctctggaagagtttgagtaaacacaacaaggactcacaaagtctctggcatggattcaacttgatgccttccattgcatttctacttctttggtgtgtgtcactgctgactgccactagattgtctttactttacgtgctc

SEQ ID NO: 52129 - DNA, 97 bp, Glycine max
  Clone ID: LIB3109-014-Q1-K1-A7
gcgagaaaacgacagaaggggatggaaagagccgggtcttcattaatgggaaagccatttattatttcatgggaacattcacttttaatcaatacac

SEQ ID NO: 52130 - DNA, 413 bp, Glycine max
  unsure (1)..(413): unsure at all n locations
  Clone ID: LIB3109-014-Q1-K1-A8
ggagagaagggaagagaagagggagaagacgaagaagaatccaaaagcaatcccatctgtgtgtttgcacatcagaagggagggctatcaaactcaaagtggttgtgttggatgctataaaaggcctacactgagtgctactgtggatgtgccatcgaaagggttggcaacacaaggtaacggagtgaggaaaccaagttcatcagaagatttttggaccactagcacgcatgatatggacaacagcgctgtccagtcacaagggagcatctcttcagccagtctaacaaaaccaagctgggttcttcatgctggttcttncaaaagcagcaccaaccccactgaatttgtaaatcacggtgtaattctttggaatcaagactcgcaacgatgggttggaaataaaaagctcg

SEQ ID NO: 52131 - DNA, 381 bp, Glycine max
  Clone ID: LIB3109-014-Q1-K1-A9
ggattggccattgatgcatatggtccaagcagtgacgatgctggaggtattgctgaaatggctggtatgagtcacagaattagagagagaactgatgcccttgatgctgccggaaacacgactgccgctattgggaagggatttgccattggttctgctgcccttgtatcactggccctctttggtgcctttgtgagccgagctgctattacaactgctgatgtgttgactccaaaggttttcattggtttgattgtgggtgcaatgcttccttactggttttctgctatgactatgaagagtgtgggaagtgctgctctgaaaatggttgaagaagtacgcatgcaattcaacaccattcccaggttgaaggaaggaact

SEQ ID NO: 52132 - DNA, 364 bp, Glycine max
  Clone ID: LIB3109-014-Q1-K1-B1
gattgaagatggtgtctgacgcgagcaagaagaaggctgcgcagaagaaggcggcggcagcggccaagagaggaggcaaagcagcagctgcttcgtcgaaaacgacgtcgtcggagaaggccgccgacaagcttgccaacggaattggggaaattcagatatccgatcgaacctgcaccggtgtcctctgctcgcatcctctttccagggatattaggatagaatctctgtcagttacttttcatggacatgatttgatagttgattccgaattggagctaaattatggaagacgttatggcttgcttggattaaatggttgtgggaagtctaccctgcttacggcaataggttgtcgagagct

SEQ ID NO: 52133 - DNA, 307 bp, Glycine max
  Clone ID: LIB3109-014-Q1-K1-B10
gggattagaatttgtgaagtgttattctacagggaaagatctgattgaaaccagtggaacctatgctactgctgagcatattgcatggatggtttctggtgcatctgatacttttgtcagaagagagtcagaagggacgtccttttgcgggccttatgttttattacttgtaccctatcaagaaaaatctacccaggatcgaacagcttgcatgcctataaaatctgcaggaatacatacagtgagtattcatccatgtgcttgcttagatcatcagattcaatgtctgaaaacttgtgagcctgag

SEQ ID NO: 52134 - DNA, 408 bp, Glycine max
  Clone ID: LIB3109-014-Q1-K1-B11
gggattagaatttttgaagtgttattctacagggaaagatctgatagaaaccagtggaacctctgctactgctgagcaaattgcatggatggtttctggtgcagctgatacttttgtcagaaaagagaaagaagggttgtcctttcccgggccttttcttttattccttgtaccctcccaagaaaaatctacccaggttcgaacagtttgcaagcctttaaaatctgttggaatacatacagtgagtattcatccaggtgcttccttagatcatcagattcaaggtctgaaaacttgtgagcctgagtttcttggttctactcctgagaggctattggagcttggttctacgaaggcaattgatatttctggggtatccatgctggttattgatggggctaatactat

SEQ ID NO: 52135 - DNA, 336 bp, Glycine max
  Clone ID: LIB3109-014-Q1-K1-B12
gcgtgaacagattgctgaaaaacgaaggagagacttgactctcagggctcgtgtggctgctaagacagaagaaaagaaattggagctgctgtttcttcagtggagtgagcatcgtaaaagactaagcaattttataaggactaaagcagagcctccaatctactatttgcctaacaagcccttggatgaagatcctacattacttgagaagcgcaaagaagaggctttccttgaatggaagaatgctagaagagaggaagtgtctgagtatcagaaacagattggggagcagtatcttgccaatgttgagaaagaattggagagatggcagaatgc

SEQ ID NO: 52136 - DNA, 341 bp, Glycine max
  unsure (1)..(341): unsure at all n locations
  Clone ID: LIB3109-014-Q1-K1-B2
gggcgcgggtgaggtagaacccttccactgtggtgactctgcgatggatctgatgcctgaattgaacgattatttggtttaattgttctgctggagctttcttaagaaggtttggggttttaacgccaaagccaaaacaggagaaagaacatcatctcttcgctaacttgaactagcatggatgtttgctactgtgcccccatttttttgtttccattttgcttcatgactctatatttgaatctaggctttatatttggtccatggtcgcgcttttttttttgcttgccatttttcttttatgaaatggccattggntcttatctatgtttctcatattc

SEQ ID NO: 52137 - DNA, 319 bp, Glycine max
  unsure (1)..(319): unsure at all n locations
  Clone ID: LIB3109-014-Q1-K1-B3
gaggtactggaataatgaggaggttttgcagaagttgggacaagccatgggtcttgccaattcgggagatgcaggtgcctctgctgaaaattctggggcagatgagaccgaagatttgggaaatgaagatgaatcaattgttcatcatactgctagtgttggtgatgtggagggcttgaaaaatgcactagcctctggtgctgacaaggatgaagaagattcatagggaagaactgctttgcattttgcctgtggatatggcgaggtaaaatgtgctcacgttctcctcgaggctggagcanaagtggatgctttggat

SEQ ID NO: 52138 - DNA, 391 bp, Glycine max
  Clone ID: LIB3109-014-Q1-K1-B4
ggccggagacagaggtagtttccacgacggtgcgggtcgcgacacgaaggggcttcttgcggcgtgagatcgtgcgattataccgatcctaacagagggttacataatgaccaagaagaagaaacaaaatggggttgttgttggagagggtgatggtgttggtggtgttgtagatttggagtctgtcatacacaaccacgctcttttttttcgacaagttgattgaattgattcccgccaagttctatctgccaactgatgacaaggagaagccatggtttcagggtctaaacaaggctgcaaaagctaaggcaaagaaagagaccaaggagaatatcaagaagtctcggagggaccgtttagaccctgacaaaccttctgcaactaccct

SEQ ID NO: 52139 - DNA, 54 bp, Glycine max
  Clone ID: LIB3109-014-Q1-K1-B5
tgggtgtttaaaattgacgaaaaaaataaaaaggatgcttaaaaaagtattccc

SEQ ID NO: 52140 - DNA, 203 bp, Glycine max
  Clone ID: LIB3109-014-Q1-K1-B6
ggacaaagggagcgtgttgtacaaagggcaattttttcaaaacctttttctttttcgcaacctcacctttttcttcttcaatctctttcggaatttcccaaaatccttaatgggaagaaaaaatggttctgactcaaaagcttcacgaaaccttcaaaagcaccggcgaaaagattactggccccccgacccgttccgccttt

SEQ ID NO: 52141 - DNA, 323 bp, Glycine max
  Clone ID: LIB3109-014-Q1-K1-B7
gagagaacctaagagatataaataagccataataaggattcgattcggaaaagaagaaaagacattcaacaaacaacgcaatgggtattccgtcggaactgagggacatgttgttgcccaacaaaaaaggcgtcctcgttgcctctcccgcaaaggacaggaagactttgaggtccaagcaatgcactaaggaaggtgtgcgagctggattcaaggctgcttccattgctggtgttgccagtgctgtgcctacattggctgcagttcgtatgattccatgggcaaaggcaaacctcaattatactgctcaggcacttatcata

SEQ ID NO: 52142 - DNA, 416 bp, Glycine max
  Clone ID: LIB3109-014-Q1-K1-B8
ggagcacaagcaatccataacgtaaaggtgccgccggaaacacaactaacacaacctttgctaatgaaaaatatctccttttttcatttgcaacggttgctttgaatgaaggaagcagtaacggctatattataatttgtgaggaggcattgatgtggaagaacaagaacacgtgaaggagtttgtgttgtgttgtagagaggaaaaattattgagagggcaagatggattttacttcgatcttgacgtccctgcggacttcgtttgtgatatttctggttttgatgattgagtttgcgtatatatcaagtcagcctgggaacaatgtggtgtactaccccaacaggatcttgaaggggttggaaggagggtacaagagccgcaaccctttctcttggatcaaagacgctgtgtct

SEQ ID NO: 52143 - DNA, 407 bp, Glycine max
  Clone ID: LIB3109-014-Q1-K1-B9
catatagatggttggtatctaagataagaaaatttatgataccgatgtaaattcaggtcttcatggtttaacgaaaatcatagtttttcaatttctacgcaaatcaagataaagaaaaggcagttttccaatcattgactcaaacccattgttgaaccgaatcccactgagtggaatatggaggtacttatggcagaacgggccaatctagtctttcacaataaagtgataggtggaactgccattaaacgacttattagcagattaatagatcactttggaatggcatatacatcacatatcctggatcaagtaaagactctgggattccgtcaagctacggatacatccatttcattaggaattgatgaccttttaacaataccttctaaaggatggctagtcca

SEQ ID NO: 52144 - DNA, 401 bp, Glycine max
  Clone ID: LIB3109-014-Q1-K1-C1
gatgaagtaactgtggcgggatttgaagttccaaaatctcctgattctagttataacaatgtctaccctggaaatgaagatgaggcaagggatccacctatggtcccttcacatttacagcatactttgctaaattatcctgctaatagagacactgcaggaactgttccattgcctcagaatgtgattctaaatcatctttacatcgagaatagagaatcaccaagatctgtggtggcgttgggattcactcatcgtttccactctaaatatgttacagtcgtgctttacaaaccagtccaaagaaggggaaatacaagcatttagtgtgcataatattaaaaacctcgatcaccgatggtttgtaatgatttattgtagactccatattctaattactg

SEQ ID NO: 52145 - DNA, 360 bp, Glycine max
  Clone ID: LIB3109-014-Q1-K1-C10
cggagaaacatgaaggcctaagctatgttgggattcacattccagttggtagagtccaagcagatgacatggatgagttggctacgttagcctacgaatacaccaccggtgagctcatgctcacagtggagcagaacattataatcccaaatgtggacaataacaaaattgatggcttgctcaatgagcctctctcgaaggggagattctcacccgaaccttctctattgatgaagactctggtggcatgcactggtaatcaatattgtggacaagctataattgagacacatgaaagggcattggaagtgactgatgaagtggagaggcaaagtgctgtgactaggcctgtgagaatgc

SEQ ID NO: 52146 - DNA, 344 bp, Glycine max
  Clone ID: LIB3109-014-Q1-K1-C11
ggggggaagctttgataaatttaagtttggcgttgcggtgctgagttctgatctgctttaaactgaagaactttaaggggttttctcgcaaatggaggtgctgtgggtcacaaggcatggacgaatgtttgaggggagggtgttagtgctcttggctttgttcttgtggattcccgcacaggtggtggtgggaaggacaagaactaccatcacaaactctactgcttcttcagcaccaagagttttaagaagtggagcactgtttactcttaattctataattggaagatcggcgaaacctgcacttatggctgctttcgaagatgttaatgctgattcgagtg

SEQ ID NO: 52147 - DNA, 378 bp, Glycine max
  Clone ID: LIB3109-014-Q1-K1-C12
gtagtgaaacatggcatagtaaagcttttggatggcattgagaaatatgaggatggaaccttctattttgatgagaaatgtgttggtggacatgagcaacggggttctctttccacaacttcttcagttgttagaggggttactgcatttgctgctgtaacttctggaaaaataaatcttccaggggataaaatattgggtctggcaaaatttttcttgggcattggaatccctggagatgccaaggacttgttcaatcaagttgagtcattagcttttctagagagcaacaggatttccattccatcgatattgtcactgccagaaacagcttattcattggccatgaaaggccagcttaaggtcgaggtgaataca

SEQ ID NO: 52148 - DNA, 422 bp, Glycine max
  Clone ID: LIB3109-014-Q1-K1-C2
ggttctagtgtgtgattgtttgttgttgtaactcgttcttcttcttttgttggtctgtgtttgtgtttgttttttctctcacctgaaaatgtcttgctgcggtggtaactgtggttgcggaagctcctgcaagtgcggcaacggctgcggaggctgcaagatgtacccagacttgagctacactgagtcaaccaccaccgagaccttggtcatgggagtggcacctgttaaggctcaatttgagggtgctgaaatgggtgtgcccgctgagaacgatggctgcaaatgtggaccaaactgctcctgcaacccctgcacttgcaagtgaggtgttgggagagcaagcttcaagcaaagatagcccttaattaggaataatgataaactattaatgtgtagctaaaaacttatgtattatgtct

SEQ ID NO: 52149 - DNA, 102 bp, Glycine max
  Clone ID: LIB3109-014-Q1-K1-C3
aggggtgttgagaaatggatgaagtaatggaataagaggatcgctatgactatagctcttgggaaatttaccaaaaaaaaaaaaaaaaaaaaaaaaaataac

SEQ ID NO: 52150 - DNA, 391 bp, Glycine max
  Clone ID: LIB3109-014-Q1-K1-C4
gagggatagggatagggatggagaaagtgaaggtgcttcggcgactcctcgagacaccaggggttcaccaggggccagcctgtttcgacgctctgggtgcgaagctcatagaatccgctggcttcccctactgcatcaccagtggcttctccatcgccgcttccaggttggctctgcccgacaccggcttcatcttctacggcgaaatgctggagcagggccaactcatcacccaagccgtttccattcccgtcattggcgacgccgacaacggttacggcaatgccatgaacctcaagcgaaccgtcaagggtttcattgccgccggtttcgcaagaatcattctggaagaccagattgcgccgaaagcgtgtgggcacacgcgcgggag

SEQ ID NO: 52151 - DNA, 238 bp, Glycine max
  Clone ID: LIB3109-014-Q1-K1-C5
gggtgcaagtgggaagaaatattcgggttgcttggcggtccctttacccaacgaaagccgagagcgaaaaatggcgttggaactctcgtcactatctcttcactcctctgtccgccaccagcaccctaattcgtcgattcaaaccatcgcattccccttcgtttctttgcaccttcccttactcccacttcgtgtctctccggcgcagcctcagtctccacatttcatcgcactctct

SEQ ID NO: 52152 - DNA, 102 bp, Glycine max
  Clone ID: LIB3109-014-Q1-K1-C6
ggatcaatgaatgttgggaacaatagtcaagctggcctagcgggaaatggctttggttgtttttcgaatattgggagtgaggctctagttactatctaatca

SEQ ID NO: 52153 - DNA, 345 bp, Glycine max
  Clone ID: LIB3109-014-Q1-K1-C7
ggaagcagttgaagatggagcacgacgaagacgaagagccacctcttgctgttcagattcaagggaatgatgaatccgtttctcagcaatcttcttctgttggggtcactctcatcaccggttatcttggttcgggcaagtccactctagtgaatcatattttgaattcgcaacatgggaagaggattgctgtcattttaaatgagtttggtgaggaaattggcgtcgaaagagcgatgatcaatgaaagagataagggtgcattggttgaataatgggttgagcttgccaatgggtgtatatgttgcacagtcaagcatagtttggttcaagcacttgaacaac

SEQ ID NO: 52154 - DNA, 395 bp, Glycine max
  Clone ID: LIB3109-014-Q1-K1-C8
gaacatgaagaagagaagttgctcaagggactcgtgctcatttgttggtgattatctggaattgcgtaagcatgcaaggagagttcatcctacttctcgtccctctaatgttgatcctacaagagaaagagcctggcgacattttgagcgccaaagagaatatggtgatattgtgagtgctattcagtctgccatgcctggagctgtgctagttggggactatgctcttgagaacggagatggtattggtaggttacaagatgaacgtgttgaaggcaacattgacaatgctaacaagccttggttagccaccactatcttgtttcagatgatggatagcaccattgaaattgttagggaaccaagagcacattcgagtgcatggacaaggcacc

SEQ ID NO: 52155 - DNA, 342 bp, Glycine max
  Clone ID: LIB3109-014-Q1-K1-C9
gggcaactggatggttgcatgatcgaatacgtgttgtggtctcaagtttctttgtgaaggttctgcagcttccttggagatggggaatgaagtatttctgggacacccttttggatgcagatcttgagagtgatgctcttggttggcagtacatatctggcactctccctgatggtcgcgaatttgaccgaatagataatccacagcttgtggtctacaaatgtgacccaaatggagaatatgtgcgacgctgtcttcctgaacttgctagattaccaactgaatggatacaccatccatggaatgcaccagagtctggactccaagctgctggaattgaac

SEQ ID NO: 52156 - DNA, 403 bp, Glycine max
  Clone ID: LIB3109-014-Q1-K1-D1
gagcgaaacagagagtgatttcagtgagtgatcggtgttcacttgatctcatcataatcgtcagcgtcaattgaagaagatgccgatcagaaacatcgccgtcggaaggcctgaagaggcgactcaccccgacacgttgaaggcggctttggccgagttcatctcaaccttcatcttcgtgttcgccggctcaggctccggcatcgcctacaacaagctcaccgacaacggcgctgccacccctgccggcctcatctccgcctccatcgcccatgcattcgccctcttcgtcgccgtctccgtcggcgccaacatctccggcggccacgtcaaccccgccgtcaccttcggcgccttcgtcggcggcaacatcaccttccttccgcgcatcgtctacgtcatc

SEQ ID NO: 52157 - DNA, 327 bp, Glycine max
  Clone ID: LIB3109-014-Q1-K1-D10
ggagcaagagtgaagagcgaagagaatggctcccaagggtttaatctttttggctgtgttatgcttctcagcactgtcactgagtcgttgtcttgcggaggataatggacttgttatgaacttctacaaggaatcatgccctcaggctgaagacatcatcaaagaacaagtcaagcttctctacaagcgccacaagaacactgctttctcctggctcagaaacatcttccatgactgtgctgttcagagttgtgatgcttcactgttgctggactccacaagaaggagcttgtctgagaaggaaacagatagaagctttgggttgag

SEQ ID NO: 52158 - DNA, 404 bp, Glycine max
  unsure (1)..(404): unsure at all n locations
  Clone ID: LIB3109-014-Q1-K1-D11
gagagagaagaagaagaaaaggatattcctcttcaccctttttgattctcaaacccaaacactgcatttgcaggggtttatctttatctagaaccagcatcagagtcaaatccacttcactctttgaagttcctcttcactctacagcgacttcttccttttttgagttttcaccaggagtgttcttaaagtagttagaggatcctttgatcgagatggctcaattgctatcctcttcttgctccttgactgtctgctctagaaataaaccttacttaaaaccctttgacaaatgttcaacaccgttttctatgaaggttgcttgcaataattccaaatctccatttagaaagggctttctgcangaacagatgcctaagaaagattctctagtagtacatgct

SEQ ID NO: 52159 - DNA, 364 bp, Glycine max
  Clone ID: LIB3109-014-Q1-K1-D12
ggagaagaacaagtgaaggacaacaacaacaacaacttatacgacgccgttcagcgtctgatcttggaaccttccaagatcaaggcctccctcatccctctcttccccgaagcttctagaacctactctcgccaactcctccactggtcccgtcaaggttctcccctccgacgcatcctcttcatctccattgggatagttgcacttgttgctctctcaggacttgttgcttttacgctcttttttctggctgctactgtaaatgccattttcgtctcccttctcatttctttggctgtggctggaggcttcttggttctggtctttgcttttgtgacagctatatatattggagcactatcac

SEQ ID NO: 52160 - DNA, 376 bp, Glycine max
  Clone ID: LIB3109-014-Q1-K1-D3
gggatggagaaagtgaaggtgcttcggcgactcctcgagacaccaggggttcaccaggggtcagcctgtttcgacgctctgggtgcgaagctcatagaatccgctggcttcccctactgcatcaccagtggcttctccatcgccgctttcaggttggctctgcccgacaccggcttcatctgctacggcgaaatgctggagcagggccaactcatcacccaagccgtttccattcccgtcattggcgacgccgacaacggctacggcaatgccatgaacctcaagcgaaccgtcaagggtttcattgccgccggtttcgcaggaatcattctggaagaccagattgcgccgaaagcgtgtgggcacacgcgcggga

SEQ ID NO: 52161 - DNA, 411 bp, Glycine max
  Clone ID: LIB3109-014-Q1-K1-D4
ggaagaaaggcagagttattgccattgcctctgcctcttgcaacaccaaactgatacacacttaataatattatagtaaaaattagccaccaaagtacactaaccccttttttcatacaactcaatagctggattggagcaaggtgaaagtaaaatcatttgcaaccaatgccgttgaacatatttcaggacaaagatggattgccacggattatattgactgagccaaagggttcatcagctgaggttcttctttatggagggcagattatttcttggaagaatcatcgaaaggaagaacttctttttatgagcagtaaggctaacaagaaacagcataaagcaatcagaggaggaatatcagcttgcctagcacggtttggtgatctcagttcacttgaacaacatgga

SEQ ID NO: 52162 - DNA, 332 bp, Glycine max
  Clone ID: LIB3109-014-Q1-K1-D6
gacggcggggacgtgagaaatgtaatggcttctgaaacggaatgatttgacctgtgtctacccacacatttaacttatgttgactgggataatgcatatcatccaacgtcggttgctgctaatttgagacaaggtagctatgttctagagaaagactagcaagaacggcgtgagacgactgatactcttgcactgcctacgtgggcgatcttccacattaagatgttttgttcgctcgtcgaatactgtgattgtaccatctacggcgctatttatgagtacaagcctccatcatatatgtgcaacgacaccttacatagaagtgcacgtta

SEQ ID NO: 52163 - DNA, 334 bp, Glycine max
  Clone ID: LIB3109-014-Q1-K1-D7
tgaatacaagacgtgtctataaaaagttaacgtgacctgttccaatgagcaacaaagagagcaaggagagaggagatgtcggtggagcaaaaagcagcatggaaggaggaggagggaaaactgcagaagggaattgcagagttctacgacgagtcgtctggcatatgggagaacatttggggcgatcacatgcaccacggcttttatgacccggattccaccgtttctgtttctgatcatcgcgctgctcagatccgaatgatccaagaatctcttcgttttgcctctctgctttctgagaacccttctaaatggtccaagagtatagttgatg

SEQ ID NO: 52164 - DNA, 333 bp, Glycine max
  unsure (1)..(333): unsure at all n locations
  Clone ID: LIB3109-014-Q1-K1-D8
ggagagaaagtgagagagaattacagagcattttccaacacgattacacgaccgaatcaaacccctctttctctccgaagctgcttttaatatcgtactggccttcgattgttctcctctttaatacatactgttctctcttcgatttgagggaacagtacaagagtctgagcatcggttaacccaactgcacaggtagtctccaaataatggagcctcatgatgagactggatgccaggctcctgaacgccccattctttgcattaataaatgtggcttctntggaagagcagctaccatgaacatgtgttccaagtgttacaaggacatgc

SEQ ID NO: 52165 - DNA, 387 bp, Glycine max
  Clone ID: LIB3109-014-Q1-K1-D9
cttgagagaaatggatatcttctgttgaatgaaaaaggagagaaaatgaaggagcaacttgcagttgataggaccaactgtattgattgtatataccgtacatatgtatctcagagcatgataggctgtaatatgttgtaatataagtttagaaggcttggtgtctttggtgctgaagaaaccattagttcacattcaaatatggatgaaaactttaagatctcgtggactaatcatgaggatgatataagtatacaatactcaggaactactgctcttaaacgagactttgacagatttaggcaccgcacaattgaagggatactacaagatggtgtcaatgctcttctacgatattatttcaataattctgatgatggaacgaat

SEQ ID NO: 52166 - DNA, 387 bp, Glycine max
  Clone ID: LIB3109-014-Q1-K1-E1
ggcagtgttgccattaacacaaacatcttcaatcttcatctccacctgcattcccaattcctctctctatccatggccgattcaacctcaagcgattcactctcactcgacatcgattccttttctccttcacctcaggaacatatcatcagaacacgtcacggttctgtatctgttgctgtatatggagaccaggataagccagctctaatcacatatccggatttggctttaaattatgtctcctgctttcaggggttattattttgtcccgaggcatattaccttctgctccacaatttctgcatttatcatattagtccacctgggcatgagttgggagctgctgcaatcgatcaagatcacccaattctttctgtagatgat

SEQ ID NO: 52167 - DNA, 192 bp, Glycine max
  Clone ID: LIB3109-014-Q1-K1-E10
ggggttggcattctggtgcaagctgatgatgatgttagcatggcccaaagcaacagagattctaggaagagatgttacatttctgatggaaaatgggtttatgatgactcttaccctctctatgactctaggtgtccatatcttaactctgcagttacttgtcaaaggaatgggagacctgattctgactat

SEQ ID NO: 52168 - DNA, 333 bp, Glycine max
  Clone ID: LIB3109-014-Q1-K1-E11
aggccgtgtacgagataaacaaacatttggcgcgcctaacactacggctctgctaactccaagcggtgtcgattcaccacttccttcattgctctatatctctgagtctgctagatgaagttaacgacacctgcgcttctcagccttgtcattctctgccatctgcttctctgtcttccctcattcactatctctctcatagccaatgacgctgaccccgatacggagcttctactttccggagactacgcgaccggactacttaatgcctcgcttgcgagatccgacgatggtagcttgaccaacatgattgatcgggctctcgaaagagag

SEQ ID NO: 52169 - DNA, 357 bp, Glycine max
  Clone ID: LIB3109-014-Q1-K1-E12
ggcagcgcttgagaccaagccccactcaaccaccacaccactctctctgctcttcttctacctttcaagtttttaaagtattaagatggcagagacattcctatttacctcagagtcagtgaacgagggacaccctgacaagctctgcgaccaaatctccgatgctgtcctcgacgcttgccttgaacaggacccagacagcaaggttgcctgcgaaacatgcaccaagaccaacttggtcatggtcttcggagagatcaccaccaaggccaacgttgactacgagaagatcgtgcgtgacacctgcaggaacatcggcttcgtctcaaacgatgtgggacttgatgctgacaactg

SEQ ID NO: 52170 - DNA, 312 bp, Glycine max
  Clone ID: LIB3109-014-Q1-K1-E2
ggcataacaaagattggaaaggattgatgaggggagaagctgaatcaccttccattcgaagctctgtggttgacaatgctcatttggagcttgaagccaatcaggggccaaggtccctatctcctaagcctccagttcagaagaaaaggggccgagctgatgaacaaccgaggatgaagagggatgttgtctcacaagtaaatattgctgctccacggaggctgcttcaatttgcagtgcgagatgcagtagcgacttcaaggacagccacaggcatgtcagtggagccttccctaaaaacgtctttcggtc

SEQ ID NO: 52171 - DNA, 422 bp, Glycine max
  Clone ID: LIB3109-014-Q1-K1-E3
ggttctagtgtgtgattgtttgttgttgtaactcgtgcttcttcttttgctgttctgtgtttgtgtttgttttttctctcacctgaaaatgtcttgctgcggtggtaactgtggttgcggaagctcctgcaagtgctgcaacggctgcggaggctgctagatgtacccagacttgagctacacttgagtcaaccaccaccgagaccttgttcatgggagtggtacctgttaatgctcaatttgagggtgctgaaatgggtgtgcccgctgagaacgatggctgcaaatgttgaccaaactgctcctgcaacccctgcacttgcaagtgaggtgttgggagagcaagcttcaagccagatagcccttaattacgaataatgatgaactattaatgtgtagctaaaaacttatgtattatgtct

SEQ ID NO: 52172 - DNA, 407 bp, Glycine max; identical to SEQ ID NO: 9959
  Clone ID: LIB3109-014-Q1-K1-E4

SEQ ID NO: 52173 - DNA, 93 bp, Glycine max
  Clone ID: LIB3109-014-Q1-K1-E5
aggcgacagagggattggaattaaaacctaaacggggccgggtcattgggtggcggccggcttctctgatgctggccacgagctacttttgga

SEQ ID NO: 52174 - DNA, 61 bp, Glycine max
  Clone ID: LIB3109-014-Q1-K1-E6
gagggccaccaccaccaaaaaaaggtaaggatttggtttggcaaggaagaaagtagaaatt

SEQ ID NO: 52175 - DNA, 427 bp, Glycine max
  Clone ID: LIB3109-014-Q1-K1-E7
ggctgcagatttgtgcgttagggaaaaaaataaataaaaaatagatatcatggcagcgagtgggggttgcagcagcagcttcttaacattgtcttgtgcaggtgcggcgcaaaatcaacacgcgtcacaccctagaacgttttttggagttcctcacaagaatcagagaaagaggaaaacaccgcataggttagttgtggttgcggtgactcaaggctctgctgaatcaagcaagtccgacgaaaaaatcccttcgtgggccaaaccggactccgatgaaccaccgccatgggtccgggatgagcccaacaacaaaaacagcaacaattcgcaacaagaagaagaatttgagatccccttctatgcttatttgcttgcctctgccatcactgcaattgccgctataggttccattttcgaatatgtg

SEQ ID NO: 52176 - DNA, 427 bp, Glycine max
  Clone ID: LIB3109-014-Q1-K1-E8
ggagaagcattagcaaaagcaagaagaactagtctaagcagaaatggcctcttcagtgatggcatctgtggccctcaaacctgcccctttcactgttgagaagtcctcagttagaggccttccctccctctcaaggaactcctcttcattcagagttgtggccagtggtggcaagaagatcaagactgacaagccttatggaattaatggtggcatggctttgagggaaggagttgatgcatctggcaggaaaggaaagggaaagggcgtttaccagtttgtagacaaatacggtgctaatgtcgatggttacagtcctatctacgacaccaaggactggtctccaaccggtgatgtctacgctggcggtacgactggcttggctatctgggctgtgactctacttggtcttcttgctggtggtgca

SEQ ID NO: 52177 - DNA, 382 bp, Glycine max
  Clone ID: LIB3109-014-Q1-K1-E9
ggtgggaggcgaggaaagaaaagcattagaatagcgttggaggaggatccgtcatccctcgcaaagtattacttttgcagagctcatcaaaccgaaccttcattcccgccttcacgttttctttcctttcaccaacaacaacttttgtttcttttcctttttattgtattggtgaagcttcaccataattcaattatgagctccaccacttcgaaagccacgtccacgatttgattcctggatccaacgcatccattaagctttcgcgatggcgtggtttagtgggaaaaatacatggggaaacttccctgatttggcgggagccgtcaataagcttcaggagagtgtgaaagtcatcgagaaggattttgaatctgctctt

SEQ ID NO: 52178 - DNA, 417 bp, Glycine max
  Clone ID: LIB3109-014-Q1-K1-F1
gatgatgatgatgattcagatgatgactttagtgatgatgaagagttgcagtccccaattgacgatgttgatccttttgttttctttgtggatacaatcaaagtgatacaatcatcggatccatcgaggtttgtgaaccttacccaaacgcttgagtttaattatcaagctctcgctaatggtgttgcccaccatgctgagcagagaagggcagaaattgaaaaggagaaaatagagaagtcaacggctgccacagcttcttaagcttctgaatgtacattattactgttgcttttttaattctcaagttctcagttacccattctttatgaaaatcagagggttgcctatatttgaggcatttgtcggctttctggtcaccagatgttggtctttgatcatgaagagttgcagtat

SEQ ID NO: 52179 - DNA, 386 bp, Glycine max
  unsure (1)..(386): unsure at all n locations
  Clone ID: LIB3109-014-Q1-K1-F10
ggtggcgtcgtgggctgatggccggcacgagcctctctcacgtgatccaatcgacggtcctagaattgcccagaaccacccgccacgtcagaatctccgccaagagccaccgcgtctccgccacctctgaccaacgccccgcgggaccctgctgcatctacgttggccccctcgaaaccgctaacaaagagaacctcgaagccctttattgccaagcacgggatgcttattatagtggtcaacctctgatagtggatgacatgtttgatagagtagagttaaggctaagatggtttggttcaaagtcagttgtaaagtatcctcggtgcagtattaggagggcatccacatttgctgatgctgangaagatctgtctatggttttt

SEQ ID NO: 52180 - DNA, 372 bp, Glycine max
  Clone ID: LIB3109-014-Q1-K1-F11
ggttggaaggatcagcacgacactgagcatcagcaatggcaagcgcaagtgttggtaaagaactgacgctgtattcgtattggaggagctcttgttcccaccgagtccgaatcgctctcaacctcaaagggcttaaatacgaatacaggcccgtcaatctgctcaagggagaacaatctcgccctgagtttctccagctcaatcctgttggttgtgtccccgttctagtggatgaccacgttgttctctatgactctttcgccattattatgtatttggaagataagtatcctcacaatcctttgctccctcatgatatttacaagagagcaatcaattttcaggctgctagtggtgtttcctcaacaatac

SEQ ID NO: 52181 - DNA, 209 bp, Glycine max
  Clone ID: LIB3109-014-Q1-K1-F12
attaggaaggagttgtagggcactgctctaccaaaagggtagaggtaagtttgtggcactcacttactatgctctgaaaatgtgagcactctgatgtcaaacttatctactacactataatccttgaaatgccaaaagtgactgcctatcccggtctactacaattgggatatatagctaccggagagcttgtacttctgactgctgtc

SEQ ID NO: 52182 - DNA, 414 bp, Glycine max
  unsure (1)..(414): unsure at all n locations
  Clone ID: LIB3109-014-Q1-K1-F2
gaggtgtgaagatggatgtggcagctaagtctgagtcaaaggacaaccttcccttgttactcacccaatctgctgaccctctcaaaaggacagggacggtgtggacagcagtggcacacatagtgacaggggtgataggatcgggagtgctgtctctgccatggagcactgcacagcttggctggcttgcaggcccattctccatccttctcattgcttccatcactctcttctcttcttttctcctatgcaacacttatcgccatccccatcccgaatatggtcccaataggagtgcctcctaccttgatgttgttcatttgcatttaagaataagcaatggacggctcancggccttcttgtgaatataagtctgtatgggtttgcaattgccttcgtcatcacaacagcta

SEQ ID NO: 52183 - DNA, 426 bp, Glycine max
  Clone ID: LIB3109-014-Q1-K1-F3
gatgatgattctgaaacagataggaacttgagtggtaaagagcacagaaaggcccactatgatgaatttcttaaagtcaaagagctgcaagagacgggttctcttgaggatgaaagtgacgaggatcataattctcaacccagtaaggcggagaaatgtgagtcgtcttcactgagtcatagtgtaaaagagatggtcattgagggtaagaagtcttcaacgcctccagctaatggttcttagacagtgatcaacaaataaaatccactgtcttttcattagtttcattttgtgtattgaagaaaactaaatgattcactgtattgtatcatttgtatgtaaatagtttctttcttcatcatgcttattatgatcccgtcacactttggttgtattctggcaaattggtttatgtttcgcatcttc

SEQ ID NO: 52184 - DNA, 339 bp, Glycine max
  unsure (1)..(339): unsure at all n locations
  Clone ID: LIB3109-014-Q1-K1-F4
ggaggcaatagtagcagcaattcacactggtctttgcttctcgttactcatttctcacctaactttctattcttctcagtctcagatcagaaccttagccatggcagcgttccagaagatcaaggtcgccaaccccatcgtcgagatggacggagatgaaatgactagggttatctggaagtcaatcaaggacaagctcattttgcccttcttggagttggacatcaagtattatgacttangccttccttaccgtgatgagaccgatgataaagttacaattgaaagtgcggaagcaactctcaagtataatgtggcaattaagtgcgcaactattac

SEQ ID NO: 52185 - DNA, 388 bp, Glycine max
  Clone ID: LIB3109-014-Q1-K1-F5
gggttctagtgagtgattgattgttggtgtaactcgttcttcttcttttaacgctctgagatcgtgtttggttcttctctcacctaaaaaattctagctgcagtggtaactgtggttgcggaagcttcttcaagggcttctacggctgcataggcttcaaaacatactctgacttgagctacactgagttaactaccacctagaccttggttatggtagctgcacctgctaatgctcaatatgaagttgctgaaataggcgtgcccgataagaacgattgctgcaaatgtggaccaaactgctactgcaactcctgcacttgcaagtgaggtgttgggagagcaagcttaaagcagagattggccctaattatgaataatgataaact

SEQ ID NO: 52186 - DNA, 287 bp, Glycine max
  Clone ID: LIB3109-014-Q1-K1-F6
ggtggacaggaggttagaaaggactgcagaatgatcaattaataagtcttaaatcaattcaagttaaattgatgttccaaacaagttggatcaaatttcctagatgccaagaatattatgtctttttcctctattaaagaaatatgtatatttatctgaagttaataaaatctcaagcatgtcttgggaaattaatttaaaaaaaaaaatagaaaaaaaaaataaaaaaaataaatttataatttaaataacataaattgaggtgaactctataaaaaaaaattgaa

SEQ ID NO: 52187 - DNA, 426 bp, Glycine max
  Clone ID: LIB3109-014-Q1-K1-F7
ggatccaatcaagaatacaataacatagcgtagagtgagaagtgagaagagaaaaatggcaatctccatacccagtagacaacttttcatagatggagagtggaaagtccctcttctcaacaatcggtttccgatcatcaaccccgctactgaagacatcatagggcatattccagccgctactaaggaagatgttgaccttgcggtggatgctgctaaaagagccttttcccataacaaaggcaaagattggtcttcagctcctggctctgttcgtgctcgctatcttcgagccatcgcttcaaagataacagagaaaaaggatgaactaggaaagcttgaagcaattgattgtggaaaaccactagatgaagcactggcagacctggatgatgttattggttgttttaactactatgccgagct

SEQ ID NO: 52188 - DNA, 391 bp, Glycine max
  Clone ID: LIB3109-014-Q1-K1-F8
ggattctaccaaacgaataaaaaagtgttaatggagacagcaaggatatttgtatcctggttcctaatagtagtagttattatttgcaattaaaatctcttcatttttctctctttattacattttcattatggtgaccaagatatgatctgttatcaatatatattcaatgacattcacagtcccgagtcctaacctgagtttaaagcttcagatcacaaccgatccaccattcaccactttctcttcacaagctcaagttactgacaggcaaatctaacaagaaaagtagtctctgaagtcgatccagtgccttgtgaatttggaattggtggtgaatgtagatctaaaagccatagcaatgtcttttatcggtacccagcaaaagtgc

SEQ ID NO: 52189 - DNA, 364 bp, Glycine max
  unsure (1)..(364): unsure at all n locations
  Clone ID: LIB3109-014-Q1-K1-F9
gaagaggaggaggagttgaagaagaaggagccctttgggttctctcgctccaacaacaaggctgcttctaagcctctctctcgtggagcaacaactgtgaaatctgtggaatcaaaggggcaagctgagaagtgcgccaagagaaagaggaagaaccagtatcgcggaatccgccagcgtccatggggaaagtgggctgctgagattcgcgacccaagaaagggggttcgtgttaggcttggaactttcagcactgctgaagaagctgcaagagcttacgatgctgaagcaaggaagatccgtggcaagaaagccaaagtgaatntccctgatgagccttcaggcgctgctttctcaaaacgtc

SEQ ID NO: 52190 - DNA, 391 bp, Glycine max
  Clone ID: LIB3109-014-Q1-K1-G1
gaaggagaaaagagtgacactaatttcaaatggaaattgctctctcataacagaattcaagaggaggaagaacaagtatataaaaactatatctacatagttatatctctctcttgagatttcaaacgtagagatatggaatggaggaagtgctacttggatgtgatattggtgcccttgggatttctaacaagcattgggtaccatttctggctatggcacaaggttcgaactcagccacacacaaccatcattggcatcaatgctagtggccgtagaaattgggttaatggcatgatgaaggacaatgacaagaaaaacattctgactgttcaatcactaaggaacacaataatgggtgctactctaatggccacagcccccatcctac

SEQ ID NO: 52191 - DNA, 358 bp, Glycine max
  unsure (1)..(358): unsure at all n locations
  Clone ID: LIB3109-014-Q1-K1-G10
gacccaccaaacattctcaaaccaaagccatgaccaatatggaatccaccacacctatactcactcctctagtgctcctcctcctcttctctctagccaaagggcttcacaaccccaaatgtgatgctgcctatcaacatgaccatgatggctcaaccctccaagtgttccatgtgttcagcccttgttccccattcaggccctcaaaaccaatgtcatgggaagagagtgtcctacagctacaagccaaggaccaagccaggatgcagtacctttctaacttggtggctagaagatccattgtcccaattgcctcagggagacanatcacacagagccctacatacttagtgagggc

SEQ ID NO: 52192 - DNA, 342 bp, Glycine max
  Clone ID: LIB3109-014-Q1-K1-G11
ataaggaaggtgatttagtgtggggctttaccaaatgggaagagtattgcttggtacccttagctcaaatactcttcaaaattgagcacactgatgttccacttacctactacactggaattcttggtatgccaagagtgactgcatatgcaagtctatttgaagtaagatctcttcagaaaggagaaaatgtttttgtttcggctgtctctgtgcgcacatggtcaacttgttgggcaatttgctaaactgaatggttgttatgtagttggaagtgctggatctaaagagaaagtggatctgctgacaaataaatttggatttgatggagggtttaactac

SEQ ID NO: 52193 - DNA, 355 bp, Glycine max
  Clone ID: LIB3109-014-Q1-K1-G2
gaggagaagaaggagtaaacaacacaaccaacaaacatcttcgatcttattctagggtttcaattgtgatgtgaatctaatgaatgtaacgggaaaagactgtagatagatgagctccagcaatttgacggggtttgtgttggccgtgctttccagcgctttcattggctccagcttcatcatcaagaaaaagggtctccaactcgccagtgccaatggcccacgtgccagtgttggtggctatggctacttgcttcaacctctctggtgggtcggaatgattaccatgattgttggagagattgctaattttgtagcctacatttatgcccctgctgttcttgttactccactc

SEQ ID NO: 52194 - DNA, 409 bp, Glycine max
  Clone ID: LIB3109-014-Q1-K1-G3
gacagtgagtgagcatagaggaaatcactatccaattatgcatctgcatgagcgtagccttagtgtgttagcttgccgttatgttgatgaagttattattggttcaccttgggaaattacaaacgacatgatcaccactttcaatatctcagtagttgtgcatggtactgtttctgagaagtcattaaattgtgaactagatccatatgagatccctaagagcatgggaatattccgcttgctcgaaagcccaaaagatattactactgccacagttgcccaaaagataatggctaatcatgaagcttatgtgaaacgcaatgctaagaaaactaggagtgagcagagatactatgaggagaaaaaatacgtctctggagactagagtgtatataatgatctttacatt

SEQ ID NO: 52195 - DNA, 395 bp, Glycine max
  Clone ID: LIB3109-014-Q1-K1-G4
gggaaagtgaaagagtaagacaccacaaagtgtaacttgagtgattatatctgatgagtgcagaaagaagggaggattgttggtggtcgatcatcgatcatcgatcatcgatcatcgatggcgtctgctagccttggaagtggtggggtgggcagttccaggtctgttaatggtggcttcaggggttcttccagttccgtcgattggcttggcagagagatgcttgagatgtctttgagagaccacgaggacgatagagatagtgagcctgacatcattgatggtttgggtgctgagactggtcacgtgataagaaccagcgttggtggccgaaatggtcaatctaagcagaatgttagttatatttctgagcatgttgtgggaacaggctcttt

SEQ ID NO: 52196 - DNA, 185 bp, Glycine max
  Clone ID: LIB3109-014-Q1-K1-G5
gagagaaagggagagctgtgagtactaaggaaggtgcgactcaaattgcagaaacgcaacaacagcgtgttggagagtataaagagagagaccgtacgcattagtgaatactgaggtttctcaaaatcttaataatccctttgttgaaaccaaaacgacgacgcgtaaattgactttcatgtata

SEQ ID NO: 52197 - DNA, 170 bp, Glycine max
  Clone ID: LIB3109-014-Q1-K1-G6
atatcctaaagcatcattggcttcaaaactcatagagagagagaggagagagagcttaaaggtagtcgtttgtatgtttttattttccctcttgttaggttgggagaatgcctatcctttgcaaaccagtgtacattgttgtgacttcattttatgtttatgttcttcaa

SEQ ID NO: 52198 - DNA, 422 bp, Glycine max
  Clone ID: LIB3109-014-Q1-K1-G7
gttgatgaagaaggagtatgggtattccatgagggtgctttctttccagatacagacttcggatatcatacctgcttttccctatgtggcgccattttcgtccactgtgccagattgttgtaggattgtgcggtccttcattgaggattctgtgagtttcatgtcatatggagggcagcttgagttctatgaagttgttaagaagtatttacacaggcttttgagtgaggttttggatgaatctttagtgaagcttatcaatacatcaattaatggggtttcccaggcaatgcagatggcagcgaatatggctgtcttggagcgcgcttgtgatttattctttcgccatgctgcacagctttcaagtgttcccttgagaatggtggagagaagcagaatgaacttccctctaagaaaagctc

SEQ ID NO: 52199 - DNA, 417 bp, Glycine max
  Clone ID: LIB3109-014-Q1-K1-G8
gggaagagagtggagtatggacgtgtgttagttggctaatgaggagtcctcatttttcttcatctgtatctgaaccctaatcccttcggaattggaaagaataagaatcatcaatggagggagtgctgtccgcgaatgagcaacagagcatggtctcttctttcctggaggtcgctcagggccagaccgccgagactgcgcgccagttcctccaagccacaagttggaagcttgaagaagctcttcagctgtttctgatacggagtgaatgtggggccgtgccgttgccggtgccgccgcctccgttgttgcacactccgcctttggaaaatgtcgattcctggaccgatcaacagcctttgagtgaaccgaagaaggacgctgcggctgcaagtgaaagtattggcctcaatgatg

SEQ ID NO: 52200 - DNA, 239 bp, Glycine max
  Clone ID: LIB3109-014-Q1-K1-H1
ggcgacccgcaccgaccctcacacattcgtatcatttctaaaaaaccttctatatagacaaccagttaaccttaattgaagcgctttttaaatattccacttcaactaccaaaccctatatttttaaccttcccataatttcaataaactattaatcgttcaactttggaaaatttcaaactccttttcaccacattcaaaaaactaaatattttttctcatacccctttttaaaaatc

SEQ ID NO: 52201 - DNA, 278 bp, Glycine max
  Clone ID: LIB3109-014-Q1-K1-H10
tggtgatggagctggggtgacatgcttcgcttgcagttataggaatgaatgtttgttttattattgtgcagactgtcaacttcaattcttaacaaccctaatcatatcaacatgacattctcttcataatttctgaaccctacaggctttactttactgctgattctcctgtctatgcttctaccaatgccataagcttgctactgcaccactcttcatcctgtttaagccatcaaacaacctgttctgaacccgctattgagcttttctagctcctt

SEQ ID NO: 52202 - DNA, 297 bp, Glycine max
  Clone ID: LIB3109-014-Q1-K1-H11
tactgcgatgaggaaatcaaaagcaggggagaagattgtcagctacaacgatgtggcgctcacgcgatctgatttacacatccttagtggtccatattttttgaatgatcggattatcgagtcttatttcagctgtctttctttacgtcatgcctatcaggatatcctgctgcttccaccatccattgcactttggataatacaatgccctgttgctgacgctattggtgattatatagaacccgttcatttgcctgatacgacactgggtatacttcccgtcaatgtctatgatga

SEQ ID NO: 52203 - DNA, 316 bp, Glycine max
  Clone ID: LIB3109-014-Q1-K1-H12
ggagagagagagagagagaggcacttggaatccaaaaatgagagaaatcatcagcattcacataggtcaggccgggatccaggttggcaactcctgctgggaactctactgcctggaacatggcatccagcccgatggcatgatgccaagtgactcctccttcggtgtagcccacgacgccttcaacaccttcttcagcgaaaccggatccggcaagcacgtccctcgcgccgtcttcgtcgatctcgagcccaccgtcatcgacgaagtccgttgtggcacttaccgtcaactcttccaccccgaacaactcatc

SEQ ID NO: 52204 - DNA, 384 bp, Glycine max
  Clone ID: LIB3109-014-Q1-K1-H2
ggaggcaagaagttgtattttggcatccccgtggcttcaagaagagaatctcaatggaggcccaggagctgaagcgcgtgttccagatgttcgaccgcaacggcgacgggagaataacgaagaaggagctgaacgactcgctggagaacctgggcatcttcatctctgacaaggacctgagccaaatgatccagaggatcgacgtcaacggcgacggttgcgtggacatggacgagtttggggagctgtatcagaccataatggacgagcgcgacaatgaggaggacatgagggaggccttcaacgtcttcgaccagaacgccgacggcttcatcaccgtcgacgagttgaagaccgtcttgtcctccctcggcttggagcaag

SEQ ID NO: 52205 - DNA, 369 bp, Glycine max
  Clone ID: LIB3109-014-Q1-K1-H4
ggagagagcacaatcacttgcttaaacttcactccgagagttacgattatggcattgaatttgagcatgttaccattgctctgcgttttgtctctttttgttacctcggccatcacaattactctttccaagagcgttgcacccattcatgacgtttcttatctcaaccggagcagtttcccgcaaggctttattttcgggtcagcatcctcagcatatcagtatgaaggtgctgcaagggaaggtggaaaaggaccgagtatatgggatactttcactcataaatacccagaaaaaataaaagatggaagtaatggagatgtagcggacgactcatatcatcggtataaggaggatattggaatcatg

SEQ ID NO: 52206 - DNA, 417 bp, Glycine max
  Clone ID: LIB3109-014-Q1-K1-H5
ggggagaagcagagaagagaagaagacaacataggatggccgaggttgctgtgtcaacggtcgttaccaagctgacggggctgctggtggaacaagcagtagtggcggcggtgtctgtttcacagctggcaggggtaagagagcaagtggagaatttgaagaacgaattggggtggatgcagagctttctgagggacgcagatgcaaaacaagaaggcaacgaccgcgttcgcatgtgggtgtcggaaatccgagacgtggctttcgaagcagaggaactcatagaaacctacgtgtacaagaccaccatgcagggaagcttagacaaggtcttcagaccctgtcatctctacaaggtcaggaccaggatcgacaagatcctctccaagatcaagagcatatccgacaggcgcgaga

SEQ ID NO: 52207 - DNA, 204 bp, Glycine max
  Clone ID: LIB3109-014-Q1-K1-H6
ggggagaagcacagaagggtggaggacaacatatgatggccgacgttgctgtgtcaacagtcgttaccaaactgacggggctgctggtggaacaagcattactggcggcggtgtctgtttcacacttggcaagcggaagatagcaatttgtgaatttgaacaacgaaatgtggtgcatgccaaactttttgatggacacagatg

SEQ ID NO: 52208 - DNA, 416 bp, Glycine max
  Clone ID: LIB3109-014-Q1-K1-H7
ggtgacaaatggagggtccttagttctggtggtctttcttctctctgttctctcaaccaagttctcaattcaatcttcttcacccttttgatctgctaattctcaaggtattcaaaattgggaggttttcgtttgaattgtgatgtccaagccactgctaggcataggggaggaggaaggtcaaagcaatgtcactttgttggtttcttcctcagtcatcatggaaagtgtgtgcctgaatagctcaaaattgaaagagcgcaactacatggggttatctgattgttcatctgtggacagctccgcgccgtccttctcagatgagactaaaagcaatctgaaccttaaggctactgagctgagactgggacttccgggattgcagtctcccgaacgagattcagatctttgcttga

SEQ ID NO: 52209 - DNA, 358 bp, Glycine max
  Clone ID: LIB3109-014-Q1-K1-H8
gaatgtaacacttttgagttgcattgttgcatcaccgcaagtccacaacatggctgccactgccgctgcaggcatagcttacttgttttcttcttctattaacagcgtcaaatgtcttcgttcctccaagaactgctccattatagacccccttataaccacagtgccctcaaaccgaggcatgtttgtgtcacacttggtggaacctttgaccattgggggtgccattaattcgcacaagttgtgggggcctataatttctgctgctgttgcacaagatgaggctgttgttgtcgctgatgatgaagtaaatgatggcgctggattaggtgaacaagagatagggatgagaatgaac

SEQ ID NO: 52210 - DNA, 327 bp, Glycine max
  Clone ID: LIB3109-014-Q1-K1-H9
ggaatttccgtggcgacccatcggacgctcgtccgacgcatcaacactacggccgactggaggcgacttgaatgaaagggaggtaatcttaagtggaaccgtttgcaaaattacccgttcctcgtacctcgaatgcagtctaaacttggggtcgctgaagtcacagccatatacgacactagacatatttgtgtgtctcccattgcaggcaatggactcctttaagttgttcttcgattcaacaaaccgctggacttactagactcttcaaaacttgccgcaaatttctccggtcgttcagaattacctcaagcgggtgtattttac

SEQ ID NO: 52211 - DNA, 373 bp, Glycine max
  Clone ID: LIB3109-015-Q1-K1-A1
gtacttggaagaggtaaaacaagagccaaacaatagctcccaggataacaacaacacaaaaggatcaaatgaatcaagcaaggagttatggtcagaagctaatgctgctgcacaagaatcaggtgcaatgagatttgatcagattaacattctccaatcaaaggcagaaagcttcaagaacaaccaagccacttccccaacagagatctccaattccaactcactccaatctggtttccatcttgctgacatgcaaagtccaaacaagccaaaaagcacttctgagatgcatcaaaattctccaggtagcattcttttagtggacatggaaatgaagcctcatcatcatggaaaaacaaattatatcactaga

SEQ ID NO: 52212 - DNA, 332 bp, Glycine max
  Clone ID: LIB3109-015-Q1-K1-A10
gatggcacagtttggaaggcaatgaaagaatcccctgcatctgtgatactaatggcttattgtttcatctctttgtggtttgttggtggactgactggttttcatttataccttataggcttaaatcagactacctatgaaaatttccggtacagagctgaacgcaggatcaatgtttttaaccggggttgtttaaataattttctggaagtgttttgcacaaaagtaaagccctcaaggaacaatttcagggcatttgctcgagaggaggtaccaccgagacctctggctccgatcattccccgggatcgtgaagacttgggtggagacca

SEQ ID NO: 52213 - DNA, 318 bp, Glycine max
  Clone ID: LIB3109-015-Q1-K1-A11
ggaggataatggactggttatgaacttctacaaggaatcatgccctcaggctgaagacatcatcaaagaacaagtcaagcttctctacaagcgccacaagaacactgctttctcctggctcagaaacatcttccatgactgtgctgttcagagttgtgatgcttcactgttgctggactccacaagaaggagcttgtctgagaaggaaacagatagaagctttgggttgagaaagttcaggtacattgagaccatcaaagaagctttggaaagggaatgcccaggagttgtttcctgtgctgatatcctcgttctctc

SEQ ID NO: 52214 - DNA, 304 bp, Glycine max
  Clone ID: LIB3109-015-Q1-K1-A12
tcggtgacagctcgtcgtggaagacagaaggatcagttaccattggaagagagacaacagagtgggactttgtactgataagccgtttaaggtctattactgtgtgccatttttgttgaccgttaatatactgggagaggtggaagcactgaacattatcttgatactcgctttgttgacatctgctaaaactacaacattaaaccggtgcggggtatgccatgatatttttaattatatgaacacatagaggtgttataaatactagcactctgatcaggcttggtggagtggctgagaatta

SEQ ID NO: 52215 - DNA, 336 bp, Glycine max
  Clone ID: LIB3109-015-Q1-K1-A2
gtagtagtgaagaaaatgaaagtccttgttttctgtgttgctatagttctagcagcatggcattgccatggctcagaccatgaccatgaccatggccacacctaccaaattttccctctgagaatgaaaactggccatggtggccactacattccggaggtatcatgccaaagttggaggcttggtgtggaagcacacaacgtcattgactggaaaaccgttcctcaagattgcgagggatatattgggaactacatgcttggcgaacaatatagatcagactccaaaatagttaaccaacaagcttatttctatgctaaaaccctcaatatcact

SEQ ID NO: 52216 - DNA, 386 bp, Glycine max
  Clone ID: LIB3109-015-Q1-K1-A3
ggcggcataaaggaccaaccatgtcgcctagtttcgtcttcgacccgcctagcgacgaagaaatcgaacactctgaacacgaagaagaagaagaatccgaagaagaaccagagtcaggatcaggaacaggatcagaatcagagtcagaaggagaaggagaagaagaagaagggcacgaagaagcgcgggttccgaagaagaagaagaagaaaacgcagtctccatgggactttgctaaatacacggaatcagtggcggaggaacacgctcgcaggagcacaacctcggtcgacgagaaaatctccaaagcactcaaacaacgttccacgccgctcgttgctgagctggaccacagctccgagtccgaacctgatgaacaagaagat

SEQ ID NO: 52217 - DNA, 351 bp, Glycine max
  Clone ID: LIB3109-015-Q1-K1-A4
gacactaaacaaggtaaaagaagagcatcactgtgctaacaaagcaaccctatgtcgaaggtggtttgtgtcaccggagccagcggcgccatcggatcatgggtggtcctactcctcctccagcgtggttacaccgtccatgccaccgtccaagatatcaaggatgaaaatgagacgaaacatttggcggaaatggacggagcacagagtcatctacatttttttcgaaatggatcttcttgacatcgactccattgccgctgccataaagggttgatcctgcgtaatccaccttgcatgtcctaacatcattggtcaagtcgctgatcccgagaaacggatatttggacc

SEQ ID NO: 52218 - DNA, 402 bp, Glycine max
  Clone ID: LIB3109-015-Q1-K1-A5
gtctccagtatttgtagcctccacacttttggatgatggtggagttccacatggcgtgagtcctgcatcacttttaaaagaagccatccaggtcatcagttgtggttatgaagacaaaacagaatggggaaaagaagttgggtggatatatggttctgtgacagaggatatcttgactggatttaaaatgcattgccatggttggcggtctgtgtattgcattcctaagcggcctgcatttaaggggtctgcgcctatcaacctttcagatcgtctgcaccaagttcttcggtgggctcttgggtctgttgagatttttttcagcagacattgttcaatctggtatggctatggtggtggaatgaaattggtggaccaattttccacattaactcgggcgta

SEQ ID NO: 52219 - DNA, 406 bp, Glycine max
  Clone ID: LIB3109-015-Q1-K1-A7
gggtgaccccagatgaaccagggactcgccatgtgcaatatggcacatcaaaggataagtttaaaactagtgcagaaggcacagttgcaaactacactttctataactacaagtctggctacattcatcattgtcttattgaaggccttgagtataagacaaaatactactatagaattggaagtggtgattctgctcgagacttttggttcgaaacacctcctaaagttgggccagatactccctacaaatttgggatcattggtgatttggggcaaacgtttaattctctttcgacccttgagcattatttggagagtggaggagaggctgtgttatatgttggagatctttctcattctgatgaacatgactacaaaaatttgggtttacggtgggatacatg

SEQ ID NO: 52220 - DNA, 363 bp, Glycine max
  Clone ID: LIB3109-015-Q1-K1-A8
cggttgacgtgtggcatgaaattggggggtcctttagaattgaaaagcagccatcaaaggttatggtttatgtgcaaggtcctgcttctggtgtggacttaatggttgctggacttcaaatttttcctgtggatagacacacaagatttagatatttaaagatccaaactgataagattcgtaaacgcgatgttatcctgaaattctctggactggactctggcagctatgctaacacctcggttaaagttatacaaacacataatgatttccctattggaacatgcattatctgaacgaacattgacaaccaggactttggttacttcattgtgaagcattttaactgggcctggggtttgg

SEQ ID NO: 52221 - DNA, 396 bp, Glycine max
  Clone ID: LIB3109-015-Q1-K1-B1
ggtcgaaacggggttcctctgtggtagttggaaggtcgcaccgtgccactattgcaccaggctgcctcgtcatcggagggggtcacggtgaagtgtattctgcttttgtgtatgttataatttcaataggaattcagatcttataatcctcagtttgatcctatgaaggacagacacttgaagaaaagaatcaaaagattgaaagacatggttgagccagataaaaattgcgagactagggttgaagatgttgcttggccttgctccctttcagagtctgagattgcttggctaatgtattccgatcacattgggatggcaaacgtgtgcttattattccaaaatgtctaaaaaatttctgacgataagtattcatatctaatcatggtagttgag

SEQ ID NO: 52222 - DNA, 340 bp, Glycine max
  Clone ID: LIB3109-015-Q1-K1-B10
cagataatgaagttataatggtccaacatcgccattgtttggaaacagccttccaatgcatagaagatcatcttgtaggttagaatacttacatgttataagctataatctttttttggattgaagtatattttagtccttagagtttccccttatttggtttttggtccttacatatatatttttttggtttttgttcttatttgtccctgtcattaagtatcagttcttatatttttcagtaatttaagttttagtccctttagcttttattcttcaaaattaaatggtccttatattccatgatgaacaggtctctatagtttattattaagatatc

SEQ ID NO: 52223 - DNA, 313 bp, Glycine max
  Clone ID: LIB3109-015-Q1-K1-B11
tggggggggagaagagtttgctgaataagagaccatcggggatttactaactatgaattgaactttcttaatacctcacattcccaacctaaacattgctgctgtcaatctcacattcattaacgagcattcgcaaaaagagctccttaacatcctcaataatgttcgaagaaagaagtgtttagtcattgatcccaatctcagagactctctctcgcttatcatacagacatccattcttcaggatcatgacattgaattgctgcatctttccgggcacccaattaaaacttacttgctgaaagtaaattta

SEQ ID NO: 52224 - DNA, 381 bp, Glycine max
  unsure (1)..(381): unsure at all n locations
  Clone ID: LIB3109-015-Q1-K1-B12
gattccaagttctaccatatagtgtaaagcaagaagacacaaacaatggagttgtggaagctcttcgtaactgcattaatgccagttcttaaggtgctcctcattactgctgttggcacatttcttgctctgcaccgctttaatatactgagggagagtgctaggaagcacttgaatacaatagtatactttgtattcactccggctcttgtttgcagcatcctggctaaaactacaacatttaagagcctggttgcggtgtggttcatgccattgaatattcttctcacatttatcattggaacaacactaagatggttgtttatgaaaataactaaagcacctnctgatatgcaaggccttgtgttgggatgttgtgct

SEQ ID NO: 52225 - DNA, 406 bp, Glycine max
  Clone ID: LIB3109-015-Q1-K1-B3
ggcacaagtgagtttgttgatcgagataactagaaacagtgtgatgaaaatgaaggtccttgttttcttcgttgctacaattttggtagcatggcaatgccatgcgtacgatatgttccctctccgaatgaacactggctatggtgcccgtactccggaggtgaaatgcgcaagttggaggcttgctgtggaagcacacaacatctttggctttgagaccattcctgaagagtgcgttgaagcaacaaaggaatacatccatggcgaacaatatagatcagactccaaaacagttaaccaacaagcttacttttatgccagagacctcgaagtccatcccaaggacacatttgtgttcagtatagatggcaccgtactctctatttttcatactacaaaaaacatg

SEQ ID NO: 52226 - DNA, 394 bp, Glycine max
  Clone ID: LIB3109-015-Q1-K1-B4
gaagaaagagatgagaacaaacaagaatcaagagagagaggtgttactacgttagtctatgaacagtcaccccgagagactgaaatttccagaccctcaaatcaaactcttctattctctcatcaatcaatcaatccagttccctctcggataggaatgggaatatatctcagcactccaaaaactgaaaagttttctgaagatggtgaaaatgactgtcttagatatggtttatcatccatgcaagggtggcgtgcaacaatggaagatgctcatgctgcatatactgatctggatgagtccacttcattttttggtgtctatgatggccatggaggtaagggtggtgcaaagttttgtgccaagtttcttcatcaacaggtgttcaaaagtg

SEQ ID NO: 52227 - DNA, 350 bp, Glycine max
  Clone ID: LIB3109-015-Q1-K1-B5
gacagcagtgaagtgagttaaaagaaccgataatagttgttccttcactctccgctctctctgccactgagccaagaagatggcctcacaggtttgcaaatctgcttccagagccgcgaggtcccttctatcctctcgttttcactctcaaggacgtgcgcttggggctgctgcggctgtttcattgagcagcaaagtgcctcttttttacggaaagaacggttctggaaatggatccgcttcttcatcatcatcatcatcatggatttcaggagctcttgctcttcctgccgcagcttacatgttccaagatcaggaggtgcaagcagctgagctggagcgcactttca

SEQ ID NO: 52228 - DNA, 309 bp, Glycine max
  Clone ID: LIB3109-015-Q1-K1-B6
gattcttagtgtcttactccgaacagtgaaccctgacctagcaatcaaccctaccattccaaagctcgaaggtgaacagtgagtgagtgagttattcagaacccaggatttggcgaaagtgaagcgatgagcagtgataggaatattggggttgccttggacttttccaaaggaagcaaaatcgctctcaaatggtctattggcaatcttctccgcatcggtgacatactctacatcgtccacatcaagccttccggaggaagtgaattccgaaatcttctctggccaacactggttcacctctaattc

SEQ ID NO: 52229 - DNA, 410 bp, Glycine max
  Clone ID: LIB3109-015-Q1-K1-B7
gattggtggtttggtatacaactaaatccacagttcatgggtatcgacctcaaatttttctttgttagagctggaatgatgggatggctacttatcaatttatctattcttatgaagagcattcaagatggtactttgagccagtcaatgattctctaccagctattctgtgcactatacatcctggactattttgtacatgaagagtacatgacatccacctgggacataattgcagagagactgggcttcatgttggtctttggagatttagtgtggattcctttctctttcagcatacagggatggtggctcttgatgaacagggtggagttaacaccagctgccattgtagctaattgctttgtgttcctgattggatacatggtatttcgaggagcaaacaagca

SEQ ID NO: 52230 - DNA, 378 bp, Glycine max
  Clone ID: LIB3109-015-Q1-K1-B8
ggaccaagtatagtttcttcagctcagccttcacaagcacctcataaggatgttgaagtggttcaggtatcttcaacatcatctcctgagccatctgtgccagtttctgctgaaactcaaccaccaatactgccattgccagtaacatcacggcccagttacaggcccggtggagctcctagccaaactcatcatggctataattatagaggacgtggaagaggaaggggaactgggggtttacacccagtcacaaaattcactgaggattttgatttcatggcaatgaatgagaagttcaaaaaggatgaagtatggggccatcttggtaaaagtaagtctcattcaaaagaaaaagatggggaagaaaatgccttt

SEQ ID NO: 52231 - DNA, 407 bp, Glycine max
  Clone ID: LIB3109-015-Q1-K1-B9
ggggcatttaaagctaaaattaattatttaagccgaaaagagcatccgactcgtgcttgctctctctgtggttttgggtctctctcactcacaggcacagcatcagcaccatggaaggcgcaacgatgttactgttgtcgccaatatcgagctgcaacgtgcgcagtaagcatttaaactactcactcagaaggcgtagctgttattcttctcccagggcactgaaaatagtgagcatggcgaatgagggaagcgacaccggcaacggcgtgggtgaaaaagcagccatagcgggtggattgatctcaaccccagtaattgcttggtctttctatactctcaaaacaacaaggtgcggtcttccccaggaccaggtgggtcaattggagcattggagggtgtgagct

SEQ ID NO: 52232 - DNA, 337 bp, Glycine max
  Clone ID: LIB3109-015-Q1-K1-C10
tggggagccagagtgaagagcgaagagaatggctcccaagggtttaatctttttggctgtgttatgcttctcagcactgtcactgagtcgttgtcttgcggaggataatggacttggtatgaacttctacaaggaatcatgccctcaggctgaagacatcatcaaagaacaagtcaagcttctctacaagcgccacaagaacactgctttctcctggctcaaaaacatcttccatgactgtgctgttcaaagttgtgatgcttcactggtgctggactccacaagaaggagcttgtctgagaaggaaacagattgaagccttgggttgagaaatttc

SEQ ID NO: 52233 - DNA, 352 bp, Glycine max
  Clone ID: LIB3109-015-Q1-K1-C11
caacggggcgacagagggtgatacagggagcaaaagggtgactcgtgagtccttagtatcgggtggtgacaaagaaagagctcaaaaacccgatgatgtaatgtcgactctcgcatggaataagccatgattctcttgcgtctgaatgcattaggttttcgagtcaaaccttcgtatattgctttttgagggaaaatctttatgtattgatacatggcgaatgaattcacattgtctttactagaaaatgaatgttaaggagatatatattgggcttttcacgagaccaatggtctataattaactgttctacatttataacttggataaaatatttgatgcatgcctaggc

SEQ ID NO: 52234 - DNA, 337 bp, Glycine max
  Clone ID: LIB3109-015-Q1-K1-C12
ggccttggtattgggaaagttattgaaaatggaggagttggaggaagcctaaccgggataacaattggtaccgtgacccaaactgataaagtttggagaaccatgcaagctcttggtgacatagcctttgcttattcatactccctcatccttatagaaattcaggacacagtgaaatcccctccatcagagtcaaaaacaatgaagaaggctagtttcatcagtgttgcagtaactagcattttctacatgctttgtggttgctttggttatgctgcttttggagatgcaagccctggaaaccttctcactggttttggcttctacaacccatact

SEQ ID NO: 52235 - DNA, 357 bp, Glycine max
  Clone ID: LIB3109-015-Q1-K1-C2
ggaggcaaggagttgtattttggcatccccgtggcttcaagaagagaatctcaatggaggcccaggagctgaagcgcgtgttccagatgttcgaccgcaacggcgacgggagaataacgaagaaggagctgaacgactcgctggagaacctgggcatcttcatctctgacaaggacctgagccaaatgatccagaggatcgacgtcaacggcgacggttgcgtggacatggacgagtttggggagctgtatcagaccataatggacgagcgcgacaatgaggaggacatgagggaggccttcaacgtcttcgaccagaacgccgacggcttcatcaccgtcgacgagttgaggaccg

SEQ ID NO: 52236 - DNA, 418 bp, Glycine max
  Clone ID: LIB3109-015-Q1-K1-C3
gattcatcttcaacttatattctgcataaacacatcaaactattagcaatttagcaccttctactactttgtaatcgttcaagagttgtgaactgtgaagaatgagttcaacaagccgtgcttggacttggagcgtggcagcaagtgttggagtggtggaggccttgaaggaccagggtatatgcaggtggaacagtgtgatgagatcagcacaacaacatgctaaacataatatgaggtctttgtctcaaaccaagaagttttcttttcaatcatctgcgatggcttctgccaaattgaaagatgagaaagctaagcagtcagaggagtctttgagaacagttatgtacttgagttgctggggtcccaactaaacaaagatgctaagacttcatgcaattttggatttccctttttt

SEQ ID NO: 52237 - DNA, 290 bp, Glycine max
  unsure (1)..(290): unsure at all n locations
  Clone ID: LIB3109-015-Q1-K1-C4
gccgacccacgcgtccgcggactcatgttcggcttttataagacaattttaggggtttcatcttcaacttatattctggatatccggatgatactatgagcaatntagcaccttctactactttgtaatcaatcaagagctgtgaactgtgaagaacgagttcaacatgccgtgcttggacttggagcgtgatagcaagttgaagagtggttgaggccttgaaggaccatcgtttatgcagatggaacattgtgatgagatcatcacaacaacatgcttaacataatatg

SEQ ID NO: 52238 - DNA, 414 bp, Glycine max
  unsure (1)..(414): unsure at all n locations
  Clone ID: LIB3109-015-Q1-K1-C5
ggactcaaagtgtaagtgctgctccgacaacagaggtgaaacaaaccaactacccacctatggcggcctctgttgtagtgtctacctctctgtctgtgtgtttcaactatggctatcatcgtcgtccatccatttccgctctctcttgtcattcgaattccatcaccaaaacaaacctaaaactcagttcgcaatgtttctccaactcgaattcggtagccccgatttattgccgcaagtttgttgctcgcacttcaattggagaaaacgagagcgagagcgagaaggagttagggttcgtgggggaggactctgcggtgtttgaattgggcaaacagaaagtatcttcgtggatttatttcaccgctattttgggagtcgttctctatgntcttaacgtcgcatggattgata

SEQ ID NO: 52239 - DNA, 183 bp, Glycine max
  Clone ID: LIB3109-015-Q1-K1-C6
gctacacgaaggtgggatcattcgtcaatggagccagtgtggtgattatcttccatcccaacacggttaactcatgtggtggtgatcttgcgatcccattatgaccaaggcttctattagctcgaaacacactacatctttggccacagcactgtctcatcatcatgagatctgaattgactg

SEQ ID NO: 52240 - DNA, 399 bp, Glycine max
  unsure (1)..(399): unsure at all n locations
  Clone ID: LIB3109-015-Q1-K1-C7
gttgccaagaaatttggtgttaagctaaccatgttccatggtcgcggtggaactgttggaagaggaggtggacctactcatcttgctattctgtctcaacctccagacacaatccatggatcacttcgtgtgacagtccaaggtgaagtcattgagcaatcatttggagaacaacacttgtgctttagaacactacaacgtttcactgccgccactctagaacatggcatgcaccccccaatttcgccaaaaccagaatggcgtgctttgatggatcagatggctgtcattgctactgaggaataccgttccattgtattcaaggaaccacgctntgttgagtatttccgcctggctacaccaagagtggagtatggaaggatgaatattggaagtcga

SEQ ID NO: 52241 - DNA, 325 bp, Glycine max
  Clone ID: LIB3109-015-Q1-K1-C8
ggcggccaagaaaagaaaatcctcacccattttcttcgtagccaaacactctgaaattctcagttatgtcgtggcaagcgtatgtggatgatcacctactgtgtgaaatcgaaggtaaccacctcactcacgccgctatcatcggccaagacggaagcgtttgggctcagagcaccaacttccctcagttcaaacctgaggaaataactgccatcaataatgactttaatgagcctggatcacttgctccaactggattgtatatcggtggcaccaaatacatggtcatccagggtgagcctggtgctgtcattcgagggaagaa

SEQ ID NO: 52242 - DNA, 397 bp, Glycine max
  Clone ID: LIB3109-015-Q1-K1-C9
ggagcaagagtgaagagcgaagagaatggctcccaagggtttaatctttttggctgtgttatgcttctcagcactgtcactgagtcgttgtcttgcggaggataatggacttgttatgaacttctacaaggaatcatgccctcaggctgaagacatcatcaaagaacaagtcaagcttctctacaagcgccacaagaacactgctttctcctggctcagaaacatcttccatgactgtgctgttcagagttgtgatgcttcactgttgctggactccacaagaaggagcttgtctgagaaggaaacagatagaagctttgggttgagaaatttcaggtacattgagaccatcaaagaagctttggaaaggggatgcccaggagttgtttcctgtgct

SEQ ID NO: 52243 - DNA, 384 bp, Glycine max
  Clone ID: LIB3109-015-Q1-K1-D1
ggacctggggttggtcaaggcactgctgcagggcaagctgtagaagggattgcacgacaaccggaggcagagggaaaaatacgaggtactttattgcttagtttggcttttatggaagctttaacaatttatggactggttgtagcattagcacttttatttgctaatccttttgtttaatcctaaaaaaatagaaatacatatccttttttccgtggacttgctttaccggtcttgctttttcgaattctatttatattaatatttcactcctataattctttatccgttcggacaagaacacaggggaaggactaattgaaaggtgaagaattcacatactgattcgccctctttcttctcttttttaggccaatgaccccc

SEQ ID NO: 52244 - DNA, 381 bp, Glycine max
  Clone ID: LIB3109-015-Q1-K1-D10
ggggaacagcaaacaataaggccattcgccagttactgcactttgctgtgtctgatgtgagtgatgatgtcaggaggactgcagttctagcattagggtttgtgttgtactctgatccagagcagactccacgaattgtttccctcctatcagaatcttacaatccacatgttcgatatggagcagctcttgctgtgggtatttcctgtgcgggtacaggtctcagcgaggctatctctttattggagcctttgacatcggatgttgttgattttgttcgtcaaggtgcccttatagcaatggctatggtcatggttcagatcagtgaagctagtgactcacgcgttggaacatttaggcgacaattggagaaaattattc

SEQ ID NO: 52245 - DNA, 414 bp, Glycine max
  Clone ID: LIB3109-015-Q1-K1-D12
gaatgaatcgaagctgaaacgcttcatcaccggattctcgctctcaactcagataccaactcggagtttcggactcatcgcctccgattcaaaaccctaactcggacctcaaactcaatcgatttcatacaacatggcttcggatgctgatatggaggactatggatttgagtactcagatgaggagcaagaggaacgggatgttgatattgagaatcaatattacaattcaaaaggtttggtcgaaagtgatccagaaggtgcacttgctggttttgctgaggtagtgcgcatggaacaagagaaggcagaatggggatttaaagctctaaagcaaactgtgaagctctattatagacttggaaggtataaagagatgatggaagcctacagggagatgttgacttacattaa

SEQ ID NO: 52246 - DNA, 316 bp, Glycine max
  unsure (1)..(316): unsure at all n locations
  Clone ID: LIB3109-015-Q1-K1-D2
gatgatatgaagtggaaaacgctgcctccaatgccaaaagcaaactcacatattgaatttgcttgggcgcttgtaaataactccattgtcattgttggaggcacaacagagaagcaccctataaccaagaagatggttttaaacggagaagtagtccagtttaacttgaatactttgaagtggtcagtgattggaaaattaccataccgggtgaaaaccactctagttggattttggaatggatggttgtatttcacttcangacagagagacatgggacctgatgatccatcaccaaaaaaggtcattggggaga

SEQ ID NO: 52247 - DNA, 349 bp, Glycine max
  Clone ID: LIB3109-015-Q1-K1-D3
tgtccaaaggaatgcagaaagccgatcaggcacttctctctggatgctctgcgggtggtctggcatccataatacactgtgatgagttcgggagcttgtttggaaaatcttccaaagttaaatgtttgagcgatggaggtttttttcttgatgcaatggatgtatctgggggacgcacactgaggactcttttcggaggtgtggttcagttgcaggatgtacaaaaaaatctgccaaaaagttgtctcgaccaactagacccaacttcgtgcttctttcctcagaatatgatcgaacatgttgagaccccattgtttctactcaatgctgcttatgatgtgtggcaagt

SEQ ID NO: 52248 - DNA, 375 bp, Glycine max
  Clone ID: LIB3109-015-Q1-K1-D4
gatggatgacaagtgctaactaagcactttcttcttcttcttcttcatcccttcatcgccaaacacaatgaaggaattgggcgtggttgcaatcctcttttcaatagagttcttggacgttatcgtctacactgtaagcaaagcagccatgaagaagggcatgaatgactttgtctttgtcatgtactccaatgccttcgcaacttgcctcctccttcccataaccttcttcttttacaggaaaagacctcttcctccactcacatatttcatagttgcccaattgtttattaatggctttttaagttgcagtgttcaaatgctcaagttttttggaataggttacagctctcccactttggccactgctatgtc

SEQ ID NO: 52249 - DNA, 345 bp, Glycine max
  Clone ID: LIB3109-015-Q1-K1-D5
gaaggcaaaggcagctcctccatctgtaagtgagcccccaaagaagcgtactaaaagatcatcagcctcacaaaaggaaacttcccaggaagaaaaagaacaggagataaaggaagcggaaatgcaagaagctgatgacaccactaaggatgataatgatatagggaaggaaaaggatgttgtaaaggaaaatcaagatgacaagtgtgtggaagatacagatgtcaacaaatccactaattctggagaagaagctaaagctgtagaaaatgttgaggtacctattgacgagaagtccaatgctgctgatggagaactacctgcattgaaagataaagttgatga

SEQ ID NO: 52250 - DNA, 338 bp, Glycine max
  Clone ID: LIB3109-015-Q1-K1-D8
ggacatgtggacagtagcgtgagcttagagggtgtttccattcctcgtctagatgtaaacggtttgatgccatcagagcatttaaatggtactgaaggctatgtaaatgacaaagagcatccttctgaattggaacgtaatcatcactcagctgaagatgtaaagattaactctatggcagacacaggacccagcattcctcaaattcttcatatgatatgcagtgggggtgatggaagccctatttcaagtaaacggactgctcttcaacaattggttgaagcttctataacaaatggtcattctgtttggaccaagtacttcaatcagattttgac

SEQ ID NO: 52251 - DNA, 362 bp, Glycine max
  Clone ID: LIB3109-015-Q1-K1-D9
gggggaccttgagttttcggagaaatcaaagaaggagaaggtgagaagcttgagcgctgttgatgaagctttatcaatgggttgccgtgtctctcactctcataaaccaaccaagaaatttaagcttcccagaaagtttctgaaggactgcaatggcgttgatcatgcctctgttccacggaagatacgttcagctgtgaagaaacggggtcgcgaatccatctttggtgattctgaaaaggtgaaccataggatgaacggaatggaatctccccaaaaagatggcataaagaaatccaaaaaacaaagaaccccgggctggtccacgaggctagtctcaccggggcccatcacaaaggatg

SEQ ID NO: 52252 - DNA, 384 bp, Glycine max
  Clone ID: LIB3109-015-Q1-K1-E1
agggggagaaagtgtgaaaagggtcgaacaactggtgaagtcattgatggctacagaggaagagagtgcggtgaaggagcctttggatctcattaggctcagcctcgacgagcgtatctatgtcaaactccgttccgacagagagcttcgtggcaaacttcacgcttatgatcagcatcttaatatgattcttggtgatgttgaagaaattgttactacagtggaaatcgatgatgagacatacgaagaaattgtgaggactacaaagcggacagttcctttcctgtttgtcaggggagatggggtgatattggtttccccgccattgaggactgcatgactggactgatgaactatgtgatcattttaataacatgtgtcact

SEQ ID NO: 52253 - DNA, 382 bp, Glycine max
  Clone ID: LIB3109-015-Q1-K1-E10
gaggatcagaaggaattttacttttgttcaatatgaatcagaggatgatgctagcagagcactggaagctacaaatatgagcaagttactggatcgagttatttctgtcgagtttgctgttaaagatgatgatgataggagaaatggatatagccctgagagaggccgtgatcgtcaacgtgatagaagccgtgatggaaggcgatcacccagtccttatcgtaaagaaaggggtagtcctgattatggtcgtgggcccagtccatatcagagagagaggggtagccctgactatggccgtgaccgtagccgtagcagaagcccccctaggagggagagagctagccctgcttatggacgtaaaagcattagtccatataga

SEQ ID NO: 52254 - DNA, 358 bp, Glycine max
  Clone ID: LIB3109-015-Q1-K1-E11
ggaagaaaataatacgtgcatacatagctatctatttatctatagcaagtgcgtcaagagacacgtggtaccctagctagagtgccattctgtggtttctttctttctttctttctgcatcacatcacaatttgcattgcctcgtgtcctttttcttctttgctctccaaaaatctcacacacacaggtatctagcaaatgggttctcaccaacaagaaccatggctattggagaatgggaaaccaagggttttgaccaaggagaccaggcatggccgttctgcacacagaatgtcctccacctctttgcgcaagaaatctagccgaactcttgtctcaaaagttccatgtgccactc

SEQ ID NO: 52255 - DNA, 396 bp, Glycine max
  Clone ID: LIB3109-015-Q1-K1-E12
gacgcagaggggctgaaagctgatgtgaaaaaattcctttacgatcttcggatgcaagcagaagtctttgtcataacgatgaaatgggatgcacagatggatggtggtgggtctcctgcacaagatgagtcaatggatgcatttactagtgctcagcaaagaattgatgattacttaacccaaatgaaggcgacggcgaagagagaaggtactcctctaatggcagatggcaagcccgtggttgtgaacgagaagcaggtcgagaagtttctttacacgacacttaagctcaattcgaccattttgagatattcaagaatggctgctgctgtgttggtgagtctacctccacctccagtgagccacccatcatatttctatatggagtacatggat

SEQ ID NO: 52256 - DNA, 397 bp, Glycine max
  Clone ID: LIB3109-015-Q1-K1-E2
gatagcagcatcatacaaagcattgaattcaaaaactaagttcatttcttgtgctttgctttattcctcaaaaccaaacatgtcgaacacatgcggcaactgtgactgcgctgacaagactaactgcaccaagggaaacagctatggtgttatagtagagactgagaagagctacatcgagactgttgacatggatgttccagcagctgagcatgatgggaagtgcaagtgtggcactaactgcacttgcacggactgcacttgtggccattaaggaatatgtatgaaaatgtaattgccatgtgtttggcaatacaaatctccaaataatgtaatctttgtatgaataaatgtgtgctggtatcctacttccaagtctgtgtagtcatgcagtctg

SEQ ID NO: 52257 - DNA, 325 bp, Glycine max
  Clone ID: LIB3109-015-Q1-K1-E3
gggggaagaggagttggttcaagcagctgagtatttttgtaggtttggtgcgaagaaggaggatgtggcacgattgattgtagacggaccggagttgttggagcttgatttggaggcatgggtggttgatgtggtgaagctgttgaagtactttggaatgagatcggatgatgtcgaggatgttaggagggattatgctcatgtattggggacagttaagatgggtaatctgcccaatgtgatgagagcgttaggtttacgtgagtggttctttgataagatcaaggatgggaatcatcaattggtagttagttttgcacgagct

SEQ ID NO: 52258 - DNA, 381 bp, Glycine max
  Clone ID: LIB3109-015-Q1-K1-E4
ggttttctttctgttattacacaacacactctgtgaaaaagggggagtttcttattccttctagacgcttccattgatcggcgatttctgatacatggcggagcatcacgaacacgaggaagtgaagggtgagtccttgttggagaagatttctgggaagatccacgaccacgattcctcgtcttcgtcggattccgacaacgacaaaaccagcgccactgattccttcaagtctaatgttttcaggcttttcggcagagaaaagcccattcatcatgttcttggcggtggaaaaccggctgatgtttttttatggagaaacaagaaaatatccgcatcgacactcggagttgcgaccggtatatgggttctgtttgaatt

SEQ ID NO: 52259 - DNA, 366 bp, Glycine max; identical to SEQ ID NO: 9971
  Clone ID: LIB3109-015-Q1-K1-E5

SEQ ID NO: 52260 - DNA, 357 bp, Glycine max
  Clone ID: LIB3109-015-Q1-K1-E6
gggggcaattttttcaaaacctttttctctctcgcaacctcacctcttcctccttcaatctctttcggaatttcccaaaatccttagtgggaggaagagatggttctgactcagaagcttcacgaagccttcaaaggcaccgtcgagaggattactggcccccgaaccgtttccgccttcaaagaaaaaggagttctcagtgtctctgagttcgtcaccgctggcgataatctcgttgccaaatgccccacctggtcctgggaatcgggtgatccaggcaagaggaagccatacttgccacctgagaaacagttcttgattactaaaaatgtgccttgtcttcggagagctgcatct

SEQ ID NO: 52261 - DNA, 358 bp, Glycine max
  Clone ID: LIB3109-015-Q1-K1-E8
gattcacaacacgagcatttgtttcaattccaaagcaaagaggtcgaagaaaaacaagagcaaattgggatcgaagaatttgaagaacaccacaagcaagatgcatgttgttgtggtgctcaacacgcaatcctactgcagaggcctagaacctccttcatcttctccttccgtcgtttccaacaagggaacaaggactttgagtttcaggaggctgctgctgcgtccttctcttgggattcatttatcgcgtagctttgctttaaagtgtgttgttactccgaacccagctgtggaattgccattaactgctgaaaatgtagaaagtgtattggatgaaattcgaccctatctcatt

SEQ ID NO: 52262 - DNA, 305 bp, Glycine max
  Clone ID: LIB3109-015-Q1-K1-E9
gcagacattaaattcacagatatcttcagtgggggatgagaagaacgtgctcaatgaaactaatcagaatttaaagaaggaacttcagtctctgatatttgaccttgaagagaagctgaaggaacaacagaaaattgaaggttccctgagatctgaggttgaaactctcaaagttgaggttgctgagaaatctacattgcaaagtcagctggaggaaattgaagggaaactggcacaagctgaatctagactaaatgaagaagttgaaagtggtcaagctgctgcttctcaacgagaagcagatt

SEQ ID NO: 52263 - DNA, 397 bp, Glycine max
  Clone ID: LIB3109-015-Q1-K1-F1
ggagggagacggtagcagataagcctaaacacgagactcgcagattccctcaacactggagtcgctggaaaattcattctgggactcaggttacgtttctcccttcctcaatattccatttttctcattctaagaaggcactgcataatctcagtcattatctcacaatgcgattcggatccttaaatcggtgcttggtttgaaccaaacgataagcagtgatatgactatgatggcgtgcatttttaattatttatttgatatccgtttccggcatatctttcaactgttaaccgctaatttaaattcccagggctgttcttcttgttctcattgggactgctatatactgtgttggtcaatcagctgaactgaccaagcatgattcaaaaagggt

SEQ ID NO: 52264 - DNA, 268 bp, Glycine max
  Clone ID: LIB3109-015-Q1-K1-F11
gacggaccaactggctagcacattctgtggagagcattcgattttcgagagcgttctgacttcccctagcgcattctatccaagcattacgaacaatgcagttattgatttgccttttgggggactgatggccctaatggccgttctgaacaacatgtgactgctaatatgttgctgatgacatctaacattgacccgcccgacaccatgaaaaccatgcttgaatatgacaacctaatgttctattgtatggtcttacctcacaact

SEQ ID NO: 52265 - DNA, 96 bp, Glycine max
  Clone ID: LIB3109-015-Q1-K1-F12
taccgtccggttcccgtcgaccacgcgtcgtacggtgaaagacacgaggggagggacaaaaaaaggggagatggggcgttaaatcaagctacgtac

SEQ ID NO: 52266 - DNA, 315 bp, Glycine max
  Clone ID: LIB3109-015-Q1-K1-F2
gattcgagtgtgaggaagtcgtttagttatgggaaactggcgtatgccaatgctgggggggctttttactccagcatgagggtgaatggtgagggtgaggactggttttactacagcaatcacagatcagatgttggggtttcgcataaagaggattctttgaccgtgtcagtgactgatccttatgtgttgcaaagctcaaggcgtattatactgccttggaggaagaggaagttgagtttcagatctcctaaatctaaggtggagccattgctgaaaaatgcttatggcgaaaaatgcggttatgacattgat

SEQ ID NO: 52267 - DNA, 405 bp, Glycine max
  Clone ID: LIB3109-015-Q1-K1-F3
ggacacacatgggcaaaaaagaagtgtccaggttcatcctcctgaaccagtctctgtcgaagaaggaaggccctttatatataaaaacctaaactcgtattgttctgagcaacccaggttgtctgttacggattagcatcaaagcaagttaacaaaatttgggtgcgtcctggattgacccttttgccccctctccctcaccctccactaactcctcctttttggtttttataaagcacattcccaatagaggagggtccctacacaacacaacccttcaatgacgtccatggccactttcttcgcccaaaccttctttccctcccactctctctccaaaaccttcgatacccatttcggcccttgcccgaaagtcaacgtctttgtgaacttcaaggcgaggag

SEQ ID NO: 52268 - DNA, 367 bp, Glycine max
  Clone ID: LIB3109-015-Q1-K1-F4
ggagatagctgcaaatttgaccatcctgtttgggttccagagggtggaatcccggattggaaagaggctccaaatgttgttacaagtgaaactcctcctgagagaccaggggaaccggattgtccatactttctgaaaactcaaagatgcaagtttggttcaaagtgcaaatttaatcatcccaaggtttcctctgaaaatgctgatgtttcttctggcttacctgagaggccatctgagcccccttgcgcgttctacatgaaaactggaaaatgtagatatggcactgcttgtaaattccatcaccccaaggatatccagattcagttgtctgacgacttgagtcaaaatgttgcacagacacaaa

SEQ ID NO: 52269 - DNA, 367 bp, Glycine max
  Clone ID: LIB3109-015-Q1-K1-F5
ggttggaaggatcagcacgacactgatcatcagcaatggcacgcgcacgtgttggtaaagaactgacgctgtattcgtattggaggagctcttgttcccaccgagtacgaatcgctctcaacctcaaagggcttaaatacgaatacaggcccgccaatctgctcaagggagaacaatctcgccctgagtttctacagctcaatcctgttggttgtgtccccgttctagtggatgaccacgttggtctctatgactctttcaccattattatacatttggaagataagtatcctcacaatcctttgctccctcatgttatttacaagagagcaatcaatttccttgctgctttggttgtttactcaac

SEQ ID NO: 52270 - DNA, 265 bp, Glycine max
  Clone ID: LIB3109-015-Q1-K1-F6
gacggcacagaggggaagaagaagatggtgtccttgaagcttcagaagcgcctcgccgctagcgtcctaaagtgcggcaagggcagggtctggcttgatccaaatgaagtcaatgaaatctccatggccaattctcgacaaaacataaggaagttggttaaggatgggtttattatcaggaagccgactaagattcactctcgctcccgtgctcgtcgaatgaaggaggccaagagaaaggggcgtcactctggttatggtaagc

SEQ ID NO: 52271 - DNA, 403 bp, Glycine max
  Clone ID: LIB3109-015-Q1-K1-F8
ggagattgggaagcattggtggctagccaagctaagctaaaactaaactctttcagtttgttttagcttcagcttcttctgcttcttttgctttttccaccacaaccacaaccatgtcttctgccactgcctccaacactttcttccttcactcttgtttcctcctcttctgtctcctctcggctccttcctgtgtttccatgttctctggtattgagacaggagatttagaaaaaagagatgatttgtttccacagattctaagagacgaggcagtggcagggctttatgagcttgggaaggtgagtgatgctagcggttatttggagaggacattcttgagtcctgcatccatgagggcaatcaatcttattcgtaaatggatggaggatgctgggttgag

SEQ ID NO: 52272 - DNA, 397 bp, Glycine max
  Clone ID: LIB3109-015-Q1-K1-F9
gagaggttcaatgtgatgcttcatgaactaaagattgaacacccaaaaggaggaattgctaggagtgaaactgatgcacttgccattgcagcagatattggatacccagttgttgttcgtccttcttatgttttgggtggtcgagcaatggagattgtgtatactgatgataagctggtcacttaccttgaaaatgctgttgaggtggatccagaacgccctgtattaattgacaagtatttatctgatgcctgtgagattgatgttgatgcactggctgactcacaaggtaatgtagtcattggtgggataatggagcacattgaacaggctgggatacattctggtgactctgcctgctctaattccaccagaactgttccttcttcttgcttgg

SEQ ID NO: 52273 - DNA, 405 bp, Glycine max
  Clone ID: LIB3109-015-Q1-K1-G1
ggtgatgaggcagtgtctgaaatgtgaaacttgattaggcaaaatggtgagtgaaaatggtgaatagattcctcattctaaaattaacttcatcttttccattcaccaaatccattttctttctctgctgcaacatacatagcccaatgctctctttttctttaacccattcactttagggtttgtttggtaggatgaatggagaagaaaaaacaccggctttggctccaaagagattcatcaatcatcagatacatcaaatgctgtccttagtcttctgaaaacctacggatgctccgaaagccagttctctgtcttgccaagaggttactctcattgctcttaatcaaatctcactacattaaattctgtgagcgaagtaatggggtctaattttcttctcat

SEQ ID NO: 52274 - DNA, 108 bp, Glycine max
  Clone ID: LIB3109-015-Q1-K1-G10
tatagggattgaacaactgtctgtaataaacggtcttgagcaaaggtatctggccaaacgtatacctaacactaggcataggttgctgataatttccgctatcaccgt

SEQ ID NO: 52275 - DNA, 264 bp, Glycine max
  Clone ID: LIB3109-015-Q1-K1-G11
gacagatcggacggatggcactgacggtttagggcaatctgattccgagaaagttaagactacccctgctggtaaatatctcactgctgccctgaatgactttaatcctgaacaatatgagggactggctgccatttctgatggtgcgaacaaactgatgatgctgattctggatgatgacatcaaagctgtgtgcctccagagaacatgagagccttgctggaactagacatgctgaactcttatttattcgtaatatggcac

SEQ ID NO: 52276 - DNA, 390 bp, Glycine max
  Clone ID: LIB3109-015-Q1-K1-G12
gggaccaagtgttgaaaatgcgaaggcctataacgggaacctgattgctcatcttagatcattggttgggacacctttgatgcctgggaagtctgtggacacttacatttttgcactctatgatgaggatctaaaaccaggcccatgatctgaacgtgcatttggtatgttcaaaactgatcgcaccgtgttgtacgatgttggattaaccaagtctagccagcagactccaacaactgcggtaactccagcaccaaacactgctggatggtgtgtagcgaaagctggagtttctgatgctcatgtgcaggccaacattgactacgcctgtagccaacgtattgattgccggccaattcaaccaagatgctcttgttttgagcctaacac

SEQ ID NO: 52277 - DNA, 204 bp, Glycine max
  Clone ID: LIB3109-015-Q1-K1-G2
ggcccgaggggattagtgactctctctcctctgtgttctacgcgtttagagagagagaggggggctcatttttcaatcttgcccgcatctttttgcgacttcttatttttcttccgctcctttccttttcttttttttgccactacttccaactccttccattcttatctttctttcactctctatggatgaattggccgctca

SEQ ID NO: 52278 - DNA, 348 bp, Glycine max
  Clone ID: LIB3109-015-Q1-K1-G5
gatccagagagagatgcaaaagccataaagatttttcttgaggatggtcatttaataggacttgctcagtcatatgcaaaaaatatgggactgtatggccagcgagcaggaagcctgagtgtgctttgtgaagatgagaaacaagctgtggctgtaaaaagtcagttgcagctgattgctagacccatgtacagtaacccacctctccatggagcacttatagtttctactgtccttggtgatccagatttgaagaagttatggcttaaagaagtcaaggttatggcagaccgcatcatcggaatgaggactacactacgagaaaacttataaaagaaggggtctact

SEQ ID NO: 52279 - DNA, 373 bp, Glycine max
  Clone ID: LIB3109-015-Q1-K1-G6
ggtgtttggaggtggaaacttagggttgttggagaaattgttctgttggggggatatgatgtcgatggagaaggaagcttcaagctccacacctacgcgcaaattgtcgtgcactgcatgcttcgacgctgtctatttctgctactcgccggttcatcaaatgcagcagtattacaggcttggtaaatttgacaattgttccggcaaatggaaagcgatggttgattgcttaatgctcaagaccaaacccacatctcaagtccaggaagttctggatactgaagagaaatcaaagtttaagtcacatatctggacctttcggacaccagaagaagcttcttactactggcaagaactttatggtcatttggat

SEQ ID NO: 52280 - DNA, 412 bp, Glycine max
  Clone ID: LIB3109-015-Q1-K1-G7
gactgtaagataatgtcaatgaagagagaggtttctattttacagagagaaactctttagagatagaaagtcagtgacaagcaccagaagaagtgcctagcacccaaaaacgacaccagattctggataaaaatctaatcttcatcgctcttagatccattgagtttgttcttgcacatcatgattttccccgggtcaacaaccggttgagcacacagaagaaagagaagggtgtgaagagatgggtttgatcatgacccttttgatgagtcacatgcccacctagctcactagttttaatcgcgttctttttcgtgtatgttatgaaatttgttcatgtgggtcatgctaattcccttcgatcgacgagataattcaccttctggttccattcagaattgggttttctttt

SEQ ID NO: 52281 - DNA, 362 bp, Glycine max
  Clone ID: LIB3109-015-Q1-K1-G8
gccagtgggacgtgttgagaccggtgtcttgaagcctggaagggtggtgacttttgcaccaactggactgacaactgaagtcaagtctgtggagatgcaccatgaatctcttacagaggcacatcctggtgacaatgtgggattcaatgttaagaatgttgctgttaaggatttgaagcgtggttatgttgcctcaaactcaaaggatgaccctgcaaaggaggctgctaacttcacagaccaagtcatcatcatgaaccaccctggtcagattggaaatggctatgcccctgtcctcgactgccacacttttcacattgctgtcaagtttgctgaactcatgaccaagattgacaggcgat

SEQ ID NO: 52282 - DNA, 361 bp, Glycine max
  Clone ID: LIB3109-015-Q1-K1-G9
gagagaaagagggtctctttcgttttggagtattgggtcacagcctcttttaggaatgccaaagttactcaacaacacctcacgctctctgaaaatgctgcaggcatgaaaccgctcattccaaccttcacctccttcttccaaacctctccttcacttgttagatttgttcacattgcaaagggaactttgttgctatggggttgatcgatctgaacaccacggaggatgatgaagctgctccattatctgcttcttcttctcactcggggataagcacttctgcttcaaccttggttggttctcctcctccttctgtgtgcttggaactgtggcacgcgtgtgcgggccctttgatctc

SEQ ID NO: 52283 - DNA, 376 bp, Glycine max
  Clone ID: LIB3109-015-Q1-K1-H1
ggacccaggatgaggatcgcgtgagcactcctgtgcagatccgcacaagcattgcatatcaaatcaagcatcctgttccttatctctgtctctgcatttcccttccttcttcttctctctctctctctaaaaccctaattctatacatggaagggaaatctcaaatctaatgactaattaattaatccatcgatcaagcatggagtccgaactcaaagacctcaattcgaagccgccgaacggcaacggcaacagcgttcgcgatgaccgtcctctgctgaagccggagcctccggtctccgccgacagcatcgccgatatggagaagaagttcgccgcttacgttcgccgcgacgtgtacggcaccatgggacgc

SEQ ID NO: 52284 - DNA, 279 bp, Glycine max
  Clone ID: LIB3109-015-Q1-K1-H10
gagggaacgactgtctgtaatgaactgctttcagcaaaggagtctgcccaaatgtatgcaaaacacttggcagagcttgctgttaatttaagctttgacgggtggctgttgaatatggaggtatcattgaagccggaacagatttctaacttaaaagagtttgtcaatcatctatcattaacaactcattctttagcgcccggatcaatggtgatatgggttgacagtgacactattaacggggatctatgggggcaaaatgaacttaatgagcattat

SEQ ID NO: 52285 - DNA, 153 bp, Glycine max
  Clone ID: LIB3109-015-Q1-K1-H11
gaatgagcggacgtctaaactaaacggactagagcaatttggtttggacaaacttatacctaccactaaggtaaggtatctcaaaaatacaaataacgctaattgtcgaatatcatatcggcgatcggaggacgtatctaaagttgtgacaaa

SEQ ID NO: 52286 - DNA, 313 bp, Glycine max
  Clone ID: LIB3109-015-Q1-K1-H12
gatacagactagaccgagctcggttactggttcggactcctctcccgccggcgatcaggatggaggttcgtgttggtgtgggggattcacagtatggggtatgggtagcggaagagatagggcttgaagtcgggtcggcccggaatagaactgcgctgtctgaagggtggtcggaggagatcctttcggaggatgtcggagatgctgacgacgccatcaatgacggcgacactcagccttcctgcttgccggaaccgccccatgggaaacggacaccgtccgatatccaaggggtagagggggagactaacgg

SEQ ID NO: 52287 - DNA, 369 bp, Glycine max
  Clone ID: LIB3109-015-Q1-K1-H3
gacggctaaaagctaaaaatcatcgaagtactcaaattagcatggctgtcacggttgcattcttgaatttgatcatcatgttttcagtagtctctacaagcaagtcactgagcttaaactactattcaaaaacatgccctgatgtggaatgcattgttgccaaggcagtgaaggatgccactgctagggacaaaactgttccagctgcacttctgcgaatgcacttccatgactgtttcgttcgggggtgtgatgcctctgtgctgctaaattcaaaaggaagcaacaaagcagaaaaagatgggccaccaaatgttttcttgcatgcattctatgtcattgatgcagcgaaaaaagcactagaagctt

SEQ ID NO: 52288 - DNA, 390 bp, Glycine max
  Clone ID: LIB3109-015-Q1-K1-H4
gtacgtcagggctcagaaatcaaaagcctacttcaagagatatcaagtcaagttcaagagaagaagagagggaaaaaccgattatcgtgccaggattcggttgattaatcaggacaagaacaaatataacactccgaaataccgatttgttgttcgctttagcaacaaggacattgttgcacaaataatatctgctagcatcgctggcgatattgctcttgctgcagcatatgcacatgagctgccacaatatggtcttggagtagggcttacaaattatgctgcagcttattgcactggtctcctgttggcccgaagagtcctcaatacacttgaaatggatgaggagtatgaacgaaatgttgaggcttctggagaggattattccgt

SEQ ID NO: 52289 - DNA, 275 bp, Glycine max
  Clone ID: LIB3109-015-Q1-K1-H5
ggtgtgtgggatgagaagatgatgaggaaacattggtagaagaaattgaagagagagagagagagagagagagagagagagagggttggattggttttcttcttccttttctctaaagagaatctaatctcaatcctcattacagatttcttcattcctctctcagtcttttctgttttccccctttgacattctcgttttcgccgaaacaaaaacaactaagattttttgtttgttttgtttttcttctccttgttgttatttgactcggttgt

SEQ ID NO: 52290 - DNA, 211 bp, Glycine max
  Clone ID: LIB3109-015-Q1-K1-H6
gaggcaggggatgaaggtcctattgtgactgaagctgacatacagcatattgtctcatcctggactggtattcctgttgagaaagtctcaacagatgaatctgatcgcctcctgaagatggaagagactttacataagcgagtcattggtcaggatgaagcaattaaagccattagtcgggctattccgccagcgctggttggaactaaaa

SEQ ID NO: 52291 - DNA, 323 bp, Glycine max
  Clone ID: LIB3109-015-Q1-K1-H7
tacgtgttgtagttgctagtttctttgtgaaggttctgcagcttccttggagatggggaatgaagtatttctgggatacccttttggatgccgatcttgagagtgatgctcttggttggcagtacatatctggtagtctccctgatggtcgtgaaattgaccgaatagataatccacagtttgagggctacaaattcggcccaaatggagaatacgtgcgacgctggcttccagaactttcaagattacccactgagtggatacatcattcttggaatgcaccatagtcagtgctacaagctgctggaattgagctaggatcg

SEQ ID NO: 52292 - DNA, 406 bp, Glycine max
  Clone ID: LIB3109-015-Q1-K1-H8
gagccttgagtttgataattttgctgaagtgcacaaactctatgaaggtggagttacactacctacaaactttcttagcaagatcgcccctataccagtgatcaaggaaatttttcgaactgatggcgaacagttcctcaagtatccaccacctaaagtgatgcaggtggataagtctgcatggatgactgatgaagaatttgcaagagaaacgattgctggtttaaatccaaatgtcattaagattatagaggagttcccactaagtagcaagctagatactcaagcctatggtgatcatacctgtataatagcaaaagaacatttggagcctaacttatgtgggctcacttgtgagcaagctattcaaaacaaagaagttgttcattttaaatcaccatgacta

SEQ ID NO: 52293 - DNA, 338 bp, Glycine max
  Clone ID: LIB3109-015-Q1-K1-H9
ggaagaaaggcagagttattgccattgcctctgcctcttgcaacaccaaactgatacacacttaataatattatagtaaaaattagccaccaaagtacactaaccccttttttcatacaactcaatagctggattggagcaaggtgaaagtaaaatcatttgcaaccaatgccgttgaacatatttcaggacaaagatggattgccacggattatattgactgagccaaagggttcatcagctgaggttcttctttatggagggcagattatttcttggaagaatcatcgaaaggaagaacttctttttatgagcaagtaggctaacaagaaacagca

SEQ ID NO: 52294 - DNA, 340 bp, Glycine max
  Clone ID: LIB3109-016-Q1-K1-A1
ggtgcacaagtgagtttgttgatcgagataactagaaacagtgtgatgaaaatgaaggtccttgttttcttcgttgctacaattttggtagcatggcaatgccatgcgtacgatatgttccctctccgaatgaacactggctatggtgcccgtactccggaggtgaaatgcgcaagttggaggcttgctgtggaagcacacaacatctttggctttgagaccattcctgaagagtgcgttgaagcaacaaaggaatacattcatggcgaacaatatagatcagacttcaaaacagttaaccaacaagcttacttttatgccagagacctcgaagtccatt

SEQ ID NO: 52295 - DNA, 427 bp, Glycine max
  Clone ID: LIB3109-016-Q1-K1-A10
ggaacaagggagaacttctgagtttcctgactgaaatcactgcagatatatttggaattaaggatgatcagggagatggatatcttgttgacaaggtcctagacaagactggcatgaaaggcactggtaagtggactgttcagcaagctgctgaattatcaattgctgctcccactattgaagcatcattggatgcaaggttcctgagtgggttgaatgaggaaagagttgaagctgcataggtctttaaatcaggtggtattggtgatatcgcgactgatcaacctgtagactagaaaaaattgatcgatgatgttaggaatgctctatatgcagccaaaatctgtagttatgcacaaggaatgaatttgatccgtgcaaagagtattgaaaagggttgggacttgaagttgggtgaactggcccg

SEQ ID NO: 52296 - DNA, 429 bp, Glycine max
  Clone ID: LIB3109-016-Q1-K1-A11
ggttgtgaatcaacataaatattccgttttgcgtttctctgcctaaaaggattgaaagatgggtcaagcactaggttgctatcaagttgatcagtcaaatgtggttatcaaggagcattttggaaaatttgatgatgtcctagaacctggatgtcattgcctgccttggtgtcttgggtaccagattgctggtagtttgtcactgcgtgtgcagcaacttgatgttcgatgtgagacgaaaaccaaggacaatgtctttgtcactgtggttgcatctgtgcaataccgagctgtgtctgagaaagcatctgatgcattctataggcttaccaacacaagggagcagatccaatcatatgtttttgatgtcatcagggccagtgtaccaaagttggagttggattctgtctttgagcagaagaatgatat

SEQ ID NO: 52297 - DNA, 376 bp, Glycine max
  Clone ID: LIB3109-016-Q1-K1-A12
gtgtgcagtggtggttgtagcacttcttcttctggcggaggtggggcccatggctgaggctgtgacatgcaccccaacagagttgagtccgtgtcttccagcaatcacttccggtgctaaaccttccaatgcttgttgcacgaagctgaagcagcaaaaaccatgcttatgtggctacctcaaaaacgctagcttgaagcagtatgttaactctcctaatgcccgaaaaaccgttgcttcttgtgggattccctttccaacttgttaattaattaagccttcttataattaaagtgtgggatatatatatatatatagataaacagtttaatttatacacactttgatcctaacaagcatcttgacacaagcattc

SEQ ID NO: 52298 - DNA, 216 bp, Glycine max
  Clone ID: LIB3109-016-Q1-K1-A2
gatggtcagtagtaggtaacttggtttctcttcctcgatgtgatcgatcgttccttctctctcttgtgtttatgccaggaatgacagcgtatcagtggcagtgcaggaaacgagagggagagttttcattgggaaggtaaaagcctttgtttgtagcaatgccttacatgaacccttgccccccttcttttggtcggtaccactaacttatcgttt

SEQ ID NO: 52299 - DNA, 366 bp, Glycine max
  Clone ID: LIB3109-016-Q1-K1-A3
gaattgacccatcgacccacccagacgaccacacacgcgtacggtcacttgtacgtttcttggtttctcttcctccatttgatcgagcgatccttctctgtcttgtggttatgccatcaatgacaccgtatcagtggcactgcactaaacgagattgagagctttcattgtgcaagtaaaagcctatgttcgtaccattgcctcacattaacccttgtcccccttatctcgttctataccactaactcatcggattctcaatgcgccccgcgtacgttctgctgtgaactctcactcactattgtcaccgtgtaaccactagaatcatacttagtggcatggcaagaattaatttatgattaacct

SEQ ID NO: 52300 - DNA, 332 bp, Glycine max
  Clone ID: LIB3109-016-Q1-K1-A5
ggccaaagggaatggataaaagtttgcagtcaacaggtagaggacgtgaagttactgtcacgaatgatggcgctacaatcttgaagtccctccatattgataacccagctgctaaagtccttgttgacatatcaaaagttcaagatgatgaagttggggatggaactacctcagttgttgtgttggctggtgaacttttaagggaggcagaaaagctggttgcaaccaagattcatccgatgacaataatatcaggttttcgaatggcagcagagtgtgctcgtaatgctttgttggagaaggttgtggacaataaagcagattctgagaaa

SEQ ID NO: 52301 - DNA, 327 bp, Glycine max
  Clone ID: LIB3109-016-Q1-K1-A7
gaagcctttgatatataccgatcatgtttgagaatcacaagaatatggtgcaactcaaggtcgtagcctcaaccttggtggtgttgtggtcatggtggagctttgatggtgcaattggagaccctcaactctttttactcaaatgggagtgcagcgtagtcgcagtacacgacttgctcaacttcaaccaaaatctaaacgcacgtttggtcgaccttagagcacaagtgagcaaccaaagaaaacactttgccacggctcaatcaaccagcggagcagacccagtccatgccatgttccaatgcaagaactacctcttcatcaatg

SEQ ID NO: 52302 - DNA, 365 bp, Glycine max
  Clone ID: LIB3109-016-Q1-K1-A8
gaagagggtgtttgcaaacatgcctttgagttgatttttgcatttgatgaagtcatctctcttgggcacaaggaaaatgtgactgttgcacaagtgaagcaatactgtgagatggagagtcatgaagagaagctgcacaagttggttttgcagagcaagattaatgaaactaaggatgttatgaagcgaaaagctagtgagattgataaaagcaagattgaaaagaacagaggtgataaaggaagatttggtccattacagtcaatgggctctggaagaattgaaaatagctttagtgatttgagcatatctagcagttgaactggttttggaagtggctctggttttggattgacttctgatgt

SEQ ID NO: 52303 - DNA, 418 bp, Glycine max
  unsure (1)..(418): unsure at all n locations
  Clone ID: LIB3109-016-Q1-K1-A9
ggagcgaagagtgaagagaatggctcccaagggtgtaacctttctggctgtgttaatatgcgtttcagcactgtcactgagtccttctgttgcgggggaagggcaaaataatggccttgttatgaacttctacaaggaatcatgccctcaggctgaagacatcatcacagaacaagtcaagcttctctacaagcgccacaagaacactgctttctcctggctcaggaacatcttccatgactgtgctgttcagagttgtgatgcttcactgttgctggactccacaagaaggagcttgtctgagaaggaaacagatagaagctttgggttgagaaatttcaggtacattgagaccatcaaagaagctttggaaagagaatgccctnggagttgttcatgtgctgatatcctcggtctc

SEQ ID NO: 52304 - DNA, 350 bp, Glycine max
  Clone ID: LIB3109-016-Q1-K1-B1
ggacaaatgattgatttacctattcaaagcaatttgcgcgaagggctttctttaacagaatatataatttcttgctacggagctcgtaaaggggttgtagatactgctgtacgaacatcagatgctggatatcttacacgcagacttgttgaagtggttcaacacattgttgtacgtcgaacggattgtggtaccattcaaggaatttcggtgaatacccagaatggaatgatgccggaaagaatatggatacaaacattaattggtcgtgtattagcagacgatatatacagaggttcacgatgcattgccgttagaaatcaagatattggaattggacttatcaatcg

SEQ ID NO: 52305 - DNA, 413 bp, Glycine max
  Clone ID: LIB3109-016-Q1-K1-B10
gactgattgaatattttcagaatatacctggggtgccaaagatcaaggacaattataatcctgcaacctggatgttggaaactacctctgcatctgtagaagcataacttaaaatagattttgcacaaatatataaagagtcacacctttgccgggatacccttgaattggtgagagagttgagtgaaccaccgccaggtacaaaagacttgcacttttcaactcgcttcccacaaaatagtttgggacagtttatggcatgcctttggaagcaacacttgtcttattggagaagtgctgagtacaacttaactacgttcattttcatgattggttgtgcaatcatgtttggagcagtattctggcagaaagggaataaaatgaacaatcagcaggatttgctcaacgtactt

SEQ ID NO: 52306 - DNA, 373 bp, Glycine max
  Clone ID: LIB3109-016-Q1-K1-B11
ggctgtgagtgagattacccatagatagagagcgcggcatagcctaaacttacccttcttctctctgtgtgtgtgcgcatcaaacgcaaccagaagcagccatggccactgcaagaactgtgaaggacgtttctcctcatgagttcgtcaaagcttactcttctcacctcaagcgatctggcaagatggagctgccagagtggactgatattgtgaaaactgcaagatttaaggagttggctccttatgatcctgactggtactatgtcagagctgcttccatggcaagaaagatctacttgagaggaggacttggtgtcggtgcctttcagaggatttatggtgggagcaagaggaatggtagccgccctcc

SEQ ID NO: 52307 - DNA, 274 bp, Glycine max
  Clone ID: LIB3109-016-Q1-K1-B12
ggccttcaccttgatctatcttgtcagcacaggaaatagtatcttcgtttgttcaatatgtttggttcatcaggcatggcacaggaatctggtatgttcatggttagccagacaattggcagtgttttgtgctgcaaatgtggaattccaatgcaacccaatgctgctaatatgtgtgtcaagtgtctgcgatcggaagttgatattacagaaggactgctgaagcgtcttgtgctggtgcattgccctgagtgtgagagttacttgcagccac

SEQ ID NO: 52308 - DNA, 411 bp, Glycine max
  Clone ID: LIB3109-016-Q1-K1-B2
gatggtcagtagtaggtaacttgttttctcttcctcgatttgatcgatcgttccttctctctcttgtgtttatgccaggaatgacagcgtatcagtggcagtgcaggaaacgagagggagagttttcattgggaaggtaaaagcctttgtttgtagcagtgccttacatgaaccctcgccccccttctcttgttcgctaccactaactcatcgttttctcagtgtgccccgcgtgcgttctgctgtgtcctctcactcacaggtgtaaccgtgtaaccactagaatcatacttagtggcatggaaagaaagaaagaaagattaacctaaaaaccctgtgcaggctttcccagaaaagccaagtgagaaaaccaaaccctctattaccacttactacttacttcatgtaact

SEQ ID NO: 52309 - DNA, 324 bp, Glycine max
  Clone ID: LIB3109-016-Q1-K1-B3
ggaggcaagaagttgtattttggcatccccgtggcttcaagaagagaatctcaatggaggcccaggagctgaagcgcgtgttccagatgttcgaccgcaacggcgacgggagaataacgaagaaggagctgaacgactcgctggagaacctgggcatcttcatctctgacaaggacctgagccaaatgatccagaggatcgacgtcaacggcgacggttgcgtggacatggacgagtttggggagctgtatcagaccataatggacgagcgcgacaatgaggaggacatgagggaggccttcaacgtcttcgaccagaacgccg

SEQ ID NO: 52310 - DNA, 335 bp, Glycine max
  unsure (1)..(335): unsure at all n locations
  Clone ID: LIB3109-016-Q1-K1-B4
gggggcagagactgatatatggtatggtcgtctctgagtctgaagatctgtgagttaattgcatttgcagagagagagagagagagggaagacggttgtggggattcgatgggggccaccgttcactcgccgctagtcacttatgcttccgtcatatctctgcttacactctgccctccgtttgtcatacttctatggtacaccatgactcttgctgacggatctgtttccgagacattccattatttaaggcagaatgggttgcaaggtttgctacatatatggcccacccccacttccaccgnctgcaaaatcattgcagtctatgctgcatt

SEQ ID NO: 52311 - DNA, 283 bp, Glycine max
  Clone ID: LIB3109-016-Q1-K1-B5
gactcagcaggagtatgtgatcaactgtacgagagactatcttgaggagaatatgacgctatttgcattggctgatacagcaatagtaacaccatgatgacgcgcccacgatacactctaccaagaaatccacactgtcatgagaaccggttctatatacatgatcttcgccgtaaaaatggcatcaactatgatcagctgatgttctctcttcgacacatcgtctagaatggtcactgtagcgtgcaacgaatcaacctaggactacatctatggcaaacac

SEQ ID NO: 52312 - DNA, 330 bp, Glycine max
  Clone ID: LIB3109-016-Q1-K1-B6
ggagggagacggagacgattttacaaggaagatctgaaattctgaattcttaactggaatcagggttttggttttttttcattatcttcctcagtaagcaatgtcttctcccgcggagttttatcactctcttccgccaataacgaaggcatatggcaccgtttgcctgttggctaccgcaacttaccatcttggattatatcatccagcttacattgcactattctacgataaagtgttctacggttttcaggtttggaggttgttcacaaacttatttttccttggaccattctctatcaattttgggatccgtctcctaatgatagt

SEQ ID NO: 52313 - DNA, 402 bp, Glycine max
  unsure (1)..(402): unsure at all n locations
  Clone ID: LIB3109-016-Q1-K1-B7
gaagacaagagtgattagggttttggtttggtgtttttcttaagcttgagatcaggaattaatttcagaggttcagagaatggcaacggattcttctaatggtaatggacatcaccaaacaacaacaaagcaacctcctttgccgtctcccctgcgcttttccaaattttttcagtccaacatgagaatcttggttactggaggagctggattcattgggtctcacttagttgacagattgatggaaaatgaaaaaaatgaggtaattgttgctgacaactacttcactggatccaaggacaacctcaaaaaatggataggtcatccaagatttgagcttatccgtcatgatgtcacggagcctttattgatcgangttgatcagatctaccatcttgcatg

SEQ ID NO: 52314 - DNA, 343 bp, Glycine max
  Clone ID: LIB3109-016-Q1-K1-B8
ggaggttgcagacttagaaagagagagagagagagaatgggtctcatctcaatgcaatttaggttctgaaaaccaaagcttttcataggaaaagttgtgctaagatgccagggaaacctgacactgatgattggcgtgtagagcgtggggagcagattcagtttcagtcttccatttactctcatcatcagccttggtggcgcggagtgggggaaaatgcctccaaatcatcttcagatgatcagttaaatggttcaatcgtgaatggtatcacgcggtctgagaccaatgataagtcaggcggaagtgttgccaaagaataccaaaacatcaaacatgccat

SEQ ID NO: 52315 - DNA, 415 bp, Glycine max
  Clone ID: LIB3109-016-Q1-K1-B9
ggagacagagagaatgagtacggtgggagaagggaaggtgagtagtaatggtcatggatgttgcaaatcagggccaggctatgcttccccactggaagccatttctggtcccagagagtctctcatttatgtaacctctgtctacacagggaccggaatagagaagccagactatttggcgacagtggatgtggatccaaactctccaacttattccaaagtcatccataggcttcctgttccttatttaggtgacgaattgcatcacacaggctggaattcatgcagctcttgccatggagacccctcagcagaccgacgatttctcatcgtacctgcactcgtatcaggtcgagtatatgtggttgatgtgaaaacaaatccaaaggctccatctttgcccaaagttgtcgag

SEQ ID NO: 52316 - DNA, 367 bp, Glycine max
  Clone ID: LIB3109-016-Q1-K1-C1
ggcagcgcttgatttgaggccaggcaagccccactcaaccaccacacctctcctcgttcacgctacccctttctgctcttcttctacctttcaagttttaaaagtataaagatggcagagacattcctatttacctcagagtcggtgaacgagggacaccctgacaagctctgcgaccaaatctccgatgctgtcctcgacgcttgcctcgagcaggacccagacagcaaagttgcctgcgaaacatgcaccaaaaccaacttggtcatggccttcggagaaatcacgaccaaggccaacgttgactacgagaagatagtgcgtgacacctgcaggaacatcggcttcgtctcaaatgatgtgggac

SEQ ID NO: 52317 - DNA, 162 bp, Glycine max
  Clone ID: LIB3109-016-Q1-K1-C10
gactgaagtatcagctaggagctagctcatgaggggggggtacttggccttgtgatgcaggagatcgctctcataaatgctgcgcttgtgtgcgtcaatatgttgaatccgaatgattgtgagcactctggagctgaacactttgttcaatggccatccata

SEQ ID NO: 52318 - DNA, 351 bp, Glycine max
  Clone ID: LIB3109-016-Q1-K1-C11
gactccgatatcgctcaagttttgtcctccatgggagggtccattgactatttcacgactggtgcgggttgaacctgcccttattttgtgtgcgtcaccgtctctgatctgcctgctgtgcacacgatagacatggatgcactctacaacgtccagagatagcacccttacactgtttcttttactgcggatcaccccacttttacggcgctgtttaaaatgccacctatggaggatgaccccacttatggtcctattatttgcagcattgctctcatgaagctagctactgcccttgaacgccaagccaacgcaatgatcaatgtaggttctgaacaactcacattgatg

SEQ ID NO: 52319 - DNA, 281 bp, Glycine max
  Clone ID: LIB3109-016-Q1-K1-C12
gacctgaaaatctagtttcttacaaggctctactctactgcttcaccttctgctctagaaaattcagtggtgatacatggcttcggctactctctctgtagccaaaccagcccttcaggcaaatgggaaaggcttctctgaattctctggcctccgcagctcatcaggcttccttcccttttctagaaaatcttcagaggatttccattctgtcgttgccttccagacctatgcagttggaagcagtggaggatacaagaaaggtgtgacagaagcaaaac

SEQ ID NO: 52320 - DNA, 410 bp, Glycine max
  Clone ID: LIB3109-016-Q1-K1-C2
ggacacgacgagtacatcgtaaaaggaggcagggatttgtttcacttgttgcccgatgctttcaaggggatcaagcagattggtgttatcggttggggatctcagggacctgcgcaggctcagaatctacgggactcacttgctgaagcaaagtctgatattgtggtcaagattggactcaggaagggttctcgttcctttgctgaagctcgcgcagctgggttttctgaggagaatgggactctaggtgatatatgggaaactgtctctggaagtgatcttgtgatgctggtaatttctgattctgcacaggctgataactatgagaagatattgtctcacatgaagcccaacagtatacttgggctttcccatgggtttcttctttggcatttacaatcattgggact

SEQ ID NO: 52321 - DNA, 286 bp, Glycine max
  unsure (1)..(286): unsure at all n locations
  Clone ID: LIB3109-016-Q1-K1-C3
ggagagtgagtgagatagagagagacgcctcgcaaatctcaatcgaatctcagaaaaatgagagaaatcatcagcattcacataggtcaggccgggatccaagtcggaaactcctactgggaactctactgcctcgaacatggcatccagcccgacggcatgatgccttctgactccaccttcggtgtagcccacgacgccttcaacaccttcttcagcgaaaccggatctggcaagcacgtnccccgtgctgtcttcgtcgacctcgaacccaccgtcatcgacg

SEQ ID NO: 52322 - DNA, 393 bp, Glycine max
  Clone ID: LIB3109-016-Q1-K1-C4
ggcctacgcagagagaaattgagtttctgagataaccacttttctctttgattcatcaatggcaaccgcgaggaccgtgaaggatgtttcgcctcacgatttcgtgaaggcttacgcctcccatctcaagcgttccggcaagatggagcttcctgagtggactgatattgtaaaaacagcaaaatttaaggaattggctccatatgatcctgactggtattatgttagggctgcctcaatggcaagaaagatttatttgagaggcggtcttggtgttggggttttccagaggatctatggtggaagcaagagaaatggaagccgtcccccacatttctgcaagagcagtggggctattgcaagacacattctgcaacaattgcaaaacatgag

SEQ ID NO: 52323 - DNA, 335 bp, Glycine max
  unsure (1)..(335): unsure at all n locations
  Clone ID: LIB3109-016-Q1-K1-C5
gacggctaaaagctaaaaatcatcgaagtactccaattagcatggctgtcacgggtgcattcttggatttgatcatcatggtttcaagaatctttaccagccaggcacttgacctaaacctccattcaaaaacctgcccttgatgtgaaatgcatggttgccaagcaggtgaaggatgccactgctaggggacaaaactgttccagctgcacttctgcgaatgcaacttcatgactgtttcgttcggggtgtgatgcctctgtgctgctaaattcanaaggaagcatcaaagcagaaaaagatgggccaccaaatgttccttgcatgcattctat

SEQ ID NO: 52324 - DNA, 348 bp, Glycine max
  Clone ID: LIB3109-016-Q1-K1-C6
ggaaggagtgaggtagcaacagcactgccactgccactaccaatagcagaatgggaaccttgggcagagctttctacgccgtcggattttggatccgcgagaccggccaagccatcgatcgcctcggctctcgtctccaaggcaactacctctttcaagaacagctatctaggcatcgacctctgatgaatctgttcgacaaagctccctcggttcacagggatgcatttgtggcccccagtgcctccctcctcggcgatgtccacgttggcccagcttcctccatttggtatggatgcgttctcagaggtgatgttaacagcattactattggatctggaactaata

SEQ ID NO: 52325 - DNA, 296 bp, Glycine max
  unsure (1)..(296): unsure at all n locations
  Clone ID: LIB3109-016-Q1-K1-C7
ggcacaagccggatatggttggtggaccttggtctggacccagaggatgtgaattgtgctaatgatacacctaaacttgtaattctgacccacttgatttagctcattgagcattgtngatgttactatggaactcatcgcttatggccaangaagcgcangatgtctgaaagagatgcagcttttgggttgaatacttctgtgggcttgggaggttatcttggtataatgggttctcgaagagatgttgntactgcaacgtggaaaactggcctttgaggggtctggtacaagtg

SEQ ID NO: 52326 - DNA, 381 bp, Glycine max
  Clone ID: LIB3109-016-Q1-K1-C8
gggcgtgttatagatgttaaaggcacaacagttcgtgttgagttggaatcccaaatgaaggttgtgacagttgaccggaaccatatatctgacaatgtggctgtaaccccatatcgtgatacatctcgctatggaatgggaagtgaaacaccaatgcatccttctcgaactcccttacatccatatatgactccaatgagagatcctggagcaacacctattcatgatggaatgagaacacctatgcatagccgagcatggaatccttatactccaatgagtcctgcaagggataactgggaagatggaaatccaggctcttggggagccagtccacagtatcagcctggaagccctacttcacgggcatatgaagcccca

SEQ ID NO: 52327 - DNA, 428 bp, Glycine max
  Clone ID: LIB3109-016-Q1-K1-C9
gacgccgagatcagccaggagctgccggttgagaagggttccatttactcgctcacgttttgtgcggctcgcacctgcgcgcagtttgagtccatcaacgtctcggttctgcctgcgtcgcagacgatagacctgcagacactctacaacgtccagggatggaacccttacgcggtttctttcaatgcggatcaggacacttttaggttgctatttaagaatcccggcatggaggatgaccccacttgtggccccatcattgacaacattgctatcaagaagcttttcactcctcttaaacccaaagacaatgcagtgatcaatggggattttgaagagggtccatggatgttcaggaacacttcactgggtgtgttgcttcccacaaatttggatgaagaaacttcatcactgccaggttggatagt

SEQ ID NO: 52328 - DNA, 338 bp, Glycine max
  Clone ID: LIB3109-016-Q1-K1-D1
ggagcgagtgatgctcatcacatcatgtgcttccaaaactgatctatttcccttctccttcttacttctgtcgttctctctgctgcaaatccaaaaaccaccaaatcgcggttccaaattgcaatttctcgagcgaactttgcgagttctagggttcccccactgccatggaccaggccgaattaacctccgaacaggttctgaggagggacatcccatgggagacctacatgtccaccaagctcatctcaggcaccagccttcagctcttaaggcgctacgatcaccggccagagagtcacagagcacagttgctcgatgatgatggtccctcttat

SEQ ID NO: 52329 - DNA, 408 bp, Glycine max
  Clone ID: LIB3109-016-Q1-K1-D10
gagagcgaagagtgaagagaatggctcccaagggtttaacctttctggctgtgttaatatgcgtttcagcactgtcactgagtccttctgttgcgggggaagggcaaaataatggccttgttatgaacttctacaaggaatcatgccctcaggctgaagacatcatcacagaacaagtcaagcttctctacaagcgccacaagaacactgctttctcctggctcaggaacatcttccatgactgtgctgttcagagttgtgatgcttcactgttgctggactccacaagaaggaacttgtctgagaaagaaacagatagaagctttgggttgagaaatttcaagtaccttgagaccatcaaagaagctttggaaagagaatgccctggagttgtttcatgtgctgata

SEQ ID NO: 52330 - DNA, 423 bp, Glycine max
  Clone ID: LIB3109-016-Q1-K1-D11
ggatgaggaaccaggcgatgatgaagaaagcagtggccaaagacaatacaagcttcccatggcaaatatcattcctttccccaagagtaatgatccttctagcgctcctgatttccctcctggaaaacatgttttggcggtctatccaggaactactgcactttataaagcaacagttgttcaaggccctcgcagaaggaagaccgaggattatgtgttggaatttgatgatgatgaggaagatggatctttacctcaaaggacagtgccattccgcaaagtggttcctcttccagaaagacatcgccaatgagtttgagtataagctatttattatggttgtgtataaagcagaaactagaccattgcatatgtgccacttgtgtaatatgctccgtgtgatgtggtttgtaagaatgacat

SEQ ID NO: 52331 - DNA, 381 bp, Glycine max
  unsure (1)..(381): unsure at all n locations
  Clone ID: LIB3109-016-Q1-K1-D12
ggcggcgcggcagagcaaatacattgcaggttatctttcatctcagaacgtctgatttgagcctctctcagtgacaacagtttctgagtcttactgatcttttcttctctctaatctcttgtgatttttcttctctctaatctcttggttgcgtggcagactaaatgattttgtgtttttggttctcttttaggtgcgattctgattctcttctcttaaatcattggctttgattgtattcattggtgccatggcgtttcccagtttgattacaacaatcattaagtcngtgttgggtctttgattttccttttctttttcatggaatggtacgaataggcttcaagtttttcaatatcctacttgcaaccaggtctggtt

SEQ ID NO: 52332 - DNA, 321 bp, Glycine max
  Clone ID: LIB3109-016-Q1-K1-D3
gctggaaatgttgataaaactgttgaaatttggtcaaggagcctgtcaaatgagaccgagggaaaatcttatgttgaccttcttcaggatttaatggaaaagactattgttcttgccttggcaactgggcagaagcggtttagtgcttctctgtgcaagcttgttgagaaatatgctgaaattttagcaagtcaagggctgttgactacagcgatggagtatttaaaacttttgggttctgaagaactgtcgcctgaacttacaatcttaaaggatcgaattgcactttctacagaacctgagaaagacttcaaaactact

SEQ ID NO: 52333 - DNA, 362 bp, Glycine max
  Clone ID: LIB3109-016-Q1-K1-D4
gactattcaaggaagcaaaagacagggattctagtgggaagaaatgggatgatcaccctgcaataatggctgttggtgtggttgatggaacttcagaagccatcttccagactcttatgtcgcttggtccttcaagatcagaatgggatttctgtttctacaaaggaaatgtggtggagcacttggatggtcacactgacattattcacaaacaactatttagcgattggttgccttggggaatgaaacgaagagatctcttgttgcggcgttattggaggagagaagatgatggaacttatgttattctttaccattccatgtttcacaagaagtgcccttcccagaaaggctatgtgcgt

SEQ ID NO: 52334 - DNA, 373 bp, Glycine max
  Clone ID: LIB3109-016-Q1-K1-D5
ggaacaaaacaagtgtttcgaatagattatcctgagtctttgggaatagagctgcaatggcttcaagtcaggaggaggtgacccttttgggagctactggaagcccatttgtgtgcagggctcatattgccctcaagttgaagggagttcaatacaaatatgtcgaacaaaatttgaggaacaagagtgaactgcttctcaaattcaacccagtttacaagaaggttccagtgtttattcacaatgagaagcccatagcagagtctcttgcgattgatgaatacattgatgagacatggaagaacaaccccatcttgccttctgatccttaccaaagagccttggctcgtttctggtgcaaattcaatgatga

SEQ ID NO: 52335 - DNA, 341 bp, Glycine max
  Clone ID: LIB3109-016-Q1-K1-D6
gggaacaccaattgtattgttaaagaggatgtgaatgatgattcgatatccattggatcagtatcagaagattcaatgaactctgtgtgttcatcttcttcatcagaattggctgaggatgcatcatcctcttcagcatcttatttgtcaacctcatcatcgcattcaaacggccctttgtttgaactatcagagctaatgagtcaactccctatcaagagaggcttgtctatgttttatcaagggaaggctcagtctttcagttctctagcaagcgtggagagcataggggatcttcctaagaagaaagagagattttacaggaagaaaatgaaatcatg

SEQ ID NO: 52336 - DNA, 399 bp, Glycine max
  Clone ID: LIB3109-016-Q1-K1-D7
ggagagaaagaatggggataggaatacagagcattttgcaacacgattacacgaccgaattaaaccctgtttttctttccgaaagctggcgttaataatttaactcgcttaaaatgggtcttctcttcaataatactggtcattttttcgattggggggaacagtacaagagtgtgagggatcgggtaaaccaaactgcacaggtagtcacttaaaataatggaagtctcacgatgagactggatgccaggctcctgaacgccccattctttggattaataaatagggcttcttttgaaaaagcactccaatgaacatgtgttccaagggtacaaggacatgctgttgaagcaagagcaggacaattttgcagcatcgtcggttgaaaacattgtgaat

SEQ ID NO: 52337 - DNA, 334 bp, Glycine max
  Clone ID: LIB3109-016-Q1-K1-E1
ggaaaccgagaagaagaagatggagatgtatcagatctggagcaggagaatagcgttgggagcgttcgcgtttgttctgcttttcctatcggcctcagcagacgacgtcgttgtgctctctgaagataacttcgagaaggaagttggtcaggacagaggagctctcgttgagttctatgctccttggtgtggacactgcaaaaagcttgctccagaatatgaaaagcttggtagcagcttcaagaaagccaaatctgttttaatcggcaaggttgactgtgatgagcacaagagtttgtgcagcaaatatggagtctctgggtacccaacaatt

SEQ ID NO: 52338 - DNA, 425 bp, Glycine max
  Clone ID: LIB3109-016-Q1-K1-E10
gcacccaaaggtgcacaaatattaagatgataaacattggagcacttgttgtactctttgcatttctcttcctcagttgtgcctatgcacaagacacaacaacccttgtgcctgcaatcataacttttggtgactcagccgtggatgtagggaataatgactatcttcccacccttttcaaggctgattaccctccttatgggagggactttgctaaccaccaacctactgggaggttttgcaatggcaaattagctactgattttactgctgacactttgggttttaagacctatgctccagcatatcttagcccacaggcatcatggaaaaacctacttattggagcaaactttgcttctgctgcatctgggtatgatgaaaatgctgctactttgaatcatgcgaatccgttgtcccaacag

SEQ ID NO: 52339 - DNA, 260 bp, Glycine max
  unsure (1)..(260): unsure at all n locations
  Clone ID: LIB3109-016-Q1-K1-E11
ggacgagcgagggtgcgactatgacctgcgacttcgatctccggcaatccgcggcgaggttcgtccagtaaaacggcgccgtatagcgggatctgcgacgctgggcggagtggctatggagggcgagaacgcgagcaacaaggtgatcgagttgatgaacgagatagccagcatctccgattacaggcctncggtgaagaagcagtactgcaacttggcgcggaggctgaagcttctgatcccgatgttcgaggagatta

SEQ ID NO: 52340 - DNA, 377 bp, Glycine max
  Clone ID: LIB3109-016-Q1-K1-E12
ggcgtctgaaatttggagtgttttttcgtttgctgtgttcagctccttatggagctctcactctctccaacttcacatcgtgttccttccacaattcccactttgaatttcgctaaactatcatccactaaggccacaacgtcccaacctttgttcttaggattttccaaacacttcaactcaattgggttgaaccatcacagttacagatgctgctcaaatgctgttcctaagagaccccaaagacccagttccataagggcctgcactggagttggagctgctggttctgatcgtccattagctgaaagacttctagatttgaaagatgcttgctgcagatttttagggcacatactatacgtggtacagcacta

SEQ ID NO: 52341 - DNA, 348 bp, Glycine max
  Clone ID: LIB3109-016-Q1-K1-E2
gtccaaaggaatgcagaaagccgatcaggcacttgtctctggatgttctgcgggtggtctggcatccataatacactgtgatgagttcgggagcttgtttggaaaatcttccaaagttaaatgtttgagcgatggaggtttttttcttgatgcaatggatgtatctgggggacgcacactgaggactcttttcggaggtgtggttcagttgcaggatgtacaaaaaaatctgccaaaaagttgtctcgaccaactagacccaacttcgtgcttctttcctcagaatatgatcgaacatgttgagaccccattgtttctactcaatgctgcttatgatgtgtggcaagt

SEQ ID NO: 52342 - DNA, 73 bp, Glycine max
  Clone ID: LIB3109-016-Q1-K1-E4
gggtttggatatgaagatatatatgttctacttgcattcagaaaatcagataattgtataatgttttcttttc

SEQ ID NO: 52343 - DNA, 294 bp, Glycine max
  Clone ID: LIB3109-016-Q1-K1-E5
gaagtctatgttcttgaaccaggccacagatcgaccttgcaatgcaaaatgattgattattccataccagacagtgttttagttatccgaaatgtctcacatgtggagtttgaatgtgaagtaggccttgttgctgatccagctaaattgaaaggtgatcttgtatcattcttgaaggctgtgaacgaatagttggagtcataactgagctaggtgaaacagcatgctcttaaactaaagcgagatctggtaggagctgagtttcgtaactctgacctttacaaggagctctaa

SEQ ID NO: 52344 - DNA, 412 bp, Glycine max
  Clone ID: LIB3109-016-Q1-K1-E6
gagtgcacaagtgagtttgttgatcgagataactagaaacagtgtgatgaaaatgaaggtccttgttttcttcgttgctacaattttggtagcatggcaatgccatgcgtacgatatgttccctctccgaatgaacactggctatggtgcccgtactccggaggtgaaatgcgcaagttggaggcttgctgtggaagcacacaacatctttggctttgagaccattcctgaagagtgcgttgaagcaacaaaggaatacatccatggcgaacaatatagatcagactccaaaacagttaaccaacaagcttacttttatgccagagacctcgaagtccatcccaaggacacatttgtgttcagtatagatggcaccgtactctctaatattccatactacaaaaaacatgga

SEQ ID NO: 52345 - DNA, 351 bp, Glycine max
  unsure (1)..(351): unsure at all n locations
  Clone ID: LIB3109-016-Q1-K1-E8
ggagaaaatgttgaggaaggaggagtggaggggaacggatctgctgggtgggactagataaagtgaagcaagctgacaagactaagggaagattggatggtggaaatggaatcggcagctgaaaaccctaattacccggcggtggactacaagcgaccttccatcttgtcatttcctcgggggcccgccctcagagttacatccgagttcgatagtgaaagcgcagtcttcttccataagatttcctgcaagttgttggacagccttgccaagttcaagttttcgttcaaccacagcggtaaaggcggcgacatctncgaacctcaattcagctttgtctccaagcacctt

SEQ ID NO: 52346 - DNA, 358 bp, Glycine max
  Clone ID: LIB3109-016-Q1-K1-F1
attgaaacatatgatgtgactacaattagagcaagcacacctatgtttctcatgtctcggaagattaaatcacttggtgtcaaatgggttatctcaggagaaggatctgatgagatctttggagggtatttgtacttccacaaggcacccaacaaggaggagttccacagagaaacatgccgcaagatcaaagcacttcaccaatatgattgcttgcgagccaataaatcaacatttgcttggggtctagaagcccgtgtaccatttttggacaaggcgtttatcaatgctgcaatgagtattgaccctgagtggaagatgattaaaagagatgaaagacgaattgagaagtggattc

SEQ ID NO: 52347 - DNA, 298 bp, Glycine max
  Clone ID: LIB3109-016-Q1-K1-F10
gggagaggagaagtaaaccctagagtagagaatggaaggtgagggtggggagaggaaaagaggcgcacgtttatgctgcgtgtgcaagaaatcaagagcttcggtgaagaggccgaaaaccctagagcagatatgcagggagtgcttctacgatgcttttgagtctgagatccatcaggtaattcttgagaatcagctcttcagccctggtgaacgcgtcgcaatcggcgcttctggcggaaaggattccaccgtccttgcctacgtcctctccaagctcaaccgcctccacaattac

SEQ ID NO: 52348 - DNA, 267 bp, Glycine max
  Clone ID: LIB3109-016-Q1-K1-F11
ggggcaatgtacagatcacagagcattacgatattatccatgctggttctcagagcaaaggagaattttctaggcttgactatcagaccaggccatttttaagaggtgcatcagcctttaggcgtcttgttgccaagctacctccaagagctcattctgtgtactacagggatgaaattggcaacatttccacttctagtttatggggtgactcaaaaaaggtggatattttcacatttgataaatttttactgtgaaatacttttt

SEQ ID NO: 52349 - DNA, 310 bp, Glycine max
  Clone ID: LIB3109-016-Q1-K1-F12
ggggtaatcgattcactgatgtgtgaaaagcatgcacggctcattgaaaggccttctgaactggttttcagacgttgtgctataattgccagagaatcttctgtaagtggcttaaccatcatatcttagaatgattggtaatgctactgcgaataatggagtggtattgagaccaaaggaatatctgcaagaattgagaatgttaatgattcagacaatgctttgactggatcctgcagatagatgccaacttgcgaggactaacttaacacttgggataaagctaattatgattgtggtattggacaca

SEQ ID NO: 52350 - DNA, 356 bp, Glycine max
  Clone ID: LIB3109-016-Q1-K1-F2
ttattggggtttagaaatgtgacttttctaaatggggttgtggcagcgtgcgtgagttagtagattttccaaacacccttcccgcataagtctatgaaccttgagttgttgactttataatataattcttcaaaatcaagcgcttcccattcatatagtatcgcctcatcgtgaccggaattcaacggaaccgcttctttatcctccaccgtcctgggtaagctaagctagctgccatgtctaaggataaagactctaccaatctctcacgcaccttcaagtacctattagctactcagatcttgtcaacaggaattccatttatattcaatacatggattgtaaggcatcttact

SEQ ID NO: 52351 - DNA, 352 bp, Glycine max
  Clone ID: LIB3109-016-Q1-K1-F4
ggagggtgtgaattctaaaaggaaagaacagctgagctggtcagaaaatcaatggcatcatccttgggttttgagttcctgacgaagaagccttacagtcctccatcctgggcatcccatctccaccctttaccttcccacttcttctctcttgcccatcttcccactccaattcacagatggaaccttcccaatctgcccaccaataccgagctgtggatcaagcgagacgacctttccggaatgcagctgagtggtaacaaagtgaggaaattggagttcctgatggccgatgccattgcgcaaggcgccgactctatcatcacaatcggaagcattcagagcaaccact

SEQ ID NO: 52352 - DNA, 410 bp, Glycine max
  Clone ID: LIB3109-016-Q1-K1-F5
gagtgtgtgagttcattaacatatacagattctctgtgttgtgttgtgtacttgtgttaattgtgttgttgttgtaggaaatttaagtgaagagagaatgatgatgaagtctgctatgtgtgcattggtgcttgtggcactggttgtggttgaagtggggcccatggctgaggctgcggtgacttgcaacccaacacagttgactccttgtcttccggcaattaattcaggttctgcaccttcgagtgcttgttgccagaagctgaaggagcaaaagccatgcttctgtggctaccttaaaaaccctagcttgaagcagtatgttaactcttctaatgccaaaaaaaccggtagttcttgtggtattggctattcaactttgtaagcacctcttatatatatatataaaa

SEQ ID NO: 52353 - DNA, 409 bp, Glycine max
  Clone ID: LIB3109-016-Q1-K1-F6
ggagagaaatgtgacttttctaaattgtattgtagcagcgtgcgtgagttagtaatttcgccaaacacccttcccgcagaagtctatgaaccttgagttgtggactttataatataattcttcaaaatcaagcgcttcccattcatatagtatcgcctcatcgtgaccggaattcaacggaaccgcttcttcatcctccaccgtcctgggtaagctaagctagctgccatgtcgaaggataaagacgctaccaatctctcacgcaccttcaagtacctattagctactcagttcttgtcaagaggaattccatttatattcaatacatggattgtaaggcatcttactcaagaggactatgcgctgtatgcagttgcagttcatttgctagtcacatgtattttatttc

SEQ ID NO: 52354 - DNA, 388 bp, Glycine max
  Clone ID: LIB3109-016-Q1-K1-F7
catattgaattgacctgttagtggattgccatgttgctggtctaagccatgtagaaagtctatacatttttggcatttttgtagaaaaaatgaagatgaattatttcaagttgtttttgttgaactgaaatctttttgattcattgagtgcattacaaggttgcaggcactgttttttttttcccttacatttttcacttcagtgtattaggatatttcaagaaatcaagaaactgtatgtaagtaaccggagaattgtagaagatattgtaattatgtaattagctgtaattatccaaatcagcataaattaggtagctataatcttggatatatttgtgcctttgataatcaatacacacacaagtttttccaattgtgaatacta

SEQ ID NO: 52355 - DNA, 174 bp, Glycine max
  unsure (1)..(174): unsure at all n locations
  Clone ID: LIB3109-016-Q1-K1-F9
gactcggaaaaggggttacttttagtgangtggtgacnggtgtacacaggttttctaaagccctaaaaactcttggtctgaagaaagggcatgttgtgaatggaatgcttccaaatgtggtagaatatgccattggtgctttggggataatggctgcttgtggggtgttctcaa

SEQ ID NO: 52356 - DNA, 352 bp, Glycine max
  Clone ID: LIB3109-016-Q1-K1-G1
gatgataattctgttcatggttcacctgtgaatgcaaatgggaagcaagaaaattctgctaatggtgattatacagttgaggatgaatcctatgcacacagtgaagatgacctggcaagaatcccccatagtctagctgggaggagtacggtggagagtccttctcaagacttttcaaattctcattttggaaaaagttttgaagcagatgcagaaacacacagaagttttgatgaatcaacctggggtgcatttgacaacaacgatgatgtggactcagtgtggggttttaacaccaagaccaaggactctgacttcgagcagagagatttctttaaatctgatgattttg

SEQ ID NO: 52357 - DNA, 376 bp, Glycine max
  Clone ID: LIB3109-016-Q1-K1-G10
gatactggttacgacaacacatcatattccaagccttctgatgactatgactctggtttcaacaagccatcgtatgagtcttctggcggtggctatgaaggtggttacaacaaaacatcttattctagtgatgagccagcttctggtggtggctatgaaggtgggtacaagaaaacaggttattctggtggcattgatgagacttctggtggctatggcgctggtggtggtggatactctgacgtcactgatggtggctacggcaaaccaagtggtggctatggcgccgctggtggtggtggtgtgtaccctgacactaccactgatggtgggtacagcaaaacaagtggtggtgggtatgatgatgaagttgact

SEQ ID NO: 52358 - DNA, 310 bp, Glycine max
  Clone ID: LIB3109-016-Q1-K1-G11
gggagaaagggtgggtattgcttcacacaaacacaacagtgtctgctgcaccttgcaatggtttcgctatcaacatggtttcgctacattgcccacaagctcgaatactccttctccctcagctggaagaactacaaaggaggtcaaattacagacagggaggtacgtgatgttgtttggaaaaacttctttcaaggaaagctgacgtacttgcactggaataaaggagaggagatggcccctactattgatggaaaagcagtaactcttgttcggaaattaccagttgtagacccaacgcgtgtttttg

SEQ ID NO: 52359 - DNA, 380 bp, Glycine max
  Clone ID: LIB3109-016-Q1-K1-G2
ggcgcaaatctagattagaaatgggttctgataagctaaggtcctctgcttgcccagttcgtttgtgcgtagatgagcacgtgacaaggatttataatgcattccgtcctatcctttatcaatttgttggggaagaattaacaaagtcggaagctgttgaagtactcaggattactaaaggaattcttttggatcttagcaagtccccctataaaacaagaaggacctccattgactcagttctagataacccaaaatttcagaaactattgccatcttttgatgacttacttggtgctctttcactggagaaaaaagtgaatacagatgggagagttgaattttggttggttggtgaccctgtagtaacttctttagca

SEQ ID NO: 52360 - DNA, 396 bp, Glycine max
  Clone ID: LIB3109-016-Q1-K1-G3
gacacacagatcgggaaagcgcctttttactctggtctctgctttggtagagctctctcacaagtacacagatcttggctgggcctgggcctacggggatagaaggaactggagcctttggtacatgccccggggggcatagcagcattattactcctaaatttttcatgcttatcttgtgctacacactctctctctctctgctagagcgcgcgctaaaactgtaataagtttaagaagagcaggcaaaagtgaatgtatctatctatctgaaacagcattattatttgttcgctctgtgcaactgcaactgcaactgcaaccaaccgcgctttaccgaatgccaacaaataaagctgtgggtagtgaagatctgggaataatcttagagtaaga

SEQ ID NO: 52361 - DNA, 376 bp, Glycine max
  Clone ID: LIB3109-016-Q1-K1-G6
ggctgcaaatgtggaccaaactgctcctgcaacgccctgcacttgcaagtgaggtgttgggagagcaagcttcaagcagagatagcccttaattaggaataatgataaactattaatgtgtagctaaaaacttatgtattatgtctgtgatggttttcgtgcactctggtgttttgtgttaaacaaacatccttagaataaagtggtcatgtcttgcctttcagcaagttcaagtgttttggacttgtgatgggtgtgttaagctcatggttgcttctttttttttttttttaatgtttggtaattggtcgcttctgtataaagttcggctaatctgaattatgaatctctgcttataatattaaatactattacc

SEQ ID NO: 52362 - DNA, 389 bp, Glycine max
  unsure (1)..(389): unsure at all n locations
  Clone ID: LIB3109-016-Q1-K1-G8
ggggtgttgtgtcggtaggtttgtggtggagaagaacagtttgaaggtgacttctccgaaatcgttgaagggtacgtatgaatgtgcaattgggaattttggggttcccaagtatggaggaacgttggttggttctgttctgtacccaaaggtgaatcagaaagggtgcaccaacttcagtgatgtcaattttcagtccaagccaggagggtttcccacttttcttcttgttgatcgtggagattgctacttcactttgaaggcgtggaatgcacagaatggtggagcagcagctattcttgtagctgatgaccaggcagaaacgttgatcactatggacactcctgaagaagggaagcanatgatgattatgtggacaagattagtat

SEQ ID NO: 52363 - DNA, 407 bp, Glycine max
  Clone ID: LIB3109-016-Q1-K1-G9
ggaatgaatgaacacaacacaagtacttacagagagtacatactctctcaatttctctctcttcttactttttctctccaaaccttacatgcacaaagttgtgtacccatggaatttgcttgcttagactaatcaaccaagttttgcattttgtgtaaccaaaactctatctctttattttttttcttctggggttggcaaagtcagcatgcaagagcaagatttctaggctggttgatggtttgagttccaaaaaattgaactttttgttgaattgaaatttgggttggtgaaaggggtgttgatgaacagatgaagaacgaagagcaggctcgtagtttgtttggaatttcactctctgacagacccagatggcagcaattcctcatttggtcatcagggttctt

SEQ ID NO: 52364 - DNA, 367 bp, Glycine max
  Clone ID: LIB3109-016-Q1-K1-H1
gaatacaaggagtggaatgacaagaatccacaggtgacaacatgcaataaagataccaagaatttgatgcaaggtagtactgtcccacaagaagttgatacaagcaaggatattgtattcacatatgatgtttccttcacggaaagtgatatcaaatgggcatcacggtgggacacatatcttttaatgaatgatgatcagatccactggttctccatcattaactctctgatgattgttcttttcctgtctggaatggtggcaatgatcatgatgagaactcttttcagagacattgccaattataatcagctagaaacccaagatgaggcccaagaagaaacagggtggaaacttgttcatggag

SEQ ID NO: 52365 - DNA, 389 bp, Glycine max
  Clone ID: LIB3109-016-Q1-K1-H10
ggacgaaggatggggaaggcaaaagaagcggcggtggtggcgggagccctagcattcgcgtggctcgctatagagctcgctctcaaacccttccttaccaaggcacgtgcttccatcgacaagtccgacccggcacgtgaccccgacgacgatgctcttcctaaaaccaccgccgacgacgttcccgaagcctccgctgacgacgtgcctgtcgctgctgataccaaaaccaccgacgacgcctgaacttatctcattcatgttattttgaatgtcctgaaaattactgtccaaatgaaataatgttgctagcctctttgtgtttctgttaattttgtgtatattgtgttgtcagtatttttggtctggtttgtttggttttaggattg

SEQ ID NO: 52366 - DNA, 419 bp, Glycine max
  unsure (1)..(419): unsure at all n locations
  Clone ID: LIB3109-016-Q1-K1-H11
ggagaaacagaactttcagaagcggaatcgctcactattgatccgattccaccgtcatcggatctttctgcagccaccgtctatcgcacttcgttgccgtcattggcgccggaattctgaatgttaatgaatttgtgaagtaatgatgagtggaagagctatccaataacatgacatgaactgcaaattcttgtatacttgaaggttaagacagcttaaacaatacaaggatgttttcgttgttttatggactatggaagtacttgttcagcaagatggagcttcatgtactcattctggggattgacaaggctggcaaaacgactttgctggagaagatgaagtcggtgtactcaaatatagaaggcattcctnctgatcgaattattccaacagtgggattgaatattggtcgcatt

SEQ ID NO: 52367 - DNA, 389 bp, Glycine max
  Clone ID: LIB3109-016-Q1-K1-H12
gacggcgatgatgatgcagatcaacatcacctggaccacctcaatcgtcacggcgttctcttcggatcattccccgaatgttctaccttgagccatgtccaacctcgttcagattcgcgtcggcgccgacgctagcgatggcttcgactctccggcgaagcagaaagcagccaaccgcagctcctacagcaatcgcccctttctgtccctccgccgcgccaaacagttcctcggcgccgccaagttcaagctcttcttagttctttgtgctctctccatcgtcgttattgtctccttcagactcagttcgtggatgggatggaaccctcaccactcctgttcagtttcctgcacttcaaggggtggctatactgtgcttataaacactt

SEQ ID NO: 52368 - DNA, 334 bp, Glycine max
  Clone ID: LIB3109-016-Q1-K1-H2
ggagcaagagtgaagagcgaagagaatggctcccaagggtttaatctttttggctgtgttatgcttctcagcactgtcactgagtcgttgtcttgcggaggataatggacttgttatgaacttctacaaggaatcatgccctcaggctgaagacatcatcaaagaacaagtcaagcttctctacaagcgccacaagaacactgctttctcctggctcagaaacatcttccatgactgtgctgttcagagttgtgatgcttcactgttgctggactccacaagaaggagcttgtctgagaaggaaacagatagaagctttgggttgagaaatttc

SEQ ID NO: 52369 - DNA, 338 bp, Glycine max
  Clone ID: LIB3109-016-Q1-K1-H3
gaatgaaaggagtgatatattgtctttggaatttgactgtgttgtcttcttctttgtgactcactctctcttcagctcttgaatttgatccacctgtgttgcttttcccaccaaaccaaacaaaataacctgatattaacgtaatagtagttcttttatcgaacattgtgccatgacattcgacgaggtttccatggaacacggcaagagcttcatcttcgccttgcaggaacttaagaacctgaggcctcaactctattctgctgcagactactgtgagaaatcttatctcaatagtgataaaaaaccaatggtacttgacaacatgaaagattatg

SEQ ID NO: 52370 - DNA, 385 bp, Glycine max
  Clone ID: LIB3109-016-Q1-K1-H4
ggaatcgccattgagctcatagtcatgtacccgattcaggaccgcaggtacagggaaggaattgacaacctgttagtgctcttgattggaggaattcccattgccatgccaactgtgttgtctgtcactatggctattggttcccacaggctttctcagcagggtgccatcacaaaaagaatgacagctattgaggaaatggcagggatggatgtcctatgcagtgacaaaactgggactctcaccttaaataagttgagtgttgacaggaacttgattgaggtgtttgctaagggtgttgagaaagagtatgttatccttcttgcagcaagagcttctaggactgaaaatcaagatgccatagatgctgcaattgttggcatgc

SEQ ID NO: 52371 - DNA, 53 bp, Glycine max
  Clone ID: LIB3109-016-Q1-K1-H5
gacacacaacattttcagtgaaactgaaaaggggaagaagagagtgaaatggg

SEQ ID NO: 52372 - DNA, 299 bp, Glycine max
  Clone ID: LIB3109-016-Q1-K1-H6
ggttctagtgtgtgattgtttgttgttgtaactcgttcttcttcttttgttgttctgtgtttgtgtttgttttttctctcacctgaaaatgtcttgctgcggtggtaactgtggttgcggaagctcctgcaagtgcggcaacggctgcggaggctgcaagatgtacccagacttgagctacactgagtcaaccaccaccgagaccttggtcatgggagtggcacctgttaaggctcaatttgagggtgctgaaatgggtgtgcccgctgagaacgatggctgcaaatgtggaccaaact

SEQ ID NO: 52373 - DNA, 344 bp, Glycine max
  unsure (1)..(344): unsure at all n locations
  Clone ID: LIB3109-016-Q1-K1-H7
ggagagaagagaagcaaacgatggctacttttctttccaaccaatctctgatgggttcttgtccttgctctactcccttctcttcaaagccctttcaaaccctaaaaccccaaatcttatcttttccatctcgcgggtttccgcgccccctaatttcctcagtcaatcgaagaacccaattgaagtcttcccaagatttccctccaactacaaatgatgaaacagaggagacccagaatgatgtaagagggacaaatgatgatgaagatgaaaaacangtacctagtttaatgatcctccttgaagcatacaaagaagccttttttaatggcgaccaaaatacc

SEQ ID NO: 52374 - DNA, 249 bp, Glycine max
  Clone ID: LIB3109-016-Q1-K1-H8
gagggagcgaaggtatgaagccttcaacaggctgagaatattccaagttgtaagtgtcgcttttctaggtggactattgtggtggcatactccagagtcacacattgatgatcgggttgccttgctctttttcttttctgttttctggggattctaccctctctacaatgcagttttaacattccctcaagagaggagaatgctgatcaaggaacggtcttcgggaatgtaccgcctttcttcctactt

SEQ ID NO: 52375 - DNA, 343 bp, Glycine max
  Clone ID: LIB3109-016-Q1-K1-H9
cagaatgtgaactacaagtggaccaaaatctcaaaaggcaagctaaattcaaaacgcggaataagtacaataaactcgcgtcctgtggtgaatcaaattcaatccgcagaagaaaacatgttactctttgcaacacttcttctcttttctctgcaatcgactatcttaacaccgattccagtaaaacccactaaactctcttcgaatctctccgtcaccaactccgcctcttactgcgagagaatcagcattagcacgcgccggagaaccatttcacccttcgaatcccgaatctcactcattttcgccctcgctcctcaagccaacactctctcccagcgac

SEQ ID NO: 52376 - DNA, 277 bp, Glycine max
  Clone ID: LIB3109-016-Q1-K2-A2
aaaaacgaaaaaaaataaaaaaataaacaaaaacaaaaaaaaaaaaaaataaaaaaagaaaaaaagaagaagaaaaaaaaaaaaaaaaacaaagaaaagagaaaaaaaaaaaaaaaaagaaaaataaaaaaaagaaaaaaaaaaaagagaaataaaaaaaaaaaaaaaaaaacaaaaaaaaaaaaagaaaaagaagaaaataaagaaacaaaaaagaaaaaaaaaacaaacacaaaagaaaacaaggaaaaaaaaaataaaaaatgaaaaaaaaaaa

SEQ ID NO: 52377 - DNA, 345 bp, Glycine max
  Clone ID: LIB3109-016-Q1-K2-A4
aaaaaaaaaataaaaaaaaataaaagaaagaaaaaaaaaaaaaaatataaaaaaaaaaaaataaaaataaaaaagaaaaaaaaagaacaaaaaaaaaaaaaaaaaaaaaaaaaataaaaaaaaaaaagaaaaaaaaaaaaaaaaaaaagaaaaaataaaaaaaaaaaataaaaataaaaaaaaaaaaaaaaaaaaaaaaaaaaaccacaaagaaaaatacaaacaaaaaataaaaaaaaaaaaaaaaaaaaaaaaaaaataaaataaaaaagaaagaaaaaaaaaaaaaaaaaaaataaaaataaaaataaagaaataaaaaataaatataaaaaaaaaaaaaaa

SEQ ID NO: 52378 - DNA, 345 bp, Glycine max
  Clone ID: LIB3109-016-Q1-K2-B4
aaaaaataaaaaaataaaaaataaataaaaaaaaaaaaaaataaaaaaaaaaaaaaaaaaataaaaaaaataaaaatcaacacaaaaaaaataaaaaaataataagaaaaaaaataaaaaaaaataaaaaaataaaacataaaagaataaaaataaaaaaaaaaaaaataaaaaaaaaaaataagaataaaaaaaaaaatacccacccaaccaaaaatagaattaaaacagaaataaaaaaataaaaaaaaataaagaaaaaaaaaataaaaaaaataaataaaaaaaacattaaaaataaaaaaaaaaaaaaaatataaaaaaaaaatataaataaaaaaataa

SEQ ID NO: 52379 - DNA, 197 bp, Glycine max
  Clone ID: LIB3109-016-Q1-K2-B5
aaaaaaaaaaaaaaaaaaaaaaaaaaaaaaaaaaaaaaaaaaaaaaaaaaaagaaaaaaaaaaaaaaggaaaaaaaaaaaaaaaaaaaaaaaaaaaacccaaaaaaaaaaacaaaaaaaaaaaaaaaaaaaaaaaaaaaaaaaaaaaaaaaaagaagaagaaaaaaaaaaaaaaaaagaaaaaaaaaaaaaaaaaaa

SEQ ID NO: 52380 - DNA, 428 bp, Glycine max
  unsure (1)..(428): unsure at all n locations
  Clone ID: LIB3109-016-Q1-K2-B6
ccgacccacgcgtacgnacaggcagttttaagacgacgagaggaagattgaaaccacggggaaganacaaggaagaagggaggcggccaagaagaagcggaagcccaccgaggaagcagacgaaaaacaccaccaagaaacgaagggagaagaggcgacgaagaagagacgacgacangcagccacaaaacaaaaagcagaaggcaccagcagccagacgaacacaacaacgaggcaaaccggacaaaacaaacacagaacgggggaccaaaggacagaaacaacaaaaagggaccaacagacaaagcgaaacaaacagagaacaaccagcggaaaacaaaaaggcaggcgccgacgaggaaaaagaaaaagccaccaaaggagaacaaaaaaaaaacaaaagaacaggaaggaagaaagggccaaag

SEQ ID NO: 52381 - DNA, 349 bp, Glycine max
  Clone ID: LIB3109-016-Q1-K2-B7
aaaaaacaaaaaaaaaaaaaaaaaaataaaaaaaaaaaaaaaaaaaaaaaaaaaaagaaagaaaaataaaaaaaaaaaaaaaaaaaaaaaaaaaaaaaaaaaaaaaaaaaaaaaagaaaaaaaaaaaaaaaaaaaataaaagaaaaaaaaaaaaaaaaaaaaaaaaaaaaaaaaaaaaagaaaaaaaaaaataaaaaaaaagaaaaaaaaaaaaaaaaaaaaaaaaaaaaaaataaaaaaaaaaaaaaaaaaaataaatataaaaaaaaaaaaataaaaaaaagaaaataaaaaaaaaaaataataaataaaaaaaaaaaaaaaaaaataaaaaaaaaaaaaaaaaaaa

SEQ ID NO: 52382 - DNA, 395 bp, Glycine max
  Clone ID: LIB3109-016-Q1-K2-C5
aaaaaaaaaaaaaaaaaaaaaataaaaaaaaaaaaaaaaaaaaaaaaaaaaaaaaaaaaaaaaaaaaaaaagaaaaaaaaaataataaagaaataaaaaaaaaaaaaaaaaaaaaaaaaaagaaaaaaaaaaaaaaaaaaaaaaaaaaaaaaaaaaaaaaataataataaaaaaaaaataaaaaaaaaaaaaaaagaaaaaaagaaaaaaaataaaaaaaaaaaaaaataagaaaaaagaaaaaaaaaaaaaaaagaaaaaaaaaaaaaaaaagaaaataaaaaaaaaaaaaaaaaataaaaagaaaagaaaaaaaaaaaaaagaaaataaaaaaaaaataaaaaaaaagaaaaatataaaaaaaaagaaaaaaaaaaaaaaaaataaaaaaaaa

SEQ ID NO: 52383 - DNA, 293 bp, Glycine max
  Clone ID: LIB3109-016-Q1-K2-D2
agcagaagaattaaaaaagagagtaaattaaaaaaaaaaacgagcggtcccacaaaaccaagggaacccacaaaaacatgcaacgacataccaaaaaaataggaaaacacaaaagaaaaatacagaccagagaaaaacaaacaaaacgaaaagaaaaaaaacataacaaaaaaaaagaaaaaaacacacaaagaaaaaaatacacaaaaaaacacagaaagaaaacaaaaacaaaaaaagacaaaaaccaaaaaaaaaatacaaaaaaaaaaaaacaacacaaaaaaagaaaa

SEQ ID NO: 52384 - DNA, 227 bp, Glycine max
  Clone ID: LIB3109-016-Q1-K3-C4
tctgagatagcacttttctctgtgattcatcaatggcaaccgcgaggaccgtgaaggatgtttcgcctcacgatttcgtgaaggcttacgccttccatctcaagcgttccggcaagatggagcttcctgagtggactgatattgtaaaaacatcataatttaaggaattggctccatatgatcctgactggtattatgtttaggctggctcaatggcaagaaagatt

SEQ ID NO: 52385 - DNA, 380 bp, Glycine max
  Clone ID: LIB3109-016-Q1-K3-D4
cctgcatgtaccggtccggccatgccgtgccgaccgacgcgtgcagtccgcgaagacggacactattcaaggacaccaattgcatggattctagggggaaaaaatgggatcatcatccttcattcatggtgaagatcatgacgacttaaaacatttctactttattacttgccctcagatcaaatggattctgctcctcatatgaaatgtggtcgagcacttggatggtcacactgacattattcacaaactactttttaacaattgcttgcctttgggaatgatacgaagagatctcttgtcgcggcgttattggaggagagaagatgatggaacttatgttattctttaccattccatgtctcacaagaagtgccctc

SEQ ID NO: 52386 - DNA, 403 bp, Glycine max
  Clone ID: LIB3109-016-Q1-K3-H8
gggcactcgtccttgcactcatacgtacgttcgccagtgaccaccgaaggggcaggagcggaagtgtgaagccttcacaggctgagaatgttggaagtcgcatgggcaggccttctaggtggactattgcggtggctactgcatagtcacacattgatgatcgggttgccttgctctttttcttttctgttttctggggattctaccctctgtacaatgcagctttcacattccctcaagagaggagaatgctgatcaaggaacggtcttcgggaatgtaccgcctttcttcctactttctggctagaacaataggagacttgcctctggagcttgcactaccaactgcatttgtcttcataatctattggatgggagggcttaaacctgatcctatgacttt

SEQ ID NO: 52387 - DNA, 227 bp, Glycine max
  Clone ID: LIB3109-017-Q1-K1-A1
cgataagacaacacaacgggacacaagtgagtatgttgatcgatatagctagaggcagtgtgatgaatatgaaggtgcttgtaatattcgttgctacaatattgggagcatgggaatgccatgcgtacgatatgttccctctccgaatgaacactggctatggtgcccgtactcctgaagtgaaatgcgcacgttagaagcttgctgaggaagcacacaacatcttt

SEQ ID NO: 52388 - DNA, 406 bp, Glycine max
  Clone ID: LIB3109-017-Q1-K1-A10
ggagtagcgatggagaagaagaagggtgagctaaagtcaatgttccttcctttcctttccactagtcacataatcccgctagtggacatggccagactcttcgccttgcacgacgtcgacgtcaccatcatcaccaccgcacataacgccaccgttttccaaaagtccatcgatttagatgcgagtcgcggtcgccccatcagaacgcacgttgtcaacttccccgccgcacaagtgggtctccccgttgggatccgagccttcaacgtcgatacgcctcgggaaatgacccccaaaatctacatgggcctatcccttctccaacaagtcttcgaaaaactcttccatgacttggaaccggatttcatcgtcaccgacatgttccacccttggagtgtcgatgctg

SEQ ID NO: 52389 - DNA, 306 bp, Glycine max
  Clone ID: LIB3109-017-Q1-K1-A11
ggttaaaaaaaagtgcaattagcaacaaatcttgcaaatccacacccaccacttgctcctgagccatacaatacaaaaaaaaaagccgcttttttttaattgttctttccaatcatggctggtgtgaaccccgaagcaggagggtggaaggcttatccttctgttatggagactgctcttggtagtagtggtgatggaaggcgtggccataacatgaatgatgatgggtcggtgatgcatttctatgctacaaggccagtggcagtgccatcatctggacagaataaagtagcatctagtccaact

SEQ ID NO: 52390 - DNA, 368 bp, Glycine max
  Clone ID: LIB3109-017-Q1-K1-A12
ggagtgagtgagttacaaaatgaagagtgacgaagccattttcgccattatcactcctctcgcaccaaaagcgatgaagctctaggtttacattttaggagtagctgaatcatatgaggcagatggtcttttgttaattacctcaacttagactgcagattacttgtctaccagaaaggattcaaaatgagttggaacccacacaatggaggccaattccattaccattagtaatccctttaatccagcaggaagcttaattgaaatattttgaaggctcaaccttataacaatgtaactactttttcttggtgcatcacatgcttagggagagttcttacccttcaaattcaagcttttacaagttt

SEQ ID NO: 52391 - DNA, 104 bp, Glycine max
  Clone ID: LIB3109-017-Q1-K1-A3
gaacacaatgttcttgttgatttctataaggtagaaagaaaggtgggaacaggcccaagccagaaggaacgaattaaattgaaaatgggtcctttggtccgaaa

SEQ ID NO: 52392 - DNA, 315 bp, Glycine max
  Clone ID: LIB3109-017-Q1-K1-A4
gggttgaacacaatgttcttgttgattgctatgaggtagaaggaagggtgggagcagcggcaagcctgaggtagcgaatcatattgagatggggtcgataggtcggataagcatgtccactgtggtgaaagcggtgtatgaaatcaccggcactggcaacacctagatccgcgaatctttcagagagctctgcaccttactacgcatccctcgccaatctcaatccgaaagcgctctaattctcttcaagctcatgatactctataatttaaagagttacggcattatcaaggacacgatttgggagcataaatt

SEQ ID NO: 52393 - DNA, 56 bp, Glycine max
  Clone ID: LIB3109-017-Q1-K1-A5
aaaaaccccacaaaggggataccgagaagctcttgacagtctaattcctgggaacc

SEQ ID NO: 52394 - DNA, 234 bp, Glycine max
  Clone ID: LIB3109-017-Q1-K1-A6
aagtttcaatggcgttgctctgaaatcgaagcgtacggtattgtaaacgcaggttatacatagatagatcatgatagagatagggttaaggccatggagcgcatcatcgactccaagttcaagctacgacgcacgatcgcaagcgtatccttcggcgaattctacctacacattcatattggttccttcaagatcgtcggcagtaagagtgtaaacggtctaacgaagcattcg

SEQ ID NO: 52395 - DNA, 399 bp, Glycine max
  Clone ID: LIB3109-017-Q1-K1-A7
gacggctaaaagctaaaaatcatcgaagtactcaaattagcatggctgtcacggttgcattcttgaatttgatcatcatgttttcagtagtctctacaagcaagtcactgagcttaaactactattcaaaaacatgccctgatgtggaatgcattgttgccaaggcagtgaaggatgccactgctagggacaaaactgttccagctgcacttctgcgaatgcacttccatgactgtttcgttcgggggtgtgatgcctctgtgctgctaaattcaaaaggaagcaacaaagcagaaaaagatgggccaccaaatgtttctttgcatgcattctatgtcattgatgcagcgaagaaagcactagaagcttcatgcccaggtgtggtctcttgtgctgaca

SEQ ID NO: 52396 - DNA, 390 bp, Glycine max
  Clone ID: LIB3109-017-Q1-K1-A8
gggaagtgaaggaggagagggagaagaagaagaagtaggaggaagaaaaggggaaaacgcaaagaaaaaaagaggaagatagatcaagatctcccttgcgtttgtctcagttgaagaaattcaagagcagaacgagactaactcaacggtatcagacgtttcagggtttcagcacttccattttttttttttccggatttgagttggaagaagatcaaagaggttcctagttgcttggattgttcctctgggtggtggagactttgtgtatttttaaaatattgacaattcaaaatgccaaaggagagaagggataggtctttgtcacatgaaagtagcagagcctcaccttaccctagcagctctagtcgtgttggaagatcttctctt

SEQ ID NO: 52397 - DNA, 366 bp, Glycine max
  Clone ID: LIB3109-017-Q1-K1-A9
ggttgttcatttctgctcagtgagagaaactctgtctctaggaaccctattggacggtttggaatccaacttgaccatgggccacaagaaccttcctcgaagaatcatcaaggaaacgcaacgtttgctcagtgagccagcaccaggaattagtgcctccccttctgaagagaatatgcgatatttcaatgtgatgatccttgggccaacccagtcgccttatgaaggaggagttttcaagttagaactatttttgccagaagaatatccaatggctgctccaaaggttaggtttctaacaaaaatatatcatccaaacattgataagcttggcaggatttgtcttgatattctgaaagataagtg

SEQ ID NO: 52398 - DNA, 415 bp, Glycine max
  unsure (1)..(415): unsure at all n locations
  Clone ID: LIB3109-017-Q1-K1-B1
gacgacagaagggggcacaaaaatacaatacaaaacaaaacagagcaaagagagagtgtgtgaaaagtgaaacaaaagacagaacaacaatggcgacacttaaggttcctcagcctcttccccccgttgcagatgattgtgagcagctccgaaaagccttctcaggttggggaactaacgaggagctgattgtatcgatcttggctcataggaatgctgctcagaggaagcttatcagagaaacttatgcccagacctatggagaagatctcctcaaggccttggacaaagaactcacgagtgattttgagaggctggttcatctttggacacttgattctgctgaacgtgatgcatttttggcaaacgaggcgactaanaaatggacttcaagcaatcaggttctggtggaaat

SEQ ID NO: 52399 - DNA, 373 bp, Glycine max
  Clone ID: LIB3109-017-Q1-K1-B10
ggtatgataatgagatgataaagtgtgtggctgggccagatcatgaagaagaagagggaggcaacccaccagaagatttcttcgccatagaatcggccatggagaacagcagcatcacaactcacttggaagcactgctccatagcctggccgcagagggaggtcacgtggcctgcttggtggatgacttattggcatcttgggccatacaagtatccgataggcttgccatcccttgtgctggcttttggcccgccatgtttctcacatacctatttattgctgccatacaacactttctgcaaactcgcctcattttaaaactcttgactttcacatcacgaatgaaaaatttgccctagaccttaacttc

SEQ ID NO: 52400 - DNA, 418 bp, Glycine max
  Clone ID: LIB3109-017-Q1-K1-B11
gaaggtgcaagagtttgttgtgagctataagctagtttatcgtgaggagaatatgaagttgtttgttttctttgttgctgcagtagttttggtagcatggccatgccatggcgcaggctaccaaaggttccctctccgaatgaaaactggctgtggtgagcgttcttcggaggtaaaatgcgcaagttttaggcttgctgtggaagcacacaacatccgagcctttaaaaccattcctgaagagtgcgttgaaccaacaaaggactacattaatggcgaacaatttagatcagactctaaaacagttaaccaacaagctttcttttatgctagtgaacgcgaagtccatcacaacgacatatttatattcggcatagataacaccgtactctctaatatcccatactatgaaaaacat

SEQ ID NO: 52401 - DNA, 261 bp, Glycine max
  Clone ID: LIB3109-017-Q1-K1-B12
ggcacaagtgagtttggtgatcgagataactagaaacagtgtgatgaaaatgaaggtccttggtttcttcgttgctacaattttggtagcatggcaatgccatgcgtacgatatgttccctcttcgaatgaacactggctatggtgcccgtactccggaagtgaaatgcgcaagttggaagcttgctgtggaagcacacaacatctttggctttgaaaacatttcttgaaaagtgcgttaaaccaccaaaggattccttcc

SEQ ID NO: 52402 - DNA, 363 bp, Glycine max
  Clone ID: LIB3109-017-Q1-K1-B2
gaagacatgggaagaagaagcacacatagagcaagcgttgcatgatcattttctcttccgaaaacttactgattctcagtgccatggtttattggattgcatgcaaagagtggaggtccaacctggggatattatagtcaaacagggtggtgaaggtgactgtttttatgttgttggtagtggagaatttgaggtcttggcgactcaggaagaaaaagatggggaggtgcctagggttttgcagcgctacacagctgaaaaactttcatgctttggagaacttgctctaatgtataataaacccctccaggcttctgtacgtgctgtaacaaaaggaactctttgggctttaaaacgagaaga

SEQ ID NO: 52403 - DNA, 302 bp, Glycine max
  unsure (1)..(302): unsure at all n locations
  Clone ID: LIB3109-017-Q1-K1-B3
gagagtgagtttgataattatggttttcccatgttgtcttgtgacatctcttgggtaggtgtccatcgttgcccaataatatatttttgttattatttgagctacatctggactccacaacgcaaaacctcagccctttgcctttgttccttcaacaaaatttttctttattacttgtgctattaaaatttagaattcctattatcgtggtaaaatacctgntatttttcttaccagacatagtcaggtgtctgctttgtttggagtttggtagagaccgttacatgtctggggacataaat

SEQ ID NO: 52404 - DNA, 323 bp, Glycine max
  Clone ID: LIB3109-017-Q1-K1-B4
gcccgaacaagagagcatggccgtagctgatcccaagcctgactccgaacctaaggtctggaacttcttcaagcttccgttccgccattccgtcgtcaccaatacgacgccgacttacgataaccttcaccatcttcatcatcaccataaccaccaccaccaccaccaccaccaccacaaccctaataatctaccactcgagggatccacttcccacacctgcaattccgtttactccgtcgagagatctcttctgccaacacgacatcgtctcaagctcgatcccttcaacaagctctactttccttatgagccgggcaaac

SEQ ID NO: 52405 - DNA, 371 bp, Glycine max
  Clone ID: LIB3109-017-Q1-K1-B5
gtcaacactctaagcaaggcacccatgaagaaggccatgaatgactttgtattcatcatgtactccaatgccttcgctgcatgcctcctccttctcttagccttattcttttataggaaaagaacacttccgccactctcctgtaacacccttggcctattccttgttgttggcatgctcagttgcattaatcagtcgatcaagtttttcggcataggttacagctctccaactttggcctcagcactgtccgatttggtgcccgcctttaccttcatacttgccgtcatcttcaggatggaaaaattagatcggaaagctaatagcactctggccaagtccattggcacagtggtatcgatcgctggggc

SEQ ID NO: 52406 - DNA, 178 bp, Glycine max
  Clone ID: LIB3109-017-Q1-K1-B6
tatagggatcaacactacaagcgaagcatccgggaagaacctcatgaatgactgcgtattcataatttactccaacgcctttcatgaatgcctgctacttactttatgcctatgcctttatactagacgatcacctttcgacactctcctgtgaccacactttgcctataaacttgct

SEQ ID NO: 52407 - DNA, 395 bp, Glycine max
  Clone ID: LIB3109-017-Q1-K1-B7
ggagaaagacggaaggcgaagggttggggaagcgcggtgagggaactgactcaggcgattctgaaattcggtgaggcttatgaacaagcagagagttcgaagctgcagcaggtggtggagatggagaagcagaggatgaagttcgcgaaggatttggagttgcagagaatgcagtttttcttgaagacgcagctggagatttcgcagctcaagcttggaaggaaaggtggtaaccctagcaacaatctcaatggcaccaccaacaataacaacaacaatcataacaataatagtgacagtgaatgaatgtgtgagagtcaggaagggataactaggttgaggtaaagtttagattggaattgcatcagcctaatagccttgtggtgtatgtgttt

SEQ ID NO: 52408 - DNA, 371 bp, Glycine max
  Clone ID: LIB3109-017-Q1-K1-B8
gtcaacactctaagcaaagcagccatgaagaagggcatgaatgactttgtattcatcatgtactccaatgccttcgctgcatgcctcctccttctcttagccttattcttttataggaaaagaacacttccgccactctcctgtaacacccttggcctattccttgttgttggcatgctcagttgcattaatcagtcgatcaagtttttcggcataggttacagctctccaactttggcctcagcactgtccgatttggtgcccgcctttaccttcatacttgccgtcatcttcaggatggaaaaattagattggaaagctaatagcactctggccaagtccattggcacagtggtatcgatcgctggggc

SEQ ID NO: 52409 - DNA, 352 bp, Glycine max
  unsure (1)..(352): unsure at all n locations
  Clone ID: LIB3109-017-Q1-K1-B9
ggatgagaatgagatgataaagtgggtggctctgccagatcatgaagaagaagaaggaagcaacccaccagaagatttcttcgccatagaatcggccatggagaacagcagcatcacaactcacttggaagcactgctccatagcctggccgcagagggaggtcacgtggcctgcttggtggttgacttattggcatcttgggccatacaagtatccgataggcttgccatcccttgtgctggcttttggcccgccatgttcgccacatacctcttcatttctgccataccccactttctgcaaactcgcctcatttcaaactctggacttncacaacacgagggaaaattt

SEQ ID NO: 52410 - DNA, 390 bp, Glycine max
  Clone ID: LIB3109-017-Q1-K1-C1
gaaggaagagatgaatattgatattggaagcaaagacacaggtttcacaaatggagcagtggtaaaatggcccttcatgaacaaagtatatgtccatcctcttttgatgtcattcaatcctcctcaggtgaattctgtgaaccatcctcatggtatgaagatgttttcagttcccaatcaagcaatttcagtttccatgggacatccatccctaaagaatcattttgcaactgttggtcagaatatgaatgttgctactgtgaagcaaccactactcggaggaatacctgttacggtgcctcattcagttcatcccattgttggtgctgttgctggaatgaccgaaacacgcgtgaaaccatccgtacctgctcctaaacttacaatctt

SEQ ID NO: 52411 - DNA, 236 bp, Glycine max
  Clone ID: LIB3109-017-Q1-K1-C10
ggtgagagagagagcgagcaggttcagacacagagagaggggtttgggattggagggattgacgctgcgtctcttcctcttctctttcgatccatccctcattcctaatcctccaatccaaccacctcagcctcacactcacatatacacatatctgaacgcgtatcgtccctcctatggcttcaaagcgcatcctcaaggagctcaaggacttgcagaaagacccaccaacttct

SEQ ID NO: 52412 - DNA, 264 bp, Glycine max
  Clone ID: LIB3109-017-Q1-K1-C11
acgcgtacgaacacctccgatattacgttagaatgagttcagagagagaacgggcagggtgttacacagagagaggatgttgcaaatcaaggccttgacattctttctcactctcaaccatttctatccatacataatttctaattcatctatcctatcacttcacactgacactaatatatacacatatactatactcgtatcgtgcatgctaatcctaactatccatccatttcgaactcatccatttgcttactgaccctt

SEQ ID NO: 52413 - DNA, 408 bp, Glycine max
  Clone ID: LIB3109-017-Q1-K1-C12
tatgcaaagattgaaaatatagagggaatgaaacattttgatgaaatattgagagaagcagatggtatcatcctcgctcgtggaaatttagggatagaactcccacctgagaaggttttcttattccaaaaggctgctatttacaagtgtaacatggttggaaagccagttgttgttacacgtgttgtggactctatgactgataatctaagacctactcgtgctgaagcaacagatgttgccaatgcagtgttggaatgaagtgacgcaattcttcttggagcaaagaaccttgcgggaacataccctggagagaccatttctattggtggaaaaatatgtgctgaggcagagaaaggtcataatcaagaattggatttcaagaaggctcgtaaatatgtgggagag

SEQ ID NO: 52414 - DNA, 242 bp, Glycine max
  Clone ID: LIB3109-017-Q1-K1-C2
gatccttgagttggataaggcaagtcggaacttctatcatcttgattttgcaggatttgaatcatctaaatgtgcagagtacatttcaaaggataaaatgtaataacaattgttatcaatgattgagattttaataaaaatatgtgtaaaataaattgaaatttattacaatctcaatcgttgattaatcagcaattactattctctactttattctatgtagtgtacaatttagagtcaac

SEQ ID NO: 52415 - DNA, 334 bp, Glycine max
  Clone ID: LIB3109-017-Q1-K1-C3
acccagcgtccacccagcgtccgacggatagacaaagacgtaagggaggggtggaatgaaagggacaagcaacagttcatagaggattggggcactgacataaaaactggagataaattgccttggactcaccgaacctcgctcttgtaggcatattctgattgatatccccgtactcgtctacacgggcatcgtccgtgaattccatatgcaagatttggataatggtcggtcgtacaggaagttcacgtgagagagtctggagagccttgggtaataattcgttaagttagacctggatattatgaggctacaaaccatgttattttttcct

SEQ ID NO: 52416 - DNA, 371 bp, Glycine max
  Clone ID: LIB3109-017-Q1-K1-C4
gaaggtgcaagagtttgttgtgagctataagctagtttatcgtgaggagaatatgaagttgtttgttttctttgttgctgcagtagttttggtagcatggccatgccatggcgcaggctaccaaaggttccctctccgaatgaaaactggctatggtgagcgttcttcggaggtaaaatgcgcaagttttaggcttgctgtggaagcacacaacatccgagcctttaaaaccattcctgaagagtgcgttgaaccaacaaaggactacattaatggcgaacaatttagatcagactctaaaacagttaaccaacaagctttcttttatgctagtgaacgcgaagtccatcacaacgacatatttatattcg

SEQ ID NO: 52417 - DNA, 356 bp, Glycine max
  Clone ID: LIB3109-017-Q1-K1-C5
tccggaattgacggatgcatccacgcatgcgtacggatgggtgagacaacagacagaatgggtggggaggaatggagacgaacaagcgcaggttcatagaggataggagcactggcataaagaatctggagatagatttgcgttgaactcaccgcaaccttgctcttgttggcatcttcggcatcgatattccagtactcgtctacaaggtcatcgctcgtgaattccatatgcaagacgaggataatggtcggccgtacaggacgttcatgtgagagagtatggagagtctttggtaataattcgtcaagttagaccttgatattatgaggctacaaaccatgttcatttttcct

SEQ ID NO: 52418 - DNA, 401 bp, Glycine max
  unsure (1)..(401): unsure at all n locations
  Clone ID: LIB3109-017-Q1-K1-C6
gatgattaaggaccgtaccatcgtctacattgtccactgcttaacctccatttccataaagggagatcaaacttaatagtaaataacataatgcggcatttgctgcacgggaggctcgatgtgatcatacgtgagatcgacacattaccaagtcttaacgagtggaatttcaatctctgctgcaagggtacaagtagaagcgtgaggaagagatttctttcccaactcaagagttgtttgctctgtcaatgctaatgccagcccgagtttgtcgagacgggtctctatgcgacaggtgatttagatgaggcaagggttggaaggactaaactgttaaatgatcaatcctacaatcccacatggaatgagacctttcacatatatngtgcccatttgatctc

SEQ ID NO: 52419 - DNA, 393 bp, Glycine max
  Clone ID: LIB3109-017-Q1-K1-C8
ggttctagtgtgtgattgtttgttgttgtaactcgttcttcttcttttgttgttctgtgtttgtgtttgttttttctctcacctgaaaatgtcttgctgcggtggtaactgtggttgcggaagctcctgcaagtgcggcaacggctgcggaggctgcaagatgtacccagacttgagctacactgagtcaaccaccaccgagaccttggtcatgggagtggcacctgttaaggctcaatttgagggtgctgaaatgggtgtgcccgctgagaacgatggctgcaaatgtggaccaaactgctcctgcaacccctgcacttgcaagtgaagtgttgggagagcaagcttcaagcagagatagcccttaattaggaataatgataaactattaat

SEQ ID NO: 52420 - DNA, 283 bp, Glycine max
  unsure (1)..(283): unsure at all n locations
  Clone ID: LIB3109-017-Q1-K1-C9
gagagagaatgagtacggtgggagaagggaaggcgagtagtaatggtcatggatgttgcaaatcagggccaggctatgcttccccactggaagccatttctggtcccagagagtctctcatttatgtaacctctgtctacacagggaccggaatagaaaagcccgactatttggcgacagtggatgtggatccaaactctncaacttattccaaagtcatccataggcttcctggtccttatttaggtgacgaattgatcacacaggctggaattcatgcagc

SEQ ID NO: 52421 - DNA, 387 bp, Glycine max
  Clone ID: LIB3109-017-Q1-K1-D1
gaaggtgcaagagtttgttgtgagctataagctagtttatcgtgaggagaatatgaagttgtttgttttctttgttgctgcagtagttttggtagcatggccatgccatggcgcaggctaccaaaggttccctctccgaatgaaaactggctatggtgagcgttcttcggaggtaaaatgcgcaagttttaggcttgctgtggaagcacacaacatccgagcctttaaaaccattcctgaagagtgcgttgaaccaacaaaggactacattaatggcgaacaatttagatcagactctaaaacagttaaccaacaagctttcttttatgctagtgaacgcgaagtccatcacaacgacatatttatattcggcatagataacaccgt

SEQ ID NO: 52422 - DNA, 418 bp, Glycine max
  Clone ID: LIB3109-017-Q1-K1-D10
gaagaagaagaagaagaagaagaagaagggttgggtggtcccattccataggaagagatcaaagagaagagaaaagatgtttgagccgaatcagctatacactcgagcgaagaccgaggaattcgacctcgaatcaggggaaaccctctacccagggctgagcgtcggcgagaaccagctccgatggggcttcatccgcaaggtctacggcatcctctccgtccagatcgtcctcaccaccctcgtctatgtcaccaccgatttctatactccaatcaatgacctcctcaagggcaattccaccctcctcctcatcctgctcttccttcctttcatctttttgaatcccctgctgaagtaccagcagaagcatcctcataattacatattgcttgcactcttcaccgtgtctatcaac

SEQ ID NO: 52423 - DNA, 261 bp, Glycine max
  Clone ID: LIB3109-017-Q1-K1-D11
gggctcaaggaatttcgcttagttctttgcagagaaatcagtgcagatgagagcaaattgaatttagaagccaagatcaagatcagtatggaatatcctctaaggcctcctctttttgcattgagcattagttgtatatcttctggggaaaaccatgatgagacaggtttggagtggtacaatgaacttcgtgcaatggaagcagctgtcaatctacacatactaaagatgttacttgtcaatcaacaaaattatgtattg

SEQ ID NO: 52424 - DNA, 397 bp, Glycine max
  unsure (1)..(397): unsure at all n locations
  Clone ID: LIB3109-017-Q1-K1-D2
ggcaaaagaaagagagagaaatggcactgagggcagccgtgctccgccacgttcgtgtgccactccaagccgctccaaaactgcagccatggcgtgccatgtcatcacacggcgacgatcatctctccaaagaggaggtcgtcgaaagagtcctcgccgtcgtcaaagatttccccaaagtcgatccttccagggtgagtccagatgtacatttccagaaggatttgggtttggatagcttggacaatgtggaaattgtaatggcactagaagaggagttcaagctagagatcccagacaaggaagctgataaaattgactcttgtcatcttgctattgagtacatttctaaccatcccatggctggntaaactaatgtgtccttttcctatttggc

SEQ ID NO: 52425 - DNA, 390 bp, Glycine max
  Clone ID: LIB3109-017-Q1-K1-D3
ggttttgagcatgagtagattgggtggagttggtgcagtggcgccactggtaactgatatcccattatcgtcagtcgaggaagaaggcggtgagggaagaaaccagccagcctgggagaagtggtcaaatgatggcacagaaagacaggtagccaagcttatggaagaaaatgtgggtgctgccatgcagtttcttcaatcaaaagcactctgcatcatgcccgtctcactagcttcagcaatataccagtcacaaccctcaggcacttctagtatagttaagcctgaaactaatcctccttcataatcatagtcagaactctggcacagatgcaccatccagtggtcccatcaagggctcacctaacactgctaggacccacgtgtaat

SEQ ID NO: 52426 - DNA, 397 bp, Glycine max
  Clone ID: LIB3109-017-Q1-K1-D5
ggatgtggaatgtgggaaaccacgaagtagagtttttgcctgaagtgggagaagttgaacctttcaaaaactatctttaccgatatactactccctattcggcttccaaaagcaccagccccctctggtatgcagtcaggcgtgcctctgctcatatcattgtgctatcaagctattctccatttgtgaagtacacgcctcaatacatatggcttaaagaagagctggcgcgggttgatagaaagaagacaccttggctcattgtgctcgtgcacaagccactctacagcagcaacgtagctcactacatggagggtgaagccatgcgatcagtttttgagacatggttcgtccaatacaaagttgatgtcatctttgccggccatgtccatgctta

SEQ ID NO: 52427 - DNA, 334 bp, Glycine max
  Clone ID: LIB3109-017-Q1-K1-D6
ggagagtgagtgagatagagagagacgcctggcaaatctcaatcgaatctcagaaaaatgagagaaatcatcagcattcacataggtcaggccgggatccaggtcggaaactcctactgggaactctactggctcgaacatggcatccagcccgacggcatgatgccttctgactccaccttcggtgtagcccacgacgccttcaacaccttcttcagcgaaaccggatctggcaagcacgttccccgtgctgtcttcgtcgacctcgaacccaccgtcatcgacgaggtccgctgcggcacctaccgtcaactctttcaccccgaacaactca

SEQ ID NO: 52428 - DNA, 399 bp, Glycine max
  Clone ID: LIB3109-017-Q1-K1-D7
ggaagcagctcaggatatggaggaggatggagctgataagggaacttttccaagtacaaggagtgttgagaaggtgggggacatgaagcaagtaaatgatgctgtgaatttgagttttgctactaaggattccgaggaattgaagtcaaggttgagtataatggatgcaaagctaagagaggctgaaggaaccatcatgaagttgaatgaagagaggcgcaggaacatccgagaaaaagatttgctgaagcaagagttggagatgttgaagaagaaaattaagatgaaaagagctcaggagggattcccgttactgtttgtctgtgtggtttcgattgtcagtatggcagtcggatattatattcatccataagggggaattgagtatagtcacagatg

SEQ ID NO: 52429 - DNA, 399 bp, Glycine max
  Clone ID: LIB3109-017-Q1-K1-D8
ggagtgcggtgttggttaaacatgtggaagtttggtgcttgaacttgaacgccgaacattgcgattcagagagagagagagaagagaatggccatggcccgaagagtccctcgtaatgttttgggattggtcaaaaggaacatgtccttcaaatctttggatcccccttcctccctcacccacggaatccacgtctttcattgccccgatgccgttggaattgtagccaagctatccgactgtattgcctctagaggtggaaacattctcgccgctgatgtttttgttcctgaaaataaacatgtcttctactccagaagtgattttgttttcgatcctgttaaatggccacgggtgcaaatggaagaggacttcctaaagctttcacaaacattcaaa

SEQ ID NO: 52430 - DNA, 411 bp, Glycine max
  Clone ID: LIB3109-017-Q1-K1-D9
ggagacatttttttttcctcaccctcaaaatacgtttctttgagtccaaagcgcgcactgtggaaattcttaacacatcgtttggccaaaaccgaaattaacaaaaactcatttttccaatggagtgccagtttttccttcctccttaaaattgttccttcccccattcaatccctttctgcacttcagatctaagaccataattgggttcctcgctctctaaagaacaagggactccaatttgggtactgtactagtttataaagatttcatttttattataaaatatttaagggtgggggctagagaaggagaggaatggggttagttggggtccaagaaaacgggaacggtaatggagatggaatctctgagattccgttggggactaaaacaaaatacattaagatg

SEQ ID NO: 52431 - DNA, 389 bp, Glycine max
  Clone ID: LIB3109-017-Q1-K1-E1
gatacaacagttatagtgtgaactcaactaagaataataataaaaaaagaagaaaaagaagcggaacaatggagctaactcctgcgagtgttgtttggtgacagttgaagtcgaacaaaagacggctagaaacgcggcatggcgtcgtcgaagcttgtctcgacgaatccggatctgccacgggacccttcttcttctatatctcccctttcttctcttctctccgatctgcaccccatggacgacctcctcaagtccatcacccccaattccgtcgacgacttctggaaggggatcgctgccgcctccaccgacaatgccggcggcgtgaccctcgaggatttcctcaccaaggccatccccgtcacagaggaagacgtcagaggtgc

SEQ ID NO: 52432 - DNA, 318 bp, Glycine max
  Clone ID: LIB3109-017-Q1-K1-E10
gggaacagagcgagcgagatcaaaaaatggcatcctctgcttgtaccaaacccatcttcccctctgccttcaccgtctctaagtcaaagctctctcgtcatgttcatgtctccttcacctcccccaaacccatctactaccactacagaaagctctctcatgcctctcaacgttccttggtggtcaacagcgttttgaaaacagttgacccgacacaaacctttttggcggaaacccacctccaaggatgttgggcctttggaaaaaaagccaaccttcctggcttccagaaaactggaaaaggcaggcttgcagggg

SEQ ID NO: 52433 - DNA, 224 bp, Glycine max
  Clone ID: LIB3109-017-Q1-K1-E11
agagaagagaggagaaagcaatgggcattgatagtgaatacgtgatatctcacaaggcctatgcgagggtgggattgcttgggaacccgagcgatgtctactacggcaaaacgatagcgttaagcgtcgccaacttcttcgccaccgtcacgctgcgtcccttcgaccagttaatccttcaaccccacccccttcaagatctccttcatttcttaatggttcct

SEQ ID NO: 52434 - DNA, 295 bp, Glycine max
  Clone ID: LIB3109-017-Q1-K1-E12
ggaaacaatggaagctgttgagttagaaaagcagaaacataataatactagaatggaagttcttgcacgtttagctaaactggagactgccaatgctgatcttgcaagatcccttgcagctgtgcagtggaaccttgaagttgaggttaaacaggtggcagaactcagacaggaaatcactttgaaaggattggtttacgaaaaacttaaaaagggaatggccaattcttggcaaacttggactttaccaaatcaaattggtttaaaagggggttaagttgaaacggaaaatttt

SEQ ID NO: 52435 - DNA, 270 bp, Glycine max
  Clone ID: LIB3109-017-Q1-K1-E2
tgtgatacaacagttatagtgcgaacggaactagaaataatattacggaaagaagaaaaagaagcggcacaatggagctaactcctgcgagtgttgattggtgacagctgaagtcgaacaaaataccgctagaaacgcagcatggcgttgcctaagcttgtctcgactaatccagatctgccactaaaccctagtccttctatatcacccctttcttctctactatccgatctgtaccacatacacaacctgcttaattacattaccccc

SEQ ID NO: 52436 - DNA, 271 bp, Glycine max
  Clone ID: LIB3109-017-Q1-K1-E3
tatgttaaactatttattgtaatgaattattgtattgttaatttttttatttatatgtaaatatttggtccctaaaaaagttaataagaaaaccaagattatatgaaaaaaaaacaaattttctttgttgtttaaaaagaatattcttaaataaaatatttaaatattaaaaaaattaaaaaatataagcttatttaatttaattataatctataaaaaatgaacattttatttaaaatcatattagttgataaaaatacttaaatatgta

SEQ ID NO: 52437 - DNA, 348 bp, Glycine max
  Clone ID: LIB3109-017-Q1-K1-E4
gggagtgaagaagattaacgaaggatggaagctgggtctagcgaaggagaagaggtgcagcatcgcgtgccgttgagggagagagtggagtggtcagatgttacttcggttcctcaaaacgacggccctaaccctgtcgttccgatccagtacactgaagaggtttccgaagttatggattactttcgcgccgtttaccttaccgatgaacgctcccctcgcgccctcgctctcacagtcgaagccgttcaattcaacttcggcaactacactgtgtggcatttccgacggctgttacttgagtcgctaaaagtcgactcgaacgatgaactggagtttgaggagcgt

SEQ ID NO: 52438 - DNA, 390 bp, Glycine max
  Clone ID: LIB3109-017-Q1-K1-E5
gggctcaaggaatttcgcttagttctttgcagaaaaagcagtgcagatgagagcaaattgaatttagaagccaagatcaagatcagtatggaatatcctctaaggcctcctctttttgcattgagcattagttgtatatcttctggggaaaaccatgatgagacaggtttggagtggtacaatgaacttcgtgcaatggaagcagctgtcaatctacacatactaaagatgttacttgtcaatcaacaaaattatgtattggctcatcaagtgaattgtcttgctatgttgttcgactattatttggacgaggcatccccatcatctgaaaggacaaattgtacttccgtggttgatattggcttatgcaagcctgttactggtagattc

SEQ ID NO: 52439 - DNA, 362 bp, Glycine max
  Clone ID: LIB3109-017-Q1-K1-E6
ggggcgaggtagccagagagtgatacaatacagagtgcgttgttgctccttcgccacaactccctgccaacatgggtatctccagagattctatgcacaagaggcgtgccactggtggcaagaagaaggcatggaggaagaagagaaagtatgagcttggtcgccagcctgctaacactaagctgtcaagcaacaagacagtcaggaggatccgggttagaggtggaaatgtgaagtggagggcactgagattggatactggaaattactcctggggaagtgaagctgtaactcgcaagactcgtatactaaatgtggtttacaatgcctcaaacaacgagcttgtgcgtactcagactctt

SEQ ID NO: 52440 - DNA, 231 bp, Glycine max
  Clone ID: LIB3109-017-Q1-K1-E7
tttaggcaatagtagcagcaattcacactggtgtttgcttctcgttactcatttctcacctaactttctattcttctcagtctcagatcagaaccttagccatggcagcgttccagaagatcaaagtcgccaaccccatcgtcgagatggacggagatgaaatgactaaggttatctggaagtcaatcaaggacaagctcattttgcccttcttggagttggacatcaagt

SEQ ID NO: 52441 - DNA, 120 bp, Glycine max
  Clone ID: LIB3109-017-Q1-K1-E8
atcatcttagcgctcatatgatacccgacatgcacaatgaggccgttgatatcgccgttcacccgtttgagaagtacaatgtgcagaaagacgtttcggagcagataaagaagctcccct

SEQ ID NO: 52442 - DNA, 232 bp, Glycine max
  Clone ID: LIB3109-017-Q1-K1-E9
gagcttcaggtcagagagagtgagagacggcaaagacggaggagaggtcgcaaacgcaaaaatggtgaagtttctgaaaccaaacaaggccgtcattgtccttcagggacgctacgccggcaagaaagccgtgatcgttcgaaccttcgacgaaggaactcgcgagcgcccctacggccactgtttggtggcggggataaagaagtaccctgcgaaagtgatcaagaaagac

SEQ ID NO: 52443 - DNA, 377 bp, Glycine max
  Clone ID: LIB3109-017-Q1-K1-F10
ggagcaagagtgaagagcgaagagaatggctcccaagggtttaatctttttggctgtgttatgcttctcagcactgtcactgagtcgttgtcttgcggaggataatggacttgttatgaacttctacaaggaatcatgccctcaggctgaagacatcatcaaagaacaagtcaagcttctctacaagcgccacaagaacactgctttctcctggctcagaaacatcttccatgactgtgctgttcaaagttgggatgcttcactggtgctggactccaccagaaagaacttggcttagaagggaaccgattgaagctctgggttgagaaatttcaaggaccttgagacccttcaagaagctttggaaagggaatgcc

SEQ ID NO: 52444 - DNA, 196 bp, Glycine max
  Clone ID: LIB3109-017-Q1-K1-F11
ggagaacaaaaaaaaaacaactttgcggctgcgctgctgctaatagcgcgttgcatctgctacctatcatacatattttcgccaaaccgccgattccggtgagcgtttctaccgtagcgctcaagaaggaagcagtggctggtggtgttggttgtggtggaggtgggtttgctgatcatttgtggtagaaggtagg

SEQ ID NO: 52445 - DNA, 269 bp, Glycine max
  Clone ID: LIB3109-017-Q1-K1-F12
gggggaaagagagtggattcttggtgactttcttgaccagaaaagtagcaaccgcagcaccaaagactgtgctttgcatctatcgaattctaatccaattctctctgcatctacatatacaatatcataatcgctcataagattgcatttgcattgatttcaaaaatgcagatcaggggatcgagtcacagactctccagtatgggcaataatcgatcccgcattcccgcgctcctcatctacatgttcgccactttcgcttctatcta

SEQ ID NO: 52446 - DNA, 393 bp, Glycine max
  Clone ID: LIB3109-017-Q1-K1-F2
ggagtgaagaagccaaaaagaacttcgccggagctctaacggcgaggcccaactccgatgagccgaaaccggcaccggtgccagctgttcccccgaagaaggtcatcatcaagagcgctgatatgatccccgacatgcagaaggaggccgttgatatcgccgtcgccgcgtttgagaagtacaatgtggagaaagacgttgcggagcagataaagaaggagttcgataagaggcatggccccacgtggcattgtatcgttggacgtaattttggctcatatgtgactcatgaaacaaaccactttgtttatttctacttggatcagaaagcggttttactctttaaatctggctagccttattgtggtagcaaagaagttgagatctatggga

SEQ ID NO: 52447 - DNA, 257 bp, Glycine max
  Clone ID: LIB3109-017-Q1-K1-F3
ggaagaagaagaatcagttccgtcgtgagacactgtcataacataagagtcgtggacgcggttggctgttgctgtctacggttccaacttccaagttacaagcttcacccattttataaaagttacggttcggttccgctgcattcgtgcaacacaaaatgagcgccatctctttcagttccacccatttgcacagttggaaaaatcccaaggcgtttggaaaggtgagaaagcaacgagatgggaagctacttgtc

SEQ ID NO: 52448 - DNA, 401 bp, Glycine max
  Clone ID: LIB3109-017-Q1-K1-F4
ggataatgtaaaggatagaacccaatctgaaatatctagctctacctcggaaaccaagcatttgtgtgtattccttttcagggagttaagtggaagatggggttgtcaacagcacggacaagcataggatcagtttgtgtttgtgccatctcaaagcctccccgccgtcactgccatttcctcccaacctctgtttctcctgtcttctatgttttcaggtttgaggattctttcaccagagattttgcatatcgagtagcttgcaatggttacaacattctagttccagacttatttcgtggaaatccatggacaaaggaccagcacgatccagatgtgttcgaaaaatggattgctagacaaaacccagagaggatcgcacaagacattaccagatggac

SEQ ID NO: 52449 - DNA, 306 bp, Glycine max
  Clone ID: LIB3109-017-Q1-K1-F5
ggagagaaaaaatgaccaaatcaatcaaattctttgagttgaacacaggggccaagattccttctcttgggttagggacttggcaagctgaacctggtgttgtagctgaagctctcaccacagccattcaggttggatacaggcatattgactgtgctagtgcgtataagaatcaagcagagattgggtctgctcttaagaagctttttgatgatggtgtggtgaagcgtgaagacttatggatcactttcaaactctgggggtcaaatcatgcaccagaagaagtgcccaaagccttggattaaa

SEQ ID NO: 52450 - DNA, 390 bp, Glycine max
  unsure (1)..(390): unsure at all n locations
  Clone ID: LIB3109-017-Q1-K1-F6
ggagtaagaataatacaaaaaatataccacggacccgcatatcaccggtatacccacccctctttccactgtaggagggactggagagtcagaaattggaacataagattgagacaccaaaatatagcttactatacacaacactgtgttgtgcttgtgaatctgccttcgaagagaatcagcacagcagcaacaatggaggcgccgccatttgcttattctgcttccacttcctctctcttttctcttcgcaacaagccactctcatcccctacaatcacccatttgggcaacaccaaaccatcaaagagcttctcggttggtgcctcctcttctagggattctgttgtgactntgcttgattacggtgctggcaatgttcggagtgtc

SEQ ID NO: 52451 - DNA, 348 bp, Glycine max
  unsure (1)..(348): unsure at all n locations
  Clone ID: LIB3109-017-Q1-K1-F7
ggagagagagagaagaaagggaaaatggtgaacttcatgttgatgattactgcagagcttgagaacctcacgaatctgcaaccccaagatggctgcgacgaccccaacttctcctacctcttcaagttgaaatgcgggagatgcggagaactgagccagaaagaaacctgcgtcgtcttatacgacaccgtttctctccccgttggcaagagcaccactcatctcattcaaaagtgcanattttggggcagggatggcactgtgaccatgattgaaggcaaaggtaaaccactcacccaggaaatcagtgaatcagggaagtacgccccattgatgttatttgactgt

SEQ ID NO: 52452 - DNA, 248 bp, Glycine max
  Clone ID: LIB3109-017-Q1-K1-G10
ggcatcaaaattgcttattattttggtattagggatgcgatggctctgttctgattgactccactaaggataatacagcagaaaaggattctccagggaatttgagcctgagaggctttgaagtcatagatgccatcaaagaagagcttgaaagacaatgccctggggtggtttcatgcgctgatattcttgccatggctgctagagatgcagttttctttgctggaagcccagtgtatgacatacct

SEQ ID NO: 52453 - DNA, 253 bp, Glycine max
  Clone ID: LIB3109-017-Q1-K1-G11
gaggaaaaaaagaagaaaaaaactggggagatattctgatcagaaaaattggggtttgaactttgaagcattaagggactacgaaggcatcaatttctctttcttcttgggaagaattttcttctgcgcaccgaaattgcatcttctacagtggtccatctgatcttcttctttctgcttctggggtggtttgtctttggatccttgatggaatggaaggagaaagtgtttcaaggtcaagttagtcaccaaa

SEQ ID NO: 52454 - DNA, 297 bp, Glycine max
  Clone ID: LIB3109-017-Q1-K1-G12
gattccactgagtgtggtaatcaatcatcttttgattggtcttcagtactttagtgtgtgatttaattcccagattttgagaatgtctagctgtgggtgtggaagtagctgcaactgtggcagcaactgctgttgcaacaagtactctgttgacttgagctatgttgagaagacaaccacagagactcttgttttgggtgttgggtctgtgaaggcccaattggacggtgctgaaatgggtgttgcagctgagaacggtggctgcaactgtggatcaagctgcacctgcgacccatg

SEQ ID NO: 52455 - DNA, 179 bp, Glycine max
  Clone ID: LIB3109-017-Q1-K1-G2
aggtgctcctttactgggatgacagatataaaaaggatgatgggctcaacactatgggttcaaaccttgctcacatgaacaacgataataatttgtatctcaagtccagctgctacgatcgcgacatttacctacttgcgacgaaaatttgtagccatatagcgctgatctattccata

SEQ ID NO: 52456 - DNA, 354 bp, Glycine max
  unsure (1)..(354): unsure at all n locations
  Clone ID: LIB3109-017-Q1-K1-G4
tcctgaagagtgcgttgaaccaacaaaggactacatggatggcgaacaatttagatcagactctaaaacagttaaccaacaagctttcttttatgctagtgaacgcgaagtccatcacaacgacatatttatattcggcatagataacaccgtactctctaatatcccatactatgaaaaacatggatatggggtggaggaatttaatgaaaccttatatgatgaatgggttaacaagggcgacgcaccggcattgccagagactcttaaaaattacaacaagctgttgtctcttggctttaagattgtattcttgtcaggaagatatcttgacanaatggccgtaacagaagc

SEQ ID NO: 52457 - DNA, 395 bp, Glycine max
  unsure (1)..(395): unsure at all n locations
  Clone ID: LIB3109-017-Q1-K1-G5
ggaagtttgaaacaacaaagtattattgcacagttattgatgcgcctggacatagggatttcattaagaatatgattactgggacatcccaagctgactgtgctgttcttatcattgattcgaccactggtggttttgaagctggtatttccaaggatggacagactcgtgaacatgctctgctttcattcacccttggtgtgaaacagatgatttgctgctgtaacaaaatggatgctactacacccaagtattccaaggccaggtatgatgaaattgtgaaggaagtctcttcctacttgaagaaagtaggatacaaccctgacaagattccttttgttcctatctctggttntgaaggagacaacatgattgagaggtccacaaaccttgac

SEQ ID NO: 52458 - DNA, 205 bp, Glycine max
  Clone ID: LIB3109-017-Q1-K1-G6
aggcgtgcgtacacgtccgagaagacgacagagaggcatgcatctcaaccatgggggctaaggtttcaagatgcggtaacacctataatgcgcggaattatatacttacatcacgacttcttgatcttgctcattgaaagcggccgttatggatcatggctattgcttcgtgctttgtgcaattccaggattaaaatgaacccaa

SEQ ID NO: 52459 - DNA, 395 bp, Glycine max
  Clone ID: LIB3109-017-Q1-K1-G8
ggtgtgagttcattaacatatacaaattctctgtgttgtgttgtgtacttgtgttaattgtgttgctgttgtaggaaatttaagtgaagagagaatgatgatgaagtctgctatgtgtgcattggtgcttgtggcactggttgtggttgaagtggggcccatggctgaggctgtggtgacttgcaacccaacacagttgactacttgtcttccggcaattaattcaggttctgcaccttcgagtgcttgttgccagaagctgaacgagcaaaagccatgcttctgtggctaccttaaaaaccctagcttgaagcagtatgttaactctcctaatgcctaaaaaaccgttagttcttgtggtattgcctatccaacttgttaagcacctgttatat

SEQ ID NO: 52460 - DNA, 111 bp, Glycine max
  Clone ID: LIB3109-017-Q1-K1-G9
aatattgatgagtcttttcaagtgtgggaaattctgtgctaacttaaagcattctgagaggttgaattcgggagtcatggtggtggagccatctgctactctttttaatga

SEQ ID NO: 52461 - DNA, 232 bp, Glycine max
  Clone ID: LIB3109-017-Q1-K1-H1
ggagcgaagagtgaagagaatggctggccaaggtttaacctttctggctgtgttaaatgcgtttcaccactggcacttgattcctttggttgcggggaaaggccaaataatgggcctggtattaacctctaccagggatcatgcccttaagcttaagaccttattaccgaaccaggcaagcttctttaccagcgccaccagaacactgtgttcttctggcttaagaaccttt

SEQ ID NO: 52462 - DNA, 361 bp, Glycine max
  Clone ID: LIB3109-017-Q1-K1-H10
gacactaaacaagttaaaagaagagcatcgctgaactaacaaagcaaccctatgtcgaaggtggtttgtgtcaccggagccagcggcgccatcggatcatgggtggtcctactcctcctccagcgtggttacaccgtccatgccaccgtccaagatatcaaggatgaaaatgagacgaaacatttggaggaaatggaaggagcaaagagtcatctccatttttttgaaatggatcttcttgacatcgactccattgccgctgccataaagggttgttccggcgtaatccaccttgcatgtcctaacatcattggtcaagtcgaagatcccgagaaacagatattggaaccggcgattaaag

SEQ ID NO: 52463 - DNA, 350 bp, Glycine max
  Clone ID: LIB3109-017-Q1-K1-H11
ggagagcgagttgattaaggcaaagggtgtgatgagattagttttgagaagaaaccagcaatcggcgattaggagtgagagagatatggagggaattgaaggaaatagcagcagatacagtctgaaaccctcgcgaatttgcaacgaagatgttctgatctgcgtcgacgtcgatcctcagtgcctcgtcgaaatgaaaggtgccaccggtcccaatggcagacccctcacccgtttggactccatcaaacaagccatcgttcttttcgtaaatgccaaattaaccttcacccccgaccaccgtttggccttcgccattttttccaaaaccttgggtttttggttcagga

SEQ ID NO: 52464 - DNA, 244 bp, Glycine max
  Clone ID: LIB3109-017-Q1-K1-H12
gggaatgggaccaggtaacgagcaaggggtatacaacatggagttcttgtaaatggtatgacatggcttttaaacccaccagaacatgatctgacgttgattttagctgataatggacttgacgtaaggattgcgaacacgatacgaacctggtattgtccgcggcccattttaatggaaccgtcttagccaggcttatgggaatggcctttggaatgaactggcctccaatgatttccttgcg

SEQ ID NO: 52465 - DNA, 221 bp, Glycine max
  Clone ID: LIB3109-017-Q1-K1-H3
ggagagatgcgtgtttgagtctgtgtgtgtgaaggttgaacaagacgcgaagcattcgcaacccccaaaaacgcggcgttttgaacggtccacgacacgaacatggccgaaacgttttctacagaagaggatcacattcatattcccatcgaaattttcagcgacgacgaatgggctttaattgaacctgttttcgcttttgcttccactcgcactttctt

SEQ ID NO: 52466 - DNA, 344 bp, Glycine max
  unsure (1)..(344): unsure at all n locations
  Clone ID: LIB3109-017-Q1-K1-H4
gatagcatcctaagatacagagactgtcaccatcgtcctgctcatttggcacatgcttctccccctgaatactttgtccgcctggagaacacaacttacaaagacgatctatatttaaggaagaggacaaggatgcgtcggtggctttgttgtacttgtcaggtggaagagtcttacccatcaaatgaaaatgaacacctgaaaagcccaaggaattatggagatggcaaccaaaaaggctcaaaggtgtcagctcctgtcaaacctgaaacacanaaggcacctncacctattgaagctccaaccttgtctntagatgagctgaaggagaagactgacaactt

SEQ ID NO: 52467 - DNA, 402 bp, Glycine max
  Clone ID: LIB3109-017-Q1-K1-H6
ggcacaagtgagtttgttgatcgagataactggaaacagtgtgatgaaaatgaaagtccttgttttcttcggtgctacaattttggtagcatggcaatgccatgcgtacgatatgttccctctccgaatgaacactggctatggtgcccgtactccggaagtgaaatgcgcaagttggaggcttgctgtggaagcacacaacatctttggctttgagaccattcctgaagagtgcgttgaagcaacaaaggaatacatccatggcgaacaatatagatcagacttccaaacagttaaccaacaagcttacttttatgccagagacctcgaagtccatcccaaggacacatttgtgttcagtatagatggcaccgtactctctaatattccatactacaaaaa

SEQ ID NO: 52468 - DNA, 381 bp, Glycine max
  Clone ID: LIB3109-017-Q1-K1-H7
gaagtgtgaagcactgagcattgaggaaatgggatcccttgggagagcgatctacagcgttggtaactggattcgagaaactggacaggccattgatcgtctcggttcccgtcttcagggcggttactacttccaagagcagctctctaggcatcgaactctgatgaacatatttgataaggctcctgttgttgataaggatgtatttgttgcgccaagcgcctccgtcattggagacgttcaacttggaagaggatcatccatttggtatggagttgtcttgagaggtgatgttaacatcatcagagttggaaatggaactaacattcaggacaactctctggtgcatgttgcaaagtcaaatttaagtgggaaggtgtt

SEQ ID NO: 52469 - DNA, 209 bp, Glycine max
  Clone ID: LIB3109-017-Q1-K1-H9
gaactacaagtggaccaaagtcgcaaagagcaacgcgaattcaaaacccagaagaagtagaagaaactcgcgtcgtgtggtgaatcaaattcaatccgcagaagaaaacatgttactctttgcaacacttcttctcttttctctgcaatcgagtatcttaacaccgattccagtaaaacccactaaactctcttcgaatctcttcgtca

SEQ ID NO: 52470 - DNA, 299 bp, Glycine max
  unsure (1)..(299): unsure at all n locations
  Clone ID: LIB3109-017-Q1-K2-A4
atagggatagggttaaggccatggagcgcatcatcggcgccaagtacaagctatgtcgcaagatcggaagcggatccttcggcgaaatctacctcgccactcatattgataccttcgagatcgtcgccgtcaagattgaaaacggtaaaacgaagcatccgcaattgctttatgaggccaagctctacaatattcttcaaagaggaagtggaatcccgagcataaaatggtgtggtgtagacggngaggataatgtgcttgttatggacttgctgggacctagtcttgaggatcttttt

SEQ ID NO: 52471 - DNA, 188 bp, Glycine max
  Clone ID: LIB3109-017-Q1-K2-B1
tcttgaatttgatcatcatgttttcaagagtctctacaagcaagtcactgagcttaaactactattcaaaaacatgccctgatgtggaatgcattggtgccaaagcagtgaaagatgccactggtatggacaaaactgtttcaactgcacttttgcgaatgcactttcatgactgtttcggtcggggg

SEQ ID NO: 52472 - DNA, 251 bp, Glycine max
  unsure (1)..(251): unsure at all n locations
  Clone ID: LIB3109-017-Q1-K2-C6
gatccttgagttggataaagcaagtcggaacttctatcatcttgattttgcaggatttgaatcatctaaatgtgcagagtacatttcaaaggataaaatgtaataacaattgttatcaatgattgagattttaataaaaatatgtgtaaaataaattgaaatttattacaatctcaatcgttgattaatcagcaattactattctctactttattctatgtagggtacaatttagagtcaaccccnnanaa

SEQ ID NO: 52473 - DNA, 251 bp, Glycine max
  Clone ID: LIB3109-017-Q1-K2-E2
tcgacgtgaaaacacagggggcggggtacaggagtgggtgactgcgcgcatggataaagagagaaaaaaggcatgccgaagtcctgtatgtttggatggcaaagacatgtcttaattttgatcccttctcctcaccaggaatcacgttttattgcccatgcgtggaatgaccagctatcgctgtttgctctaagtggaacatttcgcgtatgtattgtctgaaataacatgtcttctactccagaagtgat

SEQ ID NO: 52474 - DNA, 193 bp, Glycine max
  unsure (1)..(193): unsure at all n locations
  Clone ID: LIB3109-017-Q1-K2-F1
atgaaagactagggtatctggaagtaatcaaggacaagctcattttgcccttcttggagttggacatcaagtattatgacttangccttccttaccgtgatgagaccgatgataaaggtacaattgaaagtgcggaagcaactctcaagtataatgtggcaattaagtgcgcaactattactccagatgaagc

SEQ ID NO: 52475 - DNA, 57 bp, Glycine max
  Clone ID: LIB3109-017-Q1-K2-F2
ggaggggagaagcccaaaagaactttggcggagctgttacggcgaagcccaacttcg

SEQ ID NO: 52476 - DNA, 140 bp, Glycine max
  Clone ID: LIB3109-017-Q1-K2-H8
gggggatattttttttttggtttaacaggcattttttaaattaaaaagaattgatttttcaatccataaaaaaaatttgaagcttccaatccccaggggtaaaaaaggcccatggaaatttatatacaaaatttgggggg

SEQ ID NO: 52477 - DNA, 403 bp, Glycine max
  Clone ID: LIB3109-018-Q1-K1-A1
gaagaagggttctttcttccctgcgaagattcagagtgctaagtgtgagagaaagaaaatgccaaagtctcaatttcgaaccccatttcttgtttctttttctcttttgttattcatcttcaacctcaccccttcatacgcactctatggagcatccacacccgtgcttcaactcactccctctaacttcaagtccaaggttctgaattcaaatggagttgttcttgttgaattctttgctccatggtgtggacactgtcaggctcttactcctatatgggagaaggcagctactgtgttgaaggcgtgtgttactgttgcagcaattgatgctgatgctcacccgtctttggctcaggaatatggaattagaggatttccaactataaaaagtgttgcacct

SEQ ID NO: 52478 - DNA, 107 bp, Glycine max
  Clone ID: LIB3109-018-Q1-K1-A10
ggggtttctgaagatcaaatcctcatcttctaccatgtcaagtgctcactttcttcggccatttttatttgtttgttggtttaacaaaacccataatcagaacccat

SEQ ID NO: 52479 - DNA, 259 bp, Glycine max
  unsure (1)..(259): unsure at all n locations
  Clone ID: LIB3109-018-Q1-K1-A11
ngggtgttgtgttaatctcattcacacattcacaggtatactctctctctctttgtcgcttggatcactgatctcatctcaattttcagatatgtcgacatctgataagccagaagtggtggaaaggggtagcaaggatgaaaaacacaaggaagatgatcaagaggaggggaagggtggattcattgagaaggtgaaggatttcattcatgacattggtgagaagattgaggaagctattgggtttgggaagccaact

SEQ ID NO: 52480 - DNA, 378 bp, Glycine max
  Clone ID: LIB3109-018-Q1-K1-A12
aaccaaaaatggttctcacatccactgccacacacccagatgaacaagaccagaggctaaactatacttttgcttccagatatgtgcgtgaacctattccaaagttcaagatgccggagaaatccataccaaaagatgctgcttatcagataataaacgatgagttgatgttggatggtgcaccaagggctaacttggcctcggttgtgaccacttggatggagcctgagtgtgacaagctcataatggcttcacttaacaagaactatcttgacatggatgagtatcctgttaacactgagcttcagaaccggtgtgttaatatcatagcaaatctattccatgctcctataagtgatgatgagactgcaataggtg

SEQ ID NO: 52481 - DNA, 389 bp, Glycine max
  Clone ID: LIB3109-018-Q1-K1-A2
ggatagagagatggcagctgcaacatctggtgctgtgttaaatgggttgggatcttccttcttgagtggaggaaacaggagccaaacccttctggcctctgctattggaggcaaagttggtgctgctgttactgttaatcccagaagactcattgtggtagctgctgctgcaccaaagaagtcatggctccctggtgttagaggtggtggcaatctcgtcgacccagaatggcttgatggatcgctaccaggtgactatggttttgatccactaggccttgggaaggacccagcattcctcaaatggtacagagaagctgagctcattcatgggaggtgggcaatggctgcagttctaggaatctttgtggggcaggcatggagtggag

SEQ ID NO: 52482 - DNA, 365 bp, Glycine max
  Clone ID: LIB3109-018-Q1-K1-A3
caatgaattgaatttagcacataacaaattcacaggtgctttgcctgacttaactggaatggataccctcaactatgtggatcttagtaacaactcttttgatgcatcggatgctccaacttggttcacaattcttccatcactcaccactcttattatggagtttggatcccttcaaggtactcttccatcaaaactctttgacattcctcaaatacagcaagtgaaactacgaaacaatgcattgaacaatacattggacatgggtgacaacatttgtccccaattgcagcttgtagatttgcaagacaatgagatttcctcagtgacactccgttcacaatacaaaaatatattgattctta

SEQ ID NO: 52483 - DNA, 429 bp, Glycine max
  Clone ID: LIB3109-018-Q1-K1-A4
gagaggattggatttaaaaaagaaaagacaaaaaccgcattgagtggggcctgccctaaaatggcccttacagagcttctctatcaagagctgctagttggtggttgaggagtaataggttccgcataagctacatttcgtgggggaggcacctatccagtacttccgaactcgtctttcatctacagacattgggtcgctaaagccaatagttcggtgtccgggcaacagccaagccactcatctttggttgcagcttcggcggaagcctatgctttcagttcagttccattccttggttctccggttgattgccctgcccgcgtcacaccttaaaaagctttggaacggcagtttcacttacttctcacggacattggaccttcttcaaactggcctttgaactttagcaaagagtctattggatag

SEQ ID NO: 52484 - DNA, 159 bp, Glycine max
  Clone ID: LIB3109-018-Q1-K1-A5
aggggttttaaaaaaccaaccagccaacccgttccaagggggggatttggaattggaaaggcaaggaattcccctcgtgttcttccctttacttttgaattaaaccctaattaataactttccaatccaccaccttaagcttacaattacaccttcccc

SEQ ID NO: 52485 - DNA, 395 bp, Glycine max
  Clone ID: LIB3109-018-Q1-K1-A6
ggagaagaagaagaagaagaaacgaggggtcttcgaagaaaccatgagtatcctctctctctaaactctctcagattcgatcctctcttctcttctttcaaatccgcttccctcgcactaaatgacagggtttcctggccctcgccgcgatcacgcttcttcttcctcctcctcgacaattccaacagcagtggtagcaacgtatttaatttgcttgcaaggaaggagatctcaccccgaacaagatatgtggcaaaatggcattggggagaacccggtgaagcttcaaaatcaaagtctattgcttattctcgtcctaaaaaagaagttgtgagagatgcaagacgtggtctcctctcatgggttgaggctgagccattgcggcatttgtctgc

SEQ ID NO: 52486 - DNA, 398 bp, Glycine max
  Clone ID: LIB3109-018-Q1-K1-A7
gactctaggtgggtggaggtactttatgatctatggtaaatctctaatagtagctgcgcatttctggaattgcatacttgcggactgtggaggatgacaaatctcgattatgttgtagcttgccgcacagatagagacagattcaaaatctgtcttgcacaggtgtggaagatgtgcttatagatggaccctttctctgtcccatttactacagttactcctaatgttggaatgagttagacagaagtaacatgcagatttgtattcttctggcaaaatggatactccgcttttgcttcatgttctctgattagttggggttgatcttctggactacagtgtgaatctgatatgcgagaaccctattactaccaggattggcgttatcgacgatgcaa

SEQ ID NO: 52487 - DNA, 394 bp, Glycine max
  Clone ID: LIB3109-018-Q1-K1-A8
ggaagcagaagccaaatggcaccgggccgtcattccataaaccccaaaacccatggcgactttgacttctaaaaccaacgtcgttttcatagacaccaacctcgatacccacttggccctcgtcgtttccgacctcgacactgtctgcaaccttaaaaagagttttctgtcggaacatccttaatgctttccgaaaattgggaaaattcagattcatgggataaaggttgagcgcatggggtacttttaccaccttacagattccatgcctgtgagaagtgccttcagtggtgtcaaagagagctggtttctcactgttgatgtttctgtgttgagggagtgtgctcagaatgactcaatattttctctgggcattgcaaataatgctttgact

SEQ ID NO: 52488 - DNA, 384 bp, Glycine max
  Clone ID: LIB3109-018-Q1-K1-A9
ggggtctctgaagatcagatcctcatcttctaccatttcaggtgctcactttcttcgcccatttttatttgtttgttgttttaacaaaacccataatcagatccgatcctcttgagattgggatcaacgccgagtccatgagcacgccagcgctttcagggggcacgggcctcttctctgggttcactcggttatgcaagggccttgcggtggtgcttggttgcggtcacattgcggttcagttttttccttcagctgctaactacctggctcttattcccgccaggacaatcccatttgcctggaatctcatcacagctgggtatgttgaacaatctatatatggggtaatggtcaacacattaagtctcctgggtattggga

SEQ ID NO: 52489 - DNA, 388 bp, Glycine max
  Clone ID: LIB3109-018-Q1-K1-B1
gacacagggtcctttcttacctgctaagattcagagtgctaagtgtgatacaatgaaaatgcctaagcctcaacttcgaaccccatttattgaatgtttcactgttttattaaccatcatcgacgttacctctgcatacgcgctctatggagcatccactcccgtgctatagctcactcactgtgacttcaagtccatggatctcaattcagatggagttgtgctcattgaatgctttgctccatggtgtggacactgtcaggctctgactgctatatgggataaggcatctactgacttgaacggtgtcgttactgtggcatcaatagatgctgatgctcacacatgtttggctcacgaatattgaatcagaggattttcaactatt

SEQ ID NO: 52490 - DNA, 233 bp, Glycine max
  Clone ID: LIB3109-018-Q1-K1-B10
gatagaaaaaaataaaaaactttgcaaagattttatccaattggaattttaaaaatgactgggataaacttaagaattcaattattgaaattgaataaggtaaccatttaattggattggtccaatggtattaaaaaatggagtacttacttccaattcctatttattattggaatacccgaccacttggtttggtatcggaccattttttttggatttcaaaaattttccgg

SEQ ID NO: 52491 - DNA, 162 bp, Glycine max
  Clone ID: LIB3109-018-Q1-K1-B11
gacaacagagtgtgataatagtaagacagaacacctactcactcgtaaatggcgaggaagaagatcagagagtgccactccaagaggcttctcaaggagcatcttaaacgtgttgactatatcgacctgcaaatgctctcagctcaagggacagaatctacg

SEQ ID NO: 52492 - DNA, 409 bp, Glycine max
  unsure (1)..(409): unsure at all n locations
  Clone ID: LIB3109-018-Q1-K1-B12
gatggacttgatcattttcgtctatctccgacacaactccgtgcagagttcacaaggcgcaatgcggatgctgtgtttgccttccagctccggaatcctgttcacaatggccatgctttgctaatgactgacacccgaaagcgccttcttgagatgggctataagaatcctgtcctcttgcttcatccacttggaggctacaccaaagctgatgatgtcccacttgattggcgaatgaagcaacatgagaaggtacttgaggatggtgttcttgatccagagacaactgtggtatccatattcccatctcccatacactatgctggacccacggaggtgcagtggcatgcaaaggctaggatcaatgcangggctaacttctatatcgntggtcgtgaccccgcaggca

SEQ ID NO: 52493 - DNA, 394 bp, Glycine max
  Clone ID: LIB3109-018-Q1-K1-B2
gatccaaaaccatttgatcctaaaacatatgtggaggaggatacttttgtaaccgatgaatctggaaccagaaaacgcatacgtttggagaacaatattgtacgctggaggactactaaaaatcctgatggcacaacatcatgtgaaagcgatgctcgctttgtgagatggtccgatggcagcctgcagttgctaattgggaatgaagttcttgacatatcagtgcaagatgcacagcatgatcaagcacatctttgtcttagacatggaaagggtatcctccaatcacaaggaaggttgttaaggaaaatgaggtttatgccatcttccttgtcatcaaattctcatcggctgttgactgcccttgttgactcaaggcataagaaggttttta

SEQ ID NO: 52494 - DNA, 356 bp, Glycine max
  Clone ID: LIB3109-018-Q1-K1-B3
gatacaaaaacattagatactataaaacatgaaaattgcgaggatctttcttctctccaccatcgttgcgttgtgtttgcgtgtctctccgtaaattgccttcgactgtgacaacacgcaccgatcgccatgaacatcttcaccaagaaacccaccgccaaagaggctcttcgtgagagtaaacgtgaaatgacaaacgccagtagaggtatagagaatgaaattggagctctacaatcgggagaaaaaaagcttgttgctgagataaagagaactgctaagacgggaaatgaggcagcaactaaaattctagctcgccagttgatcaggcttaggcaacaaattgctaatcttca

SEQ ID NO: 52495 - DNA, 116 bp, Glycine max
  unsure (1)..(116): unsure at all n locations
  Clone ID: LIB3109-018-Q1-K1-B4
tgaacaaaacaagtgtttcgaatagattatcctaagtgtttgggaatagtgctgcaatggcttcaagtcacgaggaggtgacccttttgngagctactggaagcccatttgtgtgc

SEQ ID NO: 52496 - DNA, 409 bp, Glycine max
  Clone ID: LIB3109-018-Q1-K1-B5
ggtttgagaaatgaaagacatttgacatcaacggatgcccaagatggcagcatatcagtgaacttgccccaagagccaagatataaaagggattcactttcaaatcagcttcctgtgtttgtccctggtggatttgagaataaccttcaacctcgttctggcatgaattaacttatgttgttttgagattccaatgagtggacaaagtttttgttggaatcgaaaggatagtgaagagcaattaaaagagtctatgtggtagacacgattttagcctttaagaccatacaaatgaaaagtatggtgaacaacatccgactccaacaggttgttgtttattcggcctaatcatctagggttaacgtgtgttgtcatcaaaatccatctgggcgtttgagagaatgaaatc

SEQ ID NO: 52497 - DNA, 53 bp, Glycine max
  Clone ID: LIB3109-018-Q1-K1-B6
ctgcggattgtgaaattagaaacatttcacaggtacaaaggccctctatggaa

SEQ ID NO: 52498 - DNA, 112 bp, Glycine max
  Clone ID: LIB3109-018-Q1-K1-B8
gggcaacctggatttggactgaatggaaattttaagaaagagaagagagaaataattttcccggaaaattcaaagtccaatcgggacccggaatgaataagggttgggttct

SEQ ID NO: 52499 - DNA, 251 bp, Glycine max
  Clone ID: LIB3109-018-Q1-K1-B9
cgaagagaaaaagagacaaggaccgtctagaattgatttcattgagtgtagcagcaaccaattccatttccagtttctgattcgtcaaacggacaaaggaagtgaaagggtttagggtgtgacctgagatcaacatgttgcggaggcttctctcttctcacctcaaaaccctagccggcaccgcttcttcttccacttcccgatctgctttcggcggcggcagattcgccggtttcttttggttcttccgg

SEQ ID NO: 52500 - DNA, 348 bp, Glycine max
  Clone ID: LIB3109-018-Q1-K1-C1
gacagcggagcatttgatagatggaaactgcaacagcctttggtgtgctaccctgattatgcctaatcataagcttagaacgacacacatggaatcttccattgctctagtgactatcattgatgttatctttgtctacatgctcattcaaggagccactgctgactatggtagtagtcacagtgcttatgccactatttatgtcgatgctgatgcttctggcacaatgggaggagcatgtgcatatggaaatcactatagccatcgctatggaactgacactagggctctaaccactgctttggtcaacaatactttaacctgtggagcttgctatgcaatgacatg

SEQ ID NO: 52501 - DNA, 340 bp, Glycine max
  Clone ID: LIB3109-018-Q1-K1-C10
aatgtggaagctgacctattatgctgcacatggggcattgggtcttaaaattacgtaccatgaaccctcgttcactaatacgaagccatacttcaatgactggtcaaatcatgagtcgaagagttcactactgttgtactacatgtgccagtgtcggctctacatatatagcattgctgctattctcacatgggacactcgaatgaaggatttttcaaagacgtttacttaccatgtaattactgcactactgattgggatctcatatctaacaagtatctttagggatggctacataatcctcgcccttcatgatgcacgtgacgtattcatggaagct

SEQ ID NO: 52502 - DNA, 280 bp, Glycine max
  unsure (1)..(280): unsure at all n locations
  Clone ID: LIB3109-018-Q1-K1-C11
ggttctagtgtgtgattgtttgttgttgtaactcgttcttcttcttttgttgttctgtgtttgtgtttgttttttctctcacctgaaaatgtcttgctgcggtggtaaccgtggttgcggaagctcctgcaagtgcggcaacggctgcngaggctgcaagatgtacccagacttgagctacactgagtcaaccaccaccgagaccttggtcatgggagtggcacctgttaaggctcaatttgagggtgctgaaatgggtgtgcccgctgagaacgatggc

SEQ ID NO: 52503 - DNA, 318 bp, Glycine max
  unsure (1)..(318): unsure at all n locations
  Clone ID: LIB3109-018-Q1-K1-C12
gacacacataaaagcatgtgtggactttacaaggccatgatggagagggaagaagagctggctataatgattttcatgttcccatgttctgctgaccagccttgtaagtggcttgaatcattaggtgtccaccagaagggtatgtggaggagaaagtgcagttgctattcacactgcccttttggtctcctttctgggaaaggtgggctgcaagaactatggggtggaattgatgaatttgaataccctcatgattctncatttaataaccatttcatctcaagcccatttcttctctctgggtggtctgagtactac

SEQ ID NO: 52504 - DNA, 376 bp, Glycine max
  unsure (1)..(376): unsure at all n locations
  Clone ID: LIB3109-018-Q1-K1-C3
ggatgatgatgcgttggcagtggtggaaaccaaagacgggaaatcggtaacgttgtctataatgagacagggtgttaacggctagaaacgaaggaaggagtaacataaaatggaggttcaatttgccctcccattccactaacacacatcacatctccctctcgcacgcgacgagggagctacgcttcggaatctcactccctctttctgctaattgacaagatggttgctcagaaattcgttgttgatttgaacaagccccttgtgttccaggttgggcatcttgtggaagcctatgatgagtgggttcacgatcctatcgtaagcaagggaggccctacgtttttccaaaatgggtntctcgagttggtcacgc

SEQ ID NO: 52505 - DNA, 389 bp, Glycine max
  unsure (1)..(389): unsure at all n locations
  Clone ID: LIB3109-018-Q1-K1-C4
ggggagatagatggcacgcttgtcactgctcattttcgcgttctgcgccgtcggcgtcgccgtcgccgtcgcgggcttctccttcgatgatgccaaccctatccgtttagcgtcggacttggagtcgcatgtgctggacgtgatctgacagagccgncacgctctctccttcgcccgtttcgctcgccgncacggcaagcgctaccgttccgtcgacgagatccgcaaccgctttcggatcttctctgataatcttaaactcatcagatccaccaacaggaggtctctcacctacacgctcggcgtcaatcatattgctgactggacttgggaagagttcaccagacacaagctcggcgctcctcaaaattgctctgccacgctcaaag

SEQ ID NO: 52506 - DNA, 417 bp, Glycine max
  Clone ID: LIB3109-018-Q1-K1-C5
gacactaaacaagttaaaagaagagcatcactgaactaacaaagcaaccctatgtcgaaggtggtttgtgtcaccggagccagcggcgccatcggatcatgggtggtcctactcctcctccagcgtggttacaccgtccatgccaccgtccagatatcaggatgaaaatgagacgaaacctttggaggaaatggaaggagcaaagagtcatctccatttttttgaaatggatcttcttgacatcgactccattgccgctgccataaagggttgttccggcgtaatccaccttgcatgtcctaacatcattggtcaagtcgaagatcccgagaaacagatattggaaccggcgataaaaggaacggttaatgtgttgaaggccgcgaaggaagcaggggtggagcgcgtggtggcgac

SEQ ID NO: 52507 - DNA, 85 bp, Glycine max
  Clone ID: LIB3109-018-Q1-K1-C8
agggccccagttagggtggtgatccaaataacttggaaccatgggatgaaaaataaagggcctggtttctttggtacttccattt

SEQ ID NO: 52508 - DNA, 280 bp, Glycine max
  Clone ID: LIB3109-018-Q1-K1-C9
cgggacggaaagaatgtgcatcagcccttgacaatggctatgggggctgaatcaccggaatctgacagtgacaacaactccttaaaaaccaacaatcctcaaaccctcaatgaaacggcgccatttcttgactacgctcttgcgcaggtccagctttaccacaaggtcttcaacgactccgtccattcgacaatcgatactgcaaaatcccgcttctaccaaaacctgtcaacttcttccggccactttcaccagaccttggattctgtggatgaactca

SEQ ID NO: 52509 - DNA, 334 bp, Glycine max
  Clone ID: LIB3109-018-Q1-K1-D1
gacaaatgggaatcatcttaattcttaactacaagagatagagagagagagagagagagagagagaggaagtgagtgaacatcatggattcagagacgagtagaggtgcttctttgacagtgaagtatttgcagatggcgatatggtggttctcagtgatgatctttgttgggtatttaatggttaggattgtgatgcccaccaacatcttgtttccacatggatattcagatgttcaagctacggcagattcaatatacttcggcagacatgggacaaccatactcatttacacgattccaatgttattaatagccactatagctaggctata

SEQ ID NO: 52510 - DNA, 259 bp, Glycine max
  Clone ID: LIB3109-018-Q1-K1-D10
gacgatgagtcgatttgataactaagatattgatattcgtgatattgatccaatttgatatcatcgaaatccaatttataccattgttgaattaattatcgatgaaagatttatcatctctatgggattaaattccgaattttttattggaaatttaagagaaataaaacataattaagattatgggaggtaatattcctgcattattgctactgcactggatatctaggtactactgctttttacttataatttacgt

SEQ ID NO: 52511 - DNA, 263 bp, Glycine max
  unsure (1)..(263): unsure at all n locations
  Clone ID: LIB3109-018-Q1-K1-D11
ggggttaaaatggaattggtggatgctgcattccctcttcttaaaggtgttgttgccacaactgatgtggttgaggcatgcactggggtcaatattgccgtgatggttggtggattcccaagaaaagaaggtatggagaggaaggatgtgatgactaagaacgtctccatttacaagtcccaggcttctgcccttgaaaagcatgctgctgccaactgcaaggttcttggtgntgctaacccagcanacaccaatgcattgat

SEQ ID NO: 52512 - DNA, 248 bp, Glycine max
  Clone ID: LIB3109-018-Q1-K1-D12
cctctaaagcagtattttgctggtgattttcatctgcaatggagttctgaatctatgatgatgggatttctcatttgaacccccagagatggacaagaaagagcatattgcaatttttactactgctagccttccatggttgacaggaaccgctgtgaaccctttgtttcgtgccgcgtatctcgccaaaagtggggaaagagatgtcacttttggtgatccccttgttatctctgaaagatcaaaag

SEQ ID NO: 52513 - DNA, 328 bp, Glycine max
  Clone ID: LIB3109-018-Q1-K1-D2
gggacatggaaaggtggaagggagaaggctcctgctgctttttgtcgtaaagttatcacttcctctgatagatttgagatgtggggggatggattgcaaacacgatcatttaccttcattgatgaatgtgttgaaggggtgctcagattgactaaatctgatttccgagagccagtaaatattggaagcgatgagatggtcagcatgaatgagatggctgagatcattcttggctttgagaacaagaatattcctattcaccacattcctggccccgaaggtgtccgaagtcgtaattcaaacaatacacttattaaagaaaaacttg

SEQ ID NO: 52514 - DNA, 429 bp, Glycine max
  Clone ID: LIB3109-018-Q1-K1-D3
gaatatgaaaaagaaaaaaaagattctaaagaaatgtaactaatattctttagaataatcaaaaagaatattaaattcaaataaattttagatagaaaaaagacttaaaaaggaggatttgaaatgcgagatctaaaaacatatctttccgtggcaccagtagtaagtactctatggttcggggctttggcgggtctcttgatagagatcaatcgtttttttccagatgcattgatattcccttttttttcattctagttattgacacggaaaggggtgaagaagattatagatccaattaagtattaaatatatgtaattaatatgtaattaatctcctcttctttatttcgtcttttatttcttcttttttttacaattggaatagaataagttaggaaagagaaagaataaagggtaatttggcct

SEQ ID NO: 52515 - DNA, 311 bp, Glycine max
  Clone ID: LIB3109-018-Q1-K1-D4
gttggggagaacatgcagcctaatgtcatatcatcgaagtcatcttcagattctgagaattttgctgagtctcaacttgttcccaagatgccaaaacaagcttctgaggagcctaagaagaaaaagaaagtgaagctgccacttccattagttccagctgataacaatcaaaatgcctcacaacctgttaggaaatgcatgcattgtgagataaccaagacaccacagtggagggcagggccaatgggaccaaaaacactatgcaatgcttgtggtgttcgttacaagttcggccggctctttcccgagta

SEQ ID NO: 52516 - DNA, 396 bp, Glycine max
  Clone ID: LIB3109-018-Q1-K1-D5
acaccgaaggggaggctaaaggagattacagggaaagtgggaaacaggagcttatcccaatgggaatgggccaaattggataccattcaccatagatatcaaaggctgaaattaaaccaattgattgtacatctgacgcgaaaacacattaggcttacctagaaaagctaatgacgtatcgattcaatgtacaaatatgtagaactgagtaacattttagaccttgatactcacacaaatgacgtaacatccatcttaagtgatacaattcaattgctaaaggaccttacttctgaagtcattcaacttatacatgaatatgctactctaaattaagaatcttaggagttggcttactagaaacattaactcagagaatactaggcttgtattaaa

SEQ ID NO: 52517 - DNA, 244 bp, Glycine max
  Clone ID: LIB3109-018-Q1-K1-D6
ggaacctttgggtttctggtttcccttttttggggggccaaccggtccttcctcgcttcaattggtgggtgccttgtccaacttgttgtgaaagaaattgccaatggggaccagccagttaaagctgatgccattccaaaaggaaacttttagggttgcctggattcttcagaccggcgaaaatttggttaaccaatattccataccggggttaatggaatctgaaaccagttccaaattgcca

SEQ ID NO: 52518 - DNA, 424 bp, Glycine max
  unsure (1)..(424): unsure at all n locations
  Clone ID: LIB3109-018-Q1-K1-D7
tgggaagtccccaaagaagaagtttctaacttttattgggctaaccaaaaggctaaactattttaatggtgactataaatagatcaatccaaacctgcggacaggtataggttggcttaaaaccaacatgaaacctgttaattgtgtaagcgatgcctgaatcaaagaaattcttgtggctgggcataattctgttgataaaactaaagtagataattcagtggcttgcgatatcaaatttaaaaaggataagatcagtgaatcattgaaagttcttgaaaatctaattcctggtgcataaggaaaggtgccactgttagtcattgatggaactatngagtacttgaaaatnttgatgtcccaaactggtgctcttgggtgaaatatcactaagtagtactcacagtcacagncactgatacag

SEQ ID NO: 52519 - DNA, 408 bp, Glycine max
  Clone ID: LIB3109-018-Q1-K1-D8
gataacatacaagatcaaaagataaaagtggaacacatggccacactctgtggctttacctacatcaccggatcacagaacagaatcgatatcgaaaatctcgctcgctttgctgttgatgaacacaacagaaaagagaatgcagttctggagtttgtgaaggtgattagtgcaaagaaacaagtggtttctggcaccttgtactatatcacttttgaagcaaatgatggtgtgacgaaaaaagtttatgaaactaacgtggtggagaaaccatggttgaacatcaaggaagttcaagaattcaagcccatcacttgtgctggtaaatccttttcggtgaccggctagcacataactaggttatggagtgactagcttggcccgaagaataataatatgtatgaactg

SEQ ID NO: 52520 - DNA, 349 bp, Glycine max
  Clone ID: LIB3109-018-Q1-K1-E1
agtcacaagtatggtcttgtctaccctggtgttggttgggttgtatggaggagcaaagatgacttgccagatgaacttgtttttcacataaattatcttggatctgatcagcccactttcacattgaatttctccaaaggatctagtcaaattattgctcaatattatcaattgattcggcttggctttgagggttacaaaaatatcatggaaaattgctgggagaatgcaagagttctgaaggaaggaatcgagagaacaggtcggtttaacatcatctccaaagatatcggtgtgccaattgtagccttctgcttgaaagacaatagtcaacacacaagtgttgaga

SEQ ID NO: 52521 - DNA, 210 bp, Glycine max
  Clone ID: LIB3109-018-Q1-K1-E10
ggtgaattgaagctcaaatgaattaaggtttaagactaaggaaacaagggggaagaattgaggaagtggaggagtaacaaaacaagtatgtcagaatcaaacgcaattgcaaatggtttggctggtgcaagtggtggaattattgctcaaatcataacttatcctcttcaaacggtaaacacgcgccagcaaactgagagaacactcaag

SEQ ID NO: 52522 - DNA, 115 bp, Glycine max
  Clone ID: LIB3109-018-Q1-K1-E11
gacggctgaaaactcacaatcatggcagtactagaattatgatgattgtaaggcagcatatctgaatatgatcatgatgagttaaggaggggttacaagcaagtgaatgaactta

SEQ ID NO: 52523 - DNA, 224 bp, Glycine max
  Clone ID: LIB3109-018-Q1-K1-E12
ggttctagtgtgtgattgtttgttgttgtaactcgttcttcttcttttgttgttctgtgtttgtgtttgttttttctctcacctgaaaatgtcttgctgcggtggtaactgtggttgcggaagctcctgcaagtgcggcaacggctgctgaggctgcaagatgtacccagacttgagctacactgagtcaaccaccaccgagaccttggtcatgggagtggcac

SEQ ID NO: 52524 - DNA, 158 bp, Glycine max
  Clone ID: LIB3109-018-Q1-K1-E2
aggcgtgagaacacctccgataggacgacataatattgtcacatgtataatcgctcccgcggctttgttcctaaaattatcactagctgcgataaatactagacatatgaacatggatttcacacactatcatttacctctaatcatgaatgttttac

SEQ ID NO: 52525 - DNA, 412 bp, Glycine max
  Clone ID: LIB3109-018-Q1-K1-E3
gagctcaaggtggagctaaaattaagagcccgggaaagaaaggatcaattcatctggtcgaaaaaaatgaagttgggaatggcgagaggggaagtttgtctaagggtctcagcaatactggttttggtattaacagcatgtttggttgctttagatacccaaaccaaggttgtgttcgtatctattgagaagaaggctacatacaaagacttgaacgctctcaagatcttggtgtatgttacatgtgcggctgctggttataatctgcttctattgtgcaaacactccatttggtctagaaaaaacttcaaagggtcttatctatgcatggcttggatttgtttctcgttggatcagatcgctgtgtacatgacatttgctgcaaacacttgaacaatgggagccgcggtgc

SEQ ID NO: 52526 - DNA, 377 bp, Glycine max
  unsure (1)..(377): unsure at all n locations
  Clone ID: LIB3109-018-Q1-K1-E4
ggagcaaagagaaaagcttccttcaatgtagttgtgattcttcaataccatatattctctttctctttcttgatttgtgttgtgaaacagttaaaagtggtcttgatgtctgaggcattggaagaggttgttccttcaatgaaaggagggtgtgaagaagaagggttgaacctggaggctactgagctgaggcttgggttgccagggtgtgagtcaccagagagggagggtgtgtttaagagtgtggtggtgtctggggccaagaggggtttctctgatgccattgatggaaactggaatggtggaggatctgaaaaagatgccgcttccttgaattctccaacttcaaagggtgctgctagtgntagtgttagtgc

SEQ ID NO: 52527 - DNA, 138 bp, Glycine max
  Clone ID: LIB3109-018-Q1-K1-E5
gaccccaaagccataatgtctcaaaacgaggaggccatatagaaattttgtattactttgtcttgaactttgtgaaaaactccattttatatcttcctcgtttcgaacaaaaaaatggggctttgccccaattttaca

SEQ ID NO: 52528 - DNA, 162 bp, Glycine max
  Clone ID: LIB3109-018-Q1-K1-E6
tattggacttttaagccataactcttcaattcggggagtggatatctaaattgtgaaacacgattacttgaactatgctaagaaccacattttatcacttcatggtttcaaacataaacttgactctataccctaattacccacttcattcctactacgaac

SEQ ID NO: 52529 - DNA, 315 bp, Glycine max
  Clone ID: LIB3109-018-Q1-K1-E7
gaatgggaagtctagatgttttggttttgtgaatttccagaatccggattcagcagctgctgcagttgagaggttaaatggaactactattaacaatgacagggttttatatgtggggagagctcagaggaaagccgaaagagaggcccagttgaaagccaaaattgggcaggaaagaatcagtagatatgaaaaattaccaggggctaatttgtacctggaaaatcttggtgaccgtttcagtgatgagaaagtgaaagatctattttctgagtttggaactattacatcttgcaaggtgatgattgattcaaa

SEQ ID NO: 52530 - DNA, 288 bp, Glycine max
  Clone ID: LIB3109-018-Q1-K1-E8
gcttgtggagggccacaccgaggtcccaaactggaggtttaactgcaacgttgagcttgtccaatcgccgcaaaaacatggtgggatgatcctcatccaaccgtagggtagacacgcggtcaggctcgtcaacgactccgagatcagtcagcatctgccagttgagaagggtatccatttactcgctcacgttcagtgcggttcgcacctgccctcactttgagtccatcaacatctcggttctgcctgcgtcgaatacgatagacttgcagacactctacaacgtcc

SEQ ID NO: 52531 - DNA, 251 bp, Glycine max
  Clone ID: LIB3109-018-Q1-K1-E9
gtagccaaagttagtaagtctgggtggatgactgatgaggaatttgctagagaggtgattgccggtgtaaacccaaatgtgatccgtcgtcttcaagaattcccaccaaagggcacacttgatcccacactctatggtgatcaaaccagtaccataacaaaagaacaattggagattaacatgggaggggtcacagtagaagaggcacttaatactcagagattattcatattagattaccaagatgcatt

SEQ ID NO: 52532 - DNA, 275 bp, Glycine max
  Clone ID: LIB3109-018-Q1-K1-F10
gggttccatatgatcactgatcagcaccactattggctacggccttgacacctgcgagaccaagtaccaggctgaggcacgttcctcaggtcgtacacaatacatgaatcttactgatgtattattggaggcaatatctaacatataagtgcttttactttaccagggccttgggacaaagatatttcaatccgttatttcacaatatgtctacctctacggatacagctatttttaaagactgtatctagaaaaaagtggttataaatccattg

SEQ ID NO: 52533 - DNA, 279 bp, Glycine max
  Clone ID: LIB3109-018-Q1-K1-F12
gagagagagagagaaaaaagagaaagtgaaaattagaaactcttgtacttggttttatgccaaattagggactcttttggttgtcaattagatcacaaagatatggaggttgccatggaactggaagatgatctattttttgctgatttgagcaaggaaattgctctactaattatggatgaagatgaagatccacttgcttcttgtcctcctgactctcttcaggtactttactactttcatttcttccaacacatgccaccacacatactttttttt

SEQ ID NO: 52534 - DNA, 429 bp, Glycine max
  unsure (1)..(429): unsure at all n locations
  Clone ID: LIB3109-018-Q1-K1-F3
gatgcataatgaggagagaaaacgtgtcccctgtgttgcgtgcgtcgtttgacagcaaattcgagggttcagcacggtcagtgctatcggttcggtggccttaacttaagaataataacaaaacaaacacagcctaatacccaatcctcactctactttccccatttatctgtcaaacgcgcagcaacaagaatcaaaatccaagggcgagctttaaaccatttcagttaagctttctaaccccccaacctactcctttgtagttaccaatttcatttagcgttntttttctactcataattagaattagaattacaacctcggtaaaatagaattactgggtatgtgtgtgctacttgcaactttgagaactcttgtgattttttttcccataaggtatntgtgaaaatgctgtaatgaggaaaattg

SEQ ID NO: 52535 - DNA, 430 bp, Glycine max
  Clone ID: LIB3109-018-Q1-K1-F4
gatgcattttcattgatgggtgttgttgaagagagtagtagtggcttcgattcccgcattgtgaaagagggtggtgagggagatgatagcgatatctcgaaagtggaagaagatgtagaggtcagaatggatctcaccgatgacttgttgcatatggttttttcgtttttggatcatcccaatctctgcaaagctgccagggtttgtaagcagtggcgaggtgccagtgctcatgaagatttctggaaaagtttgaattttgaagatcggaacatatctgtagaacaatttgaggacatgtgtagccgctatcctaatgccacagcagtgagcttatctggttctgctatttacttgcttgtcatgaaagccatctgttcattaagctgattggtctatgttgagaagattgaatatcaatgattctata

SEQ ID NO: 52536 - DNA, 369 bp, Glycine max
  Clone ID: LIB3109-018-Q1-K1-F5
gggtggaaggagccgtagcagcagcggaagctctagcttgggcagcgaatcacaatggcgagaggattgaagaagcatttgaagaggcttaatgccccaaagcattggatgcttgacaaactgggtggtgcatttgctcctaagcccttatctggaccacacaaattcagggaatgcctgccactcatactcattttgcgaaaccggctgaagtatgctctgacataccgtgaagtcattgctattctgatgcaacgacatgtccttggtgatggccaaatcaggaccgaccagacatattctggtgggttcatggatggtggatcaattccttaaaccaatgagaactttcggctggtggatgacacc

SEQ ID NO: 52537 - DNA, 392 bp, Glycine max
  Clone ID: LIB3109-018-Q1-K1-F6
gggttgttgaatcctagaactagtctaggctgtgatggtgtgggagaagtacttccttcactgggtctatgcggctcttttggaagaacaattcaggatcagactcatcaacaaaacaacgggtttgcactaggagaacatcacagtagtggagttcaagaactttaccacaagctcaggtcatcgtcatcatcaattaattattgtggcagtgataactcaccagtgtatctaagcaacatggcttcttcttactcttctttgtccaacattttggagtcatcttcagtttctgggagtgaattcgggtgctggaatccaaccctttcctggtctgatcttcccactaccaatggagcatatccttaataaccaccgcatgcaggaactac

SEQ ID NO: 52538 - DNA, 414 bp, Glycine max
  Clone ID: LIB3109-018-Q1-K1-F8
gaccacaccgagtcgcagaaaaggaaaaaagtgatcatagtttcacttcggccttatccagtttagggtttcggttctctaccctatctttcacgtatcgaaaccttaaatttacgatcaggtctgagcaatctggttggtagaacctttggtcttagtgagtcaagatttatgtctgaattagacgatcaaattcctactgccttcgatccttttgctgatgcaaatgctgatgactcgggtgctgggtcaaaagagtatgtgcatattcgtgtacagcagcgaaatggcatgaaaagcctgacaaccgttcacggattgaaaaaggaattcagctataacaagatacttaaagacgtcaagaatgagttctgttgcaatggaacagttgttcaggacccagaactaggacag

SEQ ID NO: 52539 - DNA, 294 bp, Glycine max
  Clone ID: LIB3109-018-Q1-K1-F9
ggggccataggatcactgatcagcaccactattctctacccccttgacacctgcaagaccaagtaccaggctgaggcacgttcctcaggtcgaacaaaatacaggaatctcactgatgtattattggaggcaatatctaaccgtcaggtgctttcactttaccagggccttggaacaaagaatcttcaatccttcatttcacaatttgtctacttctacggatacagctattttaaaagactgtatctagaaaaaagtggttataaatccattggaacaaaagcaaacttgggt

SEQ ID NO: 52540 - DNA, 371 bp, Glycine max
  unsure (1)..(371): unsure at all n locations
  Clone ID: LIB3109-018-Q1-K1-G1
gatggtaaacatgttgctcacaatgctcatatgtcaccactcactgcaggatgagacttcaagcccgattagtgctcgaatattcgaactttgcgagcctgatttcttgccagacacacttgacaattcagatgttactttcagctccaattgatgtcatgactagacgtcctcatatgccacaaccatattttcacctgtagatatagtagacgccangatcaatatcaataacactagcaccatagtcactactacctcatgtagcactaccacaaccagcaccccatccatcaacagcaacaacagcacatcgaacagcaataacctgtccatcctctttgacactcangatgaaattgacaatgaca

SEQ ID NO: 52541 - DNA, 252 bp, Glycine max
  Clone ID: LIB3109-018-Q1-K1-G10
gatgaacatggagaaggcaaagaagagaatatggctgcttggcttggtggaataaactctctcaagattcagcctttcaagctttctactttgggaccccatgatgtcagagttagaatgaaagctgttggtatttgtgggagtgatgttcactacctcaagacactgaggtgtgctcactttatagttaaagaaccaatggttattggtcatgagtgtgctgggatcatagaagaggttgcagtccagtga

SEQ ID NO: 52542 - DNA, 268 bp, Glycine max
  Clone ID: LIB3109-018-Q1-K1-G11
gatgaggaaaggttgagattggagaaagaagctgaagctttggcagcgcaagatgatggaagtggggaagctcttgaacgtatttatgaacgattggaagccattgatgcatctactgcagaaaagcgtgctgctgaaattttatttggtcttggtttcaacaagcagatgcaagcaaagaagacacgcgatttctctggtggttggagaatgaggattgctttaacacgtgctctatttatgaaccctaccatacttttacttgatg

SEQ ID NO: 52543 - DNA, 390 bp, Glycine max
  Clone ID: LIB3109-018-Q1-K1-G12
ggttctagtgtgtgattgtttgttgttgtaactcgttcttcttcttttgttgttctgtgtttgtgtttgttttttctctcacctgaaaatgtcttgctgcggtggtaactgtggttgcggaagctcctgcaagtgcggcaacggctgcggagggtaagattttcgttgtaacattgtttttttcttgggaaaatagagtttttccgggaaaattttctttttggatttttaattggtattatggttacccttttggttcaattgcatgaaaaaactatgcttttgttattttcttgcatggggggggagattctgatcacccgaaccttttgtttggttttaccgaacatgtccatttggtttcttttcatgggaagggtttctgggggg

SEQ ID NO: 52544 - DNA, 391 bp, Glycine max
  Clone ID: LIB3109-018-Q1-K1-G2
cacagtgaagttgatgctcctagccgaagacttgctaaaccactaatcttttgtaggactgaaagtgactgccccatggaaaatggctatgcccgtcctgttgatggaatccatgtacttgttgacatgcaaaatatggttgttcttgaatttgaagaccgtaaacttgtcccactttcacctgctgatccactaagaaattatacttctggtgaaacccggggaggagttgaccgaagtgatgtgaaacccttacagattattcagcctgaaggtccaagttttcgtgttaatgggcacttcattgaatggcagaagtggaattttcgtattggattcactcctaaggagggtttggtaattcattcagtagcctatattgatggaagtc

SEQ ID NO: 52545 - DNA, 407 bp, Glycine max
  Clone ID: LIB3109-018-Q1-K1-G3
ggcacaagtgagtttgttgatcgagataactagaaagagtgtgatgaaaatgaaggtgcttgttttcttcgttgctacaattttggtagcatggcaatgccatgcgtacgatatgttccctttccgaatgaacactggctatggtgcccgtactcccgaggtgaaatgcgcaagttggaagcttgctgtggaagcacacaacatctttggctttgagaccattcctgaagaatgcgttgaagcaaccaaagaatacatccatggcgaacaatatagatcagactccgaaacagtttaccaacaagcttacttttatgccagagacctcgaagtgcattccaaggacacatttgtgttcaagatagatggcaccgtactctctaatattccatactacaaaaaacatg

SEQ ID NO: 52546 - DNA, 323 bp, Glycine max
  Clone ID: LIB3109-018-Q1-K1-G4
ggggaagaggtagggtacagctgaagaggatagagaacaagatcaatcgccaggtaactttctccaaaaggagaggtgggttgctcaagaaagctcatgaaatatctgtactctgtgatgctgaggtagctttgattatcttctctcacaaaggaaagctctttgagtatgctactgattcatgcatggagaagatactggaacgccatgaaaggtatgcctatgcagagaggcagctagtagcaaatgattctgagacacaggaaaactggaccattgaatacactagactgaaggcaaaaattgaccttttacagagaaac

SEQ ID NO: 52547 - DNA, 400 bp, Glycine max
  Clone ID: LIB3109-018-Q1-K1-G6
gacgagattgagatcgatattgatgatgtcagtgatgataccctgttcacattacgaaagcttttggatgactttttgcaagagaagcaaaagaacaaagcaaaagttgaagcatgtgaagtagaggtgttgaatgattctggaccaagcaattcctcattgcaaccatttaaaggtaatgatccagcggatgaagaggtggacattggtggaaatgagccccctgtgtcaagctattctcatgtggagattgaaaaggatacaacttacagagtgaacaaaagcctaagcccaggcagctcacatgatacagactctgatagttcttctgatagcgaagccgatgatgttaaagcaagtccagcaaatgtaacaaaagcaccagaaaatctgggttctg

SEQ ID NO: 52548 - DNA, 96 bp, Glycine max
  Clone ID: LIB3109-018-Q1-K1-G7
gatgctggttttgttaagatgattccaaccaaacccatggctgttgaaactttcttcgagtattctgcacttggtagggttgctgttagggacatg

SEQ ID NO: 52549 - DNA, 287 bp, Glycine max
  Clone ID: LIB3109-018-Q1-K1-G8
ttgggatagagaaatatagataagtacagtgcgaaaagagtgaggcggttaaaaatgaattgcccgtactgttcggcggcgcatgggcgttgcgccaccacgagcagcgggcgttcgatcacggaatgcacgtcttgcggacgcgtgctggaagagcgacagtcgcatccccaccacgtgttccacgttcgcgcccagtacaaccttctgggtctggtcccatcggatctggttctccctgtgttcaatcaaaacaactaggaggaggaccttttcgagccaacggc

SEQ ID NO: 52550 - DNA, 210 bp, Glycine max
  Clone ID: LIB3109-018-Q1-K1-G9
ggagcgaataatatgtgaaggggtttgagtgcagtgcggcgatgctagcactctcttttgcagctttcgccgacagcttcattcaccatggctgagtaaaccgagaaagcttttttgaaacaaccaaaagtgtttttcagctcgaagaaaactggcaagggaaagagacccccaaagggtgtggaaccgcttttggaaatccattgggct

SEQ ID NO: 52551 - DNA, 384 bp, Glycine max
  unsure (1)..(384): unsure at all n locations
  Clone ID: LIB3109-018-Q1-K1-H1
ggagttaagatatgagatatatgctatctaatgcctagtgggatataggaaaggacctcaaatctgctatctttcgttcacatacgcatcatattcttttaattgntagttctgagttctgaccaaagttgttgatttgagtgtttttagcatatttggggtgtctgcaaacaccgcaggaattttgctttttctattgaattagattcctctgggaattcaattctgattcttccttagttttcggttttctgtctttctttttttccttctatttatattttgggttggttttctgttgagtcttgacttgcttgctccaactccaacccagtttcacactagttttgtgctccaattcttgtcaaggggaacaatgaatgc

SEQ ID NO: 52552 - DNA, 244 bp, Glycine max
  Clone ID: LIB3109-018-Q1-K1-H10
gatgttgtggttcaacgtgacttgcctccactctgggaaattgatatgaatggaaaagttaatggagctgtggaaacttgcagaggggacgatcagtgggtaatgtctaagcattttaggaactacttcaatttttcccatcctcttgttgcacaacatttggatcctgatgagtgtgcttgggcttatgggatgaatgtatttgatctgcgtgcatggagaacaacaaacataagagagacat

SEQ ID NO: 52553 - DNA, 174 bp, Glycine max
  Clone ID: LIB3109-018-Q1-K1-H11
gaaggcagagatcacatagacccatctaattttggactcaaatagttggtggtatggatgaccaatttttgaccggtcataggcatagtcgtgagcccatggctaagggcttaattcatgagaaggctttaaaagcccaaattttttgccacaatgggtgccacgaatttttta

SEQ ID NO: 52554 - DNA, 276 bp, Glycine max
  Clone ID: LIB3109-018-Q1-K1-H12
ggggaaaaaaaactcaactttgaaattcttaaagccctaactggtccgaaccattggagccaccgtgcaatagttcctactctcactctctccctcaacacaccattgattttggtttcagctttatttggaagaaggttgtaacgctgacctgaaatttttctgaagacaaagatgcaggcttgtacaacgatgagttctttgcagcaacaacctatttggaccaaagggttaaatttccctgcaaaagggtatggcagcaataacgggtttcta

SEQ ID NO: 52555 - DNA, 354 bp, Glycine max
  Clone ID: LIB3109-018-Q1-K1-H2
aatagagagaggtgcaaaatcaatggatatgagatgccagctaagaccagggtctttatcaatgcttgggcaattggaagggatcccaagtattggactgaagctgaaagtttcaaacctgagaggtttcttaatagctctattgattttaagggcacaaactatgaatttatcccatttggtgctggaaggagaatctgcccaggcatttcatttgctacacctaacattgagctgccacttgctcatttgctttaccattttgattggaagcttcccaacaatatgaagaatgaagaacttgacatgactgagtcatatggggctacagcaagaagagcaaaagacctatgc

SEQ ID NO: 52556 - DNA, 414 bp, Glycine max
  Clone ID: LIB3109-018-Q1-K1-H3
accaggagatttacaacactcgtacaccctactcaaccaactgagctaaacccccttgttattaatattgtattacattatatatctattggtataaaccaattatcctaaaaaggcttaagtcattaggtaaaagattttgtattaacatctgtagtagacatcatcatgatcagtataaagcttacttttgctggacatgataaatgctctgttgatgaattatgttttttaatccctaaggattcactagaagaataaatgcaagcaagctaaagtactaaaagttctttagaattcccttttacttttaatgcaggatcgtgatgagaactacattatgttggtatcaagttgctctagaccatgcccatcaaatagaaaatactttcttttctttatatcttttacatg

SEQ ID NO: 52557 - DNA, 355 bp, Glycine max
  Clone ID: LIB3109-018-Q1-K1-H4
gacactaaacaagttaaaagaagagcatcactgaactaacaaagcaaccctatgtcgaaagtggtttgtgtcaccggagccagcggcgccatcggatcatgggtggtcctactcctcctccagcgtggttacaccgtccatgccaccgtccaagatatcaaggatgaaaatgagacgaaacatttggaggaaatggaaggagcaaagagtcatctccatttttttgaaatggatcttcttgacatcgactccattgccgctgccataaagggttgttccggcgtaatccaccttgcatgtcctaacatcattggtcaagtcgaagatcccgagaaacagatattggaaccggcga

SEQ ID NO: 52558 - DNA, 415 bp, Glycine max
  Clone ID: LIB3109-018-Q1-K1-H5
gcacctaacggcatttgtgaaacttgaaaccttagcggaggtaacttggttggagcgagttcacattccgtagatgaatggatggtccttagtgctaatttggcaccatcaaattactatgataattctagtgttagcatgtgtgaatccagatctgaggttcattgtgcagattagcgtggaagagaactatggagtcagcaacggtatcatcatctgagtcggagactgcgcttgctcttgctctggcgtcgtagtcacagcatccctacgtctacgaacttgtctgcttcacgctctatcgcctgcacatggaacgcgaactcctccgcgtggacgccaaccgcattcggcgtcaaatgcatgaggtcgtactcggcaactaccgatctttcattgccgtcgtcgacgcctt

SEQ ID NO: 52559 - DNA, 291 bp, Glycine max
  Clone ID: LIB3109-018-Q1-K1-H6
ggtcagaagagcatatattatgttatggcttcttgcacaaactttcggagttttctttcggtaattaataaaatctttgcttaattaatttgtgctttctggaggggcacttaattaattaatctctggtgagtatttataaatatggagagcctggaagaaagagtgcttatgttcatggatgaacaatattatttttccaattgcaatgaatcagagctgcatatgcatcatcatccctctgtgtctgtggagaacatatcgtgggaaaacaacaccgacttctatgac

SEQ ID NO: 52560 - DNA, 347 bp, Glycine max
  Clone ID: LIB3109-018-Q1-K1-H7
agacgggggcagaaggcaaatcgcgaagactagatctgatctgagagaatggctcctcggtctagcagcaaggacgcccaagaccttttgcgcgctctttggtctgcttatgctgcaacctccactaatcttaagatcattgatctctatgtcatctatgccgtattcaccggtttcatgcaggacgattacatggctttggttggatcatttccatttaacttcttcctatcaagagcactatctggtgtaagaactgctggtcttgcatgatgacttaggatccaaatgaataatgagaatctgggcattaaggatcttgcacctgaacgcgctttagcggattt

SEQ ID NO: 52561 - DNA, 422 bp, Glycine max
  Clone ID: LIB3109-018-Q1-K1-H9
tcggcaacagctacttgattggtggaacaggcattataaatggccatacccttcggaatctcaaaagcaggcacttgcagaatccacaggcctagatctgaaacaaatcaacaactggttcatcaatcagagaaaacgtcattggaagccttctgaggatatgcaatttgccgtgatggatgcaactaactactacatggaaaatgttatgtgcaagccattttcaatggatggcatgcctatgcttctttaaactaatcctctactagaatattcaaaagcttagccgagaaaaccctatctattttaagttgcctaggtcgccaggttgctatatataatgtgtcattgatgaatgttttactttaaattgtagaaagcaggatgaaaattctcggttatccctgaactgcaatctatgt

SEQ ID NO: 52562 - DNA, 143 bp, Glycine max
  Clone ID: LIB3109-019-Q1-K1-A10
ttgggaagagggttttgggtaaaactcccacggtcaagaggcaatcttgtgggaaatacaaaggtgttcggatgcggaaatggggcaaatgggctgcagagattcgtgaccctttcaagggcgcgcgaatctggttgggtact

SEQ ID NO: 52563 - DNA, 170 bp, Glycine max
  Clone ID: LIB3109-019-Q1-K1-A11
gtggcactagggtcaatcatccaataaattgatgcacctaagagtactatatgagaccccatacctgttactcaagatgcattctcagtaccacccacaccttgtagagaaagagagaatttatcaattaagtcatagggaaaattgaagaaaaccaatgtgacttcagt

SEQ ID NO: 52564 - DNA, 405 bp, Glycine max
  Clone ID: LIB3109-019-Q1-K1-A12
gggatcgaatttcgcagcacgatttggggctttccggaaatccaattagggatttcaacggttcttctctccgttccgttctcgtttcgtcgcggaatcacaaaactgaaaacaatcaaacctggggagtgaaggttcaggcttcgatcctcgctccttgtgctgatgcctccttcggctctggcgctacgtcatggccgataacatggaaatcgatattccctccgattcccagccgctcaagcctcgcgatcgagttgttcggaggcttgcccagtttggtgttcctgaggagcagctcgaccaacctggtttggttgcttttgctaaggataagagggcgttgatacctgagctggtgtctgtgatattgcctactgatgcggaagtggcagatgcatggga

SEQ ID NO: 52565 - DNA, 415 bp, Glycine max
  Clone ID: LIB3109-019-Q1-K1-A2
gatacaatgaaggatttcaatttaacctttatgggaactcggctttgtagatgagcttgatgtttccatttgagatgcaagacatcttactgccttccggcacaaatggtgttaaagacctacacatttctgcttctcatagtagtaccctggctctctttgcttctctaggaaagaaattatcagtgctcagcttggacagcggcaaccttgttgtcaattatgacctacaggttcctgcatggtcttgttcatgggtctcaacaattcacattacatatatgctggactacagaatggttctgtcttagtgtttgatatgcgccaaactgcaggacccatgaaatctctagttggtttgactagcaaccctgtgcatactgtacatgctcttgcacaaacttcaagtttgtct

SEQ ID NO: 52566 - DNA, 293 bp, Glycine max
  Clone ID: LIB3109-019-Q1-K1-A3
gtatctatttgtcattatacccattttaacttatgccaacatggagaactttatagaagctacagtcaaggttcagatactgcttctttagaggtagcaacacctattctaattcctagaagtgatggtcataggcatcggaagggaagccatggtgatgttatcttcttgacaaatcgtggagagattacatcatactcccctggcttgcatggtcatgatgctatttggcagtggcaacaatcaactggtgttacatggtcaaacctaccctccccatcaggaatgatgga

SEQ ID NO: 52567 - DNA, 415 bp, Glycine max
  Clone ID: LIB3109-019-Q1-K1-A4
ggttgttcaggcgaaacaatggcgacggtggagctctggtggatgacgtgctttctctaacaactgctcttagaaaagagagagagaatggcggtggagtacacatgctgctcaacggcgttcttcgttcacatagtggtaatcgtgctgctggtgctgttcgcgggcctcatgtcgggcctcaccttgggcctcatgtcgctcagcctcgttgatcttgaggttctcgctaagtccggcactcctcaggatcgtaaacacgctgagaagatattaccagttgtcaaaaaccaacatttattgctatgtactcttctaatttgcaatgctgcggccatggagacacttcctatttttcttgatggtcttggtactgcttggggcgctatcctgatttcagtaacattaattcttt

SEQ ID NO: 52568 - DNA, 316 bp, Glycine max
  unsure (1)..(316): unsure at all n locations
  Clone ID: LIB3109-019-Q1-K1-A5
gaagtttgaaagacaaatacaccatggcagatatcctgagtgaagaacagattgttgattttaaagaggcctttggcttgtttgacaaagatggggatggttgcattactgtggaagaacttgccactgttattcggtcgttggatcagaaccccaccgaagaagagctccaagatatgataagcgaagtggatgcagatggcaacggaaccatngaattcgatgagttcttgagcttgatggccaagaaagtgaaagacaccgatgcagaggaggagctcaaagaggctttcaaggtttttgacaaaaatcaaaa

SEQ ID NO: 52569 - DNA, 409 bp, Glycine max
  Clone ID: LIB3109-019-Q1-K1-A6
acgacagaaagggattcattgaagtattacaatacaacctttatgggagctcggggttgtatatgagctggatgtttccatttgagatgcaaaacatcttactgccttccggcacaaatggtgttaaagacctacacatttctgcttctcatagtagtaccctggctctctttgcttctctaggaaagaaattatcactgctcagcttggacagcggcaaccttgttgtcaattatgacctacaggttcctgcatggtcttgttcatgagtctcaacaattcacattacatatatgctgaactacagaatggttctgtcttattgtttgatatgcgccaaactgcaggacccatgaaatctctacttggtttgactagcaaccctgtgcatactgcacatgctcttgca

SEQ ID NO: 52570 - DNA, 396 bp, Glycine max
  unsure (1)..(396): unsure at all n locations
  Clone ID: LIB3109-019-Q1-K1-A7
gaccatctaaggtagctgtaaattagtgactttaatatttgaagtttgagatgttgcagcatgttttgcttgctggttgctgatggcaaagaccatgacttgaaggatgatggtgaagagaatggttgtaaagaagagtatttggtgcttgtgggtgtgaagctggatttttctcttttaggaaacatctctgttggacattaaaaacatgttaacagagagcacattgcaccgcagcccatcattgtcttcgctgtgcatactcgaggagacatangctgtctgtgttaatggctaagaaagatggaagttgtgagtgatgttgatgggttgaccaggtcaagggtgatgtaatgcatgcaagtacttgtgcactctgatacttgcatgtgtgca

SEQ ID NO: 52571 - DNA, 412 bp, Glycine max
  unsure (1)..(412): unsure at all n locations
  Clone ID: LIB3109-019-Q1-K1-A8
ggagcgagaagcgagaagggagtgaggtttggagaagagagagatgggaaaggagaagaagaggtatcttctgaaaacggaaccgtcggagtggtcgtgggaggaccaggcagcaaacggaggcataagcaaatgggatggggtgaagaacaagcaggcccagaaatacctcaagtccatgtccatcaacgacctctgcttcttctaccactccggccccaaggcccgccgtatcgtcggcgttgtttccgtcgtccgcgagtggtacggcgatgctgtcgacgtcaaggctgtcggggagatgaggaggcccgtcgacttaaaggagatgaaacatttcaaggatttcgctctcttgaggcaacctangctctctgttgtccctgttcccgatcacatttggaaccaaatc

SEQ ID NO: 52572 - DNA, 399 bp, Glycine max
  Clone ID: LIB3109-019-Q1-K1-A9
ggccacttttcgctgagatgctgcgactttctaacgaaactggctaactgaataaatgattaatgcgattacatgggtgcataaaagggtttcgaaatcggaactagtggtggctgaaccttctaccgacaaggaaaatgatcacacgatagtcaaccatgcattcactaggatagacaaggaccatgaagacgctatcgacgatgaccttgtggcacatgcattaaccgtatcagacgcagatgacaatgcctttactggaacctgcgacgataaaaccctcgcggtgaatgaccttgacatggacctttatgatgactaaaattaaggaattgatgtgttcagttctggaattggctatcgttattatgctagtaacgacatggatccctatatcaa

SEQ ID NO: 52573 - DNA, 364 bp, Glycine max
  Clone ID: LIB3109-019-Q1-K1-B11
gcatgttatttgggtaaagaatggaaataatggctatgatgatattcgtgctgccattaaggaagcaaaagctgtcaaagacaaacccacattaatcaaggtcacaacaaccattggttatggttctcctaacaaggctaactcctacagtgtgcatggaagtgcactgggtgccaaagaagttgatgccacaaggcagaaccttggatggtcacatgagccattccacgtgcctgaagatgtcaaaaagcattggagtcgccacacccctgagggtgctgcacttgaagctgaatggaatgctaaagttgctgagtatgaaaagaaatacaaggaggaagctgcagaattgaaatctattatc

SEQ ID NO: 52574 - DNA, 419 bp, Glycine max
  Clone ID: LIB3109-019-Q1-K1-B12
gattaacaagaagaagaagaagaaacggtgtcttgctccaatctgacaatgttggtgtcctcaaaaccttccctttccgacccctcgaacctctccttccgctctgtcctgaacccttttcagctccctacacaaaacccagcttcatgcaccccttcacgctcctcaagcacccaaattcagtgtggtctgagagaactgagaacccgcattgagtctgtgaagaacacgcagaaaatcacggaggcaatgaagcttgttgctgcagccaaagtgagaagagctcaagaagctgttgtgaacggaagacccttctcagagaccctggttgaagtcctctacaacatcaacgagcagctccaaactgatgacgtagacatccctctcacaaaggttagacctgtcaagaaagttgcact

SEQ ID NO: 52575 - DNA, 180 bp, Glycine max
  Clone ID: LIB3109-019-Q1-K1-B2
ggcccatggacgtcgcagacaccgggtatgaggaccacgccgaccacaaagcacgaggtaacaaacacatcactggcgacgaacgagaggggcacggagaagaggtaaacgggaagggaacaacggaaaagaggaaggacgacgggctaaaggagaagaaacggaacaaggaatggggag

SEQ ID NO: 52576 - DNA, 428 bp, Glycine max
  Clone ID: LIB3109-019-Q1-K1-B3
ggcatataacgattagaaaatctagtctgactcactctcacgaggttatgcaacaagacaacgcgacaggggtcccacttccagatctacttactacgcttctctgatctgacactcatcattctgatagtataactcctttttgggaaagcttaaaacttgaatgcaaaaccacaccaccccattagccatttggtgatcaaaatcgatcaatggagtttactgcatcttacaagcaaacgggatcctgttgtgtgtcttccaacgctcgattcattgccattggcgttgattatcgtgtcgtgattcaggagaccgtatctttcaaggtcgtgcagttgctttcatgcttagacaagattacctatattgaatggccccttgattctgaatatattctttgcggtctctacttaacgacgatgata

SEQ ID NO: 52577 - DNA, 428 bp, Glycine max
  Clone ID: LIB3109-019-Q1-K1-B4
ggacctgaggttgtttttgcaggcagaggaagagacaatggaacgattaaggtcacacgagactggcatattcaagaagaaaccagccgatctaatgcagatttttaaggatgtgcaatctaaagtcagcgatgttgtccttgggaaagagaagccagtagaagaatcagatcctgagtatgaaaagatgaaacattacatctttgagcttgaaaaccacttggctgaagctcaaaagcatgcataccgtcttgtgaagaggcacagagagttggggcaatcactgtctgattttggaaaagcagtaaaacttctatgtgcttctgaaggaaatgctcttgggaaagcgttctctgaacttgggatgaagtcagagattttatcagccaagttgcaaaaggaggctcatcagctcttgatgaattttg

SEQ ID NO: 52578 - DNA, 409 bp, Glycine max; identical to SEQ ID NO: 51708
  Clone ID: LIB3109-019-Q1-K1-B5

SEQ ID NO: 52579 - DNA, 422 bp, Glycine max
  Clone ID: LIB3109-019-Q1-K1-B6
gacccatattttgatcaaattggctgttctcatgctggttgtgagccagcttatcggactcccaagtgtgttaaaaagtgtgtaagtggaaaccaagtttggaagaagtcaaagcactatagtgttagtgcatacagagtcaactctgatccccatgatatcatggcggaagtttacaagaatgggccagttgaagttgcatttaccgtttatgaggattttgcttactacaaatcaggagtttacaaacacatcactggttatgaactaggtggtcatgcagtaaagctaattgggtggggaacaactgatgatggggaggactattggcttctcgcaaatcagtggaacagagaatggggagatgatggttacttcaagatccgaagagggacaaacgaatgtgggattgaagaggatgt

SEQ ID NO: 52580 - DNA, 198 bp, Glycine max
  Clone ID: LIB3109-019-Q1-K1-B7
gagaggttgaagaagcaagcaccaacgtgaatacgcctaattcggagggtttcagttttcgccctcttttctcatctccaacatcttcgtcgtcacggaagctagtcttcctgttatcacaaacaatgtctgacggtcaagaatcagacaagaatattgagatatggaagatcaagaaattgataaaggcattggaag

SEQ ID NO: 52581 - DNA, 424 bp, Glycine max
  unsure (1)..(424): unsure at all n locations
  Clone ID: LIB3109-019-Q1-K1-B8
ggtgagagagagagcgagcagtttcagacacagagagaggggtttgggattggagggattgacgctgcgtctcttcctcttctctttcgatccatccctcattcctaatcctccaatccaaccacctcagcctcacactcacatatacacatatctgaacgcgtatcgtccctcctatggcttcaaagcgcatcctcaaggagctcaaggacttgcagaaagacccaccaacttcttgcagcgctggtccagtagctgaggacatgttccattggcaagcaacaataatgggtcctgctgatagtccttatgctggaggtgtattcctagtcactattcacttccctccggattatcctttcaagcctcctaaagttgcctttaggactaangtgtttcacccgaacatcaatagcaatggtag

SEQ ID NO: 52582 - DNA, 247 bp, Glycine max
  Clone ID: LIB3109-019-Q1-K1-B9
ggatgaagagcgaatagtgaatagaatggctggcaaaggtttaacctttgcggctgtgataatatgcgtttcagcactgtcactgagtacttctgtcgcggtggcagcggccaatgatggccttgtattaacttgtacaaggaatcatgccctcatgctgaagacatcatcacagaacaagtcaagcttctctacaagcgccacaagaacactgctatctactggctcatgaacaatgatcatgact

SEQ ID NO: 52583 - DNA, 416 bp, Glycine max
  Clone ID: LIB3109-019-Q1-K1-C1
ggtaaagagatagatgaagcaagcaagcgatttgtgaaagcgttgaccagaaagtgtgaactacaaagtgtaggaatgagcatataccaccagatacctgcgttgattctggattcttgaagccattccttctattttctggtgacagcttcgtcttgtgctatactatataacaactcaccctctctccttacctcttcattcccaacacaaaacactctctcctccttcaacctagccctggtcactaccaaccaagtgtcccccctcctctcccttgttaacaggtagctgagttagtgagtgatggcgggaggacaactaggagtgcttaatgcactcgatgtggcaaagacacaatggtaccacttcacagctattgtgattgctggaatgggattcttcaccgatgccta

SEQ ID NO: 52584 - DNA, 423 bp, Glycine max
  Clone ID: LIB3109-019-Q1-K1-C10
ggaagcgtgagggcaaaaagtcggaaccaccggggaggagggcttcacacagagaattacgcggttgcagcagtcaacgcccgggattcccacgtccataccaaccacaacaggcggagagagagtttaggccttagtgagaaggataacgccatttggttttggcttggaatacgtcatccactatcaatcaactgggctttgaaatggtgaaggagaccgaatactatgacgtgctgggtgtcagccctacggcatccgaagccgagattaagaaagcttattacattaaggcacggcaagtgcatccagataaaaacccaaatgaccctcttgctgcacaaaattttcaggttttaggtgaggcttaccaagttctgagtgacccagctcaaagacaagcttatgatgctcatggaaaat

SEQ ID NO: 52585 - DNA, 283 bp, Glycine max
  unsure (1)..(283): unsure at all n locations
  Clone ID: LIB3109-019-Q1-K1-C11
gacagcagcagagcaaaagaaagaaagaaagaaagtgcaacttcctctgttttgctcccctgtttaagccttatcataagcttagaatggcacacaaggaattttccattgccctagtgactctcattgttctctttgtcaacacgaacctncaaggtgccacggctgactatggtggtggttggcagagtgctcatgccactttctatggtgggggtgatgcttctggcacaatgggtggagcatgtgggtatggaaatttgtatagccagggatatggaac

SEQ ID NO: 52586 - DNA, 385 bp, Glycine max
  Clone ID: LIB3109-019-Q1-K1-C2
gatccaaagcagaacaaagagccattgaactttgactataatgttcagagttcagattactcactctaatcttctaagttttcattttggggtttaagtttctgaaggaaaaaaaaatgataaagtttgttctatttttgttctgctttgcctctgcactgaccctttcagtatcggagtccaaatcagcttcagtgcaacctcatgctgctgaatctttctctgttggatatattcagatgaagactgcagcgaactgttcttacctggtagttatatctacgagttgttcatcgcctaagttcacaacggataagatcggtatcacgtttggggatgctaatggcaaccaggtatatgaaccaagactggatgatccaatttc

SEQ ID NO: 52587 - DNA, 399 bp, Glycine max
  unsure (1)..(399): unsure at all n locations
  Clone ID: LIB3109-019-Q1-K1-C3
ggatggaatggtgtcaagatgtgatggttgaagaaatgaaaactttgaaacgtcttcacaggttgcagcaaactagtgccaatcttccaaaggaaaaggtgctttcgaaaatacgcaactatttacaacttcttgggagaaggatagatcaaattgtgttagaacatgaacaggaaccctataagcaagatagaatgaccgtgcgactgtggaaatatgtctccactttttcccatctttcacgggagaggcttcatcaaatatattccaaacttagacaggagcaagatgaggcagaggttggcccctctcacacaaatggatcggtatctgtttcatttancagaaatggaaatccattccgtttccatatggagaggcaaagaggattaaaaaata

SEQ ID NO: 52588 - DNA, 362 bp, Glycine max
  Clone ID: LIB3109-019-Q1-K1-C4
ggaggggtttaggtttaaagttgaagaaggagcgagcatggggaaggaaggagatctatgggacgattcatctctcatcaatgccttcgaccaagctatttctactttcaacgttctcttcataaccctatttttcactcttcaaattcggtcttaatctgagaatttcgttattaactaatttacagaaaatgcatagcagcggcaaacacaaaggcgccgccacggctcgagaggcggacacaatcatcggagaaaatggctccaatgttgacactacaagggatgctgatacgaatattccagctactgatgtgcctgattcaggtgaaactggtaatttgtcaaagttggaagaaaat

SEQ ID NO: 52589 - DNA, 387 bp, Glycine max
  Clone ID: LIB3109-019-Q1-K1-C5
aaccaccttttgggattttgcaagagattgatgtaaccggtaaactggcttattgagaggggaatatgaagttgtaacttttctttgttgctacaatatttttgctaacatggccatgccttgtctcaggctacccaaggtcccctcttcaaatgataactcacctattctgagctttctttcctggtaaactgctcacactttatgcttgcttcttagctcacaacatccgcaccttttataccattcctccagagcgcgttcaaccaacacaagactacattaatctcgaacatttaagatcagactctaaaacaattaaccaacaagctttcccatatgctagtgaacgcgacattcatttctgcgacatatttatgttccccc

SEQ ID NO: 52590 - DNA, 221 bp, Glycine max
  Clone ID: LIB3109-019-Q1-K1-C6
ggaagaatagaagattcatttttttgtctttttgatatggaagctgatgtttctattatttttgttgcgttttcaaaaccctaaattggagaaatcccaatttctccttctgtctttctgctttggatgtttttcaaccaaaaaattgtgcttttcaaatcttttgctctgatgggtacttcaaatcttctcttgtttttctctctgatgagcctgtgtgc

SEQ ID NO: 52591 - DNA, 68 bp, Glycine max
  Clone ID: LIB3109-019-Q1-K1-C7
gaacttaattagaaattaaattgcacaaaaagcttcagaattgtcctatttattttgtgtaccttttg

SEQ ID NO: 52592 - DNA, 382 bp, Glycine max
  Clone ID: LIB3109-019-Q1-K1-C8
gggagttgagttgagaaggaaaggctgaagaacacatagagagagagagagaagtgcagaaaaaatgagactgttcgatccatggcctgttttcttcaagagagaatggaagcggaattggcccttcttggttggattcgccatcaccggaactctcatcaccaaactttcccttggtctctctgaggaggaagccaaaaagtcgaaattcgtccaggcacacaagaggtgactttagaatggaagatttgcagtggctttgcacattgtattagatgtgtgaagagagcttttgtttgtaataaatgaagagagatgttgtatacactccatgttcctatttccattttggttgtttactttaatgtgattgagaaattca

SEQ ID NO: 52593 - DNA, 355 bp, Glycine max
  Clone ID: LIB3109-019-Q1-K1-C9
gggccatgaacgttgtcagctccggcggaattagtatggccaacaaacagcttatgtccaacaatggctatgctttcagctttgccagttcgttaactgggttccactttgccgtaactgctctcgttggtctggtgtcaaatgctaccggttactcagcgtcaaagcatgttcctatgtgggagctcatttggatctcactggttgccaatatgtctatcacggggatgaactttagcctcatgctcaactccgttggattctaccacatatcaaaactgagcatgattactgtggattgggtgatggaatggatacttcacaacaaacactactcaagggaagtgaaaatgtc

SEQ ID NO: 52594 - DNA, 380 bp, Glycine max
  Clone ID: LIB3109-019-Q1-K1-D1
gggtcaaagtgctactattacaggaacctacgcaggacagtatgtcatgcagggatttctggatttacgactggagccatggattcggaatatgttaactcgttgcttagccatagttcctagtttgattgttgcagtcattggtggctctgctggggctgggaagctcataataattgcatctatgatcttatcatttgagcttccttttgctttggttccactcctcaagtttacaagcagcaaaaccaagatggggacacatgtcaactctaccatgatttcggctgttacttggataatcggtaccctcctcatggccattaatatatactacttaataactggcttcatcaagctgctgcttcatagtcacttaa

SEQ ID NO: 52595 - DNA, 317 bp, Glycine max
  Clone ID: LIB3109-019-Q1-K1-D10
gagagagaggtagagtgttgatactggagcggaggcactcgaattaggagagtgaagcaagaagaagatgaagatgaggcagaagaagatgcattgagaagacggtgtctgaggaaactgatctgatgctgtgactgggactatgtctgcctggaaatggaacgacggtatcaactgaagctgctgatgtggtatcatgaatcaggactagaggtgtctctgagactgcgactgatgaaacatgcacgcgtaatttaatgcttaagctctgacgcacagaagctactgctgctgatggtgcagatccacgtgagaag

SEQ ID NO: 52596 - DNA, 333 bp, Glycine max
  unsure (1)..(333): unsure at all n locations
  Clone ID: LIB3109-019-Q1-K1-D11
ggttggagagagagatgggaaggtccccttgctgtgagaaagcacacacaaacaaaggtgcatggaccaaagaagaagatcatcgcctcatttcttacattagagctcacggtgaaggctgctggcgctctctccccaaagccgccggccttctccgttgcggcaagagctgtcgtctccgctggatcaactatctccgccctgacctcaagcgcggcaatttcaccctcgaagaagaccaactcatcatcaaactccatagcctncttggcaacaagtggtctctaattgctggaagattgccggtagaacggacattgagataaagattac

SEQ ID NO: 52597 - DNA, 421 bp, Glycine max
  Clone ID: LIB3109-019-Q1-K1-D12
gaagaagaagggtgttgatgagtttcctttctgtgtccatctggttagttgggagaaggaaaacgtttctagtgaggccctggaagctgctcgtattgcttgcaacaagtacatggccaaatttgctggaaaggatgctttccacttgagagtcagggtgcacccattccatgttcttaggatcaacaagatgctttcgtgtgctggagctgataggctccaaactggaatgagaggtgcttttggaaagccacagggtacttgtgctagagtggctattggacaggtccttctttctgtccgctgcaaggacagcaacagccatcatgcccaggaggcccttcgccgtgccaagttcaagttccctggtcgtcaaaagattattgttagcaggaaatggggcttcaccaagtttagtcgt

SEQ ID NO: 52598 - DNA, 432 bp, Glycine max
  Clone ID: LIB3109-019-Q1-K1-D2
gggagcagatagtaggtgaagaagttctcaagagttttctgggacggagaccaaaaccaacttggaactggcatggcaactataggaattggagtaggagtgacgaagctccaaccccacaaaccaaagtctaagtccttgtttcttggccagaggcttacgattagaccattttggggggagcctcaatgcagtgaaagaagattattcagtgtctcaaaccccccaagagtggttcaagtttttgcactagcgggtggtgaatggcttgacactgttcacagcctctttgtgggtgttggggttggacttccttgcagtgtgatgcagtgtggtgatgtgatatataagagcactcttcccaagtcaaatggcttgacactcactgtccctggagtgattttggctttggggaccctatcttacctttgg

SEQ ID NO: 52599 - DNA, 425 bp, Glycine max
  Clone ID: LIB3109-019-Q1-K1-D3
ggcacaagatgggtgttatcgtggggatcactggtgctactgcttctgcttcttaagccttttcttttcttctgtgggttccccctctttcgatattctgcactttagagagacaaccagacatggctggcagcaaccaagtcaatctcaatgaatctaggagtgttgttcctttaaatacatgggtgcttatctccaatttcaagttgtcttacaagcttctcagacgtgacgatggaacgttcaatcgtgagttggtggagtatctcgataggaaggtccccgcaaacgcaattcccgttgaaggtgtgttttcaatcgatcacgttgatagaaacgcgggtttattctaccgtgtgtacttaccaacctcaggaaacgaggctcaatggggtatcagagaccttgaaaagccgttaagtact

SEQ ID NO: 52600 - DNA, 433 bp, Glycine max
  Clone ID: LIB3109-019-Q1-K1-D4
ggcacaagtgagtttgttgatcgagataactagaaacagtgtgatgaaaatgaaggtccttgttttcttcgttgctacaattttggtagcatggcaatgccatgcgtacgatatgttccctctccgaatgaacactggctatggtgcccgtactccggaggtgaaatgcgcaagttggaggcttgctgtggaagcacacaacatctttggctttgagaccattcctgaagagtgcgttgaagcaacaaaggaatacatccatggcgaacaatatagatcagactccaaaacagttaaccaacaagcttacttttatgccagagacctcgaagtccatcccaaggacacatttgtgttcagtatagatggcaccgtactctctaatattccatactacaaaaaacatggatatggggtggagaaatttaactcg

SEQ ID NO: 52601 - DNA, 383 bp, Glycine max
  Clone ID: LIB3109-019-Q1-K1-D5
agggggttgaagcaaagataagtgatatgcaaaacatgtctctaatagcttcactctcctccacaacttcacaactcacttcccttccttccctcccttcttcctcctctccactttctcgcaaatttcccctcactttccgggaaaaaaacagaactccaatcacacctcacaagctccctttttcagcaaggcctaccaccaccagagtggtgttggtgaagtctcaagccacagcacctgcttcttctgaggctgtggcagtgacacctgtgtcttctgagatgaaagcatgggtctatggggaatatgggggtgtggatgttctgaagctggactccaatgttactgtgcctgatgtgaaggaagatcaggttctaatc

SEQ ID NO: 52602 - DNA, 421 bp, Glycine max
  Clone ID: LIB3109-019-Q1-K1-D6
gggagagagaatgagtggcggaggagaagagggggcaactctggagttcactccgacgtgggttgtggccgccttttgcacagtcatcgtcgccatttccctcgccgctgagcgcctccttcattatggcggaaagtttctcaaagccaaggaccagaagtcgctctacgaagctctccagaagatcaaagaagagctgatgcttttggggttcatttccctgcttttgacggttacacaaaacggcattaccaaaatctgcgttcgaccctctttgacgctccacatgctcccgtgtaatctccacgacgctccagcaaaccacgaatctcatttccagacatttttccctggaacagccaggcgccttctctctggggaacactccacccccgagtccgcctctaaaattggttattgc

SEQ ID NO: 52603 - DNA, 408 bp, Glycine max
  Clone ID: LIB3109-019-Q1-K1-D7
ggatttactgctgaacattttgtgaagtcagatgtgattgacacaaatgcagtggcttcaaaagtccaagataatttttccaatgaaggttttgaccaaactgaaacagagagggaaaatgccaaacctgatgactccagagaatcaatagtgtccagtgaaaacagtgacgggaatgataaggatgggtccgttgatgagaccacattaaagagtacactcgattctgtgcatgaagagcaagggtttatagctgaacatgttcaaatgttagatgttgaaatagatgcagcggcttcaaaagttgaagacaaattttctaatgacggatttgataaagctgaagcacagagggaagacgccaaacttgagagctctagtaaatcaataatttcctgtaaaaacagc

SEQ ID NO: 52604 - DNA, 397 bp, Glycine max
  Clone ID: LIB3109-019-Q1-K1-D8
ggtgagaagagtggtgtgatggcgcagagagctcaaccagtattggccacagatgttttccaaatgggaaacatccaatggaagcaattcaatgttgatacatccagtgcttccttctcacctccaaaaccattgctaatttttacaccaactgttcctggcgcataccctgtaatattgttcgtccatggctttttcattcgcaatttctactactcaaagctcctagcccacatagtctcacatggattcataatcgttgctcctcaactgttttccaatgggcttcctatgtatggacccactgaagtggaatatgcaggaaaagttgcggattggatagctgaggagcttcaacatttgcttccagagaacgttgaagccaatttggacaaac

SEQ ID NO: 52605 - DNA, 268 bp, Glycine max
  Clone ID: LIB3109-019-Q1-K1-D9
ggttctagtgtgtgattgtttgttgttgtaactcgttcttcttcttttgttgttctgtgtttgtgtttgttttttctctcacctgaaaatgtcttgctgcggtggtaactgtggttgcggaagctcctgcaagtgcggcaacggctgcggaggctgcaagatgtacccagacttgagctacactgagtcaaccaccaccgagaccttggtcatgggagtggcacctgttaaggctcaatttgagggtgctgaaaatgggtgtgcccgc

SEQ ID NO: 52606 - DNA, 404 bp, Glycine max
  Clone ID: LIB3109-019-Q1-K1-E1
gacgtcaacaacattcatcaatgtgttgtgtacacactgcacaccaccccatcccatgtgactctctgccccttccttcatcaatcatagtttctctgtgttttgttccgctaaatctccaaagcaatcaagcagagttctttaattagatgcaacctcagcacgagggttaacagattccgaccgtctcaatgaatgttgtgatttgtggtactgttgactccttctttttggttggacttagagtccaaaatggcggtgctggggtgagttgagttgaagtgaggcacctactttgcagtctgagtttgtgttgtctagtcttttttttttctttttcaaacatacaataatgaaggccttttccttcagtggggtttggattttattgtttctgagctcgg

SEQ ID NO: 52607 - DNA, 417 bp, Glycine max
  unsure (1)..(417): unsure at all n locations
  Clone ID: LIB3109-019-Q1-K1-E10
gattgtatatcatttacaatttcaatctctctctctctctgtctctctctctagacttagattttgtgaatggctgaagtggaagagggacaggtcatcggcgtccacaccgttgatgagtggaagctgcaactccagaatgcaaaagactccaaaaaactgattgtggtggattttactgcttcctggtgtggtccatgccgttttatggccccagttcttgcagagattgcaaagaaaactcctgaattgatcttcctcaaagtggatgtggatgaagtgaggcctgttgctgaggaatattccattgaagccatgccaaccttnctcttcttgaaagatggcgagatcgtggacaaggtggttggtgctagtaaggatgnaccttcagccaccatagccaagcatgcatctgct

SEQ ID NO: 52608 - DNA, 195 bp, Glycine max
  Clone ID: LIB3109-019-Q1-K1-E11
ggagctgacatcattgttgagtccaccggagttttcaccgataaggataaggctgccgcacatttgaagggtggtgcaaagaaggttattatttctgcccccagtaaggatgcccccatgtttgttgttggtgttaacgagcacgagtacaagccagagcttgacattatttccaatgctagctgcacaaccaac

SEQ ID NO: 52609 - DNA, 421 bp, Glycine max
  Clone ID: LIB3109-019-Q1-K1-E12
acagttcatccagggaactgatgaacaaacaatacccgatgtgaggctgaccaaatcaagggatggaacaaatggcatggctatcttcacatttgatcaaccctcagttttcgattcttcgggtgaaataggcgatatcactggattttatatgattgatgaggaaggggtccttcagtcagttgatgtaagtgctaaatttgtcaatgggaagccctcaataattgaagccaagtatgtaatgcggagtccacgggactgggatagattcatgagattcatggagcgatactcaaatgcaaatggtttgcaattcatcaaaaaatgagttaatgtgctaactctgcccttctattcttttgcccttttcaggaagtttgtgttctacgatatagtcacatataaaacctgagtgaaatgc

SEQ ID NO: 52610 - DNA, 389 bp, Glycine max
  Clone ID: LIB3109-019-Q1-K1-E2
ggagagaaagtgagagagaattacagagcattttccaacacgattacacgaccgaatcaaacccctctttctctccgaagctgcttttaatatcgtactggccttcgattgttctcctctttaatacatactgttctctcttcgatttgagggaacagtacaagagtctgagcatcggttaacccaactgcacaggtagtctccaaataatggagcctcatgatgagactggatgccaggctcctgaacgccccattctttgcattaataattgtggcttctttggaagagcagctaccatgaacatgtgttccaagtgttacaaggacatgctgttgaagcaggagcaggacaaatttgcagcatcatccgttgaaaacattgtgaat

SEQ ID NO: 52611 - DNA, 330 bp, Glycine max
  Clone ID: LIB3109-019-Q1-K1-E3
ggattccgaatccgagaacgtggttgtgacaggatcattgagctcggcaagaatggaagaacacaggttgagcttgagaatgagcacgcttgtcttcactctttccattatcatcatcgtactctcttacccagcacaaccacttgcgttgaaccattctccgaaattcctaggaaaattcgcagcaacagcacgaacccattcaaattccgagccaccgccgcaattccactacgaaaaaagatactttcaacagcgcctcgaccactttagcttctcggagctacccacgtttactcaacgctaccttatcagcaccgaacactgggt

SEQ ID NO: 52612 - DNA, 351 bp, Glycine max
  Clone ID: LIB3109-019-Q1-K1-E4
gaccagacaatgctaatttaatgaaagtacatattttctgaactcagcattgtagggtggactacctttataggtggtccgtgaaccactattaatgaccctagggtgaatgatgttggtagtcagaataaatccgctcaagggcatggcaaacggtggtggggctcgatccacatgcacacaaggtccggacaaacaatggtggtgctcggtctagatccggtttaggccactacaaacgatcaaagaggtgctcgtgatgttctctcgcgtttccagatatgatcatacagatactcatccccgcctctgctgttacaactattattatttactttaattattcacagt

SEQ ID NO: 52613 - DNA, 421 bp, Glycine max
  Clone ID: LIB3109-019-Q1-K1-E5
gattgagaaggctgatggatttgctggagtattggctgaacacaaatatgaaattgtgaagaggctgcaagagaggaagcatatttgtggaatgacaggtgatggtgtcaacgatgctcctgcattaaagaaagcagacattggaattgctgttgctgacgctacagatgctgctagaagtgcttcggacattgtcctcactgaacctggtctgagtgtcattattagtgcagtgctcaccagcagggcaattttccaaaggatgaagaattatactatctatgctgtgtcaatcaccattcgtatagtgtttggtttcatgtttattgcattgatttggaaatttgattttgcacccttcatggtgttgattattgccatactaaacgatggtaccatcatgacaatatccaaggatcga

SEQ ID NO: 52614 - DNA, 396 bp, Glycine max
  Clone ID: LIB3109-019-Q1-K1-E7
ggtattacaaaaacctattttggcttgtgcctttgcttttccagggagcttattgacaatggctgaaacaaaaggggtcatgaaagacaaaagatggtcttttcatggaatgaccgctctagtcacaagaggcacccgaggcattaggcatgccattggtgaaaaggtaactgagtttggagcaactggtcatatatgtgcacgtaatcaagatgatattgattaatggttaaaaaagtggaaaaaccagggacttaatgtgactggttcaagatgggatttactatggtctgaccaacgtaaaagattaatggaaattggtggcttcatctttcatggaaaggtcaatattctagtgaacaatgcttcttccaattttaccaagaagattaccga

SEQ ID NO: 52615 - DNA, 416 bp, Glycine max
  unsure (1)..(416): unsure at all n locations
  Clone ID: LIB3109-019-Q1-K1-E8
gtattgacaagcgtgtgattgagaggttcgagaaggaggctgccgagatgaacaagaggtcattcaagtatgcctgggtgctcgacaagctcaaagctgagcgtgaaagaagaattaccattgatattgctttgtggaagtttgaaaccaccaaatactactgcacggtcattgatgctcctggacatcgggactttatcaaaaacatgattactggtaccttccaagccgactgggctggccttattattgactccaacactggtggttttgaagctggtatttctaaggatggacagacccgtgagcatgctcttcttgctttcaccctangtgtgaagcagatgatctgttgctgtaacaagatggatgccactacccccaagtactctaaggctaggtatgatgaaatcgtg

SEQ ID NO: 52616 - DNA, 420 bp, Glycine max
  unsure (1)..(420): unsure at all n locations
  Clone ID: LIB3109-019-Q1-K1-F1
agaataccaaaaaaccaatatttcctgggcccttgcctagataagacgggatcatttaactcncccaaaatttaacaacactatgtgaccctgaaaatgatcacaacttatttcactcttttcattatgagcaacctactcttttacccatcccaaccactaaaagttaaccatttttcgaaatccctatcaaaatttgcacctacagcacgaacccatttaaaattcttaccaacgccgcaattccactaccaaaaaagatactttcaacaacgcacttaacacttgaacttctcaaagctacccacgtttgctaaacgctaccttatcattaccgaacacttggagagtccacatcaacttggccccattttttttttatatggaaactaaagctacatcgaatggttctgccaaaac

SEQ ID NO: 52617 - DNA, 402 bp, Glycine max
  Clone ID: LIB3109-019-Q1-K1-F10
ggagactcgaagtgtgaagcactgagcagttgaggaaatgggaacccttgggagagcgatctacagcgttggtaactggattcgagaaactggacaggccattgatcgtctcggttcccgtcttcagggcggttactacttccaagagcagctctctaggcatcgaactctgatgaacatatttgataaggctcctgttgttgataaggatgtatttgttgcgccaagcgccttcgtcattggagacgttcaacttggaagaggatcatccatttggtatggaagtgtcttgagaggtgatgttaacatcatcagagttggaaatggaactaacattcaggacaactctctggtgcatgttgcaaagtcaaatttaagtgggaaggtgttgcctacaattat

SEQ ID NO: 52618 - DNA, 173 bp, Glycine max
  Clone ID: LIB3109-019-Q1-K1-F11
ggagcgaagaagatattaaggtttttgagtgcggtgcggcgatcctagcactctcttctgcagctttcgccgacagcttcattcaccatggctgagtaaaccgagaaagcttttttgaaacaaccaaaagtgtttctcagctcgaagaaaactgggaagggaaagagaccccg

SEQ ID NO: 52619 - DNA, 392 bp, Glycine max
  unsure (1)..(392): unsure at all n locations
  Clone ID: LIB3109-019-Q1-K1-F12
ggaagaaagtgtgaggtcaggtcgaacagcaagacgaggaaaacgcacgtagcgtcaccgccatcttccatctaaaaccccaaaacttaacatgcccaatctgtgtcgaaaaatgtttcaataatggttctgttccgcaagttcctaaaacaaatactcgtcgacaacacccaaaccaaaacaaaagcccgaacctttttcacctcaacctcaaccgcaaccgcattcccatggtgcgcgcctcaccataacaaccgcctcttccggtccccaggcccaggcccaagcccaagccctctcttcctcgctcggcctccatggaaactctctcagtccgncacccctctctattcgcacggaaacgccttcaatttgcttcgctccacaacccc

SEQ ID NO: 52620 - DNA, 157 bp, Glycine max
  Clone ID: LIB3109-019-Q1-K1-F2
ggtggagcgaaatggatgcggcattgtcgtccatcgctccaaagagctcaagcgcatcatcactgccactgctttcatcctccaacaactatcgccctgccgttattctcccaagcttaaggaacaactccggtgactaccagagtttgaagcaaac

SEQ ID NO: 52621 - DNA, 417 bp, Glycine max
  unsure (1)..(417): unsure at all n locations
  Clone ID: LIB3109-019-Q1-K1-F3
ggcgataaaacggagaaaagaaaaaagaaaaatggaagtggaagaagagaaagtggcatcgcttaggtacagatacagacacaacctggtaaaaatcccgaccccagtgccgcacaattttccttcactcgcagcggaggtttacttttgatctagtacctgctatccctatgtataagcatggacttctagcatactattgtttgattaaccaagttcttccatattggttgaggaagcctcgagtcaatatttagtttttgctgccatctgtgggtttctgatggatgatgccgggcatcgtgaaaatggaaggcacaaagcagcagatcaatataaatctgctcanggacagtggttgatgcaacatcagccttccatgaagcagattatggcaattatggctgaaagagatgt

SEQ ID NO: 52622 - DNA, 297 bp, Glycine max
  Clone ID: LIB3109-019-Q1-K1-F4
ggctataaaacgtataaaagaaaaaacaaaaatggcaccacggagaatataaagtagcaatcacttaaatacatatacaaacacaacctgttaaaaattcttacctcactaccacacatatgcccctcacgcccagacgaacagaactttgaacctaccacctacaataaagacttataaaccatctcttccagcaaacgaaccttgacacaaaccaaaaccactacatattctgattatgaagacaccaataaataaccaacttctactgtcaccaaacctatacttataaactat

SEQ ID NO: 52623 - DNA, 415 bp, Glycine max
  Clone ID: LIB3109-019-Q1-K1-F5
ggatagagagaggtgaaaagaaacgttgcataaaaaatcaaataatgcgtgtggctctcactcaacccacctgggacctggctcggaagtgctaagaaagttacaaagctcttttctcctttcttctctgtggtgtgtgtggtgatggtggttgtggtggtggaggggaatcccatttgctgctccaaccgcaaagtgcagatatttatttgtattgtaccctcttttgtatttattggtttctgtttttgtgctaataatgggagaggaagcacaggtaaagcacttcagatcataggtacttttttttttttttaactttaacacaactttgtgattatttccagaggggaaggggcatgtacatatggttcattttggattgtaaacagtgacctagaatcagttgaataaa

SEQ ID NO: 52624 - DNA, 278 bp, Glycine max
  Clone ID: LIB3109-019-Q1-K1-F6
aaccaccgtttggggatttatagaggtgaaacgaaacggggataaaggatcaaataatacgagtggctgtcactcaacccaccacagacactcttaggatgtgctaagaaagtaacaaagctatgctatcccttcccctattaacagagtgaggaaacaacccttgacaacaaagactgaaaaaccatctgtttcttctaccgctccttgcttagatgcaaacgactcaccccctgattcggacgaccccaaatactcacttactctcatcttcacta

SEQ ID NO: 52625 - DNA, 416 bp, Glycine max
  Clone ID: LIB3109-019-Q1-K1-F7
ggaacacatgagaaagcagaaaccaaagaaccatgaagtctctggggtccatcttagcaacttttgtggttctattatcaatttcactcactatctcacttccaattgaagaagctttcaaccattgtctaacacaacactctcagactccaaaccaatttccctcatcaatctacacttacaccaatggttccttcacttcaatccttgagtccacagctcaaaatctaaggtacttgttgccctcagtgccaaaacctgatttcatattcaccccactggatgactctcaagtccaagcagcagtggtttgtgcaaaaaagcttggtattcacatgagagtgcgaagtggagggcatgactatgaagggctctcttatgtttccctcattgagaagcctttcatgatcctagac

SEQ ID NO: 52626 - DNA, 417 bp, Glycine max
  unsure (1)..(417): unsure at all n locations
  Clone ID: LIB3109-019-Q1-K1-F8
gtgaaagaaagtgattacaagagctgcaccacaggcaattcactaagcacagacagcagtggcaccaccacaatcaccctcaagactgccggcactcactacttcatatgtgcttctcctggccattgtgatggtggtatgaagcttgctgttaaagtaaaggctaaaaaagcatctgctcctgctacagcaccttcaccagctgcaaaggactcaccttctgattctgatgacaccaaagacacacccacttncacctgcactaaccctaaaacttcaacctccaccaccccttcaactgaaacctccaccactaccacatcttcttatacatcatctgcaactgctgctggctccccaaattgtgctatgttttttgcttctttgatcccatactttgtgttgccgttgatgtga

SEQ ID NO: 52627 - DNA, 319 bp, Glycine max
  unsure (1)..(319): unsure at all n locations
  Clone ID: LIB3109-019-Q1-K1-F9
gcacaaaagagaagaagaaaagtctaggaaaactaaagcatggagaggccaattcattcatccccctcttcagagagccaagtagcattgagaaaatctttggggactttgaaagggagcaacaactactggggttaaggcctgccactcctccggagaggcctaaaacgccaccttatgcccctccaagagctccttctcctaggcctccctctccaagggttccttcttcaaggcctncattcccaaagggctgttcttccagggccggtttttccgcaggtaacctttccaaaggcacgtttttccggaatggtta

SEQ ID NO: 52628 - DNA, 428 bp, Glycine max
  Clone ID: LIB3109-019-Q1-K1-G1
ggagagagaagggttagaagggtgaagaagcatgtgttcactcaagaagaagaaaccctattacccgcttccgttaattcctatctagtactactactttacttctgattcaaaagggtgatcttcttcttcttccaagcttatcaattatcatgcatatgctactttcttctctcttctcggggaattgaagcgttgtggtccgattgtttgctagatcaagcaaattaacctatatactggtctatatcatcatcaccttgcacctctctctctctctctctctctatatatatatatatatatatgtgggtttaatctcttactttctttatcttttcacttttttcagttttggtttgatttaattacttgattaaaacttacatatatggatttgaatatatagtacgtggttttcgagcttg

SEQ ID NO: 52629 - DNA, 425 bp, Glycine max
  Clone ID: LIB3109-019-Q1-K1-G10
ccaaggctgatggtgggaaaggaaaaattggagagagtacaaatttaagaggaaagataacattaccaaccttgggagctggcgaacaagcatacgatgttaattttgaatgggacagtgacttcggaattcccggtgcattttatattaagaacttcatgcaaaatgagttctacctcaagtctctaattctcgaagacattccaaaccacggtaccattcacttcgtatgcaactcctgggtttacaattcagaaaactacaagactgatcgcatttactttggcaacaatacatatcttacaagcgagacaccaactgcacttttgaagtacagagaagaagaattgaagaatgttagaagggatggaactggaaagcgcaaggaatgggataggatctatgattatgaagtctacaatgac

SEQ ID NO: 52630 - DNA, 418 bp, Glycine max
  Clone ID: LIB3109-019-Q1-K1-G12
ggtgtgactaacataaaataattagagagagagagagagagagaggatatgggttcgaagaggtatgcgctattgatgtgcggtgaggattcggagtacttggtgaagatgcacggaggcacctatggggtattcatgaagttgctccaagagcaagaggaaaagtgggacctctacaagctcgtccaaggagagttcccggagcagcatgacttgcctctctacgatggctttgtcatcagtggaagctgctatgatgcacatgccaatgacccatggatccttgacctcattgctctcgttatcaaattggactccatgcacaagaagatccttggcatttgctttggccaccagataattgggcgtgcattgggaggaaaagtgggtcgctctcccaatggttgggacattggtg

SEQ ID NO: 52631 - DNA, 370 bp, Glycine max
  Clone ID: LIB3109-019-Q1-K1-G2
ggagaaaaagttcttgttcaggttgaagattttgcaaaccacaatgctttgagttgcttgcaaaatatggcacaactcatcttgttttcaacgatgatattcaggggactgcatctgttgttcttgctggggttgtggcagccttgaagctcattggaggtactctggctgaccacacattcttgtttcttggtgctggagaggcaggaactggaatagcagaactaatagctcttgagatgtcaaagcagacaaagacacctatagaggagactcgcaagaagatatggcttgtagactcaaaaggtttgattgttggttcaagaaaggcttcacttcaacacttcaagcagccttgggctcatgagca

SEQ ID NO: 52632 - DNA, 431 bp, Glycine max
  Clone ID: LIB3109-019-Q1-K1-G3
gatcacaacaagacataaacaagaatgttgacatgagtgctgctaggcgtagagaacgtgagtactttaatagtacccctgaatataaacaccttgcaaacagaatgggttctgaacatctggcgaagatgctctcaaagcatttggagacagtaatcaagtccaaaattcctggcattcaatccctaattaacaaaacaattgccgaacttgaagctgaactaactcgtttaggaaaacctgttgcagctgatgctgggggaaagttgtatgctatcatggaaatatgccgctcatttgatcaaatatttaaagaccatcttgatggcgtgcggcctggaggtgataaaatttataatgtctttgacaatcagctccctgctgctttaaaaaggttgcagtttgataagcagctttcaatggaaaatata

SEQ ID NO: 52633 - DNA, 383 bp, Glycine max
  Clone ID: LIB3109-019-Q1-K1-G4
ggagtagcgatggagaagaagaagggtgagctaaagtcaagggtccttcctttcctttccactagtcacataatcccgctagtggacatggccagactcttcgccttgcacgacgtcgacgtcaccatcatcaccaccgcacataacgccaccgttttccaaaagtccatcgatttagatgcgagtcgcggtcgccccatcagaacgcacgttgtcaacttccccgccgcacaagtgggtctccccgttgggatcgaagccttcaacgtcgatacgcctcgggaaatgacccccagaatctacatgggcctatcccttctgcaacaagtcttcgaaaaactcttccatgacttgcaaccggatttcatcgtcaccgacatgtt

SEQ ID NO: 52634 - DNA, 418 bp, Glycine max
  Clone ID: LIB3109-019-Q1-K1-G5
gggctcaaggaatttcgcttagttctttgcagaaaaatcagtgcagatgagagcaaattgaatttagaagccaagatcaagatcagtatggaatatcctctaaggcctcctctttttgcattgagcattagttgtatatcttctggggaaaaccatgatgagacaggtttggagtggtacaatgaacttcgtgcaatggaagcagctgtcaatctacacatactaaagatgttacttgtcaatcaacaaaattatgtattggctcatcaagtgaattgtcttgctatgttgttcgactattatttggacgaggcatccccatcatctgaaaggacaaattgtacttccgtggttgatattggcttatgcaagcctgttactggtagattcctgggtagatcttttagaggaagggatc

SEQ ID NO: 52635 - DNA, 422 bp, Glycine max
  Clone ID: LIB3109-019-Q1-K1-G7
gaagatgggtggctgtaattatctgcagctacaagtgtgcttaagctgatactcttcaactggagaacattcataagtgagcgaggttaatggatcttgaatccagcaagtgttgggacacctcaaagggctcttggaagactattctgctcttggcctaccaaagccttggtgttgtatatggggacttgagcatttctccattgtatgtttacacaagcacatttgctgaagatattgagcattcagagaccaatgaagagatttttggtgccctttcttttgtcttctggactctgacactggtgccactcttcaagtacgtttttgtggttcttcgagctgatgataatggagagggaggtacttttgctctatattccttgatttgtaggcatgctaaagttagtctcctaccaaat

SEQ ID NO: 52636 - DNA, 428 bp, Glycine max
  Clone ID: LIB3109-019-Q1-K1-G8
gaaggagaaggagatttctgttgaatgatgaggaacctaccctcttgtgctgattgagaataagaaccagaacaggttgcagttaaaaaaatataacttgatgcaaagaggagtagcagaaccatataacaaaccgaaagtaaaggaaaagaaaagaagtgtttgaatttgatcgttaaactgagggagaagaagatgaatcacactcgcttggagtcttgtcatgaatctccccttaaagtatacaaattctgttttgtcccagaaaaacttggtgatatggttatactcttaataaggtttggcattcttgtgtgtcttgttgcatccatatcacttgctctccactcagcattctctaaaccagaccggtggttcccgttaccggagcatattcgcgccgtccagaatacttcagtcattgacaa

SEQ ID NO: 52637 - DNA, 418 bp, Glycine max
  unsure (1)..(418): unsure at all n locations
  Clone ID: LIB3109-019-Q1-K1-G9
gatggaaatggaacaaccaatggggatgaagtgcgaaagggcgattgaaaaccgagtgatggtgctgagaatggagatatggaagaaggaaaagattaagatgtggtgaaaaggatggttactgtggaggactggcttcttcaatttgcaaggatgttcaagaaccatgtanggtttgagtctgattcttatctagatactcatgagtatgcaatgaaactgtatgaagaaacaatagaggattcagtggcaagcaatgatgctcaagaactttttagaatggctgcggataaatttcaagagatggctgctttggctttgnttaattggggtagtgttcagatgtccctggcaaggaaccaaggtttctttttggaggatggggcaagagagtcttncttggagcatataaaagctg

SEQ ID NO: 52638 - DNA, 431 bp, Glycine max
  Clone ID: LIB3109-019-Q1-K1-H1
ggaagtgaagcgggaaagagacagaaccgaaaatggttgcgactttgagtcttccgatcatagacctctcttctccccatcgtctttccacagccaattccattcgtcaggcatgcgtggaatatggtttcttttaccttgtgaaccatggggtggacaccgattttgtgagcaaagtcttcgaccaaagttgcaagttcttctcgcttccggtccaacgcaaaatggacctggcccgcaaggaatatagaggctacactcctctctatgctgagacacttgatcctacttcactctccaaaggtgatccaaaagagacctattacattggtcctatagaagatacctctattgctcatctgaatcaatggccttctgaagaattactgccaaactggagacctacaatgaaatccttatattggaaacta

SEQ ID NO: 52639 - DNA, 389 bp, Glycine max
  Clone ID: LIB3109-019-Q1-K1-H10
gacaaacaagtgtagaagaagtttttcattatagctccttttgtacttaaaatgaaattgtatcatatacatattgcagtactggcaaagaagtttatgaatgctaggaggcactactactgcacagattaatcatgagtcttccacaaactgcaactagccctactgcacatctgtatccacaggaacttcagcttaagctttaccaagccttcatattctcaattccaatactcttctgcatcattctcttcctcttgctttactagttctaccttaagagaagggcttcctatgtatcttcctgttctcacttgcttccaaggaccattgtcaatccaccaaccaccactgcgtatcattcctcaccttgtcgtttggatctgacc

SEQ ID NO: 52640 - DNA, 285 bp, Glycine max
  Clone ID: LIB3109-019-Q1-K1-H11
gggatctaatgaacgaatgcatctttgatgttgacaccaacgttttgcaaagtctagattagaaacttgtgtaactggaacagatatgctcattcttatcttgaatcaagaccctaatcttctgcgatcctattttgttcgacaggaaagattcgctatttttggacttttgggtaaaggaatgttcacagattttggagaagacatgcactgtcagtatctttgaaaccttcgtaattcatttgactcatgcacatcttctggaccacagagggacactattat

SEQ ID NO: 52641 - DNA, 368 bp, Glycine max
  Clone ID: LIB3109-019-Q1-K1-H12
gcttatgttgagaagaagaagatatgtactcttgaagatctatgggatgatgagaagaagaaggcgcaacttcattggacattcatattctgaaaccttattgtgcaatgggctcagcggatagcaaatttcgtgttaggatctggatctatgcacgggcgtctaatatcatgtccttatgctgcactaaatatgcgcaacaataggatgtttgctccatctctaagccatctgactgaagcacgactgagagatctacgacggccgctagaagttgcatatgatggtgctaaagcttagcaccaagacgcacttgaacaatcgtggaaattggcttacccggacagtgagcttgcttgacttaaatc

SEQ ID NO: 52642 - DNA, 381 bp, Glycine max
  Clone ID: LIB3109-019-Q1-K1-H2
gttgtacaatttgatacaaccaaaaatcgatatttggctggaggcgatgatttctccattaaattctgggatatggacaatattcagcttttgacaactgttgatgctgatgggggtctccctgcaagcccacgaatccgttttaacaaggatggagctcttttaactgtttctgcaaatgagaatggaattaaaatcttagccaatgcagatggtattcgtttgttacgcacattagaaaattctttatatgatacatcaagaacatcggaagccatgacaaagcctacaataaatccaatttcagcagccgccgctgctgcaactagtgctgcacttgcaaagaaggcctcgtctgtggtagcgattactgcgatgaac

SEQ ID NO: 52643 - DNA, 420 bp, Glycine max
  Clone ID: LIB3109-019-Q1-K1-H3
gttttacaattttatacaaccaaaaatcgatagggggctgggggcgatgatttcggcattaaatcctgccatatggacaatattcagcttttgacaactgctgatgctgatggacgtctccctgcaagcccacgaatccattttaacaaggatggagctcttttaactgtttttgcaaatgagaatggaattaaaatcttagccaatgcagatggtattcgtttgttacgcacattagaaaattctttatatgatacatcaagaacatctgaagccatgacaaagcctacaataaactcaatttcagcagccgacgtttctgcaactacggctgtacttgcaaagatggcctcatctttcgtagcgattactgcgatgaacggagatgcccgaaacttgggtgatgttaaacctactata

SEQ ID NO: 52644 - DNA, 341 bp, Glycine max
  unsure (1)..(341): unsure at all n locations
  Clone ID: LIB3109-019-Q1-K1-H4
gaaagcaaggaaggaagaaataaaccgaatgagagcattaacctcttcttcttccactttcattccaaagcgttattccttcttcttcttcctctccattctcttcgctcttcgatcctcgtccgggggctgctccgaataccaccaccaccacgcgccgatggccacgataggaggcttacgcgactcccaaggctctcagaacagcgtccaaaccgaggccctcgctcggttcgccgtcgatgaacacaacaagaagcagaattcacttctggaagtttctaaggtggtgaggacacangaacaggtttgtgcgggaaccctgcatcaccttactctcg

SEQ ID NO: 52645 - DNA, 421 bp, Glycine max
  Clone ID: LIB3109-019-Q1-K1-H5
gacaacttcatttgttgacaatcatcagatgaatggtagtcagagaaaaaggcgaacaaacccaaatgaagcactggtcttgtccactgcacctgaggaccctcctacacattggcagcaggtgcagtatttattttttcaatttccagtttaaatatctggttctagttttttgttcaatgaatgtatatacaagtctgttctcaatgcttttcttaagcatacatgaaaataaaaatgtataagatgtctttgatctggttgcttatttgtattcaattcttaataactccatagttggatcccagctatatgcttgcgccacacttgcagcaaggatgttatcacctcaccaagtagcttgtggtgcaagattacattgaagcacagccacacacaccgaaaaaactaaatatgcttt

SEQ ID NO: 52646 - DNA, 496 bp, Glycine max
  unsure (1)..(496): unsure at all n locations
  Clone ID: LIB3109-019-Q1-K1-H7
ggaagaaccgaaccgaccgcacgcgttcgtacagctccaaaaaaacgacttttttgagttttctaaattcttaaacatcanatgtggccacaatctgcggattattaaaagagtcatttcgcgtcacattcatacattccaataacatcaaaacatatctaacatctcaccattctactaacaccattacttcactttttctaattcaaaatctcactatctatatgcttatctcaccaaaaaattataaatgcatagattaaacaatccctaccattttccctattaatacatcaaaaccattgcaactatctttttcatgattctcaacaacctatattacatatattctagacttcacattccatatcttttttttttgatatacaccaaacttcatgactcatgaaatttctatttggctttattgcatttcatggctaaacttaattctatccctcaaaaaaatttttattggacaacaattctaaatttt

SEQ ID NO: 52647 - DNA, 422 bp, Glycine max
  Clone ID: LIB3109-019-Q1-K1-H9
gagataaagagtggcttagtccaaaacctcacacgactccctttgttgcgttgtgtttcctttcgccgaaaccctcgctcgcaacttctacagaatccctttcaccatggatattgaggaggacatccgttctttacagctcgattcagcagaagacaataatggggtggtaaatgcagaggatggaaggccagaagaagttgagaaatctgataagatggatgaagatccaaagcaggatgttgaggctgagccaaaagctgttgaagctgagccaaaagtgaaggataaggaggttccttctgttcaagatgaagaagatgaaccagagatgacaaaaagacacttgaatgttgtttttattggtcatgttgatgctggtaagtctacaactggaggccagatacttttccttagtggtc

SEQ ID NO: 52648 - DNA, 434 bp, Glycine max
  Clone ID: LIB3109-020-Q1-K1-A10
gaaggtgcaagagtttgttgtgagctataagctaggttatcgtgaggagaatatgaagttgtttgttttctttgttgctgcagtagttttggtagcatggccatgccatggcgcaggctaccaaaggttccctctccgaatgaaaactggctatggtgagcgttcttcggaggtaaaatgcgcaagttttaggcttgctgtggaagcacacaacatccgagcctttaaaaccattcctgaagagtgcgttgaaccaacaaaggactacattaatggcgaacaatttagatcagactctaaaacagttaaccaacaagctttcttttatgctagtgaacgcgaagtccatcacaacgacatatttatattcggcatagataacaccgtactctctaatatcccatactatgaaaaacatggatatggggtggagg

SEQ ID NO: 52649 - DNA, 433 bp, Glycine max
  Clone ID: LIB3109-020-Q1-K1-A11
ggcacaagtgagtttgttgatcgagataactagagacagtgtgatgaaaatgaaggtccttgttttcttcgttgctacaattttggtagcatggcaatgccatgcgtacgatatgttccctctccgaatgaacactggctatggtgcccgtactccggaggtgaaatgcgcaagttggaggcttgctgtggaagcacacaacatctttggctttgagaccattcctgaagagtgcgttgaagcaacaaaggaatacatccatggcgaacaatatagatcagactccaaaacagttaaccaacaagcttacttttatgccagagacctcgaagtccatcccaaggacacatttgtgttcagtatagatggcaccgtactctctaatattccatactacaaaaaacatggatatggggtggagaaatttaactcg

SEQ ID NO: 52650 - DNA, 401 bp, Glycine max
  Clone ID: LIB3109-020-Q1-K1-A12
tttggcacccaaaggtgcaaaaatattaataggataaacatttgagcacttgaggtactctctgcatttctcttcctcagctgtgcctatgcacaagacacaacaacccttgtgcctgcaatcataacttttggtgactcagtcgtggatgtaggaaataatgactatcttcccacccttttcaaggctgattaccctacttatgggagggactttgctaaccaccaacctactgggaggttttgcaatggcaaattagctactgattttactgcctacactttaggttttaagacctatgcatcaacatatcttatcccacaggcatcagggaaaaacctccttatcggagcatactttgcttctgctgtatctggatatgattaaaatgcttcttcttt

SEQ ID NO: 52651 - DNA, 428 bp, Glycine max
  Clone ID: LIB3109-020-Q1-K1-A2
ggtgatttgaaagataagccatggtggcaaaagatgcaaacttgtgaagagttgattgaagcctcggccaccctcatatggatcgcttcagcccttcatgcagctgttaactttggacagtatccatatggaggtttaatcttgaacaggccaaccattagcaggagattcatgcctgagaaagggtctgctgagtatgctgctttggctaagaaccctgagaaggggtttttgaaaactattactggcaagaaggagaccctcattgaccttacaattatagaaatcctgtcaaggcacgcatctgatgagttctaccttggggagagagatggtggtgacttctggacttctgatgctggtccactagaggccttcaagaggtttggaaagaagcttcaagagattgaacataagcttatacagaa

SEQ ID NO: 52652 - DNA, 433 bp, Glycine max
  Clone ID: LIB3109-020-Q1-K1-A3
ggtgacaaatggagggtccttagttctgtttctctttcttccctctgttctctcaaccaagttctcaattcaatcttcttcacccttttgatctgctaattctcaaggtattcaaaattgggaggttttcgtttgaattgtgatgtccaagccactgctaggcataggggaggaggaaggtcaaagcaatgtcactttgttggtttcttcctcagtcatcatggaaagtgtgtgcctgaatagctcaaaattgaaagagcgcaactacatggggttatctgattgttcatctgtggacagctccgcgccgtccttctcagatgagactaaaagcaatctgaaccttaaggctactgagctgagactggggcttccgggattgcagtctcccgaacgagattcagatctttgcttgagaagttcaattcagttt

SEQ ID NO: 52653 - DNA, 387 bp, Glycine max
  Clone ID: LIB3109-020-Q1-K1-A4
ggagaaagaaaagagtgtatgtatttatgcgtttgtgtgagagatagagagatagagagagagaaagagttgttgataaaaacataattattttttcttcttggtctttggagggtcatgtagatgtagtagctatagatttttggtttatttgttgataccctttttcttctttatcttatttttgttttgaaatctgaaacctttcaaaatcggttttgggtgtgagtgaatctcgtgagttgaagtttttttctttctttctatctttgcaccgatgaggatccggaaaaggccggcgcttttcccttcttcgctctcgccgctgcgtctctcagatccccacctgatcaaccggtcaccggtggtggtgcaactaagcgacgc

SEQ ID NO: 52654 - DNA, 392 bp, Glycine max
  Clone ID: LIB3109-020-Q1-K1-A5
gggtttatcagtagatgaacagaagaaaaagcaagaacagcggcttctgctgaatgacttaagaaacttagaagacaacactcaagattttgttagctgctgccaatcaagtggagttggctgctgccaatctaacggaggagactcttttttccgtcagaatcatgtgttattggaaaggagaatggaccccgatgttattgagtcagaggcaaagctctcagcagatagtaagagcagtgagactgtgatttctcggatcaatagtggtaaaggagcttcacgcaagtttctatccatgacaacttggctggatggctgggagcaagaagatacttatgcagctcttgctgttgtctgtgctgctgtgtcagttgccattggctataact

SEQ ID NO: 52655 - DNA, 378 bp, Glycine max
  Clone ID: LIB3109-020-Q1-K1-A6
gggactgcatagggggagattgtcacttgtcagcactcaggagtgatatcaggtgaagaagcagaagcagacgaaagaggcagaagatggtgagggtggacatatatcggccaatgaccctggagcaggttatggtccacaccgacatcgctggcaatgccaagaaatgggcaacggctcaggattgaccgcatttactattatatggaccatgtggctgcgactagaaaacgctaatgatggctctgatgcggcaaaagttcggacctggcgccgaaaaggtgaatgcggatgataggacctgtgaagcggatgctgggagtagagctagtgatgtagagctagcagcagtatcaagcgccaatcacattgaaatga

SEQ ID NO: 52656 - DNA, 388 bp, Glycine max
  Clone ID: LIB3109-020-Q1-K1-A7
gttgaaggaaatcttcgtgtacttgcatatgagtttgctactatgggctctcttcatgacatattgcacggtagaaagggagttcaaggtgctcaaccaggaccaactcttgattggatacagcgagttagaattgcagttgatgctgctcggggattggaatatttacatgagaaagttcaaccaccgattatacacagggatatcagatcaagtaatgtgctaatctttgaagattacaaggccaagatagccgactttaacctttctaatcaggcccctgacatggctgcacgccttcattcaactcgtgtattgggaacttttgggtatcatgctccagaatatgcaatgactgggcagttgactcaaaaaagtgatgtctata

SEQ ID NO: 52657 - DNA, 412 bp, Glycine max
  unsure (1)..(412): unsure at all n locations
  Clone ID: LIB3109-020-Q1-K1-A8
gatcacagaagcaattaacatattctcctctcattctcactcaaaacacaaaatcctaactaaggtgaaaatgaaggcatcacgcattgctttgttcactttggtggtgcttctttttgtggctgaagttcaagtgtcaaaggcagtgacctgcagcccagtgcagctgagtgcatgtgtgagtgcaataacctcttcaacccctccatcaaacctatgctgctccaagatcaaggaacagaaaccatgcctttgccaatatctcaagaaccccaatctcaagaagtttgttgactctcctaatgcaaggagagttgctaacacttgtggaactcccttcccaaggtgctaaggtgttactaaatttgaagtggttntaatttctctgcctgattatgcatcttgatatcta

SEQ ID NO: 52658 - DNA, 236 bp, Glycine max
  Clone ID: LIB3109-020-Q1-K1-A9
ggagaaagaaaacaagcgatatgatcatcatcaagcacattgaggaacgttctagagagagagaaagagttgttgataaaaacataattataagtcgttgcttctctctcatggaaaacacagctgcgttgggggaacttgaagtgctccatgacgacaacgccatcataccctaagccctcggagattccgtggcagaaagagctctgcaactccgtcaacctcatcggcaatgt

SEQ ID NO: 52659 - DNA, 428 bp, Glycine max
  Clone ID: LIB3109-020-Q1-K1-B1
gaggtcgcgagcgagcatcttcgagttgcatttcgcagtgtgtgtgagaagaagagaaaaatggagaaaatgatgcgactgagaccactgttccgatcactgagttgcagatcttatcatgccttcccattcatcaaccatgtcgttcttcgaccttctcttatctctcgctctcccaatcctcttccttctccttcacactcagaatgcatgtctcctttctcgatgggtttagggagcatgcgattctatagtgaagatttgacccacgtgcccaatattaaggaccctgcactttacaatgctttcaaggatttgatggcagtaagttggagtgagcttccggattctgttgtatctgatgttaagaatgtgttgtctaaaaacactgatgacaaagctggcaaggaggctgtggaaaatgtgtt

SEQ ID NO: 52660 - DNA, 422 bp, Glycine max
  Clone ID: LIB3109-020-Q1-K1-B10
ggcgcacccagagaggaggaagctttgagagagagagagggaggagggagagtgttgacgctccatcaagatgggtatttctagggattccatgcacaagaagcgtgccactggtggcaagaagaaagcatggagaaagaagagaaagtatgagcttgggcgtcaggccgcaaacaccaagttatcaagcaacaaaactatccggaggattcgtgttcgaagtggcaatgttaaatggaaggcattgaagttggataccggcaattactcatggggtagtgaagcagttactcgcaagactcgtattctaagatgttgttacaatgcctcaaacaatgagcttgtgcgaactcagaccctggtcaagaatgctattgttcaagttgatgctgctcctttcagcagtggtaccttcagcacta

SEQ ID NO: 52661 - DNA, 434 bp, Glycine max
  Clone ID: LIB3109-020-Q1-K1-B11
gccttccaaacctttggctaccaacaaacacacacgcacacacacttggatcaactttcctcgtcccttgctttccactccaacacggtaccaaccaacctaccaaatggcagccaaaccagctgaagaagctcctcaaggagaaaccctcaagtaccagacgtgggctttgaaagtattgatccactgcgatggctgcaaaaggagagttaagaaaattcttcagggaattgatggggtttatacaacagaggttaattctctgctgcacaaggttacggtcaccggtaacgtggacgctgagactctcatcaagaggctttcaagatcagggagggtagtggagctttggccagaaaaaccacctgagaagaaagataataagaagtctgggaaatccaataagggtggtgctggtgatgctaataaggaga

SEQ ID NO: 52662 - DNA, 383 bp, Glycine max
  Clone ID: LIB3109-020-Q1-K1-B2
gaccgttaaacgaaagtaagaactaacatctcgttcaccgcttgtactttggatgatgatgaggtgagtgtgtaacgagaaggtagggtagggtgcagattgcagaggattgggaattttgaatttgaacaacaatccgagcttgcttgtttcctcgttctgttctgagctctaatggaagcactatcccttcccataaacactctcaccaattcctctgccaaacaacacatttatctgagtgcttctttcaattatgcctcagtctcttcttccttacaactcaatccttctcttccaaccagacccctcactctgaggaaaagcgcggttcgagtccaagccgagaatgaagattttgaattgaagcaaatgagggacat

SEQ ID NO: 52663 - DNA, 408 bp, Glycine max
  Clone ID: LIB3109-020-Q1-K1-B3
gggttgaagggtagggatgaaatgagagcgagaggagatgaagctgataaagggcagtgttgtgttaacaatcacaatcacattaagtagcgccattctgttgctactattgttcccacaaaaccaaaagccatcttcttcttccatgtcgagggcgcgaagctttgttctgtggcttcacggcctgggtgactctggtcccgccaacgaacccatcaaaaccttattcacttcttcccaattcagagacaccaaatggtccttcccttctgcccctttcgcccctgtcacttgcaactatggttctgtaatgccttcatggtttgacattcttgagattcccgtggcagctgattcttcaaatgacgagagtagtttacttaaagctgttcgaaatgtgcatgctac

SEQ ID NO: 52664 - DNA, 414 bp, Glycine max
  Clone ID: LIB3109-020-Q1-K1-B4
ggtcctccgttggttataataataacaataaaaaattcattagattgaaggtttctttgtttctcaaaaccctcttgattctactcctcttcatcctcaaattcataacccttttacagtttcacctttccctgcttctctcaattgtgcttggcctttaactggctatccacgttgccggtcgatgatcaccgtttctctgtttgcttcgtatcccataattcacctcaattcggttgtggccatatatattcttctttgatcacgacccatataccggtttccattgaaaactgatcacggcttttctggctttatctagaactgaaatgccattttcaagaacctgaggattcaaagctctagtcttggcacagtgttacaagttcataatggatttgaagattcaacata

SEQ ID NO: 52665 - DNA, 425 bp, Glycine max
  Clone ID: LIB3109-020-Q1-K1-B5
ggacaaaactcgaagcagaaactcaactcaccaacacagttgcattattttctttccagatccaactcaaaattgcaatgggagtagaagatacagatatttgtatcatcaaggagccagatcatgttgtagtctattcagatggcatttcccatgattcaggtcatgaagctggaagtgatcatcacaatattacagagtcttatgaacaaatcaatgagactactgaacatcatagttcagaggagagtgcaaaggaatatgaggtgaaggaatgtacaacagaaatttctgttaaggtctctgatgtctctaatgttaaaaaatgtgaggataagttaacctcagattctgagggtgtcctcagtgagaaaagttttaaatctcacaaaacaaggggtaaacataagccacgagataccggg

SEQ ID NO: 52666 - DNA, 401 bp, Glycine max
  Clone ID: LIB3109-020-Q1-K1-B6
gacggcaacagaagaataatcaaatttctcagatctatccgacgtcgtcgcagatccaccaaccgttatggctgccttcagcggtgatgaaacggctccgtttttcggcttccttggagccgcagctgccctcgtcttctcctgtatgggagctgcctatggcacagcaaagagtggtgtgggcgtggcttccatgggtgtgatgagacctgagctggtgatgaagtctattgtccctgttgtcatggctggagttttgggtatttatggccttattattgctgttattatcagtaccggtattaatccaaaggccaaatcttattacctctttgatggttatgcacatctctcctctggtcttgcctgtggcttggctggcctttctgctggcatggcta

SEQ ID NO: 52667 - DNA, 409 bp, Glycine max
  Clone ID: LIB3109-020-Q1-K1-B7
gggggaagtttatttcaaaaccttttctatgagtccttggctttaacatcagcaacgtttgcgtccgctctctacaacctcattccagccattacctttgtcttggccatctcctgcggtttcgaaaggttaaatttgagggtggcagcaggaagggccaaggtgttgggaactttacttggaattggtggagcaatgttgttgacctttatcaaaggggcagaaattaatatctggcctttccacatcaaccttatgcatccagatcagcaccaaaacagccacgtggcatcattaaatactgactctggcaataataagttgttgggagcaatttgctccctagcaagctgcttctcttttgctttgtggctcaccattcaggctaagatgagcaaagaatacccat

SEQ ID NO: 52668 - DNA, 404 bp, Glycine max
  Clone ID: LIB3109-020-Q1-K1-B8
ggaggcaaaaaggagaagtgagataaagatgtgttgccagacataggcaatattggggtggtgggaggatattgagctctggtgatcataatggtgatcttgtgactaatttgcctggccagcctggggtgaatttccagcactatgctggatatgtcacagtcaatgaaaccagtggaagagcactcttttactggttctatgaggctatcaccaagccagaagagaaaccattggtgctttggcttaatggaggccctgggtgctcttctgtgggatatggagcaacacaggagattggtccatttttagtggacactgatggccaaggcctcaaatttaataacttctcttggaacagagaagccaacatgttattcttggaatctcctgttggagtgggc

SEQ ID NO: 52669 - DNA, 425 bp, Glycine max
  Clone ID: LIB3109-020-Q1-K1-B9
ggaaattctattattatgcacacaaaggaggaaaaatcaacacgaagatctcattctcgcagctgcaccgtttcaccttctaaatcagagtaccgttttttcatcagatccgtatacaaaactcctcagggaatgttgaattacgatattttaattcttgattggtagccggttttggctggatttgggttgttggtttttatatcagaaggagaaaggaataggttgagagttgaaagtgaaagtaaatttctgtttcaatggctgctgcttctggtgaaaggtggatggaccgtcttcagttttcctcattgttctggcctcccccactagatgatcaacaaagaaaggatcaagttgctgcgtatgttgaatacattggccaatttacatcataacaagtttctgaggatattgctgagttg

SEQ ID NO: 52670 - DNA, 428 bp, Glycine max
  Clone ID: LIB3109-020-Q1-K1-C1
ggagttagtagtaatttaagagagagaaagagagagtgagagagggagacccatccacttcttccatttccacaccttcacacaacacaacataacacaaaagcgctctctctaatatctagagacaggatttccaacgcactcacctctcagagcgcgtgcccttcaaacatgatcatcatcgtcttcttcctaggacctgtttcagattcttcgtagaggagtactagggctgatcactggatctttcaaatttggaatgatttgatggggaatatgacttgcagcttcaacaagactgattcaattgagtgctgtgaagctgaaatgcagaaggctgattctcaggaatctggtcctgcgttgaagaagtcaaaaaccaaaattttggcctctcaaaatgtagataattgtgaaatggaagaaag

SEQ ID NO: 52671 - DNA, 437 bp, Glycine max
  Clone ID: LIB3109-020-Q1-K1-C11
gtatgaagaggattacaatgagttggttgacatatactcttttggaatgtgcatcttagagatggtcacttttgaatatccttatagtgaatgcaaccatcctgctcaaatttacaagaaagttgtatctgggaagaagccagaagctctttacaaagtagacaatcccgaggttaggcagtttgtagagaaatgcttagcaactgtgtccctcagactttcagctagggaactcttggaggacccttttctccaaattgatgattatggatttgactcaaaagttttgcagtatcaaagagattgttatgaagtaacgccattaattagacaacctgtgaatggaatttgtatcattaacaacaacttaatgagtggggacactgataatattggtggttatgggcctgtatctgaattggattatcatcaagacg

SEQ ID NO: 52672 - DNA, 406 bp, Glycine max
  Clone ID: LIB3109-020-Q1-K1-C12
gacagattagggtaaccggagttgcaaaccctaaacgctacgattttaattttctggttttctctttttcaatcggtgcttcctccggcggcgcgtgggagtgtctttggcgcgtgattcctagttccccgcttacctatgcttcgctcgacccgcattgtagagttcacgccggagagactgcggaatctcaccggacgatcgtgatttcgcatcttcatggcttgcgcctaccggaacgaacctaattggccacggcatagaagcggtggagctggattcatgggaaaagtacctttctctaaccctaaccctaaccctaattctaaccctaaattagcgaatggcaagaagacccaatcggcgttcgatgatgcttactctatcaaccggagatcgaacgacg

SEQ ID NO: 52673 - DNA, 402 bp, Glycine max
  Clone ID: LIB3109-020-Q1-K1-C2
gactgaagtgaagagagaaacaatggccaatgtttcaattccactcccacgaaacggtttctccaaacccaattactcgacaaaacgcccatgtttcaccccttcagcttcaacactcagaatttcttgctctggagtggctgagtttgatggatctcatcagaaaaaaggaggtttgtttaatttcaatggaatcaagggcgtggcttgtggtattcttgcagcttgtgctgttacttctgctgcatttcctgttactgctgctactcagaggcttcccccattgtcaactgagcccaatcgctgtgagcgtgcatttgttggcaacacaattggtcaggcaaatggtgtatatgataaaccattagatctccggcaatgtgatttcacaaatgagaaaac

SEQ ID NO: 52674 - DNA, 421 bp, Glycine max
  Clone ID: LIB3109-020-Q1-K1-C4
ggaggtgaaggggaaaaaaaaaagagtagagtggataatggcttcgttatcgctttgcatagccatgagagcacccactccctcagcttctctcattctcactaccccaaaaccatcttcactctctttgaaccttacccgcacttgctccagcgctcgctctccgctcctccattgctccttcctctcttcgccttcccatctctcttccccttcctccgtttcaggcttgtcacttggattggatttgacatctaatgttgggaccagaagaggaaaaggttctggcctagttgtgagggcaggcaaggctgctctttgtctgactaagagaagcagatcaagaaaatcattggcacgcactcatggtttccgcaaaagaatgagcacaccaggtggaagagctgttttaaggcgacga

SEQ ID NO: 52675 - DNA, 404 bp, Glycine max
  Clone ID: LIB3109-020-Q1-K1-C5
ggcagtgaaagaaacaacaccagatggtgaggaggatcaagagaaaggagtgcctgcattttggcttactgccatgaaaaacaatgaagtgttggctgaggagatttcagagcgtgatgaaggtgctcttaagtatctcaaagatatcaagtggagcaggatagaaaacccgaaaggattcaaacttgagtttttctttgacaccaacccttattttatcaattctgtcttgacaaaaacatatcatatgattgatgaggatgaaccaatattggagaaagcaattgggactgaaattcaatggcacccaggaaaatgcctgacacagaagattcttaagaaaaagcctaagaagggttcaaagaatgctaaaccaattaccaaaactgaaaattgtgaaagct

SEQ ID NO: 52676 - DNA, 416 bp, Glycine max
  Clone ID: LIB3109-020-Q1-K1-C6
cgacgataggggcattcgcgaatgtggaaccagctgtggctttgacacttataaatgttctcgagcacacattacagcgactaccaactgtcatctcagagaatattctctatacatgaaggcgtcgtcttgatgtatggacttaactacatattgatagcacagaccatgtaactgagcaacgcgcataatgtatggaactatattcatcatatcgctcaggagaaatgtattgttcgtgaagtccgttttacaattcggagagtcaatatacctgtcttgatgcccttgatatatctcgtcatcacatacatgggcatagctgacatgcttttccatagcaatctaggacggagtgctaaatcatactatcatttacgttagtttataggacatgataccttactggggacata

SEQ ID NO: 52677 - DNA, 417 bp, Glycine max
  Clone ID: LIB3109-020-Q1-K1-C7
ggtatggatattgatggtgatacacctagcaaaaaacagcgtctgagtagatcactgtcacggtccaagtcagtgtcacgcccaccacatgaaggtgtgcctggagaaagttacaaggattctgctcaaaaggtcaaggcaattaaacttgcaaagaaatctgtcaagaagagaaacaaggatgcccgtcgtggagaagctgatagagtcatacctaatctgaagcccaagcacttgttttctgggaagcgttccaatggaaaaactgagagacgctaggacaggggatgcttgtttcttcattttagagacacctgttggcatttttcgtggctgccaaaattttggtatttcatattagtgttttgtgttggagtttaaggtgctgtgttggcaacatagtttacttatacatct

SEQ ID NO: 52678 - DNA, 413 bp, Glycine max
  unsure (1)..(413): unsure at all n locations
  Clone ID: LIB3109-020-Q1-K1-C8
gaaggaaacgaatttattcttctcttgcactcgtctggagtcaagactctggaggagccttatcccgatccgcaagaacacgcaaacaccgatcaattaattttctttatgctagatggggagtgcatcagagttcgacccagcgcttgcgctttcccacaaattccctgatgtaatattctttgcgtaatctttttcttttctttttagtaggttttcctaatttacaacaaactgaattctgaatttctgttatcattttgatcgtgcgagatgctctgcagactacgtactcttataccgaaagggatgcagcactttatgccctaagcgtangggtgtgtttgtcggacgctgttgacgctgatgagcttaaatatgtttaccatgaaaatggtcaggagtctatcaag

SEQ ID NO: 52679 - DNA, 420 bp, Glycine max
  Clone ID: LIB3109-020-Q1-K1-C9
ggcaatcagcaaccaagatgactcaagcccagattcaaccagttaaacttggaacccaaggctttgaggtactattaactacattacttgctcttattttgataattgatacaattaatctcattctaggtttcaaaattgggattcggatgtatgggccttactggagcgtacaatgaccctctccaagaacaggatggcatatctgttatcaagtatgcgttcagtaagggaatcacatttttgatactgcggatgtttatggagccaatgctaatgaacttttggttggaaaggctttgaagcagctgcccagagaaaagattcagatagccacaaaatttggtattgcttcacgaggttttcctgatatgaagatcaagggttcgcctgaatatgtgcgatcatgctgtgaagcta

SEQ ID NO: 52680 - DNA, 436 bp, Glycine max
  Clone ID: LIB3109-020-Q1-K1-D1
gaggaggaaaatgacaataatgaaaaggactcatcttccacagatgagcgatgtacagaactcaggcagagaaggcgaaagaggcggaccagaggtcgtccttctcagccctcatcatcgacggcaagtcctgatggtggatgcatagaaagtgacatggacataagaatttcttctagactggtgtcaaaacctcaaaaactaacttggggaaggggtggttttaggagtcacacacggcatggcagtggcaatggtagcaatagcaaaagttcccgcagtagtcgcttggctaagttagttgattatctccatagcttgaatgaaaacactgatgagttagatgtccatctcattcttttgtctttagacaaacaaattacaccaagcttgcagcagccacacctttgctgtcggccaacattgtctgtgaagc

SEQ ID NO: 52681 - DNA, 397 bp, Glycine max
  Clone ID: LIB3109-020-Q1-K1-D10
ggaccacataggattcatcattttccaaacgagcatcttcgtagtttcttaagtcaagagaagaagtgaagtgctgcttcaatggcttcaagtcaggaagaggtgatccttttgggggttattggaagcccatttctgcacagggtgcagattgctctcaaattgaagggagttgaatacaaatatttggaagatgatttgaacaacaagagtgatttgctcctcaagtataacccagtttataaaatgattccagtgtttgttcacaatgaaaagcccatatccgagtcccttgtgattgttgagtacatcgatgacacatggaaaaacaaccccatcttgccttctgatccttaccatagagccttggctcgtttctgggccatgttcattgatg

SEQ ID NO: 52682 - DNA, 309 bp, Glycine max
  Clone ID: LIB3109-020-Q1-K1-D11
gaggatgaaggggtgtggaagaggcgtttggagtgcaatgataatggctcgattcggtgtcctaatcgttgttcttgtagttcgcaaacaaaataatatacagaataaaaatttgaaaccgtggtgtgtgtacttgttttgttgttgttgcatgaaacatagatgcggatgcttacatgattctggtgttgttgtcctgtctgtgatagagtttcatagtgccgttagatcatatatctgatgataaacactgtcatcctactttcttacactttggtactgtttgactattatagtcctactctcacg

SEQ ID NO: 52683 - DNA, 417 bp, Glycine max
  unsure (1)..(417): unsure at all n locations
  Clone ID: LIB3109-020-Q1-K1-D2
ggagtgagcaagagtgaagagcgaagagaatggctcccaagggtttaatctttttggctgtgttatgcttctcagcactgtcactgagtcgttgtcttgcggaggataatggacttgttatgaacttctacaaggaatcatgccctcaggctgaagacatcatcaaagaacaagtcaagcttctctacaagcgccacaagaacactgctttctcctggctcagaaacatcttccatgactgtgctgttcagagttgtgatgcttcactgttgctggactccacaagaaggagcttgtctgagaaggaaacagatagaagctttgggttgagaaatttcaggtacattgagaccatcaaagaagctttggaaagggaatgcccaggaagttgttcctgtgctgatatcctcgntctct

SEQ ID NO: 52684 - DNA, 428 bp, Glycine max
  Clone ID: LIB3109-020-Q1-K1-D3
ttcatcacaagttttgaaaatgtgttttaaattgctgtggttcatctttttagctgtcaatatggagaaaggtgtagatatttacatgttcagcaacagcggaaacctaatgttaatgggtttggaggacagagcagttctcatcaacagcaaaatacaaatccctttggatttgggtctggctctggctcacaacaacagcagaagggtaatccttttggttttggcaagcataacagctcccagttgaatggggggcctcattctgagaacaaacccaaccaatacaaggttctcactctttcctatgcatatacatgacgtgaaggtttattttaattatatcgttttaattgttaggtattataatagatgaatacaccattatttatggtctatttttgaagggttttcattgctatgtctgc

SEQ ID NO: 52685 - DNA, 314 bp, Glycine max
  Clone ID: LIB3109-020-Q1-K1-D4
ggcacaagtgagtttgttgatcgagataactagaaacagtgtgatgaaaatgaaggtccttgttttcttcgttgctacaattttggtagcatggcaatgccatgcgtacgatatgttccctcttcgaatgaacactggctatggtgcccgtactccggaggtgaaatgcgcaagttggaggcttgctgtggaagcacacaacatatttggctttgagaccattcctgaagagtgcgttgaagcaacaaaggaatacatccatggcgaacaatatatatcagactccaaaacagttaaccaacaagcttactttt

SEQ ID NO: 52686 - DNA, 418 bp, Glycine max
  Clone ID: LIB3109-020-Q1-K1-D5
ggtttaagagaggactatatctggagattcatactatggctctcacgtgatgcagtatggtgatgtacggcttagcagtgatgttctcttccattatttgggtacagatcctgctaatgataatttcacttttgtggacgaaaactccttatggtcaccttcaaaaccagtcaaccaacgtgatgctgatctcatccatttttgggataagttccgcaaagctcctgagggttctctcaggaaaaatgcagctcagaaacaagttttggaagcaatgtctcatagaatgcatgtagacaacagtgtaaaacttattgggaagcttttatttggtattgaaaagggtccagaagtactcaacgctgttagaccggcaggatcggcacttgttgatgattggcactgccttaaaaccatg

SEQ ID NO: 52687 - DNA, 63 bp, Glycine max
  Clone ID: LIB3109-020-Q1-K1-D6
gaatgcagttgatcgtgctcaatggactggcagtgctgctcaactatcaagaaggcaattaat

SEQ ID NO: 52688 - DNA, 368 bp, Glycine max
  Clone ID: LIB3109-020-Q1-K1-D7
ggaggaaagaagagagagaacaaagcacttaatgctattcaataattacgaaaaaccaacagcgagtgttgtttttgtttggtccaagctggaccagggaatgaatagagatgagaggctttcggttgaagagaactgagttaagcggcgaaaccaaacgcaaaatcggcggcagaaattgccaccggaagcacgtcgaagacgggtgaaccaaacacaaaattccatccaccacttctcttttcaatccccaactcaaatctgtgaagaaaatctcaatttctaaattggaattcttagcactactgctagtagtaggtaaaaaaaacaattagaaagtagtagagtgtttttttttctttttttcg

SEQ ID NO: 52689 - DNA, 408 bp, Glycine max
  Clone ID: LIB3109-020-Q1-K1-D8
ggaggaaaagaggattagagggtcgccacgtttagcaataaccaaaccctctctactcttttttcttctccttctcttcgctagggttttagcttcttcctcttcacttcgttctttttcgcctctacaatgagcaacgacaaggacacattcaacgtcgccgatctcacttctgctctcaacgaggacaatagagcagaccttgtcaatgctcttaagagcaagatacagagtttggctggacaacactcggatattctagagtctctgtcgcccaatgtccgaaagcgtgttgaggttcttagagagatccagggccaacatgatgaattagaggctaaattttttgaagagagagcagctctcgaggccaaataccaaaaattgtatcaaccactttacacaaag

SEQ ID NO: 52690 - DNA, 357 bp, Glycine max
  Clone ID: LIB3109-020-Q1-K1-D9
agcgcaagagtgaatagcgaagagaatggctaccaagggtttaatctattcggctgtgttatgcttcttagcactgtcactgaatcgttgacttgcggatgataactgcactagttatgaacttctacaaggaatcatgccctcaggctgaagacatcatcaaagaacaagtcaagcttctctacaagcgccacaagaacactgatttctcctggctcagatacatctgccatgactgagctgttcatagtctgtatgcttcactgttgctggactccacaagactgagcttgcctgagaaggaatactatagaatctttgggttgagaaatttcaggtacattgagaccatcaaag

SEQ ID NO: 52691 - DNA, 413 bp, Glycine max
  Clone ID: LIB3109-020-Q1-K1-E10
gtggtctgtgtgaaacaataagtgaggttgtcttagaaagatggaagaggggacatttgaacaaccatctttggagaaacactattatgggaactgtcctggttgtaaggtggatcaagccaaagagctgagaaaggatgtttccattagaaatctttcttatatttggatggcagtgttatgtggcatacagcgctgcctgtagcatcactctttccctttgtttatttcatggtgaaggattttaatattgcaaaaactgaggcagatataagtacctatgctggttatgtgggattatcattcatgcttggcagggctttgacatccatattttggggaatgctatctgatcgctatggtagaaaacctgtattatttcagggatattacttgtgcattttcaacacata

SEQ ID NO: 52692 - DNA, 424 bp, Glycine max
  Clone ID: LIB3109-020-Q1-K1-E11
gggggaagacggactggaatgggaacaggaacagcttcttatcatagaaatcaacaaactcctgggtccgtccattctcacggaagtgccccttcggcggggagaaaagctcagacggtgaacgggaattacttgctgaattttcaatatgacccgatatcccgttctcaaccacggggtcctcctcctacccctaccactacaagaaggtatcggaagaggaagccgtacaacaaagatttgtttctgcaggcaaattacaagttcatggtgctaggtttgggaaattattcacctgagtcgatggatccagataaaatgttgcagtgggaagatattatatgtgtgacatatttgacccccttttcagttcagtgtccaatttgtttggagtatcccatgtgtccgcagataaccacatgtg

SEQ ID NO: 52693 - DNA, 401 bp, Glycine max
  Clone ID: LIB3109-020-Q1-K1-E12
gacactaaacaagttaaaagaagagcatgactgaactaacaaagcaaccctatgtcgaagatggtttgtgtcaccggagccagcggcgccatcggatcatgggtggtcctactcctccttcagcgtggttacaccgtccatgccaccgtccaagatatcaaggatgaaaatgagacgaaacatttggaggaaatggaaggagcaaagagtcatctccatttttttgaaatggatcttcttgacatcgactgcattgccgctgccataaagggttgctacggcgtaatccaccttgcatgtgctaacatcattggtcaagtcgaagatcccgagaaacagatattggaaccggcgataaaaggaacggttaatgtgttgaaggcggcgaacgaagcatgggt

SEQ ID NO: 52694 - DNA, 362 bp, Glycine max
  Clone ID: LIB3109-020-Q1-K1-E2
gagagaaaactttgcctagaagacccaagctcgtgtgtaagcgctacggtttatgtgatgtcttcgtctattcccaattccaaattcaagaaattttttaaacttgacatatctgctatcaccttttccgtttcttgcgattcgacgatggccgatcaaaagctttcagaaccggcgcttaaacgtgagcagcttgatgaattcgtgagtagtctatattttgaacaacgaattcttgaactccgacttcttcaagacctcgagaacaatgatgaatgtaggaaaaatgggagcctgaaaaggttaaatgaccagagtgatgtctgtggatttagaagttgcttcaaaaaccattatgattc

SEQ ID NO: 52695 - DNA, 422 bp, Glycine max
  Clone ID: LIB3109-020-Q1-K1-E3
ggcctcaagaaggagaacatggggtttgaggaaactgagttaaggcttggactgcctggaaacggaggcactgaagaagtgctcatcaggaagaggggtttctctgagactgaaactggtcatgaagatgagtctgccaccactgtggatttgatgcttaatctttcttctaaggaggccgcaaccactgctgctgctgctgcagatccaactgataagcacaagactttgcctaaggagaagacccttctgccagcagatcctgctaagccttcagccaagacgcaggtggtgggttggccacctgtgcggtcctttcggaagaacatgttggctgtgcaaaagagcgttggagaagagagcgagaagaacagcagccctaatgcaagctttgtcaaagttagcatggatggagcacctta

SEQ ID NO: 52696 - DNA, 340 bp, Glycine max
  Clone ID: LIB3109-020-Q1-K1-E4
gcaccaaaattttcataagcataggcccttctactgtgaatagcaattatcctaatgctattttgaatgggctggaaataatgaaaatgaacaactctgtgagtagtctcagctcatcaacagctgtgcctttgtctagtacttctggttcaggttctaagaaagttggcttgatagtgggtgtgagtgttggggcatttcttgcagtggtcattgttggagttttcttttttctactatgcaggaaaagaaaacgtttggaaaaagaagggcattcgaagacatgggttcccttatcaatcaatgatggaacttctcacaccatgggaaagtaatattc

SEQ ID NO: 52697 - DNA, 408 bp, Glycine max
  Clone ID: LIB3109-020-Q1-K1-E5
ggctgatctagcagcgtatcaatgagaaaatgtagatagggaagaacaaccatttttcaatgaccaagatctgttgaaggctgtggttgatttagctacatcaaccgaccttgatctccaggaaaaggtgattgttgatacagcacctgatactatcgttaaagcattgtcaaatgatctgttttgtttgtgactaaccttatctgtgcaatgccaatgtcataaaaacacattttgaactatgcctctttcatatgcaagactccaagccatgttccattatggtatgtctacatctgaaattgatccaatgaggttgttcaatgttatctgctttccaatctatgatctctcaatttgcccacaatgttgtgtttctggtgatgttaagcatccttctggaaatca

SEQ ID NO: 52698 - DNA, 393 bp, Glycine max
  unsure (1)..(393): unsure at all n locations
  Clone ID: LIB3109-020-Q1-K1-E6
ggttctagtgtgtgattgtttgttgttgtaactcgttcttcttcttttgttgttctgtgtttgtgtttgttttttctctcacctgaaaatgtcttgctgcggtggtaactgtggttgcggaagctcctgcaagtgcggcaacggttgctgaggctgcaagatgtacccagacttgagctacactgagtcaaccaccaccgagaccttggtcatgggagtggcacctgttaaggctcaatttgaaggtgctgaaatgggtgtgcccgctgagaacgatggcttgcaatgtggaccaaactgcttctgcaacccctgcacttgcaagtgangtgttgggagagcaagcttcaagcagagatagcccttaattaggaataatgantaactattaat

SEQ ID NO: 52699 - DNA, 387 bp, Glycine max
  unsure (1)..(387): unsure at all n locations
  Clone ID: LIB3109-020-Q1-K1-E7
gaatcaagagagtgactactggtcggcgacagcgaactacttccgggtaatggcgaacctcgtcgcaatcgccggcgctttgaacggcgcatgatcgccggattctgacagcggtgaacgtcggagcgtcgagcctgtcgttggccggttccagcttcattgtagtgtgctacctnctcttcaaagagctccgcaagttctccttcaagctcgtcttctacctcgctctctctgatatgctttgcagtttcttcggcataatagggtatacatgctagatcaagcaagattttcttcaatggacccgtccaaaggtttcttttgttatgctcagggctatagcacacatttcttttgtgtggcatcttttctatggactacaacaat

SEQ ID NO: 52700 - DNA, 398 bp, Glycine max
  Clone ID: LIB3109-020-Q1-K1-E8
ggacaaaactcgaagcagaaactcaactcaccaacacagttgcattattttctttccagatccaactcaaaattgcaatgggagtagaagatacagatatttgtatcatcaaggagccagatcatgttgtagtctattcagatggcatttcccatgattcaggtcatgaagctggaagtgatcatcacaatattacagagtcttatgaacaaatcaatgagactactgaacatcatagttcagaggagagtgcaaaggaatatgaggtgaaggaatgtacaacagaaatttctgttaaggtctctgatgtctctaatgttaaaaaatgtgaggataagttaacctcagattctgagggtgtcctcagtgagaaaaagtttaaatctcacaaaacaagg

SEQ ID NO: 52701 - DNA, 432 bp, Glycine max
  Clone ID: LIB3109-020-Q1-K1-E9
gactgaaagaagagggagggtcctcaaaacggcgtaaaagaaactgtctgaaacgctcctcttctccctcaaaaggcaaaagggttgtgttcacgagtgaacggtgttgatttgtatttgctgatgcaattggtggttaggttggtttaagaagctaagaactgttgctactacttcacaatgggcgctgcttgttgtgttgctgccagagacaaaaccatacaaagtggatcaaccagtgacaatttgcatcggaatgttcgatgttctccaacatggagctttcgttgggatcatcgagggcgtgtagctggtgaagatacttctataaattggttttctgacggtattagcaggaatgatggatcagagaataaaaatgaatcaacatatatgtcagaggacggaagtccactgcagaatgatcaacgg

SEQ ID NO: 52702 - DNA, 421 bp, Glycine max
  Clone ID: LIB3109-020-Q1-K1-F10
ggttggagcaggcgctcgtgcgcttttctatccaaccctgttttacaatgtcgtaaggaataagattcagaccgagtttcgatggtgggataaggttgatgagttcatattgttaggtgctgttccatttcctatagatgttccccacttaaaggagctcggtgttcgtggggttatcacattgaatgagtcatatgagactttggttccaacagcattatattatgctcatggaattgatcatctggtgattcctactagagattactgttttgctccttctctgcatgacatttgccgtgctgtggacttcatacatgaaaatgcattgtcgggacgaactacatatgtccattgcaaagctggacgtggtcgcagcacgactattggtatttgttatctggtgcaccacaaaatgatg

SEQ ID NO: 52703 - DNA, 435 bp, Glycine max
  Clone ID: LIB3109-020-Q1-K1-F11
ggagcaagagtgaagagcgaagagaatggctcccaagggtttaatctttttggctgtgttatgcttctcagcactgtcactgagtcgttgtcttgcggaggataatggacttgttatgaacttctacaaggaatcatgccctcaggctgaagacatcatcaaagaacaagtcaagcttctctacaagcgccacaagaacactgctttctcctggctcagaaacatcttccatgactgtgctgttcagagttgtgatgcttcactgttgctggactccacaagaaggagcttgtctgagaaggaaacagatagaagctttgggttgagaaatttcaggtacattgagaccatcaaagaagctttggaaagggaatgcccaggagttgtttcctgtgctgatatcctcgttctctctgccagagatggcattgtttc

SEQ ID NO: 52704 - DNA, 437 bp, Glycine max
  Clone ID: LIB3109-020-Q1-K1-F12
ggaagaatcaaatatccttgagccagacatgtgcaggaacgctgcttcacgtcttagggtcatcagtgcccgttcgtgcagcagcagcaggatacctgccagtgccagatttgcaagttccgttgccacacaacaatcctcttctggtttgggtggtttatttggatggctcactggagaccgatccagttctttaccatctctggatttcccgctttcgggcgttacacttcccccttcattgcctgattttgttgcgcccggaaaaactattattactacactcccaaatggactcaaagtggcctctgaaacatcaccgactcccactgcgtcggttggcttatatgtagattgtggttcaatatacgagactccgataagttttggggctacacatctgctagaacgaatggctttcaagaccactagaaacc

SEQ ID NO: 52705 - DNA, 411 bp, Glycine max
  Clone ID: LIB3109-020-Q1-K1-F2
gaatataaaaaatattactttttctcttctattattatctgaataagtgacatataaagtatttattgactttaattgattaatggttttggttgaagaaattgattaattatcagtctctttttttaataattatgcttctagctagagatttttcttaacatattatctctttacgtctatcttcattttttacttttaaatttaattttaatatattttttttaaatattaatagttaaacattttgtctcaaaatataaattatttttcataaatttaaaatatttatttattatgtataataaatatttatctcgtgtattgcataagcactataatactaataataataaatttccgttaaaaggtgtaacaaagggaaatgcatagaactactctatataagga

SEQ ID NO: 52706 - DNA, 426 bp, Glycine max
  Clone ID: LIB3109-020-Q1-K1-F3
ggatcatgcttttaaacagataggattgaaaatcgggcaaatctctcatttttgtggtagatcttacggcatcaaatccctggttgctttcgcagatcgctcccttttgcaactccaactcccttctcttgatgtccaccatcagaataggtgtgctcctctcctccatggggactgtgatgcttaagatccaagcttgggagacagagaaagagaaagagaatggacgccattgattctgtgttcgatccgctgagagaattcgcaaaggacagcgtgaggctcgtgaagcgctgccacaaacccgatcgcaaagaattctccaaggttgccgtccgtactgcaattggtttcgtcgtgatgggattcgtcggtttcttcgtgaagctcattttcattccaattaacaacatcattgtcggatct

SEQ ID NO: 52707 - DNA, 408 bp, Glycine max
  Clone ID: LIB3109-020-Q1-K1-F4
gaagagtgaagagcgaagagaatggcgcccaagggtttaatctttttggctgtgttatgcttctcagcactgtcactgagtcgttgtcttgcggaggataatggacttgttatgaacttctacaaggaatcatgccctcaggctgaagacatcatcaaagaacaagtcaagcttctctacaagcgccacaagaacactgctttctcctggctcagaaacatcttccatgactgtgctgttcagagttgtgatgcttcactgttgctggactccacaagaaggagcttgtctgagaaggaaacagatagaagctttgggttgagaaatttcaggtacattgagaccatcaaagaagctttggaaagggaatgcccaggagttgtttcctgtgctgatatcctcgttctc

SEQ ID NO: 52708 - DNA, 391 bp, Glycine max
  Clone ID: LIB3109-020-Q1-K1-F5
gggaaaactgtgtatctacaatattccaataggcaagaaatagtgaataacaaaactgcagcagatgttgctggaaatgtactgttagttacaattgagggtgaagatgcacgccttgtcagcattgatgtcttacacttggtcttttcagcctttgggtttgtgcataagattactacttttgagaagacagcaggattccaggcattggtgcaattctcagatgcagaaactgctacttctgcaaaggatgctttggatggaagaagcatacctaggtacctgcttcctgaacatatgggaccatgtagccttaagatcacatattctggacattcagacttaagtgtcaagtttcaaagtcacagaagcagagactacactaatcctt

SEQ ID NO: 52709 - DNA, 407 bp, Glycine max
  Clone ID: LIB3109-020-Q1-K1-F6
attgacaagcgtgtcattgagaggtttgagaaggaagctgctgagatgaacaagaggtctttcaagtatgcctgggtgctggacaaacttaaggctgagcgtgaaagaggaatcaccattgatattgctttgtggaagtgtgaatcaacaaagtattattgcacagttatcgatgcgcctggacatagggatttcattaagaatatgattactgggacatcccaagctgactgtgctgttcttatcattgattcgaccactggtggttttgaagctggtatttccaaggatggacagactcgtgaacatgctctgctttcattcacccttggcgtgaaacagatgatttgctgctgtatcaaaatggatgctactacacccaagtattccaaagccaggtatgatga

SEQ ID NO: 52710 - DNA, 418 bp, Glycine max
  Clone ID: LIB3109-020-Q1-K1-F7
ggttaaacaattgaatgtccgtgggctcatgaattgtcagtatgcaataactccatcaggggatgtatttttactagaggccaaccctcgagcttctcgtacagttccatttgtatcaaaagcaattggccatcccttggctaaatatgcttcccttgtcatgtctggaaagatcctctatcatttacagtttacaaaagaagttatccctaattatgtgtcagtcaaggaagcagttcttcctttttcaaagttcccaggctgtgacgtgtttttaattcctgagatgcgaagtactggtgaggtcatgggtattgacccttcatataatattgcatttgctaaggctcaaattgctgctggccagaagttaccacttgttggtactgtgttccttagcctgagcgacttaacaaag

SEQ ID NO: 52711 - DNA, 305 bp, Glycine max
  unsure (1)..(305): unsure at all n locations
  Clone ID: LIB3109-020-Q1-K1-F8
gacagcagcagagcaaaagaaagaaagaaagaaagtgcaacttcctctgttttgctcccctgtttaagccttatcataagcttagaatggcacacaaggaattttccattgccctagtgactctcattgttctctttgtcaacacgaacctncaaggtgccacggctgactatggtggtggttggcagagtgctcatgccactttctatggtgggggtgatgcttctggcacaatgggtggagcatgtgggtatggaaatttgtatagccagggatatggaactgacactgtggctctaagcact

SEQ ID NO: 52712 - DNA, 435 bp, Glycine max
  Clone ID: LIB3109-020-Q1-K1-F9
ggttctagtgtatgtgattgttgtgactcgttctgcttcgtcgttatcttcttcttttgttgtttgtgtgtttgttttttctctcacctgaaaatgtcttgctgcggtggtaactgtggttgcggaagcgcctgcaagtgcggcaacggctgcggaggctgcaagatgtacccagacttgagctacaccgagtcaaccaccaccgagaccttggtcatgggagtggcaccagttaaggctcaattcgagagtgctgaaatgggtgttcccgctgagaacgatggctgcaaatgtggagctaactgcacctgcaacccctgcacttgcaagtgaggtgttggagagctaaagcttcaagcagaaatggcccttagaaataatgataaaaactatatgtagtttcaaaacttcaaaattatgtagtatgtattatgt

SEQ ID NO: 52713 - DNA, 421 bp, Glycine max
  Clone ID: LIB3109-020-Q1-K1-G1
ggatcgagagagagataaaaaaaagaagaaaaaaaaaggaagagagagaggcaaaggcgaagcttggaagatggaaacccagtgagtgaggttcgagatttgtgagcaattcgtgaactttgcgaaggtgcaactaagattggatgaagacacggccaatgaactgagagtatgtatccaaggctattcctcgtggaacagagggatattggggtgctgggtcatattgggagatgggtcaactatgtatgatgatctggttggttcagattgttggggggttgttgtggggtttaatatgggaaggttttagatgtattgctgcaggcttgcaggtcttagttattactgagatagtggttttgtgatgactcctatcttggcatgataactaaagtccttgctctaatatatgagttat

SEQ ID NO: 52714 - DNA, 437 bp, Glycine max
  unsure (1)..(437): unsure at all n locations
  Clone ID: LIB3109-020-Q1-K1-G10
gaccggaaaaggggttacttttagtgaggtggtgacgggtgtacacaggttttctaaggccttaagaactcttggtctgaggaaagggcatgttgtgattgtagtgcttccaaatgtggtagagtatgccattgttgctttggggataatggctgctggtggggtgttctcaggtgcaaatccaacatcacatgtatcagaaattaagaaacaggcagagtctgctgatgccaaattgattgtcacaaatgtcacaaactatgaaaaggtaaaggctttggagctacctattattttgctaggagatgaagttgttgaaggtgccatgaattggaacaagttgcttgaagcagcagaccgtgcaggggatgatttgacaaaggagcctattcagcagaatgatctntgtgccatgccattctcatcaggcaccacag

SEQ ID NO: 52715 - DNA, 389 bp, Glycine max
  Clone ID: LIB3109-020-Q1-K1-G12
gtgcagtagttgagttgaggaagtgatggaagcagtttacaggttgaaacctcttttggatgtggttagagttgggaacgctaccacttctgagatgcgtcttgaatcaacggctaattgttacctgcagctagaagctcctcaactctatgagtttcatcgattaacatgactcatcaataagatatgactggatcggataatcaagatccagatcgccaatcaccctctttatccagatttactctctgcatatattgaatgccaaaaggttggagcaccgtcagaactgacatgccttcttgaagaaataggccgagaaagccaccgcatgaatgctcgccgtgagataggggaaggccctgaacttgaccacttcatggaaacat

SEQ ID NO: 52716 - DNA, 196 bp, Glycine max
  Clone ID: LIB3109-020-Q1-K1-G2
gagagcaaacgttaccttgagatgtcctatgctgggaagtaccgcaaattggctgagtctgtgccccttgctattgaagagtaaaatcatgtttgaagagaacatgaatggagaaaccggcttttggtcgtttgaagtcttatggagctttcataaataacgccattgattttggatgggaacatgtttttgaatt

SEQ ID NO: 52717 - DNA, 430 bp, Glycine max
  Clone ID: LIB3109-020-Q1-K1-G3
gatagaaaggaaacgaaaaaacagagtacccgacagaatttgaaaacaaaggctgaaatttgaagaaactgagatcattgggtgtgaaatatatggcagaggttgtcctgctagtcgatgatttgaaattactttctgcgagtcctcgttgtagaatttgtcatgaagaagagtttgaaagcgtagaaaccttggaagcaccttgtgcttgttctgggaccgttaagtttgctcatagagattgcatacagagatggtgcaacgaaaaaggaaatacaacctgtgaaatatgtctccagcaatatgaacccggatatacagctcctccgccaaagaagtctaagataaatgatgaaacaatgtccattatggaggaggaagaaccgtcaaacgcaagaatagagattatggttgaaggagtggaaatgga

SEQ ID NO: 52718 - DNA, 107 bp, Glycine max
  Clone ID: LIB3109-020-Q1-K1-G4
gacacacggagcgcggaaccaagtgaaatgattgagaagagagagcgaagaaaaaaaagagagccaaaccaaacctttcccgaaacggttcgttttgcccttcttcg

SEQ ID NO: 52719 - DNA, 399 bp, Glycine max
  Clone ID: LIB3109-020-Q1-K1-G6
gagagggaggaggcactgagagagatggtgttggatgggtggaattggaaatcgaagtgaaaagaacggttgaaagtgaaagagtaagatgctattacaattgcgctgctctcattctcaccacaaactgacacttgcctgcagttgaagaaagaatagaggatcgtggtcgatggcgtctgctagccttggaagtggtggggtcggcagttcgaggtctgttaatggtggcttcaggggttcttccagttccgtcgattggcttggcagagagatgcttgagatgaggttgagagaccacgaagacgatagagatagtgagcctgacatcattgatggtgtgggtgctgagacaggtcacgtcataagaaccagcattggtggccgaaatggtcagtc

SEQ ID NO: 52720 - DNA, 389 bp, Glycine max
  Clone ID: LIB3109-020-Q1-K1-G7
ggatacaagtctgttattattccgatttttgctattgccattagtatttttgttagtttcacctttgctgccatgtatggtattgctgttgctgcgcttggcatgctgagtaccattgccaccggattggccattgatgcatatggtccaatcagtgacaatgctggaggtattgctgaaatggctggtatgagtcacagaattagagagagaactgatgcccttgatgctgccggaaacacgactgccgctattgggaagggatttgccattggttctgctgcccttgtatcactggccctctttggtgcctttgtgagccgagctgctattacaactgttgatgtgttgactccaaaggttttcattggtttgattgtgggtgcaat

SEQ ID NO: 52721 - DNA, 184 bp, Glycine max
  Clone ID: LIB3109-020-Q1-K1-G9
aagtgaaattattcagaagagagagcgcttaataactatatagccaatccaaacatttctctaaacggttcctttttcccttcttcaaaaccctcccttctacgcctcttctactgcttcggtcttcgtcgtcaactcttcattaacccaagaccactgtcaatccttcagaaacctcatatct

SEQ ID NO: 52722 - DNA, 426 bp, Glycine max
  Clone ID: LIB3109-020-Q1-K1-H1
ggaattggaactgtgcctgtgggacgggttgagactggtgtcttgaagcctggaatggtggtgacttttgcaccaactggactgacaaccgaagttaagtctgtggaaatgcaccatgaagctctcacagaggctcttcccggtgataatgttggattcaatgttaagaatgttgctgttaaggatctcaagcgtggttatgttgcctcgaactcaaaggatgatcctgccaaggaggctgctaacttcactgcccaggttatcatcatgaaccatcctggtcagattggaaatggctatgcccctgttcttgactgccacactttccacattgctgtcaagtttgctgaactcatgaccaagattgacaggcgatctggcaaagagcttgagaaggaacccaagtttttgaagaatggtgatgct

SEQ ID NO: 52723 - DNA, 423 bp, Glycine max
  unsure (1)..(423): unsure at all n locations
  Clone ID: LIB3109-020-Q1-K1-H10
ggaaagaaagaaggaaagcaaagtagacgagtgattgcgtggcgattgacgacgacgaggaatcatgtcttccggcggcggcggtggtaagccgttcttctgccacgtgtgcagtcagaggattacgtgctccgatgagtcggaaccattctgcccgatgtgtatggaaagtttcgtagaagaatgcaaccctaacaatcccaaccctaatctcttccccgacagtgatgaatcttcggatcccgaactccccttcaccgcttctcacttctccctctcttgctctcatcagtctctagggtcccgatccgaacnccgacgtgttcgaccccgatggtctttctntcagaccacctttcaggaccttccgcgccgacgggtgcaacattcaagttgactttgaccatncttncaacgagaatc

SEQ ID NO: 52724 - DNA, 432 bp, Glycine max
  Clone ID: LIB3109-020-Q1-K1-H11
cggtccccatgatcagcagtctattgctgatgctctgttgaagcttgttagcaacaaacaactttgggcaaaatgtagacagaatgggttaaagaatattcatttattttcatggcccgagcactgtaagacttacctttctaaaatagccacttgcaagccaaggcatccacaatggcagcgaagtgaggatggaggtgaaagttcagaatcagattcaccaggtgattccttgagagatttacaggacttgtctctaaatctgaagttttcattagatggagagaagagtgagggtagtggaaatgacaattctttgaattctgatggaaatgctgctgatagaggggcaaaattagagaatgctgatttgtcatggtcaaagggcatctctaaggacacacgcaagggtggtgctacagaaaaatccga

SEQ ID NO: 52725 - DNA, 436 bp, Glycine max
  Clone ID: LIB3109-020-Q1-K1-H12
ggggaaagtgagggaagcacgagaaagcttgcgaaaatttcacgttcttcttctatttgcaaacactgattttccattccattactgctattgttatcattcttattttgctgtgatcaaattggtttttcgtattaagaattctcattattattactgttgagactttcctatcgccttgcaccaaagaactcggttcccacttttctctaattctagggcagctttttcggccaaatccttttcttcccatcgaagcgagctctcattgcaaattaaacgcgctttgcgtggtgcgatcttcgttgtgatggaaactagggcatgaattggccgtacagaagaaaaaagcgataaaaaatgttcttcagcggcgatccttcgacgcggaagcgtgtcgatttgggaggtcgcagttcaaaggaaagggaccgga

SEQ ID NO: 52726 - DNA, 147 bp, Glycine max
  Clone ID: LIB3109-020-Q1-K1-H3
gtatgaataaatgcgtgtgctgttatcctacttcaggtctgtgtaggcatgcattctgaatcatttcaagttcctgtcttagttaatataacagccatggttgtggcattctatggtttattagactaaactatctgcagaataact

SEQ ID NO: 52727 - DNA, 147 bp, Glycine max
  Clone ID: LIB3109-020-Q1-K1-H4
ggttatagaaagagagatagaaagaaaatgattgatggcaataacagtgtcaacatgagccaccacaagcctaatttcacaggaacaaatgaagttgttggttaagactatgaatcaccattgttggcgttgccactgctaagaaac

SEQ ID NO: 52728 - DNA, 410 bp, Glycine max
  Clone ID: LIB3109-020-Q1-K1-H5
gactgataaaagctaataatcatggaagtactcaggtgagcatggctgtcactgttgcattcttgaatacgatcatcatgttttcagtagtctgtacaagcaagccactgagcttaaactactattcaaaaacatgccctgatgtggaacgcattgttgccaaggcagtgaaagatgccactgctagggtcataactgttccagctgcacttctgcgaatgcacttacatgactgagacgctcggcggtgtgatgcctttgtgctgctaaattgaaaacgaagcatcagaccacaaatagatggtccaccaaatgtttctttgcatgcattctatgtcattgatgcagcgaataaagcactatacagctcatgcccagctgcggcctcttgtgctgacatccttgctcta

SEQ ID NO: 52729 - DNA, 407 bp, Glycine max
  Clone ID: LIB3109-020-Q1-K1-H7
gggccagcagccaataacttttgtccgagaggttcttgcattatgtgaccatccagctatattggacaaaagtgaaacacagggtttgttcagtactgatgcaatacagcgagcatggcagattgtggatcagattcctgggagagcaactggtgcctatagccatagtcagggtgtcaagggcttgcgtgatacaatagctgctggaattgaagagcgtgatggttttcctgccaatcctgatgacattttcatgactgatggtgcaagccctgctgtccataatatgatgcaattactcattagatcagaaaatgatggtattctgtgtcccattccacagtaccctctgtactcagcctcaattgccctccatggtggctgcctggtaccttattatctagatg

SEQ ID NO: 52730 - DNA, 422 bp, Glycine max
  Clone ID: LIB3109-020-Q1-K1-H8
gacggctaaaagctaaaaatcatcgaagtactcaaattagcatggctgtcacggttgcattcttgaatttgatcatcatgttttcagtagtctctacaagcaagtcactgagcttaaactactattcaaaaacatgccctgatgtggaatgcattgttgccaaggcagtgaaggatgccactgctagggacaaaactgttccagctgcacttctgcgaatgcacttccatgactgtttcgttcgggggtgtgatgcctctgtgctgctaaattcaaaaggaagcaacaaagcagaaaaagatgggccaccaaatgtttctttgcatgcattctatgtcattgatgcatcgaagaaagcactagaagcttcatgcccaggtgtggtctcttgtgctgacatccttgctctagcagcaagggat

SEQ ID NO: 52731 - DNA, 422 bp, Glycine max
  Clone ID: LIB3109-020-Q1-K1-H9
gggtacagctgatgaagttgtgaggactcctgagaagggaactgtttttgttgaagatcttccagaagaagaacaagtagttgctgttggacatactgctggtcttttcaacttgggaaacacatgttatatgaattcaacattgcaatgcctccattccgtacctgagttaaagtcagctttgactaattattcacattcaggacgaaacaacgatgtcgatcaatcttctcatttgttgaccattgcaacccgtgacttgttcaacgagcttgataaaagtgtgaagcctgtggcgccaatgcaattttggatggtattgcggaaaaaatatcctcaatttggccagctgcataatggagttttcatgcaacaggatgctgaagaatgttggacacaacttctatacactctctctcagt

SEQ ID NO: 52732 - DNA, 290 bp, Glycine max
  Clone ID: LIB3109-021-Q1-K1-A1
ggttctagtgtgtgattgtttgttgttgtaactcgttcttcttcttttgttgttctgtgtttgtgtttgttttttctctcacctgaaaatgtcttgctgcggtggtaactgtggttgcggaagctcctgcaagtgcggcaacggctgcggaggctgcaagatgtacccagacttgagctacactgagtcaaccaccaccgagaccttggtcatgggagtggcacctgttaaggctcaatttgagggtgctgaaatgggtgtgcccgctgagaacgatggcttgcaatgtg

SEQ ID NO: 52733 - DNA, 360 bp, Glycine max
  Clone ID: LIB3109-021-Q1-K1-A10
gacggtgacggctctcgacagggacgacactctgggtcagcggtctaacttactgggcacatgccaaatccctctgatttcgactggatcgattaaggttgtcacagcggtcaaatgtgcactacacaaccacactgactttttctgctaaactaaactaaaatggtatcctccggtagaaattgctgcttcaaatatcccggcacctactttccgaaggggtatgcctcacatcctactaatgctatactctgcacaactcatttttgcccaaattagctgaccccaattaccctgttggaaaagatgcactgagtgctcattcttttcaccatgcccacaaacttgacctccttttat

SEQ ID NO: 52734 - DNA, 289 bp, Glycine max
  unsure (1)..(289): unsure at all n locations
  Clone ID: LIB3109-021-Q1-K1-A11
atgactgacaatcgcacatcatacgcctaaagccctcgcgagatatccgtggcaagaaaggagcttcttgcaactccgtcatacctcatcggcaattgtcgcaggcccctcgtcgaaatcaaacaacctncccattcggcaagagtcgtctgcctggaccacgcctctgcgtcaaagaaaaagcgcccacgcaatcattcgtccataaagcctcacattctggcgacgaacctcgctcatgtcgcgtaccagcatctccagaaaggttaccaaattcatgtcttcggtc

SEQ ID NO: 52735 - DNA, 419 bp, Glycine max
  Clone ID: LIB3109-021-Q1-K1-A12
ggggaacagaaacaagaaaaaaaaactcccacaatagggatgaggagtgccgacaggattaattgaggtcagggactgaaagggggtgttctgttctgatcggatctgaaatcatcgggaaaatgtcgtcgtttctgcaccagagaagcagtctccagaacccattctcgaatccattcccggcatcaactccatcatcatcgaattcgaagaaatccctgtccatcatgggccccaccaccctcctagccctaatctccctcatagtcatactcggcgtcttctgcccctgggtgggcttttcccagggctttcccttcactcccacttccactttcaaatgggctcactacactttagaacaagcgctctccttcgtcgccaaaaacggttcctccgtcatcgtctgcattgtgagc

SEQ ID NO: 52736 - DNA, 424 bp, Glycine max
  Clone ID: LIB3109-021-Q1-K1-A3
gaaggtgcacagagtttagttgtgaagctataagctagttttactcgatgaggagcatatgaagactgttgtgttttctttgttgctagcagtagctttggtagcatggccatgccatggcgcacgctaccaaaggttccctctccgaatgaaaactggctatggggagcgttcttcggaggtaaaatgcgcaagatttaggcttgctgtggaagcacacatcattcgagcctttaaaaccattcctgaagagtgcgttgaaccaacataggactacattaatggcgaacaatttagatcagactctaaaacagttaaccaacaagctttcttttatgctagtgaacgcgaagtccatcacaacgacatatttatattcggcatagataacaccgtactctctaatatcccatactatgaaaaa

SEQ ID NO: 52737 - DNA, 340 bp, Glycine max
  Clone ID: LIB3109-021-Q1-K1-A4
ggactcaaaagctcaataaatgcacgttaccaagcgaacgaatcaaatctctctctcaatctagccttctttctttttttcaatttccaaatcacgaaactcaagaagatggagaaagcgatcaacagacagaagattttgcttcatcatctcaacccttcatcatccacccaccccaacgaatcatcctccctccatgcttcagcatgtgtggcgggggatagcgctgcttatcaaaggacatcgacattcggggacgatgttgtgatcgtgggtgcttatcagactgctcattgcaaaagctaacgaggtggttcaaagacactcttcctgatgatct

SEQ ID NO: 52738 - DNA, 312 bp, Glycine max
  Clone ID: LIB3109-021-Q1-K1-A6
ggaaaagaaaaatgaaaaatagcacaaggccaaaaatatcacctgatctgaaacttggacacgaaagaaaagctcgtatgcgcgacttctctctcttgcattgattcaacgttgtccattctccgaaacatcacaaagaaacccaactgagagagtgaagaataagaagaataaatagaagaagaaggacgacaacaatggggggtttcgcaatgggttctgccttcgattccaaatctgggcagattattatggctgctttgcttttgatgattatgtccttctatgctggcaacctttttggaacaatgc

SEQ ID NO: 52739 - DNA, 166 bp, Glycine max
  Clone ID: LIB3109-021-Q1-K1-A7
aggggaagggaataaagtaaaatggtatgtgggttgctgaggcaacaaaaccattcactaaattccaattccacagacccactactttatttccccctgcttccgatggcaaaccaagcttcactctccttttcttctttcgggacccctggttaaccccctttta

SEQ ID NO: 52740 - DNA, 368 bp, Glycine max
  Clone ID: LIB3109-021-Q1-K1-A8
gagcactgagcaggtgcaccaaacaaaaacaacggcaacttcacacacagctgacgcggtaactaagattcaacgtctgcgctctgcaaccaccatacaatagatccttcattctttctctgcaacgatcaaacaacaaaaaacactgcaccctttcttctggatttggtgaaaaagaaaaagaaagaagaagaagaagaaagggtgatttgatgattatgaattgaaatgtgagaggtgaagagatgaacgtgagccatgcttcggttcacccagttgaagaagctccaactactgaaggtggtggtgaccaaaacgtcaacgctcctaaggtgaggatgaaagatgttcaaggcatgcctggcact

SEQ ID NO: 52741 - DNA, 306 bp, Glycine max
  Clone ID: LIB3109-021-Q1-K1-A9
gcatttgagatgtaaggacatgaaagaaaagaggggatatgtttatgcgtttgtgtgggagatagagagatagagagagagaaagagttgttgataaaaacataattattttttcttcttggtctttggagggtcatgtagatgtagtagctatagattttaggcttatttgttgataccctttttgttctttatcttatttgagatttcgaagatctaaagcgttttaaaatcgggttaggctgtgagtgaatttcttgagttgaagtttttatctttctttctatctttgcaccgatgaggatc

SEQ ID NO: 52742 - DNA, 82 bp, Glycine max
  Clone ID: LIB3109-021-Q1-K1-B1
gaatgtaaaaaatagaggttgaagaagcaagcaccaacgtgaataccctaattcggagggtttcagttttcgccctcttttc

SEQ ID NO: 52743 - DNA, 523 bp, Glycine max
  unsure (1)..(523): unsure at all n locations
  Clone ID: LIB3109-021-Q1-K1-B11
aattcccggtgtcgactccacgtcgtctcgtaccggggctgtcgagaagaccgaccagaagggggacctctttaagatgaatggaattgggctttctcgtctgatgggacccaagaatttttcactttcatantgatnngaagtctatgatanngttttgatgcannatgggcctnntcaagaaaatcttctcagaggcatatanttcttatggnttttgagagggccttctgcaatacagcaaaggggaattgttcctttctgcaagggtctggatgtgattcagcaggctcagtctggaactggaaagacagcaacattctgttcggggattttgcaacagcttgactatggattggtacagtgtcaggctttggttttggcaccaacaagggagcttgcacaacagattgagaaggttatgcgagctctaggtgattaccttggtgtcaaggttcatgcttgtgttggtgggaccagtgttcgtgaggatcagcgcattctccaagctggtgtccatact

SEQ ID NO: 52744 - DNA, 249 bp, Glycine max
  Clone ID: LIB3109-021-Q1-K1-B12
ggacgaaggtgataataatcggtgccggaacttctggtatcgccaccgccggttgcttaacgaagcaatcaataccttacataatgctcgagagagaagactgtttcgcttcgctgtggcagaaatacacctacgatcgtttccaccttcatttgaggaagcaagtttgcaagttaccgaacttaccgtttcccaagtcttaccttaactacgtgcctcggaagcagttcataaacacctgggaaactt

SEQ ID NO: 52745 - DNA, 413 bp, Glycine max; identical to SEQ ID NO: 50909
  Clone ID: LIB3109-021-Q1-K1-B2

SEQ ID NO: 52746 - DNA, 418 bp, Glycine max; identical to SEQ ID NO: 50910
  Clone ID: LIB3109-021-Q1-K1-B4

SEQ ID NO: 52747 - DNA, 403 bp, Glycine max
  Clone ID: LIB3109-021-Q1-K1-B5
gggcaaaaaaggaggtaatatggagcatgatgggagggcagaccactgaacaaggggattgttcaaaatttaagggaggcattccacattgctgtaagaaagatccgacggttgtagatttgctacctggaacaccttacaatcaacaaattgcaaattgctgcaaaggtggggtgctcagttcatgggtgcaggatccaaccaatgcagtttcctcatttcaagtcagtgttggtagagctggaaccacaaatagaactgtcaaagtcccaaaaaacttcaccttgaaagcaccaggaccaggttatacttgtgggccagctaagaatgtggcacccactaaattcattacttcagacaaaaggagagtgacccaagcactgatgacatggaatgtgacatg

SEQ ID NO: 52748 - DNA, 378 bp, Glycine max
  Clone ID: LIB3109-021-Q1-K1-B6
ggcgcaagagaagagagagggagtaatggacagagacgaagcagaaaccatggagaatgtggaattcgatgcttctgagattgagtacgttagttacggtggcgagcatcacctccctctcgtaatgaacctggtggaccaagaactcagcgaaccttattccatcttcacgtaccgttacttcgtctatctctggcctcagctttcattcctggcgttccacaagggtaaatgcgtgggcaccgtggtatgtaagatgggggaacaccgtaacactttcagaggctacattgccatgctggttgtcatcaagccctacagaggaagaggcattgctacggagcttgttactaggtctatcaaggtgatgatggaatc

SEQ ID NO: 52749 - DNA, 382 bp, Glycine max
  unsure (1)..(382): unsure at all n locations
  Clone ID: LIB3109-021-Q1-K1-B7
gattacttaaaggacaagattcagccctcgtttgtaaaagagcgacgggcaatgaagagagaatatgaagaattcaaagtacggatcaatgcccttgtagccaaagctcataagatgccagaggaaggttggacaatgcaggatggaacttcttggcctggaaataatcctagggatcatccgggaatgattcatgtgtttttaggtcatagtggggggctggatacagatggaaatgagctgnctaggacttgatatgtttctcgtgagaagcgaccaggcttccaacatcacaagaagggctggagctatgaatgctttgattcgagtttctgcttgcttgaccaatggtgcatatcttctgaatgtggattgcgatcac

SEQ ID NO: 52750 - DNA, 388 bp, Glycine max
  Clone ID: LIB3109-021-Q1-K1-B8
gggagaattaggcaaaatgtttgatatcccaatggatggctctaaatctagaaaatccggtcccataagtaatgctccttcaaggacaggatcatttgcaggtgctgcttcacactctggacctatcatgcaaaatgctgcagctcgttctgcttatatcacatctggtaatgtatctactggaggcatgtctgcttcagcctcaatgaaaaagaccaactctggtccattgaataagcatggggaaccagtcaagaagtcatctggccctcaatctggtggagttacacgccaaaactctggtccaattcctgcagttcttcctacgactggtcttattacatctggcccattaaattcatctggagctccaaggaaagtgtctggt

SEQ ID NO: 52751 - DNA, 423 bp, Glycine max
  Clone ID: LIB3109-021-Q1-K1-B9
ggctaagcgaaaccaaaccaatctttttatctccaccctttttatttgggaataataataataataagcacttcaaggttgtgaagccttgaaggtgcatcaacacttgtgtcaacacaagaatgaggctctctgttttacttctagtgttcctcgcagttctggctgccacaaggcctagccttgtagactgtagggtccttccttcaccaaaaaacacagagaaagcccctcatgagcctctcaaagtgattcgatttctcatcaatttagtgatggcagaaaaggccaacactagtgagggtaatataagcaacagggttttgactgagaacaaattccaaaccatgccttcagggccaagcagaagaggttcgggtcactagcaccatgtttcagttaatcaactatcactgctttttc

SEQ ID NO: 52752 - DNA, 351 bp, Glycine max
  Clone ID: LIB3109-021-Q1-K1-C10
ggatttagagtgaagagctaagagtatggctcccggggtgtgaatcacttaggctgggtaatgcttcttagcactgtcactgaatcgctgtcttgccgaggataatggacttgtcatgaacttctacaaggattcatgccctcaagcttaaaacatcatcaaagaacaagtcaagcttctctactagcgccacaagaacactgctttatcctggctcataaacatcttccatgactgtgctgttcatagtactgaatccacactgatactagacttcacaacaatgagcctgtctaataaggaaacaaatagaaactctatagttgataaattacaggttccttactacca

SEQ ID NO: 52753 - DNA, 429 bp, Glycine max
  Clone ID: LIB3109-021-Q1-K1-C11
gggttgaaagtgagcaatgtcgttcgcagtggcattgtgtacaacgtcgtcgttcttcccttcccgttttgaaattcgcaatccaaagcagcttcagcttccacctctcctttcaatgtcactgtcgtcgaagctaccgttgcatttctccggcaatgccatattcaaccgcaaccacccaaccatgttcaaaattcgagcctcaaactcttcatccaaactcgtcttattgagctccactatcgtcgtcacaacagcggtagcgaatcgcgtgctctacaaattggcccttgttcccatgaaagagtaccccttttttctcgctcagttcataacttttgggtatgttgttatatatttctcgatcttgtatttccggtaccgggcgagaattgtgaccgatgagatgctggcaattccgaaattgcg

SEQ ID NO: 52754 - DNA, 309 bp, Glycine max
  Clone ID: LIB3109-021-Q1-K1-C12
ggcacaagtgagtttgttgatcgagataactagaaacagtgtgatgaaaatgaaggtccttgttttcttcgttgctacaattttggtagcatggcaatgccatgcgtacgatatgttccctcttcgaatgaacactggctatggtgcccgtactccggaggtgaaatgcgcaagttggaggcttgctgtggaagcacacaacatctttggctttgagaccattcctgaagagtgcgttgaagcaacaaaggaatacatccatggcgaacaatatagatcggactccaaaacagttaaccaacaaggcta

SEQ ID NO: 52755 - DNA, 422 bp, Glycine max
  Clone ID: LIB3109-021-Q1-K1-C2
ggactggccagagggtgcaatctcacgagagagtattaaagctgttatgaagcttccccgactacagaaccttataatgcagcatgttgatcattcagctggagatcttatacatcttttgcaggggctacttagatatgacccctttgaaagacttacagctagggatgctttgaggcattccttctttatgagagatcatcttaggagatgatttttatgtgtttgtaaacgattggtctgcttttaggtgaaagatcactcgagggcaaatatggctgtaaggagcctatgtgccaatgtaaataaatatttaaatttacgcttgtgtggcaagtgaggatgggtattcagcagcatttacacctcaacctcaaagcctgtgtttcaaacgttttattaacaaaaaatgggaataaaaa

SEQ ID NO: 52756 - DNA, 348 bp, Glycine max
  Clone ID: LIB3109-021-Q1-K1-C3
gaggaagaatttgatgaatcagacaagtcacatgataatgaagctccagaatatagacgtctaattgcaattcatgctgggaagcctaaaggtggattagcagaatgcctcaaagtggatcctgataaagtgagacgtctaagtttaagtgagcaacagcttgaaaaggctgccataaatcatggacaacaaattgtcaggtttactcagcggaatatactaagggtgtatccaaaaggtactcgcattgactcatcaaattataacccattaattgggtggatgcatggagctcagatggttgcatttaacatgcaggggtatgggagatctctttgggtgatgcat

SEQ ID NO: 52757 - DNA, 412 bp, Glycine max
  Clone ID: LIB3109-021-Q1-K1-C4
ggttcaaggaatgtagagagagcgggcggagactgctatgccctttgactcttcaagaactaagaagtacagagctgaatccaagtatggctttgcgtaacaccattgaagaatggactgccaggaatgaagctgcacagctggatatggctcgccggtcattgaatatggggagtccagaaaatgagactcttcaggccttaaagtatgtccagcacatctgccgaagaagtcgatcaaacaaatacactgtccgcaatgcagggcttatcccaatgattgttgacatgctgaagagtagcagccgtaaggttcgttgtagagctctggaaacccttagagttgtggtagaagaagatgatgagaataaggaattgttggctgaaggggatactgttcgcactgtagtaaa

SEQ ID NO: 52758 - DNA, 414 bp, Glycine max
  Clone ID: LIB3109-021-Q1-K1-C6
gagagcgaagagcgaagagaatggctcccaagggtttaacctttctggctgtgttaatatgcgtttcagcactgtcactgagtccttctgttgcgggggaagggcaaaataatggccttgttatgaacttctacaaggaatcatgccctcaggctgaagacatcatcacagaacaagtcaagcttctctacaagcgccacaagaacactgctttctcctggctcaggaacatcttccatgactgtgctgttcagagttgtgatgcttcactgttgctggactccacaagaaggagcttgtctgagaaggaaacagatagaagctttgggttgagaaatttcaggtacattgagaccatcaaagaagctttggaaagagaatgccctggagttgtttcatgtgctgatatcctcg

SEQ ID NO: 52759 - DNA, 411 bp, Glycine max
  Clone ID: LIB3109-021-Q1-K1-C7
ggcgagagttctgagaagaaaagagaagatcggggagtgaggaagcaaatagcaatagcaccgccaccgtcaccactgccactgccactgccactagcaacagcagaatgggaaccttgggcagagttttctacgccgtcggattttggatccgcgagaccggccaagccatcgatcgcctcggctctcgtctccaaggcaactacctctttcaagaacagctgtctaagcatcgacctctgatgaatctgttcgacaaagctccctcggttcacagggatgcatatgtggcccctagtgcctgccttctcggcgatgtccacgttggccccgcttactccatttggcatggatgcgttctcagaggtgatgttaacagcattactattggatcctgaactaatatacaag

SEQ ID NO: 52760 - DNA, 381 bp, Glycine max
  Clone ID: LIB3109-021-Q1-K1-C8
ggcacgttgttaaggatgttcctaacaatttgttgaggcacattaccctggataacaatgagaacaaacctgtcactaacagtagggatacacaagaggtaatgttggagcctggcctgaaattaatcaaaattttcaaggaatataccagcaagacatgcattctggatgattttggcttctatgaggcccgtcagaagactattttggagaagaaagcaaagcaacaattcccaaagcaggtatgggaagggaaacctgctgatgagaagattgagataaatggggaagtcaatactcaaaaatctgaagttagctcggaagtgctcaaggagtcccttgctgaggaggatagtgatgaccacaaagttcccgagaatg

SEQ ID NO: 52761 - DNA, 442 bp, Glycine max
  Clone ID: LIB3109-021-Q1-K1-C9
ggagcaagagtgaagagcgaagagaatggctcccaagggtttaatctttttggctgtgttatgcttctcagcactggcactgagtcgttgtcttgcggaggataatggacttgttatgaacttctacaaggaatcatgccctcaggctgaagacatcatcaaagaacaagtcaagcttctctacaagcgccacaagaacactgctttctcctggctcagaaacatcttccatgactgtgctgttcagagttgtgatgcttcactgttgctggactccacaagaaggagcttgtctgagaaggaaacagatagaagctttgggttgagaaatttcaggtacattgagaccatcaaagaagctttggaaagggaatgcccacgagttgcttcctgtgctgatatcctcgttctctctgccagagatggcatagattcgctagga

SEQ ID NO: 52762 - DNA, 333 bp, Glycine max
  Clone ID: LIB3109-021-Q1-K1-D1
gacgaaacaatggtagaactagtctctcaatacccgagaacgtgtgaacgaaaaatagcgtctattttaaactagaagactagaagattacgtctttgattatgcaaagcggtgcacaaattacataatccagagtccagaactcacactatatatataagcacgacctaagcttcttctttgcactgcacatcacttttctactttgagtcttcttgatccttctgtgtctccttgaactcaaacatggcagatgatgtggttctgctagatttctggccaaggccatttgggatgaaggtcatgattgcacttgctgaaaagggtatgaaa

SEQ ID NO: 52763 - DNA, 402 bp, Glycine max
  Clone ID: LIB3109-021-Q1-K1-D10
ggaagaggaaggggctagagaggaaagaactagctggctggaagctgagaactttagcatggactagtactactagtacattcatgcatattacgttggactatggtggcttaaccatagcatcgagagcgcaaagatggtgtgagctccttggtgagaaaagatgcgcctgaagaaagagccttgggctatcgaggaagatcaaattctaagatgttacattgacaaacatggacatggcgaattggcctgccctttcaaagcaagcaagcttgttaaggtgtgggaaaagctgtatactacgctggattaactatgtgaggcccgatgttcaaagacggaatttcacaattgacgaagaagatactatcattgagctggatgacatgctgaggaacaggt

SEQ ID NO: 52764 - DNA, 439 bp, Glycine max
  Clone ID: LIB3109-021-Q1-K1-D11
gaccaggtggtaggcgccctgatatttcacttcaagttccccctagacctacagggtttggcagcactagtggtgtaagggttctggatcattctcaaagtttcggtaaagggatttcatcatcaagaggcttcttgcgggccttgagcttcaaaagaaaaggaaatgtagcagatggcgaaagaagttccctccttaattcagaccccaagacagctgcagacagtcctaatatggcctccatatctgaaattgcatggaaaagatgtacttctcttcctgttacacctgcatcaaatctgtctccttcagtttctacgcccatttctgcaagggcatataatgaacagactaagcctcataaagatgttgattgttctaaggtttcaaggtccctttctgtacccgggcgaaatgttgttattgtaagatctgtctc

SEQ ID NO: 52765 - DNA, 381 bp, Glycine max
  unsure (1)..(381): unsure at all n locations
  Clone ID: LIB3109-021-Q1-K1-D12
ggagaaaagaaggaggatcccaacgcgctttccaacttcaggatttcggaacccttgaggcaaaaattgaaggagaagggtatcgaatcactgtttcccattcaggccatgaccttcgacaccgttctcgatggttctgatttggtcggtcgggctcgcaccggtcagggtaaaactctggcatttgtgttgcccatattagagtctttaataaatggtccaacaaaagcttcaagaaagactggcttcgggaggactccaagtgttcttgtgcttctacctactagggaattggcctgtcaggtgcatgctgattttgatgtttatggtggggcaatgggattgagttcatgttgnttatatggcggagctccgtatcaa

SEQ ID NO: 52766 - DNA, 336 bp, Glycine max
  unsure (1)..(336): unsure at all n locations
  Clone ID: LIB3109-021-Q1-K1-D2
gacacacaacatttacatttctctctccagtatggcttctactcacaatgagttttatgcacttatgctagtggtggtggttggctccatggtggcttcctgtggtgctaacttcaaccaagactttgatctaacatggggtgatcaccgtgctaagatattcaatggtggtcagcttctatctctttctctggacaaagtctctggctccggcttccaatccaagaaagagtacctatttgggaggatcgatatgcaactcaagctcgttgcttgcaactctgccggcactgtcactgcttactactngtcgtctcagggccaactcatgatgag

SEQ ID NO: 52767 - DNA, 313 bp, Glycine max
  Clone ID: LIB3109-021-Q1-K1-D3
gcgtcagagggggagaggctcttgggctagatctggatgaacacctactagttgtgagatgggtgctttaaggctaagcctgatgaaagatgatcagcttgcggctgctcaggtcatggaaggcgtatcacgtagtggatccctggcactgacactgttgactgatgtggaaggagaggacatgaactacacgcaacagattgtcgtaggtgctagaccaaggagatggcgagccagggactacgagcccgtatagataggggctaagaatatagtgcactccgacactaaggaacgtgagatggttacgatt

SEQ ID NO: 52768 - DNA, 420 bp, Glycine max
  unsure (1)..(420): unsure at all n locations
  Clone ID: LIB3109-021-Q1-K1-D4
catgccacaggttaaaatgatggtagtacttggggaacttggtgggcgtgatgagtattccttagtggaggccttaaaacaaggaaaggtatccaaaccggttgttgcctgggtcagtggcacatgtgcacgactcttcaaatctgaagtacaatttggtcatgcaggagccaaaagtggtggtgagttagagtctgctcaagcaaagaatcaggcactaagggacgctggagctgttgttcccacatcatatgaagcttttgaagctgcaattagggaaacatttgataaattggttgaagaagggaagatcacaccaatcaaggaaatcacacctgcaccaatccctgaagaccttagtactgcaattaagagtggaaaagtccgtgctccaactcatattatntccaccatttctga

SEQ ID NO: 52769 - DNA, 401 bp, Glycine max
  Clone ID: LIB3109-021-Q1-K1-D5
ggctgagttcagaacaaaacaagagaaaaaaaagggtttcacactttgtccaatctttcacactgaactcttcaattttcaattctctttttcatgcaccactcttctttttcttcagacaccttcatcatctgcataccgcttagctccaaaaactacacacacaagaattctgtttctttctgttgatttgatggatccgcaggtctaatggtttcacacactttcttcactacggatcattgtcttcttcatctggggcaccccaatagcttcttctaatcgatagtcaaattttgttggtttgtggtggatcatcttcgtcgttgtggtgactagtgaggagtgcaggactatacctatctatatagtgtatgaaaattctggggggtgaagtcgtt

SEQ ID NO: 52770 - DNA, 418 bp, Glycine max
  Clone ID: LIB3109-021-Q1-K1-D6
gtggaacatggagacattgcaaacagaaagtactccggaggaacacagtcttattattactgatgttcgcttcagaccaaattcaactcagctggcaacatcttcgtttgatacaactgtgcggctgtgggatgctgcagatccaaccttccctttacatacatatagtggtcatacttcacatgtggtgtcccttgatttccacccaaagaaaactgagcttttctgttcttgtgacaataacaatgagattcgcttctggagtattagtcaatattcttccacacgtatttttaagggaggatctacacaggtgaggtttcagccaaggcttggtcaccttctggctgcagcaagtggcagtgttgtgtctctctatgatgttgagactgacaggcagatacacacattacaggga

SEQ ID NO: 52771 - DNA, 192 bp, Glycine max
  Clone ID: LIB3109-021-Q1-K1-D7
atgaggaaggaagattagtttgagggcatacaatatagctaataatgttaatctgttacctcacccataaagtgagttttacatatagacatttgatgaccatttcctgcagctttatacctctcatctaaccttcgaatacaatacgtatcgccctgaatcgacctatatctatgttctttgatccttcat

SEQ ID NO: 52772 - DNA, 207 bp, Glycine max
  Clone ID: LIB3109-021-Q1-K1-D8
ttgactttagaagcatgaggaaggaagatgagtttgggggcatcaaagattgctattaagtataatctgtatcctcacccagaaagtgagttttacgcggagacattctgtgactattccatacagctttcaacctctcagctatctcttgaatacaatgcgtatcgtcctgaatctacctatatctatgatctcgttctttcatcc

SEQ ID NO: 52773 - DNA, 443 bp, Glycine max
  Clone ID: LIB3109-021-Q1-K1-D9
gaactcaaacagggaggatcatttctgatcgatttattgcttacgatttggaatagtgacaagtaaagacaaatcacaactcacggtcatccaattccaagaatagagctttacgaggcagcggcttcaaaaggaggggaatattcagaggaaaagaaagagtagttgttgaacaacaagagctttcctcattcttagcttatctcacaaggaaggtacgtaagatccttaacacccttaccgcggttacttgccgcctcaatccattgctgaaatgaatgctcataaataaatatatttgcaggctacgaatctctgctcctagatttttgtttcttaattatcaatctagtctctaaattatattaaaagatttaatttgattccaaatttttaaataatttaatttaatttctatattattttaaaatagattaatttga

SEQ ID NO: 52774 - DNA, 368 bp, Glycine max
  Clone ID: LIB3109-021-Q1-K1-E1
ggggagatggagcggaagtggagcagtgaatctggtgggaatgtgatatcgtcgccatcacactcgcgtaatgggcattctcgctcctcttcgctcactatccccggaggaggaatttcaaccgtcaaaaggactcagaatgttgctgccaaagccgccgctcagcgcctcgcccaggtcatggcttctcagactgccgacgacgacgacgacgacgaagacgatctaggatttcgctacactgctcctccacctctctctctttccaggagctctgctagatctccatctcctgcgttagctcggaacctcgtagaagaatcatcaatgtatcttcgcccagcaccacctgctgcttgtaataatag

SEQ ID NO: 52775 - DNA, 340 bp, Glycine max
  unsure (1)..(340): unsure at all n locations
  Clone ID: LIB3109-021-Q1-K1-E10
ggagggtgcattgtgtcaaacctgttggaggtaaaaagacccagtttattgtaatgggcaatgtgttttgctcggagtaccagatccacaagaggtttgacctcaaaggctcttctcatggtcaatctacagataagccaagggaacaaattgatgagactaccactctcaaagaccttgatcttaactttgtctttcgccttgaatagtcttggtttcaagagcttatatggcaacttggtagagattgtgagttcctggaagcaaagggaatcatggattacagtcttctaattggcctgcatttctgtgatgatagctcanttgatgaaatgaaaag

SEQ ID NO: 52776 - DNA, 217 bp, Glycine max
  Clone ID: LIB3109-021-Q1-K1-E11
ttattctaatgacaattctacagattaaccaatcgaactgatagatcagactaccactataagagtcctttatatcaactttgactatcgccataaataatactaaattcaaattcttacatgaaataatcaatctatattgatactatgatcgaacaccatctattaataattttctgtcttatatacttcctgtcattttggcattatagcatac

SEQ ID NO: 52777 - DNA, 328 bp, Glycine max
  Clone ID: LIB3109-021-Q1-K1-E12
ggatagagagaggtgaaacgaaacgtcgcataaagaatcagataatgcgtgtggctctgactcaacccacctgggacctggctcggaagtgctaagaaagttacgaagctatcttctacattcttctctgtggtgtgtgtggtgatggtggttgtggtagcggacggggataccatttgctgcttcaaccgcccagagcagagatttatatgtattgtaccccctattgtatataaaggactctgtttttgagctcatcatgggagagggagctcatgcctagcactgaatatcacaggcacgtgcatgctgaaactgatacacatcg

SEQ ID NO: 52778 - DNA, 223 bp, Glycine max
  Clone ID: LIB3109-021-Q1-K1-E2
ggttctagtgtgtgattgtttgttgttgtaactcgttcttcttcttttggtgttctgggtttgggtttggtttttctctcacctgaaaatgtcttgctgcggtggtaactggggttgccgaagcttctgcaagtgccgcaacggctgccgaggctgcaagatgtacccagacttgagctacactgagtcaaccaccaccgagaccttggtcatgggagtgggg

SEQ ID NO: 52779 - DNA, 401 bp, Glycine max
  Clone ID: LIB3109-021-Q1-K1-E3
gaccacttggataaacgaacttggacttatatctttggagcttgctgtgccacctctgtgttcataccttcttttcacaattaccgtatttggtcttttctgggacttggaatgaccacttacactgcttggtacttggcaatagcagcccttattcatggccaggcagaaaatgtgacacacacgggtccaacgaagctagtgctgtacttcacaggagccaccaacatactgtacacgtttggtggacatgcagttactgtagagattatgcacgccatgtggaagccacagaagttcaagtacatatacttgctggccactttgtacgttttcacactaacgattccttctgctgctgcccgttactgggcttttggtgatgaacttctcaatcattc

SEQ ID NO: 52780 - DNA, 411 bp, Glycine max
  unsure (1)..(411): unsure at all n locations
  Clone ID: LIB3109-021-Q1-K1-E4
gagagaaaggatgcggaaagagatcttttggccaaactacttgtcaaccttgtgaaatctcagcatggaaccttgaatcaagttcagctcattaaagggtttgaatctgctctcagtacattggaggatgctgttaatgatgctcccagagcagcagagtttcttggccgaatttttgcaaaagccataacagagaatgtagtttctttgaaggagattgggcagttaatacatgatggtggagaggagccaggtagtctcttagaagttggacttgcagctgatgttcttggaggcactttggaggtaattcaaagcgagaagggggacgtggttctaaacgagatgcgttcagactctaactngagggtggaaacttttccgcaacctaatgctaaaacatcaaggaag

SEQ ID NO: 52781 - DNA, 414 bp, Glycine max
  Clone ID: LIB3109-021-Q1-K1-E5
ggtggaaaaactgaagattatgatcatgaagataaacaaagtggtgtcactttcttcagctgcagctcttaaatctgtgtgttccaaaactttttgaggtaaagtctcaaaactttctctcttttctcattaatcacattcttgcttaattagctcttcttttacaaattcttcttcattatattcagctgcagctcttaaatctgtgtgctccaaaactttttgaggtgaagtctcaaaactttctctcttttctcattaatcacattcttgcttaattagctcttcttttacaaattctccttcattatattcagctgcagctcttaaatctgtgtgttccaaaactttttgaggtaaagtctcaaaactttctctcttttctcattaatcacattcttgcttaattagctc

SEQ ID NO: 52782 - DNA, 415 bp, Glycine max
  Clone ID: LIB3109-021-Q1-K1-E6
gggggaaggtcgagtagtgtgccagataaatcctcccagcgttcctctcgcagcatgtctgtcagtcctgatcgtgttcgtgtgagggggcggtctccagcctttaatgctctagcagctaattttgagaaccctaattctaggaacctttcaaccccacctccagtaattagaaagctgtatcctaaatctgtgacaacagattctgcaatactggcgccaaaatcttctgccatagctgcacttagttcttcttttgaacaaccaccttcagcacgagaaaccatgatacctcgctcacttaaagtgagtccagtaatgcccaaatcaaaccctgagaaaaatgacaaggagaattctgtgagcaccagagtggaatctcttaccatacaggaagatgtgaaagaggatgaag

SEQ ID NO: 52783 - DNA, 414 bp, Glycine max
  Clone ID: LIB3109-021-Q1-K1-E7
ggatgactgatgaagaatttgcaagagaaacgattgctggcttaaatccaaatgtcattaagattatagaggagttcccactaagtagcaagctagatactcaagcctatggtgatcatacctgtataatagcaaaagaacatttggagcctaacttaagtgggctcactgttgagcaggctatccaaaacaagaagttgttcatcttagatcaccatgactatctcattccttatttgaggaaaataaatgcagataccacaaagacttatgctacaagaaccatatttttcttgaaagatgatggaactttgacaccattggccattgagttaagtaagccacatactcagggtgaagaatatggtcctgttagcgaagtctacgtgcctgccagcgaaggagtggaagctt

SEQ ID NO: 52784 - DNA, 400 bp, Glycine max
  Clone ID: LIB3109-021-Q1-K1-E8
ggacccgaaggcctgaagaacattgcacaccgtgttcatggtcttgctggggcatttgctcttggattaaagaaacttggaactgtggaagttcaagaccttcccttctttgacactgggaaggttaagacttctaatgcacatgcaattgctgatgctgctctcaagagtggaataaatttgcgagttgtagatggaaacactatcactgttgcttttgatgaaacaaccacattagaggatgttgataatcttttcaaagtttttgctggtggaaagccggtccccttcactgctgcatctcttgcaccagaagttcagagtgcgattccttctggattagttaggaagagcccttatctgacacactctatctttaacatgtaccaaactgagcatg

SEQ ID NO: 52785 - DNA, 442 bp, Glycine max
  Clone ID: LIB3109-021-Q1-K1-E9
ggtagtttaagtgtgaatccctttccctctctactcttctttcactttccatttccatttccattttttctggttcactttctcgatggcctccgagaaccccaccgccgacgacgccgtcaacggcttcaatcggccggaaatgttctcggaaaacctcgccggcaccgtcgacgcctacgaccgccacgtgttcctctgctacaagagtcacctgtcctggcccccgcgcatcgaggcctccgacgccgatcccttccccaagcgcgtcgccaccaccttcaaagcccgcaagaacgacttgcccctcaagacgaaaatcaccgtgtgcgaggtgcgtgaggaggctggcttcctcgacggtgacgtgttgattttccccgacatgatcaaatacaggggtttggaggaatcaaatgttgatagctttttcgaagatgtt

SEQ ID NO: 52786 - DNA, 419 bp, Glycine max
  unsure (1)..(419): unsure at all n locations
  Clone ID: LIB3109-021-Q1-K1-F1
ggagcctgagtgtgacaagctcataatggcttcacttaacaagaactacgttgacatggatgagtatcctgtcaccactgagctccagaaccggtgtgttaatatcatagcaaatctattccatgctcctataagtgatgatgagactgcagtaagtgtgggaactgtggggtcatcggaggcaataatgttggcaggtctagctnttaaaaggaaatggcagacaaagagaaaagcagaaggcanaccatatgataagcccaacatagtaactgnggctaatgtgcaggtttgttgggaaaaatttgcaaggtactttgaggtagagctcaaggaagtgaaactcatagaaggatactatgtgatggaccctgcgaaagcagttgaaatggtagatgagaacaccatctgtgttgcaa

SEQ ID NO: 52787 - DNA, 440 bp, Glycine max
  Clone ID: LIB3109-021-Q1-K1-F10
gacacacagagacatttttctttcttagaagcgtgcaccacacggaacctcgcaattccttcacacccaccataataataatatcttcattgttcttttcttctttgttaccattaaaaacacacacacacacacaacaacactctgaaactaacaacaacaataaaagaccatgtcggtgaaggagtgcgagcaccacaaggggaagaagaggaagatcttccggcaagtgttctggtgcttagtggtgttccttttcatcgtgctggtcacaattcttttgatatgggcaatccttagacccaccaaacccaccttcacgctccaagacgtcaccgtctacgccttcaacgccaccgtggcgaacttcctcacttcgaattttcaggtcacgctcatctcgcgtaacccgaacgaccgcattcgtgtttactatgatc

SEQ ID NO: 52788 - DNA, 436 bp, Glycine max
  Clone ID: LIB3109-021-Q1-K1-F11
ggagttagggtgagttgcaggcagtgtcatctctgctttgacgacaagatgagcatcccaattccccatcggcagttattcatagacggagactggaaagtccccgtcctcaagaatcggattcccatcatcaacccttccacccaacacatcatcggggatatcccagcagctactaaggaagacgttgatctcgctgtcgctgccgccaaagctgccctctcccgcaacaagggcgccgattgggcctccgcttccggctccgttcgggctcgctacctccgcgccatcgctgccaagatcaccgagaaaaagcctgaactagcaaaactcgaagctattgactgtggaaaaccgctcgatgaagccgcctgggacatcgacgatgttgctggttgctttgagttctatgctgaccttgctgaaaaattggacg

SEQ ID NO: 52789 - DNA, 356 bp, Glycine max
  unsure (1)..(356): unsure at all n locations
  Clone ID: LIB3109-021-Q1-K1-F12
ggagaattgttctacgtcgtcaaagacaccgatttaggggttaaaaaatatcgattaacctctgatatttctcttagctgcagcctgcagtgagactaagaaaatctccgaacccgctacttcctattttctatcctttcaaaagagaaactggaaaagttagctaaacgtcatagctagatcgtcgaacaaaacgaatagaaaagcgttgaaaatggctcangagtcactctcagaaacccctgatatctcgcccccttcgtctactgcacaatcgctgccagatccatctctttcaaggaaccgttcttttagccggctcaacgcacaggcaccagaatttgtgcccactcgcg

SEQ ID NO: 52790 - DNA, 369 bp, Glycine max
  Clone ID: LIB3109-021-Q1-K1-F2
ggtgagacgagggtagggtcgcgttgtgtcgcggcgtgtcgcgcgctgcttctgtgtgtggcgtttgtgtttacacaccaaactctatctgcgtatcagcaccatgtcgaccacgcggggtggaaaagctaagcctttgaagaaacccaagtgtgatgagagggatcaccacgagggtgacatggctcacattcagaagaaaagggaagaggagaacgctctaaaagagttgagagccagggcgccacagaggggacgctttagaggctctgcgctcaagaagagtggagagatatagggtctctatatcaagagtgtacacatccaatattgagccctgtagtatatcaccatgatcacttgtgtcat

SEQ ID NO: 52791 - DNA, 407 bp, Glycine max
  Clone ID: LIB3109-021-Q1-K1-F3
gtatgttaaaagtgttcaaagaactgtcatttggatgggaaaaagacaggaaactgtggaagatgtcccctgtggtaacactgttgctatggttggtttggatcagttcataacaaagaatgctactttgactaatgaaaaggaagttgatgcccatcccattcgagctatgaagttttctgtctcacctgttgttcgtgttgctgttcaatgtaaggttgcatcagatcttcccaagcttgttgaaggtcttaagcggttggccaagtcagatcctatggttgtttgtaccattgaggagtctggtgaacacattgttgctggtgcaggagagcttcatcttgagatctgtttgaaggacttgcaagatgatttcatgggtggagctgagatcattaaatctgacc

SEQ ID NO: 52792 - DNA, 288 bp, Glycine max
  Clone ID: LIB3109-021-Q1-K1-F4
gacaacagacacagaaactgctaagaccataacaagaatggtgtttgactcaaaaaagacgaggaacatgaaatgttagggctaggatgcttcaacctcactcgattctctcactatccatccactacctctctaccatcctctcactccgaattacttaaggttgccccttgcaaatccacctaatcagtgactaatacgcaccaatcttcagtcacttagccacagtccacctgcaccgctataattgaaacatataacccgaccagtgccaaaaggcaattggca

SEQ ID NO: 52793 - DNA, 269 bp, Glycine max
  Clone ID: LIB3109-021-Q1-K1-F5
ggtcaacttaggctggagaaccgatatcaaaatgtaatgcacacacaacacaacacaacagcgtggaacgagacaacttagtacgaaaatcgttatccgtcgcaacagccactaagatgttctttgagtcttggcacgccacgtgtcagaactgccaacagatagccccatctctttctacttctgcctaaacctcgaactcagcacccccatccactggtgattgtttgattgagccttgaagaaatggaccacagcgctgatgcaca

SEQ ID NO: 52794 - DNA, 405 bp, Glycine max
  Clone ID: LIB3109-021-Q1-K1-F6
gaagtacaagcagagagttacgacacatatttctttttcttttccctttttcctaggcacagcacacgccctctcaaatagaaactgagagatgaattctgatcagtttcagaagaacagcatgttcgtagaaacccctgaagatggtggcaaaaacttcgacgatgatggacgagtcagaagaacgggtacatggataactgcgagtgcccatatcataacggcagtgatagggtcaggagtgttgtcacttgcatgggcaattgcacaaatgggttgggtggctggccctgccgctctctttgccttctctttcatcacttacttcacttccactcttcttgccgactgttatcgctcacctgatcctgttcatggcacgcgaaactacacctattccgatgt

SEQ ID NO: 52795 - DNA, 364 bp, Glycine max
  Clone ID: LIB3109-021-Q1-K1-F7
ggtatcgcttcagagttgagaccaagacacactcgttcatatatctctctgctcttctcttctcttctacctctcaagtttttgaagtataaagatggcagagacattcctattcacctggagtccgtgaacgagggacaccctggtaagctctgcgaccaatctcgagctgcctgaccttgctcgaacggcccagacagaaggtgctgcaaacatgcccagacaatggtatggcttgagagacacacaagcaacgtgactacagagatcgtgcggaaccttcaggcatggcttattcaacgattgggacttgatgctgacaactgcaaggtccttgtaaacattgagcagcagagccctgata

SEQ ID NO: 52796 - DNA, 356 bp, Glycine max
  unsure (1)..(356): unsure at all n locations
  Clone ID: LIB3109-021-Q1-K1-F8
gacacaaaaacggctaaaaccataacaagaatggtgtttggctcaaaaaaaaagaagaagaagaaatgttagggttaggatgcttaaacctcaatcgattctctcacttcccatcccctccctctctaccatcctctcgttccgatttacttaaagttgcgtctcgtagattcgctttatcagtgactaaaacgcagcaatctccagtcactaagccacaatccaccttcaccgctataattgaaatagataacccggccagtgtcaaaaggcaattggcgcagctgtttgacttgtctctgagggcaactgtgcccgatgagccagatgttgtgccgntaattgatgcttgtgct

SEQ ID NO: 52797 - DNA, 437 bp, Glycine max
  Clone ID: LIB3109-021-Q1-K1-F9
ggaatccagaaagtttgataaatgagtgattgtgtgactccaaaagtttatgcactttggaaaggaattttctgtctcataaactctgttcaaaggattttaataatttgtttctggcttagaccattccatgattgctctcctttcttgggggtccatttttttttctcagtttataattataataattgaagcttttgaaccctctcatgtttcattaaattctgtgccctcaaaggggtactgttgaaccattttttttaatctatttacttggctgcggattgtccactcagaatctttacaaagctttatctccaatggatttgattaccactttgattgtcttcctttatgatgctttagcttctttcagtgctaatccgagttaacaagaccaaattttaaaattaaaaaaatggaaaaccagtgacatt

SEQ ID NO: 52798 - DNA, 419 bp, Glycine max
  Clone ID: LIB3109-021-Q1-K1-G1
ggtccgttgcaatatcggcagaagagagacaccaacaaccttccattggttgatgacacatcggatggagcatttgtccagtttagggggcggtttaaggtcacgccggcagatctcagtccaatgggtccttcaaacagcacatctggcccacttgttagtcctaccagtccaccaaatccaaatttcctgtctgtagctattcttccatcactgcagtgcatcttgcaacagaacggtttgcagagggaagagattattaaattaataaaatatgcagagcaatcttctggcaagaatacagaatcaatggaagcagggatagttgatattttgcaggcaccacctgcaacaactagggagcgagagctgcattttcaggtgattcaactccagcagagcaatggaatcctttttga

SEQ ID NO: 52799 - DNA, 430 bp, Glycine max
  Clone ID: LIB3109-021-Q1-K1-G10
ggaaaagaaggtagagaaggtgttgtgaaaggttaagatcgagaaattagggtgaagtgaaggagaagctcttgagaaggtatagttcttgttcttgctcatgctcccttgtgttttgtgtgactcgttgttcttgttcttgctacatttttatctttaatttacgtgcttctaatcatgttaacattagtgttttgtttcaccttctacacatttacacatttatcgtctcaaatctcaaatacaaagcacctatactttctttctcccaaaataattgatcgtctcaaatctcaatttaataaatgtattataaagtcttttaacataagattcttttttaaaaaagacaaaacataacattaatataaaccaaaagatcgttatcacttatgttaattaataagtgataacgatttatatttcttaa

SEQ ID NO: 52800 - DNA, 435 bp, Glycine max
  Clone ID: LIB3109-021-Q1-K1-G11
gagagacagtgacagaaataaattgaaaacagagaaagatgaacggcgacgacgacaagggtttgctgtggaagctcccagtggtgaagtccgaccactttggcaaggtgggccccgtcttcggcatcggtgccggctgcggcctcggtttcggccttggccttctcggaggagtgggtgttggccctggaattcctggattccaagttggttttggatttggtgctggatgtggtgttggtttagggtttggctatggtgtggggaaaggaattgcacaagatgacaacaagagatactctaatgttggaaatcctttccgtggttctagaagcatcatttctgaggatgatattactgcacttgtggacgaccttgtcattaatactaaaaagcttatcaaggcaacatcaaaagaaattgacaagtggagaa

SEQ ID NO: 52801 - DNA, 429 bp, Glycine max
  Clone ID: LIB3109-021-Q1-K1-G12
ggaagaaggcatggagcagtggtggatgtggtcgggtaggagcactagagatgggaagctgcccgggacccatagagacacccgctcttctcctatctactcgtaaagggcttcctcactttatctcccctgacctactcacttctctcccttcccccgattcccatctccttcaaatttctccactccactttttggaaggacttgcttcaaccactatatcaaaattaggagggcttcaccaaatgcttggtttgcaccaatatggaatggcggctgtagccagggattccattcaatgccttcctgagtctaagggagctaccaaactcggagcctcttttgaaactccttgtggtcgtctgttgattaaacccaaagattatgttgaaatgatttcatgcatgaggcctaatatatgggccactt

SEQ ID NO: 52802 - DNA, 375 bp, Glycine max
  Clone ID: LIB3109-021-Q1-K1-G2
gacaagaagaagaagaagaagaagaagaagaagggttggttggtcccattccataggaagagatcaaagagaagagaaaagatgtttgagccgcagcagctatacactcgagcgaagaccgaggaattcgacctcgaatcaggggaaaccctctacccagggctgagcgtcggcgagaaccagctccgatggggcttcatccgcaaggtctacggcatcctctacgcccagatcgtcctcaccaccctcgtctctgtcaccaccgttttctatactccaatcaatgacctcctcaagggcaattccaccctcctcctcatgctcctcttccttcctttcatctttttgattcccctgttgaagtaccagcagaag

SEQ ID NO: 52803 - DNA, 405 bp, Glycine max
  Clone ID: LIB3109-021-Q1-K1-G3
ggtggttggcttgctttcagtctgttcattgcaaatgcttcattccaagatggttaggactctgtaagctgatgaagacaacactcataccgttggaaagaacgatgctgctggccaatgttgttaatttagatcttgcttcctttgtcttcttgagtattatcagagacgggagtgcatggatcactagctctttcattcggtcagagtggccggcagttgacattcctcttgatcatgaagcatttgcagttccaaagggttataatgcacctcaacaagtgcacatcacgcaaggtgactatgatggaaaagcagtaatcatctcatgggtgaccacagaagagccagggcacagccatatacagtatggcacatcagagaataaatttcaaactagtgaag

SEQ ID NO: 52804 - DNA, 362 bp, Glycine max
  unsure (1)..(362): unsure at all n locations
  Clone ID: LIB3109-021-Q1-K1-G4
ggaggaagaggaggagtaacaaagcaagtatgtcagaatcaaacgcaattgcaaatggtttggctggtgcaagtggtggaattattgctcaaatcataacttatcctcttcaaacggtaaacacgcgccagcaaactgagagaacactcaagaagaacaagcaaagtttgcccttcaactcaaccactgctcctggcactcttcttcagatctttcaggtcattggaactganggttggggtggactctatagtggcctcaagccttctcttcttggaactgctgcttctcagggaatttactactatttctatcaagtttttaagaacaaggcagttgccattgcagctgcacggatggtg

SEQ ID NO: 52805 - DNA, 331 bp, Glycine max
  Clone ID: LIB3109-021-Q1-K1-G5
gagtgagagacggaaagtgcaaagccaccgtcttgtcttttcagagcttggctttgcttatcgaatctctctcctctcatctttctcaatcaaggtttggaaaagattgccgatgcttaggatattcaaccccttggttgtgacaatggaactggaatggtcaaggctcgatttgctggtgatgatgcttccaaggctggctttcccaggattggtggccggcctcgacacactggtggtatgggtgggatgggtcaaaaggatgcccttgttggtgatgaagcccaatcaaaaagaagtattcctactctcaaggatcccattgagcatg

SEQ ID NO: 52806 - DNA, 370 bp, Glycine max
  Clone ID: LIB3109-021-Q1-K1-G6
gggaagatgtgaacagggaaggtcttagaaagacaccacttcgtgttgccaaggcccttcgtgaaggaaccagaggttacagacaaaaggtgaaggacattgttcaaggtgctttattccccgaagctggtctagataatagagttggtcatgcagggggagcaggtggactcgtgattgttcgagatcttgacttgttttcctattgtgagtcctgcttgcttccattcccggtcaagtgtcatgtgggttatgtcccctctggtgaaagagttgttggtttaagcaagctctctcgtgttgctgatgtatttgcgaaacgacttcaagagcctcagcgtctggcaaatgaggtatgctctgctttaca

SEQ ID NO: 52807 - DNA, 350 bp, Glycine max
  Clone ID: LIB3109-021-Q1-K1-G7
ggtacaagcagagagttacaagacatatgtaacggttttttccgtttttactatgcacatgttaagccctattaaatagaaactgagagatcaattctgatgagcttcacaataaccgcgtgttcagagaaacccatgaagattgggtcaaaactttacgatgatggacgacgtaaaagaaccgtggcatggataactgttagtgcccatatcgttactgcagtgatctggctccgaatgctggtacttgcattggccatttgccacatgggttgggtggctggccctggcggtcactttgtcttttatgttattactgacttgacttacactcttcttgacgactgtta

SEQ ID NO: 52808 - DNA, 91 bp, Glycine max
  Clone ID: LIB3109-021-Q1-K1-G8
gggatggagaaagggaaagtgcttcggcgacttctttagacaccaagggttcaacaagggtcaacctggtttgaacctcttggttccaaac

SEQ ID NO: 52809 - DNA, 395 bp, Glycine max
  Clone ID: LIB3109-021-Q1-K1-G9
ggaagagaatggctcccaagggtttaacctttctggctgtgttaatatgcgtttcagcactgtcactgagtccttctgttgcgggggaagggcaaaataatggccttgttatgaacttctacaaggaatcatgccctcaggctgaagacatcatcacagaacaagtcaagcttctctacaagcgccacaagaacactgctttctcctggctcaggaacatcttccatgactgtgctgttcagagttgtgatgcttcactgttgctggactccacaagaaggagcttgtctgagaaggaaacagatagaagctttgggttgagaaatttcaggtacattgagaccatcaaagaagctttggaaagagaatgccctggagttgtttcatgtgctgat

SEQ ID NO: 52810 - DNA, 396 bp, Glycine max
  Clone ID: LIB3109-021-Q1-K1-H1
gacaccgagtgagatattgaatcactgaagagggtccttgaatggcggtttcttctctctctgttactcctctttcgctctcaaatactttcccctctctatcttccaagccaaagattccatctttgtgttttctctctggcaacaacaccacattgagggtgacatgcccaaaacctctgcactcatccactgttgttcatgttgctaccgaagcgttggattcatcccctgatcccttggacccacctccagaaacccttgatgatgactctgacgccaccacctttgaggttggtgacttggggactcctagcacttcagcaattagcattggtggcgatgcagatacaatggcgccaaagcagaagattagaatcaagcttatgtcttact

SEQ ID NO: 52811 - DNA, 381 bp, Glycine max
  Clone ID: LIB3109-021-Q1-K1-H10
gaagcaggaacggatgggatgcaagattccccaccgcacgaattaaccatggcctcttcaatcgaaaagctcctagaaagtggtcgtcccttccttcgcggtgatctggagtccatcgaccagaacttacctcggctggttggcgtcctgcaaaatgtgggttcccgggaagtgctggcccaaccccggaagtttcgttaacaacttggcgacctatttcgcattctcaagctcttgaaagccccttactctgtctggctctgtggcctgtttcactcagactacttcaatccttacgtttacctcgccatattcgacccttcaaccggtcgagaagtggttcgagcactcgattgcgaggaagctgagagtccgattcac

SEQ ID NO: 52812 - DNA, 416 bp, Glycine max
  Clone ID: LIB3109-021-Q1-K1-H11
agacaccacagagggagagacagggacggatataaatcgagaacagacaacgatcaactgaaacatcgactagggtatgctgaggaagctaccaagggtgaagtcctaccactttggcaaggtggaccccatcttcaacatcttagccggcttgggtctcgttttgcaccttgtccttgtcggaggattctgtgtcagacacggaatttctggattccaagttggctacatatttggcactgtatagctttgtaaagtacggactggcgtatggcgttgggaacggtatcactcaagatgacatcatgagatactttaacgttggaaattcgatccgtgaatctagaaacatgattttcgagcactatattactaggcatctggaagacctattcacttgtactgcatagcttata

SEQ ID NO: 52813 - DNA, 424 bp, Glycine max
  Clone ID: LIB3109-021-Q1-K1-H12
gaactcaagctttcagacattttcccttttcagcgttcattggtgtggcctagctgttttctcaatgagaaagccttcatctctgcaaagcgcacttttgcgctttggggttcccttgttgcttgttatcaccttctgttatgctacttctactgctgcagcaacaactcaagtttcagggaatgaagagctgccaaagacaaacctaaatgggcatgatgaagaagcaaaattcggattttttcatcataaaccaatattcaagaaacatattccaattccagtatataaacctgtaccaaagccatttccagtgtataaacctataccaaagccagttccagttccagtgtacaagcctattccaaagccagtgtataagcctattccaaagccagttccagtgtacaagcctatgccaaag

SEQ ID NO: 52814 - DNA, 329 bp, Glycine max
  Clone ID: LIB3109-021-Q1-K1-H2
ggcatccaaaatggcgcattcttctgttatagtcttcctctgcactctccttctcttcttttctccgtcaattcgtgcctccgacgatgacgtggctcttcacgcgaagaagctcatcagagacctcaacttgttccccgacgctgacgtcaacatcgttcccgttgctaattgcacccttcaaccccgcaggatcgtcgagaagcgcctgatgttcccgaagctgctagcttccgattccgagccttcggttgaagattttgggcaccacgctggctattaccccattcagcattcacatgccgcaagggatgtctactttttcttcg

SEQ ID NO: 52815 - DNA, 325 bp, Glycine max
  Clone ID: LIB3109-021-Q1-K1-H3
ggcatacaaagtggcgcattcttctgttatagtcgaactctgcactctgcttctattcatttctacgtcaattcgtgcctccgacgatgacgcggcgctgcacgcgaagaagctcatcacagacctcaacttgttccccgacgctgacgtcaacatcgttcccgttgctaattgcacccttcaaccccgcacgatctgcgagaagcgcctgatgttcccgaagctgctagcttcggattccgagccttcggctgaggatttgggtcaccacgctggctattaccccattcagcattcacatgccgcaaggatgttctactttttc

SEQ ID NO: 52816 - DNA, 238 bp, Glycine max
  unsure (1)..(238): unsure at all n locations
  Clone ID: LIB3109-021-Q1-K1-H4
ggaggatagataggccttagaagaagaagagagaggtctctcaacaatggccactgccactgtttcaatttcaactttatgcgctactttcggaacccattgcgccatttgccacaacccagaacctctattctctcaaccttataatctcaatcactttccttctaactcttacaagctcgatntctcgcctcgctcacctgtttcacccgttgccaaggcctctgaatccgcggta

SEQ ID NO: 52817 - DNA, 396 bp, Glycine max
  Clone ID: LIB3109-021-Q1-K1-H5
ggtgggattttgagagagagaaatagagagagaacttcaagtgagggtgagagtgacacaaatctagagagagcactagtactctaaaagtctattatattcttcaaaatatgaccatgcatcgcgagtcttgggcttttgtcttcggcgttatgggcaacatcatctcctttggagtgatccttgctccattgccaaccttttaccaaatctacaagaagaaatccactgaaggtttccagtcacttccttatgttgttgcactgttcagtgcaatgctttggatttactatgctttcgtgaaaagggaaactgccctacttctcattaccattaacacatttgggaattgtgtggagtcaatttacctttctatcttcctaatttatgccccca

SEQ ID NO: 52818 - DNA, 391 bp, Glycine max
  Clone ID: LIB3109-021-Q1-K1-H7
agggagagccaacagtgaagagaatggcttccaagggtgtaacctttctggctgtgttaatatgcgtttcagcactgtcactgagtccttatgatgccggggaagggcaaaataatgggcccgttgtgaacttctacacggaatcatgccctcaagctgaagacatcatcacagaacaagtcaacgcttttctacaagcgccacatgaacactgctttctcctggctcaggaacatcttccatgactgtgctgctcacagttgtgatgcttcactgttgctggactccacaagaacgatcttgtctgagaaggtaacagatcgaagctttgggttgagaaatttcaggtacattgagaccatcaaagaagctttggaaagagaatgccctg

SEQ ID NO: 52819 - DNA, 239 bp, Glycine max
  Clone ID: LIB3109-021-Q1-K1-H8
gggggccgtgtgtggaagagttgccagcgtcaggaagtcaggaacaacttgacttcttctccttcttcttcttcttcttctctttggacagaacaacaactcaactcatctcacgattcattcagctttttaaatgaataaaattcctttcttccttacaatcacaatgctcttctaccctttaaacccaacattacacccctcttgctttctttctttcctaatactaatatttggta

SEQ ID NO: 52820 - DNA, 426 bp, Glycine max
  Clone ID: LIB3109-021-Q1-K1-H9
gggttgttaaaggagcagttgatgtacacattggtgcaaacccttctgctgagggtggaggagaagatgagggagttgatgatgcaactgttaaggttgttgacattgttgacacattcagacttcaggagcaacccgcattcgataagaagcagtttgttaccttcatgaagaggtttatcaagaatttgactcccaagctcgatgcagagcaacaggagttgtttaagaagcacatcgagggagcaactaaatacctgctctctaagattaaagatttccaattttttgctggtgagagcatgggtgatgatgcttgcttggtctttgcctactacaaggacggcgctgccgatccaacattcctgtactttgcatatgccttacaggaggtcaagtgctaagtgacttaatgtaccgagctat

SEQ ID NO: 52821 - DNA, 320 bp, Glycine max
  Clone ID: LIB3109-021-Q1-K2-A10
cacagcaatcaagtaagcactacacaaccacactcactttttctgctaaactaaacaaaaatgttatcctccggtagaaattgctccttcaaatatcctggcacctacttcacgagggggaatgcctcacatcatactaatactatactctgcacaaactcattttgccccaaatttgctgaccccaattacccttttggaaaaaatgcacggagtactcattcttttcaccatgcccacaaacttgacctctttgtattccaaatcaacactagttacactcaatttcccatcccatttgcaccctttaattctcacta

SEQ ID NO: 52822 - DNA, 304 bp, Glycine max
  unsure (1)..(304): unsure at all n locations
  Clone ID: LIB3109-021-Q1-K2-E10
ggctcttctcatggtcaatctacagataagccaagggaacatattgatgagactaccactctcanagaccttgatcttaactttgtctttcgccttgaatagtcttggtttcaagagcttatatggcaacttggtagagattgtgagttcctggaagcaaagggaatcatggattacagtcttctaattggcctgcatttctgtgatgatagctcagttgatgaaatgaaaagttcacctcgcagttctcattcaggcaagagagacatgnctgataatgagatgctcacatgctggtaagttc

SEQ ID NO: 52823 - DNA, 174 bp, Glycine max
  Clone ID: LIB3109-021-Q1-K2-H1
acagggggggctatattgtaactgaagagctcccttcagggaatttctggtttctgtaatatacctactttcgctttcaaatgattcctcctctctatcttccaggccaaaggatgcatcttggagttacctctatggcaacaacaccaccttgagtgtaacaagccttaatcc

SEQ ID NO: 52824 - DNA, 238 bp, Glycine max
  Clone ID: LIB3109-021-Q1-K3-D11
atagtttcaatcaaaaacaaatctcatctcactgtcatccaattccaagaatatatctttacaaggcattcccattctaaaagaggggaatattcaaaggaaaaaaaagagtatttttttaacaacaagagctctcctcaatcttatcttatatcacaaggaaggtacgtcataatcttaacttcctcaccgttgttactttctcactcaattcatttctgaattctattctcataaa

SEQ ID NO: 52825 - DNA, 265 bp, Glycine max
  Clone ID: LIB3109-021-Q1-K3-E11
gcgtccgccactcgttcgacattcgataagacgacatattgttgaggctgcattgtttcaaacctggtggaggtgaaaagacccattttattgtaatgtataattagtgttgctcgtagttccattttcacaatagttttgtcctctattgtacttcttatgggttatttatttataaattattgttaacttattttctattctattcctgttatacatcctaatcttaagtttttcttttctattaaatagttttggtttttat

SEQ ID NO: 52826 - DNA, 374 bp, Glycine max
  Clone ID: LIB3109-022-Q1-K1-A1
ggagaagaagaagaagaagaaaagaggggtcttcgaagaaaccatgagtatcctctctctctaaactctctcagattcgatcctctcttctcttctttcaattccgcttccctcgcactaaatgacagggtttcctggccctcgccgcgatcacgcttcttcttcctcctcctcgcacaattccaacagcagtggtagcaacgtatttaatttgcttgcaaggagggagatctcaccccgaacaagatatgtggcaaaatggcattggggagaacccggtgaagcttcaaaatcaaagtctattccttattctcgtcctaaaaaagaagttgtgagagatgcaagacgtggtctcctctcatgggttgaggctg

SEQ ID NO: 52827 - DNA, 413 bp, Glycine max
  unsure (1)..(413): unsure at all n locations
  Clone ID: LIB3109-022-Q1-K1-A10
gatggtgatgagcggtttattgagcctacaccaaaatcactggaaaatttaaccctgcaatctgttaaggatgcagtgatgaatcaattttttggtgataacatggaggtatgcattgtaggtgacttcactgaggaggacattgaatcttgcattcttgattaccttggcacagctcaggccacaagaaatcatgaaagagagcaaaaattcaacccacccttatttcgaccatctccatctgatttgcagtttcaagaagtatttttgaaggacaccgatgagagggcatgtgcttatatagcaggaccagcgccaaaccgttggggttttacttgtgatggagtagacttngtagagtcaattaataatgcatcaataatcaatgatgatcagtcaaaatctgatgcaca

SEQ ID NO: 52828 - DNA, 415 bp, Glycine max
  Clone ID: LIB3109-022-Q1-K1-A11
ggaagtgaagtggctgcaatggcttcaagtcaggaagaggtgacccttttgggagttgtgggaagcccatttctacacagggttcagattgctctcaagttgaagggagttgaatacaaatatttggaagacgatttgaacaacaagagtgatttgctcctcaagtataacccagtttacaaaatgattccagtgcttgttcacaatgagaagcccatttcagagccccttgtgattgttgagtacattgatgacacatggaaaaacaatcccatcttgccttctgatccctaccaaagagccttggctcgtttctgggctaagttcattgatgacaagtgtgtggttccagcatggaaatctgcttttatgactgatgagaaagagaaagagaaggctaaagaagagttatttg

SEQ ID NO: 52829 - DNA, 410 bp, Glycine max
  Clone ID: LIB3109-022-Q1-K1-A12
gaggttgatgggcatgaaagcaacctagattctcaagctgaagatcgtgaactcaaagtccagcttttgcgcaagtatagtggatatctagggagcctcaagaaggaatttttgaagaagaaaaagaatggaaagttgccaaaggaagctcggcaacagctacttgattggtggaacaggcattataaatggccatacccttcggaatctcaaaagcaggcacttgcagaatccacaggcctagatctgaaacaaatcaacaactggttcatcaatcagagaaaacgtcattggaagccttctgaggatatgcaatttgccgtgatggatgcaactaactactacatggaaaatgttatgtgcaagccatttccaatggatggcatgcctatgcttctttaactcaatcc

SEQ ID NO: 52830 - DNA, 412 bp, Glycine max
  Clone ID: LIB3109-022-Q1-K1-A2
ggatggcacacgttgacgccatgacttgtgggttgccgacatgcgccacatgcaatggtggtcctgctgagatcattgtgcatggcaagtctggcttccacattgacccttaccatggtgaccgtgctgctgatctccttgttgacttctttgagaagtgcaagcttgacccaacccactgggaaacaatctcaaaggctggtctccagcgtattgaagagaagtacacatggcaaatttactcacagaggcttctcactctcactggtgtctatggcttctggaagcatgtgtctaaccttgaccgccgtgagagccgccgctatctcgagatgttctatgctctcaagtaccgcaaattggccgagtctgtgccccttgctgttgagtaaactgaggatgaagagttgga

SEQ ID NO: 52831 - DNA, 288 bp, Glycine max
  Clone ID: LIB3109-022-Q1-K1-A3
ccggactctgaattcccgagccgacctacccgaccgttccgagaagacaacagaaggggaggaccgattgaaagatgtgtgatcgggcctttgggatgaactatgtattctctatgtgtggtccgttcgctttaccacaatcctaattttacgatgctcgcataccacgatctatctcttacatgaagacaactactttcaaattcctacctttcttactattacgaccgaacacataaaagcttatcgaaactaaattttttagaatggcaataaatgttcgatata

SEQ ID NO: 52832 - DNA, 410 bp, Glycine max
  Clone ID: LIB3109-022-Q1-K1-A4
acaaaaggggcggacagtttgtaagattgatgaacgggccttttggatgaactatgtattctctatatctggtccattaacaataccacttgggtatcctaagatgatggctatccatgatcttgactcaaaagaagatgatgactctggtattcctacctttcttactctttctagtgaacacatcagtgatgatggaatatatcttcttgagaatggacatgattgtttgatatatgttggagactctgtgaatacagacatcgtgcagaaactgtttggtgttgctacagatgacaaagaccctaccctgtttgtattgcagcaatacgacaatccactatgaaagaagttaaatgaagtggtaaatgagatacggcggcaaagatgttcctacttccggttcaagc

SEQ ID NO: 52833 - DNA, 412 bp, Glycine max
  unsure (1)..(412): unsure at all n locations
  Clone ID: LIB3109-022-Q1-K1-A5
gatagttntatataataataagggggtggcaacagaacacacagctctcacttccttttgccacattacacaagaactctccaaggatcctccttcccacgaaattcatttggtgggaaaatccaagaagagggtggaatttcaagccagggaagatggattatttcaatgcaccaggaagaaaccatctctttgttccggggccggttaacatcccggaccagatcattcgggccatgaacagaaacaatgaggactaccgttctccagcaattccagctatgaccaaaacactgcttgaggatgtcaagaagattttcaagaccataactggaatcccatttctcatccctacaactggtactggtgcttgngagagtgctctcacaaacacactgtctcctggggatcg

SEQ ID NO: 52834 - DNA, 388 bp, Glycine max
  Clone ID: LIB3109-022-Q1-K1-A6
ggtggcacacatctatacttgtgcagaagaagaaagatccatgaactaacattcccacacgctcgcttcaccatatttgccacccttttaaccctcacttcttgggtttattttgctccttttttttttccttgtttggggtttgcatttttcctggttgaaaaagggaagaacttgaactaattggttaagttacctatctatctatctatctaaggtataatattttatatcagttattaaaggaaagaaagaaagaaacgaagatgggaaggggtaaggtacagctgaagaggatagagaacaagatcaatcgccaggtaactttctccaaaaggagaagtgggttgctcaaaaaagctcatgagatctctgtactctgtgatgc

SEQ ID NO: 52835 - DNA, 378 bp, Glycine max
  unsure (1)..(378): unsure at all n locations
  Clone ID: LIB3109-022-Q1-K1-A7
gcacggcaacagaagaataatcgagacacagatcatggtgatcattttttaatttctcagatttatccgacgtcgctgcagatccaccaaccgttatggctgccttcagcggtgatgaaacggcaccgtttttcggctttcttggcgccgcagctgccctcgtcttctcctgtatgggagctgcctatggcacancgaaaagtggcgtgggcgtggcttccatgggtgtaatgagacctgagctggtgatgaagtcgattgttccttgtgtcatggctggagttttgggcatttatggccttattattgctggtattatcagtaccggtattaatccaaaggccaaatcctattacctctttgatggttatgcacatc

SEQ ID NO: 52836 - DNA, 89 bp, Glycine max
  unsure (1)..(89): unsure at all n locations
  Clone ID: LIB3109-022-Q1-K1-A8
ggagacttctcaggtcagggcgnngggctacccgcgtgagttggaagcnnatatcaaataagcgggaaggagaaannaaaaaaaagacg

SEQ ID NO: 52837 - DNA, 415 bp, Glycine max
  Clone ID: LIB3109-022-Q1-K1-A9
ggatggtgctggtcgtgtcgggaagatgctctttgctcgccaaggaaagaaatttgattatgacctcaaacagctgcgcttcacaggtgatcttctcatggagttgggtgctggagttgaactcgctactgctgcagtgccgcatctctttcttccattggcttgtgctgctaatgtactcaagaatgttgctgccgtaacatcaacctcaactcgcacaccaatttataaagcctttgctaaaggagaaaacataggggatgtcactgctaaaggagaatgtgttggcaatattgcagacctgttaagaactggtttgagcatattgattgccaaaaggaatccatcgcttgtcaccacattttccctcctttcatgtggatatatccttagctcttatagagaggtaaaatct

SEQ ID NO: 52838 - DNA, 365 bp, Glycine max
  Clone ID: LIB3109-022-Q1-K1-B1
gagggaaaaatttgcttgaaaaaatttctaatctattctattctatatacaattatgtcttttccatctggtattctgaaaaggctagtttaatttatttgtggaaagagatataaagcaagcaattaataaaaacatgggtaggggaaaggtggagctgaagaggattgagaacaagataaaccgtcaagtgacatttgcaaagaggaggaatggtttgctcaaaaaggcttatgaactctctgtcctctgtgatgctgaggttgcccttattatcttctccaaccgtggcaagctgtatgagttctgcagccgccatagcatggccaagacacttgaacggtatcacagatgcagttatggag

SEQ ID NO: 52839 - DNA, 436 bp, Glycine max
  unsure (1)..(436): unsure at all n locations
  Clone ID: LIB3109-022-Q1-K1-B10
gatgcaacaccagcaacaaaactatccatgtgtggtgcctaacaccaattctcaaagtgaaaaatgcacatatgttggtatggagcagtttcttcacaatcccagcaagttctcctctgatgtccagcctgtactgcaatcatcagggtatacgcctccactatatgctacagcagcagcagcttatatgacctcagcaaatccattttacactaatttgcaggcttcgggtatatattctccgcaatatataggtgcatacccttttagtcccacagctgttcctccatatattgctgcataccctcctcatggttctgtaccacttgttgacggngctactggttctagttttactccccaagcaccagggatttcttctactgcaagaaacatttcacacggagctgaaatgatgcatgcaaacaagtttttt

SEQ ID NO: 52840 - DNA, 419 bp, Glycine max
  Clone ID: LIB3109-022-Q1-K1-B11
gagcttcagtgtctgcgtctcttcctcctctctctgcatcgctgcgttttccgaatcgaaaggtgaggttagtaagtaacaatggtggagaaggccaagggtaggaaggaggaggttgtcactcgagagtacaccatcaacctccacaaacgcttgcatggctgcacatttaagaagaaggctcctaaagcaattaaggagataaggaagtttgctcagaaagcgatggggacgaatgatgtaagagtggatgtgaagctcaacaaggctgtgtggagccaggggatccggagcgtcccaaggaggattagggttcgcattgctcgcaagaggaacgacgatgaggatgcaaaggaagagctctattcccttgttactgtcgtcgaaatccccaaggaggagctcaaaggtttggaaac

SEQ ID NO: 52841 - DNA, 434 bp, Glycine max
  Clone ID: LIB3109-022-Q1-K1-B12
gggcttacacttgtaaaaaaaattcacagcagcctaatcagcaagcaggaattggcactaataatccacagattccaccacctctgcagccgtcaccaccttcatcggtgacgacaggtatcggaggtagtgactatattcaaggctctatcagaccaggatcaatggctgatagagccaggatggccaagatacaccaacccgatgcagcactcaaatgtccacgatgtgaatccacaaacaccaagttttgctactacaacaactacagcctctcacagcctcgccacttttgcaagacttgtcgtcgttactggaccagaggaggtgcactcaggagcgtgccagttggaggtggctgcagaaggaacaaaagaaacaaagggaacagtgctagatcaaagtctcctatgaaaccttcagcaagtgctaat

SEQ ID NO: 52842 - DNA, 341 bp, Glycine max
  Clone ID: LIB3109-022-Q1-K1-B2
gagagcgaagagtgaagagaatggctcccaagggttgaacctttctggctgtgttaatatgcgtttcagcactgtcactgagtccttctgttgcgggggaagggcaaaataatggccttgttatgaacttctacaaggaatcatgccctcaggctgaagacatcatcacagaacaagtcaagcttctctacaagcgccacaagaacactgctttctcctggctcaggaacatcttccatgactgtgctgttcagagttgtgatgcttcactgttgctggactccacaagaaggagcttgtctgagaaggaaacagatagaagctgtgggttgagaaatttc

SEQ ID NO: 52843 - DNA, 418 bp, Glycine max
  Clone ID: LIB3109-022-Q1-K1-B4
tggggagccagagtgaagaacgaagaggatggcttccaaagggttaatctttttggctgtggtatgcttctcaacacttgcacttgagtcgtgtcttgcggaggataatggacttgttatgaacttctacaaagaatcatgccctcaggctgaagacatcatcaaagaacaagtcaagcttctctacaagcgccacaagaacactgctttctcctggctcagaaacatcttccatgactgtgctgttcagagttgtgatgcttcactgttgctggactccacaagaaggagcttgtctgagaaggaaacagatagaagctttgggttgagaaatttcaggtacattgagaccatcaaagaagctttggaaagggaatgcccaggagttgtttcctgtgctgatatcctcgttctctct

SEQ ID NO: 52844 - DNA, 419 bp, Glycine max
  Clone ID: LIB3109-022-Q1-K1-B5
ggagcgaagagtgaagagaatggctcccaagggttgaacgtttctggctgtgttaatatgcgtttcaacactgtcactgagtccttctgttgcgggggaagggcaaaataatggccttgttatgaacttctacaaggaatcatgccctcaggctgaagacatcatcacagaacaagtcaagcttctctacaagcgccacaagaacactactttctcctggctcaggaacatcttccatgactgtgctgttcagagttgtgatgcttcactgttgctggactccacaagaaggagcttgtccgagaaggaaacagatagaagctttgggttgagaaatttcaggtacattgagaccatcaaagaagctttggaaagagaatgccctggagttgtttcatgtgctgatatcctcgttctct

SEQ ID NO: 52845 - DNA, 207 bp, Glycine max
  Clone ID: LIB3109-022-Q1-K1-B6
gactgcaaccgagtaattggaaacaccatgaacttaaagctttcgggatatgtgatcaatgtaaatgtgtgtaagatctaacgggttgtgctcaactaaagatgatcctgcaagagtgtacttactgccagttatatgaaccatctgtagatgaaaggtatccctgtttgatgcacattcacatgtgaagttgtgactatgacaaat

SEQ ID NO: 52846 - DNA, 235 bp, Glycine max
  Clone ID: LIB3109-022-Q1-K1-B7
catatcagccatggatgtggaacgtgcgaaaccacgaagtgaaaccattgcctgaaggataacttcatccttccaaaatctatctctaccgatttactacttgctattcgcctctcaaaaacaccagcctgctctagtatgcaagcttgcgtaccatctctcatattatcgtgctatcaagctattctccattatcgaagatcacggcctaatacatattgcttaaaaaatagct

SEQ ID NO: 52847 - DNA, 386 bp, Glycine max
  Clone ID: LIB3109-022-Q1-K1-B8
gagggtgagagagaattatcaaaggtgaaacgaagaagccctaactacgcacgcattcgtgagaaaactcaatattcgtcgctcatggcactctcttctcgtctcttttccaaatccaaattgatctatggcagtcaaatacttctacaaaaggagcatgctattccagttcgtcactttgctaaagagtctgcccctcctgcccttaagggagacgagatgctgaagaacatttttgtggaggtgaagaacaaatttgagaccgccataggaatattaaagaaggagaaaatcaccattgacccagaagatccagctgctgtttctcattatgcaaaggtcatgaaaacaattagagagaaggcaagcttattgtcggagtccca

SEQ ID NO: 52848 - DNA, 400 bp, Glycine max
  Clone ID: LIB3109-022-Q1-K1-B9
ggagagaaatgagtgaagaagccaaaaagaacttcgccggagctctaacggcgaggcccaactccgatgagccgaaaccggcaccggtgccagctgttcccccgaagaaggtcatcatcaagagcgctgatatgatccccgacatgcagaaggaggccgttgatatcgccgtcgccgcgtttgagaagtacaatgtggagaaagacgttgcggagcagataaagaaggagttcgataagaggcatggccccacgtggcactgtatcgttggacgtaattttggctcatatgtgactcatgaaacaaaccactttgtttatttctacttggatcagaaagcggttttactctttaaatctggctagccttattgtggtagcaaagaagttgagatctatgg

SEQ ID NO: 52849 - DNA, 413 bp, Glycine max
  unsure (1)..(413): unsure at all n locations
  Clone ID: LIB3109-022-Q1-K1-C1
gatgtagataaggatgttgatgacgcttttgccagttgaagttaaagaacagcgcctcancaatctgctgcaggcattgatggttgcagcttgtgttgctgctatgcctctcttgaagaagataccaacctcagtgctttggggttactttgctttcatggcaattgaaagcttgcccggaaaccagttttgggagagaatactatatcttttcactgctccaagtcgaagatacaaagtgatggaggaacaccatgcagcctttattgagaccgtgccattcaaaacggttgccatgtttaccttattccagacagcttacttgcttctctgctttggtctaacctggataccaattgctggggtcctattcccattgttaatcatgcttctaatcccagtacgccaatatt

SEQ ID NO: 52850 - DNA, 384 bp, Glycine max
  unsure (1)..(384): unsure at all n locations
  Clone ID: LIB3109-022-Q1-K1-C10
ggtaatgagattgagcaagggtatttttgaaattgagacactaaagaggattaaaattgtacgttgggcgaaaaatgagaatcgagggatgatctgtaattttgttgttgggtgagtgtgttgatcggattggaggcaggcaaagtgcaaatcaagcgattatcaatctttggggtacgaaatttgatgtttgttgagcttttatgaatcacaattaaatgcgtggtgtgatctgaaaaggcaaaggagaactaaaaaagtgtggaatcaattgaaatcaggcggtgctgttgaattctgcaatggcatcagcagcgcctaatgtcgatctcttcgatgcctattttcgccgtgcagatttggatcgagacggncgtatcagcg

SEQ ID NO: 52851 - DNA, 400 bp, Glycine max
  Clone ID: LIB3109-022-Q1-K1-C11
ggagcaagagtgaagagcgaagagaatggctcccaagggtttaatctttttggctgtgttatgcttctcagcactgtcactgagtcgttgtcttgcggaggataatggacttgttatgaacttctacaaggaatcatgccctcaggctgaagacatcatcaaagaacaagtcaagcttctctacaagcgccacaagaacactgctttctcctggctcagaaacatcttccatgactgtgctgttcagagttgtgatgcttcactgttgctggactccacaagaaggagcttgtctgagaaggaaacagatagaagctttgggttgagaaatttcaggtacattgagaccatcaaagaagctttggaaagggaatgcccaggagttgtttcctgtgctgat

SEQ ID NO: 52852 - DNA, 423 bp, Glycine max
  Clone ID: LIB3109-022-Q1-K1-C12
gaccaacaacacgtagtattattggattgatttctccctcttcgctctctctcagtgaccagagacagatgatgatggagatggcgaagcgaaacgctgtcgttgcggcactcgcggcgttggtgctactcgcggcgagtgtggcggtggatgctcaggagaactcggacgtgaagacgctggtgaagtacaagcacgggaagaagtactgcgacaaaggatgggaatgtaagggctggtcaatttactgttgtaacctcaccattaccgattatttccagacctaccagttcgagaatctgttctccaagcggaactcgccggtggcgcacgcggtcggattttgggactaccactccttcatcgccgccgccgcgctttttgagccggaagggttcggcaccaccgggaacaagacgatgc

SEQ ID NO: 52853 - DNA, 389 bp, Glycine max
  Clone ID: LIB3109-022-Q1-K1-C3
aaaaaagaggttgttgataaagcaaaagagtgtgattgaaacataaattttggactttctttgcatttggcagccacccccacaacgaaataaaacaaaacaagcacacaaccagagacacacacgcatagagagagacggagagagaagcagaggaagaaggagaagaaggagatcttgagagatcaggtcgcaactcgtcatggggagagaagttacaggaatgcaagttgtggacaagaagccaaatggtgttataccaccttcaaatggtagttctaatgataaagtatgcttttctcctaaaatggaagcagctaacgttcacgcgaaggatcacaaggtaaatgaatgtaccaaaactaactcttttgaggagaaaagccatg

SEQ ID NO: 52854 - DNA, 241 bp, Glycine max
  Clone ID: LIB3109-022-Q1-K1-C4
gtcttgtgcgtttgtttaacaactactcgatgacctgtgacacaggggaactaccttgaaaacccattgtagaagtacacaggtgcatggtacattaaaaaaagagaggagcctaagagttgaagcagccacaaaggagcttggagttggctagaaagggaagaatggctctttatgatgatcatcattgaccctgatataccagaactttgctatgggcttttatgttatgtgtctgact

SEQ ID NO: 52855 - DNA, 117 bp, Glycine max
  Clone ID: LIB3109-022-Q1-K1-C5
tttgtgacaatgctgctttcaatgattctggggagtattttggaaactgacaatatgcgatgtactagtaccgtgatttaaccataacgtctacagaaattttacgcaaatttctgt

SEQ ID NO: 52856 - DNA, 414 bp, Glycine max
  Clone ID: LIB3109-022-Q1-K1-C6
gggatggtctgcgtccaaaaaataaggggcgtgtacttgttctggctgctacaaacaggccttttgatcttgatgaggctgttattaggaggcttcctcgacgattgatggttaatttgccagatgctccaaacagagaaaaaattctcagagtcattttagtgaaagaagatttggcacctgacgttgattttgaagcaatagctaatatgactgatggatattctgggagtgacctaaagaatctgtgtgtcacagcagctcactgtccaatacgagagatcttggagaaggaaaagaaggagagaagcttagctttgtctgagagcaaacctttacctggattgtgtggcggaggtgacattcgtcccttaaagatggatgattttagatatgcacatgagcaggtgtgtg

SEQ ID NO: 52857 - DNA, 415 bp, Glycine max
  Clone ID: LIB3109-022-Q1-K1-C7
ggacaagaatttgtcaagggacaacctcattttcgatttgagaccataccagatgggttgcctccatctgacaaagatgcaacacaaagcattgcatcattgtgtgatgcaactagaaaacattgttatgagccactcaaagagcttgcgaagaagctcaatgcttcacatgaagtgcctttggttacctctatcatctatgatgggctaatgggctttgcatggaaagtggcatgggatttggacatttctgaacaacaattttggacagcctcagcttgtggtttaatgggatacttgcaatttgatgagcttgtcggaagaggcattattcccttccaagatgaaagcttcactactgatgggtcattggatacaaatctatactggatatctggaatgaaaaatatgcgaa

SEQ ID NO: 52858 - DNA, 432 bp, Glycine max
  Clone ID: LIB3109-022-Q1-K1-C9
ggaacaaagtgatgatgattattctctgtcagattctgatgagactggtggactgatgcatgggcagagaaacataaacatgcttcagagttgcagaagtgtgtgcgagtttgagatgattaagaagataaacgaaggaacttatggtgttgtctacaaggctagggataagaagactggagaactagtggcattgaagaaggtaaagacgaacatagagagggatggctatccgatgtcatccttgagggaaataaacattctcttgtcttttaatcatccctccattgtgaatgttaaagaagtagttgttgatgattttgatggtacttttatggtaatggagcacatggagtatgaccttaaggggctgatggaggttaagaagcagccctttagcatgagtgaaattaaatcgttgatgcgacaact

SEQ ID NO: 52859 - DNA, 434 bp, Glycine max
  unsure (1)..(434): unsure at all n locations
  Clone ID: LIB3109-022-Q1-K1-D1
ggatgtggaatgtgggaaaccacgaagtanagtttgggcctgaagtgggagaagttgaacctttcaaaaactatctttaccgatatactactccctattcggcttccaaaagcaccagccccctctggtatgcagtcaggcgtgcctctgctcatatcattgtgctatcaagctattccccatttgtgaagtacacgcctcaatacatatggcttaaagaagagctggcgcgggttgatagaaagaagacaccttggctcattgtgctcgtgcacaagccactctacagcagcaacgtagctcactacatggagggtgaagccatgcgatcagtttttgagacatggttcgtccaatacaaagttgatgtcatctttgccggccatgtccatgcttatgaaagatcatatcgatactccaatatagactacaac

SEQ ID NO: 52860 - DNA, 439 bp, Glycine max
  unsure (1)..(439): unsure at all n locations
  Clone ID: LIB3109-022-Q1-K1-D11
ggatctctgggagtattnggctttcaacactggagaacgctcgaatacnagttgtacgtttttgggctgggtctagtctaatgcttcagttacanncctactgttcttncctttcatanatagttttctnttgggccttcgcctatnngttgtgttccgtcattcagattattcaatgtttatanatcaagagtaccgagagtggtnngcagcattctggcctgatgtccattnttcgtgtcattattgcactgatagtgtcacagatagttctgatgggactccttaccactaaagaggctgcttcatcaactccatttctaattgtactcccagtactgacgatatggttccatatatactgcaaaggccgtttcgaacctgcatttgttagatatcccttacaggaagcgatgatgaaagacacattggaacgagc

SEQ ID NO: 52861 - DNA, 373 bp, Glycine max
  Clone ID: LIB3109-022-Q1-K1-D2
gggagcgagagcgagaaacaaaaacctatttttattttctctcttcatatcacttaaactgagactggatgcttctgtatccatcatattatatgatgattattgaattgattatgcgttcagatttcacttcaagatcactttgacagtttgacttgtccggcaccaacttctggtattactattgtctgagttctcaggagttctttcacagaaagtagatgggttctagaatcccatctcataagcttagcaatggcctctacgtatcaggacggccggagcagcccaaagaaagaactccaacaatgacatcaacagccgtgccatataccggtggagacataaaaaagtctggagaattggggaagat

SEQ ID NO: 52862 - DNA, 422 bp, Glycine max
  Clone ID: LIB3109-022-Q1-K1-D3
tgatgaactattggttctggacatgccacgtgaaatgagattcgcttctggtgcaatgatgttagaatatggaaaagcagttcaagagagtgtatatgagcagcttcgtgttgttcgtgaaggtcaacttcgtatcatattcactcaagacttgaagatattgtcttgggagttctgtgcaaggcgccatgaagaacttcttcctcgaaggttggttgcaccacaggtcaaccagttagttcaggtagctaaaaaatgtcaaagtacaattgctgaaagtgggtctgatggggcttctcaacaagacattcaaacaaacagcaacatgttgttgacagctgggggtcagcttgcgaagattttggagatgcaatcactaaatgagttgggcttttctaaaagatatgtgagatgtttgcaaa

SEQ ID NO: 52863 - DNA, 206 bp, Glycine max
  Clone ID: LIB3109-022-Q1-K1-D4
tcataaaccacaacttcatatcatattcactcaagacttgaacatatccaacttgtaattctctacaaggctccattaagaacttcttcctcacaaattggttacaccacatatcaaccaattatatcagctaactaaaaaatttcaaagaacaattcctcaaaatccatctcataaaacttctcaacaaaacatttaaacaaaca

SEQ ID NO: 52864 - DNA, 442 bp, Glycine max
  Clone ID: LIB3109-022-Q1-K1-D5
gattctaagagggagatggacatccttgctgcattggatgagatgaagtcaatgaagtctaggcatgcaactgtcagtgttgatgaaatgctggaggctctgcagcgcacagcagctgacaaggagaaaaggctggaagaagaagacgaagctctgataaaatcagttgtctttcataattcagacggttttgtcagaagaattcgtgatgaagatattgaaacagaggaggaattggttcagttttcaaatggacatggcgaaacatccagttctaatcctaagaggcaaaagatttcagaagattttccaagcaaaccaactgacactttgacaaaagccagtttggatgattatggcaaacaagaaaattcacgcagtggtggaaagcttaattctttagtgaggatttctgtcattaagaaaccagtgacctcagatg

SEQ ID NO: 52865 - DNA, 291 bp, Glycine max
  unsure (1)..(291): unsure at all n locations
  Clone ID: LIB3109-022-Q1-K1-D6
ccttctattctcttcgtttcactctaaagacgtgcgcttggggctgctgcggctgtttcattgagcagcaaagtgcctctttttttacggaaagaacggttctggaaatggatccgcttcttcatcatcatcatcatcatggatttcaggagctcttgctcttcctgccgcagcttacatgttccaagatcaggaggtgcangcagctgagctggagcgcactttcattgccattaagcctgatggagtgcanagaggcctgatttctgagattatatctcgttttgagcg

SEQ ID NO: 52866 - DNA, 326 bp, Glycine max
  Clone ID: LIB3109-022-Q1-K1-D7
cgagaaaaaagtggaattgctggcgtctcgcaaaggccacacacaccgcaaatacaataacactccatcttacaaaacaaagacttcgcgtccaagcaatttctgagcgataacaaaacaaaacaaatattatcaaaaggggcatactttgaaaccaaaatcagattttattttttatttttatgctgaatctgaatagatcagacggtgatgtcgagttcgtcgtcatatgggtcggaggaagacgatgagggattcgactcttaccggaaaggatgctactacgcctgcagagtcgccgatcagttcggcgccggcaggtacat

SEQ ID NO: 52867 - DNA, 419 bp, Glycine max
  Clone ID: LIB3109-022-Q1-K1-D8
gtagataaagctgatgttttggtgcagaatagtttgttgcaggcattaagaacaggaaaattttcatattcgcatggaagggcgattagcatcaataacactatctttgttgtaacctcaactgtctgtaaaggtaatgactcttttgttttggaagagtctaagatgttttctgaggaaagaatgcttgaagccaaaagatgccaaatgcaattattaattggacgtgcctctgaggatgccaaaagaattggtggcacaaatgttaaagttgtacccagaaaagggttttccaaatcatcatctctgaacaaaagaaagcaggctgatattagtgactccaaggagggagcaacaagcaagatgcagaaacaagacagcgaggcatctcgatcctttctagatctaaatatgcctgt

SEQ ID NO: 52868 - DNA, 114 bp, Glycine max
  Clone ID: LIB3109-022-Q1-K1-D9
cgaggaagggcgtagtaagcgacgaaatgcttcggggagttgaaaataagcgtagatccggggattcccgatataggtcaacctttcgaactgctgctgaatccacgggccgac

SEQ ID NO: 52869 - DNA, 414 bp, Glycine max
  Clone ID: LIB3109-022-Q1-K1-E1
gaagtgtgagtgatatttgagctgaaaccctagccgctcttctcttcattcttcactttggaaacaatcataatggcgttctgtaataaggttggaaatgtcttgaggcagggtgctgctcgcagcacacatgcccctgttgcgtccatgcttaattacatccgctgcatgtcttcaagcaagcttttcattggaggcctttcatatggagttgatgaccagtctcttaaggatgcattttctggctttggagatgtggttgatgcaaaagttataactgatagagacagtggaagatcaaggggatttggatttgtcaacttctccaatgatgagtctgcaagttcggcactctctgcaatggacgggaaggatctaaatgggcgaagcattcgggtatcctatgcaaatgat

SEQ ID NO: 52870 - DNA, 402 bp, Glycine max
  Clone ID: LIB3109-022-Q1-K1-E10
aaaccgagaagaagaagatggagatgtatcagatctggagcaggagaatagcgttgggagcgttcgcgtttgttctgcttttcctatcggcctcagcagacgacgtcgttgtgctctctgaagataacttcgagaaggaagttggtcaggacagaggagctctcgttgagttctatgctccttggtgtggacactgcaaaaagcttgctccagaatatgaaaagcttggtagcagcttcaagaaagccaaatctgttttaatcggcaaggttgactgtgatgagcacaagagtttgtgcagcaaatatggagtctctgggtacccaacaattcagtggtttccaaaaggatctcttgaacccaaaaagtatgaagggccacgcactgctgattcacttgctg

SEQ ID NO: 52871 - DNA, 428 bp, Glycine max
  Clone ID: LIB3109-022-Q1-K1-E11
caatgggaaacgagaaagcaaattgtttctgggaggcagaattacctccaaattatgatagagttggaattgagaatttcattcgtgcaaagtatgatgaaaagagatgggttccaagagatgggaattcaaaaacaccttctggatttcgggaagagaaaagtccttcacattggcagaggcctgtggagagaagtggttatgccgctgtttctgaaaataaatttgaggaaaggaagaaaatccaaccatcaactgcaattcctgccgcaagaattaatgttcctgctcctcccagagcacctgagcaggtaactcctattaccaaacctcagcatgtggagaaagtggaatcagtagcaccacaaccacaagctccccaaccactaactgaaacatcaaagcaagctacagacacaggtaaaaat

SEQ ID NO: 52872 - DNA, 431 bp, Glycine max
  Clone ID: LIB3109-022-Q1-K1-E12
gaaccctcaacatattcactaagatttatttccttgattttattcatttaatgatttgttcctagtctttatcttataataattttcgcattgcttgcccggtaattcaagatcaacttggaaaatttgcaagatttgggatgaaatctggtcggatcttgctttgtgggatggggattttggtgggtcttatttcaatacaaagctcttcctcttcctcttccaaaaatcccatctctttctcttttttttcatcataacacaaaacacaaaacataaacctttcttccaaccaacccttttttccaattctttgtttcttccaaaatcttcaatccaatttttcaccttttcacaaatggggatggctgcagcggagtcacagtttcatgtcttggctgttgatgacagcatcatagataggaaactca

SEQ ID NO: 52873 - DNA, 412 bp, Glycine max
  Clone ID: LIB3109-022-Q1-K1-E3
ggcacaaaaatacaatacaaaacaaaacagagcaaagagagagtgtgtgaaaagtgaaacaaaaaacagaacaacaatggcgacacttaaggttcctcagcctcttccccccgctgcagatgattgtgagcagctccgaaaagccttctcaggttggggaactaacgaggagctgattgtatcgatcttggctcataagaatgctgctcagaggaagcttatcagagaaacttatgcccagacctatggagaagatctcctcaaggccttggacaaagaactcacgagtgattttgagaggctggttcatctttggacacttgattctgctgaacgtgatgcatttttggcaaacgaggcgactaaaaaatggacttcaagcaatcaggttctggtggaaatagcctgcact

SEQ ID NO: 52874 - DNA, 357 bp, Glycine max
  Clone ID: LIB3109-022-Q1-K1-E4
tgatcatcatggtttcagtagtctctacaagcaagtcactgagcttaaactactattcaaaaacatgccctgatgtggaatgcattgttgccaaggcagtgaaggatgccactgctagggacaaaactgttccagctgcacttctgcgaatgcacttccatgactgtttcgttcgggggtgtgatgcctctgtgctgctaaattcaaaaggaagcaacaaagcagaaaaagatgggccaccaaatgtttctttgcatgcattctatgtcattgatgcagcgaagaaagcactagaagcttcatgcccaggtgtggtctcttgtgctgacatccttgctctagcagcaagggatgcag

SEQ ID NO: 52875 - DNA, 438 bp, Glycine max
  Clone ID: LIB3109-022-Q1-K1-E5
gggtagatgaggtgaaatgagagcattggtgagagttgagagagagtgagttatgttatcaatgttatggtgaaagtgaaaccacaagcaaagctgaaagagaagctattcagtgattttgattcagatcgtgtctgtgtctacaaccatgtacagcggctccagcgacggcgaaagccatgacgctcctcaaaatcagaggaaaattccgcctgcatcctccatgctatgggtccgcaatcttcgccgtttcatcggatccggcgccggtctcggatccgaagccctgatggagcttgaaactaagagaattttgctcgacatttttaaggaaaagcagaagaaaaccgccgaagctgctacaattcccactttctacaagaagaaacctgaagatggatcaatcagtcatagagttcagagattggcaaagtatcg

SEQ ID NO: 52876 - DNA, 405 bp, Glycine max
  Clone ID: LIB3109-022-Q1-K1-E6
gtgggtaattatgaatggtaccaaaaattggattgggaagttcaatggcgaaaaaaaagagattccttaactcgttatttaattcgaattggtgaaatgatggaatccataaaaattattcaacaggctttggaaggaattcccggcggaccatatgaaaatttagaaattcgctgctttgatagagaaaaagagccagaatggaatgagtttgagtatcgatttattagtaaaaaaccgtctccgacttttgaattgccaaaacaagaactttatgtaagaattgaagcccccaagggagaattgggaatttttctaataggggatcaaaatggttttccctggagatggaaaattcgtccgccaggttttatcaatttgcaaattcttcctcaattagttaaa

SEQ ID NO: 52877 - DNA, 348 bp, Glycine max
  Clone ID: LIB3109-022-Q1-K1-E7
gatgcaatgatgcagttgaaaaacgagatacacacagtggctgttggatctgctataggtcaagcctgtttgctactttcagcagggactcctggtaaacgctttatgatgccacatgctaaagccatgattcagcagcctcgtattccttcctctgggttgatgcctgcaagtgatgttcttattcgtgcaaaggaggtgataattaacagggacaatctggttaaactacttgccaaacacacgggaaattcaaaggaaacagttgctaatgtggtgaagagaccgtattatatggatgccacaagggcaaaggaatttggggtcattgacagaattctttggcgt

SEQ ID NO: 52878 - DNA, 391 bp, Glycine max
  Clone ID: LIB3109-022-Q1-K1-E8
gatagtagaaggtcaggtggtgattccagaaaatcttcatctaattcaagaccatccaaaactttgtttgttataaattttgatcccgttaatgccaggacaagggatctggagagacattttgattcctatgggaaaatattaaatataagaatcagaaggaattttgcttttattcagtttgaatcccaggaggatgctactagagctttggaggcgaccaacctgagcaagtttatggaccgtgttatcactgtggagtatgccataagagatgatgatgacagagacagaaggaatggatacagtcctgatagaagaggccatgactctcctgatgggagatatggtcgtggtagatcccccagtccatatcgtagaggtaggggta

SEQ ID NO: 52879 - DNA, 430 bp, Glycine max
  Clone ID: LIB3109-022-Q1-K1-E9
cacgtgaagctgcaatacttccatgtttcaaaagacttgagctggggccaaggcattggaagtcctaaattccctggagtgccttacacttctcacacagagacaagggtgtaaggtttctctgtaccaagatgctcatgtcccagacaactttgtccctaaaataccacttgctggaggccacacttaccaacctcatagatgttgggaagatgtttttgatgcaatcaataacgcacaacacttgatatacattacaggatggtctgtttacactgagattacgttggtaagagattctaggaggccaaagcgtaggagatgcaacacttggtgagcttctcaagaaaaaagcacgtgatggtgtcagggttttgatgcttgtttgggatgatagaacttcggttcctttgttaaaagaagatggctt

SEQ ID NO: 52880 - DNA, 410 bp, Glycine max
  Clone ID: LIB3109-022-Q1-K1-F1
gaagaagattttggttgacggaggacaagctaccatgtcggacatggagtttggaacttatccctttgttacttcttctagcccatcaactggtgggatatgcactgttcttggtattgctccaagggtacttggtgatttaataggagtggtgaaggcatacactacaagagatggttctggtcctttttcaactgaaattttgggttcaggaggtgacctactcagatttgctggtcaggagtttggcacaactactggccgccctcgacagagaggctggctcgatttagttgcactgaaatactcttgtcagatcaacggtttctcatcggtgaatcttaccgaggtagatgttctatcacatcttgaagaaatacagataggtgtctattacaaacttgctgatg

SEQ ID NO: 52881 - DNA, 384 bp, Glycine max
  Clone ID: LIB3109-022-Q1-K1-F10
gatggcagaggctgcgcagagtttgaactttgaacgttgaaggaacatagaggcagaggtttttcttctctcaccgtagaatcgaatcgagttcactttgatcgtgtgtgtctccgatcttcaaatccgcaacaaccatggtgaggggattgctcaacaagctcgtctctcgctccctctccgtcgccggaaaatggcagcacaaccaactccgccgcctcaacatccacgagtaccagggcgctgaattgatgagcaaacacggagttaatgttccgagaggcgtggctgtttcctctgttgaagaggtcagaaaggccatcaaggaccttttccctaatgaaaatgagttggtggttaagagtcaaattttaacccggtgga

SEQ ID NO: 52882 - DNA, 416 bp, Glycine max
  Clone ID: LIB3109-022-Q1-K1-F11
gaggccaagagcttggaaaattagcctcacaaaagcaaagatcaaacaaaccaaggacgagaacacgatgttgcttgaacttgcacttggtttattggttttggctctgtttctgcacttgcgtcccacacccactgcaaaatcaaaagcacttcgccatcttccaaacccaccaagcccaaagcctcgtcttcccttcataggacaccttcatctcttaaaagacaaacttctccactacgcactcatcgacctctccaaaaaacatggtcccttattctctctctactttggctccatgccaaccgttgttgcctccacaccagaattgttcaagctcttcctccaaacgcacgaggcaacttccttcaacacaaggttccaaacctcagccataagacgcctcacctatgata

SEQ ID NO: 52883 - DNA, 431 bp, Glycine max
  unsure (1)..(431): unsure at all n locations
  Clone ID: LIB3109-022-Q1-K1-F12
ggagagagagaagggttagaagggtgaagaagcatgtcttcactcaagaagaagaaaccctattacccgcttccgttaattcctatctagtactactactttacttctgattcaaaagggtgatcttcttcttcttccaagcttatcaattatcatgcatatgctactttcttctctcttctcggggaattgaagcgttgtggtccgattgtttgctagatcaagcaaattaacctatatactggtctatatcatcatcaccttgcacctctctctctctctctctctatatatatatatatatatatgtgggtttaatctcttactttctttatcttttcacttttttcagttttggtttgatttaattacttgattaaaacttacatatatggatctgaatatatagtacgtggntttcgagcttggtg

SEQ ID NO: 52884 - DNA, 362 bp, Glycine max
  Clone ID: LIB3109-022-Q1-K1-F2
attcgtcaatattgctggaaattgcggacatatgtggccaatatggttcattggtcccaattgcggtcacagagattccgaaaaccttgacaatgtgaccaaaattgttgtcatggattgttattttaaaaccttgactagaaccctagaagacagaccccgactatgttaatgagcagctgctgcaggtattcaaaatctgaatgtgatgggaaaggaaatcagtcgtggtaggaagtaatttatcaacaattaacatttggtcaattaacacgttgtgtcagctcttgctttggaccacacgggatcaagagtgctttctggaagctatgactatatggtacgaatgtatgattttcaag

SEQ ID NO: 52885 - DNA, 410 bp, Glycine max
  unsure (1)..(410): unsure at all n locations
  Clone ID: LIB3109-022-Q1-K1-F3
gtgacaagaagtggagtgaggagatatgnngtactgcaaaacacgcttccacgccttggtgttcttctcaagatacttctgtccatggaacaaagtacgagaaagggtggagaaagatagtgcgaagggaacatatcggcgtcgtttacaagagcttcgcgaccgcgtcaccaatagagaaccatcgctctcaagaaagattncgcctcgagcanggaggacgaaggcgttcccacgcaccgccatttcgcgagatttcttctcctcanaagagatgcnnagcataggaacaattgttaaggttgcagggatgtagtacacnagtgaagaagcgattgtatctggtttttgagtatctggacttggatctaaagaaacatatggattcatctccagagtttgtgaaagat

SEQ ID NO: 52886 - DNA, 378 bp, Glycine max
  Clone ID: LIB3109-022-Q1-K1-F4
gggagttactgatattgggttggccaagattgctgtcgggtgtggcaaattggagaggctgagtttgaagtggtgcttggagatttctgatctggggattgatcttctttgcaagaagtgcttggacttgaaatttctcgacgtgtcctatctcaaggtagcaagcgaatctttgagatcaatagcttctctattaaagcttgaggttttcattatggtgggctgctctttagtggatgatgttggattacggtttcttgaaaaaggatgtccactacttaaggcaattgatgtaccaaggtgtgattgtgttagctcatccggtttaatatctgtaattagtggacatggaggtcttgagcagttggatgcgggata

SEQ ID NO: 52887 - DNA, 436 bp, Glycine max
  Clone ID: LIB3109-022-Q1-K1-F5
agactcaaagggtttgattgttggttcaagaaaggcttgacttcaacacttcaagcagccttgggctcatgagcatgagcctgtaggcagtctcttagaagctgttaaggtaatcaagcctacagttttgattgggtcatcaggagtgggaaaaacatttacaaaggaagtaattgaggctgtgacttctataaatgaaaaacctcttgtcctggctctctccaatccaacttcacagtctgagtgtacagctgaagaggcttatcaatggagtgagggtcgtgcaatttttgctagtggaagtccatttgatcctgtagaatacaagggcaaagtgtactattctggccaggccaacaatgcttacattttcccgggctttggtctggggttggtaatctcaggagcaatcagagtgcatgatgatatgcttcta

SEQ ID NO: 52888 - DNA, 379 bp, Glycine max
  unsure (1)..(379): unsure at all n locations
  Clone ID: LIB3109-022-Q1-K1-F6
ggagacagaaaagaatgagtacggtgggagaagggaaggtgagtagtaatggtcatggatgttgcaaatcagggccagactatgcttncccactggaagccatttctggtcccagagagtctctcatttatgtaacctctgtctacacagggaccggaatagagaagccagactatttggcgacagcggatgtggatccaaactctccaacttattccaaagtcatccataggcttcctgttccttatttaggtgacgaattgcatcacacaagctggaattcatgcagctcttgccatggagacccctcagcagaccgacgatttctcatcgtacctgcactcgtatcacgtcgagtatatgtggttgatgtgaaaac

SEQ ID NO: 52889 - DNA, 407 bp, Glycine max
  unsure (1)..(407): unsure at all n locations
  Clone ID: LIB3109-022-Q1-K1-F7
ggaggagactgagaaaacagaagaaaacaaaatggaagacacagtttctgcgttgaggtctttgatggtttctcactctccgccgctggatgccttaatggtgccctctgaagattatcacctgagcgaatatgtgtctgcacgagacaagcgccgcgaattcgtttccggcttcactggaagtgccggcttggcacttataacaaagaaagaagcactgctgtggaccgatggaccgtattttttgcaggctgagaaagaacttagtgctgggtggaagctaatgcgaattggtgaagatcctgctgtagatatctggatggccgataatttgccaaaagaagcattcgntggggttgatccctggtgcatttcaattgatactgctcaaagatgggagcgtgctt

SEQ ID NO: 52890 - DNA, 328 bp, Glycine max
  Clone ID: LIB3109-022-Q1-K1-F8
acctgtccttggcaagctagagaatctgaggggtgttgctcttcataacaacaacttctatgggtcaattccaccagagttgggaaattgcactgaattggacggaatatttttacagggtaatcaccttagtggagcgattccaagtgaaataggaaacctttcacagcttcaaaattaggatatatcaagcaattcccttagagggaatattcctgcatcactagcgaaggtgtataatctcaaaaatgtcaaagtatcaaccaattttctggtcggacctataccttgtgatggtgtccttgacaactttactggaagctccttt

SEQ ID NO: 52891 - DNA, 409 bp, Glycine max
  Clone ID: LIB3109-022-Q1-K1-F9
gcagcaacagcaggtataaattgattgatccagccagccaaaagcataattatctttttttttgttttctttaaccaaacaagactgagaaaaagacaagataaacatccattcttgttttagcaaagtggtatgtagataatctataattagcaaaatattatacagagagcatgagcgaaagattgattgtgcaaaagcttccaacattttcttatacaaagaaagacacaattccttagaaaataacaattgggggtacaaagtacaattcaggctttgtttttttctagtagataagctcgggtaagataaggcctggaaattgaaacattaaaagaaatgtgtaagggaaaggacaatgccaagtgtagcgaaggagtacccaaaatttgtaaacataaatact

SEQ ID NO: 52892 - DNA, 360 bp, Glycine max
  Clone ID: LIB3109-022-Q1-K1-G1
gagggcgactataagttagaacaaaaggccaatgctgcggtattatatgaatagcttgaccgtagctactcaactttttgaagattataatgctgatcctacacaaatagcacatatggaggatgggcgctcaacagtgattgacaaaagcgaatcacgtaagcacttcgagctgcatggtggtgaagaaactggtaagaaagacactgaatgtagcgatttaactaatgcccgctataaaggaacaagcagtttcttcaaatgttcgaattgcttgataagtagctaacgagatgcacactctcaacaagttgtatgttcacacactacacatgatgctgaaacaccttgtatcaccac

SEQ ID NO: 52893 - DNA, 425 bp, Glycine max
  Clone ID: LIB3109-022-Q1-K1-G11
ggaagaggaacgaagcaatcgcaagtcgtctgttgtgtcccgcgggagcagacgacctgtcttcatcgccaaacaacctcaaaaacattcatcaacgttcactattaatccatccatcattaagtaagaaaataaggttcgatttttttatctttgttttgcttctgatccatcatggaggtgccgagttcctgggatgcccttcgcaaacaggcaagaaaacttgaagctcagttggatgagcagatgaattcttatcgtaaattggtttctaataatgtttctacaaaagctgacgctgcagagagtgatctagagtcttggattgagcgtttactaaaacaactccaacaagtaaacacacagatgcaagcttgggtatcatctggtggttcagaaatggtttctcatactttgactagaca

SEQ ID NO: 52894 - DNA, 420 bp, Glycine max
  unsure (1)..(420): unsure at all n locations
  Clone ID: LIB3109-022-Q1-K1-G12
gggaaggaaggtaaaggaagcaaacgcaagagcaagagcaagagcgaaagcggcagagaagatggaaggagaagagggttctcagcagccacagttggtgctcgcggacaagctattccttctccggcaacccgatgtgcaagacattgacaaggttcgctacaaagaggatgtcttcactcatgtcaaggaaaacgatatggtccctctgtacgaaaccctagtcgctgattccgtgttggacttggatcgtgcccttttggactctatgcgcgctaaaattgacgacgagctcaccaagctcgacgaaaagattgctgatgccgaggaaaacttangagagagtgaagttcgtgaggctcatttggcaaaatccttgtttttcatcccgattatggacaaggagaaagccttggaaca

SEQ ID NO: 52895 - DNA, 429 bp, Glycine max
  Clone ID: LIB3109-022-Q1-K1-G2
gccaccgaaagggatcacaaaaggggattggtcctttctggtttggctttctttaccgaccccaaacattttttttggggtaaaattactggttctactcaacaatcagcaatcagcgatcagcaatcagcaatcagcatcattacttttccttgtagccatgtcaatttgttttctgtttcaaaaaccaatatgtctttctctttttctagcgtttttcttattttcctgaagtagggaatttgcagttttgttctattttcccagtgatttataatcaaaaagcgagggacagacacacagaaggtgttatcttgaatcataaaacatgatgctaaaaagctcttcaacaccagttgttggatacctcctctcttccttcacagatagccctaacaacaatattcactcagaaacctgtcatgcact

SEQ ID NO: 52896 - DNA, 424 bp, Glycine max
  Clone ID: LIB3109-022-Q1-K1-G3
gaagccattcaataatataatggtgattcttcatgttaaatctttggccttctgattaaccttgcaacttcgagaaatttcaaccacctctctctcccaaaatctcagagtgggctgcttcagtgtctgcaggtatcaaagatggcaacattgactgcttcaagtaacttagtctctagaaattctcatgtccatcatggaccaacaactgcttcatatgagtctaaagcagtagcaatgggacttagatctctaaagcagacaaatactcatagtggacttagaatttttaacccggtggatgagctacttaacagaaccccaattaaaaccaatgcaatgcaagctatgaggaagggacctcaaggcaagaatgcctggcctaaaggtataatcacatgtggcatgactttcataattatag

SEQ ID NO: 52897 - DNA, 410 bp, Glycine max
  Clone ID: LIB3109-022-Q1-K1-G4
ggggtggggcgtcgtagggctttccagttgtgtgctctgccaatgataattggtgcttctatgagtgcagcaacaaacaacttgtttggcatgcttgtaggaaggttgtttgttgggactggcttgggcctgggccctcctgttgcctctctgtatgtgacagaggtttctcctgcttttgtgcggggcacctttggagctttcatccagattgcaacatgccttggtctaatgggagctttatttattggaatccctgtcaaagaaatttctggatggtggcgggtttgtttttgggtatctaccattccagctgctatacttgccgcagctatggtcttctgcgcagagagtccgcattggttatacaagcaaggaagaactgcttgagcagaagctgagtttgagag

SEQ ID NO: 52898 - DNA, 412 bp, Glycine max
  Clone ID: LIB3109-022-Q1-K1-G5
gatccacatctcaaatcaaaagccgaatattctaatttcaccgcttcgaaatccattctttattgccaaaattttgaaaccctaatatcccaatttcgctggtgatctttccaaagcgtcatcaaaccaaacaatttttcgtcatatctgtctccgcaaggagagtcgctttgacgggaagcaaggatttccgctgcaattggaatcgtcggatcaattcgtcatgaagtttctggagtgttctgccttagatcggcttaacgatttcttgggtaatttgaatctgggagaacgtactatcaaaggatgccttgaagcctatagttgcaaacatgctggatcggataaaaaactctctatcagtttggagacagagattcttgattatcttgggaaatcatccgacactgat

SEQ ID NO: 52899 - DNA, 395 bp, Glycine max
  unsure (1)..(395): unsure at all n locations
  Clone ID: LIB3109-022-Q1-K1-G6
agaggggatggacaagaatggtatgttggaaagctcnaaagaaatgctgaagggagaatgaattgaaacaacgatttgagcagagcatgaaagaagctgctgataaatatcaaggggcaaacttgtatgtcaaaaatttagatgatagcctcggtgatgataaacttaaggagctgttctccccttttggtaccataacttcttgcaaggttatgagagacccaaatggcataagtcgtggatcaggatttgttgcattctcaactcctgatgaggcatctagagcactcttggagatgaatggcaaaatggtggtaagcaaacctctgtatgtgactctagcccaacggaaagaagataggagagctagactgcaggctcagtttgctcaaatg

SEQ ID NO: 52900 - DNA, 367 bp, Glycine max
  unsure (1)..(367): unsure at all n locations
  Clone ID: LIB3109-022-Q1-K1-G7
ggtgactgctggaggaagctttagccgtggctaggcaagaactgcactcactcactctcgattcaagttgctcaatgaaacgaaacacagagaacacaatgcttcgaaacgacgacgttcgcatcgtttcctcttccatcaaaatccctcttccttccatttccaaacaccctacctgtcctctgcgaaccgcgcactctcacattgncaacgccacaaactcgattgcgcaactcattaactcgttcacctctcactccgccgagttgactcgctccgtgatacagaaatcgtcgctcctgtgctcggcgacgctgtccttaaccggcgaccggaagagaaaatgtccgattcggcgtctggcgtc

SEQ ID NO: 52901 - DNA, 425 bp, Glycine max
  Clone ID: LIB3109-022-Q1-K1-G8
cttaataaagtgatacaggagcagaataacatgcttgcaaagaagatcaaggagaaagaaaaggttgcagcgcatcaagcacaatgggagcatccaaaccacggagttaatgcatctttcttgctaccgcagccacttttgaacatgggtggcaattaccgtgaggaagcatcagaagtagggaggaatgaacttgacctgactctggaaccattatattcctgtcaccttggatgcttttgaatactttctttgaggtggatgatattatatagctttggtatggcatttgacaacatatttgagggcttatatatgcctctatgttttaggggtttccctactctgcaaacgttaatgtttattgggtgttggaagtttataatttggtcacaaggctaagctttcttaagtggaagctttgc

SEQ ID NO: 52902 - DNA, 283 bp, Glycine max
  Clone ID: LIB3109-022-Q1-K1-G9
ggcatgtgtgtgcatgaaggaaaagcgaacagaaggggatgcatgggactgatgctgtcgactctaccttcctcgtcagaagagcctctgtttcactatctcgcggaggatactgaactggggatgtactatctcaagggatcatgccctcaagctgaatacatactaaactaacacgcgaaggtgctattcctgcgccacttgatcactgagtggtcctgaacaagaaacatgacacacgaccgggccttgctgaataggcttgctctactgccgctctact

SEQ ID NO: 52903 - DNA, 377 bp, Glycine max
  Clone ID: LIB3109-022-Q1-K1-H1
gcaatcgagaagaagaacaagaagcagatggtgaagtatgagatctggagcatgagaatagcgacggcagtgtttgcgtttgctctgatggttccatcggactcagcagacgacgtcgatgtgctctctgaagataacttcgagaaggaagctggtcaggacagaggagctctcgttgagttctaagctccttggtaacacaccaatcttatcgatctatttctctctgtgtatatcagacaattcgctattccatcgttactttgatttcttgaaatcgctattaaggagggcttattattaaccgagtctgatgttatactttatagactatgcctgaacagattgcatgagctctttgcgtgtaacggctcaac

SEQ ID NO: 52904 - DNA, 382 bp, Glycine max
  Clone ID: LIB3109-022-Q1-K1-H10
ggataagaaactgcgagaagaaaggaaaaggttcaatttttacccttttttcttcccagaagcgatctctgaagccgacccattttggaattcggaaaacccagtgctgatcgctctctgggtgttcccaaaatgaagcttcggagatcttcgctgtgcgtctttctagggtttctggtgctgttcctttcgccgccgccatctatggcgaaattcgtggtggagaagaacagcttgacggtgacgtcgccggacgacatcaagggcacgcacgatagcgcgattgggaacttcgggataccccaatacggtggcagcatggccgggaacgtgttgtacccaaaggacaacaaaaagggttgcagggagttcgatgagtatg

SEQ ID NO: 52905 - DNA, 420 bp, Glycine max
  Clone ID: LIB3109-022-Q1-K1-H12
gcagatattgaagtttaaaccagacttggtaatcgcagagaagggtctgagtgatttggcttgccattatctcagcaagcatggagttagtgcaatcaggaggctgaggaaaactgataataatagaattgcaaaggcttgtggtgctgttattgtgaatagaccagatgaattgcaggagtctgatgttggtaccggcgctgggttatttgaggttaagaaaattggagatgagtactttgcatttattgttgattgcaaagaacccaaggcttgtactgttctactaaggggtgctagtaaggatctattaaatgaagttgaaagaaacctacaggatgccatgtctgttgcaaggaacattataaaaaatccaaaacttgttcctggaggtggtgctacagagttgacagtgtcagc

SEQ ID NO: 52906 - DNA, 424 bp, Glycine max
  Clone ID: LIB3109-022-Q1-K1-H2
ggaaggaattggaattagaattgtaaaaaggaaaggggaaggaagcaaggcaaggaaggagagtggatcgattcctcagcagcaccagacatttataaaagctctttcccttccctcaaatcgctcatactcttccaatctttttttttttttttttttacctttctccctcgctcaataatacaaaacaaaaaagaagaagaagaaggttttcgcgatggcatcgaaacggatcttgaaggaactcaaggatctccagaaggatcctcctacctcttgcagcgccggtcctgttgctgaagacatgtttcactggcaagcaacaattatgggtcctccagacagtccttatgctggaggtgttttcctagtcactattcatttccctccagattatcccttcaagccacccaaggttgcattc

SEQ ID NO: 52907 - DNA, 418 bp, Glycine max
  Clone ID: LIB3109-022-Q1-K1-H3
gtctccaagtttgacaagattgggggggagaaatccactgtcccttgtgaaactgctgaggccataaaaaaaattttgactcacaatggaaagggaatcaagttccaaatcctttcaaaccctgaattccttgctgagggaactgcaatccaagatcttttcaacccggatcgagtcctaattggaggcagggagaccccagaaggccaaaaagcaattcaaacattgaaaaatgtgtatgctcattgggttcctgagaagaaaattctaaccacaaacctctggcctgctgagctatccaagcttgctgctaatgcctttttggcacagagaatttcatctgtgaatgctatgtcagcactttgtgaggccactggggcaaatgtcacacaagtttcctatgctgttggcacagaca

SEQ ID NO: 52908 - DNA, 450 bp, Glycine max
  unsure (1)..(450): unsure at all n locations
  Clone ID: LIB3109-022-Q1-K1-H4
ggttctagntgtatttgtgattgttgtgacctcgttctgtcttgcggcgntattcttcttctttgtggtgtttggtgtttgttttnttctctcaaacctgaaaatggtcttgctgcggtggtaacctcgtggttgcggaagccgcctgcnaagtgcggcaaccggctgcggaggctgcaagatgtacccagacttgagctacaccgagtcaaccaccaccgagaccttggtcatgggagtggcaccagttaaggctcaattcgagagtgctgaaatgggtgttcccgctgagaacgatggctgcaaatgtggagctaactgcacctgcaacccctgcacttgcaagtgaggtgttggagagctaaagcttcaagcagaaatggcccttagaaataatgataaaaactatatgtagtttcaaaaacttcaaattatgtagtatgtattatg

SEQ ID NO: 52909 - DNA, 436 bp, Glycine max
  unsure (1)..(436): unsure at all n locations
  Clone ID: LIB3109-022-Q1-K1-H5
ggactgacgatgaactgaagaaactatatgaaacccatgaaaggctgctagaccttgtttcattgttttgttatgttccaagaacaaagtatctacctttgggcccaataagtgccaaactcattgacatctatcgtacacgccacaatattagtgcatctactggtttgagtgatccagctgttgccactggtatatctgaccttgtctatgaatcccaaccaccagctgctgagcctgatacacttgatgatgacctagtaaatgcttgggcagcaaaccttggtgatgatggcttatgggggaacaacgcaccagcaatgaatagggtaaatgaatttctggcaggtgctggaacagatgccccagaagttgatgaagagaatatgatctctangccttcagttagctatgatgatatgtgggcaaaaacact

SEQ ID NO: 52910 - DNA, 400 bp, Glycine max
  unsure (1)..(400): unsure at all n locations
  Clone ID: LIB3109-022-Q1-K1-H6
gcagatattgaagtttaaaccagacttggtgatcgcgagataacgggctaacaagttccgcatgtcnctgggtcttccagtggcggcgacggtgaactgcgccgacaacacgggggcgaagaacctctacatcatttcggtgaaagggatcaaaggccgtttgaaccgtcttccctcggcctgcgttggcgacatggtgatggccaccgtgaagaagggaaaacccgatctgaggaagaaggtcttgccagctgtcatcgttcgccagcgcaagccatggcgccgaaaggacggcgtctacatgtacttcgaagataatgctggtgttattgtcaatcccaagggagaaatgaaaggttctgctatcactggtcccattggaaaagagtgtgctgatttg

SEQ ID NO: 52911 - DNA, 411 bp, Glycine max
  Clone ID: LIB3109-022-Q1-K1-H7
ggatgcaaagaaatgggcgcaggttattgcttttcgctttgccatccaaggccacataaacccaatgctccaactcgcacagatccttcactcaaagggtttttccatcaccatcatccacacaacttttaactcgcccaacccttcaaactaccctcactttagcttctcttgcatccaagacaacttgtccgaaaccgagacctcggcctcggatctcttgaatttcatcgttgcactcaacgttaagtgtctggtgcctttcaaagattgcgtggaaaagctactaagtgatgtgtccgaggaagctgttgtttcgtgcttcatctcagatgctttgtgttacttcactcaagcgggtgccgacaaccttcagctgcccaggattgtgttgagaactggtggagtttc

SEQ ID NO: 52912 - DNA, 420 bp, Glycine max
  Clone ID: LIB3109-022-Q1-K1-H8
gagagaagagaggagaaagcaatgggcattgatagtgaatacgtgatatctcacaaggcctatgcgagggtgggattgcttgggaacccgagcgatgtctactacggcaaaacgatagcgttaagcgtcgccaacttgttcgccaccgtcacgctgcgttcctgcgaccagttaatcctccaaccccaccccctacacgatctccttcatttctgatcgctccctcaattggtcaacaggttgagctcccaaggttactatggaggcgtgcgattgcttatggctatttgcaatgtcttctacgcgtattgcagaaagaacgccatcgatcttggcgacgacaatatcactctatgctacgacaccaatatccctcgccaggctggtctttccggatctagcgggatcgtgtgtgctgcg

SEQ ID NO: 52913 - DNA, 417 bp, Glycine max
  Clone ID: LIB3109-022-Q1-K1-H9
gggggattttgagttacaacatttgccagttggagctagtgacgctgatcttgaagagcgtataatccaacacttagcggctgcagcagcgatgggaagagcacgccacattgctagaagagaaggccagagaaacaggtcatcagctcaaggtcgcccacattttttggttttttcaactaatcctaattcacctcccatggctcctgcttcttcctctccatctcagaggggggatgatgaaccaattcctacaattgctgttgccaatctgtctccaactcctgcaactggagaagaatcatcacagctgactttagttccgcctattcaagcagaacaggtgtctgcttcaggatctggatctactgctcttgctacagatcatcagggatcatcttacaacaataggagatc

SEQ ID NO: 52914 - DNA, 287 bp, Glycine max
  Clone ID: LIB3109-027-Q1-K1-A10
gagtgggagaaggaagaagattgacagagagagagaggaaggagcgcgaaaagactaaattgaccttggatcttcgtctttcctctctctccgattcgtttttcgttggtcttctaaaagcttcttccaccatgaacagcaaggccaacgtttccaaagagctcaacgccaagcacaagaagatactggaaggacttcttaaattaccagagaatagggaatgtgctgactgcaaagctaaaggtccaagatgggctagtgtaaatcttggcatctttatatgcatg

SEQ ID NO: 52915 - DNA, 362 bp, Glycine max
  Clone ID: LIB3109-027-Q1-K1-A11
ggtgaccgtgttgattaacttcacacttcactctctagtcatggcttcttctcttcctcttctcaaccttcttaccctcgctctgtcactactcttctgcattgccttaacttccgaggttggcgtgcaggcgcagatggaggagacaggcttgaacctcatgtcggaggcgttggagtggccaaccgcaatgtcgctctacgacgaagacagcgaagaagaggatgtccagaacggttacagtcggagatcgttgttctggcggaggatgaagtactacatctcctacggcgctctttccgcgaaccgaatcccgtgcccacctcgttctggtagatcttactacacccacaactgctaca

SEQ ID NO: 52916 - DNA, 351 bp, Glycine max
  Clone ID: LIB3109-027-Q1-K1-A12
gagagagagagagagaaagagagagagagagaggttaggctatggctgatgagagcgtcgttgagtccccagtgaagaggcagagagatgatgatgaagaaaatgaggtctctgtttccatggatgtggagggtggcaaagaccctcttggtaacggtttatcatctgtgattcctgggtggttctctgaaattagttcaatgtggcctggagaggctcactccttgaaggtggaaaagattttgtttcaaggaaagtctgaataccagaatgtcatggtcttccagtcatcaacatatggcaaggttcttggtttagatggagtaattcagcttacagaaagggatgaat

SEQ ID NO: 52917 - DNA, 268 bp, Glycine max
  unsure (1)..(268): unsure at all n locations
  Clone ID: LIB3109-027-Q1-K1-A2
gggatgagtccagctttcaatctttatgggtgtgcattaattgtgcttgctgaatggaagcccccagtatatgataatacacgtggtatagttcttgtaactgctacaacacgccgtaattcaccaaataatttggattcgaagattcatcacaataaccttctcaataacatacttgcaaagattgaaggcaataatgcanaagcagatgatgcaatcatgctcgaccaagatggttatttatcagaaaccaatgcaactaacattt

SEQ ID NO: 52918 - DNA, 458 bp, Glycine max
  Clone ID: LIB3109-027-Q1-K1-A4
gcactatatccagtttcaaaagagcagctgtacagagagatcgtagatgacttgcgtgggggcgatccatgcattggttcaggatctcaggtggcatgccaagagacatattgaactttgggtgctattttttaaagtccaactttctttcttcatgtttttttatttttttttattgttttatatctattttatgttattttatattattttttttaaaaatttttattgttttttattttattattattaatactttattatttcttttcataattttttttatttttttttttacattcttttattattttttttttgttattttcattatttttctttattttttttttctgtattataattatacttcttttttttctataattctatttattttttttttttatatttttattttttaataattgtttttatactttattttgttttttttt

SEQ ID NO: 52919 - DNA, 304 bp, Glycine max
  Clone ID: LIB3109-027-Q1-K1-A5
gaatgttgaatccaacaggcgtgctcttagggagctgcttttcaccgctcccggtgctcttaaatatctcagtggtgtcatcctctttgaggaaactctctaccagagcacagctgcaggcaagccctttgtggaagtcttgaaggaggctggtgtgcttcctggcatcaaggttgacaagggcacagttgagcttgctggcactaatggagaaaccaccactcagggtctagatggccttggtcagcgttgcgccaagtactatgaagccggtgcacgttttgccaagtggcgtgctgtgctg

SEQ ID NO: 52920 - DNA, 314 bp, Glycine max
  Clone ID: LIB3109-027-Q1-K1-A6
gaaaataatagaagaaaaatttttgaataataattaaaaaattccttcatatttttagagataggagacaaaatttacatggatatagtaagtcttgcttgggctgctttaatggtagttttttcattttctctttccctcgtagtatggggaagaagtggactatagggatactcaaaattgagttaagggatcaaagtacccattttgttttctacttgggtttttcaatttcttaactttaactattgaattaaagtatttcatttatactaattaattgagttcaaatattaacaaatataaaatagatc

SEQ ID NO: 52921 - DNA, 352 bp, Glycine max
  Clone ID: LIB3109-027-Q1-K1-A7
tgggggatgagtccagctttcaatctttatgggtgtgcattaattgtgcttgctgaatggaagcccccagtatatgataatacacgtggtatagttcttgtaactgctacaacacgccgtaattcaccaaataatttggattcgaagattcatcacaataaccttctcaataacatacttgcaaagattgaaggcaataatgcaaaagcagatgatgcaatcatgctcgaccaagatggttatttatcagaaaccaatgcaactaacatttttgttgttaaaaagggccgtgttttgacccctcatgctgattacttgtcttctggcattactcgtgcaactgtaatggatt

SEQ ID NO: 52922 - DNA, 330 bp, Glycine max
  unsure (1)..(330): unsure at all n locations
  Clone ID: LIB3109-027-Q1-K1-A8
ttgtgggttgagtccagctttcaatctttatgggtgtgcattaattgtgcttgctgaatggaagcccccagtatatgataatacacgtggtatagttcttgtaactgctacaacacgccgtaattcaccaaataatttggattcgaagattcatcacaataaccttctcaataacatacttgcaaagattgaaggcaataatgcaaaagcagatgatgcaatcatgctcgaccaagatggttatttatcagaaaccaatgcaactaacatntttgtttgtaaaaagggccgtgttttgacccctcatgctgaatactgtctttcctggca

SEQ ID NO: 52923 - DNA, 245 bp, Glycine max
  Clone ID: LIB3109-027-Q1-K1-A9
actttaggggggggttgaaagacacagtataaatgaataaaccaacaagcgacgcaattaatatggggaaaaggagcctggagggtggagaagatgatcagtccgaacgaaagaggcctgctcttgccagtgtaattgtggaagctttcaaggtggacagtttgcagaagctttgctcatctttagaacccattcttcgtagagttgtcagtgaagaagaggagcgtgctttggcaaagttaggt

SEQ ID NO: 52924 - DNA, 173 bp, Glycine max
  Clone ID: LIB3109-027-Q1-K1-B1
cagggggtttatggagaggtggcggattcgttactttatgcgatcagtggaaggagagagagtctatgaataaaccaccacgcgacgcatttaatcatggtgaaaaggagcctgcatggaggagaatatgatcagacctaacgaaagaggcgctgcatcttgccatgtgtaat

SEQ ID NO: 52925 - DNA, 345 bp, Glycine max
  Clone ID: LIB3109-027-Q1-K1-B10
gatgctgccgagcgggtttctcattgtggggttctggagttcattgctgaggaaggcatgatatacatgccatactggatgatggagaacatacttttacaagagggggacattgtcaaagtgaaaaatgtgacacttccaaaggggacatatgttaagttacagccccacacaaaagactttttggatatttccaatccaaaagctatcttagaaacaacattgaggaatttttcctgcttgactactggagatagcattatggtggcttacaacaacaagaaatattacatagatattatagaaactaagcctgacactgccataagcataattgagactgac

SEQ ID NO: 52926 - DNA, 344 bp, Glycine max
  unsure (1)..(344): unsure at all n locations
  Clone ID: LIB3109-027-Q1-K1-B11
ggaaacacagtgtcagaatctgagttctttgaactcaaaccctaaaaaaaacgatgtatcgttttttgtcttccattcgccatggctgtggatcttccctcacatcacttctcgcgccgaaacccacccttccattcgacgccgccctacgatctcgccgtttacctcaaaacgacggacatgttagaggattttcaagctcgaattttgattggaggaatcttattgtgaacgagaatgtgaatgcagatgattctatgcaggatgcagagaacagaaactccgaaaagtggaataatatgaggctgaatatgaatgcagatgcaaaagctcctncaaatttt

SEQ ID NO: 52927 - DNA, 361 bp, Glycine max
  Clone ID: LIB3109-027-Q1-K1-B12
ggctggaatcttggccttcacaaagcttactccttatactgctgtcagtgctatccttcctctgtctatcatcattggggcaactatggtgaaagagggtatcgaagattggcgcaggaaaaagcgggatactgaggtgaacaatagaagagttatattgcttaaaggtgatggcaatttcgaatatactgaatggaagaatctgagagtagggaatatagtgaagataatgaaggatgaattcttccctgctgacctcctactgctttcctccagttatgaggatgcagtctgctatgttgagaccatgaacttggatggtgagacaaatttgaagttaaaacaagggctggatgtaact

SEQ ID NO: 52928 - DNA, 294 bp, Glycine max
  unsure (1)..(294): unsure at all n locations
  Clone ID: LIB3109-027-Q1-K1-B2
ccggaccggaagttcccgggtacggacccaacgcgtctcgtacctggcgagaagactgacagtaagggggtgttgtatttttactactannaggaactttgggaactgtnggatgcggtctactaggagctaaaactccatagctgtaggctagaactgcaaggaaatatgattaatggaaggttgatgccttngatggcaattggaactcaaatcgacttcctcagaaagttcctcaacttctgatgtgctcgctaagatgaaaagacactcgacttccgagtgaaggagctt

SEQ ID NO: 52929 - DNA, 326 bp, Glycine max
  Clone ID: LIB3109-027-Q1-K1-B3
gccggggcaggcgcacgcacgggtgcagagagacgaccacgatggggtgtggttttacatctggcgaacgaggagaagagaagggataccgttaacgtaggccacaacttgcttggcttgtaggatattgatgttctaaatcaggttgtgttgaggacccaggcctgaaaacctaaacaattgaattgttgtgccatctcacggatgttgattctgaaggaatgtcaccaacacattccgatacgcaattgagaattgaagaacgagctctttccgcatccggtgccgcctttgtgtctgctatcatcgttaatcccctcgatgtc

SEQ ID NO: 52930 - DNA, 300 bp, Glycine max
  unsure (1)..(300): unsure at all n locations
  Clone ID: LIB3109-027-Q1-K1-B4
gacatgagaaatttccattatagcttttccttcataatttctgcttaggattagaattgtagttgctaccatacactgtgtaatagttttgcttggtgaagttcataaggggaccgtgcgtttaatggcgttacctgataattgcagggagcgtgtaacatgaatgcgttacgtaataattgaaggggcgtctaacatggatcggtccaaaatggtaacatcacatgggtctgagaatcagttntgntttattaggtataantatatgatatttgtgtgaaatatcttttagcttttttt

SEQ ID NO: 52931 - DNA, 385 bp, Glycine max
  Clone ID: LIB3109-027-Q1-K1-B6
gtagacaagttgtgtagaattggagtgaaaactatattttgcttacaacaagatccagaccttgaatatttcggagttgatattaatgccatacgagaatatgccaagacatgcaatgacattcaacacttgcgtgcggagataagggactttgatgcatttgatctacggaggcggcttccagttgtagttagcaaattatacaaggcaataaattccaatggaggtgtaacatatatacattgcactgctggacttggaagagctccagctgttgcgttggcttatatgttttgggttttgggttataaacttaacgaggctcatacactacttcagagcaaaaggtcatgctttccaaaactggatgccattaaagtgcaac

SEQ ID NO: 52932 - DNA, 268 bp, Glycine max
  Clone ID: LIB3109-027-Q1-K1-B7
gaggcgcggcgggatcagcacaagattgcaaaatggagttcaacattgcaaatcccaccactgagtgccagaagaagctggaaatcgatgacgacctgaagcttcgagcattttgggacaagacgatctcccaggaggttcttggtgatgctctgggtgaggagtttaaaggatatggtttcaaaatcaccggtgggtgtgaccaacaaggattccctatgaagcagggagagctgacccctggtcgagttcgacttttgctacatag

SEQ ID NO: 52933 - DNA, 216 bp, Glycine max
  Clone ID: LIB3109-027-Q1-K1-B8
gatgtggattaagataaggagaaggaggagaagagaaagaagaccattaaggaggtatctcatgagtggtcattgctgaacatgcataagcctatttggatgaggaaacctgaacagatcacaaaacatgaatatgctgcttgctacatcagtcgaaccaaggtacgggttgagcattgggacgtaaagattctgttactcaattgacaattgaag

SEQ ID NO: 52934 - DNA, 287 bp, Glycine max
  Clone ID: LIB3109-027-Q1-K1-B9
gacagcaaaatagaatagaataaaaagggagaaattaaaaaaaaaacttgtttggcttgtaggatattgatgttctaaatcaggttgtgttgaggacccaggcctgaaaacctaaacaattgaattgttgtgccatctcacggatgttgattctgaaggaatgtcaccaacacattccgatacgcaattgagaattgaagaacgagctctttccgcatccggtgccgcctttgtgtctgctatcatcgttaatcccctcgatgtcgccaagacaagacttcaagcac

SEQ ID NO: 52935 - DNA, 231 bp, Glycine max
  Clone ID: LIB3109-027-Q1-K1-C1
acgtgtgagtttagtttcgagagggccaccaaaatagcagagaatggttacgtagaaattaaggaaaaaacttatttcacttgaacgatattgatgttctaaatcaagttgtgttgaggacccaagcctgaaaacctaaacaattgaatagttgtgccatctcacggatgttgattctgaaggaatgtcactaacacattccgatgcgcaattgataattgaagaacgagc

SEQ ID NO: 52936 - DNA, 293 bp, Glycine max; identical to SEQ ID NO: 7806
  Clone ID: LIB3109-027-Q1-K1-C10

SEQ ID NO: 52937 - DNA, 361 bp, Glycine max
  Clone ID: LIB3109-027-Q1-K1-C11
gtacgaatgatacaaatgatagtgattccactataggagaaagttctaataatctcgatgaaagtcaaaaatataagcatttgtggcttgaatgcgaaaattgttatggattaaattataaaaaattttttaaatcaaaaatgaatatttgtgaatactgtggatatcatttgaaaatgggcagttcagatagaatcgaacttttgattgattcgggtacttggaatcctatggatgaagacatggtttctctggatcctattgaatttcattccgaagaggaaccttataaagatcgtattgattcttatcaaagaaaaacgggattaactgaggctgttcaaacaggtactggtcaact

SEQ ID NO: 52938 - DNA, 391 bp, Glycine max
  unsure (1)..(391): unsure at all n locations
  Clone ID: LIB3109-027-Q1-K1-C12
ctaattaaaaaaaaaacaaaaataatttatattttcttaaagaacaaaatgtttgttatgcttaatatctttaatttggtctgtatttgtattcactccgtcctttattcaagtagttttttctcggcgaaattgcccgaagcctacgctttcttgaatccaattgtggatattatgccagtaatacccttactcttttttcttttagcttttgtttggcaagctgctgtaagttttcgatgatatctgtaatttgagtaatgtcttaaaaaaaaattaagaatttatcagaaaactaaaattcgaacattttaaacaattaaaagatcanataagtcttacagtgtgaattatcgatnccaatattgaaatttttggattatacgaaaaa

SEQ ID NO: 52939 - DNA, 421 bp, Glycine max
  unsure (1)..(421): unsure at all n locations
  Clone ID: LIB3109-027-Q1-K1-C2
ggaagaaaagaaaagaaaagaagcagagtggtaaacaaagagaaacaacaaaacccagaatctagagactaataacggctcttgctttgtgaatagcataccatagcaacaacaacaacacagaacacacaaagaaaaaagtacttcccccaaaatcatatattatatattatatgtacatatagatatacatagttttgtgtatattgagattgttgttctctctttcttctatttattcatgtgaaagagagagagagagagagatcttgtgattcttgtcctcctacaatggtcactntgtagcgggactaggtaatctatgcaacaaaattcacttggactcttctcatcgaccgatatttcaactatttttttcctgtcccgttaacgtttcgaataagagcttctttttcccctt

SEQ ID NO: 52940 - DNA, 325 bp, Glycine max
  Clone ID: LIB3109-027-Q1-K1-C3
gaaggaaggaaggaagagtgagcgtgaaagatgccttgggcgaggctttcagggtctccaaggctcgacgttgctattgacatgggcaatccatttctcaatctcactgttgatggtttccttaagatcggagctgtcgcagccacgcgatcagctgctgaagatacttatcatattatccaaaagggtaagcaagcatttcacaaattctccaccccatttatttttcatgctattttccttttttctcggagcctaaagaggtaaaatttgattcttataacggtttttatttttactttccttgtttaaattcgggttatac

SEQ ID NO: 52941 - DNA, 281 bp, Glycine max
  Clone ID: LIB3109-027-Q1-K1-C4
ggcacaagtttgttgagatagctagaagcaataagatgaaaatgaaagtgcttgttttgtttgttgctacagttttggtagcatatgaatgccatggctcagactaccagaagttccctctccaaatgaaaactgggtttggtgggcaatacagcaatgaggtggcatgtgccagttggaggcttggcgtggaagcaaacaacgtagtcaagtggcaaactgttcctgcagcttgcggagagtacatagctgactacgttctaggagaccaatatagatca

SEQ ID NO: 52942 - DNA, 238 bp, Glycine max
  Clone ID: LIB3109-027-Q1-K1-C5
gaccacaaaactactaacagagaaaactttcaatttctggttttctgaatttcggatggttgactctaattttaggagctggaaaaggtactaaatctaaagttggacgaaatgtggatccaaggattcagtttttggatcaaaggtttctctttgctggccttaatatctgtaatttccgctctggaacccgaactgggatcgacccgcgtcgtctttcagacaaagtatggagata

SEQ ID NO: 52943 - DNA, 266 bp, Glycine max
  Clone ID: LIB3109-027-Q1-K1-C6
ggaagaagaaggttggttgattggtcccatggaggccgaagagaaaagaaaagatgtttgagccacaacagctatacactcgcgcgaagaccgaggaattcgacctcgaatcaggagaaaccctctacccagggctgagcgtcggcgagaaccagctccgatggggtttcatccgcaaggtctacggcatcctctccgcgcagatcgtcctcaccaccctcgtctccgtcaccaccgttttctatactccaatcaatgacctcctc

SEQ ID NO: 52944 - DNA, 297 bp, Glycine max
  Clone ID: LIB3109-027-Q1-K1-C8
gtggttgtgaagtgataacgggtatttctgggtgttctgaagtaattttctttgaatgtgtatcaatggatttgcaagatgactgatgtgcaacaagtatattagaaatttgctttactagctctttcattcttgcagctgattcagtggtttatgatcactcttatattagtgattaggacttctaccatatgttacataataagtgtgaaagttgctctgtgcattatatatcatttggtatgcactgcatgaattagatactgaaacgtatatcgaggtatctgcatattacac

SEQ ID NO: 52945 - DNA, 338 bp, Glycine max
  Clone ID: LIB3109-027-Q1-K1-C9
ggagtgagcaggagtgaagagcgaagagaatggctcccacgggtttaatcttttgggctgggttatgcttctcagcactgccactgagtcgttgtcttgcggaggataatggacttgttatgaacttctacaaggaatcatgccctcaggctgaagacatcatcaaaggacaagtcaagcttctctacaagcgccacaagaacactgctttctcctggctcagaaacatattccatgactgtgctgatcagagttgtgatgcttcactgttgctggactccacaagaaggagcttgtctgagaaggaaacagatagaacgcttgggttgagaaatttc

SEQ ID NO: 52946 - DNA, 103 bp, Glycine max
  Clone ID: LIB3109-027-Q1-K1-D1
tgtggatctaacaatattcaagaacgaatagggcggcgctcaatattaaaatagatttggctgacttatgctcttcatcactaccactgaatcaacttcttgc

SEQ ID NO: 52947 - DNA, 265 bp, Glycine max
  Clone ID: LIB3109-027-Q1-K1-D10
gacggctaaaagctaaaaatgatcggagtactcaaattagcatggctgtcacggttgcattcttgaatttgatcatcatgttttcagtagtctctacaagcaagtcactgagcttaaactactattcaaaaacatgccctgatgtggaatgcattgttgccaaggcagtgaaggatgccactgctagggacaaaactgttccagctgcacttctgcgaatgcacttccatgactgtttcgttcgggggtgtgatgcctctgtgct

SEQ ID NO: 52948 - DNA, 386 bp, Glycine max
  Clone ID: LIB3109-027-Q1-K1-D11
ggcaaccaaaatgactcaagcccagattcaaccagttaaacttggaacccaaggctttgaggtttcaaaattgggattcggatgtatgggccttactggagcgtacaatgaccctctccaagaacaggatggcatatctgttatcaagtatgcgttcagtaagggaatcacattttttgatactgcggatgtttatggagccaatgctaatgaacttttggttggaaaggctttgaagcagctgcccagagaaaagattcagatagccacaaaatttggtattgcttcacgaggttttcctgatatgaagatcaagggttcgcctgaatatgtgcgatcatgctgtgaagctagcttgaagcgtcttgatgttgaatacattgatc

SEQ ID NO: 52949 - DNA, 344 bp, Glycine max
  Clone ID: LIB3109-027-Q1-K1-D12
gaacaaactaaagagtgaaagatcacgctgaaggatccctgctaattaaattaaagcaacttaattagcagtatagcatgtccaacaatggcagcaacaacccttatgttcaaatttcccctcttcacaccaaccgtccaaagccaatggatacggtgtgtgatgcattaaaccgctgcagcaggaaggttggaaaagcaactagaagagctgagaccatggctgacaatttctggaatcatatcagaattggttctagtcttgctgatgcagcagtggctagaatcgttcaaggaacaaaagtgcttacactaggaggacctgatatattatttcaacaatca

SEQ ID NO: 52950 - DNA, 318 bp, Glycine max
  Clone ID: LIB3109-027-Q1-K1-D2
gagctaagagggtggtgagtttcacattcacatagatacatacatcttattttttcattgggaaggaaaactctgagttaagttgcagagacacacgttaaccctgtgtgaagcctctgtgtctccacctgcattattcaacacacagtaacagcactggtagtagtagtagtagtgtttgtttgagagagagagagagagagacaacaagcaacactgttgatgcacagaaggatgaagatagactacacaatctcaagggaggactgatctgaatctgaatctgattcccaccatttactttgtacaggctataga

SEQ ID NO: 52951 - DNA, 281 bp, Glycine max
  Clone ID: LIB3109-027-Q1-K1-D3
ggcacacgtgagtttgttgatcgagagaactagaaacagtgtgatgaaaatgaaggtccttgttttcttcgttgctacaattttggtagcatggcaatgccatgcgtacgatatgttccctctccgaatgaacactggctatggtgcccgtactccggaggtgaaatgcgcaagttggaggcttgctgtggaagcacacaacatctttggctttgagaccattcctgaagagtgcgttgaagcaacaaaggaatacatgcatggcgaacaatatagatcag

SEQ ID NO: 52952 - DNA, 316 bp, Glycine max
  Clone ID: LIB3109-027-Q1-K1-D4
gggagaggtgaattcgcagacgaacattccgctgccatcgcatctgtaacaatggaagcgcgccatgcaactcttggtcgacgaacgttggaggaaattcggcaaaagagggccgcggagagattgagtaaaacctcttcgggaccagatctcacgcaggttcccagcacctccgagattgcgggaatgagcaagtccgagagcgcaaataagctctctgagacagatcttagtgctctattgtctcaattgaaaggactgcaaaaagaagaacacggaagtggagggaagaaaacacaaaaattaggttaaaagc

SEQ ID NO: 52953 - DNA, 268 bp, Glycine max
  unsure (1)..(268): unsure at all n locations
  Clone ID: LIB3109-027-Q1-K1-D5
ggtgcgagggaggaagaggaaaaagaggattggagggtcgccacgtttagcaacaaccaaaccctctctactctttcttcttctcttcgctaggagcttagcttcttcctcttcacttcgttcttctggcctctacaatgagcaacgacaaggacaccatcaacgtcgctgatctcactctcgctctcaacgaggacaatagagcagaccttgtcaatgctctcaagaacaagatacagactntggctggacagcattctgatattct

SEQ ID NO: 52954 - DNA, 277 bp, Glycine max
  Clone ID: LIB3109-027-Q1-K1-D6
gctctctcaattgaagtggctgttgttgacgtctgtaaatccaggattgcagcatggaacagtgaccagctccctatctatgagccaggccttgatgatgtggtgaagcaatgtcgtggcaagaaccttttcttcagcactgatgttgagaaacatgtctatgaggccgacatagtgttcgtctccgtcaacaccccgacaaaaactcgtggtcttggagccggaaaggctgcagatttgacttactgggagagtgcagcacgcatgattgctgatg

SEQ ID NO: 52955 - DNA, 305 bp, Glycine max
  Clone ID: LIB3109-027-Q1-K1-D7
gggtcttagaatatgtcagtatggttaggtctatgcaatataggaaattagattttgaggagttttgttctgctgctataagtgtgcaccaacttgagggaatggagacctgggagcaacatgcaaggcgtgcctatgagctttttgaaaaggaaggaaatagaccaattatgattgaggagcttgcctcggaacttgggcttagtccatcagtacctgttcatgtaggacttcaagactggataagacactcagacgggaagcttagtttcttggggtttgttaggcttctgcatggggtttct

SEQ ID NO: 52956 - DNA, 241 bp, Glycine max
  Clone ID: LIB3109-027-Q1-K1-D8
gcaccgtggataacaactgtgggagcgggaactgtcgaccgcgatttccctgcttacataaccctcggaacagggaaaacatacaccggagcttctctttatagcggtaaacccttgtcggattcgccgcctcctcttgtttacgctgggaacgcgagtaactcttctgtagggtatctatgtttgcaagattctctgattcctgagaaagtttcagggaaaattgctatatgtgagagag

SEQ ID NO: 52957 - DNA, 305 bp, Glycine max
  Clone ID: LIB3109-027-Q1-K1-D9
atcgctttcgtgttttgctagatgagagcaactcattgggtgtgcttggaagttctggacgaggtctcactgaatactgtggagttccagctgagaagatagacattataactgcttctatgggacatgcattagccacagaaggaggattctgcactggaaggacaagagttatagatcaccaacgattgagcagctctggctatgtctttactgcttctttggcaccatatcttgcccgtgctgcaattacagctattgatgtcctcggaggaaatcaccatctgataaatatgctgagaaaa

SEQ ID NO: 52958 - DNA, 365 bp, Glycine max
  unsure (1)..(365): unsure at all n locations
  Clone ID: LIB3109-027-Q1-K1-E10
aggacccataatgaaaatctcatagtgattctatctcgctcaaacaggattatctctatcctccgatagatgacacatgtgatttatataaaaaaagactcaaatgtaattttgattttcttattttgtttaatccgtaatcttggtcttttcattttaaaataaacatttaatcttttaaaaaattcacaattttagttcttatattttaaaataaagacatttgattcttttattttagaaaattcacaattttgattctcatattttaaaaaattaatgatttcgatgcaatcttcaattntatttaccgtntattntatttatttcttaccatatagntaataaaatcattttttgatgat

SEQ ID NO: 52959 - DNA, 354 bp, Glycine max
  unsure (1)..(354): unsure at all n locations
  Clone ID: LIB3109-027-Q1-K1-E11
gaccacactcttattgttttcttcatatcttccttgtcgctgcccgtgtgtcgccgccatggccaccgtcaccacccaagcctccgccgcaattttccggccatgtacctcgaaatcgaggtttttgaccggctcttccggtaaacttaaccgggaagtgactatgcggccaatggggtgccctccttctgcctctttcaaggttgaagccaagaagggagagtggttacctggcttggcctccccaacttacctcaatggcactcttcctggtgacaatggatttgaccctctggggctagctgaggacccagagaactngaggtggtacgttcaagccgagcttgtgaatgg

SEQ ID NO: 52960 - DNA, 345 bp, Glycine max
  Clone ID: LIB3109-027-Q1-K1-E12
ggcagccaaagaaaagaaaatcctcaattttctgagcagccaaacactctctctctgtctctcgaaaattctcagtttgcagagaaaatctgaatcatgtcgtggcaagcgtatgtcgacgatcaccttctgtgtgacatcgaaggtaaccacctcactcacgctgctatcatcggccaagacggcagcgtttgggctcagagtaccgacttccctcagttcaaacctgaggagataactgccatcatgaatgactttaatgagcctggatcacttgctccaactggattgtatctcggtggcaccaaatatatggtcatccagggtgaacccggtgctgtcatt

SEQ ID NO: 52961 - DNA, 406 bp, Glycine max
  Clone ID: LIB3109-027-Q1-K1-E2
ggcttagattgaagagaatggctcccaagggttggaccgttctggctgtgttaatatgcgtttcaacactgtcactgagtccttctgttgcgggggaagggcaaaataatggccttgttatgaacttctacaaggaatcatgccctcaggctgaagacatcatcacagaacaagtcaagcttctctacaagcgccacaagaacactgctttctcctggctcaggaacatcttccatgactgtgctgttcagagttgtgatgcttcactgttgctggactccacaagaaggagcttgtctgagaaggaaacagatagaagctttgggttgagaaatttcaggtacattgagaccatcaaagaagctttggaagagaatgccctggaggtgtttcatgtgctgaaatt

SEQ ID NO: 52962 - DNA, 286 bp, Glycine max
  unsure (1)..(286): unsure at all n locations
  Clone ID: LIB3109-027-Q1-K1-E3
gacatacatagaaataaagctgtcttgcttttgggctggctctgttttctcgtctgtctttctttccattttcatctctctgctgcatcagcttgttgtgccacctcaatccccagaaacaacactgcatacccatttcatgctnttctatattcgtcacttcttctctctcttcttttgtccacgctcatgaatatggtcgctgctggtctaaggtgatttctttacgtcatactttgatattatttattatcttggacttgggctttcatcacttttttttttt

SEQ ID NO: 52963 - DNA, 282 bp, Glycine max
  Clone ID: LIB3109-027-Q1-K1-E4
ggatcacattcgaaatcatgtgcaaataaaaaatggtgtttcacctgcgaatttgaaagattgatattgaagtcaaaggacacaaaatctgcggtgtctcctatgggcataatctcccatctacagaatattgggagtcagcttgctaatggaagagaagaagatgcacatgaatttcttaggcatgttattgacacaatgcaatctgtttgccttatggaagctggggttaatgcattgggctcattagaagaggacactactttaatgggtcaaacattt

SEQ ID NO: 52964 - DNA, 345 bp, Glycine max
  Clone ID: LIB3109-027-Q1-K1-E5
gaaagaacaagttcaagaaacagtaagagccaaggagaaaagaaaaaaaaaaagaactggactccttcaattagtgcattgtttcttttcttcaaattattattatttgtttcatgttatgagaatattatctatgtataaatagatggtagcaagaagacattgttaatttgagagatggcgagttacgaggctattaagaactttgatgatgatgatgatgatgatgatgatgtggagatggcactaccccataaccagatctttgaatcaagatctgccactgtttcttcccccattggccaaactaccccgcttcacattcacaacattattgaggaacaa

SEQ ID NO: 52965 - DNA, 346 bp, Glycine max
  unsure (1)..(346): unsure at all n locations
  Clone ID: LIB3109-027-Q1-K1-E6
ggaaacagagcacaatacaagggaatcaatcctgcgatttcgaagcagaagaaggacaagaacaaaaaacatgtagcatgccataaaagcaggagctcttgttccttgtcatctagaaagaaatactgtagatctgggttagcaatggctcctggaagcagtgttttcaaagaagttcttgaatctcacctgatgtcttcagattatgaaatgggaaaagctaaatctgaggccaagagtaacagtacatctacaaaatctagcattgggttgagtggaaagagtggaattagttaaacaatggcgtgtatgaattactnggatgccccgtttgcaagaatttgat

SEQ ID NO: 52966 - DNA, 367 bp, Glycine max
  Clone ID: LIB3109-027-Q1-K1-E9
ggagggttggttcatttgatctgcgagtggagaagagaatcgtgatgggaggaggacacggtcacggcaccacctacaaaggagttaccgttcatcacccaaagcgctggcacactatcaccggcaagggtttgtgcgcggtcatgtggttttgggtattctacagggcaaagcaagacggtcctgttgtattgggctggaggcatccttgggagggtcatcacgatgatcatggcaagggccattaagcattccttaggcatgagctccaagaacaggaagaacaaaatttgaagtgtctgttgctgtgggtgtgctgttagttgaaatgtttactttgatcaattcaataaatttggctgtaaaa

SEQ ID NO: 52967 - DNA, 405 bp, Glycine max
  Clone ID: LIB3109-027-Q1-K1-F10
ggctgagaaaattggcatgaaatttgaaacactagtggtgagcgcgcttcatctttttacattccctccattttcatttcacgatttcctccctatcacaatcataatgactaaaagcctcctctcttcttcttctgcttaggattttactctcttcgcaaattcattttctacattcccctctctctcgaatctcaacaatgccttccgaaaccctagaaaaccagaaacctcaagtggaagaccaacaagacctagctgaagacagccacacagagcaggaagataattcggagatgaaggggagatgatggcaaagcgaagaagagaaagagaaaagaggaggaggtagaaggcgatgaaaaaaatgaggagaaggaggaacgtgacgagcttgaatcaaaa

SEQ ID NO: 52968 - DNA, 432 bp, Glycine max
  Clone ID: LIB3109-027-Q1-K1-F11
gcggcaacggctgcggaggctgcaagatgtacccagacttgagctacactgagtcaaccaccaccgagaccttggtcatgggagtggcacctgttaaggctcaatttgagggtgctgaaatgggtgtgcccgctgagaacgatggctgcaaatgtggaccaaactgctcctgcaacccctgcacttgcaagtgaggtgttgggagagcaagcttcaagcagagatagcccttaattaggaataatgataaactattaatgtgtagctaaaaacttatgtattatgtctgtgatggttttcgtgcactctggtgttttgtgttaaacaaacatccttagaataaaatggtcatgtctttgctttcagaagttcaagtggttttgacttgtgatgggtggtgtaagctcaatggtgcttctttttttttttttt

SEQ ID NO: 52969 - DNA, 236 bp, Glycine max
  Clone ID: LIB3109-027-Q1-K1-F2
gaacgtgagggtgcgtgacaggtgaatgggttcgaacagggcggatgtactaggttcacagagattacaggctcttattcaccatcttcacttttctattccctctgactctaacgaacccaattcaaaatttaccgtttggaagaagatagcagcacttcttatctgggtcttttaaggcgctgattggaatctttgaatattttttaaccaacgggcttttctttttttaatct

SEQ ID NO: 52970 - DNA, 358 bp, Glycine max
  Clone ID: LIB3109-027-Q1-K1-F3
ggatgcagtttaacaaagcaaggaagagaaagaggtttggttctctctaaagagtctccgctgaactttttggtttcttgaagatgtcgttactctccgatcttatcaaccttaacctctccgacatcaccgataaagtgatcgccgagtacatatggctcgacggatttgccttgccttttattaacgcactttttttttgttcgatccgatcaaccttctcgatcaagttcccgaagaccagcttcgatttcaagggtataatgataccgtgtttactgtaaatggggttgaatactaaggaaagcttgctttgtgttggaaatttgctcatgtcttggaaacctaaaaatttttt

SEQ ID NO: 52971 - DNA, 291 bp, Glycine max
  Clone ID: LIB3109-027-Q1-K1-F4
ggcttcatggatgacatgaacgagttgaggaagaggagaaaaaccgcagacgccgagtgagagccgaaacttctctcatggaatcgcaaacggatctgctgaaccgacccggaatcttcttaattggatcctctaacgtcggcaaacgcactctcctatctcgattgacctctgttgatgttgaaggtgctgcttttgattcggcttctcaagtgaatgtccatgggtggactattaacaataagtactacactgctgatgtttctatctggatggctcatctcaatgacg

SEQ ID NO: 52972 - DNA, 240 bp, Glycine max
  Clone ID: LIB3109-027-Q1-K1-F6
ggagtgagcaagagtgaagagcgaagagaatggctcccaagggtttaatctttttggctgtgttatgcttctcagcactgtcactgagtcgttgtcttgcggaggataatggacttgttatgaacttctacaaggaatcatgccctcaggctgaagacatcatcaaagaacaagtcaagcttctctacaagcgccacaagaacactgctttctcctggctcagaaacatcttccatgact

SEQ ID NO: 52973 - DNA, 296 bp, Glycine max
  Clone ID: LIB3109-027-Q1-K1-F8
gagagagaagggaaataaagattgggattaggtgttgcgcagtcgcaggcatggccatggctttggtgagcctcaacaccattcatacatcgccttcttctttttcgttttcatctaccaaaccttattcttcctccaactatgcaccacctatcaccctgctttcacgatttcggaggcaccttgttcgtatggctcccgacgaggagaagatgactcgccgatcccctctcgatttccccatcgagtgggaaaggcctaagcctggacgaagaccggatatattccctcaattt

SEQ ID NO: 52974 - DNA, 363 bp, Glycine max
  Clone ID: LIB3109-027-Q1-K1-F9
ggggaataggagggggcaaattgagttgggtgttggaaaggcagagcaagaggagtaacataatcaaacatggcggttaggcaaagagccgtgtctgcacttccaactcttctacgcactctccgcaaagaacctttgaagcctcgcaaccacgcacacgtcaatgccttgccctctcttcgacgcgctttctctttgtacgatcagatcaacctcatcgatcaagttcccgaagaccagctccgatttcaagggtataatgatacggggtttactgtaaatggggttgaatacgaaggaagcttgctttgtgttggaaatttgctcatgtcttggaaacctaagaagttttcagagatcact

SEQ ID NO: 52975 - DNA, 266 bp, Glycine max
  Clone ID: LIB3109-027-Q1-K1-G1
acataatcaaacatttcttttatacaaaaaaccatttcttcactttcaactcttctactcactcttcgtaaataaccttttaaacctctcaaccactcacacttcaataccttgccctctcttctacacactttctctttttacaatcataacaacctcatctatcaattttcctaaaaccaactcctatttcaaagttataattataccccatttactctaaaatttttttaataccaaaataaccttctttttttttgaaattt

SEQ ID NO: 52976 - DNA, 386 bp, Glycine max
  unsure (1)..(386): unsure at all n locations
  Clone ID: LIB3109-027-Q1-K1-G2
ggagagaaaaatataagcggatgtgtgagtttgcatggttggatagcaatggcagcaaagaaggtgtgtgtaacaggtgctggaggattcgtagcgtcttggcttgttaagcttcttctttccaaaggctacattgtccatggaactgtgagagaccctgaacctgctactcagaaatatgaacacttgctcaaactccacggagcttctgaaaacctcactctcttcaaggcagatctcttgaactacgaatctcttcgctcagcaatttctggatgcactgcagttttccatcttgcttgccctgtaccctcaatcagtgttcccaaccctcangttgaaatgattgagcctgctgtgaaaggaacaactaatgtacttgaagc

SEQ ID NO: 52977 - DNA, 378 bp, Glycine max
  Clone ID: LIB3109-027-Q1-K1-G3
gtgtgttgtgggtggtcatgcagtggatggggttgcagagatacatagtgaaattgtaaaagatgatgttttcaatgcattttataagttgtggcccgagaagttccaaaacaaaacaaatggtgtgacaccaaggaaatggatcaggttctgcaatccagatctgagtaaaataataaccgagtggataggtactgaggattgggtcctaaatactggaaaattggccgagctacggaagtttgtagacaatgaggatctacaagtgcagtggagggaagcaaagaggagtaacaaagttaaagttgcagcattcatcagagaaaaaacagggtattctgtcagtcctgatgcaaatgttgacattcaggtcaagag

SEQ ID NO: 52978 - DNA, 264 bp, Glycine max
  Clone ID: LIB3109-027-Q1-K1-G4
tgagtagaagaaggatatagtcatagagtcacagaggaggcggcgagtgttgggttgagaatcctatcttgttcgtctttctcgtcttctttcttttcttttgtttttcttgtggatgtgaaacagaatctatgacgagtcaatcggcgaagaacctattggttttgttggggctgggtttagctggaatagttctaatcaccagaaagctcaagaagtctgtcagaaaggatttgggggctttcattgagaagcttcagctgc

SEQ ID NO: 52979 - DNA, 317 bp, Glycine max
  unsure (1)..(317): unsure at all n locations
  Clone ID: LIB3109-027-Q1-K1-G5
tgaagatgatgtaaagctanngggcaagaggagaggatgcgcgtggagaaccacgggcattcagttttggacaaggttaagttaggagagcctggatacaaggaaaggtattatgctgaaaaatttggtgcattggatctggagaagattgaaaaaatcaagaaagatacagtcttaaaatatgtagaaggcctttgttgggtttgtcggtactactaccagggtgtctgctcatggcaatggtactacccataccattatgctccttttgcttctgatcttaaagatctagctgatctggagataacttttttttt

SEQ ID NO: 52980 - DNA, 293 bp, Glycine max
  Clone ID: LIB3109-027-Q1-K1-G7
ggctgcggaggctgcaagatgtacccagacgtgagctacaccgagtcaaccaccaccgagaccttggtcatgggagtggcaccagttaaggctcaattcgagagtgctgaaatgggtgttcccgctgagaacgatggctgcaaatgtggagctaactgcacctgcaacccctgcacttgcaagtgaggtgttggagagctaaagcttcaagcagaaatggcccttagaaataatgataaaaactatatgtagtttcaaaacttcaaaattatgtaggatgtattatgttgcac

SEQ ID NO: 52981 - DNA, 348 bp, Glycine max
  Clone ID: LIB3109-027-Q1-K1-G8
aagtataaaaaaataaaaaaaaaaaaaaggaatctatataaatataaaaataatatatataaggtacaaatagtaaatcgaggtacccattttatgataaactttccttccatttttgttcctctagtaggcctagtatttccggcaattgcaatggcttctttatttctttatgttcaaaaaaacaagattttttagatacagaaaacaaagtaaaattctggggttttttattccccaattataatactaaattcaaaaaaaggagagtaatgagtataatctttcgctcagacgatgtactgatatattctatggcggaggttcgaagaacaagcaatttatttt

SEQ ID NO: 52982 - DNA, 337 bp, Glycine max
  Clone ID: LIB3109-027-Q1-K1-G9
ggatacagaagatgagagagataattagggttcagtattggacaagctggaattcaggtggggaattcatgctgggagttgtattgccttgagcatggaattaaccccgatgggaccatgcctagtgacacctctgttggcattgcacacgatgctttcaacaccttcttcagcgagaccggattcggcaagcatgtgccaagggctttatttgttgatttggaacctagtgttattgatgaagtaagaactggtccttgcagacaactctttcaccctgagcaattaatttctggcaaagaagatgctgctaataactttgcaaggggacactaca

SEQ ID NO: 52983 - DNA, 346 bp, Glycine max
  Clone ID: LIB3109-027-Q1-K1-H1
gagggatcagtggaagtgaaggagtttaagatatgtggagcatagtgtgttgttctctgtttcgaagcagcggaaacaaacatgtcgtggtgttactgcgctaagcctatgactttgcagttgccgttgcaatcaagagcagcatcatcgttccattcccacgttggaggagtaacagtaacattctcaacactgtctcttcgaccctcttctcctcttgttctgacccacaacctccacttccaacccaaactcaaacgcgcttccacaaccattcgctgctcctctgcgttgactcctcaattgaagtctaccttggatcaagttattgcttcaaataaagtag

SEQ ID NO: 52984 - DNA, 146 bp, Glycine max
  Clone ID: LIB3109-027-Q1-K1-H11
ctttacaagcaagtcactgagcttaaactactattcaaaaacatgccctgatgtggaatgcattgttgccaaggcagtgaaggatgccactgctagggacaaaactgttccagctgcacttctgcgaatgcacttccatgactgtt

SEQ ID NO: 52985 - DNA, 293 bp, Glycine max
  Clone ID: LIB3109-027-Q1-K1-H12
ggaagaaaagagcagatagaagaaaaagctcggtgcatagttccgaatccttgttcttctgatagtgaaggtagcttgaggtttatttaatttaattcggttcgagaaaagtgctgagagagagaaaatagaaaaggtgaaaaatcgaaggtcggagatgcaaatggaagctagggttggtatggcggtggatggtggtggtgtacggaagttggtgcagccgccgccgaagcagattggaactgtttctcagcttctcgccggaggagtcgcccgcgcgttcagcaaaacct

SEQ ID NO: 52986 - DNA, 363 bp, Glycine max
  unsure (1)..(363): unsure at all n locations
  Clone ID: LIB3109-027-Q1-K1-H2
gaggtatctttggaagtgaacgagtttaagataggtggggcataatgtgttgttctctgtttcaaagcancggaaacaaacatgtcgtggtgttactgcgctaagcctatgactttgcagttgccgttgcaatcaagagcagcatcatcgttccattcccacgttggaggagtaacagtaacattctcaacactgtctcttcgaccctcttctcctcttgttctgacccacaacctacacttgtaacctaaactcaaacgcgcttncacaaccattcgctgctactatgcgttgactactcaattgaagactaccttggatcaaggtattgcttcaaataaagcagttgtgtttatgaaggga

SEQ ID NO: 52987 - DNA, 312 bp, Glycine max
  unsure (1)..(312): unsure at all n locations
  Clone ID: LIB3109-027-Q1-K1-H3
gggtgtgttaagtgatttattagataatcgaaaagagaaaatcttgagaactattcgaaactcanaagaattacgggaaggggccattgaacagctggaaaaagcccaagcccgcttaaggaaagtcgaaacggaagcagatcgttttcgggtgaatggctattctgagatcgaacgagaaaaattgaatttaattaattcaatttatacgactttggaacaattagaaaattacaaaaacgaagccattcattttgaacaacaaagagtgattaatcaagtccgacaacgggttttacaacaagccttaca

SEQ ID NO: 52988 - DNA, 300 bp, Glycine max
  Clone ID: LIB3109-027-Q1-K1-H4
cacacaagctatttcactatccttgtgttaatttgcccgtatcatcaccatcatgggtgtttttactttcgaggatgagaccacctctactgtagctccagctaggctttacaaagctttggttaaggatgctgataacctcgtcccaaaggcagttgaggccatcaagagtgttgaaatcgttgaaggaaatggtggccccggaaccattaaaaagctcacttttgttgaggatgggcaaaccaagtacgtgttgcacaaagtttgaagcaattgatgaggctaatttgggatacaact

SEQ ID NO: 52989 - DNA, 254 bp, Glycine max
  Clone ID: LIB3109-027-Q1-K1-H5
tccaaaaccagattcgagtgccgtccccgattcgtggtaccccacgctctccgtcttcaccctcgccatcggcctcgtcttaaccgcctctttcttcatttatgaagcaacatcttctaggaaaagtcgttcacttgttcaggagctgacaactggtgcagtggcttcagtcttcttgggttttgggtccttggtcctcctacttgcttctggtgtttatgtctaatttaaacatttggattggatgaaaattt

SEQ ID NO: 52990 - DNA, 287 bp, Glycine max
  Clone ID: LIB3109-027-Q1-K1-H7
gaggtaggtgattgcaaagaatctgaatccagggctttggaagtagttggtaaaatgcaaatgcaattggaaacagcaaatcagactgttgaaactcttaggtccgatgggatgaaagcagcagaagcttacaaatctttagcttttgagttggagcaatcaagaactcaagcaaaatcattggaagaacttgtgagtaaacttcaggctgatttgcttagcaatgctaacaaaagtatgttaagtccaactccaaccaatgaaaatgaaccttctcaggaaaatga

SEQ ID NO: 52991 - DNA, 295 bp, Glycine max
  Clone ID: LIB3109-027-Q1-K1-H8
gggtgggaaaaaaataaaaaaggcagggaggagctgaggcgccgacgacgggattctcgtactatcggcgacaatgtacacgtgtgcggtgaactataaacgacgtcgcgtggcggttcaagcagtgtcgtgtgaagaaagaactaaaatggcctaaacaaccacttgaccattacattacatgtttggataatcaatctccttcaaagaacgaccaccgaatttttccccttcaaccttgtacttctacacacgcaatctcatcccattttttctttttctttcttccgatatc

SEQ ID NO: 52992 - DNA, 421 bp, Glycine max
  Clone ID: LIB3109-028-Q1-K1-A10
ggaaacaagaagtgaggttgtctttcaaagatggaagaggagacatttgaaaaaccattgttgaagaaaaactatcatgagaattgtcctggttgtaaggtggatcaagccaaggagctcaaaaaggatgtttcctttagaaatctttcttatatatggctggcggtgttatgtggcactttgcctgtagcatcattctttccctttgtttacttcatggtgaaggattttaatattgctgaaacagaggaagacataagtacctatgctggatatgtgggatcatcaatgatgcttggcaggtctttgacatccatattgtggggtatgatttctgatcgctatggtagaaaacctgttatcattatagggattatcactgttgtcattttcaacacattatttggtcttagcacgaatc

SEQ ID NO: 52993 - DNA, 422 bp, Glycine max
  Clone ID: LIB3109-028-Q1-K1-A11
gacctcactcttattgttttcttaaaatgtcttgcttgccactgccagtgtgtcaccaccatggccaccgtcacaacccaagcctccgccgcgattttccggccatgtgcctcgaaatcgaggtttctgaccggctcttccggtaaactcaaccgggaagtgactatgaggccaatggggtgccctcctcctgcctctttcaaggttgaagccaagaagggagagtggttacctggcttggcctccccaacttacctcaatggcactcttcctggtgacaatggatttgaccctctgggactagctgaggacccagagaacttgaagtggtacgttcaagccgagcttgtgaatggacgttgggccatgttgggtgttgcaggaatgctacttcctgaggttttcaccaagattggaatcat

SEQ ID NO: 52994 - DNA, 374 bp, Glycine max
  Clone ID: LIB3109-028-Q1-K1-A2
ggtctcagtgctagtgtgagtgtgagttcgtgacacacttatccacctactttcatttgagccactcttgtcagtccaaaacagtttctcgctttctcatctgaaaaatgaggagcatctttgtgcttctccttgttctgggtttgattaagtatgcatttgctgaagaagggttttgctctgctccttcggaatcgaaatcaaagcctctttattggaaagtggataaccccactctctcacctatccaccttcaagatttgcctggattcacacgcagtgtttataagagtaatcatgctttggtatcaccagaaagtcatgtatatggcccattgcctgagtggatcgacacgtcaagcgcatatttaatt

SEQ ID NO: 52995 - DNA, 331 bp, Glycine max
  unsure (1)..(331): unsure at all n locations
  Clone ID: LIB3109-028-Q1-K1-A3
tatacttccgaaacgacgtcgtaacgtgacggcgacgcgtatcaacttaaataatcgcgctccanaaccactctcccacgcatttaatcttcaaccaaaacaaacaacccacatcactctctacatatccaacactatagcgtaaaccactcttcaaaaacattacctaatctccaacgaaatctctctctccccccaagaacaattcaatatctataatcttcagttggccaaatccaaccctaataatatcatacaagaatacccacactcagatccccatactccaattcgcaagaacattgatcactcaatgcaactgaatacttat

SEQ ID NO: 52996 - DNA, 364 bp, Glycine max
  Clone ID: LIB3109-028-Q1-K1-A4
gggggaaaaagggaaggtggagtagtaaatgggtcatgggatgttgcaaatcaaggccaggctatgcttccccactggaagccatttctggtcccagagagtctctcatttatgtaacctctgtctacacagggaccggaatagagaagccagactatttggcgacagtggatgtggatccaaactctccaacttattccaaagtcatccataggcttcctgttccttatttaggtgacgaattgcatcacacaggctggaattcatgcagctcttgccatggagacccctcagcagaccgacgatttctcatcgtacctgcactcgtatcaagtcgagtatatgtggttgatgtgaaaacaaa

SEQ ID NO: 52997 - DNA, 428 bp, Glycine max
  unsure (1)..(428): unsure at all n locations
  Clone ID: LIB3109-028-Q1-K1-A5
gggaaaaaagagaggggagctcaagattttatggacaagaggggaaccaganaggcattgccctcatatccaagaggataaccaatcaattgacagccaccattaatcagcagcagacttgtaccctcctaggacattatgtaacatttgtaactttgttgtaacagaatttcagccaaattgtatgatatgatagcatggacttaaaagttataaatcagcagttaagatatgagagagatattacccagttattctgatattcaaggggacccaccaatctgtgtattgtaaccttattttttgtgagatagcagatggagattccatttcctggttgatgatggctttgcatcaaggagagtctgataaaaaaccatgtctttaccaagaagcaaagtgacatgcttaggaaactccaatcataa

SEQ ID NO: 52998 - DNA, 395 bp, Glycine max
  Clone ID: LIB3109-028-Q1-K1-A6
gtgagctactgtattaaaattggtccctatgcgcttgagatgattggcaagaactgcaagcttctagaagggttgtgtcgaaacatgcacccattggatactgcggagaagccgcatcaagacgatgaagcatatgcaattgcctccacaatgcctaagctcaagcatcttgaaatggcttatcatcttatcagcacttcgggtgtccttcaaatacttgcaaactgccctaagcttgaatttttggatcaaagggggtgttggggtgtgacacttgaccacatgtttttaaagcagaaatttccaaaactgaaggttttggggcctttggttcttgacacttatgagagtgatggctgggatgatttctcagatgtgtctgattcatcagagta

SEQ ID NO: 52999 - DNA, 414 bp, Glycine max
  unsure (1)..(414): unsure at all n locations
  Clone ID: LIB3109-028-Q1-K1-A7
ggacattagccacatggcataggctcatcattttagtaacgtcgtactctagtacaaagacattattattattgtcctcatagtgagtagaacgcagagagactagagcggagatagcaatctcatctcattcatttcaatggcaactcaaggtcaagtcattacctgcaaagctgcggtggcctgggaacccaacaagcccttaactgtccaagacgttcaggtggctccgcctcaggccggcgaggtccgtgtccaaatcctcttcaccgctctctgccacaccgatgcttacacttggggcggcaaggatcccgaaggtctcttcccctgtattcttggccatgaagctgcacggattgtggagagtgttggangacggtgtactaatgttcagcctggggatcatgtcat

SEQ ID NO: 53000 - DNA, 417 bp, Glycine max
  Clone ID: LIB3109-028-Q1-K1-A8
agggggtggtagtgtggcagcgacgcgtatcaacttcaataatcgcatcgcagaagcagtttccggtgcatctcatcgtctccgaaaatgaacgacgcagatgtctcgaagcaaatccagcagatggtgcggttcatccgccaggaagctgaggaaaaggccaacgagatctctgtctccgccgaagaggaattcaatatcgagaagctgcagttggtcgaagccgacaagaagaagatcaggcaagaatacgaacgcaaagagcgccaagttgaaattcgcaagaagattgagtactcaatgcagctgaatacttctcggattaaagttcttcaagctcaagatgacgtgatcagttccatgaaagaagctgcatccaaaggaactttggctgtgagtcatcatcatgatgatcat

SEQ ID NO: 53001 - DNA, 265 bp, Glycine max
  Clone ID: LIB3109-028-Q1-K1-A9
gacggctaagagctaaaaatcatcgaagtactcaaattagcatggctgtcacggttgcattcttgaatttgatcatcatgttttcagtagtctctacaagcaagtcactgagcttaaactactattcaaaaacatgccctgatgtggaatgcattgttgccaaggcagtgaaggatgccactgctagggacaaaactgttccagctgcacttctgcgaatgcactatcatgactgtttcgttcggaagtgcgatgcctctgtgct

SEQ ID NO: 53002 - DNA, 403 bp, Glycine max
  Clone ID: LIB3109-028-Q1-K1-B1
tggagcaagagtgaagagcgaagagaatggctcccgaaggtgtaatctttttggctgtgttatgcttctcagcactgtcactgagtcgttgtcttgcggaggataatggacttgttatgaacttctacaaggaatcatgccctcaggctgaagacatcatcaaagaacaagtcaagcttctctacaagcgccacaagaacactgctttctcctggctcataaacatcttccatgactgtgctgttcagagttgtgatgcttcactgttgctggactccacaagaaggagcttgtctgataaggaaacagatagaagccttgggttgagaaatttcaggtacattgagaccatctaagaagctttggaaagggaatgcccaggagttgtttcctgtgctgatat

SEQ ID NO: 53003 - DNA, 363 bp, Glycine max
  unsure (1)..(363): unsure at all n locations
  Clone ID: LIB3109-028-Q1-K1-B10
tcctataagagattttgtttggtgttgcgcatttgattttgagttgcctatctatgattttggacgtatggtttatcatgacttaattccatagtatcaagatttttctgtttaatcttttgaagttagttttattttgttgaaatggtatttaaacgaatttgggacttgatggaatcaaaggccgattctccatgctatttgaacgtgttaatggatagaatggaatttcgttcttggttggatctttaaaaggttggaactttggtaccccaattgtatgagttcacgggttgagccggattggctgttctatcagattgagttggtttggttcggtggttcccaanntanannacattt

SEQ ID NO: 53004 - DNA, 409 bp, Glycine max
  Clone ID: LIB3109-028-Q1-K1-B11
ttcgcaatgcacttcataaggtagcagcgccattcgaatacggtgccggacacattcagcctaaccttgcaattgaccctggactcgtttacgatttacgcaccaccgattacttgaacttcttatgtgcttctggttacaaccaagctttactcaacttatttgccaaattgaaattcccatacacttgtcccaagtcttacagaattgaagatttcaactatccttcaattacggtgcgtgatcctgggtcaaagaccataagtgttactcgtacagttacaaatgttgggcctacaagcacgtatgttgtgaatactcacgggccgaaggggattaaggtccttgttcaaccaagttcgttgacttttaagagaaccggagaaaagaagaagtttcaggttatact

SEQ ID NO: 53005 - DNA, 403 bp, Glycine max
  Clone ID: LIB3109-028-Q1-K1-B12
gtacacaagtggcagtacaggggtgccaaagggtgtcatgattactcacggcaacattgtagccactacagcagctgttatgacagtgattccaaatctaggtagcaaggatgtgtacctggcatacttgccccttgctcatgtttttgaaatggcagcagaggtgatttcttcttagccttctaattgtcaaaaacagctgatgttgatgatattatctctaaattacggtggttgtccagtctgttatgctggctgcaggttgtgcaattggttacggctctcctctgactttaactgacacgtctaataaagtcaagaaaggaaccaagggagatgctactgtgttaaagcccactcttttgacagcagtaccagctattcttgatcggattcgagatgg

SEQ ID NO: 53006 - DNA, 384 bp, Glycine max
  Clone ID: LIB3109-028-Q1-K1-B2
tgatggttatgaatatcatgtggattatgaggttcagggtgtttcaatggtactcgatgaagacgaaaatagtgaaggccacaaaactagtgaaatttgtgagattgatgagagcagtgaaaacagatatgcaagcctagagaatgatgatgataatggaattagccaggagaaccaaattcactcttctgaagtgccagatgaaagcaccatttgtgttcacgagcagaaattatcggatgaaaatcaagttaaaggtagtaaggtgccgagcacaggtggtagtgaagagcagctcacgggcaataatatgcaatgtggaactaagcggaagagacctattgaagaggatgaggaattgagaaagatcaactcacgaaagcc

SEQ ID NO: 53007 - DNA, 402 bp, Glycine max
  unsure (1)..(402): unsure at all n locations
  Clone ID: LIB3109-028-Q1-K1-B3
ggtgacgggggaagatgcttctggcgtcgatacgcagaggattcactagtcgagtaggtcccatacgaaccctctcttcgcactccgaaatgaaagactntctggattacctcgactccctcaaaaattacgagaaatcaggagttcccaaaggtgccggcaccgattccagcgacggtttcgatcttggtagaatgagatgcctcatggagcgttttggtaaccctcactccaagttcaaggctgttcatattgctggaactaaggggaaggcatcaacagctgcttttgtatctaatattctgaggaatgaaggttattctgttggttgttacactaggctttatttttctcaagcagtccacatatcctgaccatccgggagcgcattttactgggaaa

SEQ ID NO: 53008 - DNA, 418 bp, Glycine max
  Clone ID: LIB3109-028-Q1-K1-B4
gtgttataatcaataacatcggtgtgctgattggttacatgattataattggtgatgtgctctctggaacatcttcaagtggagatcatcactatggtatccttgaaggatggtttggtgtgcactggtggacggggcgaacatttgttgtcctttttacaacacttgccatatttgcaccccttgcaagctttaagcgaattgattcattgagattcacatcagccctttcagtcgcacttgcagttgtttttctagtcattgccgtgggaattgcagttgtcaagatattcagtggaagcattgcgatgcccagactcttccctgtcactactgatgtggcatcattctttagactattcactgtagttcctgtgtttgtgactgcatatatctgccactacaatgttcacagcat

SEQ ID NO: 53009 - DNA, 426 bp, Glycine max
  unsure (1)..(426): unsure at all n locations
  Clone ID: LIB3109-028-Q1-K1-B5
gaccacanactgtcatgccatcctcagttctatctagtgatagtatgcacattgggcttcttgcagctgctgctcatgctgcagcaactaatagctgctttacagtgttctataacccaagggctagtccatctgaatttgtcataccgctttcaaaatatatcaaagctgtgtaccatacgcgtgtttctgttggtatgcgtttcaggatgctttttgagactgaagaatcaagtgtccgcaggtacatgggtacaataactggcataagtgacctggatcctgttcgttggccgaattctcattggcgatctgttaaggttggttgggacgaatcaaccgctggagagagacagccacgggtatcattatgggaaattgagcctttaacaacgtttccaatgtatccatctctatttcccctca

SEQ ID NO: 53010 - DNA, 396 bp, Glycine max
  Clone ID: LIB3109-028-Q1-K1-B6
gatactaaacgatggtaacatcaggataatgccatcgatggcctagcctaaacttccctgcaaaatcagctttggttttcttctgtcactgctctaacctttaaacctctctcattcattgttctttctccaccgtcgaaaatccctaagttcctgctagtttcaaccttcgagtgctctctggaagattcggtatctcataccgttgggttcaagttctccctctttgttctagttttgggtcttcgggaggaatctatggagacacaatcagatggtaatgaggacaacatagctgccattaaaaatatgaggcagcagcttgaaactcgcatagagtcgcaacacaaggctcacatggagatgcttgcttctatgcaaactgtaatacctaat

SEQ ID NO: 53011 - DNA, 383 bp, Glycine max
  unsure (1)..(383): unsure at all n locations
  Clone ID: LIB3109-028-Q1-K1-B7
gctggtcagggttggaacaaaacgaaaaccaatcacaacaacgtagtaaaactcaaaaccaggaaattaatatgagctgcaacggttgccgtgtgctccggaaggggtgcagcgacacatgccctctgaggtcgtgcctgcagtggatcgaatcttcggagtcacaacgacacgccactctcttcctcgctaagttctttggccgtagcgacctaatgtccttgatttactccgtccccgaaaccaaaaggcctggtactgtccaacactctaccttgtactcactcataattcatgcttttacgtgtgcttagatttcatgctatatagctgcctacgtcttaaaatataaagtgtattcatattttataagatganatata

SEQ ID NO: 53012 - DNA, 423 bp, Glycine max
  Clone ID: LIB3109-028-Q1-K1-B8
gacatgagaaatttccattatagctttgccttcataatttctgcttaggattagaattgtagttgctaccatacactgtgtaatagttttgcttggtgaagttcataaggggaccgtgcgtttaatggcgttacctgataattgcagggagcgtgtaacatgaatgcgttacgtaataattgaaggggcgtctaacatggatcggtccaaaatggtaacatcacatgggtctgagaatcagttttgttttataggttataattatatgatatttgtgtgaaatatcttttagctttttttatcttcttttaattatatttgtttgtccatcaaatttaaatatgaagctttgtttaagaagatgaaatctaatttttgtcacactaaatacatatttctggcctggaccaatttatagattta

SEQ ID NO: 53013 - DNA, 432 bp, Glycine max
  Clone ID: LIB3109-028-Q1-K1-B9
ttcagattttggtctgaagaggctgcttagcaagattccgccctcgccatctttttattcctcatgattttgatgccagtgatcatgggacatcgagtttcccggttgcttctgtgcatcctataccgattttcgacattaagattcttaacaccgataggcatgctgggaacttgttggttaggaaacttgatggcattcggagttctggtcaggtggagttgattcccattgatcatgggctctgcctgcctgaaactttggaggatccatattttgaatggattcattggccacaggcttccattccgttctcagaggatgagcttacctacattgaagatcttgacccttatccgcattgtgagatgctgagaatggaactgccgatgatccgagacgcgtgtctcagagtcttggtgctgtgcacta

SEQ ID NO: 53014 - DNA, 401 bp, Glycine max
  Clone ID: LIB3109-028-Q1-K1-C1
gtcttaaagaagggtgggatctggaaagatatttatggaactgatgaaaagaaggttgccgacatggttagaggagatcaagttgatattttaatagagcttactggtcacactgcaaacaataagctgggaatgatggcatgtcgacctgctcccgttcaggtgacttggattggttatcccaatacaacaggattgcctacaattgattatagaataactgattctcaggcagaccctcccgaaacaaagcagaagcatgttgaagagttagttcgattaccggattgcttcctttgttacactccttcccctgaggctggtcctgtttgtccaactcctgctctttccaatggcttcgttacatttggtagttttaacaatcttgccaagattacacc

SEQ ID NO: 53015 - DNA, 424 bp, Glycine max
  Clone ID: LIB3109-028-Q1-K1-C10
gatgttaggaagtatgtcaacacctaccgtcgtacatttacgacaaaagctgggaaaaaggtgagcaaagctcccaagatacaaagactggtcactcctcttacgctccaaagaaagcgggcaagaattgctgataagaagaagaggattgccaaggcaaaatctgaggcagcagagtaccagaaactccttgcctccaggttgaaggagcagagagaccgccgcagtgagagtttggccaagaggagatccaagctttccagtgctgctaaggcagcagctgtataagctgctttcgatagagagatatggtgaagtttaatcatcatatgtagtttttgtttgctatattatgacggctgttgttatgataaactatggttttgctatttttgattacattgagttattcaagtatttctta

SEQ ID NO: 53016 - DNA, 304 bp, Glycine max
  Clone ID: LIB3109-028-Q1-K1-C11
caaaactactctcagacaaaacttttaatttctgattttctgaattcctgatggtccactctaattataagagctgcaaacggtactaaatctaaagttgaacaaaatgtacatccaacaattcagtatttcgcatcaaaagtttctctttgctccccttaatatctagcatttccgctctcgaacctccaactggagatcaaacaccgcttcgtctgtcatacaaaagtatcagatattgaatatattttctatccaactgttgcacctaaaactcctgaccacatttataaacttgttccac

SEQ ID NO: 53017 - DNA, 319 bp, Glycine max
  Clone ID: LIB3109-028-Q1-K1-C12
ttcgcaatgcacttcataaggtagcaactccattcgaatacggtgccggacacattcagcctaaccttgcaattgaccctggactcgtttacgatttacgcaccaccgattacttgaacttcttatgtgcttctggttacaaccaagctttactcaacttatttgccaaattgaaattcccatacacttgtcccaagtcttacagaattgaagatttcaactatccttcaattacggtgcgtcatcctgggtcaaagaccataagtgttactcgtacagttacaaatgttgggccttcaagcacgtatgttgtgaatac

SEQ ID NO: 53018 - DNA, 428 bp, Glycine max
  Clone ID: LIB3109-028-Q1-K1-C2
ggaagcaaaaaatgaaaacccaaagtgcttctctcctctggctttttctctctcttgctatccttttggctagtggcactgctgcaagtgcaactccaagaagcgcagtgccaagccaccatgtttcaacattcaacagaagcctttttccttccacttttctctttggaattggttcttctgcttaccaggttctgacaaccacataactaagcacattcaattagtattttctttttcattttttttgggtactacatagaagagatttgacgtattattttgttttctacaacctattcagatctctagtctttgaatttgtggaatacatgactggtttaactgtgagcgagtgagtcaaatttaatataatttcttttaaaaaaaggaaggacttttaaaataaaaatgatcttatatttata

SEQ ID NO: 53019 - DNA, 203 bp, Glycine max
  Clone ID: LIB3109-028-Q1-K1-C3
gagggagaatttctttggaggataaggccttttggttacatttcatgctggaagaaacaacttgtctttacaagtgcatgtgtggttataaaggcttttggtttatggatgagggtgagaagggtttgcctgaccatgttatgggtgatgagaggagggtttttcaagtaattttgcatatggatgggaacctactggaacac

SEQ ID NO: 53020 - DNA, 395 bp, Glycine max
  Clone ID: LIB3109-028-Q1-K1-C4
ggaagtaggaagagttaaaggtttgatctttgaggtgaaggtccagtggtttgagtagccaaaccttagttatggatgttgaggcagagattgatcgcttgccaattgacctgttggctcatatttttgttctgttcacttccttcactgatttggcacaggcaagtggtgtttgcaagaaatggaaacaaggggtgaaggagtctcttgttcggagacacaatctcagctttgccggttggaagatggatgatgactccactgctcgccttgtttttcatgcctacaacctcactaaactagaaataccgaggagctgctggggttgccaaataactgatgctggacttctcagaatatcttttgctaagtgtatcagcaatctcacatctata

SEQ ID NO: 53021 - DNA, 336 bp, Glycine max
  Clone ID: LIB3109-028-Q1-K1-C5
ttagattgtggtactatgaacaattaaaggggtgaggtataatgttaatgtatattggattatttatccaaacattattatatagatgttgagctaaaaatgaatcaattgccaatggacctggtgactcatatatttggcatattcaattacttcactgacttatgacaggctggtcttaatatggaagacatggagtcagaggaaactggagtatcgtttgcactgactcaatacgaactctctcaattagaacatatatgataaatgcgctgctctgatactgaaacatgccttcaacatgactatactacaaatgccgatgagatgcttaat

SEQ ID NO: 53022 - DNA, 408 bp, Glycine max
  unsure (1)..(408): unsure at all n locations
  Clone ID: LIB3109-028-Q1-K1-C6
ggtacggncatatttcctctcatcagattgaagggtggggagaattagggttctctatctgcanagcanaccttatcttttcacctgaaacttgcttttgttcccaattttctcaaattgctttcggttttcgttctgattctgcaaaatcatggagatggtgcgcatcgttgaattccctcacacatacatggatcgacccccgagaaagagagcgcgtttgggctgggacatcgctgaggtccccaaggctcaagtaggattgttttgtggacaagaggttgagaatatttcaagctttgctccttcagaacatccccctagttctctgtttaagggagttgctcgaaatggttctcccccatggcgagacgatgacaaagatggccattacatgtttgagcttgg

SEQ ID NO: 53023 - DNA, 275 bp, Glycine max
  Clone ID: LIB3109-028-Q1-K1-C7
caaaacataccttatcttttaacctcaaactctcttttatctccaattttcacaaattcctttcaatattcttttctactcatactaattatacccattcaccccatacttcaattccttcacacatacattcatctacctacctacaaacatatccctttttctctaaaacatctctaaccttcccaacgctctaataccattattttatcacacatcaattcttaatatctcacacttttatactttaaaacatacccctattactctattta

SEQ ID NO: 53024 - DNA, 419 bp, Glycine max
  Clone ID: LIB3109-028-Q1-K1-C8
aattttgtcttaaaacgctgtttagcattattgcgccggggcatttatcaataaccaatccctctctactcttttatcttctccttctcttctctaccgttttatcttctccctcttcacttcattctttactctcctctacattaaccaccatacacaacacattcaccgtcgccgatctcacttctactctcaacgaagacaatagaacagaccttgtctatcctcttaacatcaacatacacagtttgactctacaacactcccatattctagagtctctgtcccccaatgtccgaaagcgtcttgaggttcttatacacatccactgccaacatgatgaattacaggctaaattttttgaaaagagaacaacatctcgatgccaaataccaaaaattgtattaaccactttacac

SEQ ID NO: 53025 - DNA, 422 bp, Glycine max
  Clone ID: LIB3109-028-Q1-K1-C9
ggcggaagaggctgtttagcaagattgcgtctgtccagcagtttattcctcatgattttgatgccagtgatcatgggacatcgagtttcccggttgcttctgtgcatcgtatagggattttggacattaggattcttaacaccgataggcatgctgggaacttgttggttaggaaacttgatggcattgggagttttggtcaggtggagttgattcccattgatcatgggctctgcctgcctgaaactttggaggatccatattttgaatggattcattggccacaggcttccattccgttctcagaggatgagcttacctacattgaagatcttgacccttatcgggattgtgagatgctgagaatggaactgccgatgatccgagaggcgtgtctcagagtcttggtgctgtgcactatt

SEQ ID NO: 53026 - DNA, 428 bp, Glycine max
  Clone ID: LIB3109-028-Q1-K1-D1
gggctagggcattgtctggcaacaaggatgtggccttcttctctgctaatgctgcagctcacgcttcaaggaagtcccctccaagagtgaccaacgaggctgttcagaaggctgctgctgcattgaagggttcagatcatcgccgtgcaacaaatgtcagtgccagactggatgctcaacaaaagaagctcaaccttccaatccttccaaccaccactattggatccttccctcagactgtagaactgaggagggtacgccgtgagttcaaggctaacaagatctccgaggaagagtatgttaagtcaattaaggaggaaattcgcaaagttgttgaacttcaagaagagcttgatattgatgttcttgttcatggagaaccagagagaaatgatatggttgagtacttcggtgagcaattgtcaggc

SEQ ID NO: 53027 - DNA, 405 bp, Glycine max
  Clone ID: LIB3109-028-Q1-K1-D10
ggtgtttagcgaacaaaagagagtaaacaaaatggcattgcaggcaccacctagccttcacaccgtcaatggcaatgctggcctgagacgacccttgatgaatccttcttctttttctctaaagtcatccttcttctctggttccctcaatttctatcttcatcccaatcacctccatcttacttcagctccacccaggatttccatgcgtgttgcttccaaacaggcctatatctgtcgagattgcgggtaaccgggttacccttcttttattttttcataaattcaattaacttatgcttttgctaatgttattcattgaagctaacgctatgctgcaggtatatttacaaagacaggactccctttgagaagttgcctgataactacttctgccctggtaat

SEQ ID NO: 53028 - DNA, 404 bp, Glycine max
  Clone ID: LIB3109-028-Q1-K1-D11
ggatgagaaggagaatgacggaaagttgcatccgatccgtcgtagaagccattcactcctctcctttccaagccggtctccatctcgccggtggagcttctcaggtggtgggttcgttgctatcagttcccggtgcttcgaatactgtgctcgaagttgtggttccttactctaagatgtctctcattcaattactcgggaagattccatcccaattttgtggccaacagactgctgaagatatggctttattggcgtataatcgcgctcttaagctctccaagccaggatccccggctgttggagtgggtttcactggttctttggccagcagtcgtacaaaactcggggaacacagattgtatatgtcaacaaagacagccgaccaactttggatatcaagt

SEQ ID NO: 53029 - DNA, 408 bp, Glycine max
  Clone ID: LIB3109-028-Q1-K1-D12
ggtcaagaggaacttgtttatgatgaaaactctggacatggattcttaaatgatgtttttgcagggaattctcttgtgaatgatacagatttgaaccctttggagtttttagcttctctattccctggttttgcttcagaaagccttgctgaagttttcttcgccaatgcatgcgatttacatctgaccattgagatgctcactcagttagagattcaagttgatggtggcttcaatcagaatccgagtccaaagactctgtcatctcccaatctgagtgcaatggactttccagctcttacatcatcaaatgggcagaatacttcaaaatatgctgcagataatgttcaacaaagtggcattccatacatatcatctgataaagacatgctcatgttcaaatctggc

SEQ ID NO: 53030 - DNA, 385 bp, Glycine max
  unsure (1)..(385): unsure at all n locations
  Clone ID: LIB3109-028-Q1-K1-D3
gactgcgaaccagtagggactcccattccgactcttagccgncgatctctcagggcttgcatcttctcagctgtgaagatgtacacatcaaggaagaaaatccacaaggataaggatgctgaaccaactgaatttgaagagtcagttggacaggcattgtttgatctggaaaataccaatcaggagcttaaaagtgatctgaaggatttatacataaactcagccgtgcaagttgatgtttctggaaaccgcaaggctgttgttattcatgtcccttacagattaaggaaaggtttccgtaagattcatgttaggcttgtcagggagcttgagaagaagtttagtggcaaggatgtaatcttggttgccacccggaggattttga

SEQ ID NO: 53031 - DNA, 407 bp, Glycine max
  unsure (1)..(407): unsure at all n locations
  Clone ID: LIB3109-028-Q1-K1-D4
ggaaaaaggaagaggaaggaaggaatcgcaagtcgtctgtcccgcangtgcagacgacctgtcttcatagccaaacaacctcaaaaacattcaacaacgttcactattaattcatcataaaataaaaacaagtttcgattttttatctttgttttgtttctgatccattcatggaggtgccgagttcctgggatgctcttcgcaaacagggtttcttcattttgtcggtgatggggaattcatgggatcaaggatgggattctactacccttttgctatctgtgctttgaacatggtttgatttgttgagttgcaggttttcagtgttggaattcccccccgcggagacgaggctatagtttgcttttggaattgttaatggattggattatgaattttcgcaatgc

SEQ ID NO: 53032 - DNA, 443 bp, Glycine max
  unsure (1)..(443): unsure at all n locations
  Clone ID: LIB3109-028-Q1-K1-D5
cggcccggccgtcgcccacgccttggtgcaagccttccttccggttgggttaagacaccgaatgggggaaaacctttcagggccaaaaatcgttgcccacagtgcatggaatataaggttgtgcaagataagaaagtccttgaagttattgtagaaaaggggatgcataatgggcagaagataacattccctggcgaagctgatgaagcgccggacacaattactggggatatcgtctttgtccttcagcagaaggaacatcccaaattcaaaagaaaggctgaagatctttttgtagagcacactttgtcccttaccgaagccttgtgtggcttccaatttgtgctgactcacttggatagccgtcagcttcttattaaatcaaatcccggggaagntgtgaagcctgattcatacaacgctattaatgatgagggaatgcc

SEQ ID NO: 53033 - DNA, 392 bp, Glycine max
  Clone ID: LIB3109-028-Q1-K1-D6
gggggaaacaaaaacaaaacatttcgtccgaaactaatataacgtgttcctccttggaagaagccatagccataacatagccaccagaaaacaaaacccaccttagttattaaaagaaaagaaaactacataaaattaagctttgttcggtggtgaccatggggagcaccgactcatcaagcggttcacaacaaccgaacctgccacctgggtttcggttccaccccaccgatgaagagcttgtggttcactacctcaagaaaaaaacagcttctgctcctcttccggtagccataatcgccgaggttgatctctacaagttcgatccatgggagctacccgctaaggccgcgtttggggagcaggagtggtatttctttacaccgagggac

SEQ ID NO: 53034 - DNA, 425 bp, Glycine max
  Clone ID: LIB3109-028-Q1-K1-D7
ggagattggatgcgagagttctgagaagaaaagagaagatcggtgagtgaggaagcaaatagcaatagcaccgccaccgtcaccactgccactgccactgccactagcaacagcagaatgggaaccttgggcagagttttctacgccgtcggattttggatccgcgagaccggccaagccatcgatcgcctcggctctcgtctccaaggcaactacctctttcaagaacagctgtctaggcatcgacctctgatgaatctgttcgacaaagctccctcggttcacagggatgcatttgtggcccctagtgcctccctcctcggcgatgtccacgttggccccgcttcctccatttggtatggatgcgttctcagaggtgatgttaacagcattactattggatctggaactaatatacaagacaa

SEQ ID NO: 53035 - DNA, 421 bp, Glycine max
  unsure (1)..(421): unsure at all n locations
  Clone ID: LIB3109-028-Q1-K1-D8
gtagtaagggaggaaccagcattgaagaccttgcggagaaatttccggacatgattataaaggtacctgttgatgtttttgaaggtattactgatgaaggtgctgcaaaggttgttgatggtttggctctcaaagtggctgatagaaataagtcgattgaacaagtgaagaatttgtataaactttttgttgattgtgactgcactcttttggaaatcaatcccatagcggagacagctgataaccaattggtggctgctgatgctaagttgaattttgatgataatgctgcatatcgccagaaagagatattttctctccgtgatacaacacaagaggaccctcgagaggtgactgctgcaaaggcagatttaaattatattgngttagatggagaaattggctgcatggtgaatggagc

SEQ ID NO: 53036 - DNA, 412 bp, Glycine max
  Clone ID: LIB3109-028-Q1-K1-D9
ggctgagaaaattgcgacgcggaaacacgcgcatcttcacgatcctggaatccaccgcggcgtatccagcgattccgatctccgacgagtctgcgcaggcgaagaatcgcgaggccagccgccggtgaagaatcgcgcgatttgtctggaaatcgcgattcagccacgattcatccccgatactgagactcaaccacgattcaggaagaaaaacgagacaacctccgattcgtatcggtagcagttggaatcatatcgaatcgggcgatacatatcgtgaatcgtacggttgtgtcctaaaaatggcactggttgtaatgtgtgggcaaccatgcagtggaaagtccaaagctgcagtctgtctcgccgaagctctcaaagaatcagaatcaaaacttcaagtgagaatcat

SEQ ID NO: 53037 - DNA, 400 bp, Glycine max
  Clone ID: LIB3109-028-Q1-K1-E1
gggtctctacttcgcatttccgttctttgctttgctcgggctacgaaaaacgacgtcgttttcccaattttccccggcgaccgggaaatggtggagccggtggagcttcgcggcgaggagcagctctcgttgctgtcagattccagcaatggtgaccggtcgtggcggttggacttcgacgggtttcagctatcttcggagcacacggagaagcaagtgaaaccccctcgcggactccatgactgttatggggttcttggtcaagaagataatattgcggagtactatcagcagcaggtagaagtgcttgagggctttactgaaatggatgctttagcagagcgtggttttattcctggaatgtcaaaggaggagcaagacaagttagcaagaagtgaga

SEQ ID NO: 53038 - DNA, 399 bp, Glycine max
  Clone ID: LIB3109-028-Q1-K1-E10
gatagaagaagcagaaagagaagcattagcaaaagcaagaagaactagtctaagcagaaatggcctcttcagtgatggcatctgtggccctcaaacctgcccctttcactgttgagaagtcctcagttagaggccttccctccctctcaaggaactcctcttcattcagagttgtggccagtggtggcaagaagatcaagactgacaagccttatggaattaatggtggcatggctttgagggaaggagttgatgcatctggcaggaaaggaaaggtttgtgcctcattaaatcttagtacataattaacaatatgtttttttgttaaaatgatttcattcctctaaactgggggtataagtcaagtaatatagtcattgatgagaaaatcaacacttc

SEQ ID NO: 53039 - DNA, 390 bp, Glycine max
  Clone ID: LIB3109-028-Q1-K1-E11
ggctgaagacatcatcacagaacaagtcaagctgtgtctacaagcgccacaagaacactgctttctcctggctcaggaacatcttccatgactgtgctgttcagagttgtgatgcttcactgttgctggactccacaagaaggagcttgtctgagaaggaaacagatagaagctttgggttgagaaatttcaggtacattgagaccatcaaagaagctttggaaagagaatgccctggagttggttcatgtgctgatatcctcgatctctctgccagagatggcattgtttcgctaggaggtccccatatccctcttaagactggaagaagggatggtagaaagagcagagctgatgtggttgagcaattctctccagaccacaatgagt

SEQ ID NO: 53040 - DNA, 420 bp, Glycine max
  Clone ID: LIB3109-028-Q1-K1-E12
gacaagtgagtttgttgatcgagataactagaaacagtgtgatgaaaatgaaggtccttgttttcttcgttgctacaattttggtagcatggcaatgccatgcgtacgatatgttccctctccgaatgaacactggctatggtgcccgtactccggaggtgaaatgcgcaagttggaggcttgctgtggaagcacacaacatctttggctttgagaccattcctgaagagtgcgttgaagcaacaaaggaatacatccatggcgaacaatatagatcagactccaaaacagttaaccaacaagcttacttttatgccagagacctcgaagtccatcccaaggacacatttgtgttcagtatagatggcaccgtactctctaatattccatactacaaaaaacatggatatggggtggaga

SEQ ID NO: 53041 - DNA, 422 bp, Glycine max
  Clone ID: LIB3109-028-Q1-K1-E2
ggttctagtgtgtgattgtttgtcgttgtaactcgttcttcttcttttgttgttctgtgtttgtgtttgttttttctctcacctgaaaatgtcttgctgcggtggtaactgtggttgcggaagctcctgcaagtgcggcaacggctgcggaggctgcaagatgtacccagacttgagctacactgagtcaaccaccaccgagaccttggtcatgggagtggcacctgttaaggctcaatttgagggtgctgaaatgggtgtgcccgctgagaacgatggctgcaaatgtggaccaaactgctcctgcaacccctgcacttgcaagtgaggtgttgggagagcaagcttcaagcagagatagcccttaattaggaataatgataaactattaatgtgtagctaaaaacttatgtattatgtct

SEQ ID NO: 53042 - DNA, 417 bp, Glycine max
  unsure (1)..(417): unsure at all n locations
  Clone ID: LIB3109-028-Q1-K1-E3
ggagactcgaagtgtgaagcactgagcagttgaggaaatgggaacccttgngagagcgatctacagcgttggtaactggattcgagaaactggacaggccattgatcgtctcggttcccgtcttcagggcggttactacttccaagagcagctctctaggcatcgaactctgatgaacatatttgataaggctcctgttgttgataaggatgtatttgttgcgccaagcgcctccgtcattggagacgttcaacttggaagaggatcatccatttggtatggagttgtcttgagaggtgatgttaacatcatcagagttggaaatggaactaacattcangacaactctctggtgcatgttgcaaagtcaaatttaagtgggaaagtgttgcctacaattattggggataatgttac

SEQ ID NO: 53043 - DNA, 248 bp, Glycine max
  Clone ID: LIB3109-028-Q1-K1-E4
ttaacttattcacaactaacacccattatctctaattcccctcttcacaccaactctacttcaaatcattctctagcatccaactatcctaacatatttaataatgctactgcatctataaagattatccattctccaaacgcctccaatattataaacattcaacttagaataacatcatccatatggtatagaattgtccaaagaacaaatgttcacactcctaagagaccaaatatatctaacat

SEQ ID NO: 53044 - DNA, 421 bp, Glycine max
  unsure (1)..(421): unsure at all n locations
  Clone ID: LIB3109-028-Q1-K1-E5
gggaggcaacccgaacgagggttttcaagctggggcgggtgggtcttttttccgtgacacagcacanacaaattctcagtgttggagacttgagctcatagagaaatcatagtttgtttaatttcaattctgagcaaaggtcaacatgcaagttttttccattgaaggcgaaagtgctttgtcagttgttggtccaaggccaatggaatggtctactgttccatacaatgcccctcaagctcctgggccaaatggaaagcagcggacctcaagtttggaatcaccgatcatgttgctgtcaggtcaccagagtgctatatataccatgaagttcaatccagcaagatcagtcattgcatctggatctcatgacagggaaattttcctctggaatgtgcatggngattgcaagaacttcatg

SEQ ID NO: 53045 - DNA, 366 bp, Glycine max
  Clone ID: LIB3109-028-Q1-K1-E6
ggaagatacggaggctgctgctatcgaatactcggataaggagggtaagggcggtgaactgcactacttcaatccccttttctctcttctccttttatttcatcactctcttcggtcctttcttcttctccaaagttttcaattttcacacttttcgagtaagaacatcttttcaatggcgtcccaaattacccgtgagtggtctggaatcaatacattcgcacctgctacccagactaagttgcttgaactcttgggaaaacttaaacaagagaatgtgaactccttaactatacttgtgatgggaaaaggtggtgttggaaaatcttcaactgtgaactccatcattggggatagagtggtttc

SEQ ID NO: 53046 - DNA, 411 bp, Glycine max
  Clone ID: LIB3109-028-Q1-K1-E7
gacacaaagagacaattttcccaggacacctaagtctgcaagggaccaagctaggatttttaaaagcttccaattacagttaatatggagtcacattcaaaccaaaccttttgctagttcctctccaaggcatattggatggccaagatgacagcgaagagctcaacatagaggagagattggaaaccaatataggcggagaaacacccaagagatgcacccgtgtggttcctaaagatggcaccgctgctatagcctgtcccggagacccgcccctccattaaaaaattattggtatttaagatttttgcatgcacacggataattgagagcaaaaataatttagttattaagacaaatttaaaataaaaataatatcattgaaaattaaaaacatcagttgatctgatt

SEQ ID NO: 53047 - DNA, 423 bp, Glycine max
  Clone ID: LIB3109-028-Q1-K1-E8
gacagaacaatagtagcaagcagagccccaagacgagcttcaccttgcgccgaagggccacagatggttgaaaccgatatggatgccgaaactgttgcaaatgtggttccaccaaaggagactccaaacagtgttcccatctcttatcattcctcacactcacaccctcctcttaatgagaggattatttcatccatgaccagaagatctgttgctgcacacccgtggcacgaccttgagatagggcctggtgctccaacgatcttcaattgtgtgattgagattgggaaagggagcaaggtgaaatatgaactggacaaaaaatcgggtcttatcaagatcgaccgtgttctttactcatcagttgtgtatcctcacaattatgggtttatcccacgtactatttgtgaggacagtgatccc

SEQ ID NO: 53048 - DNA, 445 bp, Glycine max
  Clone ID: LIB3109-028-Q1-K1-E9
ggaaaacgggggccgaccgcacgcgtccgcgcacgcgtgatcagatgtcagattacgactgaacggggattggtcgaatggtcggaaaagaatgttttactaactcccattgcttatttattattgaatcaaccgatcaacttgcttcggtatcgaacatttctttttgatttcaaaaattttccggaaaaaatttgaatctatttttatatgctaatcaattctactacttctgatcctgatgttattgcgcttgaaaaaaaaaatctgtgacgtatcgcccaaataatttgatacagactatatgtatcttttaccccacataagatgcctaatatttacaacactctgatagttaaaggtcgagatactcttggtcaacaaatttatgtgacttgagaagtacagcaactattaggaaataatccaattagagctgtagcta

SEQ ID NO: 53049 - DNA, 427 bp, Glycine max
  Clone ID: LIB3109-028-Q1-K1-F1
gggagagggaaaagagttgaagacttgaagtgaagaaagaaagaattgagaaaggatagggtttagggttggcaaaggaaggaagggatggaagcagctgtggtggacgtcggctctaagcttctcaaagcggactttgcaattcctgaccagactcccgccatgataattcccactcagatgaagcaattgctcgatgatggatcagtcactgatagttcactggctgacaatgtcgccgttgatcccgtcgtgcgaggatttattagagattgggatgccattgaagatttgttgcaccatgttttgtatactggcctcggatgggaaattggcaatgaaggacaaatactatttactgatccactttgtacccctaaggcgaacaaagaacagttggtgcaactaatgtttgaaacattcaaca

SEQ ID NO: 53050 - DNA, 420 bp, Glycine max
  Clone ID: LIB3109-028-Q1-K1-F10
ggatatcaacagcatcaccagtgttggagggatcgttgaccaaggcttaggcttcataggcagtgcagtcgatgcacttacttttgcagccaccaaaatctccatccagttgattagtgctaccaaggctgatggtgggaaaggaaaaattggaaagagtacaaatttaagaggaaagataacattaccaaccttgggagctggcgaacaagcatacgatgttaattttgaatgggacagtgacttcggaattcccggtgcattttatattaagaacttcatgcaaaatgagttctacctcaagtctctaattctcgaagacattccaaaccacggaaccattcacttcgtatgcaactcctgggtttacaattcaaaaaactacaagactgatcgcattttctttgccaacaatacata

SEQ ID NO: 53051 - DNA, 393 bp, Glycine max
  Clone ID: LIB3109-028-Q1-K1-F11
gacacaccgtttgtgcgattcttaactcaacttctgctacccactctcttcttccaagtccaaccacgcttttctctacagtcatgggcaaggtcaagatcggaatcaacggatttggaagaattggccgtttggttgccagagtcgctctgcaaagagacgatgtggagctcgttgccgttaacgaccctttcattaccaccgattacatgacatacatgtttaaatacgacagtgttcacggacactggaagcatcacgatgtcaccgttaaggacgagaagacccttctcttcggtgacaagccagtcactgtttttggacacaggaaccctgaagagatcccatgggggtcaactggagctgatatcattggtgagtccaccggagttt

SEQ ID NO: 53052 - DNA, 415 bp, Glycine max
  Clone ID: LIB3109-028-Q1-K1-F12
gacactaaacaagttaaaagaagagcatgactgaactaacaaagcaaccctatgtcgaaggtggtttgtgtcaccggagccagcggcgccatcggatcatgggtggtcctactcctcctccagcgtggttacaccgtccatgccaccgtccaagatatcaaggatgaaaatgagacgaaacatttggaggaaatggaaggagcaaagagtcatctccatttttttgaaatggatcttcttgacatcgactccattgccgctgccataaagggttgttccggcgtaatccaccttgcatgtcctaacatcattggtcaagtcgaagatcccgagaaacagatattggaaccggcgataaaaggaacggttaatgtgttgaaagcggcgaaggaaagcagggtggagcgcgtggtgg

SEQ ID NO: 53053 - DNA, 429 bp, Glycine max
  Clone ID: LIB3109-028-Q1-K1-F2
gcctaagaatgatggtaaaacaggtgccacagaaactagttttcttaggtctggatgtaacaaggatgatgctggaaactgttctcaaactagttctgtttatggctctcaacttagttcatgggttgagaatagtgggagtgtgaaatgtgagaatagtgcttcaactagatactcaaagaggccagatgaagcttgcaagccaaatcgtaaaaggcttaaacctggagagaatcccaggcctcgaccgaaagatcgtcaaatgattcaagatcgagtgaaagagttacgagaaattgtgccaaacggagcaaaatgtagcatagatgcacttttggaacggaccattaagcatatgcttttcttacaaagtgtgacaaagcatgctgacaagctgaaacaaacaagggagtctaagattattaataa

SEQ ID NO: 53054 - DNA, 412 bp, Glycine max
  unsure (1)..(412): unsure at all n locations
  Clone ID: LIB3109-028-Q1-K1-F3
ttggggtgtaacaggaattgacggaggcatgcgaaatcggtgaagatggttgctatgaggtttcatcagtaccaggtggtgggaagggctcttcctaccgaatccgatgagcatcctaagatctaccgcatgaaactctgggcaactaacgaggtccgtgccaaatccaagttctggtattttttgagaaaattgaagaaggttaagaaaagcaatgggcaagtgctagccataaatgagatttttgagaggaatcctaccaagattaagaattatggaatttggctgcggtatcagagtcgtactgggtatcacaatatgtacaaggaataccgagatactactctgaacggtgcagttgagcatatgtacaccgaaatggcgtctcgacatanggtgaggcatccatgca

SEQ ID NO: 53055 - DNA, 377 bp, Glycine max
  Clone ID: LIB3109-028-Q1-K1-F4
gggaaatgaaaagtatgaagcattaatcacttctcttccctcgtttcagttattgggaaatttttgctgctgtagtctttgctgttttgattcatttccagttcatcattgggagatattagtatttgggagttacggtgtttgctcaaagatgattactaacccttcattgcatgcttcaacattgccaagtgctttatcttcatctctgattactctacatggaagttctgtaaagtgtatgccctgccttccatttagagccctaagaaaaatcaactggataagagctacatctgctgcagatggagggcctattgagtcatcgccagctttgggatcaaaaaatcctcttgcgggtggtttggacattcctc

SEQ ID NO: 53056 - DNA, 426 bp, Glycine max
  unsure (1)..(426): unsure at all n locations
  Clone ID: LIB3109-028-Q1-K1-F5
ggagtcanattgagaagaaaaatcttcaattgtgggtcctgaacccacttgattcaccccaactcaataattttagccaccagtgtgtagataacttaagccaaaacaactcaccaattcttttggataccaccttccatatattgatattgcaaaagatagttaaatttcattccgaaacaatgatcaacaaagtcgcagctctattagttgttttgcttttcatcattgctgctttggcttctgatcctgatccagtaatggacttttgcataggccaatcaccagacaatagcttcaggtgcaagaactcatgtacagcaacagcggaagatttcacctattgtggcataaagactcctgggaacttcaagcaaactggattctcttctatggcagtgaattcgaatgtctcttccggtttga

SEQ ID NO: 53057 - DNA, 413 bp, Glycine max
  Clone ID: LIB3109-028-Q1-K1-F6
ggttctagtgtgtgattgtttgttgacgtaactcgctcgtcttcttttgttgtgctgtggttgtgtttgttttttctctcacctgaaaatgtcttgctgcggaggtaactgtggttgcggaagctcctgcaagtgccgcaacggctgcggaggctgcaagatgtacccagacttgagctacactgagtcaaccaccaccgagaccttggtcatgggagtggcacctggttaagctcaatttgagggtgctgaaatgggtgtgcccgctgagaacgatggctgcaaatgtggaccaaactggtcctgcaaccactgcacttgcaagtgaagtgttgggagagcaagcttcaagcagagatagcccttaattaagaataatgataaactattaatgcgtagctcaaaacttatgt

SEQ ID NO: 53058 - DNA, 364 bp, Glycine max
  Clone ID: LIB3109-028-Q1-K1-F7
gaccacaaattacatagtaactctttttctcgaatccacagagtgagactcatcgtgtgaacaacgataacggcatgtttgagcgtacttgaaaaatttgagcggccatggacgaaaccgccgtaacgacgaagcctgattggctcaacaaccgcgcgagggtcgccggagagagaaccgaagaatttttctgtggcggcgacgacgaagaggaatgcgacgacgaggcttgggacatgttgactcggagcttctggcaggcgcagactgtgctggacgagaaccgtgcgctgatcgacgaagtgaacagcaaccacgagtcgaagattcctgacaacatggcgaagaacgttggcctcattac

SEQ ID NO: 53059 - DNA, 407 bp, Glycine max
  Clone ID: LIB3109-028-Q1-K1-F8
gaaagaggaattaccattgatattgctttgtggaagtttgaaaccaccaagtactactgcacagtcatcgatgcccccggacatcgtgactttatcaagaacatgattactggtacctcccaggctgattgtgctgtccttatcattgactccaccactggtggttttgaagctggtatttctaaggatggacagactcgtgagcatgctcttcttgctttcacccttggtgtgaagcagatgatctgctgctgtaacaagatggatgccactaccccgaagtactctaaggctaggtatgatgaaattgtgaaggaagtctcttcctacttgaagaaggttggttacaacccagacaagattccatttgtgcccatctctggtttcgagggtgacaacatgattga

SEQ ID NO: 53060 - DNA, 407 bp, Glycine max
  Clone ID: LIB3109-028-Q1-K1-G1
ggaggaaaagatagaaagaaaaaaaaacagcgcccgagatttgctcttctttgcttcggaagaaagagaaaaacaaataacaatggcgttcgcttctttcctcggcagagttctcttcgcttccgtcttcatactctctgcttaccaagaatttaacgaatttggagttgatgggggacctgcagcaaaagcactcagacctaagtttgatgcctttacacatcgagtgcattctcaagttggctttcaacttcctgagattgatctgaaatttttaattgctggggctattgctctgaaaggccttggaggggttcttttcatatttggcagctcttttggagctttgcttctgctcctgcaccagctgattgctaccccaatccattatgattgttacaattatg

SEQ ID NO: 53061 - DNA, 376 bp, Glycine max
  Clone ID: LIB3109-028-Q1-K1-G10
ggggggcacgggggttggtaacggcgaagaacgtcattaatggaagaagagaaagaagcagtgatggtaacaccgggagaagtgttgggtagaaccagcgatgtcaaagctggaagaggagcatacgcggcgcttcacaacaacaccgtatacgcctccctaaccggcttccgccacaccgtacctcccgcccccgactcttccgacctgagaccgactgttgaagtaactggtcacaaggcccatggacctgttccacagcctggatctgtagtcattgctcgggtcaccaaagtgatggctcggtccgcttcagctgatattatgtgtgttggaccaaaatctgttccagaaaaatttactggcattattaagc

SEQ ID NO: 53062 - DNA, 392 bp, Glycine max
  Clone ID: LIB3109-028-Q1-K1-G11
catggaaatttttcgaactgatggcgaacaggggctcaagtatccaccacctaaagtgatgcaggtggataagtctgcatggatgactgatgaagaatttgctagagaaacgattgctggtgtaaatccaaacgtcattaagattcttgaggagttcccaccacgtagcaagctagatacacaagcctacggtgatcatacctgtataataacaaaacaacatttggaacctaacttgggtgggctcacttgtgagcaggctattcaaaacaagaaagctgtcatcttaaaacaccatgactatctcattccatatttgaagaaaataaatgcaactaccacaaagacttatgctaccagaaccatatttttcttggaaagtgatggaactt

SEQ ID NO: 53063 - DNA, 393 bp, Glycine max
  Clone ID: LIB3109-028-Q1-K1-G12
ggaggagagaggagaagagaagctaaagaaagagaggagatgggagtggagaagcagttgttgaggtctggcaccggtccgaagccaattcccggtcagaacgtaaccgttcactgcactggtttcgggaagaacggtgacctttctcagaaattctggagcacaaaggatcctggccagaacccattcactttcaaaatcggccaaggttctgttatcaaaggatgggatgaaggtgtgcttggcatgcaaattggtgaagttgctcgtctccggtgctctccggattatgcttatggtgctggtggctttcctgcttggggaatacggcccaactctgtcttggaatttgaaatcgaagtcttaagtgcgcaatgaaaaccttggtagtct

SEQ ID NO: 53064 - DNA, 429 bp, Glycine max
  Clone ID: LIB3109-028-Q1-K1-G2
gatacaaggagagaaaaaaaagtgtgttccagagaagcatgtcccattaaagtatattatgtcttcaccaaagaaccaccctcaagttagaagcatctctttgctgtagctgtagccaatagtaatacccttccagctggtatacgtaccctccattctatctttatataccctccttccattctcattcctcgtccttcacattctcctctctgaattcctcttattcaggaatttggagagtattgatatatcaaggtaggataaaccagtagccaaggaagatatggagttttctatgattttcattggtagcaacattatgctgcttttcagttcagcatttgccaaaactgctagtcctccctctctgagcccaactccagcaccagcccccgcaccagacttcgtgaacctcactgagttact

SEQ ID NO: 53065 - DNA, 303 bp, Glycine max
  unsure (1)..(303): unsure at all n locations
  Clone ID: LIB3109-028-Q1-K1-G3
gaaatggctctggtgattctggacttgttctctcaactgatgctaagcctagattgaaatggacacctgatcttcatgcaaggtttatagaagctgtgcagcaattangaggagctgacaaggcaactccaaaaacggtaatgaaactcatagggattccgggtcttaccttatatcatctgaagagccatctncagaaatacagattgagcaagagtctgcatggacaaagtaacaatatgacacacaaaataaccataaattcaggtgcagcaacagacgaaagactcagagaaaataacg

SEQ ID NO: 53066 - DNA, 375 bp, Glycine max
  unsure (1)..(375): unsure at all n locations
  Clone ID: LIB3109-028-Q1-K1-G4
acaagggatctggactctaaacaaagtcactgcttctctagttttgcaacatcaatcttggctcagagagaggttgcaacttgcaaatgcaccaccgactgattattgttcaaacttcaaacttcgaaatcaaagtttctgattctgtctatttccgagctcacccttgatttggtttccttatagaggatcaaaagtcaaaatcataatcaactacaacccaccaacaccaccatgcagaggtggaagtggaacagaaagaaaccccccattttccctttgcttgtgcttattttattgnttttcatagccttctcaaccctccacagtgaacacaccatacaacgaatccatgaaaatccagatcatgttcac

SEQ ID NO: 53067 - DNA, 369 bp, Glycine max
  Clone ID: LIB3109-028-Q1-K1-G5
ggttcaccttagaaaaagccacttgacaccatggccacggaaggccatatcaacccattgttcaaattagcaaagctgcttcatctgagaggctttctcataaccttcatctgagatgagtaactctacagagagaaagccacatgcactgttgacaccatatccacttcaaggccatatcaacccattgttcagattagcaaagctgcttcatctgagaggctttcacataacctttgtccacactgaatacaacattaaacgcttgctcaactcaaggggtcctaaagcccttgatggccttcaagactttcattttgagaccataccagatagtcttccccccacatatggtgatggtgatgtcac

SEQ ID NO: 53068 - DNA, 403 bp, Glycine max
  Clone ID: LIB3109-028-Q1-K1-G6
gactcgcagttgtattgttgaacaagggtttcggtgtctgcttcttcactttctctcgttgcaatcgaaaccaaaacaaaaacatgggcagaaaattcttcgtcggtggcaactggaaatgcaatgggaccactgaggaggtaaagaagattgttactactttgaatgaggctaaagtccctggagaagatgtcgtagaagttgttgtgagccccccttttgtgttccttcctgttgtaaaaagtttgctgcgccctgatttccatgtttcggcacaaaactgttgggttcgcaaaggtggtgcttataccggtgaggttagtgctgaaatgcttgttaatttgggaattccttgggttattattggtcactctgaacggaggcagcttttaaatgaatcaaa

SEQ ID NO: 53069 - DNA, 427 bp, Glycine max
  Clone ID: LIB3109-028-Q1-K1-G7
ttgggggtgactcaatagccatgaaaggaaggagtatgctgtactcaaaactagggtgcgaacaatctaaagcaattaggctatttttgcgtatgaaaaggcttagatatgttgaaatcaacatagatgtgttccccggtagaaaggtggagctggaaaagatttctggatctgcttctgtacccaaggtttttttcaatgaaatactaattggaggctggaatgagctaaaaaacctggatgagtctggtaaacttgatgagaaggttgactttcttattactgaagcaccattatttgaagccccatcaccacctctctctggagaggatgatgtgtccagtagtggaccacttgatgaattggcaattattgtccgtaaaatgaaagaatctattgctgtgaaggatcggctgtataaaatgcc

SEQ ID NO: 53070 - DNA, 404 bp, Glycine max
  Clone ID: LIB3109-028-Q1-K1-G8
gggagcaaggcaggatgcgttcagtattttctttgaatgggatgctagttttggaattccaggagcattttacatcaaaaactttatgactgatgagtttttcctcgtcagtgttaaactcgaggacattccaaaccatggaaccattgaatttgtttgcaactcatgggtttacaacttcaggagttacaaaaagaatcgcattttctttgtcaatgatacatatcttccaagtgccacaccagctccactacttaagtacagaaaagaagaattggaggttttaagaggagatggaacagggaagagaaaggactttgacagaatctatgattatgatgtctataatgatttgggcaatccagatggtggtgatcctcgcccaatccttggcgggtctagca

SEQ ID NO: 53071 - DNA, 295 bp, Glycine max
  Clone ID: LIB3109-028-Q1-K1-G9
gtgcacaaatgactatattcatttacgcgccgttaaattttgatcagctatcgctactcttaaacatctatactataaaaagaattactcatttaattcttctcagacagaaaattctaaatatctttcatccaaacaggcactctttaatttggctcaacttcttcagtatcatcaggattccttacatgcaaagcttaatataacataaactgaatacccctgtttcatttttcacacctcatatactacaacactcaatacatgattacgtctcaagtttccacatttaaca

SEQ ID NO: 53072 - DNA, 363 bp, Glycine max
  Clone ID: LIB3109-028-Q1-K1-H1
gggttaaacaaggaggtaccaaatattgttagtgaatttgttgggggcaccaatttagaaattcacgagaggtacaaaactatcacggaaaagaacattggaaggttggaccagccttctcaaaactcaagagaatatgaatctactattggcatatgtctagagaaaagcctgagtgctgcattagattcttttgataatcttttttgtcgccgctgactgatttttgactgtcagatgcatggctgttctcaacctttaatatatcatagtgaaaagcagacagtttggtctgatcctgaaagagacaggaaaccttgcagtgatcagtgttaccttcagttaaaggtagtgaaaaatgtg

SEQ ID NO: 53073 - DNA, 382 bp, Glycine max
  unsure (1)..(382): unsure at all n locations
  Clone ID: LIB3109-028-Q1-K1-H10
ttttgggactataaggcgngctaccacacccgcgccatcgacggcttataaaaacccactggccccacaaaactctatttcaacaatgaacgggttcaatgctcaagatacttctgggaagaaaaaacgtggatcaccgtcgcgccacaccaaatcatctgtaaataagcctaagaaaagtcaagagccacctgctgatttaagtggattaattggtattagccctgcccaaacagaagatggtatccgtgaagtggttaatattgtgctcattgcctatgatgcacttcggagaaagctctgccaactttaaaaggcaaacgaattgaactcaagttcgatcaagcgtgcagattttaaagcttgcaatactttgaagacc

SEQ ID NO: 53074 - DNA, 375 bp, Glycine max
  Clone ID: LIB3109-028-Q1-K1-H11
gggcacctgacaactaagaagagaagagactcaactcaacaatggcttcttctattcagtgttcagtttgggttccttcccttcccaacactaacaccattcgctttctttctgttaacccaaactctgttactttctcttcttcttcccttaccagaatcagagcctcctcttcctccccaaccgtcgaagaagccgctatgaacatcgacaacctccgacgtttcatcaaccttaactccggaaagtggaacggctctttctatcaatttgattcatgtgggaatatgttgcaacaactgagtaccaggctttctgctagctcttatggggaagatgaactcatgagtctcattcaaacgctgtatattaaac

SEQ ID NO: 53075 - DNA, 360 bp, Glycine max
  Clone ID: LIB3109-028-Q1-K1-H12
gatgctgaagcaaggaggatgcggggcaagaaagccaaggtgaatttcccggatgagccttcaggcgctgctgcttcctcaaaacgcctcaaggtgaatccagaggctcagccaatgaaggaaaatctgaacaccgtgaagccgaaaatgaaccagatgttcaattttggtcacaatctggagggctactacagcccaatagatcaggtggaacagaaaccactggttaaccagtatgttaaccctgccccgttccctggaaacggagttcaagtctcacctgttactccatctgctgatgttactgcttacttcagctctgagcattcgagcaactcgtttgattattctgaccttgga

SEQ ID NO: 53076 - DNA, 191 bp, Glycine max
  Clone ID: LIB3109-028-Q1-K1-H2
gttaccggtttggatcaaaagacccttctcttgggcgacgggccagtcactgattttggacacactaaccttgaacagatcccatggaagtctactgaagcttacatcattctttaatccaccagaattttcaccgataaagattatgctgccgcacatttgaaggatggtgcatagaaagctattatttc

SEQ ID NO: 53077 - DNA, 430 bp, Glycine max
  Clone ID: LIB3109-028-Q1-K1-H3
gatggatgaggagtacgatgtgatcgtgttgggcacgggtgtcaaggagtgcattctcagcggtcttctctccgtcgatggcctcaaggttctgcatatggataggaacgactattacggaggagaatccacttcgctcaatcttattcagctttggaagagattcaggggagatgacaagcctcctccacatttgggcgctagcagggactacaacatcgatatgaaccccaagtttattatggctaatggcaatttggtgcgggttctcatacataccgatgttacaaagtatctctatttcaaagctgtggatgggagctatgtgtttaataaaggaaaggttcataaggtgcctgcaaacgacatggaaggcctgaagtccccacttatggggctatttgaaaaacgccgggcacgcaagtttttc

SEQ ID NO: 53078 - DNA, 428 bp, Glycine max
  Clone ID: LIB3109-028-Q1-K1-H4
ggaagcggaagtacattgttgtctcagccaggtggttactggtgctgttattatggaactcaaacaacaacttcttcttctgattctaacgcttctttttgctactgctacgcctcaatacgttcgacctcttcctcgtaaaaccttaaccatcccatgggattcaatttccaaggcccactcctcttaccctcaacaggtacacatttctttggcaggagacaagcacatgagagttacatggataaccgatgataaacattcaccttcatatgtagaatacggaacattgcctgggagatgtgactcaatagctgaaagagagtgcacctcttataactatctgttatacagctcaggaaagatacaccatgctgtaattggccctttggaagacaataccgtgtacttctaccgatgtggtggaa

SEQ ID NO: 53079 - DNA, 408 bp, Glycine max
  Clone ID: LIB3109-028-Q1-K1-H7
gatagatagagagcgcggcagggcctaaacttacccttcttcgctctgtgtgtgtgcgcatcaaacgcaaccagaagcagccatggccactgcaagaactgtgaaggacgtttctcctcatgagttcgtcaaagcttactcttctcacctcaagcgatctggcaagatggagctgccagagtggactgatattgtgaaaactgcaagatttaaggagttggctccttatgatcctgactggtactatgtcagagctgcttccatggcaagaaagatctacttgagaggaggacttggtgttggtgcctttcagaggatttatggtgggagcaagaggaatggtagccgccctcctcatttctgcaagagcagtggtgctgttgctcgtcacattcttcaacaagtgca

SEQ ID NO: 53080 - DNA, 470 bp, Glycine max
  Clone ID: LIB3109-028-Q1-K1-H9
gggccgacccacgcgtgcgcccacgcgtccgcccacgcgtccggcgagtttacgacagaagggggataagagcgagcaagggagagacaaagagtgattcagagggagaaagctccctcgcacaaagcaatgcctgccatcacctgaattctatgctccttttccctttatccgcattgctctcttctctttcaccgttttttgtctctgaatatccaagatcttcaaggacaatgttatctctgagaaacatttttctgaatagcgcttgatccggcgtgaagcattcaattgttgataatttactgcttcactttgggctgtgcgagtggagcagcctattttactattaaaggcatattctcttacaaggtataaataattcttatgcatgtatttgcaagatgcattatttttattttttttaataatcaccattgtaatttattccaattgttatgacatttttt

SEQ ID NO: 53081 - DNA, 383 bp, Glycine max
  unsure (1)..(383): unsure at all n locations
  Clone ID: LIB3109-029-Q1-K1-A1
ggcacaaaaatacaatacaaaacaaaacagagcagggagagagtgtgtgaaaagtgaaacaaaaaacagaacaacaatggcgacacttaaggttcctcagcctcttccccccgttgcagatgattgtgagcagctccgaaaagccttctcaggttggggaactaacgaggagctgattgtatcgatctcggctcataggaatgctgctcagaggaagcttatcagagaaacttatgcccagacctatggagaagatctcctcaaggccttggacaaagaactcacgagtgattttgagaggctggttcatctttggacacttgattctgctgaacgtgatgcatttttggcaaacgaagcccggnaactaaaaaatggactta

SEQ ID NO: 53082 - DNA, 404 bp, Glycine max
  Clone ID: LIB3109-029-Q1-K1-A10
ggagagaaagaagagaagatgagacatagtgcttcctccactgatattctctgcttctccattccctgaaccaaaattttcaatttttaatacatataaacttctggggttgtttgttgttgtaaaagttgaaggcttttggggggtgtctgatccattaggatcatcatcattcatcagcacatggcaaagccaggggtgttggagtctgatccaggggtgatggtgaagaaggccaaagagttgaagagggagcttcagaggttggtgaagtctattgtgcatgatgaggattgcagcactgagaccattgatcaggccaaagagactctctgtgttctcaaggagttgaagctcagaaacaggtcttcactgtctctgaagcttcacaacaagagtgtcgc

SEQ ID NO: 53083 - DNA, 404 bp, Glycine max
  Clone ID: LIB3109-029-Q1-K1-A11
gggttttgaatcggggagatgagtcacaacaacagctacaacgatagagcgaggtaccctatcgggatgggacttgtgcgcgggggtttcaattcgaacctgagccagaacccgaaccagagccagaacccgagcctgaaccagaatcatcacgcgttccaggctcggacgacgtaccaccaacagcaacaggcgcaatatgtgcagaggcatttgatgcagcagcagcagcaacagcagcagtggctgagaagggatgccaacgccgtcgacgaggttgagaagaccgtgcaatctgaagccgtcgattcgagttcccaagattggaaagcaagactaaagattccaccagctgatactcgctacaagacagatgatgtaacggctacttaaggaaatgagtt

SEQ ID NO: 53084 - DNA, 347 bp, Glycine max
  unsure (1)..(347): unsure at all n locations
  Clone ID: LIB3109-029-Q1-K1-A12
ggcgaagaagagtgaaagagaaaatccgagactctgattttgagagtcgagtgagtgagtgctgcttcctctgaatcaaatcattcatcactctctctggttctgagtttctgacaccaaaatggtgaatcctcgaattccacgttcaaggatcccaactttcacacctttcacttctgctatctccatcgccctctgcattttctttgttctctctcttctcttcacttcccattctgattcatcccatcaataccaccacacaggttctgatggtggtgttgcacatggatttgagtcaataaggagatccattctagnctctgaaacagatcctctcaacctcg

SEQ ID NO: 53085 - DNA, 191 bp, Glycine max
  Clone ID: LIB3109-029-Q1-K1-A2
cctcaacagcaccagacattcataaaagctctccaccttccctaaaatcgatcatactctcgcaatcttatttaacaaatgacgtacataccttgccttctaactcaacaatgcataacaaactataccattactaaagtatgtactagcgctgctaaaccgaaattgaaacaaaagcctcttcactggaa

SEQ ID NO: 53086 - DNA, 427 bp, Glycine max
  unsure (1)..(427): unsure at all n locations
  Clone ID: LIB3109-029-Q1-K1-A3
ggttctagtgtgtgattgtttgttgttgtaactcgttcttcttcttttgttgttctgtgtttgtgtttgttttttctctcacctgaaaatgtcttgctgcggtggtaactgtggttgcggaagctcctgcaagtgcggcaacggctgcggaggctgcaagatgtacccagacttgagctacactgagtcaaccaccaccgagaccttggtcatgggagtggcacctgttaaggctcaatttgagggtgctgaaatgggtgtgcccgctgagaacgatggctgcaaatgtggaccaaactgctcctgcaacccctgcacttgcaagtgaggtgttgggagagcaagcttcaaagcagaggnaaatagcccttaattaagaataatgantaactattaatgtgtaactaaaaacttatgtattatgtct

SEQ ID NO: 53087 - DNA, 387 bp, Glycine max
  Clone ID: LIB3109-029-Q1-K1-A4
gaggaattggaattagaattgtaaaaaggaaaggggaaggaagcaaggcaaggaaggagagtggatcgattcctcagcagcaccagacatttataaaagctctttcccttccctcaaatcgctcatactcttccaatcttttttttttttttttttttttacctttctccctcgctcaataatacaaaacaaaaaagaagaagaagaaggttttcgcgatggcatcgaaacggatcttgaaggaactcaaggatctccagaaggatcctcctacctcttgcagcgccggtcctgttgctgaagacatgtttcactggtaagcaacaattatgggtcctccagacagtccttatgctggagggtgttttttttcctagtcactattca

SEQ ID NO: 53088 - DNA, 245 bp, Glycine max
  Clone ID: LIB3109-029-Q1-K1-A5
tggggtaagagtggagtaatacttgtgtatggcacataataggaatgccaggccactttaaactactccttaggtgtgtgccaatgaatcatttgggtatcttgcatggcttgttttgaagcctatccataaaggagcagtgcctagcttcaactttgtttcttgttctttatattcggttggtattctattgcactttacctagatctttggatggatacttgatgatcttgaaattgcttttt

SEQ ID NO: 53089 - DNA, 385 bp, Glycine max
  Clone ID: LIB3109-029-Q1-K1-A6
ggagtagcgatggagaagaagaagggtgaggtaaagtcaattttgcttgctttcctttgcactagtcacataatcccgctagtggacatggccagactcttctccttgcacgacgtcgacgtcaccatcatcaccaccgcacataacgccaccgttttccaaaagtccatcgatttagatgcgagtcgcggtcgccccatcagaacgcacgttgtcaacttccccgtcgcacaagtgggtctccccgatgggatcgaagccatcaacgtcgatacgcctcgggaaatgacccccagaatctacatgggcctatcccttctgcaacaagtcttcgaaaaactcttccatgacttgccccaaaaccggatttcatcgtcaccgacat

SEQ ID NO: 53090 - DNA, 418 bp, Glycine max
  unsure (1)..(418): unsure at all n locations
  Clone ID: LIB3109-029-Q1-K1-A8
gaagtacaagcagagagttacaacacataggtcttggtcttttccctttttcctaggcacagcacacgccctctcaaatagaaactgagagatgaattctgatcagtttcagaagaacagcatgttcgtagaaacccctgaagatggtggcaaaaacttcgacgatgatggacgagtcagaagaacgggtacatggataactgcgagtgcccatatcataacggcagtgatagggtcaggagtgttgtcacttgcatgggcaattgcacaaatgggttgggtggctggccctgccgttctctttgccttctctntcatcacttacttcacttccactcttcttgccgactggttaaatttcgttcacctgatcctgttcatggcaagcgaaactacacctattccgatgttgtcagat

SEQ ID NO: 53091 - DNA, 356 bp, Glycine max
  Clone ID: LIB3109-029-Q1-K1-A9
ggataaattgaagtatagattgaacgcgcacatagaaacccaacaacaagaatgaagaagatgattctaaccctattgttcaatatcatgatatctgtcctctccctcatgccacgcctccgaggtggatttctgcgtagcagactacacaggccccaatggccccgcaaggtactcatgccagagcccagctgcggtcacggtggacgacttcgtatactacagccttggcaccgacggcaacaccttaaacattatcaaagccgcagtgacgccggcgttcgacgcgcaattgcccggcgtccacgggcttggaatctctattgcacgcctagacctatcaaccggtggagtca

SEQ ID NO: 53092 - DNA, 392 bp, Glycine max
  Clone ID: LIB3109-029-Q1-K1-B1
ggaagcagtgatggagtcactgaaggacctggaagtacgaaatccaaatgcagaacaaccaacaagtagtgttagttctgtgtatgtagatgctgtagagccgtctgataaagatgcttcttcaggagagatttcgagaccggtggagacagaatcttcctcactcaaacacaccacagagtcaaaattcaaaaccacttcctcgacatcagaagaatttgagccattgaacggtgagtcaaattccatttcagtgaaacattcccaaaatgtggtgtcggagccaagtccagtaccaagtgtttcattagaaggaccagcacatctgcagctgcagccaccaccatcggcacctactgacaacccccattatcagtaactgagtccagcaa

SEQ ID NO: 53093 - DNA, 408 bp, Glycine max
  Clone ID: LIB3109-029-Q1-K1-B10
ggtactttgtagtagcaagcgagcatgggtccgaaggagggtcttctcctttgcggggacttcatggaagactatgaagccatggttccatttcaagcattgcaagccttcggtctcgccgtcgacgccgtctgtcccggaaagaaatccggcgatgtctgccgcaccgctgtccatgtacttgccggcgcccagacttatagtgagacagttggtcacaatttttcactcaatgcaacgtttgatgaagttgatgctgcaagctatgatgggttgtgggtgccaggtgggagggctccaaagtatcttgctcatgttcctggtgttgtggaactggtgaccaagtttgtcagtttgggaaaacaaattgctagcatttggcatggacagttgattctggctgctgct

SEQ ID NO: 53094 - DNA, 289 bp, Glycine max
  Clone ID: LIB3109-029-Q1-K1-B2
ggattttaaggttgacttagtaagcacgacctcgtggaatagactgcaaatctttcacatcgcactcatcaccactgctaccgtatataccttccaacacactccaacaacactcgtaataatcaactgttgaaccctaacctcaacgatcctgtcctttaccaacaatccaccgctccaaaatgggcaaatccgacttcaccacctccgactgcgcccatgttctcctcctctatttcaatttcccatcaaccgcatacatcaaaaccctcacaataacctcctacac

SEQ ID NO: 53095 - DNA, 253 bp, Glycine max
  Clone ID: LIB3109-029-Q1-K1-B3
ggaggataagaaactagtggtgaaggagatcaaaactttggctggctcttggcagaaagtcttgttttctcgcatctttcgggaagcccatggcggatgttttatagccaaggaagcgtatgggatgtgtgaagatttttctctcttctctgttattcccaattgtgtttacctgttcgcaggggttcttagttggggtttcagcccttttgctcaccaaaaaaaaatttagaaactactgggtgttgctttt

SEQ ID NO: 53096 - DNA, 386 bp, Glycine max
  unsure (1)..(386): unsure at all n locations
  Clone ID: LIB3109-029-Q1-K1-B4
acctcagaagggtggagatccatgtcctggttatctgcttgtttttttcctggaattgcttttattattctgacaggactgaattttcttctctggggcagcaaaagtactggtgctattcccatttccctgtattttgagttgctcttcctctggttctgcatctcagttccacttaccctcattggaggatttatggggacaaaagctcagcaaattgaatatcccgtgcgaactaaccagattccaagggagattcctgcacgtaaatatccatcatggcttcttgttcttggggcaggaactcttccgtttggaaccctnttcattgagcttttctttattcccccctttccagtatctggcttgngaggttctattatgta

SEQ ID NO: 53097 - DNA, 395 bp, Glycine max
  unsure (1)..(395): unsure at all n locations
  Clone ID: LIB3109-029-Q1-K1-B5
ggaggaaacaaagaaattctggtgcatatgctttgttcagcctttatacctggcaatacttttaggtgatcacctagaaagggtttgttgtcaattttgcttagaaagtggaagccattcctgaacctttcaatttttatcactttcccctcacttcatagtaatagcgtaatcatttatttattatttatttatttttatattgttccatccttagaatttgaagtcctttcaagtactcagttcattgcagaggatagatcattacatggatcttgtcttttagtttttggcttttcaagtacctcttgttctttgatttacatgttatgtacatattancccctggaattatttggaataagttgcaaggtatatactttaattagggaatt

SEQ ID NO: 53098 - DNA, 393 bp, Glycine max
  Clone ID: LIB3109-029-Q1-K1-B9
gtaccgagtgataataaaattggaccggttgttggtgatgaggatctctttgctgtagattatgtcacttgtgtgggacaggttataggagtagttgtggccgatactcatgaaaatgcaaagattgctgcacgaaaagttattgttgagtatgaagagctcccagccatcctttcaatacgggatgccatcaatgctagaagttttcatcccaatacagaaaagtgtttgagtaaaggtgatgttgatcactgttttcaatcaggtcagtgtgaccgaataattgaaagggaagttcatatgggacgtcaggaacacttttatctggaaccacatagcactttgatatggacagtggatggtggaaatgaagttcatatgatatcatctagt

SEQ ID NO: 53099 - DNA, 416 bp, Glycine max
  Clone ID: LIB3109-029-Q1-K1-C1
ggcaagtgtgagtgatatttgagcttaaaccctagccgctcttctcttcattcttcactttggaaacaatcataatggcgttctgtaataaggttggaaatgtcttgaggcagggtgctgctcgcagcacacatgcccctgttgcgtccatgcttaattacatccgctgcatgtcttcaagcaagcttttcattggaggcctttcatatggagttgatgaccagtctcttaaggatgcattttctggctttggagatgtggttgatgcaaaagttataactgatagagacagtggaagatcaaggggatttggatttgtcaacttctccaatgatgagtctgcaagttcggcacttctccttttcaatggacgggaaagatctaatgggcgaaacatcggtatctatgcaatgata

SEQ ID NO: 53100 - DNA, 326 bp, Glycine max
  unsure (1)..(326): unsure at all n locations
  Clone ID: LIB3109-029-Q1-K1-C10
gaggaagaaatgagaactaacaagaatcaagagagagaggtgttactacgttagtctatgaacagtcaccccgagagactgaaatttccagaccctcaaatcaaactcttctattctctcatcaatcaatcaatccagttccctctcggataggaatgggaatatatctcagcactccaaaaactgaaaagttttctgaagatggtgaaaatgactgtcttagatatgggttatcatccatgcaagggtggcgtgcaacaatggaagatgctcatgctgcatatactgatctggatgagtccacttcanttatttgtgtctatgat

SEQ ID NO: 53101 - DNA, 366 bp, Glycine max
  unsure (1)..(366): unsure at all n locations
  Clone ID: LIB3109-029-Q1-K1-C11
gagccagaggaacccagaagataaatctttcaaagaaaaaaggagagtgcttagagagagagcaaaacatattattttcattttcatctttttttgagtatcaacaaatggcaaccactgtgatgaccactctcccccaattcagtggtcttagaccccaattctcagctgcccctgtgaagaacttggttgctgcgcaacccatgagtcgcagggggaagggtgcattgggagctcgatgtgactacattggttcatccactaatctgattatggcggcttctacaaccctgatgctgtttgctggaaggtttggattggctccatcagcanacaggaaagccactgcagggctaaagctggagg

SEQ ID NO: 53102 - DNA, 406 bp, Glycine max
  unsure (1)..(406): unsure at all n locations
  Clone ID: LIB3109-029-Q1-K1-C12
gaagacaatctagagaccaggatggctgatcttagcagctacatagtggaatcttgtactagtattagtggctcaaaagatgggtcaacaacatctgaatcaactatttgcagtgtgtgcaaggaggactttaaaagtagacctgcaagggaaacggctaacaatgagatctcttctaagagtacacaaaattctatgcatgaaaaacanagatttgctgctaaacattttcataaattagaagaagacaacataaatgtggcgaccacagaagttgaagatgcttcttgcaatgaaggtttggatagtgctgaagcacagagggaagattcgacctttgaggactcaggtaaatccacaatgtccagtgcatgcagtagcactgataaagataagtccatcaatg

SEQ ID NO: 53103 - DNA, 299 bp, Glycine max
  Clone ID: LIB3109-029-Q1-K1-C2
gacggagcagaggacaagatgggtagtgtgagttatagcaatctgaagaacgccatgatagcattcttggtccctctaccctccatcctattctacctctcattccaatcggccattagtactccttcttcttggtcttctctgtggacatggtgctatcaccaccctctgctattggccaatgtccttttcttcttcaatgtcaatttcctcttctggctcatcggcctaatccaatccagccactggatgattgacccgtattggacagtgatacctgtgatgcttggtcattacta

SEQ ID NO: 53104 - DNA, 418 bp, Glycine max
  unsure (1)..(418): unsure at all n locations
  Clone ID: LIB3109-029-Q1-K1-C3
ggaaggaaggagtaacataaaatggaggttcaatgtgccctcccattccactaacacacatcacatctccctctcgcacgcgacgagggagctccgcttcggaatctcactccctctttctgctaattgacaagatggttgctcagaaattcgttgttgatttgaacaagccccttgtgttccaggttgggcatcttggggaagcctatgatgagtgggttcacgatcctatcgtaagcaaggaaggccctcggtttttccaaaatgattttctcgagttgttcacgcgcaccgcgtggtgggtgattccaaccgtttgggtgccggttgcaagttggttcatttccaactccgtannaaaaaatcaggcctnccttctcttgatgtagctctgctcgtctntcttggcatcctcgtt

SEQ ID NO: 53105 - DNA, 413 bp, Glycine max
  Clone ID: LIB3109-029-Q1-K1-C4
gttggcccattatcgaagttcgggtgttctgttccagcaagcagaagcagaagcagaactcaggtagcgtgcggttgttgggggaaaaatagaaagcgatggcgaatcagggtgctaagaaacgcaaggaagagaacgctcgtcacatggcgaggctccgccaaatcatcatcgcctgcaacgttatctatgttttgcttagaatgttggtgttccattcgagcttcacctggaagcactggattgggttgattgtgacttctttggcatatgttattccctatcaacagctcgcgaagatggcaacccctgcttacgctgaagatggtgaacttttagatggtggatttgatatgtctactgggggtttgtagtttgtggggatttacatgatgtatctacataacatgctt

SEQ ID NO: 53106 - DNA, 423 bp, Glycine max
  unsure (1)..(423): unsure at all n locations
  Clone ID: LIB3109-029-Q1-K1-C5
ggcacaagtgagtttgttgatcgagataactagaaacagtgtgatgaaaatgaaggtccttgttttcttcgttgctacaattttggtagcatggcaatgccatgcgtacgatatgttccctctccgaatgaacactggctatggtgcccgtactccggaggtgaaatgcgcaagttggaggcttgctgtggaagcacacatcatctttggctttgagaccattcctgaagagtgcgttgaagcaacaaaggaatacatccatggcgaacaatatagatcagactccaaaacagttaaccaacaagcttacttttatgccagagacctcgaagtccatcccaaggacacattttggggntgttcagtatagatggcaccgtactctttatattccatactacaaaaacatggatatggggtgga

SEQ ID NO: 53107 - DNA, 208 bp, Glycine max
  Clone ID: LIB3109-029-Q1-K1-C6
tgggactgttcatttgacaagatgggtagtgtgagttggagcaggctgaataacgccatgatagcagtcttggtccctctacccttcatcctattctacctctcattccaatcggtcattaatactccttcttcttggtcttctctgtggacatggtgctattaccaaccctctgctatttgcccattggtctttttcttcttaaatg

SEQ ID NO: 53108 - DNA, 181 bp, Glycine max
  Clone ID: LIB3109-029-Q1-K1-C7
gggaacgaaaatgggtggtagatctggcggcttggggtgcgctacttcctcttacactgagattagaacaaggcgtttgtgcacttctaacaacaccacctttcccttcccccaacaacctcaatcactctctatcgctaaacctctcaaactcatgtctcaacctctgaccaccaactct

SEQ ID NO: 53109 - DNA, 125 bp, Glycine max
  Clone ID: LIB3109-029-Q1-K1-C8
ggatcagaaatcgtacagatacacacttggctgaggaaggtcgcaaaagaaaatggagttgctcttgtacacggagtttggtggttcggccgcggatgaggcagctatggagctgatcgagaaca

SEQ ID NO: 53110 - DNA, 403 bp, Glycine max
  Clone ID: LIB3109-029-Q1-K1-C9
ggaagaagcaaacacaacaaagttcagtcgtctcgaacaaaaagaacaagaaaacaaacacacaaacagacaaacaataatttaaattgttctctggtgttcttgctattaattaatagtaatttccactgctccagttccaaatatatatacttactagtttcctacacactccttaattactatttttcactttctcctttcaatatgaggaaccccactcacaagtcccctgaggttgaaaatgatggtgattttaaagttcatctgttctcttcatcatccgagttgcttgaaaagcttcatgaaaaatggagttcagtggagaaaccaccatacccagctatgtattctagtatttatggaggtatcatacttgaaccagcaatgatggtaatcccca

SEQ ID NO: 53111 - DNA, 383 bp, Glycine max
  Clone ID: LIB3109-029-Q1-K1-D1
gggaacgaaaatgggtggtagatctggcggcttgggttgttctacttcctcttacactgggattagaacaaggcgtttgtgcacttctaacaacaccacctttcccttcccccaacaacctcaatcactctctttcgctaaacctctcaaactcatgtctcaacctttgaccaccaactctgttcttgttgaagaggctgctgctgatggtgattcctccgccgccgcacctcccctcttcgattatcatcgtatcgaccaaaaactgctccaaaacatagtttacgatgctcttgtctggagcaccctcaactgcctccttgttggtgacaaatctgttcagagatcaggaagagtttttttcctggggtgggcctggtaca

SEQ ID NO: 53112 - DNA, 413 bp, Glycine max
  unsure (1)..(413): unsure at all n locations
  Clone ID: LIB3109-029-Q1-K1-D10
ggttgggattgggaagtagaagtacacattcccagtaaggttaacaaaaaaatccaacaactcagaaagaagagagaagacttccaaattgcaaaggatgatgaagaagaatcagagcaagcaagttaactcgttgaccacgacacgtttgtcaccattggcgaaacccttcacgctcaaccgttctaccctccaaccctgctcaagttcccctttttcagggtacccttttcttgaatcgccaaaagaatatgactttgatgggtttggggaggatttttcgttgcctagttactcacccttgtgccatgggaagcaaggagaaggggattctcatgagagtttgtttcacaagggtaagcatgctgttgatggantgagtccctgcccagagtctgctggtactagtacaa

SEQ ID NO: 53113 - DNA, 115 bp, Glycine max
  Clone ID: LIB3109-029-Q1-K1-D11
tgcaggcgcgtgtgattacggatgcgacaagccgactgacagtgggagtagcaggaaacttcagcacctgacaaagcttatatatgacccatatattgcccatgattatgactag

SEQ ID NO: 53114 - DNA, 387 bp, Glycine max
  Clone ID: LIB3109-029-Q1-K1-D12
gaatatggagcgtgtgactcatgctgtaatggtggggtgatgggaacgcatttgagtacatactgtagtctgggggagtacagaaagaaaaggactatccatacaccgggagagatggcacctgcaaatttgacaaaaccaaagttgcggctactgtatctaattacagtgtggtttcccttgatgaagaacaaattgctgcaaacctagtaaagaatggccctcttgcagttgctatcaatgcagtttttatgcagacatatgttggtggcgtctcatgcccatacatctgtgggaagcatttggatcatggggttcttctagttggttatggtgaaggtgcatatgcttccatgcgttttaagaacacaccttactggatcatta

SEQ ID NO: 53115 - DNA, 166 bp, Glycine max
  Clone ID: LIB3109-029-Q1-K1-D2
tggatttcaaatcgtacagatacacacttgggtgagggaggtctgtaaagaaaattgagttgttcttttacaccgtgtctggtggtgattgtcacggttgtggcaattattgaactgaacatgaacaacaggggtcgaattaacacctatttcgcatttaaattct

SEQ ID NO: 53116 - DNA, 139 bp, Glycine max
  Clone ID: LIB3109-029-Q1-K1-D3
ggaaagaatcagtgaactgcccgaaaataaacacagaaactctcaacgacgttctttcatggggttcaggaagaaaagtcagtccaatgatgagagcatggataggtgaagtcattgaggacgagagctctgagagtga

SEQ ID NO: 53117 - DNA, 323 bp, Glycine max
  Clone ID: LIB3109-029-Q1-K1-D5
gggtagtggggcagcacagcaatacgtatcattgaggaagtttcctgtggatcgtctccgaaaatgaacgacgcagacgtctcaaagcaaatccagcagatggttcggttcatccgccaggaagctgaggaaaaagccaatgagatctctgtctccgccgaagaggaattcaatatcgagaagctgcagttagtcgaagccgacaagaagaagaccaggcaagagtacgaacgcaaagaacgccaagtcgaaattcgcaagatgattgactactcaatgcaactgaatgcttctcggatccaagttcttcaagctcaagatga

SEQ ID NO: 53118 - DNA, 410 bp, Glycine max
  Clone ID: LIB3109-029-Q1-K1-D6
ggaggcaatagtagcagcaattcacactggtctttgcttctcgttactcatttctcacctaactttctattcttctcagtctcagatcagaaccttagccatggcagcgttccagaagatcaaggtcgccaaccccatcgtcgagatggacggagatgaaatgactagggttatctggaagtcaatcaaggacaagctcattttgcccttcttggagttggacatcaagtattatgacttaggccttccttaccgtgatgagaccgatgataaagttacaattgaaagtgcggaagcaactctcaagtataatgtggcaattaagtgcgcaactattactccagatgaagctcgggtttggtgaaggagtttggtctgaagtcaatgtggaagagtccaaatgggacaat

SEQ ID NO: 53119 - DNA, 333 bp, Glycine max
  Clone ID: LIB3109-029-Q1-K1-D7
gggataaggaaatatactcccttaggacaggcaactgctcaacaagtgttgattgacaaaatatctgcaggtcctataactttgattgcgataggagtgcaaacaaatatagctatgtttctcatgaacaatccacacttgaagaacaatgtacaacatatttacataatgggcggtgctgtgaggtcaacagacccaactagttggtgccccaaaaatgcatccttttcttgcattactgggcagtgtggtgaccgtggcaatgtattcacaaattatgaagcgaacccttatgcaaaggttaatatgcttgggtacccttttgcaagattc

SEQ ID NO: 53120 - DNA, 341 bp, Glycine max
  Clone ID: LIB3109-029-Q1-K1-D8
gacggctaaaaactaaaaagcatccggggactcaaatcatcatggctggcacggatgcattcttgaatctgatcatcatgtatttcagtgaatcaatacaagcaagtcactgatcttaaactactattcacaaacatgccctggtgtggaatgcattgctgccaaggcagtgaaggatgccactgctagggacaaaacttgtccaactgcacttctgcgaatgcactttcatgacttgttcgttcgggggtgtgatgcctctgggctgctaaattcaaaaggaagcaccctagcagaaaaagatgggccaccaaatgattctttgcatgcattctatgtca

SEQ ID NO: 53121 - DNA, 348 bp, Glycine max
  Clone ID: LIB3109-029-Q1-K1-D9
ggagttagggaagaagaagaaagagcaactcaggggcgacgatgctggagtcgatgttgttggacaagaacccattgcttcacacatgcctaaccctaatcctcgctttcaccttggccttcttcaagatccccctcttcttgctgcacgggctccagacctacatgcactctgactcccaaccccaatccaacaatggcctacgagccgacatccggcgtcccagcagcatcgacagctaccaacccttgtcttccaaaaccgacgtcgaactgaaaaagcggaacatgtccaacaacaagtccgatttcgatgaaaacaatgctcagatcttcagaatcacgctcg

SEQ ID NO: 53122 - DNA, 428 bp, Glycine max
  Clone ID: LIB3109-029-Q1-K1-E1
gtagatagtagataacattttttttattatatatatatatttgtcgttctgaaagtacctgaagcttattccttttgtgccttttgtttcttaccactttctgggtctgtacttcttcaggtcaaggtcaccaattcgtggaaggttggcctttttcaattttgtatatattttgtctttctgaaagtaactgaaactaattccttttgtgtcttctgtttttaccactttctgggtctttacttcttcaggtcaaggtcaccaattcatggaaggttggtctttttcaattttgtatatattcatggaaggcttacatataatctcacaagtatttctgaaagagttaacttgtggggttttttatgttgactaatggatattggataatgatgggcttattaaggtacaattttttttttcttctc

SEQ ID NO: 53123 - DNA, 399 bp, Glycine max
  Clone ID: LIB3109-029-Q1-K1-E10
gacatgcaaaaggaatagctgctaaatgatgaacgcggcaacagcagctaatagcagtgtttattcacagacacagtgcagactactttcctcggatcttcgaagttcgattcctttcttgaatgaacgcaagtcacggttggtggtaagggctggcggtcgtcctcctcaaaatatgggcaaggacgaggatgagaagcagcagcagcgtgtcatacaacaacaacaacaacaagaacaacaagcaccttcgcccgtgtctcttagcctggacgacgtgaaccccgtaggactgggtcgaagatcgcggcagttgttcgatgaggtttggagaaagttctcgggattgggtagatttctaggaccatacggtcggatgatcatgaggctctggatgcc

SEQ ID NO: 53124 - DNA, 413 bp, Glycine max
  Clone ID: LIB3109-029-Q1-K1-E11
gggtgtggttacaccacttgggcatgagccagatggcttctacaataatttgcttgatggtgttagtggcataagtgagattgaaacatttgactgtgtagaatatccaacaaggattgctggtgaaatcaagtctttctcaactgatggctgggtagcaccaaaactttctaagagaatggataaatttatgctctatatgctgacagctggcaaaaaagccttggttgatggtggaattactgatgatgtaatggatgagttaaataaagataagtgtggagttctgattggctcagcaatgggtggcatgaaggttttcaatgatgccattgaagctttacgattctcatataggaggatgaatcctttttgtgtaccttttgcaacaacaaatatgggttctgccatgc

SEQ ID NO: 53125 - DNA, 409 bp, Glycine max
  Clone ID: LIB3109-029-Q1-K1-E12
gaggggcatgatatgattatcttggctggtgctgagtatgggagtggaagctctcgtgattgggctgcaaaggggccaatgctactgggcgtgaaagctgtcataacaaaaagttttgaaaggattcaccgaagtaatttggtgggaatgggtatcattccattgtgttttaagcccggggatgatgctgattctcttggattaactggccatgaacgttacaccattgatctaccaagcaatgtgaatgaaatacgacccggccaagatgtcacagtggtgacagatgccgggaaatcatttgtatctacactgagatttgatacagaggttgaactagcttacttcaaccatggaggcatcttacaatatgtcatcagaaacatggtcaatgctaaacattgaatca

SEQ ID NO: 53126 - DNA, 413 bp, Glycine max
  Clone ID: LIB3109-029-Q1-K1-E2
ggatggatgatggaagaaacaaagagaagggaaatatcaggaggtgcgagtaccggagccaaacgcgggtgtgtgtgtgtgtgagggagagagagatgcagttccattcagaaactccaaactaaacatccctggcgacaaccttaggaatctcgatcgctgaaaaaacctatgcagccccgaacacactctctgcattccaacttgtttaagtcatgcctttcgattcacccttctctcaataaatttttagtcagattcttggccaccgccacactcataataaagttttgtttttccaaataaagggaatggcgactcctgttgagcctccaaatgggatcagaactgaaaggaaagccccaattattattccatgtggcaaacccttgttgagattgactcaaaatacg

SEQ ID NO: 53127 - DNA, 308 bp, Glycine max
  Clone ID: LIB3109-029-Q1-K1-E3
gtcctggaagaattgtagatagaccaggtgggatgtctcggatggatcgccgtggggatgtggtaatggaggatgacagatggagtagagtttctggtgcttttcgttctggacgtggtttggatggcattggaggtaatgtgggattccgatctggccaaggaggcaattttggtgtcttaaggaaccctcgtgcacagacaccaccacaatatgttggagggatcctttctgggccaacgcaatcagtgggaaatcatggtggaagaaataatcctgatggggagaggtggcagcgttctgctagc

SEQ ID NO: 53128 - DNA, 205 bp, Glycine max
  Clone ID: LIB3109-029-Q1-K1-E4
agggggtcactgtggtttctgtcatgggtggtagagaatctgagtcctcagagatctaagcctctctgtctggtgttttgttcatcacagacccttttgcttgggcataattgtgaaagtgaaaaagtgagagaagatgatgaagatgaagaatattaatagtagcaaccataattataagacaaatggtctttctttcatcatg

SEQ ID NO: 53129 - DNA, 431 bp, Glycine max
  Clone ID: LIB3109-029-Q1-K1-E5
ggacatgtggacagtagcgtgagcttagagggtcgttccattcctcgtctagatgtaaacggtttgatgccatcagagcatttaaatggtactgaaggctatgtaaatgacaaagagcatccttctgaattggaacgtaatcatcactcagctgaagatgtaaagattaactctatggcagacacaggacccagcattcctcaaattcttcatatgatatgcagtgggggtgatggaagccctatttcaagtaaacggactgctcttcaacaattggttgaagcttctataacaaatggtcattctggttggaccaaagtcttcaatcagattttgacagtagtgcctgaggggggttgctagatgaatcaaattcctcagtcaaagagcttgctctttcaatgatagttgaaatgcttaaaaaccaggaa

SEQ ID NO: 53130 - DNA, 396 bp, Glycine max
  Clone ID: LIB3109-029-Q1-K1-E6
ggacctttgtagccactaatactattgttgctaggcttagatccagtctatgaatggcaaagccaagatcttggactcagatatggccttctattgttggagtgtgtcttctgaattttgttctgaacttcaagatcgtggcagtagcagatgacactggaagcaacagtattgtatcagaaggtgactgcaagaacacaaattatcagatttttctccctccaccttatcagaatatatcctctaccatatgcaaacctgtttggcattcatacgaattgaggtacaccaagacgggtgacaccacaactatcatattatctgctccctacacttgtggatgggtgggaatttggggggattttctagggatggtatgatggctggttccagtgc

SEQ ID NO: 53131 - DNA, 379 bp, Glycine max
  Clone ID: LIB3109-029-Q1-K1-E7
ctgggggtcaatagattagagagatacgagggggactcgggtaagcttacggcttacgtgcgaagcgagcgagcgaacgagaagatgtagttattgatttcaatttccaagtcccaaccattatcaaactgacatatccatttggtcaacaaagaatcacacaccaaaccgttcgaatctaaagatcgtggatccgatcccggcgccaccaagattcggcacggacctcttctaggatcctctcgacgcccacccgctgtggttcaaaccggcgtcgtatatctgcatcgacttcgactccgaatcctacatctcggagctgcgaaccttcgtacccttcgacacgctgcgtttacccggaaagctaaacagctaccta

SEQ ID NO: 53132 - DNA, 411 bp, Glycine max
  Clone ID: LIB3109-029-Q1-K1-E8
ggaaaagaggagaatgtgaagaaggctcacgaagcccttttggtaagagccaaggccaactcagaggcaactctgggaacctacaagggtaactcaaagcttgctgatggtgcctcagagagcctccatgttgaggactacaagtactgatcaatctaagtgcgggtaggaatcggtattttatgggtacaaccgaattttcttgataatgagtattgtgcttcgactcttcccagaataataatcgtttggaattttgctttttgttattcctagtgttccttcatatcaattttagtaattcggtgtattggtcaaacctgtgcaaacaggggaagggaatttgggtaactttggtttcttgatagacaccaccaccttgctgttaacgaggctttgtgcttattttac

SEQ ID NO: 53133 - DNA, 424 bp, Glycine max
  Clone ID: LIB3109-029-Q1-K1-E9
gaaggtaggaaacccataaatttattctagtaatacatgggtgggttttgtttgccttgtgtgtatctttctattgacgagaataatggaatgttcccaattctctgtttttttgcttttgtccatttttgtgggaatttgtttagcttctactgaggaacaggaaagggacaggattgccaagctgccaggacaaccagaaaatgtgctatttgcacactactcaggctatgtgactgtgaatgaagaagctgggagagcattgttctattggctggttgagacaccagctagtattgaaccaagttcaagaccactagtgttgtggctcaatggtggacctggatgctcctctattggttatggagcagctgaagaaattggcccttttagaattaattctgatgggaattcactttactcc

SEQ ID NO: 53134 - DNA, 398 bp, Glycine max
  Clone ID: LIB3109-029-Q1-K1-F1
gggagaagaaggaagcatcataaccggccaaagcttctctctcttccatttatcccccataaataaaactaggtgaaaaaaatatactctgtgcttctcatgatgatagtgtagctgaagctgcttctgctgcagcattggtgatttggacacaaaaaaagtttcaaacttttcagttctctgagcttctggtttatcaattttgaaggagttcaatactttaccctattagttggttccctgaaatttgtattggtattgctgtatcagaaattcttctgaacaatctctttaatcaaccatgtcattattggctaaacttaaaaccgctgtgtcaccatagatgttactggtaccctaatggcttacaaaggggagctcggtgactattattgcat

SEQ ID NO: 53135 - DNA, 326 bp, Glycine max
  Clone ID: LIB3109-029-Q1-K1-F11
ggagtgaggagactgagaaaacagaggataacaggatggatgacacagtttctgcgttgaggtctttgatggtttctcactctccgccgctggatgccttagtggtgccctctgaagattatcacctgagcgaatatgtgtctgcacgagacaagcgccgcgaattcgtttccggcttcactggaagtgccggcttggcacttataacaaagaatgaagcactgctgtggacggatggacggtattttttgcaggctgagaaagaacttagtgctgggtagaagctaatgcgaattggtgaagatcctgctgtagatatctggatg

SEQ ID NO: 53136 - DNA, 52 bp, Glycine max
  Clone ID: LIB3109-029-Q1-K1-F12
tgggagagacatgagcagctagacctttgggtggtcgggatatcagctggag

SEQ ID NO: 53137 - DNA, 341 bp, Glycine max
  Clone ID: LIB3109-029-Q1-K1-F2
gacagcacaacttgtttatcgggacgttgctataaacgttgttgttttcagataaacacgtgactcactatctatctatcaatcgatatctccgagttcagccgaaccaaactccgaagctatggcagagctccaaaccaaggttgaacctgttacggtcccggctccggtggatcccgagccaccgctagctgaggctccgccgctcgagaagaaagcggtggcggtgccaccacctgttccggctgcggcagaggaaaccaaagctcttgttattgtggagaaagagaaggagaatgagaagataccagaaccttgtaaaaagaacgccttaaggggat

SEQ ID NO: 53138 - DNA, 383 bp, Glycine max
  Clone ID: LIB3109-029-Q1-K1-F3
caggtgtgagcttgagttatagagcgaagagaatggctcccaagggttgaatccttttggcttagatattcttcttatcaccttcactgagtcgttgtcttgctgtagatattgttctataaatcatcttttacaaggaatcttgctctttcatactcgtcttcagcttccttcaagatcagttttacttcattcttcatatgttcactgcttattaatgctttaacagcttttcctgatcttgaacttccacaaacaacaatcttgactacacggtggactccagttacatattttgagaagaaaatgtgcttgatgtttgtgttcggtgaagatgagaaggtggtgtctaggcagccagcaatttccccgtttgccttttc

SEQ ID NO: 53139 - DNA, 311 bp, Glycine max
  Clone ID: LIB3109-029-Q1-K1-F4
ggaacaaaaaaaaaacaactttgcggctgcgctgctgctaatagcgcgttgcatctgctacctatcatacatattttcgccaaaccgccgattccgttgagcgtttctaccgtagcgctcaggaagggggcagtggctggtggtgttggttgtggtggaggtggttttgctgatcatttgtggtagagggtaggaaagaaaaaaaagttgaaaatgagttcagacagccgcagcaggagcagaagcaggagcccaatggaccgtaagatccgctctgatcgattttcctatcgtgatgcaccttacaggag

SEQ ID NO: 53140 - DNA, 346 bp, Glycine max
  Clone ID: LIB3109-029-Q1-K1-F5
cgtcacacatacgactgatgcgaatgacacagatagggggagtacaatgtagcatcatacgcggtcaaagcttacttctatcgcatgtattcctccataataaaacttatgtgaaaaaatatactttggacttaatatgattatagcatacccgaatcttgttttgctgcaacattggtgatcttgacactaaataagtttcaaactattcaattctctgagcttttggcttatcaattttgaacgagttcaatactttaccctattacttggttccctgaaatcagtattggtattgcatgatcagaaattcttctgaaccatctgtttaatcaaccatgttatt

SEQ ID NO: 53141 - DNA, 430 bp, Glycine max
  Clone ID: LIB3109-029-Q1-K1-F6
ggaggcataagaagataattggaagattgaagaaggagtgattgtaatctggaaggatgaggagtactattgatttacgattgggaagacgtgcgcgtattccattccaacgagcattagcaacgcagagtaacaataataacactctggtgtttatccctctgcctcgctgtctcagcgcaacgcggtcgtttcactttcagggcaattcaccgtttggattctccagcgggcatgggcaacgcaagagcatgttcatccaaacgcagcccacgccaaatccctcgtctctcatgttttatcccggcaagcccgtcatggaagttggaagctccgacttaccaaaccctcgtttcccttggaatgaactctcccctcgccaaatcgctcttcgcaatcgacggcgttactcgcgttttctttggatctg

SEQ ID NO: 53142 - DNA, 409 bp, Glycine max
  unsure (1)..(409): unsure at all n locations
  Clone ID: LIB3109-029-Q1-K1-F7
ggatgagaaaagtagaaggggagtgcgcgttagggctagaggttctggttctggactgttaacgttgtcttcttctcttctagaacttattatataatccatgttttggaaggaatctgtttgtttcatactcgtgtcgtgtttcctcgaaaatcacttgaacttgattcttcatctcttgcctcctaataaatcctctaacagctttgcgtgatttcaaactccgacaaagaacaaccttgtcgacacggcaaagcaaagtaacatattaagagaagaagatgtgtttggtgtttgtgtgcggngaagatgagagggtggtgtcaaggcagccaagcactccccgggggcctgtccttactgcagagggatgatccaagctatggacgtagagagtcagtggaatttc

SEQ ID NO: 53143 - DNA, 406 bp, Glycine max
  Clone ID: LIB3109-029-Q1-K1-F8
gactacaacattgtttaatgtactatgggggcgcttaggctatgctgcatggggaaatgatgcaccatctaatttcctcaaaggattcggcttctatgagccctttcggctaatagactttgccaatgtctgcatagcagtgcacttagttggggcataccaggtctttgtccaacctatatttgggttggtggaaaagtggaccaaagaaaattggacagaaagccaatttataaatggcgagcatactttgaaccatcctctatgtggaagctacaatgtgaacttctttagggtaatgtggaggactgcatatgtgattatcacttgccgtgtaactatggtaacttcccatttttttcccttaaatgacctttttggccctttattggtagcactctttttt

SEQ ID NO: 53144 - DNA, 404 bp, Glycine max
  Clone ID: LIB3109-029-Q1-K1-F9
gggctttcatttgatttgatccaaggccaatcctcggtaataacaacgagaagttgatacaaacaatagaatgattgagtttcggatagctcctccatcataggcattttcagtcttcttccattcacactgtaaccatcaatcatatctgtatcgattctaaaatcttcaagaagatgcagctacaagatggttctgctggtaaagtcattaataacctctcacaagttctgatttcctccgtcgccggaatgattatggacaagtcaagggtggtgggagaccagagcatcgttccccgccacataaaagatcactttggccgtgttgaaaagcttgagaagttctctctctatgttggtaggcaaaatgggaattctagagagcgaggttccagcttaact

SEQ ID NO: 53145 - DNA, 396 bp, Glycine max
  Clone ID: LIB3109-029-Q1-K1-G1
ggttctgagaattcgaatctaggatttgtttgagcgttcgcgaaggatcatggtggggttcagaaacagatacatggttatggaggtttttctgaaccctaatagggacaaaggtggggatgattctgttatagttacacagtttaatgtctccaaagctgtaagagacagcatattggtgaattttggggagtgtggtttggcttcgtcattgggatcgtttcaggttaagtatgtgaatccaatcactaatgtgtgtataattagggcttcaagggaacagtatcagaaagtatggtccgccattacaatggtcacaaatattggaaactgcccggtcatgtttaacttgctgggaaatttttatcttgaagtataagggcttgtaaaaatgct

SEQ ID NO: 53146 - DNA, 394 bp, Glycine max
  Clone ID: LIB3109-029-Q1-K1-G10
tacttaggggactttaccggcacttgttttcattggcagttgagcttatggttcaattctcaaggtcctcattccccgttccctcgcctttgcttcctagttcctactgtgacctgtgagtctccccttcccggcctcgccaacgggaaattcaacggagttgtgtttgcgaatcgccttttattatctcatttctcttgccattcacacacttcttcatttttgcgtttctcttttcttacgctcttttgctttcattttcatttaagctaaccgcgttttttttcttttcttatcttttcggtttcctcagttaattctcgtgtttcttcagagcgagcataaggactttcgcatcggagaccgaatcgttagggtgaggggagtaaataaa

SEQ ID NO: 53147 - DNA, 403 bp, Glycine max
  unsure (1)..(403): unsure at all n locations
  Clone ID: LIB3109-029-Q1-K1-G11
gggggaaggaaagaaattagaaatatttattcatggtcaccaaatcttgttccctgcaagagaaagaaagaagggagagaagaagttgttgggttgagttggattggatttctaatctaatctatacctttcttttttcctatgcttttaaggcacaaacccttctttcttccctcttctttcttcttcttattggtattccttgcctttaccctttagggaaggaagaaggaacaactatactactattatccttattattggtattattgtaattaatctttttattatagttattggtgntgttattattcctcaaatatggattcgttgtgcctctccaacgactcagttgtttctggattcaaagacaaggagtcaatggttgacccctttttggtcg

SEQ ID NO: 53148 - DNA, 302 bp, Glycine max
  unsure (1)..(302): unsure at all n locations
  Clone ID: LIB3109-029-Q1-K1-G12
gaagacaccgagcgacaaagatcgacgatgatggacgaagccgaagaattagaaccgttgtttgattacagccgggttcagcctctgaaccccatcgacctcgatgatgatcttgatgattacgaggatgtgatttgcgttgatagtaaaaagaggaagatttcccaggctgttgggaatgagaagactaatgggaaaagagtaacagtggtggacattgaggatgatgattggttacctncttcaccaaagatcgcaagtaatgcacagaagacgattgacgaagattcaactttggaaaa

SEQ ID NO: 53149 - DNA, 386 bp, Glycine max
  unsure (1)..(386): unsure at all n locations
  Clone ID: LIB3109-029-Q1-K1-G2
gatccaaaagtcattgagctcattgacaatgttcgaatactacaaatagacatggtatggtgctattttatgatacgagacatcagatggctctcagatgcaggaaagcgtcttgaaatggctcgggaaggtattgaacgtgctcatggaaaggattcttttcgcctcagactcttacaagtaggtcgatatccagaactcgcattgcatttgagactagagctacttgaaggggtagtggcatatcatattggccaattggagaaatccaaaaaaacattagcctcagcaaggacaaagtttatccagcttgcagtgccagatgaagccttatcactngttatgagcatgggctttgtttttgggaacgcgatgcaaagcgagca

SEQ ID NO: 53150 - DNA, 433 bp, Glycine max
  Clone ID: LIB3109-029-Q1-K1-G3
gggggatgggatatcagtaacttgaacctggcagatgccatggccagggccaaggtgtttgatatcgacctgcagaaacagttgaggccttacatggaatctatggttccactccccggaatctatgaccccgatttcattgctgccaaccaaggagaccgtgccaacaacgtgatcaagggcacaaagaaagaacaagttcaacaaatcatcaaagacattaaggagtttaaggaaagcactaaggttgacaaggtggttgtcctgtggacagccaacacatagaggtacagcaacctagttgtgggactaaacgacaccatggaaaacctctttgcttccttggacaggaacgaggctttttgtagatttccccttccaccttgtatgccattgcttgtgtaatggaaaatgttcctttcatcaatggaag

SEQ ID NO: 53151 - DNA, 423 bp, Glycine max
  Clone ID: LIB3109-029-Q1-K1-G4
gagagagttgtgggcaactggttggttgcatgatcggatacgcgttgtggtttcaagtttcttcgtgaaggtgctgcagcttccttggagatggggaatgaagtatttctgggacacccttttggatgcagatcttgagagtgatgctcttggttggcagtacatatctggcactctccctgatggtcgtgaacttgaccgaatagataatccacagtttgaggggtacaaatgtgacccaaatggagaatatgtgcgacgatggcttcctgaacttgctagattaccaactgaatggatacaccatccatggaatgcaccggagtctgtactccaagctgctggaattgaacttggtttttccaaaattatcctcttcccattgggggaatagattcgcagaagttagacttcaagaagcac

SEQ ID NO: 53152 - DNA, 327 bp, Glycine max
  Clone ID: LIB3109-029-Q1-K1-G5
tgtggtattcgattgaactgagatgtccaagcgactgctaggcatagcggaagaggaaggtcaaagcaacgtcactttgttaggttcttcctcagccaccatggaacgtgtgtgcctgaatagctcaaatctgaacgagcgcaactacatggggatatctgatagatcatctgtggacagcttctcgccgaccttctcagatgagactaatagcaatctgaacctgaaggctactgagctcagactagtgcttccggagtcgcaatctctcgaacgagattcagatctttgcttgagacgttcgattcagtgtgatgaaaagccact

SEQ ID NO: 53153 - DNA, 386 bp, Glycine max
  unsure (1)..(386): unsure at all n locations
  Clone ID: LIB3109-029-Q1-K1-G7
caccaaaaatatgagcattcccaactaaagggcaatgaaaataagaacatggatgccgtaatggaaaacatacaaccacaggagtctgaataccaggatggcaaggatgaaccaaggaatgtggttgtagcaggggaattcgacaccagtactgtgcagttcataaagaatgaagatctagaagagttgcgagagctgggttctggtacgtttgggactgtgtaccatggaaaatggagaggatcggatgttgcaattaaaagaataaagaaaagcttgttcgctggtcgatcttcagaacaagaaaagctgaccatagagttctggcgggaagctgacatactttccaagctttttttnaacatccaaatgtggtggcattttat

SEQ ID NO: 53154 - DNA, 339 bp, Glycine max
  Clone ID: LIB3109-029-Q1-K1-G8
tccagggccgactcacgcctgcgtgcagatgacagcagacgtcagaatgccacctttaaatatcagcattcccaactaagggacgcgtccaatctcaacatggatgccttatttcacaacatacaccaccactaacatgattaatatgatggcattgatgaaccaactaatgtgacggttactaacaacttcaccaccagaactctgccggtaacaaacactatagatctgtagcacataccacatctgacatctggtgcaatagcgactaagtaccaaggaaaatgccttgcatacaattttgcaacccaaataacaaataaaacctgccttgctact

SEQ ID NO: 53155 - DNA, 420 bp, Glycine max
  unsure (1)..(420): unsure at all n locations
  Clone ID: LIB3109-029-Q1-K1-H1
cattgctgcagatgctgcagcaacctttaaggagcgcttgacaagacgtaaatctactgtggctgaattcctttccaagaattatgaatggtttttcgcagaatataacactaagctgttggaatcttccaattatattacaaggcgtcaagctgtcaagttgttgggagatatgttacttgatcgttcaaattcagccgtaatgacaagatatgtgagctcaagagacaacttgaggattttaatgaatcttctaagagagtcaagcaagagcatacagattgaagcatttcatgttttcaagctatttgctgctaaccaacataagccagctgatatcgtcggtatatttgttgcggnaaaaacaaaagtaagatgctgagactgttggaagactttcaaattggcaaagaggatgaa

SEQ ID NO: 53156 - DNA, 406 bp, Glycine max
  Clone ID: LIB3109-029-Q1-K1-H11
gaaggcaagagtggttagggttttgggctggtgtttttgtgaagcttgagatcaggaattaatttcagtggttcagagaatggcaacggattcttcaaatggtaatggacatcaccagacaacaacaaagcagcctcctttgccatctcccctgcgcttttccaaattttttcagtccaacatgagaatcttggttactggaggagctggattcattgggtctcacttagttgacagattgatggaaaatgaaaaaaatgaggtcattgttgctgacaactacttcactggatccaaggataacctcaaaaagtggattggtcatccaagatttgagcttatccgtcatgatgtcacggagcctttattgatcgaggttgatcagatctaccatcttgcatgccct

SEQ ID NO: 53157 - DNA, 325 bp, Glycine max
  Clone ID: LIB3109-029-Q1-K1-H12
gggcaaggtcaagatcggaatcaacggatttggaagaattggccgtttggttgccagagtcgctctgcaaagagacgatgttgaactcgttgccgttaacgaccctttcattaccaccgattacatgacatacatgtttaaatacgacagtgttcacggacactggaagcatcacgatgtcaccgttaaggacgagaagacccttctcttcggtgacaaggcagtcactgtttttggacacagaaaccctgaagagatcccatgggggtcaactggagctgacatcattgttgagtccaccggagttttcaccgattaggacaag

SEQ ID NO: 53158 - DNA, 358 bp, Glycine max
  unsure (1)..(358): unsure at all n locations
  Clone ID: LIB3109-029-Q1-K1-H2
gggcgttggggtgattcctgtaatccatcatatggtgcattatctgattatcagttcatgcggccacgtgcacgggacaagaagcttgttgaagaatgggcagttcccttgaaaagcgttgaagatatatatgagaggtttagactgtattgccttggaaagttgagaagcaatccttggtcagaacttgatggtcttcagcctgagacaaagatcataaatgagcagctggagaagattaacacaaagggcttcctcaccatcaatagccagccagctgtcaatggggaaaagtcagattctcctactgtaggctgnggtggacctggtgggtatgtttatcagaaggcatatgtag

SEQ ID NO: 53159 - DNA, 428 bp, Glycine max
  Clone ID: LIB3109-029-Q1-K1-H5
gttcaaaatgaggaacaggtggagctttcatttgcaagaatgtgggatcattcactagagggaaagtttgtccccttaaatattgacaaaagattcataatgctccgtggttcatcaggcttctactcttatggaatttatgagcacctaaatggatggccagattttgatattagtgaaacaaggatcactttcaagcttaggaaagacaagtttcaatacatggctatggcagacaataggcaaagggttatgccttttcctgaagatcggttagcaggaagatgccaaaccttgggctacccagaagctgtcctgctagtcaatcccaaagatccacgattgaaaggagtaaaagagtggatgacaagtatcagtattcatgtgtaaacatgaataatcgagtccatgggtggatatctttcagt

SEQ ID NO: 53160 - DNA, 436 bp, Glycine max
  unsure (1)..(436): unsure at all n locations
  Clone ID: LIB3109-029-Q1-K1-H6
ggatcagaactaagaagaagacatggcatcgtccaaggtagcgacgacgacgacgacgacgaattcggatatttcgagccagcaggtatgggacggcgccaccatggagatggagtctcaagacaacatgaacatgagcatgagcctccaggatttgttgaccgaaaacgacgccgtgccaccctctcatagtcatggaaggggaaagagaaaaaccctagtggaggaacccctcgtcgtcgataaggtcactcttcagaaacagagaaggatgataaaaaacagagaatctgccgctaggtccagggaacgcaagcaggcttacacagttgagctagaatctttggttacacatnctttcgggaggaagagaatgccatcttgttaaaacaagaggccgataggaaaaggcagaggttcaatcagctcatggagt

SEQ ID NO: 53161 - DNA, 440 bp, Glycine max
  Clone ID: LIB3109-029-Q1-K1-H8
gattgcagtgagtatgatgttgatggggctgaagaagagccgaacttcgatgttgaggaccggaagcccgaccatcttcatccatcaaaccttgggatggagagaatgatgggaaggatgccaattcagcaaccttctcatcccatgaagggagatgttgtcacaaacctagatttcatccggaagaggaagatttctagtgacttcaacatgatgatggatcagaaaatctacacatgcgagcatccccaatgcccttacagcgaagttcgccttggtttccatgataggtctgctagggacaatcatcaattgaattgtgcatatagaaacagttctgcagattatggtggtggtttccccccaatttccatgctactgatgttaatccagtcatattcccccagtcctttgttcaacccaacactacagctcagtct

SEQ ID NO: 53162 - DNA, 292 bp, Glycine max
  Clone ID: LIB3109-030-Q1-K1-A10
ggagtgagagagtagcagctagcaatggagatttgtgccctagcttcttctgctactccaagaccttctcttacaactccttccacttctccacacactgtagtcaccaccaccttcagcaaacctcaactgagacgctcccacgtagcagtatcacttcctacctcaaccaccatttcactgctcgctctcttcgcccctccaagcgaagccaaagccgctgtcagcatcgccaaagaccagattgtctcatctgtcacccaagtggagaaaacgctggatcatgttcacg

SEQ ID NO: 53163 - DNA, 262 bp, Glycine max
  Clone ID: LIB3109-030-Q1-K1-A11
gaaggagcttaggcatgaaaagcattatagatatgttagtactcatgatgtcgggtactgggctcgaagcttcttgcaagatttggaaaggacctgtagtgatcatgtgcgacgaaggtggtgggggattggttttggattaagctttagagttgttgcgcttgatccaaacttcaagaagctctcaatggagcacataatttcagcttacaaaagcgacggcactagggcaatcctttctgactacgatggtacgctaatg

SEQ ID NO: 53164 - DNA, 267 bp, Glycine max
  Clone ID: LIB3109-030-Q1-K1-A9
tgttgccctgaaaaatgatctgaaacttcatccgtattttgaacatggagaagaaaaagaaaaacctgtaggtgatttgtccccaaggttgggggatcctagccaatatcttgatggcacacgaatttacatacaaggatcattatgggatgggtttgcagatgggaagggggacttcactgatggaccttatgaaattcaaaatcccgaagatttctttacagataagttttataattatggattcaatcccgaaggtggttctgt

SEQ ID NO: 53165 - DNA, 273 bp, Glycine max
  unsure (1)..(273): unsure at all n locations
  Clone ID: LIB3109-030-Q1-K1-B10
ggaacacaacacaacgttagccttaaaagtttaagccttagcagcgtcgacaatggccggcgaggagctcgccggagaccacacgccggagctgctgtgtctggtccatgacatcgccggaatgtgctcggcgttatcctcctccgccggctccgccggcgccatgttccgcaaggactgcaccgatctggttcgccggatcntccttctcacccacctcttcgaggagattaaggaactcagcaacaacgttgtcngtggttcttctttctc

SEQ ID NO: 53166 - DNA, 262 bp, Glycine max
  unsure (1)..(262): unsure at all n locations
  Clone ID: LIB3109-030-Q1-K1-B11
gacaatcaaattaaaataaacctgagagatcagatacaaagagatcgagcaatggcattagtgtcttcactttctcctgcgaccccttcttcggttcaaaccaacactttgaacccattgggttggactgatgatcagatcctggagaagggttacattacccacgttcacaccgctgaaaggtacgatgtggaatcgcttttcaacgttactgcanacatcatcaagncgtctactgcacttgctgacagtgtttgctgta

SEQ ID NO: 53167 - DNA, 319 bp, Glycine max
  unsure (1)..(319): unsure at all n locations
  Clone ID: LIB3109-030-Q1-K1-B12
gggacaaagtatgaaggaggaagtagtggctgcagagatatgagattggaatcagaaaaaaatgtctcatcatttttaaatgattttgttacagataatgctggcttcaatgatgtaatatgtccatcagaaaaagtcagagttgattctgcatgctttccttcagtttttcttgatacagttgtttgtgaaagtgataaattgcattatgcagatattaaccaaaaaggggcagtgaattttgcccaaccttcagaagcaaactcccagcaacatattgaaaagtcaaagtttcatactgagcnncttgtacaggata

SEQ ID NO: 53168 - DNA, 204 bp, Glycine max
  Clone ID: LIB3109-030-Q1-K1-B9
ggttgagtgaagagaatggctcccaagggtttaagctttctggctgtgctaatatgcgttccagcactgtcactgagtccttctgacgctgcagaagggcagaataatggccttgttatgaacttctacaatgaactatgcccttacgctgatgacattatcacatatcatgtcaagcttacatacatgcgccacaagaacact

SEQ ID NO: 53169 - DNA, 335 bp, Glycine max
  unsure (1)..(335): unsure at all n locations
  Clone ID: LIB3109-030-Q1-K1-C10
atagaacaaaagaagaagattttggttgaaggaggacaagctaccatgttggacattgattttggaacttatccctttgttacttcttctagcccatcagctggtgggatatgcactggtcttggtattgctccaagggtacttggtgatttaataggagtggtgaaggcatacactacaagagttggttctggtccttttccaactgaaattttgggttcaggaggtgacctnctcagatttgctgggcaggagtttggcacaactactgggccgcctcgacggtgtggctggctcgattaagtgcactgaaatactctngtcagatcaacggg

SEQ ID NO: 53170 - DNA, 191 bp, Glycine max
  Clone ID: LIB3109-030-Q1-K1-C11
gtttttcaaaagaagaagactttggttgaaggagtgcatgctaccatggaggacagtgatttcagaacttatccctttgctactgcttctatcccatcaactggtgccatatgcactcggcttgatgttgctccaaggatacttggtgatttactaggcgtggtgacggcatacactacttgagttgcatc

SEQ ID NO: 53171 - DNA, 302 bp, Glycine max
  unsure (1)..(302): unsure at all n locations
  Clone ID: LIB3109-030-Q1-K1-C12
gggacgaaaaaggtgttcagtgtccaagcgttgagaanggaagaggtacacatggcaagtggcaactgacctcattgttgatagttgatacttggcctcgaagatgcacttgctactatccaagtccccactattactgatacataattcttctatgctccttcaccgcttctctcctcttctactccctccttttctctttcgccaaccccccttcccctcttcgaatttcaaacctctcacactcaaggtcctctccatggcatcgtctcattccttccaccacatacacactaatcgac

SEQ ID NO: 53172 - DNA, 378 bp, Glycine max
  unsure (1)..(378): unsure at all n locations
  Clone ID: LIB3109-030-Q1-K1-C9
gaggaaagaagagagagaacaaagcacttagtgcgattcaataattacgaaaaaccaacagcgagtgttgtttttgtttggtccaggctggaccagggaatgaatagagatgagaggctttcggttgaagagaactgagttaagcggcgaagccaaacgcagaatcggcggcagaaattgccaccggaagcacgtcgaagacgggtgaaccaaacacaaaattccatccaccacttctcttttcaatccccaactcaaatctgtgaagaaaatctcaatntctaaattgaaatcttagcactactgctagtagtagtaaaaaaaacaattaggaaagtatagagtgttttttttccttttttcggttgtttactttta

SEQ ID NO: 53173 - DNA, 324 bp, Glycine max
  unsure (1)..(324): unsure at all n locations
  Clone ID: LIB3109-030-Q1-K1-D10
gacactaaacaagttaaaagaggagcatcactgaactaacaaagcaaccctatgtcgaaggtggtttgtgtcaccggagccagcggcgccatcggatcatgggtggtcctactcctcctccagcgtggttacaccgtccatgccaccgtccaagatatcaaggatgaaaatgagacgaaacatttggaggaaatggaaggagcaaagagtcatctncatttttttgaaatggatcttcttgacatcgactccattgccgctgccataaagggttgttcctgcgtaatccaccttgcatgtcctaacatcattggtcaagtcgaa

SEQ ID NO: 53174 - DNA, 325 bp, Glycine max
  unsure (1)..(325): unsure at all n locations
  Clone ID: LIB3109-030-Q1-K1-D11
ggagagaaaaaagagaaagtgaaaattagaaactctggtacttggttttatgccaaattagggactcttttggttgtcaattagatcacaaagatatggaggttgccatggaactggaagatgatctattttttgctgatttgagcaaggaaattgctctactaattatggatgaagatgaagatccacttgcttcttgtcctcctgactctcttcaggctttttctggggcaattcatcctccttcacagtttgctttcatctttgagcatgctttgagaaagagaagcaaagggacaggtgtatttatccctcangcaacaca

SEQ ID NO: 53175 - DNA, 284 bp, Glycine max
  unsure (1)..(284): unsure at all n locations
  Clone ID: LIB3109-030-Q1-K1-D12
gggttcaagagtgaagagcgaagagaatggctccgagagggtttaatctttttggctgcgttatgcttctcagcactgtcactgagtcgttgtcttgcggaggataatggacttgttatgaacttctacaaggaatcatgccctcaggctgaagacatcatcaaagaacaagtcaagcttctctacaagcgccacatgaacactgctttctcctggctcagaaacatcttccatgactgtgctgntcagagttgtgatgcttcactgttgctggactccacaag

SEQ ID NO: 53176 - DNA, 316 bp, Glycine max
  Clone ID: LIB3109-030-Q1-K1-E10
ggggccagtggggatccttctcatttatccttgagggatcaaatgagccctgcttattctgctagaaagcaatcattggatcatgaaggcaaacttcacatgcctcatccatggcctgtaatgccctctagtctgtcactgagcatcttggactctaatacaaaaggtcctgcacatggtggtgatacaacttacaaagctcgagggaatttgaggtacagtgcatttggtgaataccctgcactgcgtggtcataaagttgagcattcacatggaaacttgatgccacccccacctgcactcctaactcaatatc

SEQ ID NO: 53177 - DNA, 80 bp, Glycine max
  Clone ID: LIB3109-030-Q1-K1-E11
ttaagagggagatttttaaaagagactgtgcttattataaactctagtacttccttaaatcccaaatatggcacacttct

SEQ ID NO: 53178 - DNA, 284 bp, Glycine max
  Clone ID: LIB3109-030-Q1-K1-E12
ggatgagagatggcagggaaggaggagaaggaggggaaacttcagaagggaatcgcggagttctacgacgagtcttctggcttatgggagaacatttggggcgaccacatgcaccatggcttttatgacccggattccactgtttcgctttcggatcatcgtcttgctcagatccgaatgatccaagagtctcttcgctttgcctctgtttctgaggagcgtaataaatggcccaagagtatagttgatgttgggtgtggcataagtggcagctccagatacct

SEQ ID NO: 53179 - DNA, 299 bp, Glycine max
  unsure (1)..(299): unsure at all n locations
  Clone ID: LIB3109-030-Q1-K1-E9
ggttctagtgtgtgattgtttgttgttgtaactggttcttcttcttttgttgttctgtgtttgtgtttgttttttctctcacctgaaaatgtcttgctgcggtggtaactgtggttgcggaagctcctgcaagtgcggcaacggctgcggaggctgcaagatgtacccagacttgagctacactgagtcaaccaccaccgagaccttggtcatgggagtggcacctgttaaggctcaatttgagggtgctgaaatgggtgtgcccgctgagaacgatggctgcanatgtggaccaaact

SEQ ID NO: 53180 - DNA, 259 bp, Glycine max
  Clone ID: LIB3109-030-Q1-K1-F10
ggcttaaaagcggtttattaacactcctaaaccagcctctctccgctaaatttaaaggttagtttaatttgatttatgatcccttgcgttgctagataaatgccgatgccgcgtctggatcgggattagggccctagggtttttgatcgctccatccggttctgcttcggatttcgatcggaaatgtccgaacctcattcaccgacccgtacctccgcgtatctcgacgcgctctcttaagcgatccacaagaaacttc

SEQ ID NO: 53181 - DNA, 310 bp, Glycine max
  unsure (1)..(310): unsure at all n locations
  Clone ID: LIB3109-030-Q1-K1-F11
ggagttgagaggatcgtgagaggggcagtagccgagattccgtgagttgcaaaaatgaagacgattctttccaccgagaccatgaacatcccggacggcgtgagcatcaaagttcatgccaaggtcatcgaagttgagggcccccgcggaaaattggtgcgagacttcaagcatttgaatctcgattttcagctcattactgacgaaaacggtaaaagaaagctgaaaatcgacgcgtggtttggttctcggaaaacatccgncgncattcgcaccgncttgagccacgtggagaatcttatcaccggcg

SEQ ID NO: 53182 - DNA, 284 bp, Glycine max
  Clone ID: LIB3109-030-Q1-K1-F12
caatcaaggagctggtgcaaatggaatgtagtagatgggcgagcaaaggggtgaacataaagtacgaggtgagggacaacagagacgggtacaaagcaggggctctgaaagaaggcatgaaacgcagctacgtgaagcaatgtgactatgttgccatctttgacgccgattttcaaccggagcctgatttcctctggcgaactgtcccattcctttgcaacaaccctgaacttggtctcgttcaggcacgcttgaaagttgtgaatgccaatgaatggttgatg

SEQ ID NO: 53183 - DNA, 249 bp, Glycine max
  Clone ID: LIB3109-030-Q1-K1-F9
ggtgaaggtcgggggatagatagggtttgccttggccctgctttgctctcggtggtgtcactgattggcgttgccaaatttcctttggcttcttcttctccgaatctttcagaatctctctctcatttatttttgaattgaagtttctttctcattatctaaaatatcctcgcgcgtgttattagcgatgccggaggaagaagtagtggagctcaagttccgtctctacgatggatccgacatcggtcc

SEQ ID NO: 53184 - DNA, 316 bp, Glycine max
  Clone ID: LIB3109-030-Q1-K1-G10
aatcatgggtaaggaaaaggttgacatcaacattgtcgtcattggacatgccgactctgggaagtcaactaccactggtcacttgatctacaagcttggaggtattgacaagcgtgtgattgagaggttcgagaaggaggctgccgagatgaacaagaggtcattcaagtatgcctgggtgctcgacaagctcaaagctgaacgtgaaagaggaattaccattgatattgctttgtggaagtttgaaaccaccaagtactactgcacggtcattgatgctcctggacatcgggactttatcaagaacatgattact

SEQ ID NO: 53185 - DNA, 339 bp, Glycine max
  unsure (1)..(339): unsure at all n locations
  Clone ID: LIB3109-030-Q1-K1-G11
gacggctaaaagctaaaaatcatcgaagtactcagattagcatggctgtcacggttgcattcttgaatttgatcatcatggtttcagtagtctctacaagcaagtcactgagcttaaactactattcaaaaacatgccctgatgtggaatgcattgttgccaaggcagtgaaggatgccactgctagggacaaaactgttccagctgcacttctgcgaatgcacttccatgactgttccgttcgggggtgtgatgcctctgtgctgctaaattcaaaaggaagcaacatagcagaaaaaagatgggcccaccaaatgnnttcttgcatgcattctatgt

SEQ ID NO: 53186 - DNA, 309 bp, Glycine max
  Clone ID: LIB3109-030-Q1-K1-G12
gactgtgagtgagattataaatttccggttcacaagctttcttctccaccgttttcaatcctgcaaacacccttcaacagtttttccccactcgttgcttattgacacttctccttcttcggaattcaccccttttcgaaataatttattcgtgtttccctccaaaaaaaccctagctagcttccatggcgtccaagaagaagcactcagagggcatcgccttgttgtccatgtacaacgacgaggaagacgacgaaatggaggacgcagaagacgacgacggcgaaaaagaagaagttgatgcaagga

SEQ ID NO: 53187 - DNA, 279 bp, Glycine max
  Clone ID: LIB3109-030-Q1-K1-G9
gatcacaaaatgtaataatatcacaccttccaacggcccctgtcactgtaatcttgggctccagaggaagaagacgatgaacgtggatctggaatcattggcagaggcaacttccggggccataggatcactgatcagcaccactattctctacacacttgacaccatcaagaccaactaccatgctgatgcacgatgctcaagtcgaacaacatacaggaatctcactgatgtattattggaggcaatatctaaccgtcaggtgctgtcactttacca

SEQ ID NO: 53188 - DNA, 341 bp, Glycine max
  Clone ID: LIB3109-030-Q1-K1-H10
gctttaaaaatgggagggtgtctaccatccaagcggagatccagaagatagtggttcagcttccagcagcacacatcgtttcatgctgtatgcgacagcactttcaatcacatggggagacactccagaatattggacatgggtacagcagaaagaagaagcaaggtacgcatctatctccaaatatatattaaagtttactaaaacacaattcacacaatctatataaaaagtagtgttctaaaaagtagatctctcattcaatctgctcttttattgctaataaaagtttcttctgaaataggaataatgcatcttgcttcgtataaggttagatatat

SEQ ID NO: 53189 - DNA, 168 bp, Glycine max
  Clone ID: LIB3109-030-Q1-K1-H11
gacttctaaaagctaaaaatcatcgaagtactcagagcatcatggatgggacggaggcactcctcaataagatcatcatggtcacagtattctctacaagcaagtcactgaacttaaactactatacagcaacatgccctatatgaaaatgcatccttgccaacacac

SEQ ID NO: 53190 - DNA, 349 bp, Glycine max
  Clone ID: LIB3109-030-Q1-K1-H12
gggaccaaattatgtccctggggagaagaaggatttgtatgttaaaagtgttcaaagaactgtcatttggatgggaaaaagacaggaaactgtggaagatgtcccctgtggtaacactgttgctatggttggtttggatcagttcataacaaagaatgctactttgactaatgaaaaggaagttgatgcccatcccattcgagctatgaagttttctgtctcacctgttgttcgtgttgctgttcaatgtaaggttgcatcagatcttcccaagctttgtgaaagtcttaagcggttggccaagtcagatcctatggtttgttgtaccattgaggagtctggtgaacac

SEQ ID NO: 53191 - DNA, 225 bp, Glycine max
  Clone ID: LIB3109-030-Q1-K1-H9
gactacctaacactaacaatcattctaatcctcagatcttctctcttgacccaaaggctaacttctcaccctgcaccactctaatatgcgtcatgaaaagcagaaagcccaacaccgactactatacagccgaacccaaacttgctgagaacaataatggctacgccaccaaagctaccaaacccacctacaaagacaatgcaactaaacatcctaacaagccca

SEQ ID NO: 53192 - DNA, 334 bp, Glycine max
  Clone ID: LIB3109-031-Q1-K1-A10
gctgtgacagactggctgctactacatgcaccacgtccaagggcaggagtgcttgatttggctacgacgacgcttcctacttggggaaacttggatacagccctggccagaatcgtgtcgttcgtagcgctggatttgagggagacaacatgctctggacgtgcactgaccttggccggtacaagggtccaagtctggttgacgcacttgaccacattagtgagctcataaggctctttgacccggcattaacgctctcacttcatggagcgtactggattgtacgcttagaaactgtgccagtgggacatgatcagaccggagccttgtaccc

SEQ ID NO: 53193 - DNA, 432 bp, Glycine max
  unsure (1)..(432): unsure at all n locations
  Clone ID: LIB3109-031-Q1-K1-A11
ggttcgagtggggattcttcttccctccttgttggtggtggttcgtgtccccctccacctccggtgccgcctcccaagccttccgtgacggggaacttgaattcgaggaggagtgtggccgggagtttgaattcccgcagcgtcggatcgtcgaggagggcagttacgtggccggttgtttcggctaggacttcacctgctgggtctaggccgtcttctcccaggtcacataatgaaagtgaggggtacaacagtgctgatgaacagaagccttgcctggtttcatcttatgatgattttgaaagggagcgacagttcgaaattgatatcagaagggcaaaaggttatgaagtcaaaaaaatgatggaggatggaaattgtctattccgagctgttgcagatcaggtgtatggngattctgaagtgtatgat

SEQ ID NO: 53194 - DNA, 333 bp, Glycine max
  unsure (1)..(333): unsure at all n locations
  Clone ID: LIB3109-031-Q1-K1-A12
cgggccgaccgacgcgtccgaccgggggtacaaaaccaataaaaggggttttagtggagagtcttggaccctacacggggggggtgattaaaagggctgggggggtacngtacctcatactaagccgttagagaagtagagctatgatgtgaggattagtggaggacggcagttaggatgtgaggagccaaccgaacgtcataggagggcagacacgcgggaggcagttgctgctgggacctatcctgatgggaataggccggcttataccatggcacatgatgacagagagcgggtcgactgtgctgatgaagagaatcctaggacgtggtc

SEQ ID NO: 53195 - DNA, 420 bp, Glycine max
  Clone ID: LIB3109-031-Q1-K1-A2
cgacgcaagggggggagacagtgagagataatccccgagccttttctatcacgattacacgaccgaatcaaacccctctttctctccgaagctgcttttaatatcgtactggccttcgattgttctcctctttaatacatactgttctctcttcgatttgagggaacagtacaagagtctgagcatcggttaacccaactgcacaggtagtctccaaataatggagcctcatgatgagactggatgccaggctcctgaacgccccattctttgcattaataattgtggcttctttggaagagcagctaccatgaacatgtgttccaagtgttacaaggacatgctgttgaagcaagagcaagacaaatttgcagcatcatccgttgaaaacattgtgaatggcagttccaatggcaatgg

SEQ ID NO: 53196 - DNA, 446 bp, Glycine max
  Clone ID: LIB3109-031-Q1-K1-A3
aaaacaaacgacggaggccgtgacatctttaagccaattgcaatcaaacaaaggttcagtttttggtgttccatttttcttcctccatctttatcttaaacataacttgaactctccattccttaaattttagctacgagctagttccgacacagacaaagcaatggtaaagaccgagttagaggtgactgttgagagcaagaacaaagacctcaagcacctggggtttgtgaggattgctgctattcaaacatttgtgattgtgtcaaatctgtatgagtacgcaaagcagaattctgggcctttgagatccgtcgtaggaacggttgagaacactgtaaccaccattctcggtcctgtctgcaacaaattcaaagacgtccctgatgatgtccttcgttttgttgacaaaaaggtggatgaagcttcccacaagttcgatgagc

SEQ ID NO: 53197 - DNA, 421 bp, Glycine max
  unsure (1)..(421): unsure at all n locations
  Clone ID: LIB3109-031-Q1-K1-A4
gggcaagaacagttgttacaggaagggcaaagcttggaggaatccctgtgggagtagttgctgtagaaacacagacggtaatgcaaataatacctgctgatcctggccagcttgattctcacgagagggttgttcctcaagccgggcaagtgtggttccctgattccgcaaccaagacagcccaagcaatattggatttcaacagagaagagctcccgcttttcattcttgcaaactggagaggcttttcaggagggcaaagggaccttttcgaaggaattcttcaggctggttccactattgtggagaaccttagaacatacaagcagcccatatttgtatatatcccaatgatgggcgaactccgtggtggggcatggngtgtttgtgacagtagaatcaattcagaccacatcgaaat

SEQ ID NO: 53198 - DNA, 356 bp, Glycine max
  unsure (1)..(356): unsure at all n locations
  Clone ID: LIB3109-031-Q1-K1-A5
ggtagtataaataaaatagtgaacacttggaaaacgacagcccgtttcatcaaatagaaccgtagaggcctaaacgacgtagcgcgcaagcaagggggaaaatcgcgacctatataaattaaggttttcaaaatcagatacagacggaacgaagaacagttagtttgagatttatgacttgatggatacggaagaaggagctcatggaaagggaacacaggtggtatctttgaatgaaaagccaccaactncaccgcgccggaggtcgatccccgcctcctaaaagccatcaagacggtggttcgctattccgattcggagctccgcctcgcaacccaaacccttatggatctcat

SEQ ID NO: 53199 - DNA, 439 bp, Glycine max
  Clone ID: LIB3109-031-Q1-K1-A6
ggacccttaaaaagagatagtaactccaactccaagtgacattggtgacaaagttagaaacaaggagaaagaaagaagatggcaggaaagaaaatcccagatgtgttgctgaattcaggacacaaaatgccagttataggcatgggaacttcagtggagaatcggtccatcaaatgagacccttgcttctatctatgttgaagccattgaggtgggttaccgtcattttgacactgctgcagtgtatggaacagaggaagccataggcctagccgtggccaaagccatagacaaaggccttataaagagtagagatgaagttttcatcacttcaaagccttggaacacagatgcacaccgtgaccttattgtcccagctcttaagaccacattaaagaagctggggacggagtatgtggatctttatctgattcattgg

SEQ ID NO: 53200 - DNA, 288 bp, Glycine max
  Clone ID: LIB3109-031-Q1-K1-A7
agccccactcaaccaccgcaccactctctctgctcttcttctacctttcaagtttttaaagtattaagatggcagagacattcctatttacctcagagtcagtgaacgagggacaccctgacaagctctgcgaccaaatctgcgatgctgtcctcgacgcttgccttgaacaggacccagacagcaaggttgcctgcgaaacatgcaccaagaccaacttggtcatggtcttcggagagatcaccaccaaggccaacgttgactacgagaagatcgtgcgtgacacct

SEQ ID NO: 53201 - DNA, 410 bp, Glycine max
  Clone ID: LIB3109-031-Q1-K1-A8
ggagagaaattttagtgattgatcttaaacgacaagtatggaggttacgttcaatttcaagaaaaattgcttgagaagctgtgtttgaagagcaacttcaatataaagtaaatgatttgtttttttttgttagatcagcatcaataaaaagtaaatgattgatcgattgattctagaggcatccgatacctgctcagtggtgtcaacagttgagtgttgaaatgggtgtgcccgctgagaacgatggctgcaaatgtggaccaaactgctcctgcaacccctgcacttgcaagtgaggtgttgggagagcaagcttcaagcagagatagcccttaattaggaataatgataaactattaatgtgtagctaaaaacttatgtattatgtctgtgatggttttcgtgcactc

SEQ ID NO: 53202 - DNA, 426 bp, Glycine max
  unsure (1)..(426): unsure at all n locations
  Clone ID: LIB3109-031-Q1-K1-A9
ggggcgaggtagccagagagtgatacaatacagagtgcgttgttgctccttcgccacaactccctgccaacatgggtatctccagagattctatgcacaagaggcgtgccactggtggcaagaagaaggcatggaggaagaagagaaagtatgagcttggtcgccagcctgctaacactaagctgtcaagcaacaagacagtcaggaggatccgggttagaggtggaaatgtgaagtggagggcactgagattggatactggaaattactcctggggaagtgaagctgtaactcgcaagactcgtatactagatgtggtttacaatgcctcaaacaacgagcttgtgcgtactcagactcttgtaaaaagtgctattgttcangttgatgctgctccattcaaacagtggtaccttcagcactatg

SEQ ID NO: 53203 - DNA, 428 bp, Glycine max
  unsure (1)..(428): unsure at all n locations
  Clone ID: LIB3109-031-Q1-K1-B1
gccactgatttctccttcatgtttgcacggttacaccgttataatacaagccttaatccccacttttgtctctcacaatcgctctcaatctttccagattttctcccaaaccgttcaaacccgtatcgcgtgtcaaattgttcttctgattttctcattgatcgcgattatcgcatctcaaatcgaacttgaatcagtcatctttatatggaggggaatccaagaggtacaataatatacccagaggacaccatcatttgacaacacagaagaaacaggagattagggaagcctttgaattattcaatactgatggctcangtactattgatgccaaggatctgaatgttgccatgagggcccttggatttgaaatgacagaagagctcattaatcaaatgaaagcagatttggacaacgatggaagt

SEQ ID NO: 53204 - DNA, 408 bp, Glycine max
  Clone ID: LIB3109-031-Q1-K1-B10
ggatcagcttgttgggttgctgcaaaggatcctaatcttcctaacagaactggaggtgaaagtttgcatagagatgttgtgtgttcaccatcggggagctttcaatgggatagccgggggcgttttgctggtgaaattgagaatccttcttatcacacctcccatgtggacagtagaaatgtcagcatggagctaaaaggttcgttaagttctgaaagaggtaatttatcagatggtggaagcattgttgagaattctgtaacacctacttttctgaagtcccctgttgatgaggcattggttgcaaatctgatgacccccacttctgatctgtccatgtcaagcaatttttctacagtggtgaagaacccagcagaatcttcaataccaaatctttctttttcaata

SEQ ID NO: 53205 - DNA, 432 bp, Glycine max
  Clone ID: LIB3109-031-Q1-K1-B11
ggggggtgttagggtgttgattctctgcgacgctcttcgcattgcggtaccctgcaccttcctcgcggtattgcgcgcctgcctcactcccattccgtttttccgctcccctctctgtgttgcgaaaataagggttcattggtttggggctaattcttcttccgatttcgagccgagtgaaatcgttaagagagaaaatgtacgctgatcgtatggagggtggagccaggaggcccgtgaaggaacgccttaataatgggaatggcgtcattggctctactcggcagcagcagcagcgtcaaatcactggcaagaggtcgaggcaagatgacaagtgggaacatgatctcttcgacaatgacaaacctcagatcactaattgcaaagttagtgctccagatcttcgcctcaagcttcaaaggaagggtcttc

SEQ ID NO: 53206 - DNA, 456 bp, Glycine max
  Clone ID: LIB3109-031-Q1-K1-B12
acgacagaagggggaggagatgaggccttgagtgttggtgtaggtccttcgaagagcagcatgccgcatgtcatcgatgggatattgaatgcggttgaggttatgaagttgaacaattctcgcagtagtcttgatggagaggtttgtgctgatttagttatgaagagctggtcgacgaggaataatacaggtatgctgtttactttggtggctgctgtttgcattgtgttgagcttgtccatagtgattcgtaggaggttgattgggtcgagggaatctgtgtcttggtcaaggttgcctgtgaatttgtcggatgatagtgttaagaattaagattggtgatatatagttatatcaaaatataagaaaaaaagattggcaatgtttagtcagcaagtgaataagttgtgtgtaaaaatatcagcaaatctagccatctaatgttgtggccctcat

SEQ ID NO: 53207 - DNA, 392 bp, Glycine max
  unsure (1)..(392): unsure at all n locations
  Clone ID: LIB3109-031-Q1-K1-B2
ggaaacgaccgggccgtgctggtctncgatggcttccgcataccgtgaccgcacgtcggagttccggttattattggagactctgaagaagatcggaagtccggtgcaacccgagaatgctgcttcgacctctcatggcgagtcgtattcgagatccgaattcaaccgaaaggcctcgcgtatcgggttggggatccacgagacctcgcagaagatcgcgaggctcacgcagctggcgaggaaatcgtccatgttcaacgatcccgcagtggagattcaggagctgactgttctgatcaagaacgagatcacggcgctcaactcggctctcttcgatttgcaaaccgttcagaacacggatatggctgacggcggttactcgcaggatacga

SEQ ID NO: 53208 - DNA, 412 bp, Glycine max
  Clone ID: LIB3109-031-Q1-K1-B3
gtccaacaactgcaactactactactcatcattgtctcaaaaaccttctctctcaacaaaacctacaacaacaacaaaaaagagaaatttttttagaacaatggaggcatcaaagatgaagtttttcttggttttggtgattgccatgttggcgatggtagcaactggggtttcagctgctgaggcacctgccccaggtccttcatccgatgccaccaccttctttgtacccactgctcttgcttctctctttgttcttgcatttggccttctcttctaattaattcttcaacaacctttggttatttgttacattacatatatggaattcactttgttcagaggtggttgtgttttgtgtttcgttcttctctttttttccaactcagcttgagtagtggttggtcactac

SEQ ID NO: 53209 - DNA, 423 bp, Glycine max
  Clone ID: LIB3109-031-Q1-K1-B4
gattgctaggggagtgatgttgggtcctgaccagcccgggatcctgcacatgcttggcattcctccggcagcaaagtcattgaatggggttaaaatggaattggtggatgctgcattccctcttcttaaaggtgttgttgccacaactgatgtggttgaggcatgcactgtggtcaatattgccgcgatggttggtggattcccaagaaaagaacgtatggagaggaaggatgtgatgactaaaaacgtatgcatttacaagtaccatgcttcttgccttgaaaagcatgctgttgccaactgcaaagttcttgttgttgctaacccagcgaacaccaatgcattgatcttgaacgaatttgctccatctattcccgagaagaacatttcttgattgactagatcggatcacaacagggcatt

SEQ ID NO: 53210 - DNA, 400 bp, Glycine max
  Clone ID: LIB3109-031-Q1-K1-B5
gggccaagcgaagggaaagggttaggcatcattcatacactgaacgaacgctcagctcagtcaggtgccggcgttcctctttcacgttctcatggaaaacgacgacgtcgacatgcacgctgccgacaccagcgaagaattggatgacatgaagaagcgcttgaaggagatggaagatgaagctgctgctttgcgagagatgcaggccaaggtcgagaaggaaatgggatctgcgcaagatcctgcaaatgcttctgcaagtcaggccaataaagaggaaatagattctcgatcagtctttgtaggcaatgtggactattcatgcactcctgaagaagtgcaacagcattttcagtcttgtggaacagtaaacagagtcaccattcgaactgataagttt

SEQ ID NO: 53211 - DNA, 437 bp, Glycine max
  Clone ID: LIB3109-031-Q1-K1-B6
gactttcagtgtgagatcttcgtctcttctcttgcttgcttcttcaattcatctccgaaccgcgtttctatttttgactctctctctctactcagtttcgtcatactgtgggaaattttggacaaggctgatgcaaccacaattgcggtcgcagagtctaaaaaccttgatgttgtggccaaaatcatgtaagaatgtatactaatattggtgtgccaccgggggtacctcagcatcatcctcaacctccaacgagctcacaacctaatctgttcgggaatgcattcaattctgctggttctggactcattcgaggtggattgggtgcgtatggagaaaaaatattaggatcaagctccgagtatgtccaaagcaatataagccggtatttctctgatccccaatactactttcaagtgaatgaccactatgttaag

SEQ ID NO: 53212 - DNA, 374 bp, Glycine max
  Clone ID: LIB3109-031-Q1-K1-B7
gttcgatggaataatttattaagtatattgcctcaccccgaaggattaggtccatttttcacaggtcagtggaatctttatgctcaaaaccccgattccaatagtcatatatttggtacccctcaaggagcaggaactgctattctaacacttctcgggggatttcatccgcaaactcaaagtttatggctgaccgatattgcacaccatcatttagctattgcatttctttttctagttgctggccatatgtatagaaccaacttcgggattggtcacagtataaaagatcttttagaagcacatactcctccggggggtagattggggcgtggacataagggtctttatgacacaatcaataattcaattca

SEQ ID NO: 53213 - DNA, 400 bp, Glycine max
  Clone ID: LIB3109-031-Q1-K1-B8
ggactcaatacgctactgagtcggtttcttttctctattctttttttctttctttcttttcaatagtaaacgcaaaagctcacaaacaacacaatttctgctgggtcttctcttcggggtcagactctaaaagcaagcatctatctaattgatggaagcgtgttttcgtaattttatttcattttagtttttgttattatttcatgaatcatgatcatcgtcttcttctctcgacaaaaccaataagtgtccacttcttttcacgttttcaatcgttctagtctttgttctttgatcttcattcattctttttcgatcacatcattcttaacgacaccattaattaccaccttcagtttcgttaacaatcaatattttttttttttcaaatttgttttca

SEQ ID NO: 53214 - DNA, 431 bp, Glycine max
  Clone ID: LIB3109-031-Q1-K1-B9
ggcacaagtgagtttgttgatcgagataactagaaacagtgtgatgaaaatgaaggtccttgttttcttcgttgctacaattttggtagcatggcaatgccatgcgtacgatatgttccctctccgaatgaacactggctatggtgcccgtactccggaggtgaaatgcgcaagttggaggcttgctgtggaagcacacaacatctttggctttgagaccattcctgaagagtgcgttgaagcaacaaaggaatacatccatggcgaacaatatagatcagactccaaaacagttaaccaacaagcttacttttatgccagagacctcgaagtccatcccaaggacacatttgtgttcagtatagatggcaccgtactctctaatattccatactacaaaaaacatggatatggggtggagaaatttaact

SEQ ID NO: 53215 - DNA, 429 bp, Glycine max
  Clone ID: LIB3109-031-Q1-K1-C1
gacaaacaaatggcgagcactctgctgtccgtacaccactttctcccctctcaaaggagggaaaagatcggttgcttgagtggtgtcagaacttcattttgtggtcaagttgtgtgcaattcaagtttctgtgggagacaaataactagaagccatggaaaccgtcttgttgttcactcactgcttggaaggaaggtgaagtctgtgaagagcagagagactgtaattcctgaaccagattacaggattccaattgtgctactcggtatagctggtggattggtttacacagataatttggtacctgcagtacctgttggtctccttggattgcttctgttgtttcagaccactagagtgagatttgtctttgatgatgaggctctggaggtaaagataggtgaacagctccaggaatcaggtgagaat

SEQ ID NO: 53216 - DNA, 380 bp, Glycine max
  unsure (1)..(380): unsure at all n locations
  Clone ID: LIB3109-031-Q1-K1-C10
taagaaggaggagaagcaccacaagcatcttgagcaccttggggaacttggtgctgcggctgccggtgcttatgccttgcatgagaagcatgaggccaagaaagacccagagcatgctcacaggcacaaggtagaagaggagattgcggcagcagctactgttggtgctggtggttttgtcttgcatgaacaccatgagaaaaaggaagttaagaaagaagatgaggaagctcatggaaagaagcaccaccatctgtttggctgaacatgataaatattcatatataattaatattcaagctccaaagtatcaccatgcctgtgtatctctatcatatcttccatttctagtgtgcctttgagtaanatctgtgcgagct

SEQ ID NO: 53217 - DNA, 436 bp, Glycine max
  Clone ID: LIB3109-031-Q1-K1-C11
gagagacaagaaaaacgagacctttagatggtcggaagatcaaaaggagaaagccaaacagcacctcctcagcaaattaacataaaaaacctctctttctctatttcttttattattgggtatgtcttgaagttcttctgaatttgaagcatatatttgtccttgaatggaaacacgtgctggaagtgatattaagatggccatagatgatgctttgaacgccttctctcctgtttccacccccaggattttctggaaatcacgaaggagatcagctagcgggaggaatttagaggtatcagaagatactgctaataaaccacccagcaagcaggaagatactcctcctcctcctcctccaccttctagtgaggaggtgcagaacacgactccgatttctgagcgccgaaaggccttgtttgaaccgttagaaccc

SEQ ID NO: 53218 - DNA, 411 bp, Glycine max
  Clone ID: LIB3109-031-Q1-K1-C12
ttccgaccggttgcaaaagaccaccgaagggggaaccgaaaaaaatttaagggttttgaagggcgggccggcaatccaagaatttttttttgaactttccgccaccggctcatttaacaaggcttgaccaaaccaaaaagctttttttgaacaacccaaaagtgttctcagctcgaaaaaactgggaaaggaaagaaacccggaaagggtgggaaccgcttttggaaatccattgggctttggatttaagactcccagggaagccatcgaaggaacctacattgacaagaagtgccccttcactggcaatgttttcatccgtggccgtatcttggctggaacatgtcacagtgctaagatgaacaggactattattgttaggaggaattatctccattttatcaagaagta

SEQ ID NO: 53219 - DNA, 421 bp, Glycine max
  Clone ID: LIB3109-031-Q1-K1-C2
gagactgaagatgaggactcttctgctcccaccttcactatcacagtggatgtgaaatctggaacttctacgggtgtatcagctgctgatagagcgaaaactgttcttgctctgtcatctcctgagtccaaatcagaggatttcagaagaccgggtcatgtgtttcctcttaagtacagaaatggtggggttcttagaagagcaggtcacactgaggcctcactggacttagttgcactggctggcttgcccccaatttctgttctttcggctcttgttgatgaaaatgatggctctatgcaatctttgctcaatttaagaaagttagcatcggaatacaccttaccaattgtctcaataactgatttgataaggtatcggagaaagagagaaaaattggttgaaagaacctcagtttctc

SEQ ID NO: 53220 - DNA, 399 bp, Glycine max
  Clone ID: LIB3109-031-Q1-K1-C3
ggaaacagagagtgatttcagtgagtgaccggtgttcacttgatctcatcataatcgtcagcgtcaattgaagaagatgccgatcagaaacatcgccgtcggaaggcctgaagaggcgactcaccccgacacgttgaaggcggctttggctgagttcatctcaaccttcatcttcgtgttcaccggctcaggctccggcatcgcctacaacaagctcaccgacaacggcgctgccacccctgccggcctcatctccgcctccatcgcccatgcattcgccctcttcgtcgccgtctccgtcggcgccaacatctccggcggccacgtcaaccccgccgtcaccttcggcgccttcgtcggcggcaacatcaccttcctccgcggcatcgtctacgtcat

SEQ ID NO: 53221 - DNA, 434 bp, Glycine max
  Clone ID: LIB3109-031-Q1-K1-C4
ttaggaaaatgggggtaacaaggatcaaatctgcgagtgcgaccacttaagctattaggtgaaaaaacacgtgaatggttttatatgtttattatcatgtcaagtgttaaaacaataattttttttatcaagacaaattttgatcgacattgaaaagcctaactgaaatttcataactaaaagactctgcgctaccagaaatccagtgcctatacatttattcacatgcaatcatggatgttgtggattttctctcgccttgagtttggtcatgtgtggttgaatccttagtttaggacacattgttttactgctctaacatcaaactgtcctatcttctttacataagaaaggatatatttgaacagaatcagcatctctaattgttgtgcaacaaagagtgtgtaccctggaactagaatctttaggtaatt

SEQ ID NO: 53222 - DNA, 434 bp, Glycine max
  Clone ID: LIB3109-031-Q1-K1-C5
ggatcctttgtattctattcttcaagattcagacacagatggctcgtacgaagcaaaccgctcgtaagtccacaggaggaaaggctcctaggaagcagcttgcaaccaaggctgtacgtaagtctgcaccaactactggtggtgtgaagaagccccaccgttatcgtcctggtaccgttgctcttcgtgagattaggaaataccagaagagtaccgagcttttgatccggaagctccccttccagaggctggttcgtgaaattgctcaggacttcaagactgatctgcgtttccagagccacgccgtgcttgcattgcaagaagctgctgaggcataccttgttgggctctttgaggacactaacctgtgtgccattcacgccaagcgtgtaaccattatgcccaaggatattcagctggcaagaaggattcgt

SEQ ID NO: 53223 - DNA, 425 bp, Glycine max
  Clone ID: LIB3109-031-Q1-K1-C6
gttgagaggaatttgaggcatgcccttcagccggtttatgaagttctctttgagcgtctaaacactcatcctggagggttgaggaccttatccattcttcgagaagatatcctctctattctcacagaggaaaatattgcatcgctgagagcattggattcatatttaatggaaaaatttattacgtggcttagtcctgctgccttagagcttcaccagattacatgggatgaccctgcttctttgctggagaaaattgttgcctatgaagctgtgcaccctattagcaaccttctagatcttaagagaagactgggaattggccgtcgttgttttggatatttacatccagctattcctggtgaacccctaattttcattgaagttgcactactgaaggatgttgctcagactatacaggaagt

SEQ ID NO: 53224 - DNA, 371 bp, Glycine max
  unsure (1)..(371): unsure at all n locations
  Clone ID: LIB3109-031-Q1-K1-C7
ggagagaaagagtgaggagagaattacagagcattttccaacacgattacacgaccgaatcaaaccctctctttctctccgaagctgcgtttaatatcttactcgccttagattgttcttctctttcattatactgttctcttttcgatttgagggaacagtacaagagtgtggggatcggttaacccaactgcacaggtagtcactaaaataatggagtctcacgatgagactggatgccaggctcctgaacgccccattctttgcattaataattgtggcttctttggaagagcagctaccatgaacatgtgttccaagtgttacaaggacatgcttgtgaagcangagcaggacaattttgcagcatc

SEQ ID NO: 53225 - DNA, 382 bp, Glycine max
  Clone ID: LIB3109-031-Q1-K1-C9
ggacttgagaaattagacagagacgaaaggagtgtgaagaacgatggaaggtgtgaaattggaggacagatggggataccaggttgcaacttcttctcaggcctgcgtttcagccatcaactcctactaccatcaggttctcatctatggtagagagaggtctgtgattctggaagcagtggcacatgacaaacactgtgtcttggccaacatcttggcagcacatttcctttactcctctggttcttctcgtgctctcacttgtcttcatgccgctaagtcccaccttgaacatgccaccttgtacgagaaactagttttcgatgccatcagttatatgctatctgaagatagagacgatgatgtagctgttgaattgcat

SEQ ID NO: 53226 - DNA, 429 bp, Glycine max
  Clone ID: LIB3109-031-Q1-K1-D1
gaccgcaaatggcagcattgaacctttgccgcatggcacttcgatcctcgaagcttctctctcgcccttatcatcgtctttctgttcagttgcagatgcagatgcagccctcttctccttcactcactcgaaagatgagcatggatgcacagagtgttgcttctcagcttaatagttctggattgttgaggactcagggccttgttggagggaaatggagtgatgcttatgatggcaaaaccataaaggtttataatccagcaactggtgaatctattgtagatgttgcatgcatgggtggaagagagacaaatgatgcaatttctgcagcctatgatgcatatggatcatggagcaaaaccactgccgctgaacgaagcaaatttctgaggaaatggtatgatttgctaatggtacataaagaagaac

SEQ ID NO: 53227 - DNA, 430 bp, Glycine max
  Clone ID: LIB3109-031-Q1-K1-D10
ggaagaaggaaggggtcattcatatgatcccgtgtttgtttgggtcttttctcaattcttcaaccaacccattccttccccacgcgtcattctccggccaccgtccacgacggagcgccgttaccgctttaatatttccccaaaaggcttcggcgaccgcccgtgatggataaagtcttcaacaagctccgcaatttggacgcttacccaaaagtcaatgaagatttttacaaccgcacgctcgccggcggcgtcgtcaccgtcgtttccgccgctgtcatgctgtttctcttcttctccgagctaagtttatacctctatacagttacggagagtaagcttttggtggatacttcaaggggagataccttgcacatcaattttgatgtcacttttcctgctgttcgatgttcaatactcagtttagatg

SEQ ID NO: 53228 - DNA, 433 bp, Glycine max
  unsure (1)..(433): unsure at all n locations
  Clone ID: LIB3109-031-Q1-K1-D11
gacaatactaggtagcatagatattattatgggagaagttgatcgttgaaatgataatttatttaacagagatacaagatatccattttttttcagattggaatcttttaaagagatatatggaattatatgggtatttgcccctattttgattcttatattgggaattacgataagtgtactagcaattgtatggttagaaagggaaatatccgcagggatacaacaacgtattggacctgaatacacaggtccttttggagttcttcaagctctagcagacggaacaaaattacttttcaaagagaatcttattccatctagaggagatattcgtttattcagtataggaccatctatatcagtcatatcgattataataagctatttagtaattccttttggctataactntgttttatctgatctgaat

SEQ ID NO: 53229 - DNA, 431 bp, Glycine max
  Clone ID: LIB3109-031-Q1-K1-D12
ggaagcagtgagtgagggaataatgttgcggattgctcccaaattcttcaccacggttcctcttcggaccatttcacccttcgcatgtcgcttctcagtccgttccatcgctgactcttctcctttcaacaaaatccgcattcaaagggatgatactgttagtcataatcacaacccattcaaagggttgctttgttttgccgcattttgtcgttaattttccgttttcttttgtctgcaaaatagaatttttctaactttttttttagtaatgggtttctgagttgaacttggaaggtattgatgagactctgcagtgacaaagataaagtttagaacttttcagcatcaatttgttgggggtaattattgtctggaaacagtgaattggagttacaacttagaactgattgtttcatgatgtgctaata

SEQ ID NO: 53230 - DNA, 415 bp, Glycine max
  Clone ID: LIB3109-031-Q1-K1-D2
gataggaggagtcttcaatcttcatctacatcagttctagctataccgttccttctgctactactcaactgcaaaggatggtgctgcccaagttctctctgtgcttctggcttctcctttcttcacttgtgattctcttaataaattgtccagttaaatgtgacgatgatgaggaagacaatctctatcaaggtatcaacaagtatcgagcatcgttaaacttgaaagctctaacaaggaatgataatgcaaattgccttgccgaaaaactagctaaccaattcaagaaacaaccctgcacaaataccacaggtgctaacactgtacctggcacagaacctcagttttccaactatccagaccttttatccaagtgtgacttggctatttccaacacaagggatggaaatgtaat

SEQ ID NO: 53231 - DNA, 433 bp, Glycine max
  Clone ID: LIB3109-031-Q1-K1-D3
caatatgggaacactgtcagatctggaatgggttatggtacacatgggtatgattctcgggctaatgggcgggcttggttggctgttgacagcaaatacaaaactaggggaagaagtggtggctattttggctatggaaatgagaatgtagatggcttgaatgaactgaacagaggccctagggccaagggtggcaaaaaccaaaaaggttttgcaccaactattttggcagtcaaagggcagaacttgcctgcaagtttaggcaccgatgaagagaaagacaagactagtaccgttccggaccgtgatcagtataacaaagctgattttccagaagaatatactgatgctaaattttttgtcatcaagtcttacagtgaggatgatatccataagagtattaagtataacgtgtgggccagtacccaaaatg

SEQ ID NO: 53232 - DNA, 434 bp, Glycine max
  Clone ID: LIB3109-031-Q1-K1-D4
ggttctagtgtgtgattgtttgttgttgtaactcgttcttcttcttttgttgttctgtgtttgtgtttgttttttctctcacctgaaaatgtcttgctgcggtggtaactgtggttgcggaagctcctgcaagtgcggcaacggctgcggaggctgcaagatgtacccagacttgagctacactgagtcaaccaccaccgagaccttggtcatgggagtggcacctgttaaggctcaatttgagggtgctgaaatgggtgtgcccgctgagaacgatggctgcaaatgtggaccaaactgctcctgcaacccctgcacttgcaagtgaggtgttgggagagcaagcttcaagcagagatagcccttaattaggaataatgataaactattaatgtgtagctaaaaacttatgtattatgtctgtgatggttttc

SEQ ID NO: 53233 - DNA, 432 bp, Glycine max
  Clone ID: LIB3109-031-Q1-K1-D5
ggaggaatgaagagagagaacaaagcacttagtgctagtcaataattacgaaaaaccaacagcgagtgttgtttttgtttggtccaggctggaccagggaatgaatagagatgagaggctttcggttgaagagaactgagttaagcggcgaagccaaacgcagaatcggcggcagaaattgccaccgggagcacgtcgaagacgggtgaaccaaacacaaaattccatccaccacttctcttttcaatccccaactcaaatctgtgaagaaaatctcaatttctaaattgtaattcttagcactactgctagtagtagtaaaaaaaaacaattagaaagtagtagagtgtttttttttctttttttcgtttgttttacttttaagatgggtgagaagagcaacgttggcggcgacgcgattaacacgacact

SEQ ID NO: 53234 - DNA, 439 bp, Glycine max
  Clone ID: LIB3109-031-Q1-K1-D6
gtcaacggcgttgaatcaaggaaacttgatgagactccagtgcctgccacaaacggcactgaagaaaagtgtggatcatgtggtggtaccacttatccatcgccaccgccaccagtactaccaccaccatcaccaccaccgccatcgccaaagaaacaaccaccctctcagtattgtccgccaccaccaccatcgtcgttcatatacatcaccgggcctccggggaacttgtatcccgtcgacgagaatttcagcggagccatcagccaccgccaccgccggagctttgccaccatgttgttgccacttttggttggcttgtttagcacgcttgcgttttggtgattcgcttgtgaagaaggtaatagtaacgatgtatcattcagatcattctaaacacaaatacacaatggaagaattttatggtttatgatgttat

SEQ ID NO: 53235 - DNA, 428 bp, Glycine max
  Clone ID: LIB3109-031-Q1-K1-D7
ggttctagtgtgtgattgtttgttgttgtaactcgttcttcttcttttgttgttctgtgtttgtgtttgttttttctctcacctgaaaatgtcttgctgcggtggtaactgtggttgcggaagctcctgcaagtgcggcaacggctgcggaggctgcaagatgtacccagacttgagctacactgagtcaaccaccaccgagaccttggtcatgggagtggcacctgttaaggctcaatttgagggtgctgaaatgggtgtgcccgctgagaacgatggctgcaaatgtggaccaaactgctcctgcaacccctgcacttgcaagtgaggtgttgggagagcaagcttcaagcagagatagcccttaattaagaataatgataaactattaatgtgtagctaaaaacttatgtattatgtctgtgatg

SEQ ID NO: 53236 - DNA, 436 bp, Glycine max
  Clone ID: LIB3109-031-Q1-K1-D8
gatgaatgaaattaccaaatttaccttcactttcccttctcttctcttcttccttgtctaagttgctggagaggtcactgcaaacatcgagaagggagggtgaaaaaaatcgtaggagagctagacaacatggagttcagtggggccatcttggtattttgtttcctctatctgcattagttgcttatgctaattgttgcttctttttgttttctttggtcttgtaaggccaacttctccaaggtgttgaccgcgcagaacaagaatttaaataggacaaaaatgttgctaatgcaatagctggagaaaagttgaaattactgtgatgcgcattccaaagcaatacaatggataacaataaaatgaaaccaaaagcaagagtccttatgcttttgcaaaagtacttttgcctcaaaagtacttttacacctaattt

SEQ ID NO: 53237 - DNA, 406 bp, Glycine max
  unsure (1)..(406): unsure at all n locations
  Clone ID: LIB3109-031-Q1-K1-E10
agttgtaaattaaaagcatgggtgcgcaagctcttgtatcatcatcatctcttaccttctcagccgaggctacaagacaaagtcttggaccaagatcactccaatctccatttggcttctcaagaaaagcctcctttcttgttaaggcaactgctactccccctgtcaagcaaggatcagacagacctttgtggtttgcatcaaagcaaagtctttcctacttggatggcagacttccgggtgactatggatttgaccctctgggactttcggaccctgaacgaacaggagggttcattgagccgaaatggctagcatatggtgagataatcaatggtcgttatgcaatgttgggtgcagttggtgcaatagcaccttgaattctangcaaggctggtctgatccc

SEQ ID NO: 53238 - DNA, 397 bp, Glycine max
  unsure (1)..(397): unsure at all n locations
  Clone ID: LIB3109-031-Q1-K1-E11
gatcaaggaaatttttcgaactgatggcgaacagttcctcaagtatccaccacctaaagtgatgcaggtggataagtctgcatggatgactgatgaagaatttgcaagagaaacgattgctggtttaaatccaaatgtcattaagattatagaggagttcccactaagtagcaagctagatactcaagcctatggtgatcatacctgtataatagcaaaagaacatttggagcctaacttaggtgggctcactgttgagcaggctatccaaaacaagaagttgttcatcttagatcaccatgactatctcattccttatttgaggaaaataaatgcaaataccacaaagacttatgctacangaaccatatttttctttgaagatgatggaactttg

SEQ ID NO: 53239 - DNA, 423 bp, Glycine max
  Clone ID: LIB3109-031-Q1-K1-E12
aatgatgaagtagatggaaaaccaggtgcagctgcaatctttgtgaaggtcagcatggatggggctccctatctgaggaaggtagatctaacaaattatacaacgtaccgggaactgtcttctgcacttgagaaaatgttcagctgtttcactctaggtcaatgtggttcccatggagctccaggaagagaaatgttgagtgagagcaagctgaaggacctcctgcacggttcggaatatgtactcacttatgaagataaagatggtgactggatgcttgttggagatgtaccatgggatatgttcatcgacacatgcaaacgactgaaaatcatgaagggttctgatgctattggcttagctcccagggccatggaaaaatccaggagcaggtgctagttggtattggaactgatgacttcg

SEQ ID NO: 53240 - DNA, 433 bp, Glycine max
  Clone ID: LIB3109-031-Q1-K1-E2
gaagtccaagtggtgtcctgctccaggttgtgaatatgcagttacttttgatgctggtagtactggaaattatgatgtctcttgcctctgttcatatggcttttgttggaattgcactgaggaggctcatcgcccagtggactgtggcactgtggcaaagtggattttgaagaacagtgcagagtctgaaaacatgaactggatacttgctaactcaaagccatgtcccaagtgtaagcgaccaattgaaaaaaatcatgggtgcatgcacatgacatgcactccaccctgtaaatttgaattttgctggctatgcgttggtgcatggtcagaccatggtgaaagaactggtggtttttatgcttgcaatcgttatgaagcagctaaacaagaaggagtgtatgatgatactgaaagaagaagggaaatggca

SEQ ID NO: 53241 - DNA, 430 bp, Glycine max
  unsure (1)..(430): unsure at all n locations
  Clone ID: LIB3109-031-Q1-K1-E3
aatgtagatgtaatcaaacataaatgcattatatctgtagatagaatactcactagcttagtgagtacattgtagtttgttggcgagcattatgaagaatcaatgctattttaattaagcgcatccgtctcttctcacttcatgtggtactgttcaacattgattatgaaattcatatactgtaatttagcaatcacgtcaagggtgagttataatatatatactccctccctctcttcatttgtaaagttcatgatcttgttcaacaactcgaaaagatttacatcaataaataatcacataaataaatttaacatcacataataatttaaaatcttgaaatttaaatttgtaagtcttgtatttacttatatgacattcaaatttttcattcttatatttcttttattatgtggaactntatctcata

SEQ ID NO: 53242 - DNA, 391 bp, Glycine max
  Clone ID: LIB3109-031-Q1-K1-E4
gggcatttctaataatatcaaggtgtattcctattttggcatttctaatttctggaattttagccccgattagcacgggaccagagaaactttctagttatgaatcgggaatagaaccaataggtgatgcttggctacaatttcgaatccgttattatatgtttgctctcatttttgttgtttttgatgttgaaacggtttttctttatccttgggcaatgagtttcgatgtattaggggtatccgtatttatagaagctttcatattcgcgcttatcctaattgttggtttagtttatgcatggcgaaagggggcattagaatggtcttaattcttgactatttagacaattagattagacaattagaaaaaaatattgagacaattatg

SEQ ID NO: 53243 - DNA, 427 bp, Glycine max
  Clone ID: LIB3109-031-Q1-K1-E5
ggggagagaatagagaagagagatggatccagacgcgttggcaaaggcattcgtggagcactactacagcaccttcgacaccaacaggaacggcttagcgaatctctaccaggagggttccatgctcactttcgaagggcagaagatccaaggcgcttccaacatcgttgccaagctcacctccctcccttttcagcagtgccaccactcaatctccaccgtcgactgccagccctccggcgtcaacgccggcatgctcgtcttcgtcagcggaaaccttcagctcgccggcgaacagcacactctcaagttcagccagatgttccatttgataccaacacctcagggaagctattatgtgttgaatgacatattccgtttaaactatgcatgaagatgtcatatgaccggaaaggccatagaagaa

SEQ ID NO: 53244 - DNA, 398 bp, Glycine max
  Clone ID: LIB3109-031-Q1-K1-E6
gaagagaaaagcgagcaatgggtgtgaactcttactgcaacagcatgaagatccaagccgagatacaaatgccacccttagaaatccacaaggttcgtttgccaccagaacgcaccaccttgcagaaactcagacacagactctctgagatcttcttcccagatgatccactccacagggaatcagctatgctaagcttgcaaacttgccacctattcttggattatattccagttttgtgcccccgttgatatattccctgcttggaagttctagacatcttggtgttggtccagtttcaattgcatctttggtcatgggatcaatgttaagcgagaccgtttcttatagtcaagatccaattctctatcttaaaatggccttcactgccactttct

SEQ ID NO: 53245 - DNA, 429 bp, Glycine max
  Clone ID: LIB3109-031-Q1-K1-E7
gaaggggaccaagtaatggaggatgatcctggatgcaacagagagtgtttgctgtccaagtgtttgagttgcatagactgataaaggtccaacagctaattgctggatcaccagatattttgcttgaagatggcgcttttctgggaaagtctcctccaaagggatctactcccaaaaaacttgcacttgaatatgttgtaaaacctcggcaacaaaaccttaagcgcaaagatgattctgaaaagctaaatcataaaatggaatgttctgcagagaatgcggttggcaaaacatctctttcatctgtgaaagacggtagccacctttcaaaatgcacccctttccctggaaatcagcaccagacaaatgcggctgctgacagtgggatgggtccctggtgtttcaatcagtcaccacctgggcacccgt

SEQ ID NO: 53246 - DNA, 431 bp, Glycine max
  Clone ID: LIB3109-031-Q1-K1-E8
gacactaaacaagttaaaagaagagcatcactgaactaacaaagcaaccctatgtcgaaggtggtttgtgtcaccggagccagcggcgccatcggatcatgggtggtcctactcctcctccagcgtggttacaccgtccatgccaccgtccaagatatcaaggatgaaaatgagacgaaacatttggaggaaatggaaggagcaaagagtcatctccatttttttgaaatggatcttcttgacatcgactccattgccgctgccataaagggttgttccggcgtaatccaccttgcatgtcctaacatcattggtcaagtcgaagatcccgagaaacagatattggaaccggcgataaaaggaacggttaatgtgttgaaggcggcgaaggaagcaagggtggagcgcgtggtggcgacttcatcgatttc

SEQ ID NO: 53247 - DNA, 429 bp, Glycine max
  unsure (1)..(429): unsure at all n locations
  Clone ID: LIB3109-031-Q1-K1-E9
gaacaaaggagttgtaaattaagagcatggctgcgcaagctcttgtatcatcatcatctcttaccttctcagccgaggctacaagacaaagtcttggaccaagatcactccaatctccatttggcttctcaagaaaagcctcctttcttgttaaggcagctgctactccccctgtcaagcaaggatcagacagacctttgtggtttgcatcaaagcaaagtctttcctacttggatggcagccttccgggtgactatggatttgaccctctgggactttcggaccctgaaggaacaggagggttcattgagccgaaatggctagcatatggtgagataatcaatggtcgttatgcaatgttgggtgcagttggtgcaatagcacctgaaattctaggcaaggctggtctgatccctcangagacagcac

SEQ ID NO: 53248 - DNA, 426 bp, Glycine max
  unsure (1)..(426): unsure at all n locations
  Clone ID: LIB3109-031-Q1-K1-F1
gaaagagagaagtaacatcaaggtgcagagagaggaattgaagcatgggaagagggaaggtggttctggagagaatacagaacaagatcaatcgccaagtaaccttctcaaagcgcagaaatggtttgctcaagaaagctttcgagctatctgttctatgcgatgctgaaatcgctctcgtcatcttctccagccgtggcaagctttttcagtatagtagcactgagtatttttcttcgatctctcatcttttttatcattataatcctaggttttgatttttcaacatatattgctggttggtttgggttgtttttttagtattacacacacacacatatatatatatatatataggcaataaatctctgaaatttgcgtggttccgattgttttcttctattaattgngatgtagctagggttt

SEQ ID NO: 53249 - DNA, 391 bp, Glycine max
  Clone ID: LIB3109-031-Q1-K1-F11
ggagcagagccgatgtggtagagcagttcctcccagaccacaatgaatccatttctgcagttcttgacaagtttggtgccatgggaattgacacccccggcgtagttgcattgcttggagcacacagtgttggtcgaacccattgtgtgaagttggtgcaccgtttgtacccagagattgatccagctctgaaccctgaccacgtccctcacattctgaagaagtgccctgatgccattccagaccctaaggccgtgcagtacgtgagaaacgaccgtggcacccccatgattctagacaacaattactacagaaatatattggacaacaagggcttgttgatagtggatcaccaactagccaatgacaagaggaccaagccttatgtgaa

SEQ ID NO: 53250 - DNA, 387 bp, Glycine max
  Clone ID: LIB3109-031-Q1-K1-F12
gacgtctaacagctaaatatcatcaaagtactcagattagcatggctgtcatggttgcattcttgaatttgatcatcatcttttcagtagtctctacaacaggcaagtcactgagcttaaactactatgcaaaaacatgccctaatgtggagttcattgctgccaaggcagtaaaggatgccactgctagggacataactgttccagcagcaattctgcgaatgcacttccatgattgtttcgctcgggggtgtgacgcctctgtgctgctaaattcaaaaggaaacatcatagcagaaaaagacgctccaccaaatgtttctttgcatgcattctatgtcattgatgcagcacagaaagcactagaagcttcatgccctggtgtgg

SEQ ID NO: 53251 - DNA, 433 bp, Glycine max
  unsure (1)..(433): unsure at all n locations
  Clone ID: LIB3109-031-Q1-K1-F2
ggaagagaagaggctatttgcgttttccactttgttttgtcgtcgttttcattcagagacggatcaaaacggcatgtggtggccgtgtgggagaagtgggggttcttccttttcatcttcttccactgccgaacaagttactgaaggaatcgatggcactggcctcaccgctattgttacaggggcatccagtggtattggtgctgagactacccgtgttcttgccatgcgtggtgttcatgtaattatgggtgtgagaaatgtggtagctgcaaaagttgttatggaagcaatacttaaagagattcccaacgctaaagttgatgctatggagttagaccttagttcaatgatatctgttagaaaatttgcattagagttcatttcatctggtcttccattaaacattctcatgntagagtataataactat

SEQ ID NO: 53252 - DNA, 422 bp, Glycine max
  Clone ID: LIB3109-031-Q1-K1-F3
ggttctagtgtgtgattgtttgttgttgtaactcgttcttcttcttttgttgttctgtgtttgtgtttgttttttctctcacctgaaaatgtcttgctgcggtggtaactgtggttgcggaagctcctgcaagtgtggcaacggctgcggaggctgcaagatgtacccagacttgagctacactgagtcaaccaccaccgagaccttggtcatgggagtggcacctgttaaggctcaatttgagggtgctgaaatgggtgtgcccgctgagaacgatggctgcaaatgtggaccaaactgctcctgcaacccctgcacttgcaagtgaggtgttgggagagcaagcttcaagcagagatagcccttaattaggaataatgataaactattaatgtgtagctaaaaacttatgtattatgtct

SEQ ID NO: 53253 - DNA, 418 bp, Glycine max
  Clone ID: LIB3109-031-Q1-K1-F4
ggatgctatgaaacaggatgcaatcaatgtattcctggggcattttcagccacaacagggtaagcctgctctatgggagttgggttcagatcagctccatgatgcaggaagacatggagatgacgatgctaggtcatttttcaaaagatccttctcagatggaaacattcttaatgaaagttctacaccgatgtcagccccaaaggccaagcatgaaaaattcccaagccaaggcggcttaccagatcgatcagaagaaggaagcaagggactctgtgagtcatcaccagaaatatctactactgagagtgacatctcattttcaaggtacactccctcaatgcctcggagacagctctttggagatatgcaaagagagcgctgcctttgaagtgaacatatttactattctgatcac

SEQ ID NO: 53254 - DNA, 421 bp, Glycine max
  Clone ID: LIB3109-031-Q1-K1-F6
ggttctagtgtgtgattgtttgttgttgtaactcgttcttcttcttttgttgttctgtgtttgcgtttgttttttctctcacctgaaaatgtcttgctgcggtggtaactgtggttgcggaagctcctgcaagtgcggcaaccgctgcggaggctgcaagatgtacccagacttgagctacactgagtcaaccaccaccgagaccttggtcatgggagtggcacctgttaaggctcaatttgagggcgctgaaatgggtgtgcccgctgagaacgatggctgcaaatgtggaccaaactgctcctgtaacccctgcacttgcaagtgaagtgttgggagagcaagcttcaagcatagatagcccttaattaggaataatgataaactattaatgtgtagctcagaacttatgtattatgtc

SEQ ID NO: 53255 - DNA, 435 bp, Glycine max
  Clone ID: LIB3109-031-Q1-K1-F7
gtggtgaaatggagcaaaagtacaatatggtagagcatgacttgaaagatgaagaagatgtagaggatggagaaaaccttgcccctggttcatatgagattctacaattagaaaaagaagaaatccttgctcctcatacccatttctgtacaatttgtgggaaggggttcaagagagatgcaaatcttcgaatgcacatgcgaggccatggtgacgagtacaaaaccccagcagcgcttgccaaaccgcacaaagaatctgcatcaccaaagcctatcaagaggtattcctgcccctatcctggctgcaagcgcaacaaggatcacaagaagttccagcctctgaagacgatcttatgtgtcaaaaaccattacaaaaggacgcattgtgacaagagttacacttgcagtaggtgcaacaccaagaagttctcag

SEQ ID NO: 53256 - DNA, 421 bp, Glycine max
  Clone ID: LIB3109-031-Q1-K1-F8
ttaaggggcctcacgatctgaggaagacaccgggcttctctccacgcccttcttgggtaaccgtctgaagtgcagcaatggcagatggattgcattcgcagcatccatcggtagttcagaagttatctggacagtcttatcttgtgtccaggcttgctcctaatcactccagaaactgttctaccactggtagttacttcaatggaggtttgcagtcttcaggtttggttccagtcacggcacacgcgccggctgagaaaggggtgtctggatttttgttggatttcctgatgggcggagtgtcggcggctgtgtccaagacagctgcggctccaatcgaacgagttaagttgctcatccaaaaccaggatgaaatgatcaagagtggtcggttgtctgaaccatacaaaggaattggcga

SEQ ID NO: 53257 - DNA, 434 bp, Glycine max
  Clone ID: LIB3109-031-Q1-K1-F9
ggtgaatgtgaggagagaagagcctgaatattagaatcggatacccttaaagaagcggagataggagtgtgcgcctccaaacccaaggggcttcggaggggctcttcatcggaggcggtgctatattcccctccggattcccccaccatgaagagcctcttcaagcccaagccccgcactccttccgatatcgtcaaacaaacgcgagatcttcttctccgtctcacctcccgagatgacgataacatgcccgacttgaccaaaaacctcagggacttaaagtcaatcctctatggtaacagtgaatccgaacccgtccccgaagcttgtgcacagctcactcaggaattcttcgccgacaacaccttacgcctccttatccaatatcttcccaaactcaacttggaggctagaaaagatgccactcagattgt

SEQ ID NO: 53258 - DNA, 53 bp, Glycine max
  Clone ID: LIB3109-031-Q1-K1-G1
gcgacatagagggtggttgtttgttgttgtaactcgggcttcttgcggtcgtg

SEQ ID NO: 53259 - DNA, 324 bp, Glycine max
  Clone ID: LIB3109-031-Q1-K1-G10
ggaagcagagcgaggagaagcagaaggagcaaaagcaatggcgccgaagaagccgagaaccacgacaaggaatcctgatttggttagggggattggcaagtattcgaggtcgcagatgtaccacaagaggggcatctgggccatcaaggccaaaaacggtggcgttttgccccgccacgatcccaagcccaagcccgaggccccggcccagaagccgcccagttctaccccgcggacgatgttaagaagcccctcgtcaacaagcacaagcccaaacccgcgaaactcatggctagcattactccagggactgtgttgatcctg

SEQ ID NO: 53260 - DNA, 409 bp, Glycine max
  Clone ID: LIB3109-031-Q1-K1-G12
ggagcatggtgtatgcgcaaagtgttgttgcagtacgaagcaaatagttggaagggatatttcagaagttgaggctgagcaaaagatgcttgaggaggccattaagaactctcgggagagagaaaggagatccttattgcgtgctatgaacaaagacaaatctaaaagttcaaatagcgccccaactgatactaaaggtaacaaagttggacaattatttccaaatgcgtcacttgaagactatgccaaactgaatagagttaatgtgggtcatgacgatggtgaaatatgtgatgatagtgagggtgaagtttgtgaagatgaagatgataacagtgacaatgaagattgtgatgaagatggaaacagtgacgatgaagacggtgacagtgagaatgaagatgtgatg

SEQ ID NO: 53261 - DNA, 294 bp, Glycine max
  Clone ID: LIB3109-031-Q1-K1-G2
agctccgaaatccctcaagaaactaccttcacaaatgttgaacagacccagaagcctcttgaatcatgctaaagaacgactcctacacaaggtgaccaaccaaaaaccaattcaaaccatagacattgctgcccccaactccccacatatattcagtcaaaacagaaacgggctaatccacaaaaagtacatgcgccaaatgaatttaggtactactaatacaaacaactgacaacatgcatcttacaaacaatgacaacaagaacccaagcaagaatcgctgctaaccaaaca

SEQ ID NO: 53262 - DNA, 435 bp, Glycine max
  Clone ID: LIB3109-031-Q1-K1-G3
gaatcaatgactattcatgattccataattgaatcaattacatactggatccaagctaaaggaatgttatggtaaaacttcgtttgaaacgatgtggtaaaaagcaacgagccggttatcgaatcgttgcaatcgatgttcgatctcgaagagagggaagagatcttcggaaagtgggtttttatgatccaataaagaatcaaacctatttaaatattcctgttattctatatttccttgaacgaggcgctcaacctacaggaactgttcaggacattttaaaaagggctggtgtttttatggaacttagctcgaatcaacaaacgaaattccattaatgaaataaaaaaaagggggtgtggatgacttgtatatagatttctaaaactcttttctcttttatcccccgctctcttggtctattcatacctaatt

SEQ ID NO: 53263 - DNA, 421 bp, Glycine max
  Clone ID: LIB3109-031-Q1-K1-G4
ggaagagacagggtggtggtaaattaattgaagttgataaatctgacataatgggggtgacatggatgaaggtgcccaggagtaaccaacttggtgttcaaatcaaagatgggttgtactataagttcacgggatttcgtgaccaggatgttgtaagtttgaccaattttttccaaaacacctgtggaatatcagtagaagagaagcagctttctgttagcggacgtaattggggagaagttgatctaaatggaaatatgctggctttcacggttggttcaaagcaagcttttgaagtgtctttagcagatgtctctcaaacgcagcttcaagggaagaatgatgtgatcttggagtttcatgtggatgacacaactggagcaaatgagaaagattcactaatggagattagtttccatat

SEQ ID NO: 53264 - DNA, 397 bp, Glycine max
  Clone ID: LIB3109-031-Q1-K1-G5
ggaagcataaaatgaaaacccaaagtgcttctctcctgtggctttttctctctcttgctatccttttggctagtggcactgctgcaagtgcaactccaagaagcgcagtgccaagccaccatgtttcaacattcaacagaagcctttttccttccacttttctctttggaattggttcttctgcttaccaggcagaaggagcagcaagtgtagatgggagaggaccaagcatatgggacacctacactagacagcatactgaaaagatttgggatcatagcaccggtgacatgggagctgatttttatcatcgatacaagggtgacataaaaatagcgaaagaaattgggctggactctttcagattctctatctcatggtcaagaatattcccaaa

SEQ ID NO: 53265 - DNA, 409 bp, Glycine max
  Clone ID: LIB3109-031-Q1-K1-G6
gacccagaggagtatgacagaatgatgaagaaggcatgggacgagaaatattataatgcagaggatgctgaccttgacttttgtagtgacattgatgacattgagaagccagattttgaaaaggaggatgaattacttgggcttcctaaaggctgggatgcatgcggatctaatggtgggtttttagctgcaagggaaaaagcattgaaagaaaagattgagaatactagtgatgacgatctccctgaagcagaagatgaaaacgaaaggtttgagaatactagtgatgacgatctcccggaaggagaagatgaaaaagaagagaaaattcctgaggaaggtagtcggaagaggaagcgcaaaacagcacttttggagaaagcaagacaggcaatgatggatgagtact

SEQ ID NO: 53266 - DNA, 128 bp, Glycine max
  Clone ID: LIB3109-031-Q1-K1-G7
aaatattataaattgggatcattaaaattataaaggcgccacatttatatacagacgcctaacacttaatactaattattacaaattgcaatgatataatcataaacatttttcttaacacctttcat

SEQ ID NO: 53267 - DNA, 430 bp, Glycine max
  Clone ID: LIB3109-031-Q1-K1-G8
ggaaagggaaaaaaaaaaaaatagcaacaaaaacaagaaaaaaggttacctctttcaattttatcccttgttgtgagcttaattcaatttctgctcacacataatggcttgcacgctcgctgattcattactcctattcaagggttcttatcagaaaccagttctgaggagagacattgctgcccggtactccccgggtatatttagtctaaacagtaatgggcttatccagaaaaggttcaggcgtcaaaggaattttgttactaggaataaggttactgtcatacatgccgtggcaattccagtacaaccagctccggtggaaagtgcggagtatagaaaacagctagctgaagactacggtttcaggcaagttggagagccgcttccagatgatgttactttaaaggatgtcatcaattcccttcct

SEQ ID NO: 53268 - DNA, 431 bp, Glycine max
  Clone ID: LIB3109-031-Q1-K1-G9
ggcgcggtgtgagtgtgatgagatgaactaactggacactccacacccacagtacgaacttcgctctgaagtttttatctttcataattcggcgctaatcaagggttttatcttcccccttcctctgtttccagtttcttcggtaaaaattcgttccctttcggtggtatcgcttaatttaagatacccttatcggatttattgcaaatcctgggtattactcgatttctgttgaagaacacccggagctattagtgaaccttcacaatggcagatctcaaggagaggctactagcaccaaaacctgcatcagctcttaacgtaagagaggtttccaatcgaccatctgcctctggaaggcaagctttccaaggggtggatgttttggggctaaagaagcggtgccaaggtctccgttcatggattcgggt

SEQ ID NO: 53269 - DNA, 413 bp, Glycine max
  Clone ID: LIB3109-031-Q1-K1-H1
gacactaaacaagttaaaagaagagcatcactgaactaacaaagcaaccctatgtcgaaggtggtttgtgtcaccggagccagcggcgccatcggatcatgggtggtcctactcctcctccagcgtggttacaccgtccatgccaccgtccaagatatcaaggatgaaaatgagacgaaacatttggaggaaatggaaggagcaaagagtcatctccatttttttgaaatggatcttcttgacatcgactccattgccgctgccataaagggttgttccggcgtaatccaccttgcatgtcctaacatcattggtcaagtcgaagatcccgagaaacagatattggaaccggcgataaaaggaacggttaatgtgttgaaggcggcgaatgaagcaggggtggagcgcgtggt

SEQ ID NO: 53270 - DNA, 351 bp, Glycine max
  unsure (1)..(351): unsure at all n locations
  Clone ID: LIB3109-031-Q1-K1-H10
gggtctataaacagtagtggagagagggagagaagccaaataanaanattgaccatggcttcatcaatgaggatctcaaggctgctctctcgttcttttctttctgcttccactactcctttgttctctagaggtggaagtggtgctcttggtgcagggctcagtaaattcagcactgctgctgcaattgaagaaccaatcaaaccaccagttaaagtagaacacacccagctcttaatcgatggaaaattcgttgatgctgctactggcaaaacttttccaacgttggaccccaggacaggagatgtgatttctcatgttgctgagggtgaccatgaagatgttgatcga

SEQ ID NO: 53271 - DNA, 389 bp, Glycine max
  Clone ID: LIB3109-031-Q1-K1-H11
ggcgagagagagagagaaacaaagcagcacccattgggatcctctcttctcttctttgatctccgttaccctttttgttttctcaacagagagagagagagagaatctttcgaagttcgtttgcgtgtgttgtgtggtcagtcaccgatggcagcaccacctgcgagggcacgtgccgattacgattacctcatcaagcttcttcttattggcgatagcggtgtgggaaagagttgtctgcttttgcgattttctgatggttccttcacaaccagttttatcaccaccattggcattgattttaagataagaaccattgaacttgatggcaaacgcattaagttacaaatctgggatacagctggtcaggagcgatttcgaactattac

SEQ ID NO: 53272 - DNA, 368 bp, Glycine max
  Clone ID: LIB3109-031-Q1-K1-H12
gggactcatttctagtaaatggtgttgccttcaaaaagacattttcatatgctgggtttgagcaacaacccaagaagtttctcaatccaaaaatactattactaaatgttgagttggagctaaaatctgagaaagaaaatgctgaaataaggttatcagatcctgcgcaatatcagtcaatagttgatgcagaatggaatattatttatgacaagttggataaatgtgtcagcagtggtgccaaagttgttctttcacgactggctattggtgatctagctacacagtattttgcagatcgagatattttctgtgctggtcgtgtagctgaagaagatctgaaaagggttgctgctgcgactggtgga

SEQ ID NO: 53273 - DNA, 314 bp, Glycine max
  Clone ID: LIB3109-031-Q1-K1-H2
tctggccagcaagagctgctaccgtgagaagtgctccacagatgcttgtccagagcctgagtattatgtgctgaagatgtcctctagtcaaactgctgtgtgatgctgacattatgcagcaaagaagtgagtcaaccactgagaaggaatgatcagtactgaaaggggttctgtaatcatgttaaagaatctagtataggagctagcattatcatgctgagaaagctgctttaataatgcactgaagatactcaaaagtttttgcatccattggaatgcactgaagaaaagctgtccttcatgtgagggttccc

SEQ ID NO: 53274 - DNA, 432 bp, Glycine max
  Clone ID: LIB3109-031-Q1-K1-H3
gcttgaaaatgaaatcaagacagcattctcactgatcacgatcgcagctttcgatctccaccatttccctaggacaatatcgtaattaacttttcggtggtgcaatgaattttttgctgcggtccacgacgggcgtgtacagagagccttctccgtcgattccggttccggagccgcgtgttgatacgcatcataggtctgcatctgctggatcttctttggagaatcgtgtgtctgatgatccgtatgcgtggtatgatgcaagggttgttagtggcgtgttccttaagcacgtggatgttgctgaggatgaaggatgggttaccattccatgcaaggaacttcctgaaaactggacttgtgcaccagatatacagtctctgtgctctcttgatcgctcctttcttttccctggatacatcttcattcaaa

SEQ ID NO: 53275 - DNA, 432 bp, Glycine max
  unsure (1)..(432): unsure at all n locations
  Clone ID: LIB3109-031-Q1-K1-H4
ggagggaagtggaagctagtagtccgtttcagcgtgtgtgatactttcctctcatcttcttcttctctctgcgataaaagcaaaacctaaaatttggtttaggcataggaatctgttgtagagttgatctacctggaatggagggagcatcgtggaatagtagtgtttgtgtggcaccgtttctgagcaagacctacgacatggttgatgatccttccaccgacttagtggtgtcgtggggcgaaaacaacaactcctttgttgtttggaacgtcccccaattcgccacagacatcttgcccaatcattttaagcacaacaacttctccagcttcgtcagacagttgaatgcttatggttttagaaaggttgacccagatcgatgggaatttgcaaatgaaggattttaagaggtgaanannacactttaaa

SEQ ID NO: 53276 - DNA, 294 bp, Glycine max
  unsure (1)..(294): unsure at all n locations
  Clone ID: LIB3109-031-Q1-K1-H6
tgctttaatttgtcgtgaactataancaccggtaggggaaggagaatatgctgggtttgttctcatcgcgctgcagtagttttgggagcatgcccatgccaaggctcacgctaccaaaggttccctatgaaaatgaaaactggctatggtgagcgtattctgcacaatatcagtcacatagttgatgcataatggaatattatttatgacacgttgcatatatgtctaatcagtgaggccgaggttgactcttctaacgactgactttagggatctaaatacacatcatactct

SEQ ID NO: 53277 - DNA, 423 bp, Glycine max
  Clone ID: LIB3109-031-Q1-K1-H7
gggggaagagaaatgagaagatgggcaccaccttgatgagatgctcccacgcaaacgctctcttcagagctctcaaacccaaaccccgcaattcttcactgccactttcttcaatggccatcaacaaaggtaatagtaataaggcatatgatgcattgctgttggatgctgggggcaccctattgcaattggcaaagccagttgaggagatttatgccactattggatccaaatatggtgtgactgtggatccagctatgataaagcagggatttaagagagcatttgctgctccgtggcctgaaaagctgcgctaccagggagatgggaggccattttggaaacttgtagtttctgaagccactggttgtggagatgaagattattttgaggaagtttatgagtactatgcaaaaggtgatg

SEQ ID NO: 53278 - DNA, 434 bp, Glycine max
  unsure (1)..(434): unsure at all n locations
  Clone ID: LIB3109-031-Q1-K1-H8
ggtgtagatgtggtgcattctttaaaggtttcctgggaggacgtctataacggcacaacaaagaaactatctctttctagaaacgtattctgctcaaaatgtaaagggaaaggttcaaaaagtggaacagctggtaggtgttttggatgccaaggcactggtatgaaaattacaagaaggcagattggactaggcatgattcaacaaatgcaacatgtctgtcctgactgcagaggatctggtgaggtcattaacgagagagataaatgtcctcagtgcaaaggaaacaaaatttcccaggaaaagaaggtgctggaagtgcatgttgagaagggtatgcagcagggtcagaagattgtttttgaaggacaagctgatgaagctcctgacacaatcacaggagatatntgttttgtattgcaagtaaaggatca

SEQ ID NO: 53279 - DNA, 366 bp, Glycine max
  Clone ID: LIB3109-031-Q1-K1-H9
cgacccacgcgtacggacaggtgcaaaaacactttagaacgtttgatatatttcaagcaaacattaatactggccgccgagcatttttataaccgcgcgccaaaaaaaatatctttttctaaaaacacattctcctaaaaataaaatacggaaatgctccaaaccacagaccagcatggtacaatatttcctattccaacgaactcgtatcaaaatcacaataatgctactcgtactatatctgattcaacaaaatcatcatatcagaactaactgcctataatatccaaatgtcattaactatcgaaatcaattatctcacatcatacaaaacaaaattaatcttgaaaacaaataactaaaaat

SEQ ID NO: 53280 - DNA, 282 bp, Glycine max
  unsure (1)..(282): unsure at all n locations
  Clone ID: LIB3109-032-Q1-K1-A10
ttggggatggttttggagttaacacatatacgctgatcaacaaggctgggaaagcagtgtatgtgaaatttcactggaagaccactagtggtataaagtgtctattggaggaagaggccattaaggtgggaggagccaaccacagccatgccactcaagacctncatgattcaattgctgctggtaactatcctgagtggaaactgtttgttcagacaatagatcctgagcacgaagacaaatttgactttgaccctcttgatgttactaagacttggcctg

SEQ ID NO: 53281 - DNA, 290 bp, Glycine max
  unsure (1)..(290): unsure at all n locations
  Clone ID: LIB3109-032-Q1-K1-A11
gtcgagcccacagccgtgtcgctaccggacgccgatgacagaccgacatggaagaggagagagctatacagagaggaggagaagaagctgtagaactcatagtcaggcacgaatnagctatgactagcgactcatgaagctcgatgcactgagcgtccaagacgtatgctcaacatgctggggacatgcgcaggacatgctccatcaacgtcaaatccaatccttgcaaggttgtacaggacagtacgtgaactacaggcaagcatgggcatgctctgagtgactcagat

SEQ ID NO: 53282 - DNA, 286 bp, Glycine max
  Clone ID: LIB3109-032-Q1-K1-A12
ggaagcgcgaggaagctaaaagtagcaacgagggatgagagaacaagaggattggaggattacgacagcgctgttaacgttgctgttggtgtttgtttcttcttttccggcgttgagctacggagttgctcctcctcgtactctgctcaataagctgtctcagggcagttatctcaccactcaagagcaatggttcaatcaaaccctcgatcacttctcttcctatgatcaccatcagttccgtcaacgttacttcgagtttctagactatctccggattcctgat

SEQ ID NO: 53283 - DNA, 399 bp, Glycine max
  Clone ID: LIB3109-032-Q1-K1-A2
gtatggcactgcgaaatatgtaatcgcaagcctggccgtggatttgaagcaactgttgaggttcttccacggcttttcaagataaagtatgaaagtggtactttggaagaactactttatgttgacatgcctcgtgaatatcataattcctctggtcagattgttctagattatgcaaaagcaatacaagaaagtgtttttgagcaacttcgtgttgttcgtgatggccaacttcgaatagttttctctccggacctgaagatatgttcttgcgaatcttgtgctcagcgccatgaagaactcattcccaggagattgttgataccacaagttagtcagcttggaacgggtgctcaaaaataccaatcttttactcaaaatgcaacacccaatgtatct

SEQ ID NO: 53284 - DNA, 385 bp, Glycine max
  unsure (1)..(385): unsure at all n locations
  Clone ID: LIB3109-032-Q1-K1-A3
cgggtgaccaaagtgtgatccatccacaagtggaaaaccgatccctttcctcacagtaatgctactctaattaacactgtctatctagagtgtttgtccgatccatgacccatggcgccagcaactccaagatttgttgtgccaatagacttgaagaagaatccatgggaacaaaacgctcctctccataaccgatggcaccctcacataccgcacgtggcggctgttaataccggtgaagtcttcagggtagagatggtagattggacaggaggtgctattaaagacaacgattcagcactagacataaaatttctagacctctcaactgtccatnatcttagtgggccaatcagaattctggataatgatggggtcccagccc

SEQ ID NO: 53285 - DNA, 436 bp, Glycine max
  unsure (1)..(436): unsure at all n locations
  Clone ID: LIB3109-032-Q1-K1-A4
gatattcaagaactagctgataaattggagattggtcataagttttatataattggtatgtcaatgggaggttaccctgtttggagctgcctaaaatacattccacacagattatcaggagcagccttggtggctccatttataagctattggtggccttcttatcctgaaaatctactaagagaagcatttctgatgctaccttactcagaccaatggacttttcgagtttcacattatgccccttggttgttctattggtggatgactcanaaatggttcccttcattgactttgacaaatttgttgtctcctgatgatatagagatcgtgaagagcttgtcagaactccaaaacactggccaggagaggataactcagcaaggtgaatatgaatcattacaccgagacataatgagtgcttttggaaagtggg

SEQ ID NO: 53286 - DNA, 303 bp, Glycine max
  Clone ID: LIB3109-032-Q1-K1-A5
tggtgcagcagcgaaatgtcagggaaagacgtggttgcttctctgagatcggcaagagaggcatagattatcctaacgaaggattacaattccgatcaaagattcaccatctgcttcttcaccaacttcggtctcgaacttaagtcaacacttgtgaagagtagaggactttcctctggtgatgtggctgcagaatttaagtataagaacaaggcggttaatgtcaaagttgatactgaatcaaatgtgttgacgacattcactggctctgatgttgtgccattcgcgaaaaccaatggtttc

SEQ ID NO: 53287 - DNA, 388 bp, Glycine max
  Clone ID: LIB3109-032-Q1-K1-A8
ggagaggaaaagtgtgagaacgaaaatggagcattgtaactgctacatgttcacgctgagccttcttcttcttcttcttactccgccttctctctccgacgatctcggattcgattttccggcgaagaagctgataagagaccttaacctttttccttctgaagatgtcaacatcgttcctcgccactccaattctcacgccaacaaaatcgtcgagaaaccgcttaggttcccaaacttagtgccttcagactccggcatttccctcgacgacttggctcaccgcgctggctattatcttattcctcattctcatgctgccaagatgttctactttttctttgaatcaaggaacagcaagaaggatccttgtgtgatttggttgact

SEQ ID NO: 53288 - DNA, 247 bp, Glycine max
  Clone ID: LIB3109-032-Q1-K1-A9
gaaggagcttaggcatgaaaggcgattatagatatgttagtactgatgatgtcgggtactgggctcgaagcttcttgcaagatttggaagggacctgtagtgatcatgtgcgacgaaggtggtgggggattggttttggattaagctttagagttgttgcgctggatccaaacttcaagaagctctcaatggagcacataatttcagcttacaagcggacggcaactagggcaatccttcttgacta

SEQ ID NO: 53289 - DNA, 422 bp, Glycine max
  unsure (1)..(422): unsure at all n locations
  Clone ID: LIB3109-032-Q1-K1-B1
ggaagagaaggaaggagaataagccgttgcaattgcctccacacgttccagttaccttatctaccacctcagccttttctcttcactcttcctttccctccaaacaaacaaaagcaaccattaccaccaccaccttgaactttcccagttacactaccaccactttgattccaaataaccaccatcaccatgttcacggctagtaaactagccttcacattaacaccacctggtccatgcactgcacccttgacaccaatctcttcagcttctggtgttcacctcattcagttcaatggcaagcacttatgcctncgncaaaggctagttctactttctcctatggccactgcagatcaaccagggaaaagtgaagaatttgaagatgattcaaatacttgtgataggaaaattcttccata

SEQ ID NO: 53290 - DNA, 272 bp, Glycine max
  Clone ID: LIB3109-032-Q1-K1-B11
gaagagagagaggaagagaacgtgggtggtggttcacatgccagtttgaaaagcattctttggcatggtgggtctgcttatgatgcatggttcagctgtgcctcaaatcaggttgcgcaggttctgctaacactgccatactctctctctcagctgggaatgctctctggcatcatattccaagtcctctatggaataatgggaagttggacagcttatctgattagcattctgtacatcgagtacaggaccatgaaagagaaagagagtgt

SEQ ID NO: 53291 - DNA, 245 bp, Glycine max
  Clone ID: LIB3109-032-Q1-K1-B12
ggagactgtggtgatcagtatcagggcgatgttagggcgcttgatatggatacaatgacttggtcaaggttgaaaattcaaggctcttccccaggagtcagggcaggtcatgcggctgtgagtattggaaccaaggtctacatcattggaggggttggagataaacgttattatcacgacatatgggtcttcgatatctgcactagctcgtggactcagcttgatattcgaggtcaacaaccaca

SEQ ID NO: 53292 - DNA, 356 bp, Glycine max
  Clone ID: LIB3109-032-Q1-K1-B2
gggaaaaacaaagggagaatgtgcttcctgttgcagatcaagactccccctcaaattctcatctatcttatgatgaccagcgccgcacccaactcttccttaaagatcaaattcccacatggtttgcaatttctggttatgttgctattgctgccatctctactgccactctgccacacatcttccccgaactaaaatggtattacataattgtcatctacctaattgctcccaccttagcattttgcaatgcttatggttgtggactaacagattggtcccttgcttccacctatggaaagctagccatctttacaattggagcatgggcccgttcaataaacggtggaagtctc

SEQ ID NO: 53293 - DNA, 428 bp, Glycine max
  Clone ID: LIB3109-032-Q1-K1-B3
ggcacaagtgagtttgttgatcgagataactagaaacagtgtgatgaaaatgaaggtccttgttttcttcgttgctacaattttggtagcatggcaatgccatgcgtacgatatgttccctctccgaatgaacactggctatggtgcccgtactccggaggtgaaatgcgcaagttggaggcttgctgtggaagcacacatcatctttggctttgagaccattcctgaagagtgcgttgaatcaacaaatgaatacatgcatggcgaacaatatagatcagactccaaaacagttaaccaacaagcttacttttatgccagagacctcgaagtccatcccaaggacacatttgtgttcagtatagatggcaccgtactctctaatattccatactacataaaacatggatatggggtggagaaattta

SEQ ID NO: 53294 - DNA, 330 bp, Glycine max
  Clone ID: LIB3109-032-Q1-K1-B4
ggaagaagaagatggcattgggtgttcctgctctggccctgacatacgtggctcacgttctggcacttgttgccagcatcttggtcgtgctctgggtcctcaattttaggggtggcttggcttgggattctgataacaaggccctcatcttcaatcttcatccagttcttattgtcattggcttactagtccttgggggtgaagctattataagctacaaagcattacccctgaagaaggaagtgaagaaattgatacaccttgttttccatgccatcgcattaatccttggaatagttggaattatactgccttcaagtatcacaatga

SEQ ID NO: 53295 - DNA, 432 bp, Glycine max
  Clone ID: LIB3109-032-Q1-K1-B5
gcatcttctggggaatagtgatcttcgggttcatcgtgttactgacagttcttataatctgggcaatcctaaagccttcaaaaccaaccttcatcctccaagacgtcaccgtttacggcttcaatgccaccatccccaacttcctcacctcaagttttcaggtcacgctttcctcgcgcaaccccaacgacaaaatcggaatctactacgaccgtctcaacacctacgtaacttaccggaaccagcaggtcacgtaccgaacctcaatcccaccctcgtaccaaggtcacaaggaagaggatgtgtggtccccgtttgtctacggcactaatgtccccgtcgcaccctacaacttcgttggcctcagtcaagaccagaccaacggcaacgtcctcgtcctcgtaagattgacggtaaggtacgatggaaagt

SEQ ID NO: 53296 - DNA, 359 bp, Glycine max
  Clone ID: LIB3109-032-Q1-K1-B6
gggcacgtgcagtacgtaggctgttcttgtgggtgttgttggattggaatcggagagaaatggagagcagcgccgtctacggaagcattcgaccaagttacccgatctgcccctctcgacgttcttcctctcttctctctcaccaatctcccttcctattcgagccttctctttctctcaagcttcgcaagcagtttcctctcatttcgcagaattttctggaagccgcttctcctctcaggccttctgccactttgtcttctgattcctaccgtgagacgattgaattagctgatatagaatgggacaaccttggttttgggcttcaacccacggattatatgtattccatgaaatgc

SEQ ID NO: 53297 - DNA, 411 bp, Glycine max
  Clone ID: LIB3109-032-Q1-K1-B7
ggttctagtgtgtgattgtttgttgttggaactcgttcttcttcttttgttgttctgtgtttgtgtttgttttttctctcacctgaaaatgtcttgctgcggtggtaactgtggttgcggaagctcctgcaagtgctgcaacggctgcggaggctgcaagatgtacccagacttgagctacactgagtcaaccaccaccgagaccttggtcatgggagtggcacctgttaaggctcaatttgagggtgctgaaatgggtgtgcccgctgagaacgatggctgcaaatgtggaccaaactgctcctgcaacccctgcacttgcaagtgaggtgttgggagagcaagcttcaagcagagatagcccttaattaggaataatgataaactattaatgtgtaactaaaaacttat

SEQ ID NO: 53298 - DNA, 398 bp, Glycine max
  Clone ID: LIB3109-032-Q1-K1-B8
ggtctagaattaagggaattcatcatagaagcttgtttaggaggagggtggcaccaatacatgaaaagtagcatccacatgtgggcaggaacagtgagcacttgatggtattgatccagttaaaggactaaggagattgcatttctgtgtttgcattttttttataggtaaatattaattttgtttgcatttttttatcttataaattagaggcatatattgttaaccctttaattttttgagtccacaacttcaaaagcaaatctctttcctttttatctttttaacaagtccttttcactctgttataatttaaatttagccaatatataaattgtcaatataacaattcttcacacaaaaatacacgtagactttttttaagcaaaatagtgaat

SEQ ID NO: 53299 - DNA, 263 bp, Glycine max
  Clone ID: LIB3109-032-Q1-K1-B9
gggacagtgacttcggaattcccggtgcattttacgttaagaacttcatgcaagttgagttctatctcaagtctctaactctcgaagacattccaaaccacggaaccattcacttagtatgcaactcctggggttacaactcgaaatcctaccattctgatcggattatatttgccaacaatacatatcttacaagcgcgacaccggctccacttgtcaagttccgagaagcagaattgaacaatgtaatacgggatgggact

SEQ ID NO: 53300 - DNA, 341 bp, Glycine max
  Clone ID: LIB3109-032-Q1-K1-C1
gacagagagaacgatctttgcgtttccgagtctcgaagtcctctgttttacactgctgcgcgagacttcatttcattttgtgattataaatacgcaactcaattacccaacccaactttcttttctttaacagcaacaacatcaaaattcccacttactttttcttttatattctttaataagaaacctcgagaagaaagtaaaaggttcgattttacccttctttcttcccagaagcgatctctaaagccgacccatttcggaattcggaaaacccagtgctgatcgctctctgggtgttcccaaaatgaagcttcggagatcttcgctgtgcgtttttc

SEQ ID NO: 53301 - DNA, 259 bp, Glycine max
  Clone ID: LIB3109-032-Q1-K1-C10
ggagatcagtttgacagttgagagtgggagtggcggctccaaaaccttgcctccatccctcaatcttactaatctccctgtctctctctcacaacactcacactctgacctatgtacccagaaccttacgtgtccacccactctcactccctctttcaccctttgtgctcttcatgcctaccaaagcaacagcttcgtatggcactggagctagtggtgctgctgaaggtgaccggccaagggagatattggtgcagca

SEQ ID NO: 53302 - DNA, 303 bp, Glycine max
  Clone ID: LIB3109-032-Q1-K1-C11
ggaatataggattttctggttttgttgttggtgggtgtcagcgttccgcttcaacttcaaattctcagtgaaaccaattcagttcagtccaaatcccaaatccgaagtgagatttgcgatggagaggcttcagcgaatgttcgcaggtgcaggtggagctctagggcacccttccccagattccccaactctcgattcctccgagcaggtctacatctcctcactcgctctcctcaagatgctgaagcacggaaaggctggggtttccattgaagtgatgggtttgatgcttggaagattcgt

SEQ ID NO: 53303 - DNA, 308 bp, Glycine max
  Clone ID: LIB3109-032-Q1-K1-C12
ggaacctgaaaatctagtttcttacaagcctctagtatactgcttcaccttctgctctagaaaattcagtgctgaaacatggcttcggctactctctctgtagccaaaccagcccttcaggcaaatgggaaaggcttctctgaattctctggcctccgaagctcatcaggcttccttcccttttctagaaaatcttcagaggatttccattctgtcattgccttccagacctatgcagttggaagcagtggaggatacaagaagggtgtgacagaagcaaaactgaaggctgccataaacgggtttgg

SEQ ID NO: 53304 - DNA, 347 bp, Glycine max
  Clone ID: LIB3109-032-Q1-K1-C2
gacagagagaacgatctttgcgtttccgagtctcgaactcgtctgttttacactgctgcgcgagacttcatttcattttgtgattataaatactcaactcaattacccaacccaactttcttttctttaacagcaacatcatcaaaattcccacttgctttttcttttattttctttaataaaaaacctctacatgaaagtaaaaggttcgtttttaccctcttttcttaccacatgcgatctctaaggccaacccatttcggaattcggaaaacccagtgctgatcgctctctgggtgttcccaaaatgaagctttggaaatctttgctgtgcgtctttctagggt

SEQ ID NO: 53305 - DNA, 434 bp, Glycine max
  Clone ID: LIB3109-032-Q1-K1-C3
gtgtttgaaaaggctgcatatgctaagaagcttgagcattttactcctgatgagatagaggacctcatgcttaatgttgggcctttgtgtgttgtcaaaatcatttatgaccattggcagcagaggaggcagaagaagggaatggctttaattcggcactttcagccccctctgtgggaaagatatcagaaacaagtgagagagtgggaactagccatgaccaagaacaatgccccttctaatggatgcctggacaaggttacaactttggagaagccggccatgtttgctttctgtttgaaacctaggggtctggaatcactgaacaagggattgaaacatcgatcccaaaagaagatttcagtctctgggaatgcaaacagtaatctagatcaggatggcttccacactttcagaagaagacagaatgcttt

SEQ ID NO: 53306 - DNA, 414 bp, Glycine max
  Clone ID: LIB3109-032-Q1-K1-C4
gattggaacaacagcaacaacccaccaatgttggtggtgagaataagcagaaaaacatgggcggtgaaggaagaaacagaagggtgctgcaagatattgggaatctcgtgggtaaacaaggccatggaaatggaattaacgtgtctaaacctgtcacaaggaactttcgtgctcaactattggccaatgcacaagccgcaacagaaaagaataagaaatcaagcactgaagtgaacaacggagcagtggtggcaactgatggggttggtgttgggaattttgttcctgctagaaaggtgggagcagctaagaagcctaaagaagaacctgaagtgattgtgattagctctgatgatgaatcagacgaaaagcaagctgtgaagggaaaaaaggcaagggaaaaatctgtcatga

SEQ ID NO: 53307 - DNA, 411 bp, Glycine max
  Clone ID: LIB3109-032-Q1-K1-C5
ggatggagtgagggttttacgccaaaggagcaccgcgacgctgtctctcccactcttctccgccgccggtaaatgcaattctttctccactctttcatttccttacaaaactaagagacgcaccttcgatttcgcatgctctttttttgttctttctttcttttaattcaattggttgcacataaattccattttcattcttctccgcttgcttttcattacattaccatattctctgtgttccgctccgcgtgcgtgtgcgtctagggtttccttaacaattaacaatttcaattctgtaatgtatcgttgggagtgtgcagcatgtgaattagaagaagaggaggcgaatttgctaatttggtgtgagtgtgttcgaaatgggtgaaatctgggtgtccctttttgggg

SEQ ID NO: 53308 - DNA, 433 bp, Glycine max
  Clone ID: LIB3109-032-Q1-K1-C6
gaatacgaagatgactagcaaagggttgctgagaggagcttcgttaactgcaaacgcagtttggcatagaagcagtttcttcccaaaggtaacggttagcgtccaccccaagttggtgaaatttcagagcttctcatcaaccaccgcttgctcctctcttccacccccggatttgcctcgtttggcaaaaactgctcaaatttcacttaccccaaacgaggtttggacagctgcagggtattgatcttgaaagtgttgaaccctcgatcagagcagagactgaaaacaatttgcgtggtaatgctcctgaaacatttgaccataaggacgccttgatcgcttctgtcccgagctatgaagagccttatattaaagttccgagggtcttaagcatggactaaagttaaaattgcttagacgagttatttggtag

SEQ ID NO: 53309 - DNA, 411 bp, Glycine max
  unsure (1)..(411): unsure at all n locations
  Clone ID: LIB3109-032-Q1-K1-C7
gccgctgacttgggtcaactctatgatctcttcgtgcaactcaaggtcaatcttagagttaatctcatgggatatgactactctggatatggagcatctactggcaagcctagtgaatccagcacatatgctgacatagaggcaatatatgaatgccttgaaactgagtatggagttagccaagaagatgtaatcttgtatgggcaatcagttggaagtggaccaacactgcacttggctgctaaattgccaaggttgagaggtgtggttcttcacagtggcattctttctggtcttcgagtgctctgccatgtgaagttcacatnttgctttgacatttataagaacatcaacaaaataacgaaggtcaagtgccctgtctttgtaatacatggtacagaagatgatgtt

SEQ ID NO: 53310 - DNA, 417 bp, Glycine max
  Clone ID: LIB3109-032-Q1-K1-C8
ggcagtgacggaggtcaactcgctctaacctttgccttccgttcactcgccgccttgctcatcctcgccgtcacagtcacctcaaccgatcatgttctagacttctctctctcaggacagctggagatgattcaacaaagtatagcttctaaattttgtgagtatagtctgggcaattgtaaaatggacttgcctaatcgtgataaacaactgactgttgctgtgaagaagacagcattgagagatctgcagaatgataataaaatcatggtgccaacctctgttggaagctcttcatttttcaagggataggatccttgtactgattctagtagaagttctggcaccaagagaccctcgtctgactacccattgaatcaccatgtccaacaatctccaagcaataatgctgcaaat

SEQ ID NO: 53311 - DNA, 277 bp, Glycine max
  Clone ID: LIB3109-032-Q1-K1-C9
ggcactcagagaggaggaagctttgagagagagagagagggaggagggagagtgttgacgctccatcaagatgggtatttctagggattccatgcacaagaggcgtgccactggtggcaagaagaaggcatggagaaagaagagaaagtatgagcttgggcgtcgggccgcaaacaccaagttatcaagcaacaaaactatccggaggattcgtgttcgaggtggcaatgttaaatggagggcattgaggttggatacccgcaattactcatggggt

SEQ ID NO: 53312 - DNA, 324 bp, Glycine max
  Clone ID: LIB3109-032-Q1-K1-D1
ggacgcaagctgacaagactaaaggaagattgcagggtggaaatggaatcgacagctgaaaaccctaattacccggcggtggactacaagcgaccttccatcttgtcatttactctgaggcccgtattcagagttacatccgagttcgattgtcaaagcgcactcttctatcataagagttcctgcatgttgttggacagacttgccaagttcaagttatcgatcatccacagcggttagggcgacgacatctccgaacctcaattcagctatgtctccaatcaccttagcctctactacgacctcgaagaccataatgctatc

SEQ ID NO: 53313 - DNA, 324 bp, Glycine max
  Clone ID: LIB3109-032-Q1-K1-D11
tttccgggtcgagacgaagccttcgcgcatgcgagaagacggctgagggaggcgacttaagggggacagggaagaggagaaactggggtacttggctttatgcccaagtagggactgtggtggctgtcaatgggatcacaatgatgagcatggtgacatggaactggatgatgatctattagcagctgatgtgagcatggtacttgctctactaattatggacgaagatgaagatccacttgctacttgcactcctgactctattcaggctctctctgaagcaattgatcctgctccacagaccgctttcgtctctgagcatgc

SEQ ID NO: 53314 - DNA, 331 bp, Glycine max
  unsure (1)..(331): unsure at all n locations
  Clone ID: LIB3109-032-Q1-K1-D12
ggggtgtgaccattttgctagcgcaatcatcttgttccccaattaattaggttttttcagagtatcacattttgcatcgattcctctacgcacgccaccgtcaatcatctcagcacaacgttgcgattcggacaatcgcaatacggtacggtgtttcggttcctattgctttataaacgctgcttttatagttgctgtttcggaaatgatgaattaaatctggtactgtaacatggaagcttctttctctatttcctcttctgatntttggttcgatacttgntagacacttagattggtccttttttttttaaaaaaaaattcaattaac

SEQ ID NO: 53315 - DNA, 410 bp, Glycine max
  Clone ID: LIB3109-032-Q1-K1-D2
gaccaatggaagggcctcgatcgctttgtcttcgatgctcgtgtaagtgtgttttttaattttgataaacttggtgttgcttactctcaaacactgttttaggtttattgaacataattggcttaattacgaatgtagtgtaaaattattttaaatgatttaatttgatttctaaatttttaaatttgaaagattttacttagatcttcaattttttaaaaataaattaatttagtttttaagtttttaaaagattcgattttatcttaaaaataaatcaatttaatttttaaaaaattcaatttgtttctttttgaattcttaaaatttgagaatcaactaaatttatttttaagaatttgagaattaattagatattttataaattaaaactaaattaaattattttt

SEQ ID NO: 53316 - DNA, 356 bp, Glycine max
  Clone ID: LIB3109-032-Q1-K1-D3
ggcctctggatggccctacttcgcttagacttcggggctggtataaatgtgttctctaatttcgataatctcgatgttgcttactataagacactgttcatggtctattgaacataattgccttaattacgaatgcaccgcaaaattattgtaaatgattcaatttgatttataaatttttcaatttgatagattacacttagatcttcaataggttaacgttcaatcactttagtttttacgactataaatcatgtccttatatcttataaatcaatcaacttaatacttaaaaatttcaacttgaatcttattgaattcttaatatttgcgaatcaactcaatttattcttaag

SEQ ID NO: 53317 - DNA, 391 bp, Glycine max
  Clone ID: LIB3109-032-Q1-K1-D4
gatattcaaatggttgaagcaggaaatatggtcaggtccatacaagttctgaagaatgtcactgacaatttcagtgagaagaatgttctgggacaaggaggttttggaacggtttatagaggtgaactccatgatggtacaagaattgcggtgaaaagaatggagtgtggggcaatagctgggaagggtgcggcagaattcaagtccgaaattgctgttttgactaaggttcgccaccggcatcttgtttcccttcttggttactgcttggatgggaatgagaagcttcttgtgtacgagtacatgcctcagggaacgttgagtagggcatcttttgactggccagaggaaggactagaaccactggagtggaatagaagattgacaattg

SEQ ID NO: 53318 - DNA, 303 bp, Glycine max
  Clone ID: LIB3109-032-Q1-K1-D5
gaccctaatgaggtcaatgaaatctccatggctaattctcgacaaaacataaggaaattggttaaggatggtttcattatcaggaagccaactaagattcattcccgttcccgtgctcgcagaatgaaggaggccaagaggaagggacgtcactctggttatggtaagcgtaagggtacaagagaggctaggctccccaccaaaatcctttggatgaggaggatgcgtgtcctcagacgattgctccgcaagtacagggaagcaaagaagattgacaagcatatgtaccatgatatgtacatg

SEQ ID NO: 53319 - DNA, 354 bp, Glycine max
  Clone ID: LIB3109-032-Q1-K1-D6
gcaacaacacgtagtatgatttcattgatttctccctcttcgctctctctcagtgaccagagacagatgatgatggagatggcgaagcgaaacgctgtcgttgcggcactcgcggcgttggtgctactcgcggcgagtgtggcggtggatgctcaggagaactcggacgtgaagacgctggtgaagtacaagcacgggaagaagtactgcgacaaaggatgggaatgtaagggctggtcaatttactgttgtaacctcaccattaccgattatttccagacctaccagttcgagaatctgatctccaagcggaactcgccggtggcgcacgcggtcggattatgggactaccac

SEQ ID NO: 53320 - DNA, 281 bp, Glycine max
  Clone ID: LIB3109-032-Q1-K1-D7
aggcgtccgaacacgtctgagagggggagcaatgacgcaacgtcacgtactcgtaacggggccttccgttcattcgcgttgtttattctagacgtcacactgaccttgaccgatcatgttatacacatctctgtctctgaggtactctctctctcagctcgacatgattcaacgtggtatagatactctattgagcgactatactctgggccactgttaaatggacttgactggtcgcgctacacaaccgactgatgctgatgagacagcttcgagagatc

SEQ ID NO: 53321 - DNA, 310 bp, Glycine max
  Clone ID: LIB3109-032-Q1-K1-D9
gagagagagagagaaacacagcggaagccatttggatcctctcttctcttctttgatctccgttacccttttcgctttctcaacacagagagagagagagagtctttcggagttcgtttgcgtgtgttgtgcgatcagtcaccgatggcagcaccacctgcgagggcacgtgccgattacgattacctcatcaagcttcttcttattggcgatagcggtgtcggaaagagttgtctgcttttgcgattctctgatggttccttcacaaccagttttatcaccaccattggcattgattttaagataagac

SEQ ID NO: 53322 - DNA, 417 bp, Glycine max
  unsure (1)..(417): unsure at all n locations
  Clone ID: LIB3109-032-Q1-K1-E10
actcggtctcggaanttcccgtggtcgactccactgcgtctcgtaccgggctgctgtagaagatctatcagaagggggagtgtcaaagggctggtagttgtctccaagtccaaagaggagaagtataagtataagcgaaaggaatgggcgaatcatagagcatcgaagtggatctctggaagcagcagctctgatgaatgggcgccgttccgtagaccgaaaatagtggtgtaactttggtgccccgctttctcgatccagtggaaatgactagagaatgcttcttagggctagggatgatacgttgcgtcgtttcaatttctctcatggcacccacgactatcatcaggaaaccctcaacaatctcaagactgctatgcacaacactggtatactctgtgccgtcatgcttgacac

SEQ ID NO: 53323 - DNA, 290 bp, Glycine max
  Clone ID: LIB3109-032-Q1-K1-E11
gaatgtcagaaattgtagtgaaagcgataattcgggggctagtataataactagtacgaatgatacaaatgatagtgattccactataggagaaagttctaataatctcgacgaaagtcaaaaatataagcatttgtggcttgaatgcgaaaattgttatggattaaattataaaaaattttttaaatcaaaaatgaatatttgtgaatactgtggatatcatttgaaaatgggcagttcagatagaatcgaacttttgattgattcgggtacttggaatcctatggatg

SEQ ID NO: 53324 - DNA, 286 bp, Glycine max
  Clone ID: LIB3109-032-Q1-K1-E12
ggaaaaagtcctacctatgaagcaattgtttacaggttccgtcaaccaaaatgctacaaacgaaaccagagattcgtaattgcacattctcttttgttgtctccagctcatagaatattataaactcagattcattcagaatttcagattcacctttttcttttcttctctaccttctttttcctctgacagctttttgcagaaagttgtgatttttccttgaaagatggcatctttgagcatgatccagatcagaactgggaattgtgcatctgggtttggtttg

SEQ ID NO: 53325 - DNA, 342 bp, Glycine max
  unsure (1)..(342): unsure at all n locations
  Clone ID: LIB3109-032-Q1-K1-E2
cgagaaagagaagcgcaattcccgagccgaaagattcggcactggttccgcttcgcagggatcagagccatcgaaatcggaggagctgaagaggaaggctagggcagaaaggtttggaatgcctagtcctactacaacttctgacgaagaggcaaagaagaaagctcgacttgctaggtttgcacctgcttccaaagttgatcctcaagaagaagataagaggaaagcaagggctcttaggtttgcgaatccatcatcaacttctatagctaatgttaatggtgagggaaagattgagccggctgctattgcaggcaatgctggangagggacctgaatgac

SEQ ID NO: 53326 - DNA, 361 bp, Glycine max
  Clone ID: LIB3109-032-Q1-K1-E3
ggaagtgggaaagagacagaaccgaaaatggttgcgactttgagtcttccgatcatagacctctcttctccccatcgtctttccacagccaattccattcgtcaggcatgcgtggaatatggtttcttttaccttgtgaaccatggggtggacaccgattttgtgagcaaagtcttcgaccaaagttgcaagttcttctcgcttccggtccaacgcaaaatggacctggcccgcaaggaatatagaggctacactcctctctatgctgagacacttgatcctacttcactctccaaaggtgatccaaaagagacctattacattggtcctatagaagatacctctattgctcatctgaatc

SEQ ID NO: 53327 - DNA, 335 bp, Glycine max
  Clone ID: LIB3109-032-Q1-K1-E4
gcacaagagcgagtgcaacatgtattgcttagattgtatgaacggtgctctctgctctctctgcctcgcttaccacaaagatcaccgtgctattcagataagaaggtcttcataccatgatgtgattagggttaatgagattcagaaggtgttggacatcacaggggtccaaacctacattatcaacagcgcaagggttgttttcttgaatgagaggcctcagccaaggcctggtaaaggtgtcaccaacacttgtgaagtctgcgagcgcagccttcttgattccttccgattctgttctcttggttgcaagattgttgggacttcaaggaact

SEQ ID NO: 53328 - DNA, 315 bp, Glycine max
  Clone ID: LIB3109-032-Q1-K1-E5
gcaggccaagttgtctcaaatggctttccttttggccttgtttttgttgattcttcagatatcagatcatgttatatccagttacgttttgtgttctagtccaggtttgttaaacctagaactagaagattgtagagaaggtttattcgtgttttttatgcttgttttatgggtgaagttagcaggaaactatacaacttgtagtgtggaatcatcttggacagaaaataggttaaagtggggtgtacaaggaaagccatgggagacactggtgtaaaaaactagattgcatggttcttattttggtgaaaagga

SEQ ID NO: 53329 - DNA, 199 bp, Glycine max
  Clone ID: LIB3109-032-Q1-K1-E6
ctgggcattccaagtcgtctcatatggctttggttttggccttacttctgtggattctttacctatcagatcatgttatattcagttcctttcagagttctagtccatctttcctaaacctattactagaacatagaatccaacggttattcatcttttttatgcttcatacattcattatgtcatcagcaaactatac

SEQ ID NO: 53330 - DNA, 345 bp, Glycine max
  unsure (1)..(345): unsure at all n locations
  Clone ID: LIB3109-032-Q1-K1-E7
ggaacctttgcattctattcattcaagattcagcaagtgcgttttggaagcagagaccgaaatacttcgagatggcccgtacaaagcaaactgctcgtaagtcaactggaggaaaagctcccaggaagcagcttgcaaccaaggctgcacgtaagtctgcaccaacaactggtggtgtgaagaagcctcatcgttatcgccctggaactgttgctcttcgtgagattaggaaataccagaagagcactgagctcctaatcaggaagcttnctttccagaggttggttcgtgaaattgcccaggatttcaagactgatctgcgtttccagagccatgctgtgcttg

SEQ ID NO: 53331 - DNA, 429 bp, Glycine max
  Clone ID: LIB3109-032-Q1-K1-E8
ggaacctttgcattctattcattcaagggtcagcaagtgcgttctggaagcagagaccgaaatacttcaagatggcccgtacaaagcaaactgatcgtaagtcaactggaggaaaagctcccaggaagcaacttgcaatcaaggctgcacgtaagtgtgcaccaacaactggtggtgtgaagaagcctcatagttatagacctggaactgttgctcttcgtgagattaggaaataccagaagagcactgagatcctaatcaagaagctttctttctagaaatcgcttcgagaaattggccaggatttcaagaatgatctgcgtttacagagccatgctgtgcttgcattgtaagaggctgctgaggcataccatgtagggctctatgaggacactaacttgtgtgccattcacgccaagcgtgtgacta

SEQ ID NO: 53332 - DNA, 285 bp, Glycine max
  Clone ID: LIB3109-032-Q1-K1-E9
ggagaaaaagagttctaagctttgtctgtgactggtgagagccaaaagccgaagaaagggaagatggcgctatggatggaaaagggttcagagccattaaccgaaaccgagaaggcagaccttgaagccattgctgcactcaaagagtctgcagcctttgaattcaaggaaaagggtaatcaatatgtgaagatgggcaagaagcattactctgatgccattgattactacacgagggcaattgatcagaaagccttgagtgactctgagacctctattctcttt

SEQ ID NO: 53333 - DNA, 324 bp, Glycine max
  Clone ID: LIB3109-032-Q1-K1-F1
ggctgagaatcttgataaaagcgcattcactcctcttactctcattgcctttgcgctcctcaaaaacagagtagcctacacgtatcagagagagtgagagaagagagagaatatttctgttcgtgcagatagatagatggctcggagctccacaagaatgaaatgggtctgcatcttcacacttctattcctctcccactcgcccctcacaaccttcgcagaagatgggctagtggcgaatggagattttgaggttagcccatcaagtgggttccctagcgaggcgattgtggaaggccccagcgaggtcccaaactggaagtc

SEQ ID NO: 53334 - DNA, 344 bp, Glycine max
  Clone ID: LIB3109-032-Q1-K1-F10
gacggctaaaagctaaaaatcggcgaagtactcaaattagcatggctgtcacggttgcattcttgaatttgatcatcatgttttcagtagtctctacaagcaagtcactgagcttaaactactattcaaaaacatgccctgatgtggaatgcattgttgccaaggcagtgaaggatgccactgctagggacaaaactgttccagctgcacttctgcgaatgcacttccatgacttgttcgttcgggggtgtgatgcctctgtgctactaaattcaaaaggaagcaacaaagcagaaaaagatgggccaccaaatgtttctttgcatgcaatctatgtcattgat

SEQ ID NO: 53335 - DNA, 278 bp, Glycine max
  Clone ID: LIB3109-032-Q1-K1-F12
gatgcaaagggtgagtgagagagacattttggtgcttgaacataatttggaccaagaccaacagatgatggaatccggggctcacttctgtaactcttgtggtgaacaaattggacttgatgctaatggggaggtgtttgtggcttgtcatgagtgttattttccaatttgcaaggcttggtttgaatatgaaatcaatgaggggcgtaaagtctgcttgagatgtgccactccctatgctggtaaccctgcaatgtttctattccttcaattatctt

SEQ ID NO: 53336 - DNA, 303 bp, Glycine max
  Clone ID: LIB3109-032-Q1-K1-F3
gggtgaagtgagtagtgagtgctgaatcgaatcgaatcgattctccgaacatggcggcgagcgatcgcacagtgttgcaattctcttcatcatcttcttcttcttcgcagatcttgtccgcgaaggtccaccctctggtcatcttcaacatctgcgattgctatgttcgacgccctgaccaagccgaccgcgtcatcggaaccctactcggctccgtccttcccgacggaaccgtcgatatccgaaattcctatgctgttcctcacaacgagtctatcgaacagggtgcattggatatagagt

SEQ ID NO: 53337 - DNA, 79 bp, Glycine max
  Clone ID: LIB3109-032-Q1-K1-F4
gacagcttttttgtaagaggtccacaaacccttgtgacaaattctcaagaaggctaataagttgaaaaagttatttcag

SEQ ID NO: 53338 - DNA, 299 bp, Glycine max
  Clone ID: LIB3109-032-Q1-K1-F5
gggagagaaagtgaacaccacactctcattcattcccacaaagacatggacttgcattgcttcttcttacgtttccacttcgcatgttttcttctcttcgctaccgccgcatgttgcttttcacacccttctctcctcggcatacaccctctagatgagaaatattacagctctgagatgatcaagtgcaaggatgaatcgaaatccttctccagagaccgtctgaatgacaatttctgtgactgccctgatggcactgatgaacctgggacttcggcttgccccaacggaaaatttta

SEQ ID NO: 53339 - DNA, 305 bp, Glycine max
  Clone ID: LIB3109-032-Q1-K1-F6
gggaaaaggaaattcaagctagaaggaaccattaatgatgttaataacatgaaaaatctacttcttgataactttaaattcccaattgggtgcatacgtgtccttacagaagaacagaaggatcccaatttaattccaacaaagaagaacatactggattccttaaattggctcgtgaaggactgccagtcagaggactcattagtcttctacttctcaggacatggtttgcaacaaccagaagatcgcaaaggagatgaaattgacgggcttgatgaaactatttgtcctgttgattttttgag

SEQ ID NO: 53340 - DNA, 360 bp, Glycine max
  unsure (1)..(360): unsure at all n locations
  Clone ID: LIB3109-032-Q1-K1-F7
gggaaaaaagagttggctgtctgcctatttcagactgttgttctgatgttattcaatgatgctgagaaactaagctttcaagatatcaaggactctactggtatagaggacaaggaactgagaaggactctgcaatcacttgcatgtggaaaagttcgtgtcctacaaaagttgccaaagggtagagatgtggaggatgatgactcatttgtttttaatgaagggtttacagctcctctttatcgtataaaggtgaatgcaattcagttgaaggagacagtagaggagaacacaagcaccactganagagttttccaagaccgtcaatatcaggttgatgctgctattgtgagggatatg

SEQ ID NO: 53341 - DNA, 435 bp, Glycine max
  Clone ID: LIB3109-032-Q1-K1-F8
cattgcgagatcttctaaagcctggccctgcaagtgttgaaatcgatgatcaccctatgcaaattgaagaaacacagtacccgaaaaccttcttctataaagaagaccttcatccaggcagaacaatgaaagtacaattcagcaagcctccctttcaacaaccatggggtgttggtacatggttaaaggaaattaaagacactactaaagaaggatatagttctgaagagctatgcatcaagaaagaagccattgagggagaagagaagttctgtgcaaaatccttgggaacagtaattggttttgccatttcaaagctgggaaagaacattcaagtactttcaagttcctttgtcaataagcaagaccaatacactgtggaaagagtgcagaatcttggagacaaagcagtgatgtgtcataggctaaatttca

SEQ ID NO: 53342 - DNA, 252 bp, Glycine max
  Clone ID: LIB3109-032-Q1-K1-F9
gagagggaaccgtggaaacttcaaccgggcaacaaggacttcttcaccagaaaccactccaccatcgtcgccttcgccatcggcaaacagtatgtttctggaaatggattccacataatcggggctcacacggatagtccttgtctcaaactcaagcctgtcaccaaggttgctaaggctgggattttggaagctgatgtccaaacctatggaggaagcttgtggcacacatggctcgatcgagacttgacc

SEQ ID NO: 53343 - DNA, 369 bp, Glycine max
  Clone ID: LIB3109-032-Q1-K1-G1
gaaggaaggaaggaagagtgagcgtgaaagatgccttgggcgaggctttcagggtctccaaggctcgacgttgctattgacgtgggcaatccatttctcaatctcactgttgatggtttccttaagatcggagctgtcgcagccacgcgatcagctgctgaagatacttatcatattatccaaaaggggaatatctcaagtcatgatttcgagaaaacgttgaagaagatgtgcatagaaggtgtatattggggaactatagctggcgtttatgttggaatggaatatggtgtatagaggatccgtggcaccagagattggaagaatgccatgaatgggggtgcaagtactggggccctggtatctgca

SEQ ID NO: 53344 - DNA, 252 bp, Glycine max
  Clone ID: LIB3109-032-Q1-K1-G10
atgtacaagtggtgatgaccctaatcataaaacgcacaattacaaaggggaagatgggctatgtactacatgggataatccaagtagactcagcacttatgaacaacctttcgtcgtggaagatgaagaagttattatcttcaggactctagcgaggcatcattcaacaccatcgtacgcactattttcccctcatgagcagatatcataaggcatagacatggatgacatagtcttacacttatgatgatt

SEQ ID NO: 53345 - DNA, 338 bp, Glycine max
  Clone ID: LIB3109-032-Q1-K1-G11
gactgctaaaagctaaaaatcatcgaagtactcagattagcatggctgtcacggttgcattcttgaatttgatcatcatggtttcagtagtctctacaagcaagtcactgagcttaaactactattcaaaaacatgccctgatgtggaatgcattgttgccaaggcagtgaaggatgccactgctagggacaaaactgttccagctgcacttctgcgaatgcacttccatgactggtccgttcgcgggtgtgatgcctctgtgctgctaaaattaaaagggaactacaaagcataaaaagatgggccaccaaatgtttctttgcatgcattttatgtc

SEQ ID NO: 53346 - DNA, 424 bp, Glycine max
  Clone ID: LIB3109-032-Q1-K1-G12
gcacaagtgagtttgttgatcgagataactagaaacagtgtgatgaaaatgaaggtccttgttttcttcgttgctacaattttggtagcatggcaatgccatgcgtacgatatgttccctctccgaatgaacactggctatggtgcccgtactccggaggtgaaatgcgcaagttggaggctagctgtggaagcacacaacatctttggctttgagaccattcctgaagagtgcgttgaagcaacaagggaatacattcatggcgaacaatatagaatagactccaaaacagttaacccaacagcttacttttatggcaaagacctcgaagttcaatccaaagacacatttttggtcaatatagattggaccgtactctctatattccattcttcaaaaacatggatattgggtggagaaattt

SEQ ID NO: 53347 - DNA, 371 bp, Glycine max
  Clone ID: LIB3109-032-Q1-K1-G2
gatactgcagatgttcagataaagcgctgggctgcagggaaagaaggcaatatgcgggcattgctatcaacattacaatatgttctttggccagaatgtggttggcagccagtttctctgacagatatgattacctcttcggcagttaaaaaagtttatagaaaagcaaatttatgtattcacccagataaagtccagcagaaaggggctactcttgaacagaaatacacagcggagaaggtttttgacattcttaaggaagcttacaccaagttcaatgcggaagagctttcttagatccctctgctaatgtctttgcaaaattgatagatctattagcacttgcacgattttggaatcggcctgttcgc

SEQ ID NO: 53348 - DNA, 355 bp, Glycine max
  Clone ID: LIB3109-032-Q1-K1-G3
ggcacgcagaagcagaagcagaagcgcaagcgcgtgtaaccctaattagggtttgcaagccgatttgggattcgcctttcgcgtgatcgcagcgctggatccgtaccgtgttcctccgtctacggaagcgccttttgctcgatccttcgccgatctcggaagcatgtacggtccccgaggggcaatgttgggaagcgggggggtttcggacgggtacgaggttggctcaaagagacaaagaatgatggaatccaatccatacttcgcagtgagcagcggaacaggcaacttaccttatgggtatgctgggtggcttcagcccccttcctttccttgggttcgtctaaggggcttt

SEQ ID NO: 53349 - DNA, 320 bp, Glycine max
  Clone ID: LIB3109-032-Q1-K1-G4
ggattcagagggagaaagctccctcgcacaaagcaatgcctgccatcacctgaattctatgctccttttccctttatccgcattgctctcttctctttcaccgttttttgtctctgaatatccaagatcttcaaggacaatgttatctctgagaaacatttttctgaatagcgcttgatccggcgtgaaacattcaattgttgataatttactgcttcactttgggctgtgcgagtggagcagcctattttactattaaaggcatattctcttacaaggttgatttgcagagagcatggcgtcttgggatcaaatggggg

SEQ ID NO: 53350 - DNA, 331 bp, Glycine max
  Clone ID: LIB3109-032-Q1-K1-G5
gatgttggcaagggttgtgctgctgcattgaagcaggctggtgctcgtgtcatcgtgactgagattgaccccatttgtgcccttcaggctctcatggaaggccttcaggttctgaccttggaggatgttgtttctgaggctgatatctttgtcaccaccacgggtaacaaggacatcatcatggttgaccacatgaagaaaatgaagaacaatgccattgtttgcaacattggtcactttgacaatgagatcgacatgctggggctggagaactaccccggcgtgaaacgcattaaccttaaaccccaaaccgacagatgggtctttcccg

SEQ ID NO: 53351 - DNA, 416 bp, Glycine max
  Clone ID: LIB3109-032-Q1-K1-G6
ggaagagaagagaaggttacagaaaaacagacacttatctctgtttctccgtcttacggcaattgaaggaagcactatctctgcaacttccgtcacattcacatggcagcttctgcatctgctactgctgtgccatatctagacaagacagattttctaaagcttcaaaatggcagtgacattcgtggtgtggctgttgatggtgttgagggagagccagttaacctcactgaacctgttgccgaagcaataagagctgcttttgctgcatggttagtggagaaaaagaaagctgatgcttctcagcatttgagagtttctattggtcatgattcccgaatatcagccaaattattacagaatgcaatatctcgaggtcttgctggtggtggcctagaagttggccactacggatt

SEQ ID NO: 53352 - DNA, 372 bp, Glycine max
  Clone ID: LIB3109-032-Q1-K1-G7
agagcaagcatctttggacacacagataacatcatctaatattggctttaagctcctccaaaagatgggatggaaaggaaagggtcttgggaaggatgaacaaggaatcattgagccaataaaatctggaattagagatccaaggctggggattggtaagcaagaagaagatgatttctttactgcagaagaaaatatccagcgaaaaaaacttgatgttgagttggaggagacagaggaacatgtgaagaaacgggaggtgttagctgaacgtgagcaaaaaattcaaactgaagtgcaagaaatccgaaaggtgttctattgtgatctctgcaacaagcaatacaaattggcaatggaaattgaagcaca

SEQ ID NO: 53353 - DNA, 289 bp, Glycine max
  Clone ID: LIB3109-032-Q1-K1-G8
ggtgaatgaggagaagagaagaaggctgagaacatcaacgaaaaagggtttttggttttggactctgaaagaaactcatagtgatgcgtttcatcgttctttcggacaaaccctaacctcgtactcgtgcattcattctccgcgatcaggtgtgtttatatccattgcatacagcatgaattttgcagcatcattgagcagatgattgaatatcaaggaacttgtgacatatattcctgtgtatagaagcaccagtggtgtttctggagaaggtttgaatttgacgttc

SEQ ID NO: 53354 - DNA, 287 bp, Glycine max
  Clone ID: LIB3109-032-Q1-K1-G9
ggaatcgaagatgggtggttccgttttcactcacggcctcgttctcccctcctcttcgactccttctctttccactctcttcccatccaaattccccaccagacccatcaatgaatcttttcccttcacccttacctgcaaccaattcccttccaaactcactacttcgcggccttcccaattctcagctcctcctaggtactcatgctctgtaaaaaagatcaaagcttcgggaagtcagcaaacaggatccattcgacatggagacaaccttgatgcaatgaata

SEQ ID NO: 53355 - DNA, 329 bp, Glycine max
  Clone ID: LIB3109-032-Q1-K1-H1
ggagaagagagagagaaagacaaatagaagaagctgcatttgcagagacgccctgagagagagaattggaaggttgcgacgagtgatgatatacacatattgtgacggtagtgaaatctgaggaaaaagaggtagcaatttgcgagtcgcaatgagtaacgaacaggcttcttcatcagcttcttcgagtagctacgagttgagcaaaggcatcaatggcctcgacacggttattcttcgcgacgcacgtggtagctacgctgatgtgtacttgtacggtgctcacgtgacttcatggaagaatgaccatgccgaggaattgccttttc

SEQ ID NO: 53356 - DNA, 383 bp, Glycine max
  Clone ID: LIB3109-032-Q1-K1-H10
ggtgttgaaggggttagggtttaggaagggatggaagcggcagtggtggacgtcggctctaagctcctcaaagcgggctttgcaattcctgaccagactcctgccatgataattcccactcagatgaagcaattactcgatgatggatccgtcgcagataattcactggctgacaatgtcaccgttgatcccgttgtgcgaggatttattagagattgggatgcaattgaggatttgttgcaccatgttttgtataccggcctcggatgggaaattggcaatgaaggacaaatactatttacagatccactttgtaccccaaaggcgaacaaaggacaatttgtgcaactaatggttgaaacattcaatatatcaggatttta

SEQ ID NO: 53357 - DNA, 315 bp, Glycine max
  Clone ID: LIB3109-032-Q1-K1-H11
gaccaacaaagtaacgtgaaagagaaagagatggaggaaattgttccagtggtggatttccagaggctttcagaggaagaggagcgcaagaagctgagaaaaacatgtgagaaaccagggtgtttcagaatcatcaaccactcaattccactaacactcatggctgacatgaagtcagtggttaaatacttgcatgaccttcccgcggaaatcaaaatgcgcaacaaacccttcttcgtccctgagagtggctatagggcggcatcgccaacaagtcctctatacgagggcatgggaatatatgacatgcatgca

SEQ ID NO: 53358 - DNA, 327 bp, Glycine max
  Clone ID: LIB3109-032-Q1-K1-H12
gattgcaagaagaacatgaaagatgtttgatctacttggatgcaagtactaggaagccattgatagcaacagcagaaaaacaacttcttgaacgtcatatacctgccattcttgataagggctttgcaatgcttatggatgggaatcgtattgaagaccttcagagaatgtactcactcttttcaagggtcaatgccctcgagtcattgaggcaggccattagttcatatatcaggagaactggtcagggcatttgtttggacgaggagaaaagataggatatggtttcatcccttttggaatttaaggcttctcttgacacaacat

SEQ ID NO: 53359 - DNA, 367 bp, Glycine max
  Clone ID: LIB3109-032-Q1-K1-H2
gtgatagaatggaagtaattgagcttcctggatgtacacctgaggaaaagctccaaattgccatgcggcatttgattccaagagttttagaccagcatggattgagttctgagtttcttcagattcctgaggcaatggtgaagcttgttattcagagatgtactacggaagctggtgtgcgaaacttggagaggaatctagctgccttggctcgagctgctgcagtaagagttttagagcacgaacaagtagttccattagacagatgcatgcacggaccttgctacaccacttgtggaaaacagacttgctgatggaactcgaagtgaaatggaagtgataccaatgggtgtcaatagtcgggaca

SEQ ID NO: 53360 - DNA, 430 bp, Glycine max
  Clone ID: LIB3109-032-Q1-K1-H3
gacacgcagttgtattgtagaactgaacaagggttgctctttctctttctctgtctgcttcttcactttctctcgtttcaatcgaaaaaaatcatgggcagaaaattcttcgtcggtggcaactggaaatgcaatgggaccactgaggaggtgaagaagattgttactactttaaatgaagctaaagtccctggagaagatgttgtagaagttgttgtgagccctccttttgtgttccttccttttgtaaaaagtttgctgcgccctgatttccatgtctcggcccaaaattgttgggttcgcaaaagtggtgcttatactggagaggttagtgctgaaatgctttgtaatttgggaattccttgggttattattggtcactctgaacggatgcagcttttgaatgaatcaaatgagtttgtgggagata

SEQ ID NO: 53361 - DNA, 220 bp, Glycine max
  unsure (1)..(220): unsure at all n locations
  Clone ID: LIB3109-032-Q1-K1-H4
ggcattatatttgagttcaaacaaatcaaagccatggccacctncaacttctctattgttctctccgtctccctagccttctttntggtgctacttaccaaggcacactcgaccgataccgtttctttcaccttcaacaagttcaacccagtccaaccaaacattatgctccaaaagaatctaggatttcaatctctggggtggtacaactcacccaaag

SEQ ID NO: 53362 - DNA, 323 bp, Glycine max
  Clone ID: LIB3109-032-Q1-K1-H5
ggaggtgtgaaggacaacataacaataaagacaaaagggacccttcacgcattgtcgacaacgtagtcatgaacaagtcgctgaaaccagaagaacaagggtccaaacattgaaactcattcccattgaagctgaacaaccaaccccattttggttctgattatctcagagctccaagcggcaagctttggaatattctgggggcttcatctggattattcttcaatttgaaaacccaccaagggatgagcgtttcctagttgcaatgactacttctggtgctgacctggttttgggtcgacttatgtaaattcttcacccct

SEQ ID NO: 53363 - DNA, 163 bp, Glycine max
  Clone ID: LIB3109-032-Q1-K1-H6
gtcattgaattgaagttattgcgcttcctggatatgcacgtgtcgaaaagctccaaggtgccatgcggcattttattccaagagttttagaccctcatggattgagacttgagtgtcttcagatttctgacgctatggtgaatcttgctattcagagatgttc

SEQ ID NO: 53364 - DNA, 366 bp, Glycine max
  Clone ID: LIB3109-032-Q1-K1-H7
ggactatgattgaccttaacttacctgttgcactggaagttgaagctgatgaaacttttgtgaatgaagtggcggagatgcagcaaaataacacaggcaaggaatcagatgatctcagtgttgtaacaaatgccaaacttagtgaacagcctgacattcacacccggaggcagagcaccagaaaccggccaccaacaacaaaagtgctagaagcttttgcctttggatatctagacagaaaggagaagtgcagaaatagagattatctccaggacagttcaacaaggcctttccgacgtgtttctcgcaaattggcaggctctagaaatggtggtactgatcttgaaaaagaggaaaaaacagatg

SEQ ID NO: 53365 - DNA, 281 bp, Glycine max
  Clone ID: LIB3109-032-Q1-K1-H9
ggggcgaggtagccagagagtgatacaatacagagggcgttgttgctccttcgccacaactccctgccaacatgggtatctccagagattctatgcacaagaggcgtgccactggtggcaagaagaaggcatggaggaagaagagaaagtatgagcttggtcgccagcctgctaacactaagctgtcaagcaacaagacagtcaggaggatccgggttagaggtggaaatgtgaagtggaaggcactgagattggatactggaaattactcctggggaagt

SEQ ID NO: 53366 - DNA, 201 bp, Glycine max
  Clone ID: LIB3109-033-Q1-K1-A1
ttgcccattggtaacattgagcattttcgcactgagaagttgggttacgctgatcttgtggaagaggtttctcttggggatgggaagattgtgaagattactgggattaaggagatggggaagaccaccactgtgcttgtacgtgggtctaatcagcttgttctcgatgaggccgagaggagtttgcacgatgctttgtgt

SEQ ID NO: 53367 - DNA, 423 bp, Glycine max
  Clone ID: LIB3109-033-Q1-K1-A10
ggagagattggaacaccccccacgaagcaccaattatggctctgaatctttgtatctcacctaagtttaaatgggttccttccttagatagtgcttcctattctttgagaccttcacttgggtcttgttttggtaacataaacattgctagtgtgagtctaagtactactagaagtttgagtttgaggaggagtgggagtgttagtgtaagatctagtttagaaactgcggggcccacagtcacagtgggacaggtcactgaggttaacaaggacaccttctggccgatcgttaaggctgccggggataaaaccgttgtccttgacatgtacacacaatggtgtggcccttgcaaagtgatggctccaaagtttcaagaattatctgaaaagtatctggatgttgtctttctaaagcttgatt

SEQ ID NO: 53368 - DNA, 242 bp, Glycine max
  Clone ID: LIB3109-033-Q1-K1-A11
ggagtgaagagtgaagagcgagagagagagagagagagaggcacttggaatccaaaaatgagagatatcatcagcattcacataggtcaggccgttatccaggttggcaactcctgctgggaactctactgcctggaacatggcatccatcccgatggcatgatgccaagtgactcctccttcggtgtaacccacgacgccttcaacacctgcttcagcgtaaccgcatccggcaagcacgt

SEQ ID NO: 53369 - DNA, 429 bp, Glycine max
  Clone ID: LIB3109-033-Q1-K1-A12
ggagcatttaatgtatataatttggaaggagttgaggctgttgtatctgctgcagaggaagaacaaagtcctgctatattacagatccatccaggtgccttgaagcaaggaggaattcccttggttgcttgttgcatttctgctgcagagcaagccagtgttcccattactgttcactttgatcatggaacttcaaagcaggatcttgtggaagctcttgacctgggattcagttctgtgatggttgatggctcacatctttctttcaatgaaaatgctgcatacacaaaattcataacattactggctcacccaaaaaatatgttggttgaagctgagctaggaagattgtcagggacagaagatgatttgactgtagaagaatatgaagccagactaacagatgttactatggcatcaaaattcatt

SEQ ID NO: 53370 - DNA, 359 bp, Glycine max
  Clone ID: LIB3109-033-Q1-K1-A2
cattgaaatgaggtcaagtgtgctgagcttacatgggacatctatagaatgatacaatgtttagaatgggagcctagtggagtattctaccaaaaacatacagttaaacctaaggagaatggtgacaataattgatcattcaggagctttcgggataatagacatgaatcttactgcagatatgaccgatccaactgtacctgctaatcctagaaaggcttgcgtgtaccgaccatgtgtgacacatgtgatagcagttttggctagtatttgtgaggagctgtcatcagactgtgatgggctagtatatcgtgtagccgtagggatggctggtcttaataatgtgtctcaggtggaga

SEQ ID NO: 53371 - DNA, 423 bp, Glycine max
  Clone ID: LIB3109-033-Q1-K1-A3
ggtaccaaagctgaatagccattcgtattgtcgcatagaatgaaaaccctagctcaccgtttcaaggtatccttctctcctattctccttctgattaagattcgtttattagggttcgtgttaatttttcaccgatcgtcgtatctgtgagtgtgaagcctttgattttgatttggggattttcgtgtctgctaattttttgttgaatctactcgtcgtacatcattgattttaccctcttgataatcatacatgctgagatatttttgaaactttttcttgtataattggctagattgtttctatttaattatgttgattgaaagcaatctcgagatctgttgtaaatatgattaatttgtcaaaccgttgggcacgtattgttgtgtattgcataatttgtaaaatcttttgttatataaa

SEQ ID NO: 53372 - DNA, 424 bp, Glycine max
  Clone ID: LIB3109-033-Q1-K1-A4
gatatgaaacaatttttgcaataagaggtaacttcatcctagtgtctcatcttgaagacgagctgtgatgaaaaaaaaatataaagaattaatacggaaggatatctgagtagtgagtattagccaaatgaattggcacatggatccccaccctatctgtgccttttcctatgtgtgtgaatttaaatgataactgaagaaaactaaggaaggaaggaagagtgagcgtgaaagatgccttgggtgaggctttcagagtctccaaggctcgacgttgctattgacatgggtaatccatttctcaatctcactgttgatggtttccttaagatcggagctgtcgcagccacgcgatcagctgctgaagatacttatcatattatccaaaagggtaactaagcatttcaaaaattctctaccccat

SEQ ID NO: 53373 - DNA, 415 bp, Glycine max
  Clone ID: LIB3109-033-Q1-K1-A6
ggtgatttcattgcataatccattgactagaaatgccatattttccccccacattaactcacccaacccctctttctaaaaggcctcaaggatacactccggacttaattacgttattttagttagggtcaccgtttcgagatattctaaacttgtactgaaaaatatggagggaaaagaagaggacgtaagagttggagccaacaggtacggagagaggcagccaatagggaccgctgctcaggctaaagactacagagagccaccgtcggcgcctctcttcgaaccgggagagttgtcatcgtggtctttctatagggctggcatagcagagtttgtggccactttcttgttcctctacatcacagtgctgactgtgatgggtgtgttcaaatctaagagcaagtgttccact

SEQ ID NO: 53374 - DNA, 448 bp, Glycine max
  unsure (1)..(448): unsure at all n locations
  Clone ID: LIB3109-033-Q1-K1-A7
gcccagcggccgcccacgcgcccgccacgcgnccgcgcggctggagcgcgacagaaggggagaaaagaaccaagcgacatgcttccttactaatacatcatggcagacgagacccatacaagttgatagctctgaggtgatgtccaggatcgtggtgtttttgactttctcggtaagaaaaaggatgaagaagacgagcctgatgctcaggaggaggtcatcgtcaccgagtttgaaaaagtcactgtctcagaccaaggagagaacaaggacagcctattagaaaagcttcaccgatctgacagcagctgtagctagttaagtgaggaggaaggagaagatggagagaaaaggaagaagaagaagaaggaagagaaagggctgaaagagaagatcgaggagaaaatagagggtgatcatcatcatcacaaggatgaggacacaagtg

SEQ ID NO: 53375 - DNA, 417 bp, Glycine max
  Clone ID: LIB3109-033-Q1-K1-A8
ggttgaagattggcaagagacaggaacctttacatttgctttggaaagagtagaatcgtggatcttttctcggatagtggagtcagtgtggtggcaggctttgacaccctacatgcattcttccagttggggactcttcaaataaacccattgggaagctgatgggacctgctcttggtgatcacaatcaagggaacttttccatcaatctgcggagaaatgctttccaagatgcttttcaacgactctgtcctgttcgagcaggagggcacgaatgtggttgtttgcctgtattggccagaatggtcatggaacaatgcatagctagactagatgttgccatgttcaatgctcttcttcgggagtcggcccttgagatcccgactgatcctatatcagaccctattgtgaattcga

SEQ ID NO: 53376 - DNA, 393 bp, Glycine max
  Clone ID: LIB3109-033-Q1-K1-A9
ggagagatcgagttatataagaatggcatgcatagagagagcatctccagcactgaagcaaatactgctcaaactttgctggtaataagaggttatatatgaaaattaacttttaggaaacactgccatgtttgctaggtcttatctttttattatatatgttggttaaagtttttctaatatgcagcacatggttttgttgtttttgtatgtgtctgtttttgttcttttcttttctttggttagtttttgttgaagggaaagtgcaaaagataaagaatgaagcaatttcattattgaaaatagttttagtaaaggaattatataatatactaatgtttgtttgtatttggaaaaatatgcatttaaacaaaaatttggtcagcatgtgac

SEQ ID NO: 53377 - DNA, 381 bp, Glycine max
  Clone ID: LIB3109-033-Q1-K1-B1
gttttcggggttggttgttctctcgttgcgttgggctttgggtttcgtgtctccgtcccttctcctccttggcctccgttgtcgttttttgggcttttgccctcgctcttctcctccttgccttcctttctcctccaagttgctaggtgtcagtcagactccgaagatgtagtggaggctgctgaagaatcaagtgatatcggcattgttggtgatgatgtccaagactttggtgatgggaccttgccttctgccccaggaattgaaacaataagtgtttttccaaaaaatagtgcgagattgataacagctggagaagagacagagctgcttgttggtgttaaaaatgatggggattcaagcttgaatgttattgcgatc

SEQ ID NO: 53378 - DNA, 431 bp, Glycine max
  Clone ID: LIB3109-033-Q1-K1-B12
ggagacatggccgaagaagaggaagaatcagagctcagcgataagcagaaagtggagatcgcgaaatggttcctcctcaactctcctaccggagaaatccaatacgttgccaaagatgtgaaatcgattctcaacaacgacgatttgtacaaggaagccgcttccgaggcttttccctattacaacaaatcgcacttgatttccattccaatgcccaaccgaagcggagacgtactggttacttcgttcggtgagcttgagggtaatgcatttcttgaacctaggactgcgcaagttgcaattgttgaccatgctaaacaagtttgtacagaggtgagacctgccacagacgaagaactttcatctccatatattgaagaatttcgatgcaatctggatgctgaaacacttaaatatgttgaagaaactta

SEQ ID NO: 53379 - DNA, 402 bp, Glycine max
  Clone ID: LIB3109-033-Q1-K1-B2
gactgcgaaccagtagggactcccattccgactcttagccgccgatctctcagggcttgcatcttctcaggtaagctgtgaagatgtacacatcaaggaagaaaatccacaaggataaggatgctgaaaccaactgaatttgaagagtcagttggacaggcattgtttgatctggaaaataccaatcaggagcttaaaagtgatctgaaggatttatacataaactcagccgtgcaagttgatgtttctggaaaccgcaaggctgttgttattcatgtcccttacagattaaggaaaggtttccgtaagattcatgttaggcttgtcagggagcttgagaagaagtttagtggcaaggatgtaatcttggttgccacccggaggattttgaggccaccgaag

SEQ ID NO: 53380 - DNA, 426 bp, Glycine max
  unsure (1)..(426): unsure at all n locations
  Clone ID: LIB3109-033-Q1-K1-B3
cacaacaagcacgggggagcaaaacccgctacaggccggagggaancaccaagaaaaggganccaacaaaccaaggcaacgaanaagatcgacgaggccatggagccgcagatgaaagaagctgcaaaattgcgtgaatatgagaacaagggccatcaaaatgggccaggccaggttgggagcaggcccgcgccaccaccagcaagcacatgtgacaggaccatgaatccggtgcgacaacgctgtaatttcggtgatggggggaaacgtactgattatgattatgacaagagacggggctatggagtcatgaatcataaggaggctgagaagaagtttaatggcgtcaccctcgatcataattaaggaggttgatgaagataagtttaatggcatgcatgtccatccaataagctagcagctata

SEQ ID NO: 53381 - DNA, 425 bp, Glycine max
  Clone ID: LIB3109-033-Q1-K1-B4
gagagtgatcgaaaatggagataagaaaaatgttgggggttgttgtggtgacactaattatgtttaacaatggtgagagtgagagccaacacagtctcgttgccaatggccttggtgccactcctccaatgggatgatagctggggtgaaatgatccgggatgtcgatggaaatttggtagctcataaaacaaaattaatttccttctggcatcaaagctgttgcagattatgttcatgggaagggtcttaagcttggcatttattcagctgcagggtattttacttgtgcaaatgtgatgcctggttcacttggttatggagagcaagatgccaagactttcgcatcatggtatgctttcaaaagcagatatgaatgaagtttatgctgattatgcaagacctggtggttggaatggtatgaat

SEQ ID NO: 53382 - DNA, 353 bp, Glycine max
  unsure (1)..(353): unsure at all n locations
  Clone ID: LIB3109-033-Q1-K1-B5
gctcccgcgcgacccaacccgaatcgccgcgcacacacacagaactaccaagcttctccaaatgcttgtcttctttagttttaatcacaccctctttcaggtaactcatattctttcacctttgaatcatttccaatccttcgcaaccttttggaaaatgtgtatctttgttgaaattgcttagaaaatgtttcgcataacaaattggtattttattaaaacggatggcattttgtatctacttattcgtggcactattgctcntgtgattgcgattatgaaccgcagaaaatgtcttgcctttttttggttgctcacttaagatattattggattctattagataaacaatg

SEQ ID NO: 53383 - DNA, 400 bp, Glycine max
  Clone ID: LIB3109-033-Q1-K1-B6
gatgtacagacagtatgtatgggattagccgcttcaatgggatcctttcttttggcaggaggagaaattaccaaacgtttagcattccctcacgcttggcgccaatgaagtcttttatttgagaatatatataaagactataccttcgccataaaaacagttaataaaaacattttataagtagtaatagcatggtattgtgaattccatatgcaaatttttgatgtttaaatcattcgattatatatagaaagagtagtatgaaaaagagggtatttacaattttatctgatctatcaggaacctagtttaattttagtgtcacagactttttgtttttttttcataccagataacttttaacaatttttattgtaattagaagaaaacatagcatatg

SEQ ID NO: 53384 - DNA, 418 bp, Glycine max
  Clone ID: LIB3109-033-Q1-K1-B8
gcacttaacgttcgatacaattctctaagagtgcgtttggatagagaattttaactgaagaaagtaatttatgaagaatttaaagttttggaattttattttctttataacctcattcttattccacctgaaagtttccaaaatctcattcttgaactctcgaccttccctcgcattgatgatcctcttcttcaagaaacaccgtcagagcttgtggagtgtcgatcgggtgcgagcgtgaggggacacgtagaactgtacctaccagtcaggcagggaagcagccgtcgatgccaatcacttgacggaggtgctccaaatgggttagctctatgagctaccctaacctagggctccaaatggcggagagagtcgtcaacatgacgaagagaactaagacagcctataggctctgata

SEQ ID NO: 53385 - DNA, 408 bp, Glycine max
  unsure (1)..(408): unsure at all n locations
  Clone ID: LIB3109-033-Q1-K1-B9
ggttctagtgtgtgattgtttgttgttgtaactcgttcttcttcttttgttgttctgtgtttgtgtttgttttttctctcacctgaaaatgtcttgctgcggtggtaactgtggttgcggaagctcctgcaagtgcggcaacggctgcggaggctgcaagatgtacccagacttgagctacactgagtcaaccaccaccgagaccttggtcatgggagtggcacctgttaaggctcaatttgagggtgctgaaatgggtgtgcccgctgagaacgatggctgcaaatgtggaccatactgctcctgcaacccctgcacttgcaagtgaggtgttgngagagcaagcttcaagcagagatagcccttaattaggaataatgattaactattaatgtgtagctaaaaact

SEQ ID NO: 53386 - DNA, 414 bp, Glycine max
  Clone ID: LIB3109-033-Q1-K1-C10
ggctcaagccaaatatactagaatagacaataacaagcgaccgtcaagttactgctcaacagtgactattgtcgagtttgtagctctttgcttgtttgggatttggatgatgacatcggcatctgttacacccgtgcaaaatgtagatgtgtctcaggagaataatagtgaggtgaaggaacaggcaactgacccctctaataacaattctcagcagtttgaagataatcggagtgatctgtccgaggatgcaaccaaaggggatggcagtgtcacccctgataaaaactctgacgtgaaagaaaaacaggaagagaaatcggacgaaaagtctcaagaaaaaccttctgaagatacaaaaacagaaaatcaagatacaagtgtgagcgagaagagatctgattctgatgagag

SEQ ID NO: 53387 - DNA, 382 bp, Glycine max
  Clone ID: LIB3109-033-Q1-K1-C11
gagggaagggaatggcaacgaccacgagagggaggaaagaaaggaaggaccccataacaggcacgacacactatcctgctctactctatcgcccttttccttcactttactccttgcatccaattctctcgcgaaattaataaaggaactttaactttcgcgagcgacacaaacgcaatcaaatcaaatcatagattgatttggcaaccccaattccctttagattataaaatctttttatgaattaaagcaatgggtatggatgcttagagtttttttggacgcacgaaagatgattccttggggtggcctcagttgctgtgtgaatgctgatgctctctaccttcacggcagaagcagcggcagggatgctgaaattctt

SEQ ID NO: 53388 - DNA, 434 bp, Glycine max
  Clone ID: LIB3109-033-Q1-K1-C12
gtaccgttccggaatcgacggacgcatccacgcgtcctgcgagcatactaccgaagggggtacaaacaacacagatgtcactgacacatatgccaatgtctcagatgcctctggaacggatacaatactttgaataacgcgtggtattaattgttaacgctctatcaccattcctcttctcatattccatactgctacctgaacatgaagaagctaaaccctcaacgattgcctgtgttcaagtaccgaatagacgttctctacctcggcgagactcacgccaccacacatcatagtctgcgacactctcaatggataaaccactcaaattgcttagtacctgaaagaaacacgttgagcctgtggtggcagactcaatgcttggacttaacctaaaggactttacactcaggctgatgctttcatagttgcct

SEQ ID NO: 53389 - DNA, 420 bp, Glycine max
  Clone ID: LIB3109-033-Q1-K1-C2
ggaagcaaactagtgattgttacattcgcacctgaatttaacattcatggattctctgcttgactttagcatttgacttgtgaggtaatataatccaaacaagtttcaacagcattctttctgctcaagaagtctttactgcttcaaccagtgaccttcaactttctgtgtcctctccttttaattcagctgaaagtcattgttgatgtcctcaatgggtgatccagctgatgaaaatcttgaaaggaaagagatggacgtgagaaatttgtcatcttcacatggccaagaaccatatgtccacaaggttggaattccttcaagacaaaaccttttcaaggaattccaatccactgtaaaagaaacacttttcgcggatgatcctctaaggtccttcaaggatcaatctaagtcccgaaa

SEQ ID NO: 53390 - DNA, 316 bp, Glycine max
  Clone ID: LIB3109-033-Q1-K1-C3
ggcgtcggaaggaagagaagatgagtgagaatttgatggtgaaagtgtgcgcactgggagagcgcctgataatcggaggcgtggaagtggggagaaagatgatctaggggatgagctccatgagtatttaagctcaaggagttcttccagcctgggcccaatcaggccgacaagcttgtggaggacgctactttcgaggccctggacgagcccgaatgggccctgaatctggatctctgcgacctcgtcaacaccgacaagctcaactgcgtcgaactcgggcgcggaatcaagaagcggatcattcttaagagcc

SEQ ID NO: 53391 - DNA, 414 bp, Glycine max
  Clone ID: LIB3109-033-Q1-K1-C4
gacacaccatccgttctagtctcaacttctgctcttccaactcctacaacgcttttctctgcactcatgggcaaggtcaagatcggaatcaacggatttggaagaattggccgtttggttgccagagtcgctctgcaaagagacgatgttgaactcgttgccgttaacgaccctttcattaccaccgattacatgacatacatgtttaaatacgacagtgttcacggacactggaagcatcacgatgtcaccgttaaggacgagaagacccttctcttcggtgacaaggcagtcactgtttttggacacagaaaccctgaagagatcccatgggggtcaactggagctgacatcattgttgagtccaccggagttttcaccgataaggacaaggctgccgcacatttgaagggt

SEQ ID NO: 53392 - DNA, 419 bp, Glycine max
  Clone ID: LIB3109-033-Q1-K1-C5
gacacacaaaaaaaacactaactaaccaaccaactgattaacgttgcgttggtaactgtgttcactcaccttgcttcaatggcactctcaatttgcagcatgaacattatccccatagcatttagcagcgccatgtttctcattcaagtgtctgaaattcccttccttctggccaacacaaaaggtgaagatgggtcctctgagtgtgtctgccatgggatttggaacatgggcatgggggaatcagcttctgtgggggtaccaggaatccatggataatgagctccaacaaatcttcaacttggctatggacaacggcatcaatctctttgacactgctgattcttatggcacgggaaggttaaatggtcagagcgagaagcttctggggaggttcattcgagaatttcaagagcaaa

SEQ ID NO: 53393 - DNA, 396 bp, Glycine max
  Clone ID: LIB3109-033-Q1-K1-C6
aggcgtgcgaacacgcgtgagggatctaacactggtactcctagctagggtgacagactgctaaatggagaaagcttagattgatgactctggatcaaaaaccaatgacactcaggtgaaactatggtgatattatgcctctgcggctaggaagagcagataagaagatattcatagctcgtgctaaatcgtatcatgggacaacattgatagcattcaggcgttatggccttacggctctgcatcaaaaagtcgatttgactgcttcgtttgtattgcgcactgactgtgcacattactggaggcatgattttccaggtgagacagtggaagaagttgcgactagattaggctataatgtggagcaggtgattctgaaagagggaccagagacta

SEQ ID NO: 53394 - DNA, 329 bp, Glycine max
  Clone ID: LIB3109-033-Q1-K1-C7
gacacacaagatgtgaaacccatgtcatggtgtctctgctaagatttcaaatttttctacatctatggttggtcatactgcttcgtgctcttggacttattctctgagtaatgtttccttaaatgctatattgtctgcttatcattgcttgtttttgtccacagaccacaatgtatgagttgggcttaatcccgtaacaagcagagataataactttcttcagaaccatcacatgggtagtgccgctaactgtcgctgaattcaacctcaaaatatctagacatactataattagaatttagaagactatgtgctgaaaatgtataggg

SEQ ID NO: 53395 - DNA, 431 bp, Glycine max
  Clone ID: LIB3109-033-Q1-K1-C8
cgaaaacggccacacgatgcagtctcaggctgacctcttgctggaccaagtgctacaacgcactcgtctgcactcataggcaaggtcacgatcggaatcaacggattcggaagaattgcccgtttggctgaccacaggtcggtctgcgaagagacgatgttgaactcgtagacgttgacgaccctttcattaccaccgattacatgacatacatgtttaaatacgacagtggacagggacactggaagcgtcacgatggcacggttagcgacgagaagacccttcacttcggtgacaaggcagtcactgctcttggacacagagaccctgagagagatgccatggaggtcaactggagctgacatcattgttgagtccaccggagctttcaccggtaaggacaaggctgacgcacatttgaagggtggggc

SEQ ID NO: 53396 - DNA, 233 bp, Glycine max
  unsure (1)..(233): unsure at all n locations
  Clone ID: LIB3109-033-Q1-K1-C9
gactaacgaagcgagcgaacaacacacgcagggcggcggaggaangacgaaaaaccaacggcgagcagggccaaggagcgggccaggcccgaccacagaaggacaagacacgacagagcaagcgacggagagaacacaagaacacggcgaaggcaaacgcacaagcagcggcagaaaaggccaccggaagcacggacaagacgggcgaaccacacacgaaacgccagccacca

SEQ ID NO: 53397 - DNA, 51 bp, Glycine max
  Clone ID: LIB3109-033-Q1-K1-D1
gtttggttacagcaaaaatggataaaaaaaagaggaaaagaaaaattaaaa

SEQ ID NO: 53398 - DNA, 444 bp, Glycine max
  Clone ID: LIB3109-033-Q1-K1-D10
ggcagtggaacaaagcacggaagagaaagaaatttggttctctctaaagagtctccgctgaactttttggtttcttgaagatgtcggtactctccgatcttatcaaccttaacctctccgacatcaccgataaggtgatcgccgagtacatatgggttggtggatctggcatggatatgaggagcaaagcaaggactctctcgggactggttaatgacccttccaagcttcccaagtggaactatgatggttccagcactggtcaagctcctggacaagatagtgaagtgatcttatatccacaagcaatttttcgggatccattcaggaagggtaacaatatcctggttatgtgtgatgctcacactcctgctggggaacccattgctaccaacaagagagatgaagctgcaaagatattcagtaatcccgatgttgctgctg

SEQ ID NO: 53399 - DNA, 392 bp, Glycine max
  Clone ID: LIB3109-033-Q1-K1-D11
gggaaaaagaagaagagaaaaaagatgagcgacggaggaaaacgacaaggtggaagagcgttgccgccgacgccaagaggccctacgcctcctccctcctctcgccctcgcctcgaacccgtcgatcgcgaaaagacatgtccgttactgctgcgagtgttcactaagattgggagtcaccattccatggaagactttgccgtcagaggcaaagagcccaaagacgaggttcagatttacacctggaaggacgctactcttcgagaactcaccgatcttgtcaaagaagttgctccggctgcaaggagaataatcgccaaactctccttcgcctttggattccccgacaaaaactgccgtttcaaagttcaagaggtgggcaagacattatc

SEQ ID NO: 53400 - DNA, 446 bp, Glycine max
  Clone ID: LIB3109-033-Q1-K1-D12
gctcacaaaagggagaggacaatggctaagcgtgcaatgcgaatggggatgttcactgagaggtatacaagcttggcatctctacctcttcatggttcacctttcaggtctcttggccttgaagctcattctgcaatgcaccgaagacacgtgccgtcctccgcggcagcactgagggctcctgatatgagagctgctgcaaaatttgagagaaaccaatttggatcactggttttcgtggaagatgatgatgttggattcttttggcctggcagtttcagacaggtagaccaacaaggagctggtgttaatgtaggacatgctcaaagttcaaatgctagtttaattccaatggtgcctacttcaccacaagcttctacatctgctgatctcacattgaagctttaagtttaaagcttaagaatgacgatacatacacaagcaaa

SEQ ID NO: 53401 - DNA, 420 bp, Glycine max
  Clone ID: LIB3109-033-Q1-K1-D2
gtaagcggacatgtgatagtagttgtagaggcaagccacacatgtatgatttcgaggggaattgagacgttaggaagtagtacggctactattgcactgctaggacatttatcaaccaaccctactgcaagggcatcattcttggagagtattccacgtcctacatcatctggggagcaatgactcttgtgttagaactcactggaaataatttagcactagatcaggtcattctctgcactgtgaagtttcagtgtcagcagttgaggtacccaagcatggataagttcagaagatatcctttaatggataatctgtatgtttttcagttcctggaattgttgtttcagtacgagatttatggtcagaatttgtctgacgattgatagtcacatcattatcgttctgtcttctagagtc

SEQ ID NO: 53402 - DNA, 356 bp, Glycine max
  Clone ID: LIB3109-033-Q1-K1-D3
agaagaagaaggagcatggccatgagcatggccatgacagcagcagcagcagtgacagtgattaaactgctgcatcacctatatatttaaaaggtttatgggaccatagtagcgagggctgtgccttaagtttgtctctctctctctctctgtatctctctctctgtctctttttcctttttccctatcttgtgatctatttatgagtgagaaaaacaaaagtgagaaattgtgcgtgtatctggttgctaattcgagtgctattagtctgtggtgtgggtggtgtggaaccccgctacttgggttatgtgtgattgcatattatcctagagaaatgaaaattttaaattatcaat

SEQ ID NO: 53403 - DNA, 429 bp, Glycine max
  Clone ID: LIB3109-033-Q1-K1-D4
gggcgcaaaggggaacaagaagaagaagatggtgtccttgaagcttcagaagcggctcgccgctagcgtcctaaagtgtggcagaggcaaggtctggctcgatccaaatgaagtcaatgaaatctccatggccaattctcgacaaaacataagaaagttggttaaggatgggtttattatcaggaagccaactaagattcactctcgctctcgtgctcgtcgaatgaaggaggccaagaggaagggacgtcactctggctatggtaagcgtaagggtacaagggaggcaaggctttccaccaaaatcctttggatgaggaggatgcgtgtcctcaggcgcttgcttcgcaagtacagggaatcaaagaagattgacaagcacatgtaccacgatatgtacatgaaggtgaaaggtaatgttttcaagaa

SEQ ID NO: 53404 - DNA, 415 bp, Glycine max
  Clone ID: LIB3109-033-Q1-K1-D5
gctgataagaaaggcatcatgctgcggttctgtaatcttaaggaatgtgaaagtcacattcacagcgtagatagcccatgtgcaaatatacgaatggagatagggtggccacttggcgttacatttgtccatcctcatgacttacctaacaaggcaaagctgggttttctagaagcatatgaacctggttggacagaagcccatcaaaactcagacaggaatcagtccccctgatttccaacgtatgggcgacaatggatcaagttgtgaagatagccctatatagttctcagggggctctgaatctatctgtagctaggctttagagttttatacctgctgtctgtatatgcaacttttgaagctcttaggattatgagacgctaatccaatgaaaatgaatggtagactcagc

SEQ ID NO: 53405 - DNA, 392 bp, Glycine max
  Clone ID: LIB3109-033-Q1-K1-D6
gcatatgattttgatgatgagtttccggttaagaatcatcgtgaagatctagatcggaaccatgatgttgatcatgtggaaaatggggactacaatccaaagaagttgcataccattggttcaagcattctattcagctgggagcgttgctggcatggattttgaaggggacaaagaattctacagcaatgcagaatggcaagaaagagtcgagaaatggagagtcaggctagaatagagaggtcttctagacaaagaatacggaaaagaagatcagggtgaagaagatgattaccttttgggtgaagctagactaccattgtggcgcatggttccgagatctagaagcttaatcaatgcatatcgcatagtgatggtgatgaggctggtca

SEQ ID NO: 53406 - DNA, 421 bp, Glycine max
  Clone ID: LIB3109-033-Q1-K1-D7
ggggagagagaaaaaggtgaaccttgtgttctgtctgttttgttgttattcttatttctgacctatataccaattacactgattctgctttatagaattacatcatcgtatcatgaactaccttggaactacacgaaaatggtgtcggtgaagaaggagatggttgtgtactgattcgacaccctgttcgggcactacaacagcgcggaagctgctgcgtctgccttcgatcaggctcaacatccattgggtgttacatggaagaaagtggtgaatggaggagatactcgtcttcggggttgcatcggaactctggaagcacgcaacttgagcaatgagctcagagggtatgcactgaccagtggcctcagggaccggagattttgaaccatacagggtaatgagctgacgtttttggagt

SEQ ID NO: 53407 - DNA, 198 bp, Glycine max
  Clone ID: LIB3109-033-Q1-K1-D8
cctaaagtgtggcagaagcaatgtctggcatctatccaaataaagtcatcaaatcttcatcggagaattcttgacaaaacataataaagttggttaaagatggttttattatcaagaagccaactaagattcactctcgctctagtgctcgtcgaatgaatgatgacactaagaatgaacgtctctatggctatgctt

SEQ ID NO: 53408 - DNA, 378 bp, Glycine max
  Clone ID: LIB3109-033-Q1-K1-D9
gagtgagtagtgagaatggagtttcaagggttaccggaaggttgcattgctagtatactctctcgcactacgccggcggacgtgtgtaggttttccgtcgtatcaaagattttccgttcggccgctgaatcggacgctgtgtggaaacgttttctcccttccgattaccattccatcatttcccagtctccttcgcctctcaactatccttccaagaaggagctctatctcgctctctcggatcgccctatcatcatcgatcagggtaaaaaggtaggtagcgtgctgagtgcttcgcataccttaaaaccttttctgctgatttaatttgacggttaattctatgatgtctggaacgcatagctttcaattggagaa

SEQ ID NO: 53409 - DNA, 280 bp, Glycine max
  Clone ID: LIB3109-033-Q1-K1-E1
tagggacccagaagaatgagtgagagtcggtgaccaatgggctacagctgaaagacaagctccttcgatctacaatctatatctattacgctctcaatttccgagagtgctctatctctttctctcacacatagtcagcgcgatttgcacgcatatttccatcatgatgtctgctactaaactcaaatctgtcgagttgtacaggtaaatgctgagagatacgactgaggcgtcgccatcagggacgggatcatggatagtggcagttctcggtatgatg

SEQ ID NO: 53410 - DNA, 422 bp, Glycine max
  unsure (1)..(422): unsure at all n locations
  Clone ID: LIB3109-033-Q1-K1-E10
ggagtctgaaaaggttttgaaccaaacaaagaatggggataatagtagtcaatcaggttcatctaatcatttagagaaagataccaatggctctcaatcaggtgaagacagcggtgttaagagtgtttctgcttacagatcttcttcgcatcctataaccgcaccatcccctttgtctggtctgcctgaattctctcaccttggttggggccactggtttacattaggggacctggaacttgctacaaacaggtttgcagaagataacgttattggtgaaggtgggtatggaattgtttatcacggtcaattaatcaatgggaatcctgtggccattaagaagctcctcaataatttaggacaagctgaaaaggaattcanggtagaagttgaagctattggtcatgtgcggcataagaact

SEQ ID NO: 53411 - DNA, 390 bp, Glycine max
  Clone ID: LIB3109-033-Q1-K1-E11
gtgtgttgtgggtggtcatgcagtggatggagtggcagagatacatagtgaaattgtaaaagatgatgattacaatgcatagttataagattgtggcccgagaagtttcaaaacacaacaaatggtgtgacaccaatgaaatggatcaggttctgcaatccagatctgagtaaaataataaccgagtggataggtactgaggatagggtcctaaatactggaaaattggccgagctacagaagtctgtagactatgaggatctacaagtgcagcggagggaagcaaagaggattaacatagataaagtagcagcattcatcatagaaaaaacagggtattctgacagccctgatgcactgattgacattcaagtcaagagaattcatgaa

SEQ ID NO: 53412 - DNA, 173 bp, Glycine max
  Clone ID: LIB3109-033-Q1-K1-E12
ccgggccgacccacgcgcccgcacgcgcggcggagcccgccgaagggggaaagagagcgaccgacgcagcaagagaccaggggcaccggaaagcaaagagcgacaaagcaaaccagagagccgagaaggcaccaacaacggccgcggggccaggacagacaagaagacaagcg

SEQ ID NO: 53413 - DNA, 354 bp, Glycine max
  Clone ID: LIB3109-033-Q1-K1-E2
ggacttggttgagaatacatattgtacacactcagtgctcggtatctctatcactaaatttcaaaatttgctctctctaatcttaaacttgatcgcatctgtgaggaagaatggaacgttcaattctcagaggctgtagaatgcgatctctccattccaattccaaggggtggacccatttacgttcctaacatggtcggtccctgcactagggttcctcactttcagacttggcttctttctgaacttctgaagctcgatgctgaatgagctgaagatttttctcagcgtgatatcttgggtgatgaccttaaaatatttacagaggatgacttaatggatatggctctcaaa

SEQ ID NO: 53414 - DNA, 416 bp, Glycine max
  Clone ID: LIB3109-033-Q1-K1-E3
aatcagaattagacacaaacacattaaacagatggatcacttcaaattacaccctcaccttactaaattcatcgttccgaaacactataacattaagctcaatcccaacctcaaccctcaccacatttgcaagctccgtcgacgtcaacctcgacatcgtcgccgacacctatttcatcgttctcaatgccgccgaactcgacgttagcaacgacgccgtttcattcaccaaccaagattcctccaaggttattaaaccttcatcaattgaattgattgaaaatgattagattctagttttggaattcccaaaagaattacctattggcttagggagtctagacattcgctctgaaagaatcttgaatgatagaatgaaaggcttctaccgaagtacctatgatcacaatggtgag

SEQ ID NO: 53415 - DNA, 400 bp, Glycine max
  Clone ID: LIB3109-033-Q1-K1-E4
cgagtcagagagagcgagagaaaggcgcgcatgatgtcggacgaatagcatcacttcgattctgaggcggatgcaggagcgtccaagacgtattctcagctggctggtaccatgcgcaagaatggcttgacttgcgatcagatccatgccttgcagggcagtagagtgttgtacgtgaaatacaggcgagcatggacctgcaaagtggcactctgttgcaattgacattattaatgggaaagagatcgaagatgttgagcgatcatccgacaaatgtgatgttacacatgtgaatcgcactgactatgagcttattgatatctatgaagacggctacgtgagtgtgatgactgataatggacataccaaggacgatctgaagctatctactgatgaggca

SEQ ID NO: 53416 - DNA, 412 bp, Glycine max
  Clone ID: LIB3109-033-Q1-K1-E6
gggaattggaattagaattgcaaaaaggaaaggggaaggaagcacggcaaggaaggagagtggatcgattcctcagcagcaccagacatttataaaagctctttcccttccctcaaatcgctcatactcttccaatcttttttttttatgtcattttttacctttctgcctcgctcaataatacaaaacaaaaaagaagaagaagaaggttttcgcgatggcatcgaaacggatcttgaaggaactcaaggatctccagaaggatcctactacctcttgcagcgccggtcctgttgctgaagacatgtttcactggcaagcaacaattatgggtcctccagacagtccttatgctggacgtgtattcctagtcactattcatttccctccagattatcccttcaagccaccc

SEQ ID NO: 53417 - DNA, 418 bp, Glycine max
  Clone ID: LIB3109-033-Q1-K1-E7
tctgagttccgtgccactctattgatccaggcgctcgggtagatctgacatcgattctcataccaacttccgaattcataatcactctcacattattctcctatcattttctccttcatctccatcaggtgaaagttcagtgaccatcaaaagccacatggacggaagcaactatatcatcggacgcaatgccgtctaactcgacgttagcatcgactccagtgtatgcaccaaccaggatttctgcaaggttattacaccttctagagttgaagttattgaaaatgatgagattctggttttggagttcccaaaagaattacctattggattaagggtctaggacattcggttagtaagaatctcgaatgatagaatgaattgcttatacccgagtacctgatagcacaatggtgag

SEQ ID NO: 53418 - DNA, 416 bp, Glycine max
  Clone ID: LIB3109-033-Q1-K1-E8
ggttggcgttgatgttacaatggcacgaagcatgcagctcctacgctggctccgcaggcgatctcgacccttccaaggtcaaacaagtttcgggaaaccgagagctttcgtacgagggttttctgacggaattggaatgcgatcacttgatttccatcgccaaatcggagctcaagagatccgcggtggccgataatttgtccggcgagagcaagttgagcgaagtcagaacgagctccggcatgttcattcccaagaacaaggatctgattgttgctggtattgaagacaagatttcatcatggacctttcttccaaaagaaaatggagaaggcatacaagtattaagatatgagcacgggcagaaatatgatcctcattatgattactttgctgataaagttaatatagctcgg

SEQ ID NO: 53419 - DNA, 436 bp, Glycine max
  Clone ID: LIB3109-033-Q1-K1-E9
ggttctagtgtgtgattgtttgttgttgtaactcgttcttcttcttttgttgttctgtgtttgtgtttgttttttctctcacctgaaaatgtcttgctgcggtggtaactgtggttgcggaagctcctgcaagtgcggcaacggctgcggaggctgcaagatgtacccagacttgagctacactgagtcaaccaccaccgagaccttggtcatgggagtggcacctgttaaggctcaatttgagggtgctgaaatgggtgtgcccgctgagaacgatggctgcaaatgtggaccaaactgctcctgcaacccctgcacttgcaagtgaggtgttgggagagcaagcttcaagcagagatagcccttaattaggaataatgataaactattaatgtgtagcttaaaacttatgtattatgtctgtgatggttttcgt

SEQ ID NO: 53420 - DNA, 424 bp, Glycine max
  Clone ID: LIB3109-033-Q1-K1-F1
ggagcgaagaagatattagggtttttgagtgcggtgcggcgatcctagcactctcttctgcagctttcgccgacagcttcattcaccatggctgagcaaaccgagaaggctttttttgaaacaatcaaaagtgtttctcagctcgaagaaaactgggaagggaaagagacccggaaagggtgggaaccgcttttggaaatccattgggcttggatttaagactcccagggaagccatcgaaggaacctacattggcaagaagtgccccttcactggcaatgtttccatccgtggccgtatcttggctggaacatgtcacagtgctaagatgaacaggactattattgttaggaggaattatctccattttatcaagaagtaccagaggtacgagaaaaggcactccaacattcctgctcatata

SEQ ID NO: 53421 - DNA, 425 bp, Glycine max
  Clone ID: LIB3109-033-Q1-K1-F10
gggataatgattttggaattccaggagcattttacatcaaaaattttatgcaatctgaatttttcctcgtgagtgtcactcttgaagacattccaaatcatggaaccattcactttgtttgcaactcatgggtttacaatgcaaaaagttacaaaagggatcgcattttctttgctaataagacatatcttccaaatgaaactccaactccactagtgaagtacagaaaagaagaattggaaaatctaagaggggatggaaaaggagagcgcaaggaatatgataggatctatgattatgatgtctataatgatttgggtaacccagacaagagcaatgatctagctcgtcctgttcttggaaggtctagtgcctatccatatcctcgcaggggaagaactggtagaaaaccaacaacaaaagac

SEQ ID NO: 53422 - DNA, 228 bp, Glycine max
  unsure (1)..(228): unsure at all n locations
  Clone ID: LIB3109-033-Q1-K1-F11
ggagaagagaggancgagagaggggcacaagcgggcaaggcggagagagcaaagaggaagacgagaaggngcaccgagaccangaacacaccggacggcgggagcaccaaagcncaggccacggccaaggaagangaagggccccgcggaacaaaggggcgagacgncaagcagcngaaacgagaaanncagcacaagacagacgaaaacggcaaaagaaagccgaaa

SEQ ID NO: 53423 - DNA, 439 bp, Glycine max
  unsure (1)..(439): unsure at all n locations
  Clone ID: LIB3109-033-Q1-K1-F12
ataggaatggaggttgctgctgctgctgttggttggaaacttgatacaacaatcatattcccagaagatcaccttttacaaagactgtttactccttctcttgcccggagatatgaagaactctatcaaaagaatggagtcaaaatcttgaagggtgcttccataaaaaatttggaagctggttctaatggacatgtagctgctgtgaaacttggagatggatctcttgtggaggcagatacggtaattataggcattggagcaaaacctgctgtgactccctttgagagggtgggcctgaatacagaggttggtggtatacaagttgatggtcagtttcggacaagcactcccggaatctttgctgntggtgatgtagcagctttccctttgaagatttataatcgtatctctcgagtggagcatgtggatcatgccc

SEQ ID NO: 53424 - DNA, 402 bp, Glycine max
  Clone ID: LIB3109-033-Q1-K1-F2
cggcctcaagatatggttccaaatttcgagaactttgggtcggagtgcccctgggaagaggatttgaagtatgctaaagatgtttgtaatcaggttgatgtgccgttagaagttggtcatttaaccgatgaaatactggaacaatgtggtttcttacctcattgaagagtatagtactggccgaacccctaacgctgatgttgtttgcaatacacgaataaagttaggagcattcttggatgcaattggaggcatgggttttgactatgttgcctctgggcattatgcgaatgtgatgcacgcatgtgctgatgggatggatgagccttatgttctggaactatcacaggacatggtaaaggatcaaacatactttgtttcaacctgtcacaattcgagctg

SEQ ID NO: 53425 - DNA, 401 bp, Glycine max
  Clone ID: LIB3109-033-Q1-K1-F3
gacacacacacacattccacttagttaaacatggagaaatcaggctctaacagtcctaaatctgctttgaagtttgtgaagaccacatctcagtctgcagctcaatggagcagtactaattcaagaggggatgacaaaagatgtactcaaagacaagttctatgacaagactaaagcttcacgaaggtctccacccaaagaaagttacatggcttcaagaaggtctccacccaaagaaagtaacatggcttcaccaaggtctccaccaaaagaaaatactaagccacaagaattcaaactccacacccaagaaagagctgtcaagcgtgcaatgttcaattatgctgtgacaacaaaattctatatcatggagctggcaaagaaacaagaggagaagctac

SEQ ID NO: 53426 - DNA, 414 bp, Glycine max
  Clone ID: LIB3109-033-Q1-K1-F4
gattgcgcaaacatttcagtgatttttgggtagttatcctcgtgatctgtgcacaatcgtctgctacttcatataccttcttccttctcccccacctcttttcctcctttctttgttcaacaccattccccataggagcaacccttttaaaagttttgggatttggagggtgcaaaagagccaatgtgctttttaaggtttgagtccttagtgtgaaggtttatgtagtttggtgcattatgtatcagctagggcatgagttttgtgaaaataatgctttaaaagcaatggggggacaattgtgacaaacatggatcctcaggcgttcattaggttgtcaattggttctctggggttgcgatgcactggaattgaactgagcactgcaaaatctggaattcaaacactctcttt

SEQ ID NO: 53427 - DNA, 417 bp, Glycine max
  Clone ID: LIB3109-033-Q1-K1-F5
gggtgaattgggtaatctgaattttcaacaacaaacaattattaagttccatggttcagtcttggattccttgcctgctggctccttgaggtgttttgtccgattgggtggtgttcgagaggtttggagaaattaaggaaacactgcacacaacacaactgtaacttcatccaaggcaataacttctctttcacgtcgatcttttgctctcactgtcagaatttgaacttgcctttgttattcagaatctcaattcaattcatggtggctcaatgttgctgaattgggctaacacctttgattcatcgctgtgggatcttttggtcaatattttggaactgtgaagatttgtggtttaggctaaatatgatgcttgagcaggactgtgctggttttatttagtaagtttatgcacta

SEQ ID NO: 53428 - DNA, 369 bp, Glycine max
  Clone ID: LIB3109-033-Q1-K1-F6
agtcaaaagcagagaagagtcactcagggcagcagtcactgagtgaaaactactggcaattgtctgctgatgagaagcttacctttgaaccaccgcctatagattgcacaactagcggagattgcatgtaacgcagtggtatgtattataccaggggcgctggtgacacaccacattattaacgcctatgttgctataatgatgctcgtacagagaacatcattgttggatgcactcgcattgacgagtcaagactgtgaaagatgaagactgattacgaaactgatgaatggtgggctaatgggataagtgagacgcatggtatggtactatttgtgcctaaggtaatggatcaagcattgatggtgg

SEQ ID NO: 53429 - DNA, 419 bp, Glycine max
  Clone ID: LIB3109-033-Q1-K1-F7
ggcgcacccagagaggaagcttagagagagagagagagagagagagagaggagagagtattggcgcttcatcaagatgggtatttctagggattccatgcacaagaggcgtgccactggtggcaagaaaaaggcttggagaaagaagagaaagcatgagcttgggcgtcaggcagcaaacaccaagttatcaagcaacaagacaatcaggaggattcgtgttagaggtggcaatgttaaatggagggcattgaggctggatactggcaattactcatggggtagtgaagcagttactcgcaagactcgtattctagatgttgtttacaatgcctcaaacaacgagcttgtgcgaactcagaccctggtcaagagtgctattgtccaggttgatgctgctcctttcaggcagtggtacct

SEQ ID NO: 53430 - DNA, 302 bp, Glycine max
  Clone ID: LIB3109-033-Q1-K1-F8
aggcattgtgagatcttctaaagcctgacgctgcaggggtttaaatcgactgatcaccctatactaaatgtacatacacagttcacttaaacctatttctataaactctatcttcatcaacattcatcagatgaatgatcagtatagcaagcctgcctatttacaacaatggcgagatacaacgtgattgaaggtaatgcaacactctactgaacacggatatacttgtgacaagctttgcatcatgacagaacccatagactgagaaaataaaggttcaacagcatacttgggaccattgc

SEQ ID NO: 53431 - DNA, 425 bp, Glycine max
  Clone ID: LIB3109-033-Q1-K1-F9
gacataaatgaagctgtgccttttgttgagtggggaccaaagggaggaaagaaaacacgatctcatgctggaacattgacatttaaccgaaacagcatgtgtggtgaacctgcacgaactgttggttggcgtgaccctggttttatacacacaagtttcttaaaagaactgtggccaaattttaggtacacttacaagttggggcatatgctgtctaacggttcttatgtatggagtaagaagtattcattcaaggcatccccatatcctggacagaactctttgcaacgtgttatcatatttggtgacatgggaaaggctgagcgtgatggttcaaatgaatatgctgattatcaaccgggttctctaaacaccacagaccaacttggtaaggatttagaaaattatgacattggtttccacat

SEQ ID NO: 53432 - DNA, 299 bp, Glycine max
  Clone ID: LIB3109-033-Q1-K1-G1
gttgaaaaacgacagctctagaaggtactgagagggtttgcgctgcgtgatttccggtgtcgcgagtcgctgcgcaatgaagaatggcaggtctatgaagtccatacccactatgggtgagcttgggggctaacgatagggtttgtcagaggaagctgtccgggttctggatcttagaagcgattcatggggattttgcgtcgcaaggtgtgcaggtagaatagggtactacggctgttaacactggaacatgccaggacgctggggacacagggactgtgctcacattatgaggggac

SEQ ID NO: 53433 - DNA, 453 bp, Glycine max
  Clone ID: LIB3109-033-Q1-K1-G10
gatgatggaaagggtaccttaatctgtgtcacttgtggagtttcctactttggtcttgccttggtcaaccatctcttgctcttaggttactctcttcgagtcaccgttgacaacccagaggacatagagaagctgagggaaatggagaggcgtggtgaagtgagggctacagaaggaaatttggaagtaataatggcaaagctaactgatgttgatgggttggagaaagcatttcagggctgtcgtggcgtctttcacacttctgcatttacagaccccgctggtttatctggctacacaaaatccatggccgagattgaagtaagggctgctgagaatgtgatggaagcatgtgcaagaacaccttccataacaagatgtgtgttcacatcatcactatcggcttgtgtgtggcaagacaattcacaatcagaatttaccccagttattaat

SEQ ID NO: 53434 - DNA, 388 bp, Glycine max
  Clone ID: LIB3109-033-Q1-K1-G11
ggcagcaacagcagcattcactgaaggcactcaggggggtttgcggtttcagagattgtgacacacacatccatggccaccaataccaacgccgactcagatatgtcgcaccagctatactagaatgatgccgacatccatatgatgctagccgccgacgtacacatagtcaccaaagactgcgactttcaaaaggaacgttacatcttcaagcgcctgatcgacgggatttacattaacaatccttgggaagacatgggacatgcttcagttagctattagggatactagagcaactgaaaaccctgatgagatcatcgtacaatccttaaggccctatgatcgaagagcagatgtgaaatatgctaaggacactgaagctcatgct

SEQ ID NO: 53435 - DNA, 347 bp, Glycine max
  Clone ID: LIB3109-033-Q1-K1-G2
gaaagagggattggaaaaaatagacaaactatcggatttaagcaactgaatttccaatcctgagaccgcaagcgcatgggtagttttcacttggattcatcacaataaactcaaactgcagaaatagacttatgcttttcatttgcattgctacagtgtcgctttaccaaaacgccaagatacagtgagattggttttaaagcaactcctgcgtgaccacaacgccacttgtttcaggcatgcctactgaacagactcaacaacctctgatatcggaggagcaagaagagacagcctacgattcctcggagaaggtggtggtggtcagaatcgacgaccactacggc

SEQ ID NO: 53436 - DNA, 403 bp, Glycine max
  Clone ID: LIB3109-033-Q1-K1-G3
ggcacaagtgagtttgttgatcgagataactagaaacagtgtgatgaaaatgaaggtccttgttttcttcgttgctacaattttggtagcatggcaatgccatggcgtacgatatgttccctctgcgaatgaacactggctatggtgcccgtactccggaggtgaaatgcgcaagttggaggcttgctgaggaagcacacaacatgtttggctttgagaccattcctgaagagtgcgttgaagcaacaaaggaatacattcatggcgaacaatatagatcagactccaaaacagttaaccaacaagcttacttttatgccagagacctcgaagtccatcccaaggacacatttgtgttcagtatagatggcaccgtactctctaatattccatactacaaaaa

SEQ ID NO: 53437 - DNA, 412 bp, Glycine max
  Clone ID: LIB3109-033-Q1-K1-G4
ggcgctcatttcagaaacactgagtgtccctactctctaaccttttctctctcactaaccctaatcccaactaattcgaatttcgcttccgtcgtgtctccttccatttcacaaggtcaattcatcttaacccaattcttctctttctttttgttctttttctatgtagtctcttgttatttctgttccttaattccgcgcgtaggtacaacatttcacgccgcttaacgttagggtttcaaatttgacaaatcttgccaattcgtttttttcttttctccctcctttttaaagcaattcgccgattcggttaaagattttcaaaatccaaaatttcatgggaagcaacgataatttcggcgacgggattttcaaaacccgtccccatctggcggacgtcacgaatctcccg

SEQ ID NO: 53438 - DNA, 379 bp, Glycine max
  Clone ID: LIB3109-033-Q1-K1-G5
ggagacagagagaatgagtacgggagcagaagggctagtgagtagttatggtcattgatgttgcaaatcatgtccaggctatgcttccccacttgaagccatttctggggccagagagtctctcatttatgtaacgctcagtctacacagggaccggaattgagaagccggactatttggcgacagtggatgtggatccagactatgcaacttattgcaaagtcatccataggcttgctggtccttatttaggtgacgaattgcatcacacaggctggaattcatgcagctcttgccctggagaccccttagcagaccgacgatttctcatcgtacctgcactcgtatcaggtcgagtatatgcggttgatgtgaaaac

SEQ ID NO: 53439 - DNA, 422 bp, Glycine max
  Clone ID: LIB3109-033-Q1-K1-G6
ggggtgaagagaaaggtgtgctatttttatgatccggaggttgggaattactattatggtcaaggtcacccaatgaagccacatcgtatacggatgacacatgctcttctagcccattatggattgctacagcacatgcaggtccacaagccatttactgctagagacagggacctttgtcgttttcatgctgatgattatgttgcattccttcgaagcataactcctgaaacacagcaggatcatctaaggcaactgaaacgctttaatgttggtgaagattgtcctgtttttgatggcctctactctttctgtcaaacttatgcagggggttcagttgggggtgctgtcaagttaaatcatgaccaatgtgatattgctgtcaactgggctggagggttgcatcatgccaagaagtgtga

SEQ ID NO: 53440 - DNA, 397 bp, Glycine max
  Clone ID: LIB3109-033-Q1-K1-G7
gataccaaggtggaggcttacgcagatgacaagcttagtgcgcgagtctctctcccttataacccttcttccacttccgtgtcttttacgagttagatttctcattctttcatggaacaacacattcactctctctctctttagtgattttttcgatttgattgacaaacacaacgaaccaaagttaactactttagagagagagagagagagagagagagagagagagagagatggagagtgaaggaagaagagaaggaggagagagagaaacaacagcagcgacgaggaaggtggagggtgctgagagaagatacataggaataaggatgaggaagtggagcaagtgggtcgctgaaagtagagaacccaataagcgttcaaggattaggctcgg

SEQ ID NO: 53441 - DNA, 409 bp, Glycine max
  Clone ID: LIB3109-033-Q1-K1-G8
ggggcaagctgagaagtgtgccgagagaaagaggaagaaccagtatcgtggaatccgtcagcgtccatggggaaagtgggctgctgagatccgtgacccaagaaagggggttcgtgtttggcttggaactttcagcactgctgaagaagctgcaagagcttatgatgctgaagcaaggaggatccggggcaagaaagccaaggtgaatttcccggatgagccttcaggcgctgctgcttcctcaaaacgcctcaaggtgaatccagaggctcagccaatgaaggaaaatctgaacaccgtgaagccgaaaatgaaccagatgttcaattttggtcacaatctggagggctactacagcccaatagatcaggtggaacagaaaccactggttaaccagtatgttaaccct

SEQ ID NO: 53442 - DNA, 312 bp, Glycine max
  unsure (1)..(312): unsure at all n locations
  Clone ID: LIB3109-033-Q1-K1-G9
gacggcgaaaagccaaaaaacaacgaaggacgcagannagcanggctgncacgggggcatcgccgaaagggaacagcagggcnncagcaggcnctacaagcaagncacngagcncaaacnacnaggcaaaaacangcccngangnggaaggcanngnngccaaggcagcgaaggaagccacngcnagggacaaaaccgnnccagcngcacancngcgaangcacnaccangacngnnncggacgggggcgagaagccgcagagccgcgaaaggcaaaaggaagcaacaaagcagaaaaagaagggccaccaa

SEQ ID NO: 53443 - DNA, 396 bp, Glycine max
  Clone ID: LIB3109-033-Q1-K1-H1
cgtcgagccgcgtcggcgtggaaagacgccacaggggggcgcatggctctcaactgcggactggcggatccctccgggggtcccatgtcgaggacttctatcagcctagctttgttgatatattctttacaggttggagtgactccatgtaggcggtagggagcgacagtacaggatgaagtagaggaggctggtgcttgggagtgagacgtgctagcgctgagcgtggatggtggaagccgggtggtggggacctgcttggagcggtgaaagaggagtgggaggtaatgagttaggcatgcgcgggaagttacagtggggatcatgatgcatggagcgtggatgggtgaatacacgtgggtagcagagcctgctaaggcatgctagagactgctg

SEQ ID NO: 53444 - DNA, 85 bp, Glycine max
  unsure (1)..(85): unsure at all n locations
  Clone ID: LIB3109-033-Q1-K1-H10
caggaagnggcagagacagacgccacaaaggaggaaaaggacaaaaaaaaaaaaaaaaaaagcggccgaacgagaggagccaagc

SEQ ID NO: 53445 - DNA, 162 bp, Glycine max
  unsure (1)..(162): unsure at all n locations
  Clone ID: LIB3109-033-Q1-K1-H11
ggcggcagnagnggaanagcggaagagngagcgaaggagaaagcagaaagcagaaagacggggcaggaagcggagggagaaaaagcgaggaacgcgacacagaaaaaaaaaggagcccaagacagcgcgagaggggcgagcgagagcaaaaggagcagacac

SEQ ID NO: 53446 - DNA, 428 bp, Glycine max
  Clone ID: LIB3109-033-Q1-K1-H2
gacagccgaagctataaggagggactaccctgaggaagatgggttgcacctaactggccttatccatgatcttggcaaggtgctgaatttgcctagttttggaggacttcctcaatgggctgtagtagggggacatattccctgttggttgcagatttgatgagtccattgttcaccacaagtattttaaggaaaatccagactacaacaatccagcatacaacactaaatatgggatttactcagagagatgtggacttaacaatgtgatgatgtcatggggacacgatgactacatgtatctagtggcaaaggagaatgatactacactgccctctgcggctttgttcattataagataccattcattctatgcattacataaagaaggagcctataagcacttgatgaatgatgaagattttgag

SEQ ID NO: 53447 - DNA, 414 bp, Glycine max
  unsure (1)..(414): unsure at all n locations
  Clone ID: LIB3109-033-Q1-K1-H3
ggccgaatattgttatttgttattaatgtttacgcaaatgcctgaattataagatgcaccacgttctgtgaacttttcaccttcactctgtatcactaatccttctctgcttggaggcttttttttttttttttgatggatccggcaaagggattggaagcttcgggggagaagacccttcaagcagaagtgaaagcttttttcgattctgctcctcctttgcagaaaagtgatgagataactcagaagttgaatcagttcattcaacgcatttcttgtccatcagcgaatgggaaagttaggagaattgattgtgtgacttctggtgggaccaccgagccattggaacaacgatgagttcgctatgtggacaatttcagttcaggtcacagaggggccacatncactgagtat

SEQ ID NO: 53448 - DNA, 346 bp, Glycine max
  Clone ID: LIB3109-033-Q1-K1-H4
ggctttatatttgagttcaaacttatcatagccgtggccacctccaacttctctagcgctctctccggctacctagccttctttacggtgctacttaccaaggcacactctaccgataccgattctttcaaccttcaacaagttcaacccagtccaaccaaacattatgctccaaaacgatgctagcataacatacagcggggtgttacaactcaccaaagttggcagcaacggcgtgcccacctcgggatctctcggtcgtgctctttacgctgtcccaatccacatttgggacagcgaaaccgacaaggtagccagctgggctacatgctttaaattcaacatt

SEQ ID NO: 53449 - DNA, 411 bp, Glycine max
  Clone ID: LIB3109-033-Q1-K1-H6
gagagaagagaaggttacagaggaacaaaaacctgtctctgtttctccgtcgtggcaattgaaggaagcactgtctgtctctgcaactttagtcacattcacatggcagcttctgcatctgctactgctgtgccatatctagacaagacagattttctaaagcttcaaaatggcagtgacattcgtggtgtggctgttgatggtgttgagggagagctagttaacctcactgaacctgttgctgaagcaataggagctgcttttgctgcatggctaatggagaaaaagaaagctgatgcttctcagcatttgagagtttctattggccatgattcccgaatatcagccaaattattacagaatgcaatttctcgaggtcttgctggtgctggcctagaagttgtccactat

SEQ ID NO: 53450 - DNA, 360 bp, Glycine max
  unsure (1)..(360): unsure at all n locations
  Clone ID: LIB3109-033-Q1-K1-H7
agggaaagaaagggaggaaagagtgcttctgcttcaggaaagatgactctgaggtcctatctgataataatgttgagcaatatgatcttgtcccatttagattcccatgtgaactgtgatttggatgagcttctcaaggcttcagctnttgtgttgggtaagagtggaatatggattatgtacaaagtggtgcttgaagatggacttgctttggctgtgagaagatnnggagaggagggtctcaagggttaaagagtttcaacagatgtagaagcaatatggaagttatgacattcaaatattgcaactctgagagcctattactggtctagtgatgagaagcttcacatatatgattat

SEQ ID NO: 53451 - DNA, 402 bp, Glycine max
  Clone ID: LIB3109-033-Q1-K1-H8
gggtcacaagaaaaaaaaaaaaacatgactgagttatctttctcaaacaagaagaatgagttatctagtaacctcttctctatcttcttccacttctgttatctccattttttctcaccctttatacttctcctacttcatcttcttctccccttacctcctcaggatcctgtctttcctctcccctttgttcatcaccacaactcttctccttgtggcccttctcactttcactcccaacaatcttgatcaggaaaagggtggttctgagctttctgagtccaaatggggcattctgctttctgttttgcaatcttttctagcatggcttcattccaaagctgatgagatagatgaggaaatggggctcctaggtgaggttgaggcatatcttgtcatgtt

SEQ ID NO: 53452 - DNA, 443 bp, Glycine max
  Clone ID: LIB3109-033-Q1-K1-H9
gacacagtcctggctcagcaggaacatcaccagggacttgatccttatagaaaatcaaatccctttctttgtgctacagaaactctatgatgacgttgtcacttgtgtcaaagagaaggaagaacaacacaccagctttgttgatctcaccattgagtactttgcattctatgacagtcagatgtcttctcttaatgaaaatgaaaccaagaaacactatttctgtggcttactccgcaagtcaaagagcaaagatgagagtccaaaacccttcactgttgttcgtagaagcggttctgaggaaccttgtatatcaaagagcgaagataatggttccaaggaaacttgtaagtcagaaaacaaaaatagttgttgtaaaccagaacacttcactgatctgataaggtggttttaccttcccactgagtgcaatattggtcatg

SEQ ID NO: 53453 - DNA, 331 bp, Glycine max
  Clone ID: LIB3109-034-Q1-K1-A1
ggggagttgaaggggttagggtttatgaagggatggaagcggcagtggtggacgtcggctctaagctcctcaaagcgggctttgcaattcctgaccagactcctgccatggcccgcacttggagaggttttatctccttcaatgcataattctaagtttctaacccacttagctattctcaagtattactttggacttcacaaccgcacaatcatatcaccactttagtacctacctatacctaactatctatctctgtcagaatccctaattgaccttctttccattggactcagataattcccactcagatgaagcaattactcgatga

SEQ ID NO: 53454 - DNA, 374 bp, Glycine max
  unsure (1)..(374): unsure at all n locations
  Clone ID: LIB3109-034-Q1-K1-A10
ggagttgggtgctggaatattggggaatatttttgatggaattcagaggcctttgaaaactattgctaaaagatctggtgatgtctatattcctcgtggtgtctctgttccagcactcgacaaagatacactttgggaatttcaacctaagaaaattggtgaaggtgaccttttaactggtggagatttatatgctactggtttttgagaacagtctaatgcaacaccatattgcacttcctcctgataacatgngaaaagatacctacattgcaccacctggccaatattccttacaggatactgtattggaactngagtntcaaggtgtcaaaaagaaattcactatgctttagacttggcctgtacgtaca

SEQ ID NO: 53455 - DNA, 411 bp, Glycine max
  Clone ID: LIB3109-034-Q1-K1-A11
ggaaggagtgaggtagcaacagcactggcactgccactaccaatagcagaatgggaaccttgggcagagctttctacgccgtcggattttggatccgcgagaccggccaagccatcgatcgcctcggctctcgtctccaaggcaactacctctttcaagaacagctatctaggcatcgacctctgatgaatctgttcgacaaagctccctcggttcacagggatgcatttgtggcccccagtgcctccctcctcggcgatgtccacgttggcccagcttcctccatttggtatggatgcattctcagaggtgatgttaacagcattactattggatctggaactaatatacaagacaattctcttgttcatgttgccaagtctaatttaagtggaaaagtcttgccaacta

SEQ ID NO: 53456 - DNA, 376 bp, Glycine max
  unsure (1)..(376): unsure at all n locations
  Clone ID: LIB3109-034-Q1-K1-A2
acgacaagacgaggagtgagggtgaatatcaggcaaggttatctctcctttgacgacaagatgagcatcccaattccccatcggcagttattcatagacggagactggaaagtccccgtcctcaagaatcggattcccatcatcaacccttccacccaacacatcatcggggatatcccagcagctactaaggaagacgttgatctcgctgtcgctgccgccaaagctgccctctcccgcaacaagggcgccgattgggcctccgctttcggctccgttcgggctcgctacctccgcgccatcgctgncaagatcaccgagaaaaagcctgaactagcaaaactcgaagctattgactgtggaaaaccgctcgatg

SEQ ID NO: 53457 - DNA, 314 bp, Glycine max
  Clone ID: LIB3109-034-Q1-K1-A3
gataagaaagaagatcaaaagaaaaaagagaaacaaatggcagcactgggtggctttaccgacatcaccggagcacagaacagcatcgatatcgaaaatctcgctcgctttgctgttgatgaacacaacaaaaaagagaatgcagttctggagtttgtgagggtgattagtgcaaagaaacaagtggtttctggcaccttgtactatatcactttggaggcaaatgatggtgtgacgaaaaaggtttatgaaactaaggtgttggagaaaccatggttgaacatcaaggaggttcaggaattcaagcccatcac

SEQ ID NO: 53458 - DNA, 287 bp, Glycine max
  Clone ID: LIB3109-034-Q1-K1-A4
catattatacacaataaaaaaatgaagtaaatagtagaatattcaagaggccttaaaagatcaagataaagacgaaggagccgacttgatattttagcattataaccaaaaagaatagctttcggatctctattttttattatcgtcaaagaaaattagaatcataggattaaataaagaaatttcaaactttctattacacatatctgttttcgttacaagcagtatttgggtatttttgtttgagccgtacgagatgaaattctcatatacggttcttaaggggg

SEQ ID NO: 53459 - DNA, 377 bp, Glycine max
  unsure (1)..(377): unsure at all n locations
  Clone ID: LIB3109-034-Q1-K1-A5
gaataagaaaatggttaatggggggacagttaacaactggttctgcataaacttttcaaggaatgttcaagatagtgttgcccgtggtttttgctatgaacttgctcagatgtgttatatatctggaatggcatttacacctgagccagtagtccccccagtcagtgctcgccctgatcaagtggaaaaggttcttaaaactcggtatcatgatgccaagaacaaactgcaaggaagagagcttgatttgctcatcgttatcttgcccgataataatggatctctttatggtgatctcaaacggatatgtgagactgacctangacttgtttcacaatgttgcttaactaagcatgtcttcaaaatgagcaagcagt

SEQ ID NO: 53460 - DNA, 387 bp, Glycine max
  Clone ID: LIB3109-034-Q1-K1-A7
ggggttgaagatgagtgaagatataggtcaatggacttcttaaaacaaatctgtgatgagtaagttcatgataaaagtgactcagtagtgggccatacatattgtccataatggatttaattttgttcccttaagggtatttgggtttgaaaatctgatattgattttagtttccaatctcattgcaagtcaaacaccacaaaattttcttggaagttggtgttaaataatattgtatgtaactgtagttcggaaatttaggactcaagatttagttgggacttaaataatcatagacttgtgtgattatggtcactactatttgtaaatgcctgaaacttttgatgattttggcttagttcctccaacaccttccaataaattcga

SEQ ID NO: 53461 - DNA, 387 bp, Glycine max
  Clone ID: LIB3109-034-Q1-K1-A8
gaaatgtggggatgtcaatactgctaggttggtgttcgacaaaatgcctaatagagataggatttcgtggaatgccatgatttctgggtattttgaaaacggggtgtgtttggagggactgagattgtttggcatgatgatcaaatatccggttgatccagatttgatgaccatgaccagtgtgattactgcatgtgaacttctgggtgatgatagattggggaggcagattcatggttatgttctgagaacggagttcgggagagacccttcaattcataattcgttaattccaatgtactcatctgttggacttattgaggaagctgaaacagttttctctcgaacagaatgtagagatgtggtatcgtggactgcgatgatatc

SEQ ID NO: 53462 - DNA, 416 bp, Glycine max
  Clone ID: LIB3109-034-Q1-K1-A9
gaatagcaattgcattcacaaagtagtggatgaagactgctttgacttcagggatttatggtctattgtattcccatctgaatcagaaaagattattgcaacagtaacaagaaaatcaaatgaggtagttcatactcaagcaaaagttatgactgatcacgatgtcatgtataagtatgtatcgaagaatgtactttttgtcgcaaatgcagcaccaaaagccagaggggaaattggaacagccaccccagaggaggcattgttggtcatctatatcattgatactgtgactggtcgcgtattgcatcgcatggcacatcatggttgccagggtcctgttcatgctgtatttagtgaaaactgggttgtctaccactattttaatctcagagcacacagatatgagatgtcagttg

SEQ ID NO: 53463 - DNA, 332 bp, Glycine max
  Clone ID: LIB3109-034-Q1-K1-B1
gggatatagaagttagaactagtgggccggcgcgtaattcaaggcgaagctccactcacatgtcgaaatcagggcattagggttttccttctcccctgcaactgcaattcccccttttggaagatggttccacagtcagtgataacgcaagtctccgattcaagtggcgtgaatgcgatatcaaacgtttcttctggccacggattctacgattggttgttcgaatgtcacgggttctggcacaatgccactctcaacatcccctcgttcctcttcgtcttctacttggcacttcaagccaggcacagcttactcaaactctcccttgcgcg

SEQ ID NO: 53464 - DNA, 421 bp, Glycine max
  Clone ID: LIB3109-034-Q1-K1-B10
ggtggcagactcatccaaagtaccccttgattcgcttacacaacagggacgagtgttattctcggcctacggaaccattggcgtggtgggaaggggaaacgatcttgggtggtaaggatgcactgggcggtggaacatggttgggttcgacaagagacggtaggatagcgtttcttacaaattttagggaagttgagatgctttcgaatcccaagaccagaggggacttgccccttcgttttcttcagggcaataagagtcccgaggagtttgcggagcaagttgtgaaagaggcagatgagtataatggctttaaccttgtattagctgatatttgcacctccagcatggtttatgtctttaatagaccaaaccaagatcatctttctcttgcacaagttgtgttacccctggaattcac

SEQ ID NO: 53465 - DNA, 395 bp, Glycine max
  Clone ID: LIB3109-034-Q1-K1-B11
ggagctagatagatatagattaggcagaacgcaaacgaatgacctttctaactaatctacagtccatcctgtaataatctccgtttcaacaccaaacaccaagcgaaacctgaattaagcctcttcttcttcatcgaatcgaaacaacctcgtccgtgctaaggaaactcaacgacagagactgcaacaatgtacgtagatcacgcgttctcgatttcggacgaggattatcatgatgggaacctcgtacaccgtcaacaacaaaccccccatcaaggagattgccctcgccgtttccctcctcgtttgcggcgtcctcggcatcgtcatcggttctctcatggcctacaaccacgtcggcggcgacactgctcacgggatcttctttgcagtac

SEQ ID NO: 53466 - DNA, 362 bp, Glycine max
  Clone ID: LIB3109-034-Q1-K1-B2
aacagtaagattgctaaaatgattattttacatgactatccacttcatattgtggaacaccaaggtttcattgattttgttcgagcactacaaccccagttcaatccactgagctttaatgctattcaaggggattgtgtctctatgtacctcagagagaagcaaaacctattgaatcttattgatgggattcctggacgagtcaacctcaccttggacttatggacttcaaaccaaacatcggcctatgtttttgttcgagggcacttcgttgatggtgattggaacttacatcatcctatacttaatgtattcatggtaccatttcctgattctgatggttccttaaatcaaactatagt

SEQ ID NO: 53467 - DNA, 396 bp, Glycine max
  Clone ID: LIB3109-034-Q1-K1-B3
gaccccaaaaaacaaaaatcaataccttagagaaaacaaaagcacagaatcgaaagaagagttcttttttgagagagattgggatggcttcgacgaagaagatcacactgaagagttcggacggcgaggccttctaggtggaggaggcggtggcggtggagtcccagacgatcaagcacatgatcgaggacaactgcgccgacagcggaattcctctccccaatgttaccagcaagattctggccaaggttatcgagtattgcaagaagcacgttgaggccaattgcgctgatgagaagcccagtgaggatgaactcaaggcttgggacgctgatttcgtcaaggttgatcaggccacactctttgatctcattctgggctgcaattacttgaata

SEQ ID NO: 53468 - DNA, 418 bp, Glycine max
  Clone ID: LIB3109-034-Q1-K1-B4
gatactgattcagaggatgagtaccctaattctagggttctcatagctcccaatgggagcgtttactcacttggtgttcctcttcttgctgattttaagggtacaagcaaccccattttagaagcaagcacatcagacgtgataagcccggtatccactgatcccctggtgtttgatgctgagcagagccttgagagtgagttatattttattcacaaggctaaagaatctggtgttgtgtatcttctgggtcatggggatataagagcaaggaaggactcgtggtttatcaagaagttagttataaactatttttatgcctttttgagaaagaactgcagaagggggatcacaactttaagtgtaccacactcacatctgatgcaagttagcatgacatacatggtctgaaaatcaa

SEQ ID NO: 53469 - DNA, 392 bp, Glycine max
  unsure (1)..(392): unsure at all n locations
  Clone ID: LIB3109-034-Q1-K1-B5
ggtgatagaaaaaggaggaacgcagaccgaggcgtttccagttcgaaagggaaatgaaagtgtctttgttggtgaagggtaggtgagagaaacgaaaggggtgtgtgttgggttgaataggtatagataggatcaatgagcaacaacaacgcangaaaggtggtgtgtgtgacgggtgcttctggtttcatagcttcatggatcgtcaaattccttctccaacgtggttacactgtcagggccaccgttcgctacccaagtaatctgaaaaaggtagatcacttggttaaacttgagggcgcaaaagagaggttgcagctgtttaaggcagatctgttggaagaaggttcctttgactcttgtgtggaaggctgtcatggtgttttcatact

SEQ ID NO: 53470 - DNA, 130 bp, Glycine max
  unsure (1)..(130): unsure at all n locations
  Clone ID: LIB3109-034-Q1-K1-B6
catcctgtaataatctccgtttcaacaccaaacaccaagcnaaanntgaattaagccttttcttctcatcaaaacaaaacaacccatccccgctaaagaaacacaacaacacataccgcaacaatgtaca

SEQ ID NO: 53471 - DNA, 331 bp, Glycine max
  Clone ID: LIB3109-034-Q1-K1-B7
gaggggagagagggataagtgagagaaagcagggtgcgtgtttttagagagagagagaggaggaatcaggcgaactgtgtgtggtttggtttggggcatggaagggctgggcatgctgaagcagctcattggtcagcttcagcagctcttggacacttaccagtctcaatctcattcttcttctactctcattcttcaacctcctcacactctcctctttcaacaacaacaccccagatggacgacctcccttgacattgaggatagctctgtagatgacttatgtggccctgtaatgacagctagaaagtcttgcagtttcaggatgtca

SEQ ID NO: 53472 - DNA, 407 bp, Glycine max
  Clone ID: LIB3109-034-Q1-K1-B9
ggtgttgaatgggtggaattggaaatcgaagtgaaaagaacggttgaaagtgaaagagtaagatgctattgcaattgcgctgctctcattctcaccacaaactgacacttgcctgcagttgaagaaagaatagaggatcgtggtcgatggcgtctgctagccttggaagtggtggggtcggcagttcgaggtctgttaatggtggcttcaggggttcttccagttccgtcgattggcttggcagagagattccttgagatgaggttgagagaccacgaagacgatagagatagtgagcctgacatcattgatggtgtgggtgctgagacaggtcacgtcataagaaccagcattggtggccgaaatggtcagtctaagcagaaatgtagttatattgcagagcatgt

SEQ ID NO: 53473 - DNA, 358 bp, Glycine max
  Clone ID: LIB3109-034-Q1-K1-C1
ggatgaaaagcactatagtactcttagaaatctcctctgcctcttctctctctatatgacaccctcgccttttccctttttctctaattcccatgcttgcttcctctgctctcaaaagctctaaacccattaaaataactaaaaatagaattggagcttcaagttgagaagcaagcatgcctttggaggacttctacaagatatttggtgccaccagtaagttctaaccattattgttacaagtttcatgcaccttttcctcacatcattacatgaaacacagaaaaccaaatgtatgaaaacgacagaaagagagtaattcattttacctagtattcaagttcaaacatagagaaat

SEQ ID NO: 53474 - DNA, 362 bp, Glycine max
  Clone ID: LIB3109-034-Q1-K1-C11
gacggctaaaagctaaaaatcatcgaagtactcaaattagcatggctgtcacggttgcattcttgaatttgatcatcatgttttcagtagtctctacaagcaagtcactgagcttaaactactattcaaaaacatgccctgatgtggaatgcattgttgccaaggcagtgaaggatgccactgctagggacaaaactgttccagctgcacttctgcgaatgcacttccatgactgtttcgttcgggggtgtgatgcctctgtgctgctaaattccaaaaggaagcaacaaagcagaaaaagatgggccaccaaatgtttctttgcatgcattctatgtcattgatgcagcgaagaaagcact

SEQ ID NO: 53475 - DNA, 306 bp, Glycine max
  Clone ID: LIB3109-034-Q1-K1-C12
ggtgtgagagaaagacagagacattactttttggtagtagcaacaagcaaagggaggaaagaaggaaagaaagagagagaatcttcattcatttttttctgctcattttctgtgtacacctttatcgtttctctcactaactttggagtctgctttactccacactccacaacaaagatcgtctgcattccctttcccttctcttttcaccccccttttttttttctctcttcttcttttttctttttgtgggggggccactcaattggtttgagactacataacactactacttttacactcaaa

SEQ ID NO: 53476 - DNA, 370 bp, Glycine max
  Clone ID: LIB3109-034-Q1-K1-C2
ggaccaaagaaggagcaaaatcctataacacccaatcctagctacaactccaaaccctctcttaactgcaccaccccatcatcccaaatatgtaacaccccttttgaaagctttctcattagccaccccccccttgccccatgccaccaaacttccttaaccaatttggcatgtgggggtggtggacatgttgtggatggtgtgttttggtgtggctataatggtatcctccttatctttccatgctccttttctttcaaggctatgctaaaacgctccttcttgagggcgggttctcttggaaagggcaacttcaatcctttggcatttttcaactccttcaccttacttcacacactgtgatttgggc

SEQ ID NO: 53477 - DNA, 409 bp, Glycine max
  unsure (1)..(409): unsure at all n locations
  Clone ID: LIB3109-034-Q1-K1-C3
ggaggttaagagaaggagtgaccgaagcgaagatgttacccacagcttccaaaggacgttcttcttcctcctcctcttcctctcgacctaacaatcccatgctgcttccctacctccgcagaatcatcaagtggcaacaaatggatattgaatatactttttggcaaatgcttcatctatgtacgtccccgaaagttgtctatcagcatactaaatatcacaaacaaaccaagaatcaatgggcacgtgatgatcctgcatttgttgtgatctgcagtcttcttttggcagttgcaactttggcttattgtgcggcgtatgaccatagtactgcacatacacttcttgttatcttctcagngttgtttttccactttatattgactggtgtatttctggcaacattttg

SEQ ID NO: 53478 - DNA, 422 bp, Glycine max
  Clone ID: LIB3109-034-Q1-K1-C4
gagttaagaatgtgggtatgtgtttcagaatattttagtttgaagagagtgacaaaagctatcatcgaagcagctggccatacctgtcaggatttggatctagagtcacagcaaagaagacttcatgatctgcttcaaagaaaaagatatttgcttgttttggatgacgtgtgggatgataatcaagagaattggcagaggctgaaatctgcactagcttgtggggcaaaaggcgcttcccttttagttactactcgccttttgaaggttgtggcaatcatggggacattgcctcctcatgaattatcggtcctgtccgacaattgattgttgggaattggttaaacaccaaagccttggaccaaatgaggaagaacatgtggagctcgaggacataaggaaagagatggtaaagagtgtcg

SEQ ID NO: 53479 - DNA, 371 bp, Glycine max
  Clone ID: LIB3109-034-Q1-K1-C5
gaggggtgatcgatcttttccacactcaaacctaaagagtctcataaaaaaaactatgcaagcttctctcatccgaaccggctccgtgccggtccagaacacggttctccccggttcaccgcgagtctcactcacgcgccaagccttcttctccggcgacaagagccacgcgcattctcccaggttttcaatccattcttcccactccaacaaccgcagatcctcgtcggagcgcgacgacgagaatttcggcgttcgccgggatctgaaccgaaccggatcgccctcgttttcaccaatcgtacctcacgaagaagactttcttttccgacgccgctccgcgcaagctcggaatccggccggaggatcta

SEQ ID NO: 53480 - DNA, 301 bp, Glycine max
  Clone ID: LIB3109-034-Q1-K1-C6
gacaaatctttcgctaacactcattaattgcaagaatggcacttcgttgcttggtgatgtccctttctgttctcttcactcttggtcttgcgagagaaagccatgccagagacgaagatttttggcatgctgtttggccaaacactcccattccaagttcattgcgagatcttctaaagcctggccctgcaagtgttgaaatcgatgatcaccctatgcaaattgaagaaacacagtacccgaaaaccttcttctataaagaagaccttcatccaggcaaaacaatgaaagtacaattcag

SEQ ID NO: 53481 - DNA, 390 bp, Glycine max
  Clone ID: LIB3109-034-Q1-K1-C7
ggtttgattgtgggtgcaatgcttccttactggttttctgccatgaccatgaagagtgtgggaagtgctgctctgaagatggttgaggaagtacgcaggcaattcaacaccattccaggattgatggagggaactgctaagcctgactacgccacttgtgttaagatctccactgatgcttccattaaagaaatgattccacctggtgctcttgtcatgcttacaccccttgttgttggaaatcctttttggtgtcgaaacactttctggtgtcctagctggatctttggtgtctggtgtacagattgctatctctgcatccaacaccggtggtgcttgggataatgccaagaagtacattgagggctgtgcttttgagcatgcaaggag

SEQ ID NO: 53482 - DNA, 418 bp, Glycine max
  Clone ID: LIB3109-034-Q1-K1-C8
ttgggggtgtgaagtgaagtgagtgagagaagcgcagacaagtagaagagaaaatcatggcagtttctgtaaccattttagttctcatcatcgctccgcatctcatagccttcgtctttgccattggggccgaacgacgtcgtagcgaggccaaagtggtccccgacgagtacgacgaccgaaccttctgcgtttacaccaccgacgcttcctccgtctacggcctcgccgccgtcgccctcctgctcctcagccacaccgtccttaacggcgtcacccgatgcctttgctgcggtaaaggcctcgtctccggttgctccgccacttgcgccgtcttctccttcatcctctcatggattagttttttggcggcagaggcgtgtcttgtagcagggtctgcgaggaatgcataccacac

SEQ ID NO: 53483 - DNA, 349 bp, Glycine max
  unsure (1)..(349): unsure at all n locations
  Clone ID: LIB3109-034-Q1-K1-C9
ggagcagagaaggagtttaggaagtgtggggttgcttctgagattctgctgttccttagagagcgagcgatgacggtagcagcaggaatgggttacgctctgctagcgttaggaccctctctctccatcttcgtttctgtcatttccaaaaaacccttcctcattctcaccgttctctccagcacactgctgtggcttataagtttgattgtgctgtctggaatatggaggggggttttgcctctcaacacaacagcttggtggccttttggaatactcattttctcatctgttgcttttcaagaagccctcaggcttttctcctgggaaatatantagacgttacaag

SEQ ID NO: 53484 - DNA, 315 bp, Glycine max
  Clone ID: LIB3109-034-Q1-K1-D1
gaattcaaagaatgattccaaattgaaagtaggataagaacaaaggttctacatattcacaaaaaaaaactatgtatgtaggtagagacgaaaaaataaatctcgaagtaattcgtagagttcaataactattattattttcaattcggaattcttattaattactttaaaccgaataaatcttgataattgaaaaattaagtcataatttattggttgattatatcattaactatttctttattttatatttagggtacgaggaaattatcatgaatccaattatttctgctgcttctgttattgctgctgggt

SEQ ID NO: 53485 - DNA, 336 bp, Glycine max
  Clone ID: LIB3109-034-Q1-K1-D10
ggaccaacacctgtgcagcagttctctgtcaccaaatttgatctttctttctttctttctttggcgggaatgacagaaacgggggtttctgataatttcaagggcttaatactggcgatgggttctagtgcattcatcggttccagtttcatcttgaagaagaagggtcttaagcgtgctgctgcacgcggtactcgtgcaggagttggtggctatacttatctactagagccgctttggtgggctggcatggtgacaatgattattggggagattgcaaactttgttgcttatatctatgctccggcagttctggttactccccttggggcactt

SEQ ID NO: 53486 - DNA, 330 bp, Glycine max
  unsure (1)..(330): unsure at all n locations
  Clone ID: LIB3109-034-Q1-K1-D12
cagcggtaatgagctctctggggggaggggaaacaagattactgccatgcggattttgaattatctcaacctttcaagaaaccatcttgatgggtccattccaggcaacattgcctctatgcagagtctaacttctgttgatttttcatacaacaatttctctggtttggttcccggcactgggcaattcggctactttaactacacttctttcttaaggaaccctgaactctgtggcccttatntgggtccttgtaaggatggtgttgccaatggccctcgacaacctcatgttaaaggtccattcttttttttttcttaaaacttttg

SEQ ID NO: 53487 - DNA, 302 bp, Glycine max
  Clone ID: LIB3109-034-Q1-K1-D2
cctgagtgcggctgaaataagactactgatcgagataactaggagcatggtgatgataaatatggtgattgttttattggttgctacaatgcatggaacatggctatggcatgcgtactatatactgacattgacaatgaacactccctatagggtctgatctaaggacgtgaaatgctcaccttggaggatggctgttgtaacacacatcatttttggatcaccaaccattactaagaaatgcttatgagcgaccacatgatacatacgtggcacactgtctttatctgactccttaacaa

SEQ ID NO: 53488 - DNA, 405 bp, Glycine max
  Clone ID: LIB3109-034-Q1-K1-D3
gaggaaagagcggtgctttgataagaaagttagatatagtgtacgtcaagaagttgcactcaggatgcatcgaaataagggtcaatttacttcatcaaagaatcaggatggaactaatagttggggttcagatcaagagtcagggcaggatgctgttcaatcagaaaccttgtgctgcacacattgtggaataagttcaaaatccactccaatgatgcgtaaggggccatctggtccaaggtcactttgcaatgcttgtgggcttttttgggcaaataggggcactttgagggatctttctaagagaaacctggaacactctcttacaccacctgaaccaggttgatgagggcagtaataataatgccttggacatttcgagtggcatccctgcacagcataaca

SEQ ID NO: 53489 - DNA, 328 bp, Glycine max
  Clone ID: LIB3109-034-Q1-K1-D5
ggagggaatgaagactattagctcattctctgaatattctgacatccgccaccgccacgtgtcaacctaattgggatccacagtcttcttccttcttcagctccacgcgccctctttccctttcctgtttctagctgttaccgacgtcaattgttactccgattatttattcttatttattttccccatctcactctccttcgattcgggatcactcacaacacaagtactactaccttggaatcaatttttagggtttctgattcctttatgtgtttgtctcgcaattgatcatcgcaaccacaatgtccggtcccctcgatcgttt

SEQ ID NO: 53490 - DNA, 371 bp, Glycine max
  Clone ID: LIB3109-034-Q1-K1-D8
gggaaagtgaaagagtaagacaccacaaagtgtaacttgagtgattagatctgatgagtgcagaaagaaggaaggattgttggtgatcgatcatcgatcatcgatcatcgatggcgtctgctagccttggaagcggtggggtgggcagttccaggtctgttaatggtggcttcaggggttcttccagttccgtcgattggcttggcagagagatgcttgagatgtctttgagagaccacgaggacgatagagatagtgagcctgacatcattgatggtttgggtgctgagactggtcacgtgataagaaccagcgttggtgggccgaaatggtcaatctaagcaaaatgttagttatatttttgagcatgt

SEQ ID NO: 53491 - DNA, 369 bp, Glycine max
  Clone ID: LIB3109-034-Q1-K1-E1
ggggggaaatgggtatgtgatgagagtgagattggcgtcgttcttcaccggggctgcagcggcatcgtttctggggctctacaccctccacaaggattacaaggtcccgcaccaatcctttactcaacagatcccatcatcatgatagacattgctcgtctcccacactttgtgtaaatcttctcaaaagcaaacaaaagacagaaaacatatattacaaagtgttgttgaaggaaacaacaagtgaaaacatgattcttctcaaagacattgtgcctgcagctcagaacaatatagacaccaaatttatcattttggacaaaggcaagaccacagtagaagggcaaaacaagatatgcctggctcttg

SEQ ID NO: 53492 - DNA, 361 bp, Glycine max
  Clone ID: LIB3109-034-Q1-K1-E10
gatgcatttgttggttcaaaaacagtgatccagatacgaagtcatgcacaaaagtattttcttaaagttcagaagaatggaacaagtgaacatgtacctcctcctcggccaaagagaaaagctgctcacccataccctcaaaaagctcctaaaactcctactgtatcccaagttatgggcccattgcaatcttcatctgctttcattgaacctgcatacatttatagcccagattcttcatctgtgcttggaactccagttactaacatgcctttatcatcttggaattataatactacaccacaaccaggcaatgtgccacaagtgaccagagatgacatgggattgactggagctggac

SEQ ID NO: 53493 - DNA, 243 bp, Glycine max
  Clone ID: LIB3109-034-Q1-K1-E12
gaaaaagggggccgaccgacgcgatcgtacatttacaattatactacagtattgatatctttaagcggaataacataaaaaccgcacgggttctattcatagtaggcttctattaatataatattattatactttaataaacatatgtaaaaattatgacccttaaacaaaggtttattttttattattttatacaaattatcttatcttcaaaatccacaagtatatcttgatttgaaatca

SEQ ID NO: 53494 - DNA, 338 bp, Glycine max
  Clone ID: LIB3109-034-Q1-K1-E2
ggaccgcaacaaaccaataatcttcaccatggcaaggcttgaccgtgtgaagaacatcacggggcttgtcgagtggtacgggaagaacgcacgcctccgcgagttggtgaacctggtggtggtggctggagacaggaggaaggagtcgaaggacttggaagagaaggccgagatgaagaagatgtatggcctcatcgagacctacaagttgaacggccaattcagatggatatcctctcagatgaaccgtgtgaggaacggagagctctaccgtgtcatctgtgacacaagggggtgcctttgtgcagcctgcagtttatgaggcctttgggttgact

SEQ ID NO: 53495 - DNA, 397 bp, Glycine max
  Clone ID: LIB3109-034-Q1-K1-E3
ggttgttggaagcgtggaagctagttcctgatgtttcggatgaagtttctccacctcctaaatcgcaatcttcatccaaaggtaattatttgattttggttgtttagtgtttgatcagagaatttgagatgatgggtgatgttagatttctttacagtaatggaaatactgatcgtgttatctttgatgttgtatctttaaaaataaagcatgattagttaaagtaaggataagggaaaaaaggtgatggtcaatttgccattgatcaattttagatgaattcagaatttttgtatgcctaaattttagtgcgtatttggaaagttgttgagaaataagaaatcacgtctcaaatgtgaaagctattactattagcttctcaaacgtgaaaaatcac

SEQ ID NO: 53496 - DNA, 281 bp, Glycine max
  Clone ID: LIB3109-034-Q1-K1-E4
cgacgacgacgacgttgctggcgttgacgacgaagacgaaaccgcttcatggctcttgctcaaccctatcaagagtgctactgtccctaacaccaataacaataacaataataacgggttcttgtataacggtgaggttgatgagtatttggaccttgttgataattgtaactcttgtggtgataataatcacttcgcttcagctgctgctactactgatcattacgctcagcaccaacatttcgctggtgtttctcagaagagttatgctcgggacagtg

SEQ ID NO: 53497 - DNA, 316 bp, Glycine max
  Clone ID: LIB3109-034-Q1-K1-E5
agtacaggggattatgaaaattatgagaattaccaatatgcctccgaccagtatgctaattattatggcaattatggttcgggtgccgagccagggagttcgggtaccgagtcagaggctggggttgctgcttatggaactgaacagtatgggaattatggtgatgcctatgctgcctatggggattatggacagtatgggaataattggggtgacgtgtcagcggcgacaccggtgccggaagcgtctgggattagtgacagtgtgatgaggattcctgggaagagagggaggcatgagattccaactgaagtga

SEQ ID NO: 53498 - DNA, 338 bp, Glycine max
  Clone ID: LIB3109-034-Q1-K1-E6
gggttgttaaaggagcagttgatgtagacattggtgcaaacccttctgctgagggtggaggagaagatgagggagttgatgatgcagctgttaaggttgttgacattgttgacacattcagacttcaggagcaacccgcattcgataagaagcagtttgttaccttcatgaagaggtttatcaagaatttgactcccaagctcgatgcagagcaacaggagttgtttaagaagcacatcgagggagcaactaaatacctgctctctaagattaaagatttccaattttttgttggtgagagcatgggtgatgatgcttgcttggtctttgcctactac

SEQ ID NO: 53499 - DNA, 341 bp, Glycine max
  Clone ID: LIB3109-034-Q1-K1-E7
tttggagttaaagaggtggtgctggcgatggggactagtctcacaacaagtgacagagacagagtataaccaaaagattcataataactaacattagaaactaggtgaaagtaactgcacagacacacaacacatcttccttaatttctccgtccatttccctcccataaataaatctttcatttccatctttcttgggtgatccaatggcgacccttttccagggattgggagttgtgaacccatcattggcttcttcaaactccaacaagttccatcttccttcttggaccatccttctcagagaggaaagatggcatttttgtggtcagatctgatgc

SEQ ID NO: 53500 - DNA, 367 bp, Glycine max
  Clone ID: LIB3109-034-Q1-K1-E8
gggcaggttagggaatatccggatttacaggggacaaggttagacttaggaggcttgaagggcaacctacattaactacaaatcaggtatattttacatatggacgtgtacctcaatctctaacagaaatacaagggttggtttgtgaagatatcactggaggtcaagaagatatgcccattccggctacaaatttggttgatgacccccctgttccacccacagatttcacaatattgtaagtcactcaaggttgcaaaaaatgtgaagctttccatgaatgccaccggatgcaaatgtgaaagcatttgtaatgacccaacaagctgtgcatgtgcattgcgtaatggctctgattttccctatg

SEQ ID NO: 53501 - DNA, 399 bp, Glycine max
  Clone ID: LIB3109-034-Q1-K1-E9
ggcacaaaaaatggagttctacacaaggccaaataggagtgacatccacctctcagcagaggaagaagccaccatagaggcaaagaccagagactactttgatggggttgcaccacaacgccacacaaagcctcaacgaagtgagtattcagctcaatatgtggatgctttctccaatgcccatcactcttcttcttcttcttctataccagaattcatgcaattccaacgcctcgagaatgatccccaagagaagaaattggagtacaatggaagtcaagtaccggaagaatttgtggaaacagagtattaccaagatctcaacagcgtggacaaacaccaccatacgacgggaacaggatttatcaaagtagagaaaaatggaaatgactttcacat

SEQ ID NO: 53502 - DNA, 335 bp, Glycine max
  Clone ID: LIB3109-034-Q1-K1-F1
ggaagagaaaagaaaagaatcgagtgattttcgtttgcgttgctgttgcgactgagtgagtgaagatggcgtgcttgcacgaccacagttgcgaagaccatgactgttcctctaactggtctctctacaaacacatcgacctctccaaggtaactgctttgaatgaggcaaatccaggaagtgttaagtcagttttcaaagcttgggaagagcgtctggattcttctggggttcacttggaaagcaatgagggtgatcctgagttacttgtcttcattccatttacttcagatgtcaagattaagagcctatccatagttggtggagctgatgga

SEQ ID NO: 53503 - DNA, 288 bp, Glycine max
  Clone ID: LIB3109-034-Q1-K1-F10
gggcagcagaagaacaagtagttgagaactaagggggagaagcaaatggcttcctcaatgatctcttccccagctgttaccactgtcaaccgtgccggtgccggcatggttgctccattcactggcctcaagtccatggctggcttccccaccaggaagaccaacaatgacattacctccattgctagcaacggtggaagagtgcaatgcatgcaggtgtggccaccagttggcaagaagaagtttgagactctttcctacctgccagaccttgatgatgcacaattg

SEQ ID NO: 53504 - DNA, 344 bp, Glycine max
  Clone ID: LIB3109-034-Q1-K1-F12
gacatagaacataaatgtaacagctcaagaacaaataacaagggcacattctccatatgtttctggttgcaagattcatgcaatggtcataatcattcttctttactttttctgctttgttcttaaatagtttgttttgtctcctacactttgacattattttgttctttgacacagctttgtcttattttcgtaaagcaggtttgcaggaagacttgaagattgttttggggaaaattgaatcacagttattgggccttggttttggctgggagaatgtcctttatattcacctttacattgatgacatgaataatttctctgaggcaaatgagacatatgtg

SEQ ID NO: 53505 - DNA, 388 bp, Glycine max
  unsure (1)..(388): unsure at all n locations
  Clone ID: LIB3109-034-Q1-K1-F2
gtgattgcgttgcgattgacgacgacnaggaatcatgtcttccggcggcggcggtggtaagccgttcttctgccacgtgtgcagtcagaggattacgtgctccgatgagtcggaaccattctgcccgatgtgtatggaaagtttcgtaaaagaatgcaaccctaacaatcccaaccctaatctcttccccgacagtgatgaatcttcggatccccgaactccccttccaccgcttctcacttctccctctcttgctctcatcagtctctaggtcccgatccgaacccgacgtgttcgacccgatggtcttcctccagaaccaccttcaggaccttcgcgccgacggtgccaacattcaagttgactttgaccatccttccaacgagaa

SEQ ID NO: 53506 - DNA, 388 bp, Glycine max
  Clone ID: LIB3109-034-Q1-K1-F3
catggaatcaaactttacttaactaaggaatggtacaagaaaacgacctggatgtatctggctattcccatcaccatttatgcattggaaagactggttagagcattcagatcgagcattaagtccgtcagaatattgaaggtgactctttatcctggaaacgtgttatcacttaaaatgtcaaagccgcatgggtttagctacaaaagtggacaatacatgtttgtgaactgtgctgctgtgtctccatttgaatggcatccattttccataacttccgcccctgatgatgattaccttagcgttcacataaaaatacttggtgattggactcgaagtctgaaagccaaattcacacaggcgtgccagcaacccctcaatggacaga

SEQ ID NO: 53507 - DNA, 255 bp, Glycine max
  Clone ID: LIB3109-034-Q1-K1-F4
gggtgttcaatttgaagataggatcagcatgctggtttcatctgcagtcccagaagggaaaggtgtatcatcttctgcatctgtggaggttgctagtatgtatgctattgcagctgctcatggattaaatatcagcccaaggcatctggccatactctgccagaaggtggaaaaccacattgtaggagcaccatgcggtgtcatggaccagatggcttctgcatgtggtgaagccaacaaacttcttgctatgat

SEQ ID NO: 53508 - DNA, 297 bp, Glycine max
  Clone ID: LIB3109-034-Q1-K1-F5
gaagactaaagaagaagaagaaatgattgttgttgcaatgaaggaaaaagttgcctccgtccaagctgaagcttatgctcaagctctagactataccattgtacgtggggtcattaatgttcttactaacactagcatcatggatgaaacaccaaagacatccaatgcagccatagctgatgaagttgtccctcaagacaaggaacttgcattctagaaaagtacaaccttaaatgaagctaccttaagagaaaagggtgaacctgatgttattggtggtggttactctacaagctc

SEQ ID NO: 53509 - DNA, 364 bp, Glycine max
  Clone ID: LIB3109-034-Q1-K1-F6
ggcggtgagttagaactgataatcaagagagtgactactggtcggcgacagcgaactacttccgtgtaatggcgacctccgtcgcagtcgccggcgctttgacggcgcatgatcgccggattctgacagcggtgaacgtcggagcgtcgagcctgtcgttggccggttccagcttcattgtagtgtgctacctcctcttcaaggagctccgcaagttctccttcaagctcgtcttctacctcgctctctctgatatgctttgcagtttcttcggcataataagggacccgtccaaaggtttcttttgttatgctcagggctataacacacatttcttttgtgtggcatcttttctatggactac

SEQ ID NO: 53510 - DNA, 361 bp, Glycine max
  Clone ID: LIB3109-034-Q1-K1-F7
ggagagaggcagaagaagaagaagaaaagatggtgggaccagtgagacctcagtttgtgctctttggttcttccattgttcagctcagttactctctccaaggttggggcgctattcttgctcatttgtatgctcgcaaggcggatataattctgcgaggatactctggttggaattcaaggcgtgctgtgcaagttctggatgaaattttccctaagaacgccactgagcaaccagattttggtaattgtgtactttggtggtaatgattctcttcttccacatccaagtggtcttggtcaacatgtacctctccaagaatacattgaaaatatgagaaagatggtacccatctaaagag

SEQ ID NO: 53511 - DNA, 353 bp, Glycine max
  Clone ID: LIB3109-034-Q1-K1-F8
ttgtggttagagagagagaaaagagagttttgaggagggagggaataaaacaaaagagggtaagcttagtgtggctgtttagtgggtacccttgttgccctcataggaagtgagaaacaaggctagtgagtcccattggaattttttttttttgtggctgaagaaggtgaaaagggggcaagtttcactcttgaagggttttgaggggtgtcaacttgtgtttggagactccgaggttgagtttgaaggtgcattctttgaagggtgtttttgttatgggttctagttgtggttgtggtgtaactcttgttcttgttttctgcttatggggtgggttgatctcccttttttct

SEQ ID NO: 53512 - DNA, 312 bp, Glycine max
  Clone ID: LIB3109-034-Q1-K1-F9
agagacacagagggggttgttgtgtgtcattttcggggcgaattttgggtgcagaggcagagaaggagcacccacaccgaccactctactctgcaacacccgaatctcgttacctaaacacctgtttgcgttcttttcccttttcttttctgattagttcaagagaaaaaaggacacaatggactctgcacgtataatctgcaccgcaaaggttttaggatttcaaggccgaaagctgtctataaaccctaaccacgatttgaaatttctacaaccaattgacctgaaagagaattgtgcttgatggctttc

SEQ ID NO: 53513 - DNA, 358 bp, Glycine max
  unsure (1)..(358): unsure at all n locations
  Clone ID: LIB3109-034-Q1-K1-G1
ggagagaaagtgaaaaaaaaacctttttttttagagagagaaagagagggtagccctagaaaaatatgcaaccggataaggacttttgcagctgagacactgcaaaaagagttatatagagagagaaaagaaaaagnatttttttttatatatattttatcctttcaattttgatgttttctttttttatttatttaatatcttttttccattgttgtggagtaatttgcttctttgcagtgcacactgacacagtgacacagtggttctctcacctctccttccctgtgtggaactgtgaaatgtgcaccacagctttttgaatcctgttcctaaaattttcctgtgaaagattctg

SEQ ID NO: 53514 - DNA, 292 bp, Glycine max
  Clone ID: LIB3109-034-Q1-K1-G10
tttatactttagaagggggagatggattcaaactatccgtttccttaaagtggagcccaagcaaagaattttagtacactggtcaggttgttagatatgaggataacttttactcaaccacctacttggttttcatcatcatttttactttttagatcctcactttaacatttattttttctttctttatttttaaatataatattttttttttttttatattaaagcaattttttttatttattttctatcccaatttttatttttttttttttatatatttttttttttt

SEQ ID NO: 53515 - DNA, 292 bp, Glycine max
  Clone ID: LIB3109-034-Q1-K1-G12
ggcatcagcgggcacagtctcggtggtggcaagcttctgagcagggtaatggacatgctgctttactcattggagatgcgtattactatggtcggggtactgccagggattatgagcgagctgctgaagcttatatgcatgctaaatcacaatcgaatgcacaagccatgttcaatcttggatacatgcatgagcatggccaaggacttccatttgaccttcatctagccaagcgttactatgatgaagctctagaccatgatcctgcagcaaagttgccggtcacactggc

SEQ ID NO: 53516 - DNA, 373 bp, Glycine max
  Clone ID: LIB3109-034-Q1-K1-G2
ggagccagggagattgcggtgcgtgcttgggacgaggccctcaacacccaacctgaaaagctcatttggaatgttatgggcatgatgaacaactgctggttcagagtgaaaaccaatgtgtgcaggccccacaagggtgagataggtatagtgtttgaacaccccacccaaccaggcaaccaatccggcggatggatggcaaaagaaaaacacctagagaaatcatctgagtccaacccaaccctcaagaagaatgtctcctccccattcatgaacaccacctcaaaaacctataccatgtctgaagtcagaaggcacaacaacgccgattcggcttggatcatagtccacggtcatgtctatgattgcaccc

SEQ ID NO: 53517 - DNA, 406 bp, Glycine max
  Clone ID: LIB3109-034-Q1-K1-G3
ggaattgaaatagtttaacatcccaaacaccaagcttaaagaagagagacaatgagtgacacaaatagagcaacggaggagaagagcaagagaggtttaaaggaatggtttaaatcgtctcaggttctattgagcatgatattagtgcaagtgtttgttactggattgcaactactatcaagggttgtattagttcaaggctctttcatcttttctctcattgcatatcggttttattgttgctaccatttgtgttgccccctttgcactttactttgaaagaggccgcacaaaggattttactccgaaggtttggttttgggtgttcgttaacgcattgatggggatgactttggctcaaggattattctattatggtctcaaagacacttctgctacttatgct

SEQ ID NO: 53518 - DNA, 318 bp, Glycine max
  unsure (1)..(318): unsure at all n locations
  Clone ID: LIB3109-034-Q1-K1-G5
ggtttcaatttattcatttccttcctaaaaatggttcgatacttctctcgaagaacagaacagacnaaaaggccctaaaaccctaatctcccaaaaccctacgcatggcgtcgtcgttaattcacctccgccgcaccgtcagagcactctccggcgtcgcccagactttctatgtgcatgcggcatcgtattccgaccccattcggtgcggtgtttcatggagtttgcagtcaccgaagggtgtggttcagccccgttcattcaggtcaagctcaatttcacttctctcttttcgatcctcgcagcggcagagcaaca

SEQ ID NO: 53519 - DNA, 296 bp, Glycine max
  Clone ID: LIB3109-034-Q1-K1-G6
ggagcaggagtgaaaagcgaagagaatggctcccaagggtttaatctttttggctgtgttatccttctcagcactgtcactgagtcgttgtcttgcggaggataatggacttgttatgaacttctacaaggaatcatgccctcaggctgaagacatcatcaaagaacaagtcaagcttctctacaagcgccacaagaacactgctttctcctggctcagaaacatcttccatgactgtgctgttcagagttgtgatgcttcactgttgctggactccacaagaaggagcttgtctg

SEQ ID NO: 53520 - DNA, 417 bp, Glycine max
  Clone ID: LIB3109-034-Q1-K1-G7
ggtgcgaagagtgaagagaatggctccgaagggtttaacctttctggctgtgttaatatgcgtttcagcactgtcactgagtccttctgttgcgggggaagggcaaaataatggccttgttatgaacttctacaaggaatcatgccctcaggctgaagacatcatcacagaacaagtcaagcttctctacaagcgccacaagaacactgctttctcctggctcaggaacatttttccatgactgtgctgttcagagttgtgatgcttcactgttgctggactccacaagaaggagcttgtctgagaaggaaacagatagaagctttgggttgagaaatttcagtacattgagaccatcaaagagctttggaaagagaatgccctgaagttggtttatgtgctgatattctcgttctt

SEQ ID NO: 53521 - DNA, 418 bp, Glycine max
  Clone ID: LIB3109-034-Q1-K1-G8
tttacttcagaaggggatcctagacatttgggaatgaatggaaagagagtctactttcattaagtgatttattagataatcgaaaacagaaaatcttgagaactattcgaaactcagaagaattacgggaaggggccattgaacagctgggaaaagcccaagcccgcttaaggaaagtcgaaacggaagcagatcgttttcgggtgaatggctattctgagatcgaacgagaaaaattgaatttaattaattcaatttatacgactttggaacaattagaaaattacaaaaacgaagccattcattttgaacaacaaagagtgattaatcaagtccgacaacgggttttacaacaagccttacagggagctctaggaactctaaagagttgctttgacaacgagttacatttacgtac

SEQ ID NO: 53522 - DNA, 372 bp, Glycine max
  unsure (1)..(372): unsure at all n locations
  Clone ID: LIB3109-034-Q1-K1-G9
cgactcacgcctacaacagatccaataagactacagattttgttttatccctcgagagaaaccaatgaggtgtagctcaactggcactgggaatcaatcaattcaaaaaaaaccctaacaataacatggattctcaggttgccgtagctcttgctctttcacttgttggtggtgtcagctcttctatccgggcacttanagnaaangaaatatggctgttactcttcttcaaattgcaagaatatttgctaccaaaattcccggaaaaggtgattctgatgtgttgcaactgctctggaagacttgtcttgttggagctggtcctgatggaaaacataaagcttaaaagcagtcacaattgtacttgatcta

SEQ ID NO: 53523 - DNA, 387 bp, Glycine max
  unsure (1)..(387): unsure at all n locations
  Clone ID: LIB3109-034-Q1-K1-H1
gaatgtgtttatgtaagagccatggtgatcaaggcattaatctggatgcaaggtccatttgactcatttgatgaactagaatctattattgcatcggaactttctgatccagcttggccagcagcactattgaatgatgtactactcactttgcatgctcgttttaaggcttctccagatatggctgttactcttcttcaaattgcaagaatatttgctaccaaagttcccggaaaggttgatgctgatgtgttgcaactgctctggaagacttgtcttgttggagctggtcctgatggaaaacataaagctttagaagcagtcacaattgtacttgatctaccacctncgcagcctgggtcaatgcttggtcttacttcagtggac

SEQ ID NO: 53524 - DNA, 179 bp, Glycine max
  Clone ID: LIB3109-034-Q1-K1-H10
gaaggtttaaatatgaaattggagcagcaaatgcctatgctcttggttgagagacaagctctgaatgaggctatggagggagaaaagaatggtcatcaccacttacctgaaactagagggctatgcttgtcagaagagcaaactgtcaccaccatttcaaagaggccaaagattggagc

SEQ ID NO: 53525 - DNA, 421 bp, Glycine max
  Clone ID: LIB3109-034-Q1-K1-H11
gatggtatttgatttgtcaaatacatcattattgtgtactcttttatatgtatggcgcaacccaatttttgtttttttttttcaatttttaatctcctatccctttttttaattttggaatcgaaatatctaatctaaataatccaaaaattcactcttaatcttgacagtgatatatgttgtatatgtaaatcctagatgtaaaaataggcagacttctcccgggaaaaaaagtaggtaaaaaaatatgctaagtataaattgtctactgatgaaatacgaaagctgatgatattgaaaaaaaaagaattgtaaataaggttcaagttcgacttccatagagaatatagatgatattgtctataatggtagaaaaaaataaaaaactttcgaaagattttatcccaatgaaattttaaaa

SEQ ID NO: 53526 - DNA, 318 bp, Glycine max
  Clone ID: LIB3109-034-Q1-K1-H12
gatggtatttgatttgtcaaatacatcattattggggactcttttatatgtatggcgcaacccaatttttgtttttttttttcaatttttaatctcctatccctttttttaattttggaatcgaaatatctaatctaaataatccaaaaattcactcttaatcttgacagtgatatatgttgtatatgtaaatcctagatgtaaaaataggcagacttctcccgggaaaaaaagtaggtaaaaaaatatgctaaatataaattgtctactggtgaaataccaaagctgatgatatttaaaaaaaaaaaatttgtaaat

SEQ ID NO: 53527 - DNA, 373 bp, Glycine max
  Clone ID: LIB3109-034-Q1-K1-H2
ggccattgttgttgctattatcatccgcagctgcgtttattcgcaccgcaaacagtgagccatggccgtcggaaagaacaagcgcatctccaaggggaagaagggtggcaagaagaaggcagctgatccctttgccaagaaggattggtatgacattaaggctccttctgtttttcaagtgaaaaatgttggcaaaaccctcgtctctcgtactcagggtaccaagaatgcttctgaaggactcaagcatagagtgtttgaggtctccttggctgatcttcaaggggatgaggatcatgcattcaagaagattaggttgagagctgaagatgtgcaaggggaagaatgttctgacaaatttctggggaatgga

SEQ ID NO: 53528 - DNA, 377 bp, Glycine max
  Clone ID: LIB3109-034-Q1-K1-H3
ggtggtcaacggaagcgagataaataaacagagagagagagagagagagagagaggtgtgtttgttctctgagtagaagaagatcaagatcaaggaagaggatgtcgaaagaggatgtgtttgttggcgcgatcgaccaaggaacgagcagcagcaggttcataatatacgacgcgaagactggagtagtaggatgccaccacgtggagttcacccagttctacccgcaagccggggtgggtggagcatgaccccatggagatcttggagagtgtgaaagtgtgcgtggccaaggccgtcgataaggccaccgctgatggcttcaacgtcgataaaggcttgaaagccattggtctcaccaatcagagagagaccac

SEQ ID NO: 53529 - DNA, 265 bp, Glycine max
  unsure (1)..(265): unsure at all n locations
  Clone ID: LIB3109-034-Q1-K1-H4
gaatgtaagggttttttataacatgacctantaacgattcagcacattatgcgtgccactcctctttaactctctcatcctttttctctttccgtgtcaccctctttcaggttaatttgcaatgactgaaccttccaaggtcattcacgttcgaaatgtggggcacgaaatatctgaaaatgatttacttcagctgtttcaaccttttggagacataacaaagcttgtcatgctgcgtgcaaaaaatcangctcttattcaaatg

SEQ ID NO: 53530 - DNA, 440 bp, Glycine max
  Clone ID: LIB3109-035-Q1-K1-A2
ggcagttcaattgatcaactcagatttcagggacctaagtctagctgctaatagactcgcccatcatgccatcaaacttggtggcattggctttggagcctcttttttcggattgtttgctgccattgctgctatttatctgttgattttggatcgtacaaactggaaaacaaatattctcacagcactactcattccatacattttcttcagcttgccttcattaattttcgacgtcttcaggggagagcttggaaaatggattgctgcagttgctgttgtattacgccttttccttccaagacacttccctgattggctggaattgcctggtgctctgattcttcttatcgttgtagctccttctctaattgcaagcacctttagagacaacattggtggggtggtagagtgccttatcatttcatgttatttgctgc

SEQ ID NO: 53531 - DNA, 444 bp, Glycine max
  unsure (1)..(444): unsure at all n locations
  Clone ID: LIB3109-035-Q1-K1-A3
ggataataataaaaacactcgtgccgcaccttcgtcttccccaatgcttctttccacacgcatctcggaagcccttctcttcatcacatagatactttcgctatcgcaccaagtaacccttattattccaatccaccctcgccactccttcgatccgaatcatcttttccgcccacacacaagttgggtttttttgatataattgataatgggtgatagcagtgttccatctgggtctccaaatgcaaaatcagatcttgttgacagagacttggcggtttccaacaacgcgtcgtcgttggaaaccattgtgcaaagtttccaagattcaatgtctcttggtaagagacacaagttctgggaaactcagcctgtggggcaatacaaggatgttggggactcaagtttgcccgagggcccgattgagcccncgacacctttgtc

SEQ ID NO: 53532 - DNA, 433 bp, Glycine max
  Clone ID: LIB3109-035-Q1-K1-A4
ggagcctagtagtaatagtgaactggagtgatgctcaagtgtgttgtgtgtcagtgttttagggaccaatggtggagagtgagttttctgagttaagatataagatatatgctatctaatgcctagtgggatataggaaaggacctcaaatctgctatctttcgttcacatacgcatcatattcttttaattgttagttctgagttctgaccaaagttgttgatttgagtgtttttagcatatttggggtgtctgcaaacaccgcaggaattttgctttttctattgaattagattcctctgggaattcaattctgattcttccttagttttcggttttctgtctttctttttttccttctatttatattttgggttggttctctgttgagtcttgacttgcttgctccaactccaacccagtttcacactag

SEQ ID NO: 53533 - DNA, 430 bp, Glycine max
  Clone ID: LIB3109-035-Q1-K1-A5
gacaatcaatcttctttatccactctctcttaattaaattaaaacaaaaaatgtgcgctgccatatccgaagtggaacaagaagagttgctcgaaaaattggaggtgttcaagatcaaaggcagggacaagcatggccgcaagatccttcgcattatcgccaaattcttcccaggtagattgattaattaattaattaaatccctaattcctttttttttatgtgcatgaattttttaaatcttcggtaattgtttgaattgaggacagcacggttggtgagtgttgaggttctgaaaaagtacctggaggagagggttttcccgaagctgatggggaagaggaaattcgcggtgctgtacgtgcacaccggcgtccagaggagcgagaattttcccggaatctccgggtctccgtggatctacgatgcg

SEQ ID NO: 53534 - DNA, 401 bp, Glycine max
  Clone ID: LIB3109-035-Q1-K1-A6
gagagaaagagagagaaagatgtcgaagcgtggtcgtggtggttcggcggggaacaagttccgcatgtcgctgggtcttccagtggcggcgacggtgaactgcgccgacaacacgggggcgaagaacctctacatcatttcggtgaaagggatcaaaggccgtttgaaccgtcttccctcggcctgcgttggcgacatggtgatggccaccgtgaagaagggaaaacccgatctgaggaagaaggtcttgccagctgtcatcgttcgccagcgcaagccatggcgccgaaaggacggcgtctacatgtacttcgaagataatgctggtgttattgtcaatcccaagggagaaatgaaaggttctgctatcactggtcccattggaaaagagtgtgctgatt

SEQ ID NO: 53535 - DNA, 418 bp, Glycine max
  Clone ID: LIB3109-035-Q1-K1-A7
gagagcgagaaatattatagtagctctgcgtttttggggtatcattattcaaccacccattttctctcttcttcttcttccattgagaaaattctctttcatcgtgtgtgatcggtgagatgtacgtagcttccatgcgcaagtctttcaaggactccttgaaagtccttgaagctgatatccagcacgccaataccctggcttcagattttccaagggagtatgatggtgcatgccttcagatgagaatgtcatacagtccagctgcacacctgtttcctttcttggtgcaatggacagattgtcatcttgctggagcccttggactgttaagaatcctaatttacaaggtctatgtggatgggacaaccaccatgtctacacatgaaagaaaagcaagtattagagaattctatgc

SEQ ID NO: 53536 - DNA, 439 bp, Glycine max
  Clone ID: LIB3109-035-Q1-K1-B1
ggcatcgaacagagagagagagaatggcagcacttggtgggaatcgtgatgtgacaggaagccagaacagcgttgagatcgatgctctagctcgctttgctgttgaagaacacaacaaaaaacagaatgcccttttggagtttgaaaaggtggtaactgcgaaacagcaagtggtttctggtaccttgtacaccatcactttggaggcaaaagatggtgggcaaaagaaggtttatgaagccaaagtttgggagaagtcatggttgaacttcaaggaggtgcaagagttcaagcttgttggagatgcacctgcatagtctagtgcttaattaggttgctgaagagtgaagaatgagacagcctggttcgaaggggaaaagcctaaggatatatcaaaggatcctatatgtataaaataaatgttgcttttttaccttcg

SEQ ID NO: 53537 - DNA, 433 bp, Glycine max
  Clone ID: LIB3109-035-Q1-K1-B2
gacggcgatgatgatgcaaatcaacatcacctccaccacctcaatcgtcacggcgttctcttcggatcattccccgaatgttctaccttgagccatgtccaacctcgttcagattcgcgtcgccgccgacgctagcgatggcttcgactctccggcgaagcagaaagcagccaaccgcagctcctacagcaatcgcccctttctctccctccgccgcgccaaacagttcctcggcgccgccaagttcaagctcttcttagttctttttgctctctccatcgtcgtttttgtctcctccagactcagttcgtggatgggatggaaccctcaccactcctcttcggtttcctccacttcaaggggtggctatactgtgcttataaacacttggaggcataaatctcttctgaaacatactgttgctcattatgca

SEQ ID NO: 53538 - DNA, 432 bp, Glycine max
  Clone ID: LIB3109-035-Q1-K1-B3
gatgggagaatcttattgtcaaggagttttgatggttcattgaaggtttgggatctgcgcaaaacaaaagaaccgttaaaagtatttgaggatctgccaaatcactatgcacaaacaaatattgccttcagtcctgatgagcgactctttttgactggaacatctgtggaaagggagagcatgacaggaggtttattgtgcttctttgatagagtaaatcttgagcttgtttcaaaagttggcatatcacccacttgtagtgttgttcagtgttcttggcatcccaaactgaatcagatctttgcaactactggtgataaaagccaaggtgggactcacatactatatgatccaaccgtaagtgaaagaggagctcttgtatgtgttgcacgtgcaccaaggaaaaaatcaattgatgactttgaggcaaaa

SEQ ID NO: 53539 - DNA, 440 bp, Glycine max
  Clone ID: LIB3109-035-Q1-K1-B4
caaggacacgaggtggatatatatgagtcaaggccttttattggtggcaaagttggttcttttgttgacaaaggtgggaatcacattgaaatgggattgcatgttttctttggttgctacaacaatcttttccgattgatgaagaaggtgggtgcggataacaatctacttgtaaaggatcacactcacacttttgttaacaaagggggtcaaattggagaactagattttcgcttcccaattggggcaccaatacacgggataagggcgtttttgtccacaaatcagcttaatacttatgataaggctagaaatgctgtggctcttgcactcagtccagttgtcaaagctcttgttgatccagatggtgcactgagggacataaggaatttggatagtattagcttttcagactggtttttatccaaaggtggcacacg

SEQ ID NO: 53540 - DNA, 430 bp, Glycine max
  Clone ID: LIB3109-035-Q1-K1-B5
aggggaggaaagaagagagagaacaaagcacttagtgctattcaataattacgaaaaaccaacagcgagtgttgtttttgtttggtccaggctggaccagggaatgaatagagatgagaggctttcggttgaagagaactgagttaagcggcgaagccaaacgcagaatcggcggcagaaattgccaccggaagcacgtcgaagacgggtgaaccaaacacaaaattccatccaccacttctcttttcaatccccaactcaaatctgtgaagaaaatctcaatttctaaattgtaattcttagcactactgctagtagtagtaaaaaaaaacaattagaaagtagtagagtgtttttttttcgttttttcgtttgttttacttttaagatgggtgagaagagcgacgttggcggcgacgcgattaacacg

SEQ ID NO: 53541 - DNA, 428 bp, Glycine max
  Clone ID: LIB3109-035-Q1-K1-B6
gacagtattcaagatcggggaatcaatcaggtttatataattggaggagatggaactcagaagggtgcatctgcaatttttgaggaagtcagaaggcgtggtctcaaagtttcagttgtaggtatccccaaaaccatagataatgatatcccggttattgataagtcctttggctttgacactgctgttgaggaggctcaacgagctataaatgcagcacatgttgaagctgaaagtgttgaaaatggcataggtgttgtcaagttgatgggtagaaacagcggatttattgcaatgtatgctacacttgcaagtcgagacgtggactgttgcttaattccagagtcacccttttaccttgaaggtcctggtggactctatgaatatatagagaaaagactcaaagaaaatgggcacatggttatcgt

SEQ ID NO: 53542 - DNA, 426 bp, Glycine max
  Clone ID: LIB3109-035-Q1-K1-B8
cgggtctgaaagggaaaaaaaacaaaatcgcatcaaagacaagataaaagggtacctctttcaattttatcccttgttgtgagcttaattcaatttctgctcacacataatggcttgcacgctcgctgattcattactcctattcaagggttcttatcataaaccagttctgaggagagacattgctgcccggtactccccgggtatatttagtctaaacagtaatgggcttatccagaaaaggttcaagcgtcaaaggaattttgttactacgaatacggttactgtcatacatgccgtggcaattccagtacaaccagcttcggtggaaagtgcggagtatagaaaacagctagctgaagactactgtttcaggcaagttggatagccgcttccagatgatgttactttaaaggatgtcatcaa

SEQ ID NO: 53543 - DNA, 442 bp, Glycine max
  Clone ID: LIB3109-035-Q1-K1-C1
gacacgtgcgagtgatcaaatattaagaagaggttatggatgtttttaaggtttttcacatgcttgtcttaaaacaattttccagcaaaatccaaatccttcgttctggtaatggcacagaatacatgtctaaaagcatgacacagtatttaaattctcatgtatcaagaggggttgttccttttgtttgattttttttcttcttgccaaactatggcagaagatcattcttcttcgcatatattgccttcaggagctacaagttttcctggtgtgccttttgcagtagctacaggttccactagtgtggctgttggaatagaatttgagtctaatcctaatcaatgattgagctctgttgtactaaatgagttcaattaccttccttggtcaaaagccataactcttgctcttggtggaagatctaaattgagtttcattg

SEQ ID NO: 53544 - DNA, 439 bp, Glycine max
  Clone ID: LIB3109-035-Q1-K1-C2
ggagtgagtgagagaaagaagagaaggagttgaagtggttgttgtattgtagtagtgtgtaaagtcttggtgatggatagacacaaatgcaagctttgttcaaggtctttcagcaatggcagagcccttggtgggcacatgaaggctcaccttgcttctctccctctccctctccctccaaagcttcactcttgcttctcttcctctgactcagaacaagaacaatctttaagggagaatcctaagaaaaccttgaggattctggatcctgaagacagagagagcgagacagagtctaataagaacccgactcgtcaacgatccaagcgcaactggaaatctaccatgcccaagctcagcctcggacaccccgaagccgaacctctcagctccgtcttcgacaccttccccgaagaagacctcgccatgtgcctcatga

SEQ ID NO: 53545 - DNA, 416 bp, Glycine max
  Clone ID: LIB3109-035-Q1-K1-C3
gggtcgcgagttcaagtcaacaagcctcacaagtcccgcttctcttccaaatcttctcgcaatcttcataaaacctctgtcaaggacagactcgcaatcgcaaaatcagagcgcaatgtcggcaaaggagctcgtgcagctcgaattcagagaaataaaatgatacgagatcaaaaaagagctgctgttttgaaagaaaaacgagaactcagtgggtcgagaagtcctcctcgagtgatagttctcttcgccctctgtgcgtctgtggatttagaatcacttgctgatgatctcttgtcattattatctaaagatacgtgtgtggtgctgtcaggaaccgttgcttcttctgaatataggacaagaataacggtactaaaagcaccccatggtgatctactatcatgcatggaaat

SEQ ID NO: 53546 - DNA, 435 bp, Glycine max
  Clone ID: LIB3109-035-Q1-K1-C4
gggttcaaagtctagtaataaaaagagaaaagctttctcagataagccaacttcaaggccaatgaattcccaaaagatgagtgaatttagtactacgcctatggacgatgaattggatgttgttgatccagtgggtcagaaacccaagagacccaagaggataaagaagaatgtgaatgaaaagtttgaagatgcttttactgggattgctgccctgatcccagagcagacccaatttccacctccaccaagcgattttagtgccgggggttctaaagcagaatcaggccaagacaactgaagacatagtgattcttaaccactacaaaaactttggagttactattctcagccctatggattgactttttttgtggagactgctaagttggctctctggtttatcaacagtttctagttccctatttcttggta

SEQ ID NO: 53547 - DNA, 409 bp, Glycine max
  Clone ID: LIB3109-035-Q1-K1-C5
gacactaaacaagttaaaagaagagcatcactgaactaacaaagcaaccctatgtcgaaggtggtttgtgtcaccggagccagcggcgccatcggatcatgggtggtcctactcctcctccagcgtggttacaccgtccatgccaccgtccaagatatcaaggatgaaaatgagacgaaacatttggaggaaatggaaggagcaaagagtcatctccatttttttgaaatggatcttcttgacatcgactccattgccgctgccataaagggttgttccggcgtaatccaccttgcatgtcctaacatcattggtcaagtcgaagatcccgagaaacagatattggaaccggcgataaaaggaacggttaatgtgttgaaggcggcgaaggaagcaggggtggagcgcg

SEQ ID NO: 53548 - DNA, 248 bp, Glycine max
  Clone ID: LIB3109-035-Q1-K1-C6
gggtttgggaaaggcacggaaggctttgctttcaggttgctcagcaggagggttagcgacttttcaccatatgtgacgccttagctaagtatttgccaacgaatgcttgtgttaaatgcttgagtgatgccaggttttttcctgtaaaatgagatttcagcttgtattacactattagatattattgtaaaagtctagaccaatcatcaggaacagattttaaccttaactggtattatacctttgtt

SEQ ID NO: 53549 - DNA, 429 bp, Glycine max
  Clone ID: LIB3109-035-Q1-K1-C7
gaacacactcatccaaacaaccttctttctttttctgtgagcctttctttcaggttcttaacttgatcagtgtgcagtgtccaaatcataagggtagctgcaaattgcaatggctaagcatgatgttgagggtggttccttctctgcaaaggactaccatgatcctcctccagcaccgttgattgatgctgaggaactcacacagtggtccttctacagggctttgattgctgagttcattgccacaatgctcttcctttacatcacagtgctcactgtgattggttacaagagccagagtgatgtaaaggctgggggtgatgtgtgtggtggagttggcattcttggcgttgcttgggcctttggtggcatgatcttcattctggtgtactgcactgctggaatctcagggggtcacataaacccagc

SEQ ID NO: 53550 - DNA, 427 bp, Glycine max
  Clone ID: LIB3109-035-Q1-K1-C8
gggatttccaaagtttttaatagagggtaagtctcaaaaaatcgaagaattacagacgaatatgcaaaaaaaactgaattgtgtgaatcgaaaactaaacattgctattgtaaaagttgcaaatgcttataaacaccctaatattattgcagaatttatagctggacaattaaagaatagagtttcgtttcgtaaagcaatgaaaaaagctattgaattaactgaacaggcgggtacaaaaggagttcaagtacaaattgcaggacgtatcgacggaaaagaaattgcacgtgttgaatggatcagagaaggtagagttcctctacaaaccattcgagcgaaaatcgattattgttgctatacagttcgaactatttatggggttttagggatcaaagtgtggatattttctaaataaagaaaaata

SEQ ID NO: 53551 - DNA, 427 bp, Glycine max
  Clone ID: LIB3109-035-Q1-K1-D1
gaagatggagatgtatcagatctggagcaggagaatagcgttgggagcgttcgcgtttgttctgcttttcctatcggcctcagcagacgacgtcgttgtgctctctgaagataacttcgagaaggaagttggtcaggacagaggagctctcgttgagttctatgctccttggtgtggacactgcaaaaagcttgctccagaatatgaaaagcttggtagcagcttcaagaaagccaaatctgttttaatcggcaaggttgactgtgatgagcacaagagtttgtgcagcaaatatggagtctctgggtacccaacaattcagtggtttccaaaaggatctcttgaacccaaaaagtatgaagggccacgcactgctgattcacttgctgagtttgtaaatacggaaggaggaacaaatgtgaagatt

SEQ ID NO: 53552 - DNA, 424 bp, Glycine max
  Clone ID: LIB3109-035-Q1-K1-D2
ggagcaatcgcgtgaattttcaacgggattttgcagagcttccgcgttgaaaccatccaaccctcttagcctcatattcgttgtctatacttccctccttccttcgtgtaattacatttttttcatcagcagttccaggaccaaattgatacacaagatcactgtttttttagagagagattgagagaggatgtttggttcaaagaaaactcctctgagagatgctaaacctagttctgttggccatgcccataacccctttgattctgatgaagagacaaacgattaaaagtataattcctctaagaagactttgaccaacaccaacccctttgatgatgaagttgatgttgatgccactggccactcctcgtcgtcttcttatggcctttcgtcttcccatcgaaataggtataagagcgat

SEQ ID NO: 53553 - DNA, 437 bp, Glycine max
  Clone ID: LIB3109-035-Q1-K1-D3
cactgttgatccactatgctggtccaatgaaaacctctgaagatactccaacaaatggatctactgtgccccctggcagacgccttgttgttccactgcagatttgtgttttgcagggtttgtcttttgtgaaggctcagcttctttcaatggagtttcctgctcatgtcggtgaaactcttccgaagttggatgacttaaataacaagtctactgatgttgaatcagaaacaaaaatggacagattggtgaaaatagatcctttcagaggaagttggggactgcgattccttgaacttgagttatctaatccaactgatgtcgtgtttgaaatcaatgtctctgtcaaactggagaactctagcaacgaggacaatcattttgctgatcagggtgctacagaatatgtctatcctaaaacaagaattgatagagat

SEQ ID NO: 53554 - DNA, 407 bp, Glycine max
  Clone ID: LIB3109-035-Q1-K1-D4
gatattattggacatattgttgaatttagctctgatcagcatggaagtcgatttatacagcagaagttggaaagttgtagtggcgaagagaaggcattggtgtttaaagaggttcttccacatgcttctaaattaatgactgatgtatttggtaactacgtaatacagaagttttttgagtatggaagctcggagcagaggagggaacttgcagatcgacttgttggccagatactgcctttgagtttgcagatgtatggctgtcgtgtaatccaaaaggcacttgaggttattgagcttgaacagaaagctcagcttgttcatgagctagatggaaatgttatgagatgtgttcgtgatcaaaatggtaaccatgttattcaaaagtgcattgaatctattcaaac

SEQ ID NO: 53555 - DNA, 415 bp, Glycine max
  Clone ID: LIB3109-035-Q1-K1-D5
gttggtgatgacattcagcaacatcaagacataggtttagatgcttatactggatcagtatatggaaaattggatctgaattctgtacaaaagatgtttcttaagggaatgtgtagttttggcagtactgattctgacatagttgagatttaccactgctcatgtgcgtcaatgcaagcacgatgggagctgttccagaagcaagctgaaattaccaaaaaaaatcatggggaagctaacattcggtatgcttggcttgcttcctctaaaggagaactatctacaatgatgaactatggacttagtcattatggactatctggatcaaagtgcacatatggcattggtgttcatcttgctgctgttacttgccctgatgccagtgtgcgttattgtgatgttgactaaaaagggg

SEQ ID NO: 53556 - DNA, 427 bp, Glycine max
  Clone ID: LIB3109-035-Q1-K1-D6
ggctttttaggttattttcttaagtaaaaagaaggaaataaataattctcgtagctttgttgctcttataaattctattctggttgacgcttctctcaccatccccatttcgcgttggtgcaaagcatccttcgtttcaatttctctctctcagcgctttctgcaatcgaacctttcatctccaaagggatccacaggccgaaggagaaatggggctgacattcacaaagcttttcagtcggcttttcgcgaagaaggaaatgcgaattctgatggttggtcttgatgctgctggtaagaccactatcctgtacaagctcaagctcggagagatcgttaccacaattcctaccatcgggttcaatgttgagactgtggaatacaagaacattagcttcactgtttgggatgttggtggccaggacaa

SEQ ID NO: 53557 - DNA, 418 bp, Glycine max
  Clone ID: LIB3109-035-Q1-K1-D7
atccggcggaattgtcactatcttcattggtatgcttatcgggtgctttgcaagccagcgtggtggcaatagtagcgactcgtcattctgggcttgtggcatgggccttaggttgggacttcaggctctatggccctctctacacggtcagtactccattccaatatttcttggttcctggaccccaaaacctatttttggttcatcttcaaaatctgattttcaaagcaaggtaacacacataataaataagatgaatttagtcggcacaccaaattaatttggtttctctcaatcccagcctattgaatgcaaaaggttacgaggcaagtattgtaactaaaaaagacaaattgttcactccaaaagtaaattcgttggtcggcccattttggccctagttcactattttctttaa

SEQ ID NO: 53558 - DNA, 398 bp, Glycine max
  Clone ID: LIB3109-035-Q1-K1-D8
gatgcggaatggggagttccagttcatgatgacaagatgctgtttgaacttttagttttgagcggtgctcaagttggatctgattggacctcaaccttgaagaaacgcctagatttcagggctgcattttcagaatttgatgcagaaaccgtggctaacttgactgataagcaaatgatgtctattagttctgaatatggcattgacataagcagagtccgaggagttgttgataatgctaaccaaattttagagattaagaaagactttggttcatttgacaagtacatttgggggtttgtgaatcataaaccaatctccactcaatacaagtttggccacaagattccagtgaagacatcaaaatcagagagcataagcaaagacatggttagaag

SEQ ID NO: 53559 - DNA, 300 bp, Glycine max
  Clone ID: LIB3109-035-Q1-K1-E1
gatcatcatgaagttgaaggggaaccaaccacctccacgagttatctataattgatgtaaattttcccggaaagagggaacactgtaaaatattagtcttggcttctttaatgtctattttaaagtggaagacttgtgtagtaaaagggtctgcatctagtactcccaataaaagaaaaaaaagagaagcaaattccttcttccttaatttactaattaaatgaaactggtagtgtccaaataattggttttaatttttatcctatcccagtcagtgtatcataaattggtatttataac

SEQ ID NO: 53560 - DNA, 437 bp, Glycine max
  Clone ID: LIB3109-035-Q1-K1-E2
ggacaaagaactcacgagtgattttgagaggctggttcatctttggacacttgattctgctgaacgtgatgcatttttggcaaacgaggcgactaaaaaatggacttcaagcaatcaggttctggtggaaatagtctgcactaggtcctctgaacaattgtttgctgcgaggaaggcttaccatgttctttataagaagtctctggaggaggatgttgctcatcacacaacaggagacttccgtaagctcatactacctctggttagttcttatcgatatgaaggagatgaggtcaacttgaccctggcaaaaactgaggcaaaattgctgcatgagaagatttcaaacaaggcttataatgatgacgacttcatcaggattttggccacaaggagcagagcacagattaatgctactttgaatcactacaaagatg

SEQ ID NO: 53561 - DNA, 428 bp, Glycine max
  Clone ID: LIB3109-035-Q1-K1-E3
gataggcatgatatcttgtttgcaacaccctaatcttgtgaaacttcatggattttgcattgaaggggatcaattgatattggtgtatgagtacatggaaaataatagcctggctcatgctttattcagctcaaaagatcaacttaaacttgattgggcaacaaggcttaggatctgtattggcatagcaaaaggtcttgcatttctacacgaagaatcaagactcaagatttttcatcgagacatcaaagctactaatgtgttactggatgggaatttaaaccctaaaatatctgactttgggctggctaggcttgatgaagagaaaacccatgtcaccacccgaatcgctgggacaataggatatatggcaccagaatatgcattatggggttacttgtcttacaaggctgatgtttacagttatg

SEQ ID NO: 53562 - DNA, 392 bp, Glycine max
  Clone ID: LIB3109-035-Q1-K1-E4
gacggcagatcagatccattcttcaacaaatccccttttcagtttcagtttttctcgaggatcccgtgaaacgacatggcgatggtggaccagcctctgtatccgattgccgttttgatcgacgagttgaagaatgaggacattcagctgcgcctcaactcgatccgaaggctctccacgatcgcgcgcgcgctcggcgaggaccgtacgcggaaggagctgattccgttcctcagcgagaacaacgacgatgactacgaagtgctcctcgcaatggccgaggaattaggtgtcttcattccctacgtctgaggcgttgagcacgccaacgtgcttcttcctcccttggagacgctctgtaccgtttaggaaaccagcgtctgagacatgtc

SEQ ID NO: 53563 - DNA, 420 bp, Glycine max
  Clone ID: LIB3109-035-Q1-K1-E5
tgccttttcaagtatcagtaagaatagaagggaggaggagtctttcatatttaaaaatgtaagcataaaatgtactgaaaggctgattgtttctcagtatgttctttatgacaggtcaaatgctatatgaagcaattgctatctggccttgagcattgccacagcagaggtgttttgcaccgtgatattaagggttcaaatctgcttattgacaatgaaggaatacttaaaattgcagattttggactggcaactttctttgatcctaagcaaaagcatcccatgactagtagagtcgtgaccctttggtaccgtccacctgagcttcttctggggtctacgtcttatggtgttggtgttgacctttggagtgttggctgcattttggccgagctacttactggaaagccaatcatgcct

SEQ ID NO: 53564 - DNA, 157 bp, Glycine max
  Clone ID: LIB3109-035-Q1-K1-E6
gaagaagaggcagagaagagcacgaagaatgctttcgtgaaggtgagcatggatggtgcaccgtatctacgaaaggtggacattaagttgtacaagagctaccatgagctgtcagatgcgctggcttagattatcagctccttaacgattgaaaagt

SEQ ID NO: 53565 - DNA, 411 bp, Glycine max
  Clone ID: LIB3109-035-Q1-K1-E7
tgaagaaggttggttacaacccagacaagattccatttgtgcccatctctggtttcgagggtgacaacatgattgagaggtccaccaaccttgactggtacaagggaccaactctccttgaggctcttgaccaaatcaatgagcccaagaggccctcagacaagccactcaggcttccattgcaggatgtctacaaaattggtggtattggtaccgtgccagtgggacgtgttgagactggtgtcgtgaagcccggtatggtggtgacttttggtcccactgggctgacaactgaggttaagtctgttgagatgcaccatgaggctctcacagaggctcttccaggtgacaatgttggctttaatgtgaagaatgttgcagtcaaggatctcaagcgtggttttgttgcat

SEQ ID NO: 53566 - DNA, 426 bp, Glycine max
  Clone ID: LIB3109-035-Q1-K1-E8
gatatgtatcttgttgcgaggtgtgaggtgcatagtgttgttgatgtgaacaagcagaggtcgttccttactttgaatgcgttgaacgagtttgatcctaagtattccggtgtggattggaggcagaagttggagactcagaggggtgctgtgttggctactgaacttaagaacaatgcgaataagttggctaagtggactgctcaggctcttttggcgagtgcggatacaatgaagttagggtatgtgtcgaggattcatccccgcgatcatttcaatcatgtgattttggctgtggttggctataaacccagggactttgcagcacagattaatttgaacacgacgaatatgtgggggattgtgaagtctattgtggacttgtgcatgaaattgaatgaggggaagtatgttcttgtgaaggat

SEQ ID NO: 53567 - DNA, 313 bp, Glycine max
  Clone ID: LIB3109-035-Q1-K1-F1
ggcacaggtggagaaagtatatatggggggaaatttgcagatgaaaatttcaaactaacacatgatggacctggcattctttctatggctaatagtggtcctaacacaaatggatctcagttctttattacattcaagcgccaacctcatcttgacgggaaacatgttgtttttggaaaagttgtcaacggaatagacattttgaagaaaattgagcaggtgggaacatctgatgggaaacctacccagccagttaaaattattgattgtggtgaagtctctgaaacaaaaattcagcatactgcagagaagg

SEQ ID NO: 53568 - DNA, 432 bp, Glycine max
  Clone ID: LIB3109-035-Q1-K1-F2
cacggtcagtcgttggaagaaacctgagattggttgggtgaagctgaacgtggatggttcacgcgacccatacaaaagttcctccgctggttgtggtggtgttctgagggacgcatcagcaaagtggctccgtggctttgctaaaaaactgaaccctacttatgcagtgcaccagacagagttagaagccattctcacgggcttgaaggtggcttcagagatgaatgttaagaaactaattgtggagtcagacagtgactctgtggtgagcatggtggagaatggggttaagcccaatcaccctgactatggtgtcgtggaacttataaggacgaagcggcgtcgttttgactgggaagtgaggtttgtttctgtctccaacaaggcgaatcgtgtggctgataggctcgccaacgatgctcggaaattggc

SEQ ID NO: 53569 - DNA, 425 bp, Glycine max
  Clone ID: LIB3109-035-Q1-K1-F3
tacagacagagttggagagttagctaagaagcatggactgaagcttcacattgatggggcccgtatttttaacgcatcagttgcacttggtgttccagtggataggcttgtccaggcggctgattcagtttccgtttgcctatctaaaggtataggtgctccagttggatctgttattgttggttccaagaattttattgccaaggctagacgactccggaaaaccttatgaggtggaatgagacagattggcctcctttgtgccgctgcacttgttgccttgcaggaaaatgttgggaagctggaaagtgatcacaagaaagctagacttttggctgatggattaaaagaagttaaaggactgagagtggatgctggttctgtggagaccaatatggtatttattgacattgaagagggtacaa

SEQ ID NO: 53570 - DNA, 428 bp, Glycine max
  Clone ID: LIB3109-035-Q1-K1-F4
gagacacgtgggtggatagcaacttagaacacaagtgaactcaaagtggaacaacccaagcttgtttcacagctcaacaacaatggcttctatctcatgcatcacccaccaccccatcacttccaagctcaataatgccttctcttcaccccacgtctctgcctcaaacttggcctcacggtttctgggcaccagaaaaagagttgggttgcatagcctcacctctagaataattggaccctctaatggctccaaagccacatgctggttcaggttcggcaagaacggtgttgatgccaaaggtgctggcatctatggcagccagggccgtgatgactttgatagagatgacgtggaacagtacttcaactatatggggatgctcgctgtagaaggaacatatgataaaatggaagctcttctaagcc

SEQ ID NO: 53571 - DNA, 430 bp, Glycine max
  Clone ID: LIB3109-035-Q1-K1-F6
ggaggataatcaataaacttaaacttatgttatggcattctaactctgaacgatgaaatgaaatggagttccaagataagcgtttatctctgagatcgagcttgacgttcagcgagacgctgtgcgcagtgttcattccgttcataggaatagtcgaagctttggttttcacattcactagttgcttcgatttccaatctcccaggaataagaagaaacattcttctaccttcgacgacattctcaccctcgccgaggattctccatttagtattaatgaaatcgaggccttgcgtgagttgttcaagaagttgagtagttctatcattgatgatggcctcatccacaaggaagaactcacattggcactgttgaagaccaccaccggggagaatcttttccttgacagggtgtttgatgtctttgatga

SEQ ID NO: 53572 - DNA, 424 bp, Glycine max
  Clone ID: LIB3109-035-Q1-K1-F7
ggatggagtaattcagctaacagaaagggatgaatgtgcctaccaagaaatgatcactcatcttcctctttgctctattccaaaccctaaaaaggttttggttatcggtggaggtgatggaggggtcatacgagaagtagcacgccattcttcagttgaaaagatagacatttgtgaaattgacaagatggttgttgatgtctccaaacaatacttccctgatgtagctgttgggtatgatgatcctcgtgtgacacttcatattggtgatggagttgcatttttgaaggaagttccagaaggaacttatgatgctgttatagtggattcatccgaccctattggtcctgctcaggagctttttgaaaagcccttctttgcgtcagttgcaaaggctctttgtccccgtggagttgtgtgtact

SEQ ID NO: 53573 - DNA, 423 bp, Glycine max
  Clone ID: LIB3109-035-Q1-K1-F8
ggttctagtgtgtgattgtttgttgttgtaactcgttcttcttcttttgttgttctgtgtttgtgtttgttttttctctcacctgaaaatgtcttgctgcggtggtaactgtggttgcggaagctcctgcaagtgcggcaacggctgcagaggctgcaagatgtacccagacttgagctacactgagtcaaccaccaccgagaccttggtcatgggagtggcacctgttaaggctcaatttgagggtgcttaaatgggtgtgcccgctgagaacgatggctgcaaatgtggaccaaactgctcctgcaacccctgcacttgcaagtgaggtgttgtgagagcaagctttaagcatagattgcccttaattaggaataatgataaactattaatgtgtagctaaaaacttatgtattatgtctg

SEQ ID NO: 53574 - DNA, 440 bp, Glycine max
  Clone ID: LIB3109-035-Q1-K1-G1
ggatactagaacctgcagatcgtgatgctgttttggccaatgttgccatcaagaatggcaaaaactacaatgtcattgtggaaatcgccactatcctctccccggaagagcttttggccgtgagacgtgcttatctcaaccgctacaagcactccttggaagaagatgttgcagctcatacctctggccatctacgccagcttttagtggggttggtgacctcatataggtatgttggtgatgagatcaatccaaaattggcacaaactgaggctgaaattcttcatgatgctgtgaaagagaagaagggtagctatgaagagaccattagggtcttgaccacaaggagcaggacccaacttgttgcaactttcaaccgctacagagagatccatggcacttccatctctaagaaactggtggatgaaggatctgatgag

SEQ ID NO: 53575 - DNA, 433 bp, Glycine max
  unsure (1)..(433): unsure at all n locations
  Clone ID: LIB3109-035-Q1-K1-G2
gacttcaaagtggagaaaaacacacacggttggttcattctctctcttttctttttcctcaaaaagttgaaaaagaataaagggggaacaatcgagtgaagttgttgctcttcaatagtaaacttacctatggaagagggaagggttgtgagtgagtacacaaaagatggaactgtggatcttaaagggaaacccattctcaaatccaaaagtggtggttggaaagcatgctcctttgttgttggtatctctctctctcactataaattttatatggtcattttcatcttgttttggacattaatttcaaaagcaatttcccaaaacattggaagcttcatgatgttntgttaacaaaaatcttaatttcctctgatcgagagacattgttcaattctttgtgttgtgttgtctcctaaaacatgggaagaga

SEQ ID NO: 53576 - DNA, 442 bp, Glycine max
  Clone ID: LIB3109-035-Q1-K1-G4
ggaggaagccacatagagacacaatacagagtgagttgttgctccttcgccacaactctctgccaacatgggtatctccagagattctatgcacaagaggcgtgccactggtggcaagaagaaggcctggaggaaaaagagaaagtatgagcttggtcgccagcctgctaacactaagctgtcaagcaacaagacagtcaggaggatccgtgttagaggtggaaatgtgaaatggagggcattgagattggatactggaaattactcctggggaagtgaagctgtaactcgcaagactcgtgtactagatgtggtttacaatgcctcaaacaatgagcttgtgcgtactcagactcttgtcaaaagtgctatcgttcaggttgatgctgctccattcaaacagtggtatcttcagcactatggtgttgagattggtaggaaa

SEQ ID NO: 53577 - DNA, 309 bp, Glycine max
  Clone ID: LIB3109-035-Q1-K1-G6
ggattgagaaggaatgagaatggggggaggtttttgtctgatgatgttggtaggtctagcaatcgagggcgagggcaagggcaatcttctcgaacgaattatgggaggaatggagcggatggtgatggcagaatgaggaagaatgggaatgggagaaggtttttgtccaataatgttgatcggtctagcggtggagaacagtcttctcctttgaattatggcggtgatggaatggatggtgatggtagattgaggaggaatgggaatgggaggagggttttattggacattgaatttaaaagcagtttt

SEQ ID NO: 53578 - DNA, 373 bp, Glycine max
  Clone ID: LIB3109-035-Q1-K1-G7
ggccttaagaatggtgatattgaagttacttgggctgatgggatggtatcaatggttggaccccaagcaatctatgtggttggtcgagatgacgatgatgaatcaattgctgctgggagtgaaataagtgatgctgcaagctgggaaactgttaatgacgatgaaatggaagtccttgaggattccagagaggatattgagagggaaaattcaagcagtgttacttctgaggcagaagaaagtggagagaatgattttggtaggactgcagctctctctgttcccctagcagcatttcgatttgtcactagacttgccagtggaatattctcaagaggctcaaggaacttggattctattcctttggagataa

SEQ ID NO: 53579 - DNA, 431 bp, Glycine max
  Clone ID: LIB3109-035-Q1-K1-G8
ggaggcagagaagtaagaagaagatagccagaagtataggctaagattgtccacaacatgtggacagcaggaacaacgagtgtatagatcaacaactacctttcccttttcgtctatcagtccaaacactcttcttcttcttcttcttcttcactctacaaccactaaactaagtggttggttttggtttagtttcatttttttgaagctcttaaacttaaggcttaagccatggcatcctcatcctctctgcatctatctcaggcccttctggcacgtgctgtgtaccttcatggctcttcttcttctgaccgtgtcttactctccttcccatcattctctggcctgaagtcacattctacatgcaaagcagcagcagccacgtcctcgcgtagaaggggtgcttgtccattcaccaactttgttcgagc

SEQ ID NO: 53580 - DNA, 428 bp, Glycine max
  Clone ID: LIB3109-035-Q1-K1-H1
gggggaattgactagtgcggcgcgctcctattatcaccgtagacggcggaggtggcggtggtggtgtagacacggcgtgacggcgatctcttgagataaatgttggttgaaagaggaagaagaagaagagttgtattgtagaatgagccaaccaacggtgatacttgccactgcgagctatgatcacactattcgtttttgggaggccaagagtggccgttgctaccgcaccatccaatatcctgattcgcaagtaaaccggctggagataaccccggataaacgcttcctggctgcagctggcaatccacacatacgactgtttgatgttaactcaaatagtcctcaaccagtaatgagctatgattcacataccaataatgtaatggctgttgggtttcaatgtgatggtaattggatgtattctg

SEQ ID NO: 53581 - DNA, 445 bp, Glycine max
  Clone ID: LIB3109-035-Q1-K1-H2
gaaagaagagaaaataataatatgaataacaacccacaaaacttgggtcttgcaaattaagttcattttcctccctttcactctcgtagacatcacaaaccttccctccattcatcccacgcatggctgccatgaactctagcgtattggcctgtagctatgccatatcaggtgcagcgtgttcggagctcaatgggaaggtcacttccgtggcctatgttgcatgctctggctacaagttgccattgatcaaagctgaggccagagttcctaaagccaaagaatctgaaggaggaaggagaggtgcccttgttctcttggcagctacccttttcacctctgcagcttccaattcttctgccaatgctgggatcattgaagattaccttgagaggagcaaggccaacaaggaaatgaatgacaagaagagggtagctactactgg

SEQ ID NO: 53582 - DNA, 414 bp, Glycine max
  Clone ID: LIB3109-035-Q1-K1-H3
gggcaaacaagtagtggaaagacatacacgatggttggaataactgaatacgctgttgcagatatttttgactatatagagaggcatgaagaaagagcatttatattgaagttctcagcaattgaaatttacaatgaagttgttagagacctcctcagcactgacaacaacactccacttagactacgtgatgatcctgagaaagggcccattttagagaaactcacagaggagactctacgggactgggagcatttaaaagagcttctagccttcagtgaagctcagagacaggtgggagagacatacctaaatgaaaagagttctagatctcaccaaatcatcagattgacaatggagagttctgccagggaattcctgggcaaaggcaactcagccaccctaatagctagt

SEQ ID NO: 53583 - DNA, 443 bp, Glycine max
  Clone ID: LIB3109-035-Q1-K1-H4
gagttagggaagggaagcatctttagctccaatggcggatacctcaggtcgatccagggacctcgacaagctccttctccgccctggcaatctcgtcggtcccaggttcgaaccaggcgctgagttgcgagatgaccttcaggccttcgccaaagtgttggtggtaggggccggtggcttacgttgtgagttgctgaaggatttagccctctctggtttccgaaaccttgaggtcattgatatggatcgcatagaggttactaatctcaaccgccaattcttgttcagacttgaagatgttggcaaacccaaagccgaggtagctgccaagcgtgtcatggagagaattactggtgtcgaaattgtgccccacttttgcaggattgaggacaaggaaatagaattttacaatgaatttagcattattgcccttgggcttgatt

SEQ ID NO: 53584 - DNA, 433 bp, Glycine max
  Clone ID: LIB3109-035-Q1-K1-H6
ggcagatgtgaatgtgagagacacccatgaatgacagaatgaaatgaactgagtaacaccaacgctgctttcttcattctttcattcattcgaatgtgttcttttgcgattgaatttgagggaacaataatcgattttcgctttctgggcacccctgaattcccctgcatcgctgtgaaagtagttcagttcgaacaacgaaaacgatgtcggctcgattgatgaagaaggttctgaacgagcagcatcacctttcgcaacacgtgagcgaagaagaagaagaagaagagaacgattctgagcccatcactcgttcctccatcaaccccttcgaccttctcaacgacaacgattctgagcccgaagaccaaggagatgagttgatgtccaccaatgaaatattgacaagttatgatgacaaagaggagtcagc

SEQ ID NO: 53585 - DNA, 433 bp, Glycine max
  Clone ID: LIB3109-035-Q1-K1-H7
aggaacagcaatgaagaagaggcagagaagagcacgaagaatgctttcgtgaaggtgagcatggatggtgcaccgtatctacgaaaggtggacataaagttgtacaagagctaccaggagctgtcagatgcgctggctaagatgttcagttccttcacgattgaaaagtgtgggtcccaagggatgaaggattttatgaatgagaccaatggctctgactatgtacccacatatgaagacaaggacggagactggatgctcgtcggtgatgtgccctgggagatgttcgttgaatcatgcaagcgtcttcgcataatgaaaggctccgaggcaatcggtcttgcgccaagagccgtggaaaagtgcaagaacagaagctgaagaagtgatttcatctgcgtcacaaggaagcaaattgactcgagcaagatcg

SEQ ID NO: 53586 - DNA, 406 bp, Glycine max
  Clone ID: LIB3109-035-Q1-K2-A2
ggcagttcaattgatcaactcagatttcagggacctaagtcgagctgctaatagactcgcccatcatgccatcaaacttggtggcattggctttggagcctcttttttcggattgtttgctgccattgctgctatttatctgttgattttggatcgtacaaactggaaaacaaatattctcacagcactactcattccatacattttcttcagcttgccttcattaattttcgacgtcttcaggggagagcttggaaaatggattgctgcagttgctgttgtattacgccttttccttccaagacacttccctgattggctggaattgcctggtgctctgattcttcttatcgttgtagctccttctctaattgcaagcacctttagagacaacattggtggggtg

SEQ ID NO: 53587 - DNA, 401 bp, Glycine max
  Clone ID: LIB3109-035-Q1-K2-A3
ggataataataaaaacactcgtgccgcaccttcgtctgccccaatgcttctttccacacgcatctcggaagcccttctcttcatcacatagatactttcgctatcgcaccaagtaacccttattattccaatccaccctcgccactccttcgatccgaatcatcttttccgcccacacacaagttgggtttttttgatataattgataatgggtgatagcagtgttccatctgggtctccaaatgcaaaatcagatcttgttgacagagacttggcggtttccaacaacgcgtcgtcgttggaaaccattgggcaaagtttccaagattcaatgtctcttggtaagagacacaagttctgggaaactcagcctgtggggcaatacaaggatgttggggact

SEQ ID NO: 53588 - DNA, 384 bp, Glycine max
  Clone ID: LIB3109-035-Q1-K2-A4
ggagcctagtagtaatagtgaactggagtgatgctcaagtgtgttgtgtgtcagtgttttagggaccaatggtggagagtgagttttctgagttaagatataagatatatgctatctaatgcctagtgggatataggaaaggacctcaaatctgctatctttcgttcacatacgcatcatattcttttaattgttagttctgagttctgaccaaagttgttgatttgagtgtttttagcatatttggggtgtctgcaaacaccgcaagaattttgctttttctattgaattagattcctctgggaattcaattctgattcttccttagttttcggttttctggctttctttttttccttctatttatattttgggttggttttc

SEQ ID NO: 53589 - DNA, 302 bp, Glycine max
  Clone ID: LIB3109-035-Q1-K2-A5
gacaatcaatcttctttatccactctctcttaattgaattaaaacaaaaaatgtgcgctgccatatccgaagtggaacaagaagagttgctcgaaaaattggaggtgttcaagatcaaaggcagggacaagcatggccgcaagatccttcgcattatcgccaaattcttcccaggtagattgattaattaattaattaaatccctaattcctttttttttatgtgcatgaattttttaaatcttcggtaattggttgaattgaagacagcacggttggtgagtgttgaggttctgaaaaagt

SEQ ID NO: 53590 - DNA, 308 bp, Glycine max
  Clone ID: LIB3109-035-Q1-K2-A6
gagagaaagagagagaaagatgtcgaagcgtggtcgtggtggttcggcggggaacaagttccgcatgtcgctgggtcttccagtggcggcgacggtgaactgcgccgacaacacgggggcgaagaacctctacatcatttcggtgaaagggatcaaaggccgtttgaaccgtcttccctcggcctgcgttggcgacatggtgatggccaccgtgaagaagggaaaacccgatctgaagaagaaggtcttgccagctgtcatcgttcgccagcgcaagccatggcgccgaaaggacggcgtctacatgt

SEQ ID NO: 53591 - DNA, 283 bp, Glycine max
  Clone ID: LIB3109-035-Q1-K2-A7
gagagcgagaaatattatagtagctctgcgtttttggggtatcattattcaaccacccattttctctcttcttcttcttccattgagaaaattctctttcatcgtgtgtgatcggtgagatgtacgtagcttccatgcgcaagtctttcaaggactccttgaaagtccttgaagctgatatccagcacgccaataccctggcttcagattttccaagggagtatgatggtgcatgccttcagatgagaatgtcatacagtccagcttgcacacctgttccttt

SEQ ID NO: 53592 - DNA, 331 bp, Glycine max
  Clone ID: LIB3109-035-Q1-K2-B1
ggcatcgaacagagagagagagaatggcagcacttggtgggaatcgtgatgtgacaggaagccagaacagcgttgagatcgatgctctagctcgctttgctgttgaagaacacaacaaaaaacagaatgcccttttggagtttgaaaaggtggtaactgcgaaacagcaagtggtttctggtaccttgtacaccatcactttggaggcaaaagatggtgggcaaaagaaggtttatgaagccaaagtttgggagaagtcatggttgaacttcaaggaggtgcaagagttcaagcttgttggagatgcacctgcatagtctagtgcttaatt

SEQ ID NO: 53593 - DNA, 328 bp, Glycine max
  unsure (1)..(328): unsure at all n locations
  Clone ID: LIB3109-035-Q1-K2-B2
gacggcgatgatgatgcaaatcaacatcaccttcaccagcctcaatcgtcacggcgttctcttcggatcattccccgaatgttctaccttgagccatgtccaacctcgttcagattcgcgtcgccgccgacgctagcgatggcttcgactctccggcgaagcagaaagcagccaaccgcagctcctacagcaatcgcccctttctctccctccgccgcgccaaacagttcctcggcgccgccaagttcaagctcttcttagttctttttgctctctccatcgtcgnttttgtctcctccagactcagttcgtggatgggatggaaccc

SEQ ID NO: 53594 - DNA, 351 bp, Glycine max
  Clone ID: LIB3109-035-Q1-K2-B3
gatgggagaatcttattgtcaaggagttgtgatggttcattgaaggtttgggatctgcgcaaaacaaaagaaccgttaaaagtatttgaggatctgccaaatcactatgcacaaacaaatattgccttcagtcctgatgagcgactctttttgactggaacatctgtggaaagggagagcatgacaggaggtttattgtgcttctttgatagagtaaatcttgagcttgtttcaaaagttggcatatcacccacttgtagtgttgttcaatgttcttggcattccaaactgaatcagatctttgcaactactggtgataaaagccaaagtgggactcacatactatatgat

SEQ ID NO: 53595 - DNA, 395 bp, Glycine max
  Clone ID: LIB3109-035-Q1-K2-B4
caaggacacgaggtggatatatatgagtcaaggccttttattggtggcaaagttggttcttttgttgacaaaggtgggaatcacattgaaatgggattgcatgttttctttggttgctacaacaatcttttccgattgatgaagaaggtgggtgcggataacaatctacttgtaaaggatcacactcacacttttgttaacaaagggggtcaaattggagaactagattttcgcttcccaattggggcaccaatacacgggataagggcgtttttgtccacaaatcagcttaatacttatgataaggctagaaatgctgtggctcttgcactcagtccagttgtcaaagctcttgttgatccaaatggtgcactgagggacataaggaatttgga

SEQ ID NO: 53596 - DNA, 385 bp, Glycine max
  Clone ID: LIB3109-035-Q1-K2-B5
aggggaggaaagaagagagagaacaaagcacttagtgctattcaataattacgaaaaaccaacagcgagtgttgtttttgtttggtccaggctggaccagggaatgaatagagatgagaggctttcggttgaagagaactgagttaagcggcgaagccaaacgcagaatcggcggcagaaattgccaccggaagcacgtcgaagacgggtgaaccaaacacaaaattccatccaccacttctcttttcaatccccaactcaaatctgtgaagaaaatctcaatttctaaattgtaattcttagcactactgctagtagtagtaaaaaaaaaccattagaaagtagtagaatgtttttttttccgttttttcgttggtttactttt

SEQ ID NO: 53597 - DNA, 356 bp, Glycine max
  Clone ID: LIB3109-035-Q1-K2-B6
gacagtattcaagatcggggaatcaatcaggtttatgtaattggaggagatggaactcagaagggtgcatctgcaatttttgaggaagtcagaaggcgtggtctcaaagtttcagttgtaggtatccccaaaaccatagataatgatatcccggttattgataagtcctttggctttgacactgctgttgaggaggctcaacgagctataaatgcagcacatgttgaagctgaaagtgttgaaaatggcataggtgttgtcaagttgatgggtagaaacagcggatttattgcaatgtatgctacacttgcaagtcgagacgtggactgttgcttaattccagagtcaccctttta

SEQ ID NO: 53598 - DNA, 417 bp, Glycine max
  Clone ID: LIB3109-035-Q1-K2-B7
cttaattatatcattttaatcttattgtcaattatttagtatttttggtttaatcagggggatctgctcaaaacatattaaccgttaaaactatttcttgatcttcctaatcactatgcacaaacatatattgccttcactccttattagcaactttatttgactggaacatctgttgaaagggatagcattacattattgttattgtacttcttttatagaataaaattttaactttatttaaaagtttgcatattacccactttgttttttgttcattgttcttgccatacgaaactgtatcatatcttttcaactactggttataaaatcctaatttgtacttacatactatattatccataccttaagttaaatatcaacctttgtataaatttctcattcactcatttaaaa

SEQ ID NO: 53599 - DNA, 326 bp, Glycine max
  Clone ID: LIB3109-035-Q1-K2-B8
cgggtctgaaagggaaaaaaaacaaaatcgcatcaaagagaggataaaaggttacctctttcaattttatcccttgttgtgagcttaattcaatttctgctcacacataatggcttgcacgctcgctgattcattactcctattcaagggttcttatcagaaaccagctctgatgagagacattgctgcccggtactccccgggtatatttagtctaaacagttatgggcttatccagaaaaggatcaagcgtcaaacgaattttgttactaagaataaggttactgtcatacatgccgtggcaattgcagtgcaaccagattcgg

SEQ ID NO: 53600 - DNA, 378 bp, Glycine max
  Clone ID: LIB3109-035-Q1-K2-C1
gacacgtgcgagtgatcaaatattaagaagaggttatggatgtttttaaggtttttcacatgcttgtcttaaaacaattttccagcaaaatccaaatccttcgttctggtaatggcacagaatacatgtctaaaagcatgacacagtatttaaattctcatgtatcaagaggggttgttccttttgtttgattttttttcttcttgccaaactatggcagaagatcattcttcttcgcatatattgccttcaagagctacaagttttcctggtgtgccttttgcagtagctacaggttccactagtgtggcttgtggaatagaatttgagtctaatcctaatcaatgattgagctcttgtgtactaaatgagttcaat

SEQ ID NO: 53601 - DNA, 351 bp, Glycine max
  Clone ID: LIB3109-035-Q1-K2-C2
ggagtgagtgagagaaagaagagaaggagttgaagtggttgttgtattgtagtagtgtgtaaagtcttggtgatggatagacacaaatgcaagctttgttcaaggtctttcagcaatggcagagcccttggtgggcacatgaaggctcaccttgcttctctccctctccctctccctccaaagcttcactcttgcttctcttcctctgactcagaacaagaacaatctttaagggagaatcctaagaaaaccttgaggattctggatcctgaagacagagagagcgagacagagtctaataagaacccgactcgtcaacgatccaagcgcaactggaaatctaccatgccc

SEQ ID NO: 53602 - DNA, 336 bp, Glycine max
  Clone ID: LIB3109-035-Q1-K2-C3
gggtcgcgagttcaagtcaacaagcctcacaggtcccgcttctcttccaaatcttctcgcaatcttcataaaacctctgtcaaggacagactcgcaatcgcaaaatcagagcgcaatgtcggcaaaggagctcgtgcagctcgaattcagagaaataaaatgatacgagatcaaaaaagagctgctgttttgaaagaaaaacgagaactcagtgggtcgagaagtccttctcgagtgatagttctcttcgccctctgtgcgtctggggatttagaatcacttgctgatgatctcttgtcattattatctaaagatacgtgtgtggtgctttcaaga

SEQ ID NO: 53603 - DNA, 376 bp, Glycine max
  Clone ID: LIB3109-035-Q1-K2-C4
gggttcaaagtctagtaataaaaagagaaaagctttgtcagataagccaacttcaaggccaatgaattcccaaaagatgagtgaatttagtactacgcctatggacgatgaattggatgttgttgatccagtgggtcagaaacccaagagacccaagaggataaagaagaatgtgaatgaaaagtttgaagatgcttttactgggattgctgccctgatcccagagcagacccaatttccaccttcaccaagcgattttagtgccgggggttctaaagcagaatcaggccaagacaactgaagacatagtgattcttaaccactacaaaaactttggagttactattctcagccctatggattgactttttttggg

SEQ ID NO: 53604 - DNA, 359 bp, Glycine max
  Clone ID: LIB3109-035-Q1-K2-C5
gacactaaacaagttaaaagaagagcatcactgaactaacaaagcaaccctatgtcgaaggtggtttgtgtcaccggagccagcggcgccatcggatcatgggtggtcctactcctcctccagcgtggttacaccgtccatgccaccgtccaagatatcaaggatgaaaatgagacgaaacatttggaggaaatggaaggagcaaagagtcatctccatttttttgaaatggatcttcttgacatcgactccattgccgctgccataaaaggttgttccggcgtaatccaccttgcatgtcctaacatcattggtcaagtcgaagatcccgagaaacagatattggaaccggcgattaa

SEQ ID NO: 53605 - DNA, 123 bp, Glycine max
  Clone ID: LIB3109-035-Q1-K2-C6
tgggggtttgggaaaggcacggaaggcttcggtttcagggggctcatcaggaggtttatcaacctttaaccatattgtactccttcaccaagtatttgccaactaatgctagtgttaaatgct

SEQ ID NO: 53606 - DNA, 267 bp, Glycine max
  Clone ID: LIB3109-035-Q1-K2-C7
gaacacactcatccaaacaaccttctttctttttctgtgagcctttctttcaggttcttaacttgatcagtgtgcagtgtccaaatcataagggtagctgcaaattgcaatggctaagcatgatgttgagggtggttccttctctgcaaaggactaccatgatcctcctccagcaccgttgattgatgctgaggaactcacacagtggtccttctacagggctttgattgctgagttcattgccacaatgctcttcctttacatcac

SEQ ID NO: 53607 - DNA, 325 bp, Glycine max
  Clone ID: LIB3109-035-Q1-K2-C8
gggatttccaaagtttttaatagagggggggtctcagaaaatcgaagaattacagacgaatatgcaaaaaaaactgaattgtgtgaatcgaaaactaaacattgctattgtaaaagttgcaaatgcttataaacaccctaatattattgcagaatttatagctggacaattaaagaatagagtttcgtttcgtaaagcaatgaaaaaagctattgaattaactgaacaggcgggtacaaaaggagttcacgtacaaattgcaggacgtatcgacgggaaagaattgcacgtgttgatggatcagagaagtagaagtctttacaac

SEQ ID NO: 53608 - DNA, 383 bp, Glycine max
  Clone ID: LIB3109-035-Q1-K2-D1
gaagatggagatgtatcagatctggagcaggagaatagcgttgggagcgttcgcgtttgttctgcttttcctatcggcctcagcagacgacgtcgttgtgctctctgaagataacttcgagaaggaagttggtcaggacagaggagctctcgttgagttctatgctccttggtgtggacactgcaaaaagcttgctccagaatatgaaaagcttggtagcagcttcaagaaagccaaatctgttttaatcggcaaggttgactgtgatgagcacaagagtttgtgcagcaaatatggagtctctgggtacccaacaattcagtggtttccaaaaggatctcttgaacccaaaaagtatgaagggccacgcactgctgattcac

SEQ ID NO: 53609 - DNA, 340 bp, Glycine max
  Clone ID: LIB3109-035-Q1-K2-D2
ggagcaatcgcgtgaattttcaacgggattttgcagagcttccgcgttgaaaccatccaaccctcttagcctcatattcgttgtctatacttccctccttccttcgtgtaattacatttttttcatcagcagttccaggaccaaattgatacacaagatcactgtttttttagagagagattgagagaggatgtttggttcaaagaaaactcctctgagagatgctaaacctagttctgttggccatgcccataacccctttgattctgatgaagagacaaacgataaaaagtataattcctctaaaaagactttgaccaacaccaacccctttgatgat

SEQ ID NO: 53610 - DNA, 420 bp, Glycine max
  Clone ID: LIB3109-035-Q1-K2-D3
cactgttgatccactatgctggtccaatgaaaacctctgaagatactccaacaaatggatctactgtgccccctggcagacgccttgttgttccactgcagatttgtgttttgcagggtttgtcttttgtgaaggctcagcttctttcaatggagtttcctgctcatgtcggtgaaactcttccgaagttggatgacttaaataacaagtctactgatgttgaatcagaaacaaaaatggacagattggtgaaaatagatcctttcagaagaagttggggactgcgattccttgaacttgagttatctaatccaactgatgtcgtgtttgaaatcaatgtctcttgcaaactggagaactctagcaacgaggacaatcattttgctgatcaaggtgctacagaatatgtctattctaaaa

SEQ ID NO: 53611 - DNA, 386 bp, Glycine max
  unsure (1)..(386): unsure at all n locations
  Clone ID: LIB3109-035-Q1-K2-D4
gatattattggacatattgttgaatttagctctgatcagcatggaagtcgatttatacagcagaagttggaaagttgtagtggcgaagagaaggcattggtgtttaaagaggttcttccacatgcttctaaattaatgactgatgtatttggtaactacgtaatacagaagttttttgagtatggaagctcggagcagaggagggaacttgcagatcgacttgttggccagatactgcctttgagtttgcagatgtatggctgtcgtgtaatccaaaaagcacttgaagttattgagctngaacagaaagctcagcttgttcatgagctagatggaaatgttatgagatgtgttcgtgatccaaatggtaaccattgtattcaaaa

SEQ ID NO: 53612 - DNA, 321 bp, Glycine max
  Clone ID: LIB3109-035-Q1-K2-D5
ttgggttggtgattacattcagcaacatcaagacatgggtttagaggcttatactgaatcagtatatggaaaattggatctgaattctgtacaaaagatgtttcttaagggaatgtgtagttttggcagtactgattctgacatagttgagatttaccactgctcaggtgcgtcaatgcaagcacgatgggagctgttccagaagcaagctgaaattaccaaaaaaaatcatggggaagctaacattcggtatgcttggcttgcttcctctaaaggagaactatctacaatgatgaactattgacttaatcattattgact

SEQ ID NO: 53613 - DNA, 335 bp, Glycine max
  Clone ID: LIB3109-035-Q1-K2-D6
ggctttttaggttattttcttaagtaaaaagaaggaaataaataattctcgtagctttgttgctcttataaattctattctggttgacgcttctctcaccatccccatttcgcgttggtgcaaagcatccttcgtttcaatttctctctctcagcgctttctgcaatcgaacctttcatctccaaagggatccacaggccgaaggagaaatggggctgacattcacaaagcttttcagtcggcttttcgcgaagaaggaaatgcgaattctgatggttggtcttgatgctgctggtaagaccactatcctgtacaagctcaagctcggagagatc

SEQ ID NO: 53614 - DNA, 431 bp, Glycine max
  Clone ID: LIB3109-035-Q1-K2-D7
atccggcggaattgtcactatcttgattggtatgcttatcgggtgctttgcaagccagcgtggtggcaatagtagcgactcgtcattctgggcttgtggcatgggccttaggttgggacttcaggctctatggccctctctacacggtcagtactccattccaatatttcttgtttcctggaccccaaaacctatttttgtttcatcttcaaaatctgattttcaaagcaaggtaacacacataataaataagatgaatttagtcggcacaccaaattaatttggtttctctcaatcccagcctattgaatgcaaaaggttacgaagcaagtattggaacttaaaaagacaaattgttcacttcaaaagtaaattcggtggtcggcccattttggccctagttcactattttctttaagcccaaattatct

SEQ ID NO: 53615 - DNA, 291 bp, Glycine max
  Clone ID: LIB3109-035-Q1-K2-D8
gatgcggaatggggaggtccaggtgatgatgacaagatgctgcttgaacttttagttttgagcggtgctcaagttggatctgattggacctcaaccttgaagaaacgcctagatttcaggtctgcattttcagaatttgatgcataaaccgtggctaacttgactgataagcaaatgatgtctattagttctgaatatggcattgacataagcagagtccgaagagctgatgataatgctaaccaaatcttagagattaagaaagactatggttcatttgacaagtacatt

SEQ ID NO: 53616 - DNA, 300 bp, Glycine max
  Clone ID: LIB3109-035-Q1-K2-E1
gatcatcatgaagttgaaggggaaccaaccacctccacgagttatgtataattgatgtaaattttcccggaaagagggaacactgtaaaatattagtcttggcttctttaatgtctattttaaagtggaagacttgtgtagtaaaagggtctgcatctagtactcccaataaaagaaaaaaaagagaagcaaattccttcttccttaatttactaattaaatgaaactggtagtgtccaaataattggttttaatttttatcctatcccaatcagtgtatcataaattggtatttattac

SEQ ID NO: 53617 - DNA, 256 bp, Glycine max
  Clone ID: LIB3109-035-Q1-K2-E2
ggacaaagaactcacgagtgattttgagaggctggttcatctttgggacacttgattctgctgaacgtgatgcatttttggcaaacgaggcgactaaaaaatggacttcaagcaatcaagttctggtggaaatagtctgcactaagtcctttgaacaattggttgctgccaagaaggcttaccatggtctttataagaagtctctggaagaagatgttgctcattacacaacaggagactttcgtaagctcatact

SEQ ID NO: 53618 - DNA, 335 bp, Glycine max
  Clone ID: LIB3109-035-Q1-K2-E3
gataggcatgatatcttgtttgcaacaccctaatctggtgaaacttcatggattttgcattgaaggggatcaattgatattggtgtatgagtacatggaaaataatagcctggctcatgctttattcagctcaaaagatcaacttaaacttgattgggcaacaaggcttaggatctgtattggcatagcaaaaggtcttgcatttctacacgaagaatcaagactcaagatttttcatcgagacatcaaagctactaatgtgttactggatgggaatttaaaccctaaaatatctgactttgggctggctaagcttgatgaagagaaaacccatg

SEQ ID NO: 53619 - DNA, 310 bp, Glycine max
  Clone ID: LIB3109-035-Q1-K2-E4
gacggcagatcagatccattcttcaacaaatcccctgttcagtttgagtttttctcgaggatcccgtgaaacgacatggcgatggtggaccagcctctgtatccgattgccgttttgatcgacgagttgaagaatgaggacattcagctgcgcctcaactcgatccgaaggctctccacgatcgcgcgcgcgctcggcgaggaccgcacgcggaaggagctgattccgttcctcagcgagaacaacgacgatgactacgaagtgctcctcgcaatggccgaggaattaggtgtcttcattccctacgtct

SEQ ID NO: 53620 - DNA, 287 bp, Glycine max
  Clone ID: LIB3109-035-Q1-K2-E5
tgccttttcaagtatcagtaagaatagaagggaggaggagtctttcatatttaaaaatgtaagcataaaatgtactgaaaggctgattgtttctcagtatgttctttatgacaggtcaaatgctatatgaagcaattgctatctggccttgagcattgccacagcagaggtgttttgcaccgtgatattaagggttcaaatctgcttattgacaatgaaggaatacttaaaattgcagattttggacttgcaactttctttgatcctaagcaaaagcatcccatgac

SEQ ID NO: 53621 - DNA, 438 bp, Glycine max
  Clone ID: LIB3109-035-Q1-K2-E6
gaagaagaggcagagaagagcacgaagaatgctttggggaaggtgagcatggatggtgcaccgtatctacgaaaggtggacataaagttgtacaagagctaccaggagctgtcagatgcgctggctaagatgttcagttccttcacgattgaaaagtgtggattccaagttatgatggattttatgaatgatatctatagctctaactatgtaatcacatatgatgacattttcgttgactgatactttgtctgtgttgttttttatggttttgaattttatttatttcaatttgttttttgtttaataatttttttattattttttatttattaaattttattctattttttttatttttgttttttttattatgattttttgtttattatttttattttttatttttattcttatttttatatttttctatttttt

SEQ ID NO: 53622 - DNA, 258 bp, Glycine max
  Clone ID: LIB3109-035-Q1-K2-E7
tgaagaaggttggttacaacccagacaagattccatgtgtgcccatctctggtttcgagggtgacaacatgattgagaggtccaccaaccttgactggtacaagggaccaactctccttgaggctcttgaccaaatcaatgagcccaagaggccctcagacaagccactcaggcttccattgcaggatgtctacataattggtggtattggtaccgttccagtgggacgatttgagactggtgtcttgtaacccggta

SEQ ID NO: 53623 - DNA, 343 bp, Glycine max
  Clone ID: LIB3109-035-Q1-K2-E8
gatatgtatcttgttgcgaggtgtgaggggcatagtggtgttgatgtgaacaagcagaggtcgttccttactttgaatgcgttgaacgagtttgatcctaagtattccggtgtggattggaggcagaagttggagactcagaggggtgctgtgttggctactgaacttaagaacaatgcgaataagttggctaagtggactgctcatgctcttttggcgagtgcggatacaatgaagttagggtatgtgtcgaggattcatccccgcgatcatttcaatcatgtgattttggctgtggttggctataaacccagggactttgcagcacagattaatttgaaca

SEQ ID NO: 53624 - DNA, 313 bp, Glycine max
  Clone ID: LIB3109-035-Q1-K2-F1
ggcacaggtggagaaagtatatatggggggaaatttgcagatgaaaatttcaaactaacacatgatggacctggcattctttctatggctaatagtggtcctaacacaaatggatctcagttctttattacattcaagcgccaacctcatcttgacgggaaacatgttgtttttggaaaagttgtcaacggaatagacattttgaagaaaattgagcaggtgggaacatctgatgggaaacctacccagccagttaaaattattgattgtggtgaagtctcttgaacaaaaattcagcatactgcagagaagg

SEQ ID NO: 53625 - DNA, 373 bp, Glycine max
  Clone ID: LIB3109-035-Q1-K2-F2
cacggtcagtcgttggaagaaacctgagattggttgggtgaagctgaacgtggatggttcacgcgacccatacaaaagttcctccgctggttgtggtggtgttctgagggacgcatcagcaaagtggctccgtggctttgctaaaaaactgaaccctacttatgcagtgcaccagacagagttagaagccattctcacgggcttgaaggtggcttcagagatgaatgttaagaaactaattgtggagtcagacagtgactctgtggtgagcatggtggagaatggggttaagcccaatcaccctgactatggtgtcgtggaacttataaggacgaagcggcgtcgttttgactgggaagtgaggtttggttct

SEQ ID NO: 53626 - DNA, 362 bp, Glycine max
  Clone ID: LIB3109-035-Q1-K2-F3
tacagacagagttggagagttagctgagaagcatggactgaagcttcacattgatggggcccgtatttttaacgcatcagttgcacttggtgttccagtggataggcttgtccaggcggctgattcagtttccgtttgcctatctaaaggtataggtgctccagttggatctgttattgttggttccaagaattttattgccaaggctagacgactccggaaaaccttaggaggtggaatgagacagattggcctcctttgtgccgctgcacttgttgccttgcaagaaaatgttgggaagcttgaaagtgatcacaagaaagctagacttttggctgatggattaaaagaagttaaaggac

SEQ ID NO: 53627 - DNA, 387 bp, Glycine max
  Clone ID: LIB3109-035-Q1-K2-F4
gagacacgtgggtggatagcaacttagaacacaggtgaactcaaagtggaacaacccaagcttgtttcacagctcaacaacaatggcttctatctcatgcatcacccaccaccccatcacttccaagctcaataatgccttctcttcaccccacgtctctgcctcaaacttggcctcacggtttctgggcaccagaaaaagagttgggttgcatagcctcacctctagaataattggaccctctaatggctccaaagccacatgctggttcaggttcggcaagaacggtgttgatgccaaaggtgctggcatctatggcagccagggccgtgatgactttgatagagatgacgtggaacagtacttcaactatatggggatgctcgc

SEQ ID NO: 53628 - DNA, 215 bp, Glycine max
  Clone ID: LIB3109-035-Q1-K2-F5
tttatggtacttacagagttggatagttagctgggaatcaggaactgtatcttcacattgatggggcccatatttttaacgcatcatttgcacttggtgttccagtggataggcttgtccagtctgctgattcagtttccttttgcctatctaaaggtataggtgctccagttggatctgttattgttggttccaagaattttattgccattgct

SEQ ID NO: 53629 - DNA, 369 bp, Glycine max
  Clone ID: LIB3109-035-Q1-K2-F6
ggaggataatcaataaacttaaacttatgttatggcgttctaactctgaacgatgaaatgaaatggagttccaagataagcgtttatctctgagatcgagcttgacgttcagcgagacgctgtgcgcagtgttcattccgttcataggaatagtcgaagctttggttttcacattcactagttgcttcgatttccaatctcccaggaataagaagaaacattcttctaccttcgacgacattctcaccctcgccgaggattctccatttagtattaatgaaatcgaagccttgcgtgagttgttcaagaagttgagtagttctatcattgatgatggcctcatccacaaggaagaactcacattggcac

SEQ ID NO: 53630 - DNA, 284 bp, Glycine max
  Clone ID: LIB3109-035-Q1-K2-F7
ggattgagtaattcagctaacagaaagggatgaatgggcctaccaagaaatgatcactcatcttcctctttgctctattccaaaccctaaaaaggttttggttatcggtggaggtgatggaggggtcatacgagaagtagcacgccattcttcagttgaaaagatagacatttgtgaaattgacaagatggttgttgatgtctccaaacaatacttccctgatgtaactgttgggtatgatgatcctcctgtgacacttcatattggtgatggaattgcatttt

SEQ ID NO: 53631 - DNA, 334 bp, Glycine max
  Clone ID: LIB3109-035-Q1-K2-F8
ggttctagtgtgtgattgtttgttgttgtaactcgtgcttcttcttttgttgttctgtgtttgtgtttgttttttctctcacctgaaaatgtcttgctgcgttggtaactgtggttgcgtaagctcctgcaagtgcttcaacgtctgccgaggctgcaagatgtacccagacttgagctacactgagtcatccaccaccgagaccttggtcatgggagtggcacctgttaaggctcaatttgagtgtgctgtaatgggtgtacccgctgagaacgatggctgcaaatgcgtaccaaactgctcctgcatcccctgcacttgcaagttatgtgat

SEQ ID NO: 53632 - DNA, 292 bp, Glycine max
  Clone ID: LIB3109-035-Q1-K2-G1
ggatactagaacctgcagatcgtgatgctgttttggccaatgttgccatcaagaatggcaaaaactacaatgtcattgtggaaatcgccactatcctctccccggaagagcttttggccgtgagacgtgcttatctcaaccgctacaagcactccttggaagaagatgttgcagctcatacctctggccatctacgccagcttttagtggggttggtgacctcatataggtatgttggtgatgagatcaatccaaaattggcacaaactgaagctgaaattcttcatgatgc

SEQ ID NO: 53633 - DNA, 397 bp, Glycine max
  unsure (1)..(397): unsure at all n locations
  Clone ID: LIB3109-035-Q1-K2-G2
gacttcaaagtggagaaaaacacacacggttggttcattctctcgcttttctttttcctcaaaaagttgaaaaagaataaagggggaacaatcgagtgaagttgttgctcttcaatagtaaacttacctatggaagagggaagggttgtgagtgagtacacaaaagatggaactgtggatcttaaagggaaacccattctcaaatccaaaagtggtggttggaaagcatgctcctttgttgttggtatctctctctctcactataaattttatatggtcattttcatcttgttttggacattaatttcaaaagcaatttcccaaaacattggaagcttcatgatgttttgttaacaaaaatcttaatttcctctgatcgagagacattgntcaattc

SEQ ID NO: 53634 - DNA, 237 bp, Glycine max
  Clone ID: LIB3109-035-Q1-K2-G3
tggtactttaaattggttacaaactcaaccagattccataggctctcgtttatgttttctatgatgacaacattattgaaaagtccaccaacactttactggtacaaggtactatctaatcttgaacctacctaccaaataaataatcccaataagccattacacaaaccactcaagctttcattttaaaatgtctaccaattttataatcttaataccttgccaataagaattctt

SEQ ID NO: 53635 - DNA, 447 bp, Glycine max
  Clone ID: LIB3109-035-Q1-K2-G4
ggaggaagccacatagagacacaatacagagtgaggggttgctcgtgtcgccacaactctctgccaacatgggtatctccagagattctatgcacaagaggcgtgccactggtggcaagaagaaggcctggaggaaaaagagaaagtatgagcttggtcgccagcctgctaacactaagctgtcaagcaacaagacagtcaggaggatccgtgttagaggtggaaatgtgaaatggagggcattgagattggatactggaaattactcctggggaagtgaagctgtaactcgcaagactcgtgtactagatgtggtttacaatgcctcaaacaatgagcttgtgcgtactcagactcttgtcaaaagtgctatcgttcaagttgatgctgctccattcaaacaagtgtatctttaacactatggtgttgagattggtggaaaaagaa

SEQ ID NO: 53636 - DNA, 280 bp, Glycine max
  Clone ID: LIB3109-035-Q1-K2-G5
tggggatgtgttaaattatattgagtttatagccttcacgagtgagaatgctgacatgcagatgtcacaagtttggggatccggtcaaaataaaaaaaattgataaaatttcaagaacaaaggcagcgttacttctcaaccaatgctgtaaactaccgtcaagagccccaaacctctgtcttccaccgacgatgagtccttcttaccgaatgaactgatctaggagatctttcttagggttctggttagatcccttctgcaaaatacggaaaaccctaat

SEQ ID NO: 53637 - DNA, 282 bp, Glycine max
  Clone ID: LIB3109-035-Q1-K2-G6
ggattgagaaggaatgagaatggggggaggtttttggctgatgatgttggtaggtctagcaatcgagggcgagggcaagggcaatcttctcgaacgaattatgggaggaatggagcggatggtgatggcagaatgaggaagaatgggaatgggagaaggtttttgtccaataatgttgatcggtctagcggtggagaacagtcttctcctttgaattatggcggggatggaatggatggtgatggtagattgaggaggaatgggaatgggaagagggttttg

SEQ ID NO: 53638 - DNA, 447 bp, Glycine max
  Clone ID: LIB3109-035-Q1-K2-G7
ggccttaagaatggtgatattgaagttacttgggctgatgggatggtatcaatggttggaccccaagcaatctatgtggttggtcgagatgacgatgatgaatcaattgctgctgggagtgaaataagtgatgctgcaagctgggaaactgttaatgacgatgaaatggaagtccttgaggattccagagaggatattgagagggaaaattcaagcagtgttacttctgaggcagaagaaagtggagagaatgattttggtaggactgcagctctctctgttcccctagcagcatttcgatttgtcactagacttgccagtggaatattctcaagaagctcaaggaacttggattctattcccttggagattaaagctgaacgtgaacattcattacctgtaggtaatgatgagtctacttcacagaaacatattgcaattgatgct

SEQ ID NO: 53639 - DNA, 329 bp, Glycine max
  Clone ID: LIB3109-035-Q1-K2-G8
ggaggcagagaagtaagaagaagatagcgagaagtggaggctaagattgtccacaacatgtggacagcaggaacaacgagtgtatagatcaacaactacctttcccttttcgtctatcagtccaaacactcttcttcttcttcttcttcttcactctacaaccactaaactaagtggttggttttggtttagttacatttgtatgaagctcttaaacttaaggcttaagccatggcatcctcatcctctctgcatctatctcaggcccttctgtcacgtgctgtgtacatacatggctcatcttcttctgaccgtgtctcactcttatt

SEQ ID NO: 53640 - DNA, 334 bp, Glycine max
  Clone ID: LIB3109-035-Q1-K2-H1
gggggaattgactagtgcggcgcgctcctatgatcaccgtagacggcggaggtggcggtggtggtgtagacacggcgtgacggcgatctcttgagataaatgttggttgaaagaggaagaagaagaagagttgtattgtagaatgagccaaccaacggtgatacttgccactgcgagctatgatcacactattcgtttttgggaggccaagagtggccgttgctaccgcaccatccaatatcctgattcgcaagtaaaccggctggagataaccccggataaacgctttctggctggagctggcaatccacacatacgactggttgatggtaac

SEQ ID NO: 53641 - DNA, 386 bp, Glycine max
  Clone ID: LIB3109-035-Q1-K2-H2
gaaagaagagaaaataataatatgaataacaacccacggaacttgggtcttgcaaattaagttcattttcctccctttcactctcgtagacatcacaaaccttccctccattcatcccacgcatggctgccatgaactctagcgtattggcctgtagctatgccatatcaggtgcagcgtgttcggagctcaatgggaaggtcacttccgtggcctatgttgcatgctctggctacaagttgccattgatcaaagctgaggccagagttcctaaagccaaagaatctgaaggaggaaggagaggtgcccttgttctcttggcagctacccttttcacctctgcagcttccaattcttttgccaatgcttggatcattgaagattac

SEQ ID NO: 53642 - DNA, 332 bp, Glycine max
  Clone ID: LIB3109-035-Q1-K2-H3
gggcaaacaagtggtggaaagacatacacgatggttggaataactgaatacgctgttgcagatatttttgactatatagagaggcatgaagaaagagcatttatattgaagttctcagcaattgaaatttacaatgaagttgttagagacctcctcagcactgacaacaacactccacttagactacgtgatgatcctgagaaagggcccattttagagaaactcacagaggagactctacgggactgggagcatttaaaagagcttctagccttcagtgaagctcagagacaggtgggagagacatacctaaatgaaaagagttctagatc

SEQ ID NO: 53643 - DNA, 415 bp, Glycine max
  Clone ID: LIB3109-035-Q1-K2-H4
gagcgagggaagggaagcatctttagctccaatggcggatacctgaggtcgatccagggacctcgacaagctccttctccgccctggcaatctcgtcggtcccaggttcgaaccaggcgctgagttgcgagatgaccttcaggccttcgccaaagtgttggtggtaggggccggtggcttaggttgtgagttgttgaaggatttagccctctctggtttccgaaaccttgaggtcattgatatggatcgcatagaggttactaatctcaaccgccaattcttgttcagacttgaagatgttggcaaacccaaagccgaagtagctgccaagcgtgtcatggagagaattactggtgtcgaaattgtgccccacttttgcaggattgaggacaaggaaatagaattttacaatgat

SEQ ID NO: 53644 - DNA, 297 bp, Glycine max
  Clone ID: LIB3109-035-Q1-K2-H5
gggcaaacaagtgggggaaatgcatacactatggttggaataactgaatacgctgttgcagatatttttgactatatagagaggcatgaagaaagagcatttatattgaagttctcaccaattgaaatttacaatgaagttgttagagacctgctcagcactgacaacaacacttcacttagactacgtgatgatcctgaaaaagggcccattttagagaaactcacagaggagactttacgggactgggagcatttaaaagagcttctagccttcagtgaaacttaaaaacaagtt

SEQ ID NO: 53645 - DNA, 448 bp, Glycine max
  Clone ID: LIB3109-035-Q1-K2-H6
ggcagatgtgaatgtgagagacacccatgaatgacagagtgaaatgaactgagtaacaccaacgctgctttcttcattctttcattcattcgaatgtgttcttttgcgattgaatttgagggaacaataatcgattttcgctttctgggcacccctgaattcccctgcatcgctgtgaaagtagttcagttcgaacaacgaaaacgatgtcggctcgattgatgaagaaggttctgaacgagcagcatcaccttccgcaacacgtgagcgaagaagaagaagaagaagagaacgattctgagcccatcactcgttcctccatcaaccccttcgacctcctcaacgacaacgattctgagcccgaagaccagggagatgagttgatgtccaccaatgaaatattgacaagttatgatgacaaagaggagtcagcttcattgaaacctac

SEQ ID NO: 53646 - DNA, 284 bp, Glycine max
  Clone ID: LIB3109-035-Q1-K2-H7
aggaacagcaatgaagaagaggcagagaagagcacgaagaatgctttcgtgaaggtgagcatggatggtgcaccgtatctacgaaaggtggacataaagttgtacaagagctaccaggagctgtcagatgcgctggctaagatgttcagttccttcacgattgaaaagtgtgggtcccaagggatgaaggattttatgaatgagaccaatggctctgactatgtacccacatatgaagacatggacggagactggatgctcgtcggtgatgtgccctgggagat

SEQ ID NO: 53647 - DNA, 405 bp, Glycine max
  Clone ID: LIB3109-035-Q1-K3-A2
ggcagttcaattgatcaactcagatttcagggacctaagtctagctgctaatagactcgcccatcatgccatcaaacttggtggcattggctttggagcctcttttttcggattgtttgctgccattgctgctatttatctgttgattttggatcgtacaaactggaaaacaaatattctcacagcactactcattccatacattttctttagcttgccttcattaattttcgacgtcttcaggggagagcttgggaaatggattgctgcatttgctgttgtattacgcctttttgcttcaagacactttcctgaatggctggaattgcctggtgctctgattcttcttatcgtgggagcctcttctctaattgcaagcacctttagagacaacattgttggggt

SEQ ID NO: 53648 - DNA, 255 bp, Glycine max
  Clone ID: LIB3109-035-Q1-K3-A3
ggataataataaaaacactcgtgccgcaccttcgtcttccccaatggctctttccacacgccattttggaagcccttttctttattacatagaatcctttggctattggaaccagtaaaccctaataattccaatcaaccttggcaattctttgaatccgaataatcttttcggccaaaacacaagtggggttttttggatttaatggttaaggggtgatagcagggttcaatctgggtttccaaaggcaaaata

SEQ ID NO: 53649 - DNA, 399 bp, Glycine max
  Clone ID: LIB3109-035-Q1-K3-A4
ggagcctagtagtaatagtgaactggagtgatgctcaagtgtgttgtgtgtcagtgttttagggaccaatggtggagagtgagttttctgagttaagatataagatatatgctatctaatgcctagtgggatataggaaaggacctcaaatctgctatctttcgttcacatacgcatcatattcttttaattgttagttctgagttctgaccaaagttgttgatttgagtgtttttagcatatttggggtgtctgcaaacaccgcaggaattttgctttttctattgaattagattcctctgggaattcaattctgattcttccttagttttcggttttctgtctttctttttttccttctatttatatttttgggtgggttttctggtgagtcttgac

SEQ ID NO: 53650 - DNA, 401 bp, Glycine max
  Clone ID: LIB3109-035-Q1-K3-A5
gacaatcaatcttctttatccactctctcttaattaaattaaaacaaaaaatgtgcgctgccatatccgaagtggaacaagaagagttgctcgaaaaattggaggtgttcaagatcaaaggcagggacaagcatggccgcaagatccttcgcattatcgccaaattcttcccaggtagattgattaattaattaattaaatccctaattcctttttttttatgtgcatgaattttttaaatcttcggtaattgtttgaattgaggacagcacggttggtgagtgttgaggttctgaaaaagtacctggaggagagggttttcccgaagctgatggggaagaggaaattcgcggtgctgtacgtgcacaccggcgttcagaggagcgagaaatttcccggaa

SEQ ID NO: 53651 - DNA, 393 bp, Glycine max
  Clone ID: LIB3109-035-Q1-K3-A6
gagagaaagagagagaaagatgtcgaagcgtggtcgtggtggttcggcggggaacaagttccgcatgtcgctgggtcttccagtggcggcgacggtgaactgcgccgacaacacgggggcgaagaacctctacatcatttctgtgaaagggatcaaaggccgtttgaaccgtcttccctcggcctgcgttggcgacatggtgatggccaccgtgaagaagggaaaacccgatctgaggaagaaagtcttgccagctgtcatcggtcgccagcgcaagccatggcgcctaaaggacggcgtctacatgtacttcgaagataatgctggtgttattgtcaatcccaagggagaaatgaaaggttctggtatcactggtcccattggaaaagagtg

SEQ ID NO: 53652 - DNA, 331 bp, Glycine max
  Clone ID: LIB3109-035-Q1-K3-A7
gagagcgagaaatattatagtagctctgcgtttttggggtatcattattcaaccacccattttctctcttcttcttcttccattgagaaaattctctttcatcgtgtgtgatcggtgagatgtacgtagcttccatgcgcaagtctttcaaggactccttgaaagtccttgaagctgatatccagcacgccaataccctggcttcagattttccaagggagtatgatggtgcatgccttcagatgataatgtcatacagtccagctgcacacctgttgtctttcttggtgcattggacagattgtcatcttgcttgaaccctttgactgtt

SEQ ID NO: 53653 - DNA, 408 bp, Glycine max
  Clone ID: LIB3109-035-Q1-K3-B1
ggcatcgaacagagagagagagaatggcagcacttggtgggaatcgtgatgtgacaggaagccagaacagcgttgagatcgatgctctagctcgctttgctgttgaagaacacaacaaaaaacagaatgcccttttggagtttgaaaaggtggtaactgcgaaacagcaagtggtttctggtaccttgtacaccatcactttggaggcaaaagatggtgggcaaaagaaggtttatgaagccaaagtttgggagaagtcatggttgaacttcaaggaggtgcaagagttcaagcttgttggagatgcaccttcatagtctagtgcttaattaggttgctgaagagtgaagaatgagacagcctggttcgaaggggaaaagcctaaggatatatcaaaggatcctatat

SEQ ID NO: 53654 - DNA, 385 bp, Glycine max
  Clone ID: LIB3109-035-Q1-K3-B2
gacggcgatgatgatgcaaatcaacatcacctccaccacctcaatcgtcacggcgttctcttcggatcattccccgaatgttctaccttgagccatgtccaacctcgttcagattcgcgtcgacgccgacgctagcgatggcttcgactctccggcgaagcagaaagcagccaaccgcagctcctacagcaatcgcccctttctctccctccgccgcgccaaacagttcctcggcgccgccaagttcaagctcttcttagttctttttgctctctccatcgtcgtttttggcttctgcagactcaattcgtggatgggatggaaccctcaccactcctcttcggtttccttcacttcaaagggtggctatactgagcttattaac

SEQ ID NO: 53655 - DNA, 411 bp, Glycine max
  Clone ID: LIB3109-035-Q1-K3-B3
gatgggagaatcttattgtcaaggagttttgatggttcattgaaggtttgggatctgcgcaaaacaaaagaaccgttaaaagtatttgaggatctgccaaatcactatgcacaaacaaatattgccttcagtcctgatgagcgactctttttgactggaacatctgtggaaagggagagcatgacaggaggtttattgtgcttctttgatagagtaaatcttgagcttgtttcaaaagttggcatatcacccacttgtagtgttgttcaatgttcttggcatcccaaactgaatcacatctttgcaactactggtgataaaagccaaagtgggactcacatactatatgatccaaccgtaagtgaaagatgagctcttgtatgtggtgcacgtgcaccaaggaaaaaatca

SEQ ID NO: 53656 - DNA, 331 bp, Glycine max
  Clone ID: LIB3109-035-Q1-K3-B4
caaggacacgaggtggatatatatgagtcaaggccttttattggtggcaaagttggttcttttgttgacaaaggtgggaatcacattgaaatgggattgcatgttttctttggttgctacaacaatcttttccgattgatgaagaaggtgggtgcggataacaatctacttgtaaaggatcacactcacacttttgttaacaaagggggtcaaattggaaaactagattttcgcttcccaattggggcaccaatacacgggataagggcgtttttgtccacaaatcaacttaatacttatgataaggcttgaaatgctgtggcttttgcac

SEQ ID NO: 53657 - DNA, 405 bp, Glycine max
  Clone ID: LIB3109-035-Q1-K3-B5
aggggaggaaagaagagagagaacaaagcacttagtgctattcaataattacgaaaaaccaacagcgagtgttgtttttgtttggtccaggctggaccagggaatgaatagagatgagaggctttcggttgaagagaactgagttaagcggcgaagccaaacgcagaatcggcggcagaaattgccaccggaagcacgtcgaagacgggtgaaccaaacacaaaattccatccaccacttctcttttcaatccccaactcaaatctgtgaagaaaatctcaatttctaaattgtaattcttagcactactgctagtagtagtaaaaaaaaacaattagaaagtagtagagtgtttttttttcggtttttcggttggtttacttttaagatgggtgagaagagcga

SEQ ID NO: 53658 - DNA, 394 bp, Glycine max
  Clone ID: LIB3109-035-Q1-K3-B6
gacagtattcaagatcggggaatcaatcaggtttatataattggaggagatggaactcagaagggtgcatctgcaatttttgaggaagtcagaaggcgtggtctcaaagtttcagttgtaggtatccccaaaaccatagataatgatatcccggttattgataagtcctttggctttgacactgctgttgaggaagctcaacgagctataaatgcagcacatgttgaagctgaaagtgttgaaaatggcataggtgttgtcaaagttgatgggtataaacagcgtatttattgcaatggatgctacacttgcaagtcgagacgtggacttgtgcttaattccagagtcacccttttaccttgaaaggcctgggggactctatgaatatatagag

SEQ ID NO: 53659 - DNA, 348 bp, Glycine max
  Clone ID: LIB3109-035-Q1-K3-B8
gtctgaaagggaaaaaaagcaaagtcgcatcaaagacaagaaaaaaggttacctctttcaattttatccctgggtgtgagcttaattcaatttctgctcacacataatggcttgcacgctcgctgattcattactcctattcaagggttcttatcagaaaccagttctgaggagagacattgctgcccggtactccacgggtatatttagtctaaacagtaatgggcttatccagaaaaggttcatgcgtcaaaggaattttgttactacgaataaggttactggcatacatgccgtggcaatttcaagtcaaccagctccggtggaaagtgcagagtatataaaaca

SEQ ID NO: 53660 - DNA, 266 bp, Glycine max
  Clone ID: LIB3109-035-Q1-K3-C1
gacacgtgcgagtgatcaaatattaagaagaggttatggatgtttttaaggtttttcacatgcttgtcttaaaacaattttccagcaaaatccaaatccttcgttctggtaatggcacagaatacatgtctaaaagcatgacacagtatttaaattctcattgtatcaagaggggttgttccttttgtttgattttttttcttcttgccaaactatggcagaagatcattcttcttcgcatatattgccttcaggagctacaagtt

SEQ ID NO: 53661 - DNA, 378 bp, Glycine max
  Clone ID: LIB3109-035-Q1-K3-C2
ggagtgagtgagagaaagaagagaaggagttgaagtggttgttgtattgtagtagtgtgtaaagtcttggtgatggatagacacaaatgcaagctttgttcaaggtctttcagcaatggcagagcccttggtgggcacatgaaggctcaccttgcttctctccctctccctctccctccaaagcttcactcttgcttctctttctctgactcagaacaagaacaatctttaagggagaatcctaagaaaaccttgaggattctggatcctgaagacagagagagcgagacagagtctaataagaacccgacttgtcaacgatccaagcgcaactggaaatctaccatgcccaagctcagcctttgacaccccgaagcc

SEQ ID NO: 53662 - DNA, 404 bp, Glycine max
  Clone ID: LIB3109-035-Q1-K3-C3
gggtcgcgagttcaagtcaacaagcctcacaagtcccgcttctcttccaaatcttctcgcaatcttcataaaacctctgtcaaggacagactcgcaatcgcaaaatcagagcgcaatgtcggcaaaggagctcgtgcagctcgaattcagagaaataaaatgatacgagatcaaaaaagagctgctgttttgaaagaaaaacgagaactcagtgggtcgagaagtcctcctcgagtgatagttctcttcgccctctgtgcgtctgtggatttagaatcacttgctgatgatctcttggcattattatctaaagatacgtgtgtggtgctgtcaggaacccgtgcttcttctgaatataagacaagaattaccggtacttaaaagcaccccatggtgatctacta

SEQ ID NO: 53663 - DNA, 397 bp, Glycine max
  Clone ID: LIB3109-035-Q1-K3-C4
gggttcaaagtctagtaataaaaagagaaaagctttctcagataagccaacttcaaggccaatgaattcccaaaagatgagtgaatttagtactacgcctatggacgatgaattggatgttggtgatccagtgggtcagaaacccaagagacccaagaggataaagaagaatgtgaatgaaaagtttgaagatgcttttactgggattgctgccctgatcccagagcagacccaatttccaccttcaccaagcgattttagtgccgggggttctaaagcagaatcaggccaagacaactgaagacatagtgattcttaaccactacaaaaactttggaggtactattctcagccctatggattgactctttttgtggagactgctaagttggctctc

SEQ ID NO: 53664 - DNA, 378 bp, Glycine max
  Clone ID: LIB3109-035-Q1-K3-C5
gacactaaacaagttaaaagaagagcatcactgaactaacaaagcaaccctatgtcgaaggtggtttgtgtcaccggagccagcggcgccatcggatcatgggtggtcctactcctcctccagcgtggttacaccgtccatgccaccgtccaagatatcaaggatgaaaatgagacgaaacatttggaggaaatggaaggagcaaagagtcatctccatttttttgaaatggatcttcttgacatcgactccattgccgctgccataaagggttgttccggcgtaatccaccttgcatgtcctaacatcattggtcaagtcgaagatcccgagaaacagatattggaaccggcgataaaaggaacggttaatgtgttg

SEQ ID NO: 53665 - DNA, 397 bp, Glycine max
  Clone ID: LIB3109-035-Q1-K3-C7
gaacacactcatccaaacaaccttctttctttttgtgtgagcctttctttcaggttcttaacttgatcagtgtgcagtgtccaaatcataagggtagctgcaaattgcaatggctaagcatgatgttgagggtggttccttctctgcaaaggactaccatgatcctcctccagcaccgttgattgatgctgaggaactcacacagtggtccttctacagggctttgattgctgagttcattgccacaatgctcttcctttacatcacagtgctcactgtgattggttacaagagccagagtgatgtaaaggctgggggtgatgtgtgtggtggagttggcattcttggcgttgcttgggcctttggtggcatgatcttcattctggtgtactgcact

SEQ ID NO: 53666 - DNA, 260 bp, Glycine max
  Clone ID: LIB3109-035-Q1-K3-C8
gggatttccaaagtctttaatagagggtaagtctcaaaaaatcgaagaattacagacgaatatgcaaaaaaatctgaattgtgtgaatcgaaaactaaacattgctattgtaaaagtggcaaatgcttataaacaccctaatattattgcataattgatagctggacaattaaagaatagagtttcgtttcgtaaagcaatgaaaaaagctattgaattaactgatcaggcgtgtacaaaaggagttttagttcaaattg

SEQ ID NO: 53667 - DNA, 312 bp, Glycine max
  Clone ID: LIB3109-035-Q1-K3-D1
gaagatggagatgtatcagatctggagcaggagaatagcgttgggagcgttcgcgtttgttctgcttttcctatcggcctcagcagacgacgtcgttgtgctctctgaagataacttcgagaaggaagttggtcaggacagaggagctctcgttgagttctatgctccttggtgtggacactgcaaaaagcttgctccagaatatgaaaagcttggtagcagcttcaagaaagccaaatctgttttaatcggcaaggatgactgtgatgagcacattgatttgtgcagcaaatatggatgctctgtgtaccc

SEQ ID NO: 53668 - DNA, 278 bp, Glycine max
  Clone ID: LIB3109-035-Q1-K3-D2
ggagcaatcgcgtgaattttcaacgggattttgcagagcttccgcgttgaaaccatccaaccctcttagcctcatattcgttgtctatacttccctccttccttcgtgtaattacatttttttcatcagcagttccaggaccaaattgatacacaagatcactgtttttttagagagagattgagagaggatgtttggttcaaagaaaactcctctgagagatgctaaacctagttctgttggccatgcccataacctctttgattctgatgaagaga

SEQ ID NO: 53669 - DNA, 425 bp, Glycine max
  unsure (1)..(425): unsure at all n locations
  Clone ID: LIB3109-035-Q1-K3-D3
cactgttgatccactatgctggtccaatgaaaacctctgaagatactccaacaaatggatctactgtgccccctggcagacgccttgttgttccactgcagatttgtgttttgcagggtttgtcttttgtgaaggctcagcttctttcaatggagtttcctgctcatgtcggtgaaactcttccgaagttggatgacttaaataacaagtctactgatgttgaatcagaaacaaaaatggacagattggtgaaaatagatcctttcagaggaagttggggactgcgattccttgaacttgagttatctaatccaactgatgtcgtgtttgaaatcaatgtctctgtcaaactggagaactctagcaacgaggacaatcattntgctgatcagggtgctacagaatatgtctatcctaaaaccaga

SEQ ID NO: 53670 - DNA, 324 bp, Glycine max
  Clone ID: LIB3109-035-Q1-K3-D4
gatattattggacatattgttgaatttagctctgatcagcatggaagtcgatttatacagcataagttggaaagttgtagtggcgaagagaaggcattggtgtttaaagaggttcttccacatgcttttaaattaatgactgatgtatttggtaactacgtaatacagaagtattgtgagtattgaagctctgagcataggaaggaacttgcaaatcgacttgttggccagatactggctttgagtttgcagatgtatgggtggcgtgtgattcataaggcacttgaggttattgagcttgaacagaaagctcatcttgttcat

SEQ ID NO: 53671 - DNA, 274 bp, Glycine max
  Clone ID: LIB3109-035-Q1-K3-D6
ggctttttaggttattttcttaagtaaaaagaaggaaataaataattctcgtagctttgttgctcttataaattctattctggttgacgcttctctcaccatccccatttcgcgttggtgcaaagcatccttcgtttcaatttctctctctcagcgctttctgcaatcgaacctttcatctccaaagggatccacaggccgaaggagaaatggggctgacattcacaaagcttttcagtcggcttttctcgaagaaggaaatgcaaattctgat

SEQ ID NO: 53672 - DNA, 412 bp, Glycine max
  Clone ID: LIB3109-035-Q1-K3-D7
atccggcggaattgtcactatcttcattggtatgcttatcgggtgctttgcaagccagcgtggtggcaatagtagcgactcgtcattctgggcttgtggcatgggccttaggttgggacttcaggctctatggccctctctacacggtcagtactccattccaatatttcttgtttcctggaccccaaaacctatttttgtttcatcttcaaaatctgattttcaaagcaaggtaacacacataataaataagatgaatttagtcggcacaccaaattaatttgttttctctcaatcccagcctattgaatgcaaaaggttacgaggcaagtattgtaactaaaaaagacaaattgttcactccaaaagtaaaattcgttggtcgggccatattggccctaattcactattt

SEQ ID NO: 53673 - DNA, 212 bp, Glycine max
  Clone ID: LIB3109-035-Q1-K3-D8
gatacggaatgttgaggtccagttcatgaggacaagatgctgtttgaacttttagttttgagcggttctcaagttgcatctgattggaccttaaccttgaagaaatgcctagatttcagggctgtatattcagaatttgatgcagaaaccgtggttaacttgactgataagcaaatgatgtctattaggttttgaatatggcattgacataa

SEQ ID NO: 53674 - DNA, 336 bp, Glycine max
  Clone ID: LIB3109-035-Q1-K3-E1
gatcatcatgaagttgaaggggaaccaaccacctccacgagttatctataattgatgtaaattttcccggaaagagggaacactgtaaaatattagtcttggcttctttaatgtctattttaaagtggaagacttgtgtagtaaaagggtctgcatctagtactcccaataaaagaaaaaaaagagaagcaaattccttcttccttaatttactaattaaatgaaactggtagtgtccaaataattggttttaatttttatcctatcccaggcagtgtatcataaattgggatttataacatagtatgtttgaaaattaaacaaaaaagcggccgc

SEQ ID NO: 53675 - DNA, 371 bp, Glycine max
  Clone ID: LIB3109-035-Q1-K3-E2
ggacaaagaactcacgagtgattttgagaggctggttcatctttggacacttgattctgctgaacgtgatgcatttttggcaaacgaggcgactaaaaaatggacttcaagcaatcaggttctggtggaaatagtctgcactaggtcctctgaacaattgtttgctgcgaggaaggcttaccatgttctttataagaagtctctggaggaggatgttgctcatcacacaacaggagacttccgtaagctcatactacctctggttagttcttatcgatatgaaggagatgaagtcaacttgaccctggcaaaaactgaagcaaaattgctgcatgagaagatttcaaacaaggcttaatatgatgacgact

SEQ ID NO: 53676 - DNA, 422 bp, Glycine max
  Clone ID: LIB3109-035-Q1-K3-E3
gataggcatgatatcttgtttgcaacaccctaatcttgtgaaacttcatggattttgcattgaaggggatcaattgatattggtgtatgagtacatggaaaataatagcctggctcatgctttattcagctcaaaagatcaacttaaacttgattgggcaacaaggcttaggatctgtattggcatagcaaaaggtcttgcatttctacacgaagaatcaagactcaagatttttcatcgagacatcaaagctactaatgtgttactggatgggaatttaaaccctaaaatatctgactttgggctggctaggcttgatgaagagaaaacccatgtcaccacccgaatcgctgggacaataggatatatggcaccagaatatgcattatggggttacttgtcttacaaggctgatgtttaca

SEQ ID NO: 53677 - DNA, 242 bp, Glycine max
  Clone ID: LIB3109-035-Q1-K3-E4
gacggcagatcagatccattcttcaacaaatccccttttcagtttcagtttttctcgaggatcccgtgaaacgacatggcgattgtggaccagcctctgtatccgattgccgttttgatcgacgagttgaagaatgaggacattcagctgtgccttaactcgatccgaaggctcttcacgatcgcgcgcgcgctcggctaggacctgacgcggaatgtgctgattccgttcctcagctagaa

SEQ ID NO: 53678 - DNA, 419 bp, Glycine max
  Clone ID: LIB3109-035-Q1-K3-E5
tgccttttcaagtatcagtaagaatagaagggaggaggagtctttcatatttaaaaatgtaagcataaaatgtactgaaaggctgattgtttctcagtatgttctttatgacaggtcaaatgctatatgaagcaattgctatctggccttgagcattgccacagcagaggtgttttgcaccgtgatattaagggttcaaatctgcttattgacaatgaaggaatacttaaaattgcagattttggactggcaactttctttgatcctaagcaaaagcatcccatgactagtagagtcgtgaccctttggtaccgtccacctgagcttctctggggtctacgtcttaatgtgttggtgttgacctttggcagtgtggctgcattttggccgagctacttactggaaaagccatcatgcct

SEQ ID NO: 53679 - DNA, 243 bp, Glycine max
  Clone ID: LIB3109-035-Q1-K3-E7
tgaagaatgttggttacaacccagacaagagtccatttgtgcccatctctggtttcgagggtgacaacatgattgataggtccaccaaccttgactggtacaagggactcaactctgcttgaggctcttgaccaaatcaatgagcccaataggccctcagacaagccactcaggcttccattgcatgatgtctacaaaattggtggtattggtaccgtgccagtgggacgtgttgagactggt

SEQ ID NO: 53680 - DNA, 345 bp, Glycine max
  Clone ID: LIB3109-035-Q1-K3-E8
gatatgtatcttgttgcgaggtgtgaggtgcatagtgttgttgatgtgtacaagcagaggtcgttccttactttgaatgcgttgaacgagtttgatcctaagtattccggtgtggattggaggcagaagttggagactcatatggttgctgtgttggctactgaacttaagaacaatgcgaataagttggctaagtggactgatcatgctcttttggcgagtgcggatacaatgaagttagggtatgtgtcgaggattcatctcttggatcattttaattaatgtgattttgtgttgggtttggctttgaacctaaggactttgcagcacagattaatttgaaca

SEQ ID NO: 53681 - DNA, 331 bp, Glycine max
  Clone ID: LIB3109-035-Q1-K3-F1
ggcacaggtggagaaagtatatatggggggaaatttgcagatgaaaatttcaaactaacacatgatggacctggcattctttctatggctaatagtggtcctaacacaaatggatctcagttctttattacattcaagcgccaacctcatcttgacgggaaacatgttgtttttggaaaagttgtcaacggaatagacattttgaagaaaattgagcaggtgggaacatctgatgggaaacctacccagccagttaaaattattgattgtggtgaagtctctgaaacaaaaattcagcatactgcagagaaggaaaaaaaaaattgagaat

SEQ ID NO: 53682 - DNA, 357 bp, Glycine max
  Clone ID: LIB3109-035-Q1-K3-F2
cacggtcagtcgttggaagaaacctgagattggttgggtgaagctgaacgtggatggttcacgcgacccatacaaaagttcctccgctggttgtggtggtgttctgagggacgcatcagcaaagtggctccgtggctttgctaaaaaactgaaccctacttatgcagtgcaccagacagagttagaagccattctcacgggcttgaaagtggcttcagagatgaatgttaagaaactaattgtggagtcagacagtgactctgtggtgagcatggtggagaaaggggttaagcccagtgaccctgactaatgggtcgtggaacttataaaggcgaagcggcgtcgttttgactggga

SEQ ID NO: 53683 - DNA, 333 bp, Glycine max
  Clone ID: LIB3109-035-Q1-K3-F3
tacagacagagttggagagttagctaagaagcatggactgaagcttcacattgatggggcccgtatttttaacgcatcagttgcacttggtgttccagtggataggcttgtccaggctgctgattcagtttccgtttgcctatctaaaggtataggtgctccagttggatctgttattgttggttccaagaattttattgccaaggctagacgactccggaaaaccttaggaggtggaatgagacagattggccttctttgtgccgctgtacttggttgtctgcatgaaaatgtttggaagctggaaagtgatcacaagaaagctagactttt

SEQ ID NO: 53684 - DNA, 247 bp, Glycine max
  Clone ID: LIB3109-035-Q1-K3-F4
gagacacgtgggtggatagcaacttagaacacaagtgaactcaaagtggaacaacccaagcttgtttcacagctcaacaacaatggcttctatctcatgcatcacccaccaccccatcacttccaagctcaataatgccttctcttcaccccacgtctctgcctcaaacttggcctcacggtttctgggcaccagaaaaagagttgggttgcatagcctcacctctagaataattggaccctttaat

SEQ ID NO: 53685 - DNA, 439 bp, Glycine max
  Clone ID: LIB3109-035-Q1-K3-F6
ggaggataatcaataaacttaaacttatgttatggcattctaactctgaacgatgaaatgaaatggagttccaagataagcgtttatctctgagatcgagcttgacgttcagcgagacgctgtgcgcagtgttcattccgttcataggaatagtcgaagctttggttttcacattcactagttgcttcgatttccaatctcccaggaataagaagaaacattcttctaccttcgacgacattctcaccctcgccgaggattctccatttagtattaatgaaatcgaggccttgcgtgagttgttcaagaagttgagtagttctatcattgatgatggcctcatccacaaggaagaactcacattggcactgttgaagaccaccaccggggagaatcttttccttgacaaggtgtttgatgtctttgatgaaaaaagaaa

SEQ ID NO: 53686 - DNA, 428 bp, Glycine max
  unsure (1)..(428): unsure at all n locations
  Clone ID: LIB3109-035-Q1-K3-G1
ggatactagaacctgcagatcgtgatgctgttttggccaatgttgccatcaagaatggcaaaaactacaatgtcattgtggaaatcgccactatcctctccccggaagagcttttggccgtgagacgtgcttatctcaaccgctacaagcactccttggaagaagatgttgcagctcatacctctggccatctacgccagcttttagtggggttggtgacctcatataggtatgttggtgatgagatcaatccaaaattggcacaaactgaggctgaaattcttcatgatgctgtgaaagagaagaagggtagctatgaagagaccattaaggtcttgaccacaaagagcaagacccaacttgttgcaactttcaaccgctacagagagatccatggcacttncatctctaagaaactggtggatgaa

SEQ ID NO: 53687 - DNA, 392 bp, Glycine max
  Clone ID: LIB3109-035-Q1-K3-G2
gacttcaaagtggagaaaaacacacacggttgggtcattctctctcttttctttgtcctcaaaaagttgaaaaagaataaagggggaacaatcgagtgaagttgttgctcttcaatagtaaacttacctatggaagagggaagggttgtgagtgagtacacaaaagatggaactgtggatcttaaagggaaacccattctcaaatccaaaagtggtggttggaaagcatgctcctttgttgttggtatctctctctctcactataaattttatatggtcattttcatcttggtttggacattaatttcaaaagcaatttcccaaaacattggaagcttcatgatggtttgttaacaaaaatcttaatttcctctgatcgaaagacattggtc

SEQ ID NO: 53688 - DNA, 354 bp, Glycine max
  Clone ID: LIB3109-035-Q1-K3-G4
ggaggaagccacatagagacacaatacagagtgagttgttgctccttcgtcacaactctctgccaacatgggtatcttcagagattctatgcacaagaggcgtgccactggtggcaagaagaatgcctggaggaaaaagagaaagtatgagcttggtcgccagcctgctaacactaagctgtcaagcaacaagacagtcaggaggatccgtgttagaggtggaaatgtgaaatggagggcattgagattggatactggaaattactcctggggaagtgaagctgtgacttcgaagactcgtgtactagatgtggtttacaatgcctcaaacaatgagcttgtgcgtactcagac

SEQ ID NO: 53689 - DNA, 262 bp, Glycine max
  Clone ID: LIB3109-035-Q1-K3-G6
ggattgagaaggaatgagaatggggggaggtttttgtctgatgatgttggtaggtctagcaatctatggcgagggcaatggcaatcttctcgaacgaattatgggaggaatggagcggatggtgatggcagaatgaggaagaatgtgaatgggataatgtttttgtccaataatgttgatcggtctagcggtggagaacagtcttctcctttgaattatggcggggatggaatggatggtgatggtagattgaggaggaatg

SEQ ID NO: 53690 - DNA, 435 bp, Glycine max
  Clone ID: LIB3109-035-Q1-K3-G7
ggccttaagaatggtgatattgaagttacttgggctgatgggatggtatcaatggttggaccccaagcaatctatgtggttggtcgagatgacgatgatgaatcaattgctgctgggagtgaaataagtgatgctgcaagctgggaaactgttaatgacgatgaaatggaagtccttgaggattccagagaggatattgagagggaaaattcaagcagtgttacttctgaggcagaagaaagtggatagaatgattttggtaggactgcagctctgtctgttcccctagcatcatttcgatttggcactagacttgccagtggaatattcttaagaggctcaatgaacttggattctatttccttggagataaaagcttaacgtgaacatccatcacctgtagttaatgatgagtctacttcacagaaacatatt

SEQ ID NO: 53691 - DNA, 233 bp, Glycine max
  Clone ID: LIB3109-035-Q1-K3-H1
gggggaattgactagtgcggcgcgctcctattatcaccgtagacggcggatgtggcggtggtggtgtagacacggcgtgactgcgatctcttgagataaatgttggttgaaagaggaagaagaagaagagttgtattggagaatgagccaaccaacggtgatacttgccactgcgagctatgatcacactattcgattttgggaggccaagagtggccggtgctaccgcacca

SEQ ID NO: 53692 - DNA, 373 bp, Glycine max
  Clone ID: LIB3109-035-Q1-K3-H2
gaaagaagagaaaataataatatgaataacaacccacaaaacttgggtcttgcaaattaagttcattttcctccctttcactctcgtagacatcacaaaccttccctccattcatcccacgcatggctgccatgaactctagcgtattggcctgtagctatgccatatcaggtgcagcgtgttcggagctcaatgggaaggtcacttccgtggcctatgttgcatgctctggctacaagttgccattgatcaaagctgaggccagagttcctaaagccaaagaatctgaaggaggaaggagatgtgcccttgttctcttggcagctacccttttcacctctgcagcttgcaattcttctggcaatgctgggat

SEQ ID NO: 53693 - DNA, 375 bp, Glycine max
  Clone ID: LIB3109-035-Q1-K3-H3
gggcaaacaagtagtggaaagacatacacgatggttggaataactgaatacgctgttgcagatatttttgactatatagagaggcatgaagaaagagcatttatattgaagttctcagcaattgaaatttacaatgaagttgttagagacctcctcagcactgacaacaacactccacttagactacgtgatgatcctgagaaagggcccattttagagaaactcacagaggagactctacgggactgggagcatttaaaagagcttgtagcgcttcagtgaagcttagagacaggtgggagagacatacctaaatgaaaagagttctagatctcaccaaatcatcagattgacaatggagaggtcttggcagga

SEQ ID NO: 53694 - DNA, 354 bp, Glycine max
  Clone ID: LIB3109-035-Q1-K3-H4
gagcgagggaagggaagcatctttagctccaatggcggatacctcaggtcgatccagggacctcgacaagctccttctgcgccctggcaatctcgtcggtcccaggttcgaaccaggcgctgagttgcgagatgaccttcaggccttcagcaaagtgttggtggtaggggccggtggcttaagttgagagttgttgaaggatttagccctatttgggttccgaaaccttgaggtcattgatatggatcgcatagaggtgtactaatctcaaccgtcaattcttgtttagactgtgaaattgtgtgatacccaaatccgatgtagctgacaagcgtgtcatggagagaattactg

SEQ ID NO: 53695 - DNA, 400 bp, Glycine max
  Clone ID: LIB3109-035-Q1-K3-H6
ggcagatgtgaatgtgagagacacccatgaatgacagaatgaaatgaactgagtaacaccaacgctgctttcttcattctttcattcattcgaatgtgttcttttgcgattgaatttgagggaacaataatcgattttcgctttctgggcacccctgaattcccctgcatcgctgtgaaagtagttcagttcgaacaacgaaaacgatgtcggctcgattgatgaagaacgttctgaacgagcagcatcacctttccgaaacacgtgagcgaagaagacgaggaagaatagaacgattctgagcccatcactcgttcctgcatcaaccccttcgacctcctaaacgacaacgattctgagcccgaggaacaaggagatgaagtgatggccaccaatgaaa

SEQ ID NO: 53696 - DNA, 424 bp, Glycine max
  unsure (1)..(424): unsure at all n locations
  Clone ID: LIB3109-035-Q1-K3-H7
aggaacagcaatgaataagaggcagagaagagcacgaagaatgctttcgtgaaggtgagcatggatggtgcaccgtatctacgaaaggtggacataaagttgtacaagagctaccaggagctgtcagatgcgctggctaagatgttcagttccttcacgattgaaaagtgtgggtcccaagggatgaaggattttatgaatgagaccaatggctctgactatgtacccacatatgaagacaaggacggatactggatgctcgtcggtgatgtgccctgggagatgttcgttggatcatgcaagcgtcttcgcataatgaaaggctccgaggcaatcgggcttgcgccaagagccgtggaaaagtgcaagaacagaagctgaagaagtgatttcatctgcgtcacaatgaancaaattgactcga

SEQ ID NO: 53697 - DNA, 333 bp, Glycine max
  Clone ID: LIB3109-035-Q1-K4-A10
ggcagcataaagtagcaaagtcttgcaggccacaatgcaaaactttgcagaatctcatcaactttcagttatgtgttcttcttattcatctaatgttgatgtctttgacactggcaagtacaccgccaagctgctaagggttgaatctgaatcagaatcatatacacacaacaacaattttccaccaccaccaaagtctctcttgattgccactcctcttgaaggtggagatttccctcttctgccgcttctgcatggctatcttctttacaattcattttactcccagctaataccacatggtgcttctcatgggttcattggcattgcccc

SEQ ID NO: 53698 - DNA, 289 bp, Glycine max
  Clone ID: LIB3109-035-Q1-K4-A11
gattatcaatggatgctagaattgaaaatgtccatgctggaagctcagcagatggtatgacaaggggtcttggttctgagaaaaaacgacatagtgtgtctggttttactcctcaacatgctaattcacaagccactgaaaagattaggatgagcgagaggcagattttgggtataaaccgtacaaaaattgaagagatatggttagaggtgcttgagaggatacaaattactggtctgaaagagtttttgtttaaagaaggcaagctgatctctgttagttttggggc

SEQ ID NO: 53699 - DNA, 270 bp, Glycine max
  Clone ID: LIB3109-035-Q1-K4-A12
cacaatgcattgaactaaggatttgatatcccatttcattcttggtctagcagtattagggatgttttttgtacttggggggaatagtatataaaatttacagatcttgtgtgtcggtggttacctagtttacagcaagatctttgattccctaatacttgttctgtatattgtattagttaaccatagttctgctcctgttgatgctatgctgtatgtaaatcacgaccacttgtactgctttcactattatttataatatatatctag

SEQ ID NO: 53700 - DNA, 395 bp, Glycine max
  Clone ID: LIB3109-035-Q1-K4-A2
ggcagttcaattgatcaactcagatttcagggacctaagtctagctgctaatagactcgcccatcatgccatcaaacttggtggcattggctttggagcctcttttttcggattgtttgctgccattgctgctatttatctgttgattttggatcgtacaaactggaaaacaaatattctcacagcactactcattccatacattttcttcagcttgccttcattaattttcgacgtcttcaggggagagcttggaaaatggattgctgcagttgctgttgtattacgccttttccttccaagacacttccctgattggctggaattgcctggtgctctgattcttcttatcgttgtagctccttctctaattgcaagcacctttagagacaaca

SEQ ID NO: 53701 - DNA, 408 bp, Glycine max
  Clone ID: LIB3109-035-Q1-K4-A3
ggataataataaaaacactcgtgccgcaccttcgtcttgcccaatgcttctttccacacgcatctcggaagcccttctcttcatcacatagatactttcgctatcgcaccaagtaacccttattattccaatccaccctcgccactccttcgatccgaatcatcttttccgcccacacacaagttgggtttttttgatataattgataatgggtgatagcagtgttccatctgggtctccaaatgcaaaatcagatcttgttgacagagacttggcggtttccaacaacgcgtcgtcgttggaaaccattgtgcaaagtttccaagattcaatgtctcttggtaagagacacaagttctgggaaactcagcctgtggggcaatacaaagatgttggggactcaagttt

SEQ ID NO: 53702 - DNA, 393 bp, Glycine max
  Clone ID: LIB3109-035-Q1-K4-A4
ggagcctagtagtaatagtgaactggagtgatgctcaagtgtgttgtgtgtcagtgttttagggaccaatggtggagagtgagttttctgagttaagatataagatatatgctatctaatgcctagtgggatataggaaaggacctcaaatctgctatctttcgttcacatacgcatcatattcttttaattgttagttctgagttctgaccaaagttgttgatttgagtgtttttagcatatttggggtgtctgcaaacaccgcaggaattttgctttttctattgaattagattcctctgggaattcaattctgattcttccttagttttcggctttctggctttctttttttccttctatttatattttggggtggttttctggtgagtc

SEQ ID NO: 53703 - DNA, 403 bp, Glycine max
  Clone ID: LIB3109-035-Q1-K4-A5
gacaatcaatcttctttatccactctctcttaattaaattaaaacaaaaaatgtgcgctgccatatccgaagtggaacaagaagagttgctcgaaaaattggaggtgttcaagatcaaaggcagggacaagcatggccgcaagatccttcgcattatcgccaaattcttcccaggtagattgattaattaattaattaaatccctaattcctttttttttatgtgcatgaattttttaaatcttcggtaattgtttgaattgaggacagcacggttggtgagtgttgaggttctgaaaaagtacctggaggagagggttttcccgaagctgatggggaagaggaaattcgcggtgctgtacgtgcacaccggcgtccagaggagcgagaattttcccggaatc

SEQ ID NO: 53704 - DNA, 398 bp, Glycine max
  Clone ID: LIB3109-035-Q1-K4-A6
gagagaaagagagagaaagatgtcgaagcgtggtcgtggtggttcggcggggaacacgttccgcatgtcgctgggtcttccagtggcggcgacggtgaactgcgccgacaacacgggggcgaagaacctctacatcatttcggtgaaagggatcaaaggccgtttgaaccgtcttccctcggcctgcgttggcgacatggtgatggccaccgtgaagaatggaaaacccgatctgaggaagaaggtcttgccagctgtcatcgttcgccagcgcatgccatggcgccgaaaggacggcgtctacatgtacttcgaagataatgctggtgttattgtcaatcccaacggagaaatgaaaggttctgctatcactggtcccattggaaaagagtgtgctg

SEQ ID NO: 53705 - DNA, 392 bp, Glycine max
  Clone ID: LIB3109-035-Q1-K4-A7
gagagcgagaaatattatagtagctctgcgtttttggggtatcattattcaaccacccattttctctcttcttcttcttccattgagaaaattctctttcatcgtgtgtgatcggtgagatgtacgtagcttccatgcgcaagtctttcaaggactccttgaaagtccttgaagctgatatccagcacgccaataccctggcttcagattttccaagggagtatgatggtgcatgccttcagatgagaatgtcatacagtccagctgcacacctgtttcctttcttggtgcaatggacagattgtcatcttgctggagcccttggactgttaagaatcctaatttacaaggtctatgtggatgggacaaccaccatgtctacacatgaaaga

SEQ ID NO: 53706 - DNA, 243 bp, Glycine max
  Clone ID: LIB3109-035-Q1-K4-A9
ggaagatgaaagggaagaagaacaccatgaccaaaaacgacgttgaagacgacggagctccggttccttcaccaacagtatccgattccgactctgattacgaggactcttcagcagatgacgacgacaaatcttctgactcgctggattctcaatctgaatcggaattagaagatgcttcacctgagaatggtggctccggcgatgtagaatctgcagaagatgaggacactgtcaatgatg

SEQ ID NO: 53707 - DNA, 429 bp, Glycine max
  unsure (1)..(429): unsure at all n locations
  Clone ID: LIB3109-035-Q1-K4-B1
tggggcatcgaacagagagagagagaatggcagccctgggtgggaatcatgatgtgccaggaacccagaccagcgttaaaatcgttcctctacctcgctttgctgttgaagaacacaacaaaaaacagaatgcccttttggagtttgaaaaggtggtaactgcgaaacagcaagtggtttctggtaccttgtacaccatcactttggaggcaaaagatggtgggcaaaagaaggtttatgaagccaaagtttgggagaagtcatggttgaacttcaaggaggtgcaagagttcaagcttgttggagatgcacctgcatagtctagtgcttaattaggttgctgaagagtgaagaatgagacagcctggttcgaaggggaaaagcctaaggatatatcanaggatcctatatgtataaaataaatgttgc

SEQ ID NO: 53708 - DNA, 402 bp, Glycine max
  Clone ID: LIB3109-035-Q1-K4-B10
ggcagcataaagtagcaaagtcttgcaggccacaatgcagggctttgcagaatctcatcaactttcagttatgtgttcttcttattcatctaatgttgatgtctttgacactggcaagtacaccgccaagctgctaagggttgaatctgaatcagaatcatatacacacaacaacaattttccaccaccaccaaagtctttcttgattgccactcctcttgaaagtggaaatttccctcttctggcgcttctgcatggctatcttctttacaattcattttactcccagctaatacaacatgttgcttctcatggcttcattgtcattgcccctcacgtgtacacagtggctggaccagatacaagtgatgagattcattctgcagctgcaataacaaactg

SEQ ID NO: 53709 - DNA, 347 bp, Glycine max
  Clone ID: LIB3109-035-Q1-K4-B11
gggatgactatgctcatgggaaaggagtttatgtttctgatgatgcattggtcaggtatgaaggtgaatggtttcaaaacgatgtggagggtcatggtgtagttgaagtcgatatacctgttatagaacctgctcctgggtccaagcttgaagcaaagatgcgagctcaaggaaagataatagcaagggattttctgtccccataagacagagaatggcttgagaaggatattgaagatatgtattatcttgcagatgggaactatgaaatccccttttatgagaatgaggaatgggttacgcaatttggaagaaagccggagaaaggtcgctatcgttatgctggc

SEQ ID NO: 53710 - DNA, 429 bp, Glycine max
  Clone ID: LIB3109-035-Q1-K4-B12
ggatgcagagaaggtactagtttagtgtcacgaaaataagccgcagacgcaaacgtgaaaacacagacaagacgcatacgtccgtctcaacgtgtttgagattataaagacttagtggaagggtaagctgaagttgaagagttgaggggaaaacaagcagtgaaggaggttgaggtactcaataaagttttgatttgtttgaattggggggcttgttgccaatgttggatacagttgtatgtgctagaaacagtcaacagtcgcttcataaggtgaagttgacattctagtagtggaaagggccagagtcgagatgattatatatgtttgatttgcctctacacactggcaatccttaagtctgacagatgggcttttataatgaagaagagaagactgaagactacctcttcaagattgttttaattg

SEQ ID NO: 53711 - DNA, 435 bp, Glycine max
  Clone ID: LIB3109-035-Q1-K4-B2
gacggcgatgatgatgcaaatcaacatcacctccaccacctcaatcgtcacggcgttctcttcggatcattccccgaatgttctaccttgagccatgtccaacctcgttcagattcgcgtcgccgccgacgctagcgatggcttcgactctccggcgaagcagaaagcagccaaccgcagctcctacagcaatcgcccctttctctccctccgccgcgccaaacagttcctcggcgccgccaagttcaagctcttcttagttctttttgctctctccatcgtcgtttttgtctcctccagactcagttcgtggatgggatggaaccctcaccactcctcttcggtttcctccacttcaaggggtggctatactgtgcttataaacacttggaggcataaatctcttctgaaacaaactgttgctcattatgcatc

SEQ ID NO: 53712 - DNA, 422 bp, Glycine max
  unsure (1)..(422): unsure at all n locations
  Clone ID: LIB3109-035-Q1-K4-B3
gatgggagaatcttattgtcaaggagttttgatggttcattgaaggtttgggatctgcgcaaaacaaaagaaccgttaaaagtatttgaggatctgccaaatcactatgcacaaacaaatattgccttcagtcctgatgagcgactctttttgactggaacatctgtggaaagggagagcatgacaggaggtttattgtgcttctttgatagagtaaatcttgagcttgtttcaaaagttggcatatcacccacttgtagtgttgttcagtgttcttggcatcccaaactgaatcacatctttgcaactactggtgataaaagccaaggtgggactcacatactatatgatccaaccgtaagtgaaagaggagctctcgtatgtgtngcacgtgcaccaaagaaaaaatcaattgatgactt

SEQ ID NO: 53713 - DNA, 400 bp, Glycine max
  unsure (1)..(400): unsure at all n locations
  Clone ID: LIB3109-035-Q1-K4-B4
caaggacacgaggtggatatatatgagtcaaggccttttattggtggcaaagttggttcttttgttgacaaaggtgggaatcacattgaaatgggattgcatgttttctttggttgctacaacaatcttttccgattgatgaagaaggtgggtgcggataacaatctacttgtaaaggatcacactcacacttttgttaacaaagggggtcaaattggagaactagattttngcttnccaattggggcaccaatacacgggataagggcgtttttgtccacaaatcagcttaatacttatgataaggctagaaatgcttgggctcttgcactcagtccagttgtcaaagctcttgttgatccagatggtgcactgagggacataaagaaattggatagta

SEQ ID NO: 53714 - DNA, 426 bp, Glycine max
  Clone ID: LIB3109-035-Q1-K4-B6
gacagtattcaagatcggggaatcaatcaggtttatataattggaggagatggaactcagaagggtgcatctgcaatttttgaggaagtcagaaggcgtggtctcaaagtttcagttgtaggtatccccaaaaccatagataatgatatcccggttattgataagtcctttggctttgacactgctgttgaggaggctcaactagctataaatgcagcacatgttgaagctgaaagtgttgaaaatggcataggtgttgtcaagttgatgggtagaaacagcggatttattgcaatgtatgctacacttgcaagtcgagacgtggactgttgcttaattccagagtcacccttttaccttgaacgtcctggtggactctatgaatatatagagaaaagcctcacagaaaatgggcacatggttatc

SEQ ID NO: 53715 - DNA, 333 bp, Glycine max
  Clone ID: LIB3109-035-Q1-K4-B8
gtctgaaagggaaaaaaaaaaaaatcgcatcagattctggataaaaggttacctctttcaattttatccctggttgtgagcttaattcaatttctgctcacacataatggcttgcacgctcgctgattcattactcctattcaagggttcttatcataaaccagttctgaggagagacattgctgccctgtactccccgggtttatttagactaaacagcaatgggcttatacagaaaaggttcaagcgtgaaacgaattttgttactacgaatacggttactgtcatacatgccgtggcaattccagtacaaccagctccggtggaaagtgc

SEQ ID NO: 53716 - DNA, 113 bp, Glycine max
  Clone ID: LIB3109-035-Q1-K4-B9
gggggggaacggaatcgcccatccaatcgaaaccctagtgggtgactgcgaggcgcactggaatcatccaccctatgaatctatgtgcactgaagaagtggactaaatgacca

SEQ ID NO: 53717 - DNA, 406 bp, Glycine max
  Clone ID: LIB3109-035-Q1-K4-C1
gacacgtgcgagtgatcaaatattaagaagaggttatggatgtttttaaggtttttcacatgcttgtcttaaaacaattttccagcaaaatccaaatccttcgttctggtaatggcacagaatacatgtctaaaagcatgacacagtatttaaattctcatgtatcaagaggggatgttccttttgtttgatttttcttcttcttgccaaactatggcagaacatcattcttcttcgcatatattgccttcaggagctacacgttttcctggcgtgccttttgcagtagctacaggttccactagtgtggctgttggaatagaatttgagtctaatcctaatcaatgattgagctctgttgtactaaatgagttcaattaccctacttggtcaaaagccataactc

SEQ ID NO: 53718 - DNA, 378 bp, Glycine max
  Clone ID: LIB3109-035-Q1-K4-C12
gacggacgagggtttcgtttcgggtttgacgttgttcacggtcactttctgcgcttcactcactcccttcgtgcggttttctttctttgtcgaactcgtgcgaaaatgcgtgagattcttcacatacagggagggcaatgcggaaaccacatcggagcgaacttctgggaggtggtgtgcgcggagcacggcatcgattccacggggaggtaccagggggacaacgagttgcaactcgagcgagtcaacgtctattacaatgaagcgagttgcggaaggttcgtgccgagggcggtgctcatggatctagagccagggaccatggacagcgtcagatctggtccctacggtcagattttccgacctgataacttcgtc

SEQ ID NO: 53719 - DNA, 378 bp, Glycine max
  Clone ID: LIB3109-035-Q1-K4-C2
ggagtgagtgagagaaagaagagaaggagttgaagtggttgttgtattgtagtagtgtgtaaagtcttggtgatggatagacacaaatgcaagctttgttcaaggtctttcagcaatggcagagcccttggtgggcacatgaaggctcaccttgcttctctccctctccctctccctccaaagcttcactcttgcttctcttcctctgactcagaacaagaacaatctttaagggagaatcctaagaaaaccttgaggattctggatcctgaagacagagagagcgagacagagtctaataagaacccgactcgtcaacgatccaagcgcaactggaaatctaccatgcccaagctcagcctcggacaccccgaagcc

SEQ ID NO: 53720 - DNA, 416 bp, Glycine max; identical to SEQ ID NO: 53545
  Clone ID: LIB3109-035-Q1-K4-C3

SEQ ID NO: 53721 - DNA, 423 bp, Glycine max
  unsure (1)..(423): unsure at all n locations
  Clone ID: LIB3109-035-Q1-K4-C4
gggttcaaagtctagtaataaaaagagaaaagctttctcagataagccaacttcaaggccaatgaattcccaaaagatgagtgaatttagtactacgcctatggacgatgaattggatgttgttgatccagtgggtcagaaacccaagagacccaagaggataaagaagaatgtgaatgaaaagtttgaagatgcttttactgggattgctgccctgatcccagagcagacccaatttccacctccaccaagcgattttagtgccgggggttctaaagcagaatcaggccaagacaactgaagacatagtgattcttaaccactacaaaaactttggagttactattctcagccctatggattgactnttttgtggagactgctaagttggctctctgttttataacagtttctagttcccta

SEQ ID NO: 53722 - DNA, 378 bp, Glycine max; identical to SEQ ID NO: 53664
  Clone ID: LIB3109-035-Q1-K4-C5

SEQ ID NO: 53723 - DNA, 191 bp, Glycine max
  Clone ID: LIB3109-035-Q1-K4-C6
ggtttttgcaaagtcacaaagagttggggtgtctgttatatcggaataatgtctcacgtctttgcaaaagatactcacatttgcgagctgtgttcaaggccatgcaacggtggcagagcccttggtgggcacatacaacgctcaccttgcttatcttcctgttactctaccttcaaagcttaactcttgct

SEQ ID NO: 53724 - DNA, 425 bp, Glycine max
  unsure (1)..(425): unsure at all n locations
  Clone ID: LIB3109-035-Q1-K4-C7
gaacacactcatccaaacaaccttctttctttttctgtgagcctttctttcaggttcttaacttgatcagtgtgcagtgtccaaatcataagggtagctgcaaattgcaatggctaagcatgatgttgagggtggttccttctctgcaaaggactaccatgatcctcctccagcaccgttgattgatgctgaggaactcacacagtggtccttctacagggctttgattgctgagttcattgccacaatgctcttcctttacatcacagtgctcactgtgattggttacaagagccagagtgatgtaaaggctgggggtgatgtgtgtgggggagttggcattcttggcgttgcttgggcctttggtggcatgatcttcattctggtgtactgcactgctggaatctcanggggtcacataaacc

SEQ ID NO: 53725 - DNA, 416 bp, Glycine max
  Clone ID: LIB3109-035-Q1-K4-C8
gggatttccaaagtttttaatagaggggaagtctcaaaaaatcgaagaattacagacgaatatgcaaaaaaaactgaattgtgtgaatcgaaaactaaacattgctattgtaaaagttgcaaatgcttataaacaccctaatattattgcagaatttatagctggacaattaaagaatagagtttcgtttcgtaaagcaatgaaaaaagctattgaattaactgaacaggcgggtacaaaaggagttcaagtacaaattgcaggacgtatcgacggaaaagaaattgcacgtgttgaatggatcagagaaggtagagttcctctacaaaccattcgagcgaaaatcgattattgttgctatacagttcgaactatttatgggggtttagggatcaaagtttggaaattttctaaat

SEQ ID NO: 53726 - DNA, 319 bp, Glycine max
  Clone ID: LIB3109-035-Q1-K4-D1
gaagatggagatgtatcagatctggagcaggagaatagcgttgggagcgttcgcgtttgttctgcttttcctatcggcctcagcagacgacgtcgttgtgctctctgaagataacttcgagaaggaagttggtcaggacagaggagctctcgttgagttctatgctccttggtgtggacactgcataaagcttgctccagaatatgatatgcttggtagcagcttcaagaaagccatatctgttttaatcctcaaggatgactgtgatgagcacatgagtctgtgcagcaaatatggagtctctgggtacccaacaatt

SEQ ID NO: 53727 - DNA, 395 bp, Glycine max
  unsure (1)..(395): unsure at all n locations
  Clone ID: LIB3109-035-Q1-K4-D10
ggtgcaatgaaaccatctatatttataggcatttatgagtgacagtagaaccacgttttgcttcctaatgtttattattattatacttatattgtaccattcctcttgagcctagtagtaatagtgaactggagtgatgctcaagtgtgttgtgtgtcagtgttttagggaccaatggtggagagtgagttttctgagttaagatataagatatatgctatctaatgcctagtgggatataggaaaggacctcaaatctgctatctttcgttcacatacgcatcatattcttttaatcgttagttctgagttctgaccaaagatgttgatttgagtgtttntagcatatttggggtgtctgcaaacaccgcangaattttgctttttctattgaa

SEQ ID NO: 53728 - DNA, 313 bp, Glycine max
  Clone ID: LIB3109-035-Q1-K4-D11
gggagctgtagcagtaccagtaccagcactaccagctcaacaagcaacagcaacagtggtgctagcagcagtgtatttgcaagcttgtttgcctcatcatcagcatccgcaactgcaagcctccactctcaaacaccagcattcactgacctaattagggccatggggcatccggatcatccagcagacctctcaaggccttcatcttcagagcccatttctctgtgcccagccaccaatcatggctcatccatttttggaacgggaaggcaggaacgccgtcagtatgccccaccgccacagccagccatgt

SEQ ID NO: 53729 - DNA, 406 bp, Glycine max
  Clone ID: LIB3109-035-Q1-K4-D12
gggctttgaggttggagtgtttttccaagaatggaactgcgggtatctacgtgaggcccattagtggcataaacattctcgctgatcttgacacaatgaagattgttgagtaccatgataacgttgttgagcctgttcctaaggcggagaacaccgaataccgggcttcgcatttgaagccaccgttcagtccacggcttcattcttttgcctcgcatcaacccgaaggacccgggttcactatcaaaagacatagtataagctgggccaattggaagttccacatatgttatgatgtgcgagctggtgtgataatttcaactgcatcaatttacgaccctgaagtgcataagtcacgtcaagtattatacagagggtacatttctgaattatttgtgccatatca

SEQ ID NO: 53730 - DNA, 402 bp, Glycine max
  unsure (1)..(402): unsure at all n locations
  Clone ID: LIB3109-035-Q1-K4-D2
ggagcaatcgcgtgaattttcaacgggattttgcagagcttccgcgttgaaaccatccaaccctcttagcctcatattcgttgtctatacttccctccttccttcgtgtaattacatttttttcatcagcagttccaggaccaaattgatacacaagatcactgtttttttagagagagattgagagaggatgtttggttcaaagaaaactcctctgagagatgctaaacctagttctgttggccatgcccataacccctttgattctgatgaagagacacacgataaaaagtataattcctctaagaagactttgaccaacaccaacccctntgatgatgaagttgatgttgatgccactggccactcctcgtcgtcttcttatggcccttcgtcttccca

SEQ ID NO: 53731 - DNA, 425 bp, Glycine max
  Clone ID: LIB3109-035-Q1-K4-D3
cactgttgatccactatgctggtccaatgaaaacctctgaagatactccaacaaatggatctactgtgccccctggcagacgccttgttgttccactgcagatttgtgttttgcagggtttgtcttttgtgaaggctcagcttctttcaatggagtttcctgctcatgtcggtgaaactcttccgaagttggatgacttaaataacaagtctactgatgttgaatcagaaacaaaaatggacagattggtgaaaatagatcctttcagaggaagttggggactgcgattccttgaacttgagttatctaatccaactgatgtcgtgtttgaaatcaatgtctctgtcaaactggagaactctagcaacgaggacaatcattttgctgatcagggtgctacagaatatgtctatcctaaaacaaga

SEQ ID NO: 53732 - DNA, 358 bp, Glycine max
  Clone ID: LIB3109-035-Q1-K4-D4
gatattattggacatattgttgaatttagctctgatcagcatggaagtcgatttatacagcagaagttggaaagttgtagtggcgaagagaaggcattggtgtttaaagaggttcttccacatgcttctaaattaatgactgatgtatttggtaactacgtaatacagaagttttttgagtatggaagctcggagcagaggagggaacttgcagatcgacttgttggccagatactgcctttgagtttgcagatgtatggctgtcgtgtaatccaaaaggcacttgtggttattgagctcgaacagaaagctcagcttggtcatgagctagattgaaatgttatgagatgtgttcgtg

SEQ ID NO: 53733 - DNA, 383 bp, Glycine max
  Clone ID: LIB3109-035-Q1-K4-D6
ggctttttaggttattttcttaagtaaaaagaaggaaataaataattctcgtagctttgttgctcttataaattctattctggttgacgcttctctcaccatccccatttcgcgttggtgcaaagcatccttcgtttcaatttctctctctcagcgctttctgcaatcgaacctttcatctccaaagggatccacaggccgaaggagaaatggggctgacattcacaaagcttttcagtcggcttttcgcgaagaaggaaatgcgaattctgatggttggtcttgatgctgctggtaagaccactatcctgtacaagctcatgctcggagagatcgttaccacaattcctaccatcgggttcaatgttgagactgtggaatac

SEQ ID NO: 53734 - DNA, 382 bp, Glycine max
  Clone ID: LIB3109-035-Q1-K4-D7
atccggcggaattgtcactatcttcattggtatgcttatcgggtgctttgcaagccagcgtggtggcaatagtagcgactcgtcattctgggcttgtggcatgggccttaggttgggacttcaggctctatggccctctctacacggtcagtactccattccaatatttcttgtttcctggaccccaaaacctatttttgtttcatcttcaaaatctgattttcaaagcaaggtaacacacataataaataagatgaatttagtcggcacaccaaattaatttgttttctctcaatcccagcctattgaatgcaaaaggttacgaggcaagtattgtaactaaaaaagacaaattgttcactccaaaagtaaattcgttggt

SEQ ID NO: 53735 - DNA, 265 bp, Glycine max
  Clone ID: LIB3109-035-Q1-K4-D8
gatgcggaatggggaggtccagttcatgatgacaagatgctgtttgaacttttagttttgtgcggtgctcaacttgtatctgattggacctcaaccttgaagaaacgcctagatttgagggctgtattttcagaattcgatgcataaaccgtgggtaacttgactgattagcatatgatgtctattagttcggaatatggcatcgacataagcagagtacgaggagttgctgataatgctcaccaaattttatatattaagaaag

SEQ ID NO: 53736 - DNA, 407 bp, Glycine max
  Clone ID: LIB3109-035-Q1-K4-D9
ggaaagagaagcaaggagaaagagaagggttagaaggcgaagaagcatggcttcactcaagaagaagaaaccctattacccgcttccgttaattcctatctattactacttcttattcaaagggtgatatgatcttcttcttccaagagtctcatgcatgctactttcttctctcttctcggggaattgaagcgttgtggtccgattgtttgctacatcaagcaaattaacctgtatactgggttatatatcttcaccttgcacctttctctctctctctctatctctctctctctatatatatatatggggtgaatctcttactttctttatcttttcactttttttcagttttggcttgatttaattacgtgattaaaatttacatatatggatttgaatatata

SEQ ID NO: 53737 - DNA, 328 bp, Glycine max
  Clone ID: LIB3109-035-Q1-K4-E1
gatcatcatgaagttgaaggggaaccaaccacctccacgagttatctataattgatgtaaattttcccggaaagagggaacactgtaaaatattagtcttggcttctttaatgtctattttaaagtggaagacttgtgtagtaaaagggtctgcatctagtactcccaataaaagaaaaaaaagagaagcaaattccttcttccttaatttactaattaaatgaaactggtagtgtccaaataattggttttaatttttatcctatcccagtcagtgtatcataaattggtatttataacacaaaaaaataattaagaaatataaaaa

SEQ ID NO: 53738 - DNA, 376 bp, Glycine max
  unsure (1)..(376): unsure at all n locations
  Clone ID: LIB3109-035-Q1-K4-E2
ggacaaagaactcacgagtgattttgagaggctggttcatctttggacacttgattctgctgaacgtgatgcatttttggcaaacgaggcgactaaaaaatggacttcaagcaatcaggttctggtggaaatagtctgcactaggtcctctgaacaattgtttgctgcgaggaaggcttaccatgttctttataagaagtctctggaggaggatgttgctcatcacacaacaggagacttccgtaagctcatactacctctggttagttcttatcgatatgaaggagatgaggtcaacttgaccctggcaaaaactgaggcaaaattgctgcatgagaagatttcaaacaaggcttantatgatgacgacttcatc

SEQ ID NO: 53739 - DNA, 421 bp, Glycine max
  Clone ID: LIB3109-035-Q1-K4-E3
gataggcatgatatcttgtttgcaacaccctaatcttgtgaaacttcatggattttgcattgaaggggatcaattgatattggtgtatgagtacatggaaaataatagcctggctcatgctttattcagctcaaaagatcaacttaaacttgattgggcaacaaggcttaggatctgtattggcatagcaaaaggtcttgcatttctacacgaagaatcaagactcaagatttttcatcgagacatcaaagctactaatgtgttactggatgggaatttaaaccctaaaatatctgactttgggctggctaggcttgatgaagagaaaacccatgtcaccacccgaatcgctgggacaataagatatatggcaccagaatatgcattatggggttacttgtcttacaaagctgatgtttac

SEQ ID NO: 53740 - DNA, 358 bp, Glycine max
  Clone ID: LIB3109-035-Q1-K4-E4
gacggcagatcagatccattcttcaacaaatccccttttcagtttcagtttttctcgaggatcccgtgaaacgacatggcgatggtggaccagcctctgtatccgattgccgttttgatcgacgagttgaagaatgaggacattcagctgcgcctcaactcgatccgaaggctctccacgatcgcgcgcgcgctcggcgaggaccgcacgcggaaggagctgattccgttcctcagcgagaacaacgacgatgacgacgaattgctcctcgcaatggccgaggaattaggtgtcttcattccctacgtctgaggcgttgagcacgccaacgtgctttttttcttccttggagacgctc

SEQ ID NO: 53741 - DNA, 421 bp, Glycine max
  Clone ID: LIB3109-035-Q1-K4-E5
tgccttttcaagtatcagtaagaatagaagggaggaggagtctttcatatttaaaaatgtaagcataaaatgtactgaaaggctgattgtttctcagtatgttctttatgacaggtcaaatgctatatgaagcaattgctatctggccttgagcattgccacagcagaggtgttttgcaccgtgatattaagggttcaaatctgcttattgacaatgaaggaatacttaaaattgcagattttggactggcaactttctttgatcctaagcaaaagcatcccatgactagtagagtcgtgaccctttggtaccgtccacctgagcttcttctggggtctacgtcttatggtgttggtgttgacctttggagtgttggctgcattttggccgagctacttactggaaagccaatcatgcctg

SEQ ID NO: 53742 - DNA, 382 bp, Glycine max
  Clone ID: LIB3109-035-Q1-K4-E6
gaatatgaggctgagaatagcacgaagagcgcttttttgtacgcgtgattgtactgaacaccatacatactttgggtacgcgtaaacttatatatgctccccattcaatcgtggtatgcgggaaataagttgacatttatactgttaacaattgttttatccgacgtatgatcaccatgttctttataacaagtctgtagaggaagatgtttctcatcaaacaacaatagacttacgttagcgtcatactacctgtggttagttcttatacatatgaaagaaatgaagtctacctgacccttgctaaaaatgaagcgacattgctgcataaaaaaatttcaaaccaagctttttatgatgacaactttatcatgatttttgc

SEQ ID NO: 53743 - DNA, 350 bp, Glycine max
  Clone ID: LIB3109-035-Q1-K4-E7
tgaagaaggttggttacaacccatacaagattccatttgtgcccatctctggtttcgagggtgacaacatgattgagaggtccaccaaccttgactggtacaagggaccaactctccttgaggctcttgaccaaatcaatgagcccaagatgccctcatacaagccactcatgcttccattgcaggatgtctacaaaattggtggtattggtaccgtgccagtgggacgtgttgagactggtgtcgtgaagcccggtatggtggtgacttttgttcccactgggctgacaactgaggttaagtctgttgagatgcaccatgaggctctcacagaggctcttacaggtgac

SEQ ID NO: 53744 - DNA, 343 bp, Glycine max
  Clone ID: LIB3109-035-Q1-K4-E8
gatatgtatcttgttgcgaggtgtgaggtgcatagtgttgttgatgtgaacaagcaaaggtcgttccttactttgaatgcgttgaacgagtttgatcctaagtattccggcgtggattggaggcagaagttggagactcagaggggtgctgtgttggctactgaacttaagaacaatgcgaataagttggctaagtggactgctcaggctcttttggcgagtgcggatacaatgaagttagggtatgtgtcgaggattcatccccgcgatcatttcaatgatgtgattttggctgtggctggctataaacccatggactttgcaacacagattaatttgaaca

SEQ ID NO: 53745 - DNA, 363 bp, Glycine max
  Clone ID: LIB3109-035-Q1-K4-E9
gacactctaatttaaaagagtcttattgaacggtgagggtctccttggaaatccatccatgccatggctcccactcttacattcaattcatcttttttaagcaccagtcctcattcaagggtgagccttcggaattcaaggctgagagtctttgccaagaagtctgcatcattcccattatttggactatgcaagcccaaagatgattcttcttctgctgaagaaaaagataactcatccaattccaacctctttcgcttggactttggaaagataccctatgtaacgtctttgatcccatttccaaacaacacttctgcgccaggcttttcttttgtaatcacaatgcgcatggacccttta

SEQ ID NO: 53746 - DNA, 327 bp, Glycine max
  Clone ID: LIB3109-035-Q1-K4-F1
ggcacaggtggagaaagtatatatggggggaaatttgcagatgaaaatttcaaactaacacatgatggacctggcattctttctatggctaatagtggtcctaacacaaatggatctcagttctttattacattcaagcgccaacctcatcttgacgggaaacatgttgtttttggaaaagttgtcaacggaatagacattttgaagaaaattgagcaggtgggaacatctgatgggaaacctacccagccagttaaaattattgattgtggtgaagtctctgaaacaaaaattcagcatactgcagagaaggaaataaactacaaa

SEQ ID NO: 53747 - DNA, 432 bp, Glycine max
  Clone ID: LIB3109-035-Q1-K4-F10
aggtccctgaagtttggaaagttcttgacaagatccaggagttctctgagcagattcgcaatggttcttgggttggtgctacaggaaaggctttgaaggacgttgttgcaattggtattgggggaagcttcttaggtccactgtttgtacacactgcacttcaaacagaccccgaagctgttgaatctgcaaggggtcgtcagctgcgctttcttgcaaatgttgatcctattgacgtggctagaaatatcacaggattaaatcctgaaacaacacttgttgtggttgtttcaaagacttttacaactgctgagactatgctgaatgctcgaactcttagagaatggatttcatcagcacttgggccctctgcagttgcaaagcatatggtggctgttagcacaaatctcacgcttgtggaaaagtttggta

SEQ ID NO: 53748 - DNA, 412 bp, Glycine max
  Clone ID: LIB3109-035-Q1-K4-F12
ggcagttcaattccaatatattccattgtctctgtgtatttccctacctctcccttcaagatgcagatcttcgtcaagaccctcaccggcaagaccatcacccttgaggtggaaagctctgacaccatcgacaacgtcaaggccaagatccaggacaaggaaggaatccccccggaccagcaacgtctcattttcgccggaaagcaacttgaggacggccgtacccttgctgactacaacattcagaaggagagtactcttcacctcgtcctccgtctccgtggtggcatgcacatcttcgttaagacactcaccggcaagaccataaccctagaagttgaaagctccgacaccatcgataacgtcaaggccaaaatccaagacaaggaaggtattcccccggaccaacaac

SEQ ID NO: 53749 - DNA, 396 bp, Glycine max
  Clone ID: LIB3109-035-Q1-K4-F2
cacggtcagtcgttggaagaaacctgagattggttgggtgaagctgaacgtggatggttcacgcgacccatacaaaagttcctccgctggttgtggtggtgttctgagggacgcatcagcaaagtggctccgtggctttgctaaaaaactgaaccctacttatgcagtgcaccagacagagttagaagccattctcacgggcttgaaggtggcttcagagatgaatgttaagaaactaattgtggagtcagacagtgactctgtggtgagcatggtggagaatggggttaagcccaatcaccctgactatggtgtcgtggaacttataaggacgaagcggcgtcgttttgactgggaagtgaggtttgtttctgtctccaacaaggcgaatcgtgt

SEQ ID NO: 53750 - DNA, 412 bp, Glycine max
  Clone ID: LIB3109-035-Q1-K4-F3
tacagacagagttggagagttagctaagaagcatggactgaagcttcacattgatggggcccgtatttttaacgcatcagttgcacttggtgttccagtggataggcttgtccaggcggctgattcagtttccgtttgcctatctaaaggtataggtgctccagttggatctgttattgttggttccaagaattttattgccaaggctagacgactccggaaaaccttatgaggtggaatgagacagattggcctcctttgtgccgctgcacttgttgccttgcaagaaaatgttgggaagctggaaagtgatcacaagaaagctagacttttggctgatggattaaaagaagttaaaggactgagagtggatgctggttctgtggagaccaatatggtatttattgacatt

SEQ ID NO: 53751 - DNA, 390 bp, Glycine max
  Clone ID: LIB3109-035-Q1-K4-F4
gagacacgtgggtggatagcaacttagaacacaagtgaactcaaagtggaacaacccaagcttgtttcacagctcaacaacaatggcttctatctcatgcatcacccaccaccccatcacttccaagctcaataatgccttctcttcaccccacgtctctgcctcaaacttggcctcacggtttctgggcaccagaaaaagagttgggttgcatagcctcacctctagaataattggaccctctaatggctccaaagccacatgctggttcaggttcggcaagaacggtgttgatgccaaaggtgctggcatctatggcagccagggccgtgatgactttgatagagatgacgtggaacagtacttcaactatatggggatgctcgctgt

SEQ ID NO: 53752 - DNA, 408 bp, Glycine max
  Clone ID: LIB3109-035-Q1-K4-F6
ggaggataatcaataaacttaaacttatgttatggcattctaactctgaacgatgaaatgaaatggagttccaagataagcgtttatctctgagatcgagcttgacgttcagcgagacgctgtgcgcagtgttcattccgttcataggaatagtcgaagctttggttttcacattcactagttgcttcgatttccaatctcccaggaataagaagaaacattcttctaccttcgacgacattctcaccctcgccgaggattctccatttagtattaatgaaatcgaggccttgcgtgagttgttcaagaagttgagtagttctatcattgatgatggcctcatccacaaggaagaactcacattggcactgttgaagaccaccaccggggagaatcttttccttgaca

SEQ ID NO: 53753 - DNA, 425 bp, Glycine max
  Clone ID: LIB3109-035-Q1-K4-F7
ggatggagtaattcagctaacagaaagggatgaatgtgcctaccaagaaatgatcactcatcttcctctttgctctattccaaaccctaaaaaggttttggttatcggtggaggtgatggaggggtcatacgagaagtagcacgccattcttcagttgaaaagatagacatttgtgaaattgacaagatggttgttgatgtctccaaacaatacttccctgatgtagctgttgggtatgatgatcctcgtgtgacacttcatattggtgatggagttgcatttttgaaggaagttccagaaggaacttatgatgctgttatagtggattcatccgaccctattggtcctgctcaggagctttttgaaaagcccttctttgcgtcagttgcaaaggctctttgtcccggtggagttgtgtgtactc

SEQ ID NO: 53754 - DNA, 228 bp, Glycine max
  Clone ID: LIB3109-035-Q1-K4-F8
tgggttctagtgtgacattgtttgatgttggatctcgatcttcttcttttgacggtctgagttcgcgttcgttttttatatcacctgaaaatgtgtttctaccttgtgaactacggttgcggaagctcctgcaagtgcggcaacggctgctgatgctgcaacgatgtacccatacttgagctacactgagtcatcctccaccgaaaccttggtcatggtgagtggcac

SEQ ID NO: 53755 - DNA, 331 bp, Glycine max
  Clone ID: LIB3109-035-Q1-K4-F9
caaggtttaactatatggaccctctgtacgaaaccctaggggctgattccgagttggacttggatcgtgccctttaggactctatgcgcgctaaaattgacgacgagctcaccaagctcgacgaaaagattgttgatgcctaggaaaacttatgatagagtgaagatcgagaggctcatttggcaaaatacttgctttttatcctgattatggacaaggagaaagccttggtacatttgaaggtaacagaaaccaaaacagttgcatttgggcagaaaatgcatcttggtgtatatacattgcagcttagtttacttgacatggattttga

SEQ ID NO: 53756 - DNA, 350 bp, Glycine max
  Clone ID: LIB3109-035-Q1-K4-G1
ggatactagaacctgcagatcgtgatgctgttgtggccaatgttgccatcaagaatggcaaaaactacaatgtcattgtggaaatcgccactatcctctccccggaagagcttttggccgtgagacgtgcttatctcaaccgctacaagcactccttggaagaagatgttgcagctcatacctctggccatctacgccagcttttagtggggttggtgacctcatataggtatgttggtgatgagatcaatccaaaattggcacaaactgaggctgaaattcttcatgatgctgtgaaagagaagaagggtagctatgaagagaccattagggtcttgaccacaaggagc

SEQ ID NO: 53757 - DNA, 404 bp, Glycine max
  Clone ID: LIB3109-035-Q1-K4-G10
gagagaaagagatagaaagatgtcgaagcgtggtcgtggtcgttcggcggtgaacaagttccgcatgtcacttcgtcttccagtggcggcgacggtgaactgcgccgacaacacgggggcgaagaacctctacatcatttctgtgaaagggatcaaaggccgtttgaaccgtcttccctcggcctgcgttggcgacatggtgatggccaccgtgaagaagggaaaaccccatctgaggaagaaggtcttgccagctgtcatcgttcgccagcgcaagccatggcgccgaaaggactgcgtctacatgtacttcgaaaataatgctggtgttattgtcaatcccaagggagaaatgaaaagttctgctatcactggtcccattggaaaagaatgtgctgatttgt

SEQ ID NO: 53758 - DNA, 336 bp, Glycine max
  Clone ID: LIB3109-035-Q1-K4-G11
gaccgagtggaagtgaagtggtagaatagcctacaatagggaaagaaagtgttgctgctaattccatttcagtgacccctaattatgatggaggaattgaacaaaccaatggacggatcagcaaccagctggttatccgatttggaaatggatgattacaatttatttccagatgaatgtcccttggaccttgaacttgtttgatgaccaagagtttctctcacaagacattgctagtgcccttcaagaacagacacagaccttgcaacaatctttgtcttcagagtgcccttcaaaaactgtgagcaactcatccaccgatgaaaccacttttga

SEQ ID NO: 53759 - DNA, 402 bp, Glycine max
  Clone ID: LIB3109-035-Q1-K4-G12
ggacaacaaatcatgcgtttcgaatagattatcctaagtcgttggaaatagagctgcaatggcttcaagtcaggacgaggtgacccttttgggagctactgcaagcccatttgtgtgcaaggttcatattgccctcacgatgaagggagttcaatacacatatgtcgaacaaaatttgatgaacaagactgaactgcttctcaaatccaacccacttcacaagaaggctccagtgtttattcacaatgacaagcccataacagagtctcttgtgattgttgaatacattgatgagacatcgaagaacaaccccatcttgccttatgatccttaccaaatagccttggctcgcatatggtccaaattcatttatgacaatgttttttgtgcttcatgcaaatc

SEQ ID NO: 53760 - DNA, 377 bp, Glycine max
  Clone ID: LIB3109-035-Q1-K4-G2
gacttcaaagtggagaaaaacacacacgggtggttcattctctctcttttctttttcctcaaaaagttgaaaaagaataaagggggaacaatcgagtgaagttgttgctcttcaatagtaaacttacctatggaagagggaagggttgtgagtgagtacacaaaagatggaactgtggatcttaaagggaaacccattctcaaatccaaaagtggtggttggaaagcatgctcctttgttgatggtatctctctctctcactataaattttatatggtcattttcatcttgttttggacattaatttcaaaagcaatttcccaaaacattggaagcttcatgatgttttgttaacaaaaatcttaatttcctctgat

SEQ ID NO: 53761 - DNA, 280 bp, Glycine max
  Clone ID: LIB3109-035-Q1-K4-G3
ggctcctacgtggtgaagatcgccatgctgtgggggacggtgtcggtatccttaatggtgaatacgacaatgtcgaagactggcagcgccactatcctgatacccggaagacatcctttccgacagacgctcttatctaagccgctgacagtcactcattcgaagaagaagggacaggttgaacttaaggggatacacaccctcaaatactgaagggcgggacgccatgtacgctctgtggtgatgacatcaatccatagtagtatcaaactgatgctga

SEQ ID NO: 53762 - DNA, 388 bp, Glycine max
  Clone ID: LIB3109-035-Q1-K4-G4
ggaggaagccacatagagacacaatacagagtgagttgttgctccttcgccacaactctctgccaacatgggtatctccagagattctatgcacaagaggcgtgccactggtggcaagaagaaggcctggaggaaaaagagaaagtatgagcttggtcgccagcctgctaacactaagctgtcaagcaacaagacagtcaggaggatccgtgttagaggtggaaatgtgaaatggagggcattgagattggatactggaaattactcctggggaagtgaagctgtaactcgcaagactcgtgtactagatgtggcttacaatgcctcaaacaatgagcttgtgcgtactcagactctcgtcaaaagtgctatcgttcacgttgatgct

SEQ ID NO: 53763 - DNA, 268 bp, Glycine max
  Clone ID: LIB3109-035-Q1-K4-G6
ggattgagaaggaatgagaatggggggaggtttgtgtctgatgatgttggtaggtctagcaatcgagggcgagggcaaggtcaatcttctcgaacgaattatgggaggaatggagcggatggtgatggcagaatgaggaagaatgggaatgggagaaggtttttgtccaataatgttgatcggtctagcggtggagaacagtcttctcctttgaattatggcggggatggaatggatggtgatggtagattgaggaggaatgggaatg

SEQ ID NO: 53764 - DNA, 425 bp, Glycine max
  Clone ID: LIB3109-035-Q1-K4-G7
ggccttaagaatggtgatattgaagttacttgggctgatgggatggtatcaatggttggaccccaagcaatctatgtggttggtcgagatgacgatgatgaatcaattgctgctgggagtgaaataagtgatgctgcaagctgggaaactgttaatgacgatgaaatggaagtccttgaggattccagagaggatattgagagggaaaattcaagcagtgttacttctgaggcagaagaaagtggagagaatgattttggtaggactgcagctctctctgttcccctagcagcatttcgatttgtcactagacttgccagtggaatattctcaagaggctcaaggaacttggattctattcccttggagataaaagctgaacgtgaacatccatcacctgtaggtaatgatgagtctacttcaca

SEQ ID NO: 53765 - DNA, 324 bp, Glycine max
  Clone ID: LIB3109-035-Q1-K4-G8
ggaggcagagaagtaagaagaagatagccagaagtataggctaagattgtccacaacatgtggacagcatgaacatcgagtgtatagatcaacaactacctttcccttttcgtctatcagtccaaacactcttcttcttcttcttcttcttcactctacaaccactaaactaagtggttggttttggtttagattcatactttcgaagctcttaaactttaggcttaagccatggcatcctcatcctatcagcatctatctcatgcccttctggcacgtgctgtgtaccttcatggctcttcttcttctgaccgtgtgatactc

SEQ ID NO: 53766 - DNA, 328 bp, Glycine max
  Clone ID: LIB3109-035-Q1-K4-G9
ggaggtctggccttgtttaaaagaatagcagcggtgccacttgggcgggggatgatgaggaggaggaagaacatccacaacacatcaccaaacaaccttatggagatttgggccaacatgttttttcccctcatgcgtgtctggctttctctctctgctcgcctcaagcctcgcaaaaacggagcaggactgctcaagcttcatgatgatgtacagacttgtggatattaagatgtacaagtgatgtgggaaatgctactgagaaccgaaggtgaagttatagaaaaccaccataagcgcaagcctgtttccttttggaggatctttg

SEQ ID NO: 53767 - DNA, 387 bp, Glycine max
  Clone ID: LIB3109-035-Q1-K4-H1
gggggaattgactagtgcggcgcgctcctattatcaccgtatacggcggaggtggcggtggtggtgtatacacggcgtgacggcgatctcttgagataaatgttggttgaaagaggaagaagaagaagagttgtattgtagaatgagccaaccaacggtgatacttgccactgcgagctatgatcacactattcgtttttgggaggccaagagtggccgttgctaccgcaccatccaatatcctgattcgcaagtaaaccggctggagataaccccggataaacgcttcctggctgcagctggcaatccacacatacgactgtttgatgttaactcatatagtcctcaaccagtaatgagctatgattcacataccaataatgtaat

SEQ ID NO: 53768 - DNA, 314 bp, Glycine max
  Clone ID: LIB3109-035-Q1-K4-H10
tacatacacacccatattcacacttatcgtcatataaaaacgcctcatcgtcacaacaaaatttctctcaacacaaacttaacacacactctacttcatctactaccctcttaataacaacttcactcttaaaacttacataccaaacattctctatcttttaaacaaaaaaactcactactatattcctaaattatttaagaaatttgtttttaacaatatcatttacttccaaactatcatcatccacatcatgacttacttttatcataatccacacattaaaacaccactaaaaaacatccatatacttt

SEQ ID NO: 53769 - DNA, 433 bp, Glycine max
  unsure (1)..(433): unsure at all n locations
  Clone ID: LIB3109-035-Q1-K4-H11
gtgaagggaaggtgggagaaaccgggtcacagcccactatttgggtatgacttttggtaccaaccacgtcacaataccatgattagcacatcatggggtgctcctagtgcttttacaaaaggttttaacttacagcatctctctgatggattatacgggaggcatctccatgtatatagctggcctgggggcgaactgagacaaacaatggaccttggtgattcanggcttatacccttagagataaggtttttgcatgatcctgctaaagatacaggttttgtcggcagtgcattgacaagtaacatgatacgattttttaagacccaagatgaatcatggagccatgaggttgccatatcagtgaaaccattgaaagtgcaaaactggattcttcctgaaatgcctgggcttataactgattttctgattt

SEQ ID NO: 53770 - DNA, 367 bp, Glycine max
  Clone ID: LIB3109-035-Q1-K4-H12
gaagaagaagaaggttggttgattggtcccattgattccgaagagaaaagaaaagatgtttgagccacaacagctatacactcgcgcgaagaccgaggaattcgacctcgaatcaggagaaaccctctacccagggctgagcgtcggcgagaaccagctccgatggggtttcatccgcaaggtctacggcatcctctccgcgcagatcgtcctcaccaccctcgtctccgtcaccaccgttttctatactccaatcaatgacctcctcaagggcaattccaccctcctcctcatcctcctcttacttcccttcatctttttgattcccctgttgaagtaccagcagaagcatcctcataattacatc

SEQ ID NO: 53771 - DNA, 357 bp, Glycine max
  Clone ID: LIB3109-035-Q1-K4-H2
gaaagaagagaaaataataatatgaataacaacccacaaaacttgggtcttgcaaattaagttcattttcctccctttcactctcgtagacatcacaaaccttccctccattcatcccacgcatggctgccatgaactctagcgtattggcctgtagctatgccatatcaggtgcagcgtgttcggagctcaatgggaaggtcacttccgtggcctatgttgcatgctctggctacaagttgccattgatcaaagctgaggccagagttcctaaagccaaagaatctgaaggaggaaggagaggtgcccttgttctcttggcagctacccttttcacctctgcagcttccaattctt

SEQ ID NO: 53772 - DNA, 377 bp, Glycine max
  Clone ID: LIB3109-035-Q1-K4-H3
gggcaaacaagtagtggaaagacatacacgatggttggaataactgaatacgctgttgcagatatttttgactatatagagaggcatgaagaaagagcatttatattgaagttctcagcaattgaaatttacaatgaagttgttagagacctcctcagcactgacaacaacactccacttagactacgtgatgatcctgagaaagggcccattttagagaaactcacagaggagactctacgggactgggagcatttaaaagagcttctagccttcagtgaagctcagagacaggtgggagagacatacctaaatgaaaagagttctagatctcaccaaatcatcagattgacaatggagagttctgccagggaatt

SEQ ID NO: 53773 - DNA, 414 bp, Glycine max
  Clone ID: LIB3109-035-Q1-K4-H4
gagcgagggaagggaagcatctttagctccaatggcggatacctcaggtcgatccagggacctcgacaagctccttctccgccctggcaatctcgtcggtcccaggttcgaaccaggcgctgagttgcgagatgaccttcaggccttcgccaaagtgttggtggtaggggccggtggcttatgttgtgagttgttgaaggatttagccctctctggtttccgaaaccttgaggtcattgatatggatcgcatagaggttactaatctcaaccgccaattcttgttcagacttgaagatgttggcaaacccaaagccgaggtagctgccaagcgtgtcatggagagaattactggtgtcgaaattgtgccccacttttgcaggattgaggacaaggaaatagaattttacaatga

SEQ ID NO: 53774 - DNA, 306 bp, Glycine max
  Clone ID: LIB3109-035-Q1-K4-H6
ggcagatgtgaatgtgagagacacccatgaatgacagaatgaaatgaactgagtaacaccaacgctgctttcttcattctttcattcattcgaatgtgttcttttgcgattgaatttgagggaacaataatcgattttcgctttctgggcacccctgaattcccctgcatcgctgtgaaagtagttcagttcgaacaacgaaaacgatgtcggctcgattgatgaagaaggttctgaacgagcagcatcacctttcgcaacacgtgagcgaagaagaagaagaagaagagaacgattctgagccca

SEQ ID NO: 53775 - DNA, 404 bp, Glycine max
  Clone ID: LIB3109-035-Q1-K4-H7
aggaacagcaatgaagaagaggcagagaagagcacgaagaatgctttcgtgaaggtgagcatggatggtgcaccgtatctacgaaaggtggacataaagttgtacaagagctaccaggagctgtcagatgcgctggctaagatgttcagttccttcacgattgaaaagtgtgggtcccaagggatgaaggattttatgaatgagaccaatggctctgactatgtacccacatatgaagacaaggacggagactggatgctcgtcggtgatgtgccctgggagatgttcgttgaatcatgcaagcgtcttcgcataatgaaaggctccgatgcaatcggtcttgcgccaagagccgtggaaaagtgcaagaacagaagctgaagaagtgatttcatctgcgtaac

SEQ ID NO: 53776 - DNA, 423 bp, Glycine max
  Clone ID: LIB3109-035-Q1-K4-H9
gacatacacacgcatgtacaccttaatggttatatagggtggtttcttcttggtgttattcttgttctggcttgtgctttaatgcattcttcttcttcttcaaacctcttaataactactgtgccttgaatgttgggtttgagtatatctctttctcctccaaaagtagtgccacttacgtagggcatgatgatgaagaagagtgggtttgagaagatggtgatgttgcagaagaacaacatgaacaagggaagctatgatgatgagaaaccaaggagtgagacgtttttggtgaacatcaatatcattgggagtgcaaggcctattaagtttgtggtgaatgacaaaaaactttgttcttgggtcattgatactggtcttaaatcttattcccgtggaaggaagctttcttttcttggtttt

SEQ ID NO: 53777 - DNA, 479 bp, Glycine max
  Clone ID: LIB3109-035-Q1-K5-E9
gcccgacgtcgcatgcttcttccgattgacatgcatactctaagcttattttatgtctctgattatgttaatgtactatgagcattttatcaagcataggagatgcacattcatacttacctcatctataaccattatatcatgcacttattattgattactcttattaatttaatttcttattatacttttatatatttatttctttcatatttactctataaacttttgtgataattttatcatttatttttttatcatttcttttttcttttttatatattttttctttctatttttttttttttttttttatttctctatttttcttttaattttttttctttatttttttatatttttttttttttctctttttttttttttattatttcttattttattatttttttttttttttccatttataattttattatttatatatattatttttattttatatttatatttttttt

SEQ ID NO: 53778 - DNA, 281 bp, Glycine max
  Clone ID: LIB3109-035-Q1-K5-G12
gtcatggccgcaggattttcgtggtcgcggtttatgtgccagctactggtcgattcatcatgaacctgttctaatgaaccagggacagttgacaaagtgtgtgagattgtgaataaacaactggctcttactgatgataatgtaatcaacggagagtcaaaatttacagcacttgatgcttattctctagacacggttgagattgtgatgggacttgatgaatcgtttggaatcactgttgaataatataatgctcagactattgcaacagtttaagatgc

SEQ ID NO: 53779 - DNA, 326 bp, Glycine max
  Clone ID: LIB3109-035-Q1-K6-A10
ggcagcataaagtagcaaagtcttgcaggccacaatgcaaaactttgcagaatctcatcaactttcagttatgtgttcttcttattcatctaatgttgatgtctttgacactggcaagtacaccgccaagctgctaagggttgaatctgaatcagaatcatatacacacaacaacaattttgcaccaccaccaaagtctctcttgattgccactcctcttgaaggtggagatttccctcttctgccgcttctgcatggctatcttctttacaattcattttactcccagctaatacaacatgttgcttctcatggtttcattgtca

SEQ ID NO: 53780 - DNA, 432 bp, Glycine max
  Clone ID: LIB3109-035-Q1-K6-A11
gattatcaatggatgctagaattgaaaatgtccatgctggaagctcagcagatggtatgacaaggggtcttggttctgagaaaaaacgacatagtgtgtctggttttactcctcaacatgctaattcacaagccactgaaaagattaggatgagcgagaggcagattttgggtataaaccgtacaaaaattgaagagatatggttagaggtgcttgagaggatacaaattactggtctgaaagagtttttgtttaaagaaggcaagctgatctctgttagttttggggcagctccaactgtgcagctaatgttcagttctcaattgaccaaatctactgccgagaagttcagaggtcacatcttacaagcatttgaatctgtccttggatcttctataacaatagaaattagatgtgagttaaataaagata

SEQ ID NO: 53781 - DNA, 292 bp, Glycine max
  Clone ID: LIB3109-035-Q1-K6-A12
cacaatgcattgaactaaggatttgatatcccatttcattcttggtctagcagtattagggatgttttttgtacttggggggaatagtatataaaatttacagatcttgtgtgtcggtggttacctagtttacagcaagatctttgattccctaatacttgttctgtatattgtattagttaaccatagttatgctcctgttgatgctatgctgtatgtaaatcagtaccacttgtactgctttcactattatttataatatatatctagttgtgccgacctgggcaggtgc

SEQ ID NO: 53782 - DNA, 431 bp, Glycine max
  Clone ID: LIB3109-035-Q1-K6-A2
ggcagttcaattgatcaactcagatttcagggacctaagtctagctgctaatagactcgcccatcatgccatcaaacttggtggcattggctttggagcctcttttttcggattgtttgctgccattgctgctatttatctgttgattttggatcgtacaaactggaaaacaaatattctcacagcactactcattccatacattttcttcagcttgccttcattaattttcgacgtcttcaggggagagcttggaaaatggattgctgcagttgctgttgtattacgccttttccttccaagacacttccctgattggctggaattgcctggtgctctgattcttcttatcgttgtagctccttctctaattgcaagcacctttagagacaacattgttggggtggtagtgtgcctcatcattgcatgtt

SEQ ID NO: 53783 - DNA, 402 bp, Glycine max
  Clone ID: LIB3109-035-Q1-K6-A3
ggataataataaaaacactcgtgccgcaccttcgtcttccccaatgcttctttccacacgcatctcggaagcccttctcttcatcacatagatactttcgctatcgcaccaagtaacccttattattccaatccaccctcgccactccttcgatccgaatcatcttttccgcccacacacaagttgggtttttttgatataattgataatgggtgatagcagtgttccatctgggtctccaaatgcaaaatcagatcttgttgacagagacttggcggtttccaacaacgcgtcgtcgttggaaaccattgtgcaaagtttccaagattcaatgtctcttggtaagagacacaagttctgggaaactcagcctgtggggcaatacaaggatgttggggactc

SEQ ID NO: 53784 - DNA, 398 bp, Glycine max
  unsure (1)..(398): unsure at all n locations
  Clone ID: LIB3109-035-Q1-K6-A4
ggagcctagtagtaatagtgaactggagtgatgctcaagtgtgttgtgtgtcagtgttttagggaccaatggtggagagtgagttttctgagttaagatataagatatatgctatctaatgcctagtgggatataggaaaggacctcaaatctgctatctttcgttcacatacgcatcatattcttttaattgttagttctgagttctgaccaaagttgttgatttgagtgtttttagcatatttggggtgtctgcaaacaccgcaggaattttgctttttctattgaattagattcctctgggaattcaattctgattcttccttagttttcggctntctgtctttctttttttccttctatttatattttggggtggctttctggtgagtcttgac

SEQ ID NO: 53785 - DNA, 423 bp, Glycine max
  Clone ID: LIB3109-035-Q1-K6-A5
gacaatcaatcttctttatccactctctcttaattaaattaaaacaaaaaatgtgcgctgccatatccgaagtggaacaagaagagttgctcgaaaaattggaggtgttcaagatcaaaggcagggacaagcatggccgcaagatccttcgcattatcgccaaattcttcccaggtagattgattaattaattaattaaatccctaattcctttttttttatgtgcatgaattttttaaatcttcggtaattgtttgaattgaggacagcacggttggtgagtgttgaggttctgaaaaagtacctggaggagagggttttcccgaagctgatggggaagaggaaattcgcggtgctgtacgtgcacaccggcgtccagaggagcgagaattttcccggaatctccggtctccggtggatcta

SEQ ID NO: 53786 - DNA, 403 bp, Glycine max
  Clone ID: LIB3109-035-Q1-K6-A6
gagagaaagagagagaaagatgtcgaagcgtggtcgtggtggttcggcggggaacaagttccgcatgtcgctgggtcttccagtggcggcgacggtgaactgcgccgacaacacgggggcgaagaacctctacatcatttcggtgaaagggatcaaaggccgtttgaaccgtcttccctcggcctgcgttggcgacatggtgatggccaccgtgaagaagggaaaacccgatctgaggaagaaggtcttgccagctgtcatcgttcgccagcgcaagccatggcgccgaaaggacggcgtctacatgtacttcgaagataatgctggtgttattgtcaatcccaagggagaaatgaaaggttctgctatcactggtcccattggaaaagagtgtgctgatttg

SEQ ID NO: 53787 - DNA, 371 bp, Glycine max
  Clone ID: LIB3109-035-Q1-K6-A7
gagagcgagaaatattatagtagctctgcgtttttggggtatcattattcaaccacccattttctctcttcttcttcttccattgagaaaattctctttcatcgtgtgtgatcggtgagatgtacgtagcttccatgcgcaagtctttcaaggactccttgaaagtccttgaagctgatatccagcacgccaataccctggcttcagattttccaagggagtatgatggtgcatgccttcagatgagaatgtcatacagtccagctgcacacctgtttcctttcttggtgcaatggacagattgtcatcttgctggagcccttggactgttaagaatcctaatttacaaggtctatgtggatgggacaacc

SEQ ID NO: 53788 - DNA, 400 bp, Glycine max
  Clone ID: LIB3109-035-Q1-K6-A9
ggaagatgaaagggaagaagaacaccatgaccaaaaacgacgttgaagacgacggagctccggttccttcaccaacagtatccgattccgactctgattacgaggactcttcagcagatgacgacgacaaatcttctgactcgctggattctcaatctgaatcggaattagaagatgcttcacctgagaatggtggctccggcgatgtagaatctgcagaagatgaggacactgtcaatgatgaagacggtggaagtgagagctctgatctccatcaggaaggagctgagagtgattcctccgaggatgaggtggctcctcgaaacaccattggagatgtgccattgaagtggtatgaggatgagcctcatattggatacgacatcaaggcgaaaaagat

SEQ ID NO: 53789 - DNA, 357 bp, Glycine max
  Clone ID: LIB3109-035-Q1-K6-B1
ggcgttgcacagagagagagagaatggcagcacttggtgggaatcgtgacgcgacaggaagccagaacagcgttgacatcgatgctctagctcgctttgctgttgaagaacacaacaaaaaacagaatgcccttttggagtttgaaaaggtggtaactgcgaaacagcaagtggtttctggtaccttgtacaccatcactttggaggcaaaagatggtgggcaaaagaaggtctatgaagccaaactttgggagaagtcatggttgaacttcaaggaagtgcaagagttcaagcttgttggagatgcacctgcatagtctagtgcttaattaggttgctgaagagtgaagaatgaga

SEQ ID NO: 53790 - DNA, 401 bp, Glycine max
  Clone ID: LIB3109-035-Q1-K6-B10
ggcagcatattttagcaaagtcttgcaggccacaatgcaaggctttgcagaatctcatcaactttcacttatgtgttcttcttattcatctaatgttgatgtctttgacactggcaagtacaccgccaagctgctaagggttgaatctgaatcagaatcatatacacacaacaacaattttccaccaccaccaaagtctctcttgattgccactcctcttgaaagtggagatttccctcttctgccgcttctgcatggctatcttctttacaattcattttactcccagctaatacaacatgttgcttctcatggcttcattggcattgcccctcacttgtacacaggggctggaccagatacaagtgatgagattcattctgcagctgcaataacaaact

SEQ ID NO: 53791 - DNA, 442 bp, Glycine max
  unsure (1)..(442): unsure at all n locations
  Clone ID: LIB3109-035-Q1-K6-B11
gggatgactatgctcatgggaaaggagtttatgtttctgatgatgcattggtcaggtatgaaggtgaatggtttcaaaacgatgtggagggtcatggtgtagttgaagtcgatatacctgttatagaacctgctcctgggtccaagcttgaagcaaagatgcgagctcaaggaaagataatagcaagggattttctgtccccagaagacagagaatggcttgagaaggatattgaagatatgtattatcttgcagatgggaactatgaaatccccttttatgagaatgaggaatgggttaggcaatttggaagaaagccggagaaaggtcgctatcgttatgctggccagtggaagcatgggaggatgcatggatgtggtgtatatgaagttaatgagcgtatcttatatggtagattntattttggagaatatgtagatga

SEQ ID NO: 53792 - DNA, 435 bp, Glycine max
  Clone ID: LIB3109-035-Q1-K6-B12
ggatgcagagaaggtactagtttagtgtcacgaaaataacccgcagacgcaaacgtgaaaacacagacaagacgcatacgtccgtctcaacgtgtttgagattataaagacttagtggaagggtaagctgaagttgaagagttgaggggaaaacaagcagtgaaggaggttgaggtactcaataaagttttgatttgtttgaattggggggcttgttgccaatgttggatacagttgtatgtgctagaaacagtcaacagtcgcttcataaggtgaagttgacattctagtagtggaaagggccagagtcgagatgattatatatgtttgatttgcctctacacactggcaatccttaggtctgacagatggctttttataatgaagaagagaagactgaagactacctcttcaagattgttttaattggtgatt

SEQ ID NO: 53793 - DNA, 327 bp, Glycine max
  Clone ID: LIB3109-035-Q1-K6-B2
gacggcgatgatgatgcaaatcaacatcacctccaccacctcaatcgtcacggcgttctcttcggatcattccccgaatgttctaccttgagccatgtccaacctcgttcagattcgcgtcgccgccgacgctagcgatggcttcgactctccggcgaagcagaaagcagccaaccgcagctcctacagcaatcgcccctttctctccctccgccgcgccaaacagttcctcggcgccgccaagttcaagctcttcttagttctttttgctctctccatcgtcgtttttgtctcctccagactcagttcgtggatgggatggaaccc

SEQ ID NO: 53794 - DNA, 407 bp, Glycine max
  Clone ID: LIB3109-035-Q1-K6-B3
gatgggagaatcttattgtcaaggagttttgatggttcattgaaggtttgggatctgcgcaaaacaaaagaaccgttaaaagtatttgaggatctgccaaatcactatgcacaaacaaatattgccttcagtcctgatgagcgactctttttgactggaacatctgtggaaagggagagcatgacaggaggtttattgtgcttctttgatagagtaaatcttgagcttgtttcaaaagttggcatatcacccacttgtagtgttgttcagtgttcttggcatcccaaactgaatcagatctttgcaactactggtgataaaagccaaagtgggactcacatactatatgatccaacccgtagtgaaagaggagctcttgtatgtgttgcacgtgcaccaaagaaaaa

SEQ ID NO: 53795 - DNA, 401 bp, Glycine max
  Clone ID: LIB3109-035-Q1-K6-B4
caaggacacgaggtggatatatatgagtcaaggccttttattggtggcaaagttggttcttttgttgacaaaggtgggaatcacattgaaatgggattgcatgttttctttggttgctacaacaatcttttccgattgatgaagaaggtgggtgcggataacaatctacttgtaaaggatcacactcacacttttgttaacaaagggggtcaaattggagaactagattttcgcttcccaattggggcaccaatacacgggataagggcgtttttgtccacaaatcagcttaatacttatgataaggctagaaatgctgtggctcttgcactcattccagttgtcaaagctcttgttgatccagatggtgcactgagggacataaggaattttggatagta

SEQ ID NO: 53796 - DNA, 405 bp, Glycine max
  Clone ID: LIB3109-035-Q1-K6-B5
aggggaggaaagaagagagagaacaaagcacttagtgctattcaataattacgaaaaaccaacagcgagtgttgtttttgtttggtccaggctggaccagggaatgaatagagatgagaggctttcggttgaagagaactgagttaagcggcgaagccaaacgcagaatcggcggcagaaattgccaccggaagcacgtcgaagacgggtgaaccaaacacaaaattccatccaccacttctcttttcaatccccaactcaaatctgtgaagaaaatctcaatttctaaattgtaattcttagcactactgctagtagtagtaaaaaaaaacaattagaaagtagtagagtgtttttttttccgtttttcgtttggtttacttttaagatgggtgagaagagcga

SEQ ID NO: 53797 - DNA, 411 bp, Glycine max
  Clone ID: LIB3109-035-Q1-K6-B6
gacagtattcaagatcggggaatcaatcaggtttatataattggaggagatggaactcagaagggtgcatctgcaatttttgaggaagtcagaaggcgtggtctcaaagtttcagttgtaggtatccccaaaaccatagataatgatatcccggttattgataagtcctttggctttgacactgctgttgaggaggctcaacgagctataaatgcagcacatgttgaagctgaaagtgttgaaaatggcatacgtgttgtcaagttgatgggtagaaacagcggatttattgcaatgtatgctacacttgcaagtcgagacgtggactgttgcttaattccagagtcacccttttaccttgaaagtcctggtggactctatgaatatatagagaaaagactcaaaagaaat

SEQ ID NO: 53798 - DNA, 372 bp, Glycine max
  Clone ID: LIB3109-035-Q1-K6-B8
gtctgaaagggaaaatataaaaagtcgcatcctcgtctggatgaaagggtacctctttcaagttgaaccatgtggttgaagcacatatcaaggcctgctcacacttaatggcttgcacgctccctgcttcattactcctaattaagggttcttatcataaaccagctctgatgagagacattgctgcccgttactccccgggtatatttagtctaaacagcaatgggcttatccagaaaaggtccaagcgtcaaacgaattttgttactacgaatacggttactgccatacatgccgtggcaattccagtacaaccagctccggtggaaagtgcggagtatataaaacagctagctgaatactactgtttca

SEQ ID NO: 53799 - DNA, 238 bp, Glycine max
  Clone ID: LIB3109-035-Q1-K6-B9
gggtgggagtggtatcgccaatccgatggaaaccctagtcggtgactgcgaggcgcactggaatcatgcactctatgaatcaatgtgcactgaagaagaggaataactgaccaacatcagacgaaaacattgcctgctgctctccgaaaactgaaaagatagtgaagtacgcgaggctaatcagccataaattcctgatccatatccaaattatggacaccgtgatagcctaggaaca

SEQ ID NO: 53800 - DNA, 406 bp, Glycine max
  Clone ID: LIB3109-035-Q1-K6-C1
gacacgtgcgagtgatcaaatattaagaagaggttatggatgtttttaaggtttttcacatgcttgtcttaaaacaattttccagcaaaatccaaatccttcgttctggtaatggcacagaatacatgtctaaaagcatgacacagtatttaaattctcatgtatcaagaggggttgttccttttgtttgattttttttcttcttgccaaactatggcagaagatcattcttcttcgcatatattgccttcaggagctacaagttttcctggtgtgccttttgcagtagctacaggttccactagtgtggctgttggaatagaatttgagtctaatcctaatcaatgattgagctcttgtgtactaaatgagttcaattaccttccttggtcaaaagccataactc

SEQ ID NO: 53801 - DNA, 297 bp, Glycine max
  Clone ID: LIB3109-035-Q1-K6-C11
ggataactattttcatatgaaaagaacagatgtgttttcggggacataggcattcgataagcgtgaataggttcaaaacggtacatatggtaatgtgtacagatcaagacaaaatgcctcttgtaaaatctgctctttgatcaaaacttgtatccacgatgacaactaaagtgtacatactaccactctacgttatgtttccattctacaaatgctgtcttgagatccatatgtcagaaaggtattggatgtcaaatatggacatatcaatgaacttttatcagaactatacttggt

SEQ ID NO: 53802 - DNA, 428 bp, Glycine max
  unsure (1)..(428): unsure at all n locations
  Clone ID: LIB3109-035-Q1-K6-C12
gacgtacgatgttttcgtttcgggtttgacgttgttcacgggcactttctgcgcttcactcgctcccttcgtgcggatttctttctttgtcgaactcgtgcgaaaatgcgtgagattcttcacatacagggagggcaatgcggaaaccacatcggagcgaagttctgggaggtggtgtgcgcggagcacgggatcgattccacggggaggtaccagggggacaacgagttgcaactcgagcgagtcaacgtctattacaatgaagcgagttgcggaaggttcgtgccgagggcggtgctcatggatctnagagccaggaccatggacagcgtcagatctggtccctaccgtcagatttttcgacctgataacttcgtcttcgggccagccggcgcctgaaacaactgggccaaaggcactacaccgaa

SEQ ID NO: 53803 - DNA, 333 bp, Glycine max
  Clone ID: LIB3109-035-Q1-K6-C2
ggagtgagtgagagaaagaagagaaggagttgaagtggttgttgtattgtagtagtgtgtaaagtcttggtgatggatagacacaaatgcaagctttgttcaaggtctttcagcaatggcagagcccttggtgggcacatgaaggctcaccttgcttctctccctctccctctccctccaaagcttcactcttgcttctcttcctctgactcagaacaagaacaatctttaagggagaatcctaagaaaaccttgaggattctggatcctgaagacagagagagcgagacagagtctaataagaacccgactcgtcaacgatccaagcgcaac

SEQ ID NO: 53804 - DNA, 410 bp, Glycine max
  Clone ID: LIB3109-035-Q1-K6-C3
gggtcgcgagttcaagtcaacaagcctcacaagtcccgcttctcttccaaatcttctcgcaatcttcataaaacctctgtcaaggacagactcgcaatcgcaaaatcagagcgcaatgtcggcaaaggagctcgtgcagctcgaattcagagaaataaaatgatacgagatcaaaaaagagctgctgttttgaaagaaaaacgagaactcagtgggtcgagaagtcctcctcgagtgatagttctcttcgccctctgtgcgtctgtggatttagaatcacttgctgatgatctcttgtcattattatctaaagatacgtgtgtggtgctgtcaggataccgtgcttcttctgaatataggacaagaataacggtacttaaagcaccccatggtgatctactatcatgcat

SEQ ID NO: 53805 - DNA, 373 bp, Glycine max
  Clone ID: LIB3109-035-Q1-K6-C4
gggttcaaagtctagtaataaaaagagaaaagctttctcagataagccaacttcaaggccaatgaattcccaaaagatgagtgaatttagtactacgcctatggacgatgaattggatgttgttgatccagtgggtcagaaacccaagagacccaagaggataaagaagaatgtgaatgaaaagtttgaagatgcttttactgggattgctgccctgatcccagagcagacccaatttccaccttcaccaagcgattttagtgccgggggttctaaagcagaatcaggccaagacaactgaagacatagtgattcttaaccactacaaaaactttggagttactattctcagccctatggattgacttttttt

SEQ ID NO: 53806 - DNA, 364 bp, Glycine max
  Clone ID: LIB3109-035-Q1-K6-C5
gacactaaacaagttaaaagaagagcatcactgaactaacaaagcaaccctatgtcgaaggtggtttgtgtcaccggagccagcggcgccatcggatcatgggtggtcctactcctcctccagcgtggttacaccgtccatgccaccgtccaagatatcaaggatgaaaatgagacgaaacatttggaggaaatggaaggagcaaagagtcatctccatttttttgaaatggatcttcttgacatcgactccattgccgctgccataaagggttgttccggcgtaatccaccttgcatgtcctaacatcattggtcaagtcgaagatcccgagaaacagatattggaaccggcgataaaaggaa

SEQ ID NO: 53807 - DNA, 122 bp, Glycine max
  Clone ID: LIB3109-035-Q1-K6-C6
gggtttgggaaaggcacggaaggctttgctgtctggtttctcaccacgagggtgcgcaaccatttcaccatagagacgccttcttcaagcttttgccatcgaacgctaatttgatatgcttg

SEQ ID NO: 53808 - DNA, 396 bp, Glycine max
  unsure (1)..(396): unsure at all n locations
  Clone ID: LIB3109-035-Q1-K6-C7
gaacacactcatccaaacaaccttctttctttttctgtgagcctttctttcaggttcttaacttgatcagtgtgcagtgtccaaatcataagggtagctgcaaattgcaatggctaagcatgatgttgagggtggttccttctctgcaaaggactaccatgatcctcctccagcaccgttgattgatgctgaggaactcacacagtggtccttctacagggctttgattgctgagttcattgccacaatgctcttcctttacatcacagtgctcactgtgattggttacaagagccagagtgatgtanaggctggnggtgatgtgtgtggtggagttggcattcttggcgttgcttgggcctttgtggcatgatcttcattctggtgtactgcact

SEQ ID NO: 53809 - DNA, 340 bp, Glycine max
  Clone ID: LIB3109-035-Q1-K6-C8
gggatttccaaagtttttaatagagggtaggtctcaaaaaatcgaagaattacagacgaatatgcaaaaaaaactgaattgtgtgaatcgaaaactaaacattgctattgtaaaagttgcaaatgcttataaacaccctaatattattgccgaatttatagctggacaattgaagaataaagtttcagatcgtatagcagtgaataaagctattgaatcaaatgaacaggcggttacaaaaggagttcaagttcatattgcaggacgtatctacggaaaagaaattgcacgcgtctgatggatcagagaatgtagagctcctctacaaaccatgcgagcg

SEQ ID NO: 53810 - DNA, 202 bp, Glycine max
  Clone ID: LIB3109-035-Q1-K6-D1
gaagatggagatgtatcagatctggagcaggagaatagcgttgggagcgttcgcgtttgttctgcttttcctatcggcctcagcagacgacgtcgttgtgctctctgaagataacttcgagaaggaagttggtcaggacagaggagctctcgttgagttctatgctccttggtgtggacactgctaaatgcttgctccagaa

SEQ ID NO: 53811 - DNA, 397 bp, Glycine max
  unsure (1)..(397): unsure at all n locations
  Clone ID: LIB3109-035-Q1-K6-D10
ttgtgcaatgaaaccatctatatttatagccatttatgagtgacagtagaaccacgttttgcttcctaatgtttattattattatacttatattgtaccattcctcttgagcctagtagtaatagtgaactggagtgatgctcaagtgtgttgtgtgtcagtgttttagggaccaatggtggagagtgagttttctgagttaagatataagatatatgctatctaatgcctagtgggatataggaaaggacctcaaatctgctatctttcggtcacatacgcatcatattcttttaattgttagttctgagttctgaccaaagttgttgatttgagtgtttntagcatatttggggtgtctgcaaacaccgcaagaattttgcttttctattgaatt

SEQ ID NO: 53812 - DNA, 442 bp, Glycine max
  Clone ID: LIB3109-035-Q1-K6-D11
gggagctgtagcagtaccagtaccagcactaccagctcaacaagcaacagcaacagtggtgctagcagcagtgtatttgcaagcttgtttgcctcatcatcagcatccgcaactgcaagcctccactctcaaacaccagcattcactgacctaattagggccatggggcatccggatcatccagcagacctctcaaggccttcatcttcagagcccatttctctgtgcccagccaccaatcatggctcatccatttttggaacgggaaggcaggaacgccgtcagtatgccccaccgccacagccagccatgtctgccactgcattgctgcagaaagccgcccaaatgggtgcagctgcaacaaatgcctcttttcttcgtgggttaggcattgtatcatcttctgcatcaacgtcatcagttcagcaagataatttgcaat

SEQ ID NO: 53813 - DNA, 412 bp, Glycine max
  Clone ID: LIB3109-035-Q1-K6-D12
gggcctttgaggtttggagtcgtttttccaagcaatggaacctgcgaatatctacgtagaggcccattcagtggcataaacattcgtcgctgatcgttgacactaatgaatgattggttgagtacccatgataaccgttgttgacgcctgttcctaagggcggagaacaaccgaatgaccgggcgttcgctatttgaacgccacgcgttccagtcctacggcgttccattctttttgcactcgcaatcaactccgaagggacgccggcgttcacttatcgaaaggacatgagtatgaagctgggccacattggacagttgcacatagtgttatgatgtgcgagctggtgtgataatttcaactgcatcaatttacgaccctgaagtgcataagtcacgtcaagtattataca

SEQ ID NO: 53814 - DNA, 354 bp, Glycine max
  Clone ID: LIB3109-035-Q1-K6-D2
ggagcaatcgcgtgaattttcaacgggattttgcagagcttccgcgttgaaaccatccaaccctcttagcctcatattcgttgtctatacttccctccttccttcgtgtaattacatttttttcatcagcagttccaggaccaaattgatacacaagatcactgtttttttagagagagattgagagaggatgtttggttcaaagaaaactcctctgagagatgctaaacctagttctgttggccatgcccataacccctttgattctgatgaagagacaaacgataaaaaggttaattcctctaagaagactttgaccaacaccaacccccttgatgatgaagttgatgttga

SEQ ID NO: 53815 - DNA, 390 bp, Glycine max
  Clone ID: LIB3109-035-Q1-K6-D3
cactgttgatccactatgctggtccaatgaaaacctctgaagatactccaacaaatggatctactgtgccccctggcagacgccttgttgttccactgcagatttgtgttttgcagggtttgtcttttgtgaaggctcagcttctttcaatggagtttcctgctcatgtcggtgaaactcttccgaagttggatgacttaaataacaagtctactgatgttgaatcagaaacaaaaatggacagattggtgaaaatagatcctttcaaaagaagttggggactgcgattccttgaacttgagttatctaatccaactgatgtcgtgtttgaaatcaatgtctctgtcaaactggagaactctagcaacgaggacaatcattttgctgatc

SEQ ID NO: 53816 - DNA, 259 bp, Glycine max
  Clone ID: LIB3109-035-Q1-K6-D4
gatattattggacatattgttgaatttagctctgatcagcatggaagtcgatttatacagcagaagttggaaagttgtagtggcgaagagaaggcattggtgtttaaagaggttcttccacatgcttctaaattaatgactgatgtatttggtaactacgtaatacagaagttttttgagtatggaagctcggagcagaggagggaacttgcagatcgacttgttggccagatactgcctttgagtttgcagatgtatg

SEQ ID NO: 53817 - DNA, 348 bp, Glycine max
  Clone ID: LIB3109-035-Q1-K6-D6
ggctttttaggttattttcttaagtaaaaagaaggaaataaataattctcgtagctttgttgctcttataaattctattctggttgacgcttctctcaccatccccatttcgcgttggtgcaaagcatccttcgtttcaatttctctctctcagcgctttctgcaatcgaacctttcatctccaaagggatccacaggccgaaggagaaatggggctgacattcacaaagcttttcagtcggcttttcgcgaaaaaagaaatgcgaattctgaatgttggtcttgatgctgctggtaagaccactatcctgtacaagctcaagctcggagagatcgttaccacaattc

SEQ ID NO: 53818 - DNA, 374 bp, Glycine max
  Clone ID: LIB3109-035-Q1-K6-D7
atccggcggaattgtcactatcttcattggtatgcttatcgggtgctttgcaagccagcgtggtggcaatagtagcgactcgtcattctgggcttgtggcatgggccttaggttgggacttcaggctctatggccctctctacacggtcagtactccattccaatatttcttgtttcctggaccccaaaacctatttttgtttcatcttcaaaatctgattttcaaagcaaggtaacacacataataaataagatgaatttagtcggcacaccaaattaatttgttttctctcaatcccagcctattgaatgcaaaaggttacgaggcaagtattgtaactaaaaaagacaaattggtcactccaaaagtaaat

SEQ ID NO: 53819 - DNA, 367 bp, Glycine max
  Clone ID: LIB3109-035-Q1-K6-D8
gatgcggaatggggagtgtgcagttcatgatgacaagatgctgtttgaacttttagttttgagcggtgctcaagttggatctgattggacctcaaccttgaagaaacgcctagatttcagggctgcattttcagaatttgatgcagaaaccgtggctaacttgactgataagcaaatgatgtctattagttctgaatatggcattgacataagcagagtccgaggagttgttgataatgctaaccaaattttagagattaagaaagactttggttcatttgacacgtacatttgggggtttgggaatcataaaccaatctccactcaatacaagtttggccacaagattccagtgaagacatctttt

SEQ ID NO: 53820 - DNA, 407 bp, Glycine max
  Clone ID: LIB3109-035-Q1-K6-D9
ggaaagagaagcaaggagaaagagaagggttagaaggcgaagaagcatggcttcactcaagaagaagaaaccctattacccgcttccgttaattcctatctattactacttcttattcaaagggtgatatgatcttcttcttccaagagtctcatgcatgctactttcttctctcttctcggggaattgaagcgttgtggtccgattgtttgctacatcaagcaaattaacctgtatactggtttatatatcttcaccttgcacctttctctctctctctctatctctctctctctatatatatatatgggtttaatctcttactttctttatcttttcactttttttcagttttggtttgatttaattacgtgattaaaatttacatatatggatttgaatatata

SEQ ID NO: 53821 - DNA, 303 bp, Glycine max
  unsure (1)..(303): unsure at all n locations
  Clone ID: LIB3109-035-Q1-K6-E1
gatcatcatgaagttgaaggggaaccaaccacctccacgagttatctataattgatgtaaattttcccggaaagagggaacactgtaaaatattagtcttggcttctttaatgtctattttaaagtggaagacttgtgtagtaaaagggtctgcatctagtactcccaataaaagaaaaaaaagagaagcaaattccttcttccttaatttactaattaaatgaaactggtagtgtccaaataattggttttaatttttatcctatcccagtcagtgtatcataaattggtatttataacana

SEQ ID NO: 53822 - DNA, 280 bp, Glycine max
  Clone ID: LIB3109-035-Q1-K6-E2
ggacaaagaactcacgagtgattttgagaggctggttcatctttggacacttgattctgctgaacgtgatgcatttttggcaaacgaggcgactaaaaaatggacttcaagcaatcaggttctggtggaaatagtctgcactaggtcctctgaacaattgtttgctgcgaggaaggcttaccatgttctttataagaagtctctggaggaggatgttgctcatcacacaacaggagacttccgtaagctcatactacctctggttagttcttatcgatat

SEQ ID NO: 53823 - DNA, 281 bp, Glycine max
  Clone ID: LIB3109-035-Q1-K6-E3
gataggcatgatatcttgtttgcaacaccctaatcttgtgaaacttcatggattttgcattgaaggggatcaattgatattggtgtatgagtacatggaaaataatagcctggctcatgctttattcagctcaaaagatcaacttaaacttgattgggcaacaaggcttatgatctgtattggcatagcaaaaggtcttgcatttctacacgaagaatcaagactcaagatttttcatcgagacatcaaagctactaatgtgttactggatgggaatttaa

SEQ ID NO: 53824 - DNA, 357 bp, Glycine max
  Clone ID: LIB3109-035-Q1-K6-E4
gacggcagatcagatccattcttcaacaaatccccttttcagtttcagtttttctcgaggatcccgtgaaacgacatggcgatggtggaccagcctctgtatccgattgccgttttgatcgacgagttgaagaatgaggacattcagctgcgcctcaactcgatccgtaggctcttcactatcgctcgcgcgctctgctaggaccgcacgcggaaggagctgattccgttcctcagcgagaacaacgacgattactactaagtgctcctcgcaatggccgaggaattaggtgtcttcattccctacgtctgaggcgtttagcacgccaacgtgcttcttcctccctttgagtcgctc

SEQ ID NO: 53825 - DNA, 420 bp, Glycine max; identical to SEQ ID NO: 53563
  Clone ID: LIB3109-035-Q1-K6-E5

SEQ ID NO: 53826 - DNA, 86 bp, Glycine max
  Clone ID: LIB3109-035-Q1-K6-E6
gaagtagaggcagagaatagcactaaaaaggcggtcgtgtaagatgatcttttatggttcaccctaaatattcatggtgaacctaa

SEQ ID NO: 53827 - DNA, 339 bp, Glycine max
  Clone ID: LIB3109-035-Q1-K6-E7
tgaagaaggttggttacaacccagacaagatgtccatttgtgcccatctctggtttcgagggtgacaacatgattgagaggtccaccaaccttgactggtacaagggaccaactctccttgaggctcttgaccaaatcaatgagcccaagaggccctcagacaagccactcaggcttccattgcaggatgtctacaaaattggtggtattggtaccgtgccagtgggacgtgttgagactggtgtcgagaagcccggtatggtggtgacttttggttccactgggctgacaactgacgttaagtctgttgagatgctccatgaggctctcacataggct

SEQ ID NO: 53828 - DNA, 359 bp, Glycine max
  Clone ID: LIB3109-035-Q1-K6-E8
gatatgtatcttgttgcgaggtgtgaggtgcatagtgttgttgatgtgaacaagcagaggtcgttccttactttgaatgcgttgaacgagtttgatcctaagtattccggtgtggattggaggcagaagttggagactcagaggggtgctgtgttggctactgaacttaagaacaatgcgaataagttggctaagtggactgctcaggctcttttggcgagtgcggatacaatgaagttagggtatgtgtcgaggattcatccccgcgatcatttcaatcatgtgattttggctgtgggtggctataaacccaaggactttgcagcacagattaaatttgacacgacgaatatgtgggg

SEQ ID NO: 53829 - DNA, 444 bp, Glycine max
  Clone ID: LIB3109-035-Q1-K6-E9
cggacggatccaagaaaagacagaaggggacatttccatctttttatactctaacacgaacgatgagggtcacgcttggaaatccatccatgccgtggctcccactcttacatccaattcatcttttttaatcaccagtcctcattcaagggtgagcctccggaatccaaggctgagagtctttgccaagaagtctggatcattcccatcatttggactacgcaagcccaaagatgattcttcttctgctgaagaaaaagataactcatccaatttcaacccctttcttttggactttggaaagatacccgatgtaacgtctttcatcccatctacaagcaacacttgtgcgccaagcttttctttaagaaacacaaagcgcaaggaccctttaaacatgttttttttcttcgcaacctaggcatgctggtattctcattgcac

SEQ ID NO: 53830 - DNA, 314 bp, Glycine max
  Clone ID: LIB3109-035-Q1-K6-F1
ggcacaggtggagaaagtatatatggggggaaatttgcagatgaaaatttcaaactaacacatgatggacctggcattctttctatggctaatagtggtcctaacacaaatggatctcagttctttattacattcaagcgccaacctcatcttgacgggaaacatgttgtttttggaaaagttgtcaacggaatagacattttgaagaaaattgagcaggtgggaacatctgatgggaaacctacccagccagttaaaattattgattgtggtgaagtctctgaaacaaaaattcagcatactgcagagtaggg

SEQ ID NO: 53831 - DNA, 335 bp, Glycine max
  Clone ID: LIB3109-035-Q1-K6-F10
aggtccctgaagtttggaaagttcttgacaagatccaggagttctctgagcagattcgcaatggttcttgggttggtgctacaggaaaggctttgaaggacgttgttgcaattggtattgggggaagcttcttacgtccactgtttgtacacactgcacttcaaacagaccccgaagctgttgaatctgcaaggggtcgtcagctgcgctttcttgcaaatgttgatcctattgacgtggctagaaatatcacaggattaaatcctgaacaacacttgttgtggttggttcaaagacttttacaactgctgagactatgctgaatgctcgaactc

SEQ ID NO: 53832 - DNA, 387 bp, Glycine max
  Clone ID: LIB3109-035-Q1-K6-F11
aggtccctgaagtttggaaagttcttgacaagatccaggagtggtctgagcagattcgcaatgggtcttgggttggtgctacaggaaaggctttgaaggacgttgttgcaattggtattgggggaagcttcttaggtccactgtttgtacacactgcacttcaaacagaccccgaagctgttgaatctgcaaggggtcgtcagctgcgctttcttgcaaatgttgatcctattgacgtggctagaaatatcacaggattaaatcctgaaacaacacttgttgtggttgtttcaaagacttttacaactgctgagactatgctgaatgctcgaactcttaaaaaatggatttcatcagcacttgggccctttggagttgcaaagcata

SEQ ID NO: 53833 - DNA, 363 bp, Glycine max
  Clone ID: LIB3109-035-Q1-K6-F12
ggcagttcaattccaatatattccattctctctgtgtatttccctacctctcccttcaagatgcagatcttcgtcaagaccctcaccggcaagaccatcacccttgaggtggaaagctctgacaccatcgacaacgtcaaggccaagatccaggacaaggaaggaatccccccggaccagcaacgtctcattttcgccggaaagcaacttgaggacggccgtacccttgctgactacaacattcagaaggagagtactcttcacctcgtcctccgtctccgtggtggcatgcacatcttcgttaagacactcaccggcaagaccataaccctagaggttgaaagctccgacaccatcgataac

SEQ ID NO: 53834 - DNA, 424 bp, Glycine max
  Clone ID: LIB3109-035-Q1-K6-F2
cacggtcagtcgttggaagaaacctgagattggttgggtgaagctgaacgtggatggttcacgcgacccatacaaaagttcctccgctggttgtggtggtgttctgagggacgcatcagcaaagtggctccgtggctttgctaaaaaactgaaccctacttatgcagtgcaccagacagagttagaagccattctcacgggcttgaaggtggcttcagagatgaatgttaagaaactaattgtggagtcagacagtgactctgtggtgagcatggtggagaatggggttaagcccaatcaccctgactatggtgtcgtggaacttataaggacgaagcggcgtcgttttgactgggaagtgaggtttgtttctgtctccaacaaggcgaatcgtgtggctgataggctcgccaacgatgctcgg

SEQ ID NO: 53835 - DNA, 349 bp, Glycine max
  Clone ID: LIB3109-035-Q1-K6-F3
tacagacagagttggagagttagctaagaagcatggactgaagcttcacattgatggggcccgtatttttaacgcatcagttgcacttggtgttccagtggataggcttgtccaggcggctgattcagtttccgtttgcctatctaaaggtataggtgctccagttggatctgttattgttggttccaagaattttattgccaaggctagacgactccggaaaaacctaggaggtggaatgagacagattggcctctttgtgccgctgcacttgttgccttgcaggaaaatgttgggaagcttggaagtgatcacaagaaagctagacttttggctgatggattaaaag

SEQ ID NO: 53836 - DNA, 411 bp, Glycine max
  unsure (1)..(411): unsure at all n locations
  Clone ID: LIB3109-035-Q1-K6-F4
gagacacgtgggtggatagcaacttagaacacaagtgaactcaaagtggaacaacccaagcttgtttcacagctcaacaacaatggcttctatctcatgcatcacccaccaccccatcacttccaagctcaataatgccttctcttcaccccacgtctctgcctcaaacttggcctcacggtttctgggcaccagaaaaagagttgggttgcatagcctcacctctagaataattggaccctctaatggctccaaagccacatgctggttcaagttcggcaagaacggtgttgatgccaaaggtgctggcatctatggcagccagggccgtgatgactttgatagagatgacgtggaacagtacttcaactatatggggatgctcgctgtanaaggaacatatgataaaat

SEQ ID NO: 53837 - DNA, 419 bp, Glycine max
  unsure (1)..(419): unsure at all n locations
  Clone ID: LIB3109-035-Q1-K6-F6
ggaggataatcaataaacttaaacttatgttatggcattctaactctgaacgatgaaatgaaatggagttccaagataagcgtttatctctgagatcgagcttgacgttcagcgagacgctgtgcgcagtgttcattccgttcataggaatagtcgaagctttggttttcacattcactagttgcttcgatttccaatctcccaggaataagaagaaacattcttctaccttcgacgacattctcaccctcgccgaggattctccatttagtattaatgaaatcgaggccttgcgtgagttgttcaagaagttgagtagttctatcattgatgatggcctcatccacaaggaagaactcacattggcactgttgaagaccaccaccgggggagaaatcttttnctgacaggggtgttga

SEQ ID NO: 53838 - DNA, 380 bp, Glycine max
  Clone ID: LIB3109-035-Q1-K6-F7
ggatggagtaattcagctaacagaaagggatgaatgtgcctaccaagaaatgatcactcatcttcctctttgctctattccaaaccctaaaaaggttttggttatcggtggaggtgatggaggggtcatactagaagtagcacgccattcttcagttgaaaagatagacattcgtgaaattgacaagatggttgttgatgtctccaaacaatacttccctgatgtagctgttgggtatgatgatcctcgtgtgacacttcatattggtgatggagttgcatttttgaaggaagttccagaaggaacttatgatgctgttatagtggattcatccgaccctattggtcctgctcaggagcttattgaaaagcccttctttg

SEQ ID NO: 53839 - DNA, 177 bp, Glycine max
  Clone ID: LIB3109-035-Q1-K6-F8
cggcgttctagtgtgcgcttgtttgttgttggagctagaacacattcttttgcagatcggaactacccatgcttttttttctaacctgaaaagtgtttgctctgttgtgaactgtggttccggaagctcctgcaagtccgaaaacggctgcgaaggctccaaaatttccccaaactt

SEQ ID NO: 53840 - DNA, 334 bp, Glycine max
  Clone ID: LIB3109-035-Q1-K6-F9
aaaggaaactacaaaattttaactaaaatgtttttttccatcataacaaaaccttaatctgtgattttttaataaactattgtcctacccatatatactcaaaactcactaaaatttactactagctcaccaatctaaactaaaacatttcctatccctatgaaatcttatgatatatttaattatctatatttaatttttcaaaatccttttttttcatctcatttataatcatatataaatccttttaacattttatcgtaacatataccaatacatttttcttttaccataaaataaactttatcttttatacatatcaacttattttttt

SEQ ID NO: 53841 - DNA, 293 bp, Glycine max
  Clone ID: LIB3109-035-Q1-K6-G1
ggatactagaacctgcagatcgtgatgctgttttggccaatgttgccatcaagaatggcaaaaactacaatgtcattgtggaaatcgccactatcctctccccggaagagcttttggccgtgagacgtgcttatctcaaccgttacaagcactccttggaggagaatgtggcagttatatacctgtggccatatacgcaagcttttagtggggttggtgacctcatataggtatgttggtgatgagatcaatccaaaattggcacaaactgaggctgaaattcttcatgatgc

SEQ ID NO: 53842 - DNA, 441 bp, Glycine max
  Clone ID: LIB3109-035-Q1-K6-G11
gaccgagtggttttgaagtggtagaatagcctagaatagcgaaagaaagtgttgctgctaattccatttcagtgacccctaattatgatggaggaattgaacaaaccaatggacggatcagcaaccagctggttatccgatttggaaatggatgattacaatttatttccagatgaatgtcccttgaacttgaacttgtttgatgaccaagagtttctctcacaagacattgctagtgcccttcaagaacagacacagaccttgcaacaatctttgtcttcagagtgcccttcaaaaactgtgagcaactcatccaccgatgaaaccacttttgactttgagagaccagccaagttgctgaaaacgacaacaagcagtagttgttgtaactctgactcatccaccatcaccaaaagcctttcacccaaactttgcccatcg

SEQ ID NO: 53843 - DNA, 224 bp, Glycine max
  Clone ID: LIB3109-035-Q1-K6-G12
ggccaacaatttatgtgtttcgaatatatcctcctactgcgttggaaataaatctggcatggctccaactaaagacgactaaaccctattgagaactactacaaacccatttacgtacaaacatcatattgcccttacgttgaagggagttaaatacacatatgtcgaacaaaattatatgaacaaaactgaacttcttttgaaatccaacccatttcacaaca

SEQ ID NO: 53844 - DNA, 358 bp, Glycine max
  Clone ID: LIB3109-035-Q1-K6-G2
gacttcaaagtggagaaaaacacacacggttggttcattctctctcttttctttttcctcaaaaagttgaaaaagaataaagggggaacaatcgagtgaagttggtgctcttcaatagtaaacttacctatggaagagggaagggttgtgagtgagtacacaaaagatggaactgtggatcttaaagggaaacccattctcaaatccaaaagtggtggttggaaagcatgctcctttgttgttggtatctctctctctcactataaattttatatggtcattttcatcttggtttggacattaatttcaaaagcaatttcccaaaacatttgaagcttcatgatgttttgtaacaaaa

SEQ ID NO: 53845 - DNA, 422 bp, Glycine max
  Clone ID: LIB3109-035-Q1-K6-G4
ggaggaagccacatagagacacaatacagagtgagttgttgctccttcgccacaactctctgccaacatgggtatctccagagattctatgcacaagaggcgtgccactggtggcaagaagaaggcctggaggaaaaagagaaagtatgagcttggtcgccagcctgctaacactaagctgtcaagcaacaagacagtcaggaggatccgtgttagaggtggaaatgtgaaatggagggcattgagattggatactggaaattactcctggggaagtgaagctgtaactcgcaagactcgtgtactagatgtggtttacaatgcctcaaacaatgagcttgtgcgtactcagactcttgtcaaaagtgctatcgttcaggttgatgctgctccattcaaacagtggtatcttcagcactatg

SEQ ID NO: 53846 - DNA, 303 bp, Glycine max
  Clone ID: LIB3109-035-Q1-K6-G6
ggattgagaaggaatgagaatggggggaggtttttgtctgatgatgttggtaggtctagcaatcgagggcgagggcaagggcaatcttctcgaacgaattatgggaggaatggagcggatggtgatggcagaatgaggaagaatgggaatgggagaaggtttttgtccaataatgttgatcggtctagcggtggagaacagtcttctcctttgaattatggcggggatggaatggatggtgatggtagattgaggaggaatgggaatgggaggagggtttttttcggtttagacatttacttt

SEQ ID NO: 53847 - DNA, 420 bp, Glycine max
  Clone ID: LIB3109-035-Q1-K6-G7
ggccttaagaatggtgatattgaagttacttgggctgatgggatggtatcaatggttggaccccaagcaatctatgtggttggtcgagatgacgatgatgaatcaattgctgctgggagtgaaataagtgatgctgcaagctgggaaactgttaatgacgatgaaatggaagtccttgaggattccagagaggatattgagagggaaaattcaagcagtgttacttctgaggcagaagaaagtggagagaatgattttggtaggactgcagctctctctgttcccctagcagcatttcgatttgtcactagacttgccagtggaatattctcaagaggctcaaggaacttggattctattcccttggagataaaagctgaacgtgaacatccatcacctgtagttaatgatgagtctact

SEQ ID NO: 53848 - DNA, 186 bp, Glycine max
  Clone ID: LIB3109-035-Q1-K6-G8
ggaggcagagaagtaagaagaagatagcgagaagtataggctaagattgtccacatcttgtggacagcaggtacaacgagtgtatatatcaacaactacctttcccttttcgtctatcattgcaaacactcttattattcttcttcttcttcactctacaaccactaaacttattgtttggtgttg

SEQ ID NO: 53849 - DNA, 367 bp, Glycine max
  unsure (1)..(367): unsure at all n locations
  Clone ID: LIB3109-035-Q1-K6-G9
ggggaggtctggccgggttttttagaatagcagcggngccacttgnacatgtgaggtttaagaggatgaaggacatccacaacacatcaccaaacaaccttatggagatttgtgccaacatgttttttcccctcaagcgtgtctggctttctctctctgctcgcctcaagcctcgcaaaaacggaacaggactgctcaagctttatgatgatgtacagacttgtggatatcaatatgtacaagtgatgtgggaaatgctacataaaaccgaatgtgaagttatagataaccaccataagcgcaagcagtttcccttctggaggatctttttatgtgccaaccatactatatttgtaaatacgcttta

SEQ ID NO: 53850 - DNA, 296 bp, Glycine max
  Clone ID: LIB3109-035-Q1-K6-H1
gggggaattgactagtgcggcgcgctcctattatcaccgtatacggcggaggtggcggtcgtggtgtagacacggcgtgacggcgatctcttgagataaatgttggttgaaagaggaagaagaagaagagctgtatggtaaaacgagccaaccaacggtgatacttgccagtgtgagctatgatcacactattcgttgttgggaggccaatagtggccgatgctaccgcaccattcgttatcctgatgcgcatgctaaccggctggagataaccccggttaaacgcctcctggctg

SEQ ID NO: 53851 - DNA, 387 bp, Glycine max
  Clone ID: LIB3109-035-Q1-K6-H10
cacagaggggttaagaattagttggtgatggtcccattgattccgaggagaaaagaaaagatgtggagcccaacagctatacactcgcgcgaagaccgaggaattcgacctctaatcatgagaaaccctctacccacggctgagcgtcggcgagaaccacctccgatggggtttcatccgcaaggtctacggcattctctccgcgcacatcgtcctcaccaccctcgtgtgcggcaccaccgttttctatactccaatcaatgacctcctcaagggcaattacaccctcctcctcatactcctcttgcttcccttcatctttttgattcccctgttgaagtaccagcagaagcatcctcataattacatcttgcttgcactctttac

SEQ ID NO: 53852 - DNA, 343 bp, Glycine max
  Clone ID: LIB3109-035-Q1-K6-H11
gtgaagggaaggtgggagaaaccgggtcacagcccactatttgggtatgacttttggtaccaaccacgtcacaataccatgattagcacatcatggggtgctcctagtgcttttacaaaaggttttaacttacagcatctctctgatggattatacgggaggcatctccatgtatatagctggcctgggggcgaactgagacaaacaatggaccttggtgattcaaggcttatacccttagagataaggtttttgcatgatcctgctaaagatacaagttttgtcggcagtgcattgacaagtaacatgatacgattttttaagacccaagatgaatcatgga

SEQ ID NO: 53853 - DNA, 369 bp, Glycine max
  Clone ID: LIB3109-035-Q1-K6-H12
gaagaagaagaaggttggttgattggtcccattgattccgaagagaaaagaaaagatgtttgagccacaacagctatacactcgcgcgaagaccgaggaattcgacctcgaatcaggagaaaccctctacccagggctgagcgtcggcgagaaccagctccgatggggtttcatccgcaaggtctacggcatcctctccgcgcagatcgtcctcaccaccctcgtctccgtcaccaccgttttctatactccaatcaatgacctgctcaagggcaattccaccctcctcctcatcctactcttccttcccttcatctttttgattcccctgttgaagtaccagcagaagcatgctcataattacatctt

SEQ ID NO: 53854 - DNA, 428 bp, Glycine max
  Clone ID: LIB3109-035-Q1-K6-H2
gaaagaagagaaaataataatatgaataacaacccacaaaacttgggtcttgcaaattaagttcattttcctccctttcactctcgtagacatcacaaaccttccctccattcatcccacgcatggctgccatgaactctagcgtattggcctgtagctatgccatatcaggtgcagcgtgttcggagctcaatgggaaggtcacttccgtggcctatgttgcatgctctggctacaagttgccattgatcaaagctgaggccagagttcctaaagccaaagaatctgaaggaggaaggagaggtgcccttgttctcttggcagctacccttttcacctctgcagcttccaattcttctgccaatgctgggatcattgaagattaccttgagaggagcaaggccaacaaggaattgaatgacaagaag

SEQ ID NO: 53855 - DNA, 384 bp, Glycine max
  Clone ID: LIB3109-035-Q1-K6-H3
gggcaaacaagtagtggaaagacatacacgatggttggaataactgaatacgctgttgcagatatttttgactatatagagaggcatgaagaaagagcatttatattgaagttctcagcaattgaaatttacaatgaagttgttagagacctcctcagcactgacaacaacactccacttagactacgtgatgatcctgagaaagggcccattttagagaaactcacagaggagactctacgggactgggagcatttaaaagagcttctagccttcagtgaagctcagagacaggtgggagagacatacctaaatgaaaagagttctagatctcaccaaatcatcagattgacaatggagagttctgccagggaattcctgggc

SEQ ID NO: 53856 - DNA, 435 bp, Glycine max
  Clone ID: LIB3109-035-Q1-K6-H4
gagcgagggaagggaagcatctttagctccaatggcggatacctcaggtcgatccagggacctcgacaagctccttctccgccctggcaatctcgtcggtcccaggttcgaaccaggcgctgagttgcgagatgaccttcaggccttcgccaaagtgttggtggtaggggccggtggcttaagttgtgagttgttgaaggatttagccctctctggtttccgaaaccttgaggtcattgatatggatcgcatagaggttactaatctcaaccgccaattcttgttcagacttgaagatgttggcaaacccaaagccgaggtagctgccaagcgtgtcatggagagaattactggtgtcgaaattgtgccccacttttgcaggattgaggacaaggaaatagaattttacaatgattttagcattattggccttgg

SEQ ID NO: 53857 - DNA, 419 bp, Glycine max
  Clone ID: LIB3109-035-Q1-K6-H6
ggcagatgtgaatgtgagagacacccatgaatgacagaatgaaatgaactgagtaacaccaacgctgctttcttcattctttcattcattcgaatgtgttcttttgcgattgaatttgagggaacaataatcgattttcgctttctgggcacccctgaattcccctgcatcgctgtgaaagtagttcagttcgaacaacgaaaacgatgtcggctcgattgatgaagaacgttctgaacgagcagcatcaccttccgcaacacgtgagcgaagaagaagaagaagaagagaacgattctgagcccatcactcgttcctccatcaaccccttcgacctcctcaacgacaacgattctgagcccgaagaccaaggtgatgagttgatgtccaccaatgaaatattgacaagttatgatgac

SEQ ID NO: 53858 - DNA, 423 bp, Glycine max
  Clone ID: LIB3109-035-Q1-K6-H7
aggaacagcaatgaagaagaggcagagaagagcacgaagaatgctttcgtgaaggtgagcatggatggtgcaccgtatctacgaaaggtggacataaagttgtacaagagctaccaggagctgtcagatgcgctggctaagatgttcagttccttcacgattgaaaagtgtgggtcccaagggatgaaggattttatgaatgagaccaatggctctgactatgtacccacatatgaagacaaggacggagactggatgctcgtcggtgatgtgccctgggagatgttcgttgaatcatgcaagcgtcttcgcataatgaaaggctccgaggcaatcggtcttgcgccaagagccgtggaaaagtgcaagaacagaagctgaagaagtgatttcatctgcgtcacaaggaagcaaattgactcg

SEQ ID NO: 53859 - DNA, 427 bp, Glycine max
  Clone ID: LIB3109-035-Q1-K6-H9
tgacatacacacgcatgtacaccttaatggttatatagggtggcttcttcttggtgttattcttgttctggcttgtgctttaatgcattcttcttcttcttcaaacctcttaataactactgtgccttgaatgttgggtttgagtatatctctttctcctccaaaagtagtgccacttacgtagggcatgatgatgaagaagagtggttttgagaagatggtgatgttgcagaagaacaacaagaacaagggaagctatgatgatgagaaaccaaggagtaagacgtttttggtgaacatcaatatcatggggagtgcagggcctattacgtttgtggtgaatgagaaagagcttgtttctggggtcattgatactgctctcaaatcttattcccgtgaagggaggcttcctgttcttggttttgat

SEQ ID NO: 53860 - DNA, 324 bp, Glycine max
  Clone ID: LIB3109-036-Q1-K1-A10
ctatacgagttcttgcgaaaacctaccaaacctatggctcactctattacgctacactttaatgggatggacctgaaacttcctttgtaaaacagattgatacacagcatcactgattagatttcatgtcttgcaattgcagtggcacccttcaatgtgaaactcatgtttaacagtatctccaactttcagaaacagaaccttaggatattgtttgataccgtccataataacgttggcatatcccgttaagtatgtaactagctggctgactacatttttatttatttatctaataaaatgtaccacctggatttcttgatt

SEQ ID NO: 53861 - DNA, 371 bp, Glycine max
  Clone ID: LIB3109-036-Q1-K1-A12
gggggaaagagagtggattcttggtgactttcttgaccagaaaagtagcaaccgcagcaccaaagactttgctttgcatctatcgaattctaatccaattctctctgcatctacatatacaatatcataatcgttcataagattgcatttgcattgatttcaaaaatgcagatcaggggatcgagtcacagactctccagtatgggcaataatcgatcccgcattcccgcgctcctcatctccatgttcgccactttcgcttctatctacgtcgctggaaggctgtggcaggacgcagagaatcgcgtttatctcatcaaagagctcgataggatcactggccagggacaatctgctatatctgtggatga

SEQ ID NO: 53862 - DNA, 321 bp, Glycine max
  unsure (1)..(321): unsure at all n locations
  Clone ID: LIB3109-036-Q1-K1-A3
ggatccaatcaagaatacaataacatagcatagagtgagaagtgagaagagaaaaatggcaatctccatacccagtagacaacttttcatagatggagagtggaaagtccctcttctcaacaatcggtttccgatcatcaaccccgctactgaagacatcatagggcatattccagccgctactaaggaagatgttgaccttgcggtggatgctgctaaaagagccttttcccataacaaagggcaagattggtcttcagcttctggctctgntcgtgctcgctatcttcgagccatcggttcaaagattacagagaaaaa

SEQ ID NO: 53863 - DNA, 405 bp, Glycine max
  unsure (1)..(405): unsure at all n locations
  Clone ID: LIB3109-036-Q1-K1-A4
ggaagcaatgaggcgttgatttgatatcagtatcggtgatgaagcaacacgagttatctctgttactgtgtctcccatgggcactaacccttctctatggtgagatgttcgcttactgggttccacccctcttcacctgttcctggccccatcttcttcgcagttcttcttcttcttcttcaacgcaggttcaaacagacagtgggaattatcagggtgattatgttaaagtggctgttattgcagatccacagctcatggataaaacttctctccgtcttcctgcaagatcacttgcactggaactngcagaattctacactgatttaaacatgcgtagatcattctttgcatctgtcctgcctttcaaacctgatgtcatatgggttttaggtgattactttg

SEQ ID NO: 53864 - DNA, 402 bp, Glycine max
  Clone ID: LIB3109-036-Q1-K1-A5
gacacgcagttgtattgtagaactgaacaagggtttctctttctctttctctgtctgcttcttcactttctctcgtttcaatcgaaaaaaatcatgggcagaaaattcttcgtcggtggcaactggaaatgcaatgggaccactgaggaggtgaagaagattgttactactttaaatgaagctaaagtccctggagaagatgttgtagaagttgttgtgagccctccttttgtgttccttccttttgtaaaaagtttgctgcgccctgatttccatgtctcggcccaaaattgttgggttcgcaaaggtggtgcttatactggagaggttagtgctgaaatgcttgttaatttgggaattccttgggttattattggtcactctgaacggaagcagcttttg

SEQ ID NO: 53865 - DNA, 411 bp, Glycine max
  Clone ID: LIB3109-036-Q1-K1-A6
ggagagggcgattctggaaaataagatggaaggattacaaagagtatagagggaagggagggcaaagccaaaggggatttcgttgtgttgtgttcctccgccagcgttagagatgagttccgccgataccgtcaatgcgagttctgctgagtctgtcaaagaacctgtcataaggtcaagtctggaagcaaaacaggatgatactgaaataaaatctcaagttgatgccatgtgggaacaaatgaataaaggagtatctaataagaccctcaacagatttacaagcaagcctaattctgctccaaaaaaaaactgcaaagaagacatcatctaactggatgtcttatttggccttggcaccgaaggcaactgaatcccttgggcaaagtgcttccaagaatggacctggca

SEQ ID NO: 53866 - DNA, 223 bp, Glycine max
  Clone ID: LIB3109-036-Q1-K1-A7
ggttgaagaatttgacagagtgagaaatatagaaatggcgtcgtggtgcggtgctcggagcttccagattccggcgatggaagacagcgcactgcgcaaccgtgcttcattggccgccggagtagggcgtttgtcggtggccggaacctccttctggcgctcctcttcgtaaccgaagcgctctttgccatacacatgctggcgcatttcttccgacactcgt

SEQ ID NO: 53867 - DNA, 415 bp, Glycine max
  Clone ID: LIB3109-036-Q1-K1-A8
ctacacgaagactctcacaactgcattatacatcgcgacataaaggcaagtaacatcttactcgatgaaaattgggtgcccaagattgcagatttcggcctcgcacgactcttccccgaagaccaaacccatgtcaacacacgtgtggctggaaccaatggctatttggctccggagtatctaatgcatggacatttaaccgtgaaggctgacgtatttagctatggggttttggtgttggaattggtcagtggccagcgaaattcatcctttgatatggacgtgagtgcacagaatctcgtcgactgggcatacaggctatacaagaaagggaaggccttaaaaatcgtggacccaacactggcctcatcagtggtagcagaacaagcagaaatgtgcattcaactgggtctac

SEQ ID NO: 53868 - DNA, 431 bp, Glycine max
  unsure (1)..(431): unsure at all n locations
  Clone ID: LIB3109-036-Q1-K1-A9
gatggaagaaaagaaataaaaaaaagtaagataaaaatgcagtagaagagtcctgattccaaacgaaaaaattcaaacttgattgaaaaggatctttctgattattgaagaatgggacaaaaggattgatcgcgaaaaagatttcttgttcttattagaagatcgtgattggatccacatatgtttggtaaaaagaaagaaaaatattcttctttgagaataataaaaaaggaaagtgttcaattggaacatgaaaacgtgacagaattggtcctagttactcttcggaacggaatagaagaaggggagagattctcgaaccgaactaggaaacggatccaatgacttcaaaagaattgaacgaagagccatatgaagtgaaaatctcatgtacggntctgtagagtggcagtaagggtgacttatctgtc

SEQ ID NO: 53869 - DNA, 151 bp, Glycine max
  Clone ID: LIB3109-036-Q1-K1-B1
ggattcaacgaggcgtcgatttcatatcggtatgggtgatgaatcaacacgagtcatccctattactgcgtctgccatcagcactaacccttctctatcgtgagatgtccgcttactgcgctccacgtctcatcacctgctcctgtactca

SEQ ID NO: 53870 - DNA, 434 bp, Glycine max
  Clone ID: LIB3109-036-Q1-K1-B10
gttggtgaaaggagaacctaatgtttcttacatctgttcaagatactaccgtgctccggaacttatatttggggccaccgaatatacaactgccatagatatatggtcaactggttgtgtaatggctgaattacttcttggacagcccttgtttcctggagagagtggagttgatcagctagttgaaatcatcaaggttttgggaactccaaccagggaggagataaagtgcatgaacccaaattatactgaatttaaagttttccacagaataaacctcatccgtggcacaaggtctttcagaaacgtttacccccagaagcagtggaccttgtctgtaagttctttcagtactcccccaatttgagatgcactgcatttggaagcttgcattcatccattttttgatgaattgagggacccaaaacacccgc

SEQ ID NO: 53871 - DNA, 439 bp, Glycine max
  unsure (1)..(439): unsure at all n locations
  Clone ID: LIB3109-036-Q1-K1-B11
ggcgagaaataacgaagcacgttactgaagtggaacctctggatctctctctctctctgtctctgcgatggagtttcgcgtttccgtcatttggagccttctcctcattgtctctttattctctcctgaaatcaagggtgaggcttctggttccgtcttcttcgtcgatagctccagtaatcaattccttcgcgctagatcatccaacgatgagcaactttcaatgttgcttcaagaagttggtgctgctgtgtcagtcttgcttggttttgcacctncttccaccttttctgctgccagctcatccaagttgaatgaggttctaattcctaacccattcaagaggccccgcgctgtgtttttgctggaaagtaatggaatcaatgctcttggaaaaattgtccaggataatccaatgttcagcaattcattttggagt

SEQ ID NO: 53872 - DNA, 278 bp, Glycine max
  Clone ID: LIB3109-036-Q1-K1-B12
ggagggagacggtagcagatagacctaaacacgaaactcgcatattccatcaacactggagtcgctggaaaatctattctgggactcatgctacgacctgcccttgcttaatataccatgagactcattctaagaaggctctggatagtctcagacattatctgacaacgcgaatcggatccgttaattgatgctcggtttgaaccatacgataatcagtgctatgattatgatgtggagtatcgttaatcatctaattggtatctgatttcgacata

SEQ ID NO: 53873 - DNA, 398 bp, Glycine max
  Clone ID: LIB3109-036-Q1-K1-B2
ggaggctcggaattgcatagagattggaatcagagatgctaacaatagcaatagcgttgtttactcttatttaatttcattcgtcgtatcggagtttgatggtttcatcgaagaaacaatacccccattcttcttcaactctctccctccctccgagagaggatcctaaattctaatcattcaaatctaatctcataataatggcggctgtgtcaggaggagggagtgagatatggaaggcccacacggcaatggccatggtgcagttattcaacggaggttatcacgtcatcaccaaagttgctctcaacgttggggtcaaccaaatcgtcttctgcgtcttccgcgacctcattgccctcgccattctcgctccactcgcttacatccgcgtaaag

SEQ ID NO: 53874 - DNA, 449 bp, Glycine max
  unsure (1)..(449): unsure at all n locations
  Clone ID: LIB3109-036-Q1-K1-B3
ctgcacgtactcggtctcgtgaattcccgggttcgatcccacgtcgtctcgtatcggctgtcgagaagttcgacatgaaggggggaggtggagagagggagagaagtgagagtagtgagaggggagcatcagtgaatgaagtagaatcgaagggaactgaagaatggagatcttcctcctctcgtcaacatagggtcgtggtgatagatagaagggagacataggggtccgaaaatcccaagtccgaatagacgaacatcgccaagtgcgttgaagggaagggagaaaaacacatgcatcatacatacatgatcagtcagcatcatactacaacagcaacatcataaccttcggtggactgagaaatacatctcagttggaagtcccttggttcctgtcctctacgactgggctcgccaaccacaancctcgtctggcccctctctctc

SEQ ID NO: 53875 - DNA, 410 bp, Glycine max
  Clone ID: LIB3109-036-Q1-K1-B6
ggtgattgtttgttgttgtaactcgttcttcttcttttgttgttctgtgtttgtgtttgttttttctctcacctgaaaatgtcttgctgcggtggtaactgtggttgcggaagctcctgcaagtgcggcaacggctgcggaggctgcaagatgtacccagacttgagctacactgagtcaaccaccaccgagaccttggtcatgggagtggcacctgttaaggctcaatttgagggttcctgaaatgggtgtgcccgctgagaacgatggctgcaaatgtggaccaaacttggtctgcaacccctgcacttgcaagtgaggtgttgggagagcaagcttcaagcagagatagcccttaattaggaataatgataaactattaatgtgtagctaaaaacttatgtattatg

SEQ ID NO: 53876 - DNA, 407 bp, Glycine max
  Clone ID: LIB3109-036-Q1-K1-B7
ggagagaaaaaatggccaaatcaatcaaattctttgagttgaacacaggggccaagattccttctcttgggttagggacttggcaagctgaacctggtgttgtagctgaagctctcaccacagccattcaggttggatacaggcatattgactgtgctagtgcgtataagaatcaagcagagattggttctgctcttaagaagctttttgatgatggtgtggtgaagcgtgaggacttatggatcacttccaaactctggtgttcagatcatgcaccagaagatgtgccaaaagcattggataaaacattacaggaattgcaactttgactatctgacctctatctgatccactggccagtccgcatgaaaagtggaacatttggtactcataaggatatcttgagc

SEQ ID NO: 53877 - DNA, 439 bp, Glycine max
  Clone ID: LIB3109-036-Q1-K1-B9
gatctttatatggaaatgaaagaatctggagtaattaatgaacaaaatattgcagaatcaaaagtagctctagtatatggtcaaatgaatgaaccgcccggagctcgtatgagagttggtttaactgccctgactatggcggaatattttcgagatgtcaatgaacaagatgtacttctatttatcgacaatatctttcgcttcgtccaagcaggatctgaagtatctgccttattgggtcgaatgccttctgctgtgggttatcaacccactcttagtactgaaatgggttctttacaagaaagaatcacttctaccaaagaggggtccataacttctattcaagcagtttatgtacccgcagacgatttaaccgatcctgcgcctgctacgacatttgcacatttagatgctactactgtactatcaagaggattag

SEQ ID NO: 53878 - DNA, 279 bp, Glycine max
  Clone ID: LIB3109-036-Q1-K1-C1
ggcgcattgaacgaaaattagggtttgtagtgtagcaggaagaagcagcaatggcgccgaagataacacgtaaggttagcagaaaccctgaattgataaggggaatcggaaagtactcgaggtcgcagatgtaccacatgaggggcatttgggctatcaaggccaaaaacggtggcgttttacctcgccacgaccctaaacccaagcctgaagctcctgctgaaaaaccacccaaattttaccctgctgatgatatcaagaagccccttgtcaacaagc

SEQ ID NO: 53879 - DNA, 416 bp, Glycine max
  Clone ID: LIB3109-036-Q1-K1-C11
ggcactggtggtgcgccaccgcatgattagttcccggaagtggagtcgcgccatggcgatactgaaggagtttgaggacaagtgtgggaccccaattgtgaagcttagacaagtggctgatgccatggatgttgagatgcacgcaggtctcgcatctgaaggtggtagcaagctcaatatgttgatcagttttgtcgataatctcccaactggggatgaggaaggactctattatgcactggatcttggaggcacaaacttccgtgtccttcgtgtacatttaggcgggaaagacaaaggtgttatcggccaggagtttgaagaagtttcaattcctccaaatttgatgactggctcttcagaagcattgtttgattttatagcagcagctcttgcaaagtttggtggttcaaaac

SEQ ID NO: 53880 - DNA, 342 bp, Glycine max
  Clone ID: LIB3109-036-Q1-K1-C12
ggcgtcttggggtgtgagatcaaaccctagattttagacactggaacagtagcatcagcagccatggcgagtatgaggtgcctgcgagcgttaactcaaacgagaccgtatatcttgcgaaaagcatactatgttcgctcactcgacgtgcttccatttgccaactgcaacgcttttgcacactctttcaccgcacacgcctatgtttttgcgcagtgcccgcacctgcgttgtgtctcttacgacacagaagacgaccacagcgacgaacaagatgaatgcgacgaggattaacgtgaacagacaagaatattgtgacgatgatgacgtacatgtgtcaag

SEQ ID NO: 53881 - DNA, 407 bp, Glycine max
  Clone ID: LIB3109-036-Q1-K1-C3
gaagaaagaacggtgtttgtcgacttcagcttgtgggtcttggatgaatacaaagtggtagaaattgacgaccacgaaatcaaaatcctcccttgaacttgagggctgcgttagtggcagtgcagagggtaacagcttacgatgggtaagagcgagagaagaggagttgctgaatttgaagagaggcttttggaattgcaacacaagacttgtgttggaaaaagaagcagtaactataggagcgagagcgagtgcatgtgcatgtgcaccggacccagacacagagaagacctggctgcaccacctcatcctttcttgcccctctatccgatgccaccgtgaccgagtctgtgaatcagttgttaacaaaatcttggataacagctaaggcccaagcccaactcatg

SEQ ID NO: 53882 - DNA, 399 bp, Glycine max
  Clone ID: LIB3109-036-Q1-K1-C4
ggttcttcgcgttaattgaacatgactgatcctcaatcaatcaccatgaacaaatcctcagatgcagcagcgtctccatattgcagaggcaggtccaagaaacccaatctccgaagctccaaatcccaacccccaagccacgttgagttcagctccaagacgccggagaagctgccgcagcgaatccgcaaccgcggcgtagcgctctccgtcgccgacatcagaaagggccgcctgcaagcgcttgcaagatcagaagcaatgcactgaaacgacgtcgtcatcgttgtcgtcgtcgtcgtcgctcagcaaaagtgtcaggaggcagatctcactggggccttcttctcccagtaaacccatggctactgaagatgaatcctctaatcttcccgaaaa

SEQ ID NO: 53883 - DNA, 414 bp, Glycine max
  Clone ID: LIB3109-036-Q1-K1-C5
ggttctagtgtgtgattgtttgttgttgtaactcgttcttcttcttttgttgttctgtgtttgtgtttgttttttctctcacctgaaaatgtcttgctgcggtggtaactgtggttgcggaagctcctgcaagtgcggcaacggctgcggaggctgcaagatgtacccagacttgagctacactgagtcaaccaccaccgagaccttggtcatgggagtggcacctgttaaggctcaatttgagggtgctgaaatgggtgtgcccgctgagaacgatggctgcaaatgtggaccaaactgctcctgcaacccctgcacttgcaagtgaggtgttgggagagcaagcttcaagcagagatagcccttaattaggaataatgataaactattaatgtgtagctaaaaacttatgtt

SEQ ID NO: 53884 - DNA, 414 bp, Glycine max
  Clone ID: LIB3109-036-Q1-K1-C6
gccgccaaagccggagaggatcgtctctctaaggtgccggtgcgtaatataaggaacttctgcatcattgcgcatattgaccacgggaaatccacgttggcggataagttgcttcaggttaccggcacggtgcaccagcgagagatgaaggatcagtttctcgataacatggatttggagagagaaagaggcatcactattaagctccaggcagctagaatgcgttatgtgtttgaaaatgaaccttattgcttgaatctaatagatactccggggcatgttgacttctcgtatgaagtttctcggtcactcgctgcatgtgaaggtgctcttctagtagtggacgcttctcacggcgttgaagcacaaaccctaactaatggttatttggctttggagaacaacctggaaatt

SEQ ID NO: 53885 - DNA, 401 bp, Glycine max
  Clone ID: LIB3109-036-Q1-K1-C7
tgaagggggagcctaaggtgtatgaaataagacgacaatattttgttccgatgggaccggacaagggacgatgaaatcagtgtagtggaagaagttgtgtttttgttgggacaattggtggctctcaaattgtgaaccgcacatatacccaccctgcttcccacgccacatcgatctcacgttctctctctttcttttttcttgttgaaactgtgagtctatgttatttgtggcggagcatgaactcctgcaccaacacctcgaattctcagtcaatggctgcagcatccagtgatgggtctgggaagaaggtaagaaaaccttacaccatatccaagtccaaggagagttggactgatgaggagcacgacaagtttctcgaagctcttcaatatttgaca

SEQ ID NO: 53886 - DNA, 415 bp, Glycine max
  Clone ID: LIB3109-036-Q1-K1-C8
gggtgtgagttcatttgatgcaaacagcattacaagtctgtcgcaatatgtgaagccacttaccaacttccttgaaaaacttttggaaggcgaaaaggtgatcttggttggacatgattttggaggggtatgtatatcatatgcaatggagatgtttcctcttaagatttccaaggctgtctttattgctgcagcaatgctgactaatggacaaagcactcttgatattatttctcaacaggcaggttcaaatgatcttatgcgacaagcccagacttttgtatatgctaatgggaatgatcatcctcccacttcttttgatctggacaagtcattgtcgagggatttgttattcaaccaaagtcccaccaaagatattgcactggcatgtgtctcaatgaagtctgtaccattt

SEQ ID NO: 53887 - DNA, 296 bp, Glycine max
  Clone ID: LIB3109-036-Q1-K1-C9
tggggatctacttataacgttataaaaatacacacgtgttgctggtcacatgatacaaactccactaatactaaaagtatttctattattactccaaaaataccaaaataactcattgtgatatgcatttcatcaaatttaactgaattaaatttcattatacaagtcaccactcataactagacatacctgtcacctgattctcaaaaactccaaagtataaattctataaactccttcataaaattatcctctacatcttaacgaacttaaatatcaatgtgtccatttacact

SEQ ID NO: 53888 - DNA, 422 bp, Glycine max
  Clone ID: LIB3109-036-Q1-K1-D10
tgggagagtgagaaagagacagagagaattgggaaggcctaatttcggaaagatcggcgatgactgcctccaaggatcgcgagaacttcgtctacatcgccaaactcgccgagcaggccgagcgttacgaagagatggtggaatcaatgaagaacgttgcgaatctcgacgttgaactgacggtggacgagcggaatttgctttctgttgggtacaagaatgtgattggtgctcgcaaagcgtcctggaggatcctgtctttcattgggcacaaagaagaaacaaaagggaacgagttgaatgcgaagcggattaaggagtacagacacgaggttgaattggagctatcgaacatctgtaatgatgttatgagagtgattgatgagcaccttatcccttcagctgcagctggtgaatccact

SEQ ID NO: 53889 - DNA, 325 bp, Glycine max
  Clone ID: LIB3109-036-Q1-K1-D11
ggggaccaattctttaatgagcgagagagagagggcgcgatagtcgccatagccataatttattgttattatttagggatgagtgaagtgaatgaatgaaaacaaaaacaccggcatcgctcttgtctctcacggctgactctgcggttcttaatctctacgacatctccgatctcttccatgtacctgatcacatcctcctcgacctattcctgagaatattgaaggctgggaagctgactgagaaagttctgagactttctatagcaactggtaacgatgaaggcctctcatttgatcatgcactcaatatcgcacatatttt

SEQ ID NO: 53890 - DNA, 420 bp, Glycine max
  unsure (1)..(420): unsure at all n locations
  Clone ID: LIB3109-036-Q1-K1-D12
ggttctagtgtgtgattgtttgttgttgtaactcgttcttcttcttttgttgttctgtgtttgtgtttgttttttctctcacctgaaaatgtcttgctgcggtggtaactgtggttgcggaagctcctgcaagtgcggcaacggctgcggaggctgcaagatgtacccagacttgagctacactgagtcaaccaccaccgagaccttggtcatgggagtggcacctgttaaggctcaatttgagggtgctgaaatgggtgtgcccgctgagaacgatggctgcaaatgtggaccaaactgctcctgcaacccctgcacttgcaagtgaggtgttgggagagcaagcttcaagcagagatagcccttaattaagaataatgantaactattaatgtgtagcttaaaacttatgtattatgt

SEQ ID NO: 53891 - DNA, 409 bp, Glycine max
  Clone ID: LIB3109-036-Q1-K1-D2
gagagaaagagagagaaagatgtcgaagcgtggtcgtggtggttcggcggggaacaagttccgcatgtcgctgggtcttccagtggcggcgacggtgaactgcgccgacaacacgggggcgaagaacctctacatcatttcggtgaaagggatcaaaggccgtttgaaccgtcttccctcggcctgcgttggcgacatggtgatggccaccgtgaagaagggaaaacccgatctgaggaagaaggtcttgccagctgtcatcgttcgccagcgcaagccatggcgccgaaaggactgcgtctacatgtacttcgaagataatgctggtgttattgtcaatcccaagggagaaatgaaaggttctgctatcactggtcccattggaaaagagtgtgctgatttgtggcct

SEQ ID NO: 53892 - DNA, 427 bp, Glycine max
  Clone ID: LIB3109-036-Q1-K1-D4
ggtgtaagagtgaagagtgaagagtgaagagtgaagagtgaagtaacaaagcaaaaagagcggagggaaagtcgtgggaacgaagaagccaacaaagacaaatcaaggtgaaaaggaaaaagcccttatgcttttttgagtttgtttctcaccagcttgagttgtttagaagctcatcttaagcattgtggcagacctgagtgagcattttttgagtggaaaatatgagctacagtggctcctcaatgagttctggtagtggatcttctagaaggacatttgagtttggaaggacccatgtggtcagacctaaagggaaacaccaggcaactatagtttggctacatggccttggtgataatggctcaagctggtcccaactcttggaaactcttcctcttccaaatattaaatggatttgcccaac

SEQ ID NO: 53893 - DNA, 312 bp, Glycine max
  Clone ID: LIB3109-036-Q1-K1-D5
ggaagctaagcgaagcaaaatgggtggatcagtgagggacgtgaagtcgaagggcgaggccgacgaggtggtggcgagtggctctccggttatcctccacttctgggcgtcgtggtgcgaagcttccaagcacatggaccaactcttctctcacctttccactgatttccccaacgcccgcttcttaaaggtcgaggccgaagagcaacccgagatttctgaggcttactccgtctccgctgttcctttctttgccttctgcaaggatgggaagacctttgatacattgggagggagctgatccgtcaagct

SEQ ID NO: 53894 - DNA, 367 bp, Glycine max
  Clone ID: LIB3109-036-Q1-K1-D6
gaatggaaaggggagtttttccctgacattcccaaaattaaatatgagggtccgtcaagtaagaatgtgctttcatttaaatggtataatgcagaggaggaaattcttgggaagaagatgaaggattggttaagatttagtgttgcattttggcatacattccgtggaacaggtgctgacccatttggtgcacctaccaaatactggctatgggaagatggtaccaattcattaaacatggctaaaagacgaatgagagctaactttgagttcataagcaaactcggtgttgacttttggtgtttccacgacagggatatagcccctgatggaaaaacctttgaagaatctaatgcaaacttggatg

SEQ ID NO: 53895 - DNA, 403 bp, Glycine max
  Clone ID: LIB3109-036-Q1-K1-D7
tacgaaaagaatttcaagaaaggcttgttaacagacaacactctgcctttactcacagacagtgctctcagagatgtcaggattcctcctggacctaggcttttgattcttgaccatatccagagggacgcggatttgaaagagaagcgaggacgccgaaagtgactgatatgaagagtttgctgcctttgaactttgaaatccattgaaaaatggatagtaggaagtttgtgttccaaatgaattttgtctttttttgtttgttagctctgttcaattgttgttgcagaatacttgatacaatttggttaaccaatcagttatattttagttgtgccatgaaacgtaaatggcttgaaaagtaattaaggagcatgaaattgttcactctaaaataagaaaa

SEQ ID NO: 53896 - DNA, 414 bp, Glycine max
  Clone ID: LIB3109-036-Q1-K1-D8
gcttgaagctgatattcaccatgccaataccctggcgtcagattttccaagggaatatgatgggacctgccttcagatgagaatgtcatacagtccagcagcacacctgtttctcttttttgtgcaatggacagactgcaatcttgctggagcccttggactgttaagaatcctaatatacaaagtgtatgtggatgggacaactaccatgtctacccttgaaagaaaagcaagtattagggaattctatgcaatcatatatccctctttagtgcaactgcaagaaagtgtggcagatacagaggattaaaaacagaaggctgtatgcatggagaggtatcgcaaaagagatgatgaggagcacagacagccttcagacatagacattgaaagagaagaagaatgtggaatatg

SEQ ID NO: 53897 - DNA, 409 bp, Glycine max
  Clone ID: LIB3109-036-Q1-K1-D9
gggcgccgcaattgtcatgacccaaaattatatggttctatcgagtaacctttacaaccttgtgtcgtcaaccaccctccaccgcatcgtcgaacacccgtatgtcgtcgtcgtctcaccaccacagcgcctcgcattagagcaccgggccgtcggagcaggttttaaggctcttaatcatgttgagatttattttctcgaggaagtcgcaccactttgctgttgcaattacattgcaatttccactgttgacaaaataaagtacccacaatcagctaaacaggaaaaactcaattttaacactacttgttgtatcttcaggttcaacccaaccaagtgtggtgtgaggaagaggtaaaaagtaacatagaggtgaaagagaaaggaagagatgtctaggacgctagtg

SEQ ID NO: 53898 - DNA, 387 bp, Glycine max
  Clone ID: LIB3109-036-Q1-K1-E1
ggaaccgagcattagttatattcccacgaacccagtccctgtttctctgtcttttttttctttatccatgcgcgttgtggaggacagacagaatgcaccaagtttagatctagcctgtgataccaatcgcatatatagagcaagctctataacactgcatagaacattgtacggatccgtgtccagaacagaatatactatataacatcgttgtggtgattgaatcatgtcgcggagaccggtgaatccgtctcggcgattcggagacagtggaggtggattgttttcatcttcgaaatcaaagtcgtcaccggttgtgtcggttgggctcataattgtgggatgcctgtatctcattgcgtatgtgtacaagggctcaggcgtttt

SEQ ID NO: 53899 - DNA, 382 bp, Glycine max
  Clone ID: LIB3109-036-Q1-K1-E10
ttagattaaggatgagctttgtgctgatctgtagcgtaatcaagttatagatcgtcatgctggtgatctttcgggtggtgagctccaaaggtttgccattgcggttgttgcgatccaaaatgctgatatatacatgtttgatgaaccttctaattatcttgatgttaaacagaggctgaaagctgcccaagctattcgatcattgcttaagcctaatagctatgtaattgttgttgagcatgatcttagtgtcttggactacttatcggactttatttgctgactatatggtaaacctggcgcatatgctgtggtgacacttcctttctcactctagaatgaattcacattttctttgctgcctttgttccaacataaaatc

SEQ ID NO: 53900 - DNA, 403 bp, Glycine max
  Clone ID: LIB3109-036-Q1-K1-E11
gacgggggtgaaaagggactatatgtaaagaagtgcttgagagactaatctgcacacagcaatacaaagtgaagaagcagaagcatattcagagagagaaatggaagcagcatgggtcaatattctgatgctgatactgatactgactctgatatgggcatggaagaagctcaactcattatggctcacgccaaagaggcttgaaaagatcttaagagaacaaggccttcgaggcagtccatacaggtttaaggttggggacacgaaggagacattgaagatgcaaatgcaagccatgtccaaacccatgaatctcttctctaatgacataggaccgcgtgtgtctccctatgatcattacattgtcaacaaacatggcaaaaattcttttatttggaatgga

SEQ ID NO: 53901 - DNA, 429 bp, Glycine max
  Clone ID: LIB3109-036-Q1-K1-E12
ggatgactgatgaagaatttgctagagaaacgagtgctggtgttaatccaaatgtcattaagattcttgaggagttcccaccacgtagcaagctagattctcaagcctacggtgatcatacctctataataacaaaacaacacttggagcctaacttgggtgggctcaccgttgagcaggctatccagagcaagaagttgttcatcttagatcaccatgactatctcattccatatttgaggaaaataaatgcaactaccacaaagacttacgctacaagaaccatatttttcttgaaaagtgatggaaccttgacgccattggccattgagttaagtaagccgcatcctcagggtgaaggatatggtccttgtagcgaagtctacgtgcctttgatcgaaggaattgaagcttacatttggttactgg

SEQ ID NO: 53902 - DNA, 410 bp, Glycine max
  Clone ID: LIB3109-036-Q1-K1-E2
ggaacgagcgagcactgagcagcggttgcaggaaaagccgtgtcagcgagcgtcgcattcacggcgatggcggagacggtgagacttcgcgtggtgttcgaggatcgtggcatgttgagcaagtcaaagaagaagcaagggctcaagcgttgctggtttctgcttaaaccccaacacaccaccatttccgatgttgcctctcatctactcaacactttccgcctccaccgcacctgtccccatgacatcgtcctatcgatggatggttttgttttgccatcttttgagttcacttgcattttgaaggataaggacattgtgtgtgtgaaaagaaaaggaagtgtatcaactgatgataaatctgcaatgctgcggcccgcgacatgtgagaatcaggctattgagcttca

SEQ ID NO: 53903 - DNA, 405 bp, Glycine max
  Clone ID: LIB3109-036-Q1-K1-E3
ggccatttctgtgtgtgatcacattgtttccctgtatcgtcttctccctccttgttcaatggtcttagggtttccggtgtccatgcgtagaagctagcaataatgcgtttttgaaacccgtattcatctgtatccaacgatttactagaaggagatcgcaatttctccatcttctcgtttcggtggctcgtgaaatcgaaagttatcgaaactttcgcgcgacacgaagtattgggaaccaagcaaaatttctatggctgacgaaccactatatccaatagcagtgcttatagatgaagtgaaaaatgatgacatccagctgcggttaaactcaattcgcaggctatcaacaattgcgcgtgctcttggggaggagcgaacccgtcgagaattaattccattttt

SEQ ID NO: 53904 - DNA, 289 bp, Glycine max
  Clone ID: LIB3109-036-Q1-K1-E4
gatcttctttgtgaatgattattgaagaccatgtatgtgaatgttcatgcaggatgatttatgtcagtgcgcttggggtaagatgaagctcatggcatatgacattcattgcagctcatctggctatacaagaaatgctcctttacctggtatactaaatgcgaagtttctgctgattttaccaagattgaatgagcagttgatagcctgagcaggaagatactgaccatacactccactggtgattactagacttccaggtcacttgtgctgaaataatgagtgttga

SEQ ID NO: 53905 - DNA, 411 bp, Glycine max
  Clone ID: LIB3109-036-Q1-K1-E5
ggaacctacgccgagcgaaaccccaaataccaatccaatgctctcccaactcacaaagccatgtctccaggtcccgttgtcgacgcttcccctgaggttgatgcagagcaacaacttccctccgtcgatgacgccactcagaagaagataccccaaccacaggaggacgatgctccccttgtcgaggacttgaaggatgatgacaaagacgacgacgatgaagacgacgacgacgacgacgaagatgacaaggaagacgatgctcaagatcaactaggtgagcacctcattgaatctggcacacctcaatttgaagagggatgaccctttttggaaatcttcagagtactgcttctgatcactgagctctttcttataccaacattataatttttgtgattctttttcttg

SEQ ID NO: 53906 - DNA, 382 bp, Glycine max
  Clone ID: LIB3109-036-Q1-K1-E6
caaagaccagctaaacttcattttgaaacacagaaacaacccaaaaaaaaaaaaacctctctactttctctctctacattctccgccatttcccgagaaaatctcgccaggtttggtatgctagctaaatctcatgctttccaaataattctcatggtggatgtatctgctttcaacacatgcttccaaaggatgatagttggtattgatatttgattatcagttacatagcagactaaaaagaaagaattgaatcttgcactgctaatcagtgaaagttttcctacagttatttctttgaatctgatataccatctgcatcccttttttttcttctatgtttggttcctccataattaccacaagggattgtatgaaagat

SEQ ID NO: 53907 - DNA, 417 bp, Glycine max
  Clone ID: LIB3109-036-Q1-K1-E8
ggtggtggaatgtggaatacaaatgttgctcttgatgtaataagaaaagatgatgtttctgccgcaatatttgctcctggatgggtctacgagactaagcaagcaccagattttgagactgctcagaatcgttggtggagtctcgtggaaaaatcttggggcatagtgcgaaagtatcttggaacactaccattttacacaaattttgatcagggacgcggttatcatatttcagttgatggagaccaagtatcagatgctacttggtgcaatatttcttcccaaggtgttcagccactccttgagtttgctgattctactgcaaattctattcaacctcttgtagacttgaaggaagtatcatatagtggagggggaaatattacattcaaaggatctcttgaaaaggataattac

SEQ ID NO: 53908 - DNA, 385 bp, Glycine max
  Clone ID: LIB3109-036-Q1-K1-E9
ggcattcactctgtgagagaaagagatagggtgggggagagagaggagcggaagtgagaaaatgactacgaggttcaagatgatcatgacgactagaggccacgtctgctcctgtcacggtacgtatcgtgaagcaccgtaagcatccagatagtcgagataacgtcagtggcatgcaccatcaccgggtactcttagacaagtaccatccgggattcttcggaaaggtggctatgcgctacttccacatgctccacatcaaattctactgagccatcgtctacattgatatgctgtggtccctcctactatacgaggctctggacatggccacggccgacaatgcgccattgctcgatgtcacccagttatgttgctttaaggt

SEQ ID NO: 53909 - DNA, 294 bp, Glycine max
  Clone ID: LIB3109-036-Q1-K1-F1
tggtgcacgacgactactgattccggacttacatcagtatgacagcataagtgggatgggttaataattaagtcgcttagtgacacggatcattcaccggattttcatgacccttcatgtatgaaggcacaattaagaagacctgcatttatagtgagcactcatactatagaatacagagaggaccaccattgcaaacactattattgagttctataagagaaaatgatgtttaacacaaattttcagagaaccatggtgtgcacaagccaaaacacatagaggggcttctag

SEQ ID NO: 53910 - DNA, 332 bp, Glycine max
  Clone ID: LIB3109-036-Q1-K1-F10
cggtcttgaattccgacccagacgtacgcacacgcgcgcgtacacctgccagaagacttcagattacgattgggctgaatgcaagttcgttcagcttattgatgttaatgttaaaaacctctactgtgctgatactggtgatctattgacgattgctagtgatacatcattctatatcctgaagtacaatcataataatcatacatcatatctatatagttacactgctatatatctgcaaggcgtttaatattccttttaactacatcattaaatgaatgaacgtatcatgacttatatctagaataggcattgcattatctactgcaatt

SEQ ID NO: 53911 - DNA, 429 bp, Glycine max
  Clone ID: LIB3109-036-Q1-K1-F11
ggttgcagcagcaaacagcgaagagaagggctagcaaatcttcaatcacctcacatacggaacctttctacaacctgcatttgagtctctgcactgcaatgcaacaacaccaatcttatgaactggtgcctttgaacaaggcatatgcctatgtacatcttaacactgcaaatgaagctgctgttcaagtcatggtggccgcaaggatagctcttatgatcaacatgatcatgcttcatctaatgaagaggctcttcatatgacaatgcctttgcagcacatgatggatgctaagacagctggagccaaataggcatcattggataagcaaagacaaattcatgagctcgatgcacaattgaatgaaaccggagatctcataacagatctaacggcatagtttaagcttgcatatctgcagttagagat

SEQ ID NO: 53912 - DNA, 395 bp, Glycine max
  unsure (1)..(395): unsure at all n locations
  Clone ID: LIB3109-036-Q1-K1-F2
ggggttgaagaaaagaaagggtgtttacactttacttgagtgagactgagagtctcaagagagtgtgtgtgagtgtttgatattctcgattaaataaatctcactgtctctttctctctctctctctgtctctgtgtttttgttgtgttctctttactacctcttgaaaccaaaagggtcactctctgtgctgtggcctctgttttcaaaggaaacccttgttcttttccttgcctttctttcttagcactgtcttccaactcccaactcatataatttcattttccctagtctttnttggtttcactctttccttgtgaaatctgcaaaaccagctattcagtttagttatcataccaagccgaagctcttacattatttntatatataagtag

SEQ ID NO: 53913 - DNA, 410 bp, Glycine max
  Clone ID: LIB3109-036-Q1-K1-F3
gacaacaataattctcaaagtggagaagctcccagagaaaatttcattcacgtgagagctagaagaggtcaagccactaacagccacagccttgcagaaagagtgagaagagaaaagattagtgagcgaatgaggttgcttcaagaacttgttccaggttgcaacatgataactggcaaagctgtaatgcttgatgagataataaactacgtgcaatcacttcagcaacaggttgagtttctgtccatgaaacttgccacaatgaacccagaactgaactttgatgtagacaggatcctatccaaggatattctccaatcacgcataggacatggaattggtgcatatggtcctggtatcaattcctctcacaccttccccaatggaagtttccatggaacattggctgg

SEQ ID NO: 53914 - DNA, 406 bp, Glycine max
  Clone ID: LIB3109-036-Q1-K1-F4
gaagatgaaaaaaaactcaattaaacaaagaaatactcctacactcaattaaatactccaagtgtgtgtttggatggagcaattaaagtaagtaaagtattttaattgagatattaaaatgcttacttgtaaaatgatctgattggatagggtattttagaagtaattaaaatgtcatcattttattgaagcattttaataaagtaaattggcagaatttcaaattctcactgaaaatagaggaattaaaattcccagccactcttaggctctctctccctgtcagccacatgctctctcttcatctcagccactctcacgatgatagttctctctcagctgcacgctctctctcacgatgctagcgcgctctctctctctcagcacactatctctgtccgtacct

SEQ ID NO: 53915 - DNA, 402 bp, Glycine max
  Clone ID: LIB3109-036-Q1-K1-F5
gataccaaaaacaaaacacaagccaagtgaaagtgagaaaaaataaaaatcaaagagcataatgtcagggatcattcacaggattggggagacccttcatgtgggagggcacaagaaggaggaggagcataagggtgagcaccatgctggagaatacaaaggggagcaccatggtgaacacagtagtgagtacaaaggagagcatcatggtgaacacaaagctggagagtaccatggtgagcacaagccagagcacaaagaagggttcctagacaaagtcaaggacaagatccatggtgagggcggcgccgtcgaaggcgaagaagaagaagaaagagaagaagaagaaggagcatggccatgagcatggccatgacagcagcagcagtgacagtgattaaa

SEQ ID NO: 53916 - DNA, 413 bp, Glycine max
  Clone ID: LIB3109-036-Q1-K1-F6
ggaagttaagtagtactctagtgatactgagtctcaagatgaagcctatagaaaatggcaataccgttagcatcaactatcaaaatagctggttaggcttctccctctccccacaaatgaatataggtgttccttcacaccttcatcagacacagccttcatcagcagctgttgaagcagttccaccaaacttttaccatcatacacctctccataattatggcctttactatgaactggaaggtgaacacgttggaatgagttcatccttgcctatcatgccccttaagtccaatgcttctctctctggaatagaagctctgagtagatcacaagcacaaggttagttccaactcaaatttctgttatgttattttttttctgttttggtaagtatttattatgtgactact

SEQ ID NO: 53917 - DNA, 410 bp, Glycine max
  unsure (1)..(410): unsure at all n locations
  Clone ID: LIB3109-036-Q1-K1-F7
ggtggtagatctggcggcttggtttgttctacttcctcttacactgggattagaacaaggcgtttgtgcacttctaacaacaccacctttcccttcccccaacaacctcaatcactctctttcgctaaacctctcaaactcatgtctcaacctttgaccaccaactctgttcttgttgaagaggctgctgctgatggtgattcctccgccgccgcacctcccctcttcgattatcatcgtatcgaccaaaaactggctccaaacataatttacgatgctcttgtctggagcaccctcaactgcctccttgttggtgacaaatctgttcagagatcaggaagagttcctggtgtgggcctggtacatctnccactttccttattacctgggccatttcctgaaagtcattg

SEQ ID NO: 53918 - DNA, 395 bp, Glycine max
  Clone ID: LIB3109-036-Q1-K1-F8
gtatgatgtggatcttgttcagaggctgttagagcattttattattcaggaacacactgaaagttcaagtccaagcagacagtccttttctgataaacagcatatgggaatgggatgcatcctaaatgccaaggcaagagtggcaaggcttgttgacagttatcttacagaggtgtccagagataggaacctttccctcaccaagtttcaggtacttgcagaggctttgcctgagtcagctaggacctgcgatgatggactatacagagcaattgattcctatcttaaggcacaccctacactttctgagcatgaaaggaagcgactatgccgtgtaatggattgttagaaactgtccattgatgcctgcctgcatgctgctcaaaatgaaagac

SEQ ID NO: 53919 - DNA, 419 bp, Glycine max
  Clone ID: LIB3109-036-Q1-K1-F9
gctatctccgaaggtgcaacatcctttcgggtcggtgaatatcaatatgtggggatcttgatggttgcttttgcaatactgatcttcctttctctgggctctgtggaaggcttcagtactaatagccagccctgcacatatgataagagcaagctatgcaagccatcccttgcgactgcattgtatagcactgtatctttcttgcttgatgctataacttcagtcctatctggtttccttgggatgaaaagtgcaacctatgccaatgcaaggacaaccttggaagccagaaagggagttggaaaggctttcattactgcatctaggtctggtgcagtgatgggtttccttcttgcagcaaatggtcttttggagctctacattaccatcaatctctataagctatattatggtgatga

SEQ ID NO: 53920 - DNA, 409 bp, Glycine max
  Clone ID: LIB3109-036-Q1-K1-G1
ggggattcaaattcaaagaggcgtgtcagcagaagcactgaatccaaaaacacacaggacataaacataaacataattgaagggaataataacccaaaagcgcaggtgcaagaacgtgctgcagtttttgaccaacatttctacgatggaatcccattctttgctgataataagccttctagaaccaacgagaaggcttctaccactgcgggtgaagagttctacgacggaatcccgcgcttccccgaggactccttgccgaacaagcctaagtcaaaggtctcagaggtgagtttacgcttgggcaaagctgttactactggaattgctattggattagagaaagcagtagaggttttggacactcttgggagcagcctgacaaatttaaatgtgagcagtgggtttt

SEQ ID NO: 53921 - DNA, 373 bp, Glycine max
  Clone ID: LIB3109-036-Q1-K1-G11
gagcaagagtgaagagtcgaagagaatggctcccagggtttaatctttttggctgtgttatgcttctcagcactgcactgagtcgttgtcttgcggaggataatggacttgttatgaacttctacaaggaatcatgccctcaggctgaagacatcatcaaagaacaagtcaagcttctctacaagcgccacaagaacactgctttctcctggctcagaaacatcttccatgactgtgctgttcaaagttgtgatgcttcactgttgctggactccacaagaaggagcttgtctgagaaggaaacagatagaagctttgggttgagaaatttcaggtacattgagaccatcaaagaagctttggaaagggaatg

SEQ ID NO: 53922 - DNA, 426 bp, Glycine max
  unsure (1)..(426): unsure at all n locations
  Clone ID: LIB3109-036-Q1-K1-G12
gatacgcagattgtggttagtgttgacaaaagtaaaatggataatgaagaaaaagagtgttgattttgtgagagatgatgagttatgcaataggagcacttgttgttccgtctgcaactcccctaccttttttgaattccactgctccagtggaagtggaacatggtcatggtgtgaagcccattcaagattggtataagtggcgcctcgttttggcttatgatggaaccaaatacgcaggttggcaatatcagcagtctccccctactgtacaatgtactttggagaaagctntaactcgagcaacanagcttcaaaggaaggatttctgtttggttggtgcgagcaggaccgatgcangagttcatgcttggngtcaggttgctcatttttttacaccttttaactatgacaacttggaagaac

SEQ ID NO: 53923 - DNA, 404 bp, Glycine max
  Clone ID: LIB3109-036-Q1-K1-G3
acattgctaatggaagtgttgcttcttgcttaagagagcgtcctccatatcaagaacccctggattggccaacccggaaaagagtagctttgggatctgcaaggggtctttcatatttgcatgatcattgcgacccaaagattattcatcgtgatgtgaaggctgtgaacatattgctggatgaagagtttgaggctgttgttgcggactttggattggccaaacttatggattacaaggacacgcatgtgacaactgctgtacggtgcactatcgggcatatagctactgagtacctttccactggtaaatcttcagagaaaactgacgtttctggttatggtatcatgcttctggagctgatcactggacagagagcttttgaccttgctcgactcgctaat

SEQ ID NO: 53924 - DNA, 296 bp, Glycine max
  Clone ID: LIB3109-036-Q1-K1-G4
aataatagaatggcatctgggagtagaaaacacactacagagttcttcacgagaaattatgcatctaagaatcatcctatgctcaccaatcatctccgtcactccacccctggccttgtcatctacgacgtcgccttcagtatctacctcatcagctaacaaatctacaataggctctattctcccgatcctcattcgatttctcacgtgaaatccgcagatcaccactaaacttttgcactgacgcactccattccatcatcacttaataagtttaccaacatgttctctcaacc

SEQ ID NO: 53925 - DNA, 406 bp, Glycine max
  Clone ID: LIB3109-036-Q1-K1-G5
ggtggcaggtgtgggttcttcaattcattctagttgtggattccgactagccgcgttgactcggttccgtttttcattctcgcggatctaatattaaggaatagcttaagggcacattacaatgaaggcattgattctggttgggggatttggaacaaggctgaggccactgacactcagtttccctaagcctcttgttgattttgctaacaagcctatgattttgcatcagatagaagcccttaaggccattggagtgactgaggtagtgctagccatcaattaccaaccagaggttatgttgaatttcttgaaagattttgaatcaaagctcggcatcaagatcacatgttctcaggaaacttgaccactgggaacagcaggtcccctggctcttgctagggat

SEQ ID NO: 53926 - DNA, 414 bp, Glycine max
  Clone ID: LIB3109-036-Q1-K1-G6
gggaaggaagggagggaagaatagaatgggatctggaagtggaaaacacactggagagttcttcaggagaagggatgcatggaggaagcatccgatgctcaccaatcagctccgccacgccacccctggccttggcatcgccgtcgtcgccttcggtatctacctcgtcggcgaacaagtctacaataggctctatgctcccgatcctcattcgatttctcacgtgaaagccggggatcaccactaaacgtttggacggacgcactccattccatcatcacttaataagtttgctagcatgttctcgcagcctttaatgtttaaatttcagaccgtgttcgcttctttggcactcactatgttgtcttgtatgcctacattttatgccttcaatttgcattcacaatgaaactc

SEQ ID NO: 53927 - DNA, 176 bp, Glycine max
  Clone ID: LIB3109-036-Q1-K1-G7
taaagggggaatttaagggagggaacaatacaataagatctgggggtagtgctcacactatagaggactacactataaggtatacattgaggactcatatgttactcaccaatcataatggacactcaaactcaagccatggaatctacttggtggacttcgaaatttacctattc

SEQ ID NO: 53928 - DNA, 431 bp, Glycine max
  Clone ID: LIB3109-036-Q1-K1-G9
tgagagcaagagtgaagagcgaagagaatggctccgaagggtttaatctttttggctgtgttatgcttctcagcactgtcactgagtcgttgtcttgcggaggataatggacttgttatgaacttctacaaggaatcatgccctcaggctgaagacatcatcaaagaacaagtcaagcttctctacaagcgccacaagaacactgctttctcctggctcataaacatcttccatgactgagctgttcagagttgtgatgcttcactgttgctggactccacaagaaagagcttgtctgagaaggaaacagatagaagctttgggttgagaaatttcaggtacattgagaccatcaaagaagctttggaaagggaatgcccaggagttgtttcctgtgctgatatcctcgttctctctgccagagatggcat

SEQ ID NO: 53929 - DNA, 247 bp, Glycine max
  Clone ID: LIB3109-036-Q1-K1-H1
tttggggatgatcagcagtgaaaaaaaactgctttgaaccccaatgattaattattaatcaaattcaattcaatgaccaaccaatcttcttcgccctctttactttgcgcttcttttaaccaggaccatatttacttttccgctggcaccacagatggtgttagaatatttgatgctaatacaggaaagcttttttatgaaagagggtaattcagatcccttaaataataaccttttttcttgttaa

SEQ ID NO: 53930 - DNA, 75 bp, Glycine max
  Clone ID: LIB3109-036-Q1-K1-H10
aggtattggcaaagtacaacgaaagttggttttcagttgagaggcaaatggtaacgtaattgagtaataaggttt

SEQ ID NO: 53931 - DNA, 162 bp, Glycine max
  Clone ID: LIB3109-036-Q1-K1-H11
gacgacggaaagactgtgtatcgggtattcagagacagagatgtgcccaaaacattagactgtgcgagacattgcctagcatctacaatagagtatggctacggaactgacccttctcggctggatataccatcacccgaaccatcatgaccaaactttccc

SEQ ID NO: 53932 - DNA, 359 bp, Glycine max
  unsure (1)..(359): unsure at all n locations
  Clone ID: LIB3109-036-Q1-K1-H12
taccgaactgcaatttcgacccacgcgtacgcacgggtgcacagcatacgacacgagaagactacagattgttttactaacctacgccctacgggttagcgatacctgaacgaagaggttcaagatacacgaacgatctagctgcacgtcatgaccgatgcatagattnctcatgaacctcgattgtgccctaacgtactctcagtcacaatagacaccgtcttagtcgtcttcacaatcaatggcaccgaagcagaccatggctgagaacaagatcgcttacgatgcgaagctgtgcgacctaatggaggagtacggtcagatccttggtgtgaacttcgatcacgtgggatcgaacc

SEQ ID NO: 53933 - DNA, 257 bp, Glycine max
  Clone ID: LIB3109-036-Q1-K1-H2
tatcagtggtggttgcatcatcgagtccggtttcacactgttcaaacataccggtggtggtggccatataggaggacattccttacatcaagtgtcaagcgtagtataagctctctaaagagttgcatcagcaggttcaattcaatctatctgatatcgctcccaaaaatatctcggtataccaaatcattgatatatctcataatgttttttatcatacaaaggtctattctgtttgtatattcggcatatgatat

SEQ ID NO: 53934 - DNA, 235 bp, Glycine max
  Clone ID: LIB3109-036-Q1-K1-H3
ggttcagatcgcaagaaatattcaactgctttggacctccctgtaccaaactaaagcatatagcgaacaatgaccttccaaccttcttcactatctctacactgctcttttctcaaccagcaccataattactctgactctaaccatagaaatcccgttcgaatatttgatgctaatacacctaacactttgttattaatacatgcgcaatccaattcctctaattaatcaccac

SEQ ID NO: 53935 - DNA, 397 bp, Glycine max
  Clone ID: LIB3109-036-Q1-K1-H5
ggatgagcagcagtgaaaaaaaacttgtttgaaccccaatgattaattattaatcaaattcaattcaatgaccaaccaatcttcttcgccctctttactttgcgcttctttcaaccaggaccatagttactttgccgttggcaccagagatggtgttagaatatttgatgctaatacaggaaggctttgttatgaaagaggtaaattcagttcctttaattaatcaccttttttcttgttaattttttcccccttccttcgtgtagcggttggagcttttgttattgctgagatgctgtttagctccaaccttcttgctatcgttggagctggtcatcagccatctttgtctcctcgccgtctttggttattcaatacaaccactggagctgctctt

SEQ ID NO: 53936 - DNA, 406 bp, Glycine max
  Clone ID: LIB3109-036-Q1-K1-H6
gatcagtggtggttgcagcatggattcccctttcacactgttcaaagaaaccggtgggggtggctagaaaggaggacattccgtacatcaagtgtcaagtgtgtgagaagctcgctaaagagttgtatcagcaggttcaaaacaagcaagctgagatcgctcccaaaaagatctcggagtaccaaatcattgagatagcggagaatgtttgtaatctgaaaaaggtagaagcggattggatattgcgcatagatattgtggagaaagaagataggctggagctggtggaacaagactctgaaggacaatgtaattctgaatgcaagacaattgagcgagcctgtcaagaggtcataggatattctgataccgatgttgccgaatatttatataattccaagcctga

SEQ ID NO: 53937 - DNA, 393 bp, Glycine max
  unsure (1)..(393): unsure at all n locations
  Clone ID: LIB3109-036-Q1-K1-H8
gactctacaattgtgatcttcacaaatcaacaacgtctctctctgttactctgaaaattgacttcaagttagtataactggctgtcaagttgtaatggcattggtctctggaagaagttctgcactgaacccaaatgcacctctattcatacctgctgctcttcggcaggtggaggatttttcacctcaatggtgggatcttgtgaaatcttcaacatggtttcgtgattattggttgagccaacataaggaggaagaatttgaagttgccaatgactctagtaatgatgatattgagaatatgctctcagaaacttttgatctangcatggaagaagacttcaatgttctagagaacgagtttgagcggttggtgatgtcctctgaagctct

SEQ ID NO: 53938 - DNA, 379 bp, Glycine max
  Clone ID: LIB3109-036-Q1-K1-H9
cgcacaaggaaacgcttgggaggagataaagagagagagagaagtgcagaaaaaatgagactgttcgatccatgggctgaattcttcaagatagaatgtacgcggaattggtccttcttggttggattctccatcaccgtaactctcatgaccaaactttcccttgggctctctgacgaggaagccaaaacgtcgaaattcgtccaggcacacattatgtgactttacaatggaacacttgcagtggctttgcacattgcattatatgtgtgaagagagctcatggttgtaatacatgaatagagatgtagtatacactacatgtccctatttacattgtggctgattactacaatgtgattgagaaattcatactcat

SEQ ID NO: 53939 - DNA, 411 bp, Glycine max
  Clone ID: LIB3109-037-Q1-K1-A1
gatgttaaattagggaagtgtgtgaaagatgtgctaaagagcatttatacagagaatgctacagattccctcctcatttctggcatttatgcagttgctggaagtcaccaattttacaagaatgcaagaaatgaagcaaatgaactttaaagtagcaaattatggggtacatgaaaccgagggagaaagtatggtcaaggaggttggactcagcagagttgaaattgataattaggcatgagaatactaaaggttaacgaacaagtggtgtctctattacactaagtggtggccctctatgagtctatggtgcaccaaaactccatttgacatgtctgaacacagccagttcctcatgtaggaacacatggtaatacaattttgattgaatccgaaggtggtatggagcac

SEQ ID NO: 53940 - DNA, 412 bp, Glycine max
  Clone ID: LIB3109-037-Q1-K1-A10
gacggctaaaagctaaaaatcatcgaagtactcaaattagcatggctgtcacggttgcattcttgaatttgatcatcatgttttcagtagtctctacaagcaagtcactgagcttaaactactattcaaaaacatgccctgatgtggaatgcattgttgccaaggcagtgaaggatgccactgctagggacaaaactgttccagctgcacttctgcgaatgcacttccatgactgtttcgttcgggggtgtgatgcctctgtgctgctaaattcaaaaggaagcaacaaagcagaaaaagatgggccaccaaatgtttctttgcatgcattctatgtcattgatgcagcgaagaaagcactagaagcttcatgcccaggtgtggtctcttgtgctgacatccttgctctagc

SEQ ID NO: 53941 - DNA, 353 bp, Glycine max
  Clone ID: LIB3109-037-Q1-K1-A11
gacagaagcatggtgaagatgtggtgcattctttaaaggtttccttggaggacgtttataatggcacaacaaagaaactatctctttctagaaacatattatgcccaaaatggtaaaggaaagggtcaaaaaggggaacctcttgtaagggttttggatgccaaagcccttggttgaaaattacaagaaggcagattggacctagcatgattcaacaaattccacatgtctgtcctgactgcaaaagatctggtgaggtcattaacgagagagataaatgtccctctgtgcaaaggaaacaaggtttcccaggaaaagaaggtgctggaagtgcatgttgaaaagggcatgca

SEQ ID NO: 53942 - DNA, 406 bp, Glycine max
  Clone ID: LIB3109-037-Q1-K1-A12
gaagtgggagttgaacaaggtctttttattggcagcttgttttattgccctctttattgaacttttatcataacattaagatatccccagcttcttgtcttttccctggcactcaaactcaattcactgatccaccacatgaggcactcagagagcatttgttgatttggatttggaaggtttttccactttggttacgggagcaacttaacttccttccttctctccttattttccacattgtacaaatgaattttcagggtacttggtaatagtggtgcctgacaaaaatattggagatggggattttgagtactattgcaagcttttttggatttggagtgggaacttcaattgggctagtcattggctactatttgttcatatacttccagccaacagatgt

SEQ ID NO: 53943 - DNA, 410 bp, Glycine max
  Clone ID: LIB3109-037-Q1-K1-A2
ggaaaaaagagtgacactcattttaaacggaaattgctttagcataaaagagttcaagaggaggaagaacaacaagtagtaataactatatctacatagttatctttctcttgagctttgtaatttgaaacctatagatggaatggaggaagtgctacttggatgttatattggtgcccttggtgtttctaacaagcattgggtaccatttctggctatggcataaggttcgaactcagccacacacaaccatcattggcatcaatgctagtggccgtagaaattgggttaatgccatgatgaaggtacctagctatcttattttcattcttgtttttagttttggcttgctaagagtatatataattcttatcactattattttttttctttccaagttatcatcacta

SEQ ID NO: 53944 - DNA, 421 bp, Glycine max
  Clone ID: LIB3109-037-Q1-K1-A3
ggaaagaaggttaagtgaaaagtgaaaagtgaaaatggacttggaagcagtgaagaggtacttagagaaaggaggagaaacagcatcggcggtggatgggttgcctccgaggtttctggaaccgttaataatgaacgctcttaaggtcgatctcatcgaaactggtcgcgttgtctgctccatgaagatacctccgcgtttactcaatgctgggaattcgttatacggtggcgccatcgctgctctggtcgacgtggtggggtccgctgcgattcccaccgttggatattcggctcccaatactggggtttctgttgagattaatgtttcgtatttggatgctgcctatgccgatgaggagattgagatcgaggccagggctttgcgtgtagggaaggcttgtgccggtataagcgtggag

SEQ ID NO: 53945 - DNA, 410 bp, Glycine max
  Clone ID: LIB3109-037-Q1-K1-A4
gatcttgagaaatgcagaaccaagtgcttgaaagattgttcctgcatggcatataccaattctaatataagtggagcaggcagtggctgtgtcatgtggtttggtgatttattagacatcaaattgtatccagatccagaaagtgggcagcgtctatatataaggttacctccttcggaattagattctatcaggccccaggtgtctaaaataatgtatgtaatatccgttgctgcaactataggagttatacttgctatttattttctctacagaaggaaaatttatggtaaaattattcttctcttctctcacatttgacagaaaaaatagctgaatagttctgcacagaatattttaagtagaaattctgctgtttgtcaattcccttgacaagtgctgttattcaa

SEQ ID NO: 53946 - DNA, 412 bp, Glycine max
  Clone ID: LIB3109-037-Q1-K1-A5
gatagaaaaaaataaaaaactttcgaaagaggttatccaattgaaattttaaaaatgactgggataaacttaagaattcaattattgaaattgaataagtaaacaatttaattggattggtcgaatggtatcaaaaaaatggagtactaactcccatttcttatttattattgaattaaccgatcaacttgctttgttatcgaacatttctttttgatttcaaaaattttccggaaaaaatttgaatctatttttatatgcgaatcaatcctactacttctggtcctgaggtttctgcgcttgaaaaaaaaaatctgggacgtatcgcccaaataattggtccggtactagatgtagcttttcccccaggtaagatgcctaatatttacaacgctctgatagttaagggtcg

SEQ ID NO: 53947 - DNA, 318 bp, Glycine max
  Clone ID: LIB3109-037-Q1-K1-A6
gcttcactaccctgtctaacgctagcagtaggggtgattttaggggcatgctgagaattccaaataatctagataatcatgcctcctgtgatcatgcttgtatacgcctttagtgttcaagctctagtgttctacttaaatggaatattaacttccagatggcaatatctctcgaattcgatcattatactactacgcactcacactataccatagcactaaatcttggaaccactactcaacacattacccttatatacatatatcagacacagtaccattagaaactacatactaatgcagatacacatatacata

SEQ ID NO: 53948 - DNA, 300 bp, Glycine max
  Clone ID: LIB3109-037-Q1-K1-A8
taccaaattcacggaggatgggggcttactttcatatgccagttctaacttaaactgatctgcctcttactatatcatatgatgttgttatttataatacatcaaaatttatcctgatccacaaatgtgatattgttcctatacaatggaatcatatctctaattttatcctaatagaacccaattactataataaatgtatgtactattctgttactcaactttactatatacacattgttattaattacttttctaatagaaattttttttcttaatttttcatctatatcatctaat

SEQ ID NO: 53949 - DNA, 365 bp, Glycine max
  Clone ID: LIB3109-037-Q1-K1-B1
gattcaggagattgtggatcatgacagcgatgagaatgacaagcaggacagtgtttccaaccaagttaacattaataatagtgtgtcagctatggatcaagaggttgaacctaagggcttgccagctggtggagattatgcaaatgtgggacatgaggcaattgcccatgcttctactgtggagactatcattacggtcactgagagtgtagtaacagaagtagtggccagtggtgaggatacttatcgtgccgaaaagaataatgaggattcagcagcacagctggagaatgaggtgtcaaaggcgcagctggatggtgaggactcaaagccccaactggattatgacaccaagcccttgcatg

SEQ ID NO: 53950 - DNA, 410 bp, Glycine max
  Clone ID: LIB3109-037-Q1-K1-B10
ggtacacacgagtaccacaaacctctgtctataaatctttctagaacgtttcttcactccccgaacctgatctcttgctggttgccacactacaccgatatttccaccaaacccgtttgcgttgttgtttgcgaataaatggcaactaagaggagcgtgggaacgttgaaggagggtgatttgaaggggaagagggtattcgtgagggtcgatctgaacgtgcctttggatgacaaccttaacatcaccgatgacactagagtccgtgctgctgttcccaccatcaagtacttgactggttatggtgctaaagtgatcctttctagccatttgggacgtccaaaaggtgtaacacctaaatacagtttgaagcctcttgtgccaaggctgtctcaacttcttggaattga

SEQ ID NO: 53951 - DNA, 416 bp, Glycine max
  unsure (1)..(416): unsure at all n locations
  Clone ID: LIB3109-037-Q1-K1-B11
gggaaatgaaagggaagagagaagaaaaagggctagagagcttgcggagatggctaagaaagctgtagaaggaggatcttctcacttcaacgtaacccagctaatacaagatatcatgcaacagtccaacaaagactagtactaacgatcatcttcggttatcaaaggcatattaatatatatacactatttcagaagaagttcctaattagcttgcagagggttgtaacatatactgtgtggcaagcctgtgaaggctcgaggaagaagagtatcctgtgtaaactcgagtgattactggaataaattaatcctactggaaacaaagaatggatataatcatatagactaaggatttgagggtgaaatataccttgagctaattgaagntttaattttatatgtttgatatcaag

SEQ ID NO: 53952 - DNA, 254 bp, Glycine max
  Clone ID: LIB3109-037-Q1-K1-B12
ggaattattgtagcgtaaatgcaatcttatcaatgaaaaaaaagaatgcgatttaagaaaatttgagtttgatctctactggtattttgcagtgacaggggtttttgtttatacaatggggatgcaatgttctctgtttatttaagacgatataaactatcgaaacaagatagtgtgacgtgcacggtttaatataatgaatgggtccactttactcttaatgatttgatatgatataaaaagggcgaaacgta

SEQ ID NO: 53953 - DNA, 399 bp, Glycine max
  Clone ID: LIB3109-037-Q1-K1-B3
ggaaacaagaagtgaggttgtctttcaaagatggaagaggaggcatttgaaaaaccattgttgaagagacagtatcatgagaactgtcctggttgtaaggtggatcaagccaaggagctcaaaaaggatgtttcctttagaaacctttcttatatatggttggcagtgttatgtggcacattgcctgtggcatcactctttccctttgtttatttcatggtgaaggattttaatattgcagaaacagaggaagacataagtacctatgctggatatgtgggatcagcaatgatgcttggaaggtctttgacgtccatattgtggggtatggtttctgaccgctatggtagaaaacctgttataattatagggattatcactgttggcattttaacacat

SEQ ID NO: 53954 - DNA, 407 bp, Glycine max
  Clone ID: LIB3109-037-Q1-K1-B4
gatagaggtgcggattcttgtttttgttggagatctttctttctttgattccaccagcctcattgtcttagggtttttgtttccagcatagatgttgttgtcgatgattacttactagttttggtttgcttgattgaagatcaaggaaggaaggaaggaagatgttgggtgttataaggcacaagagtattcgccctgccttctccgcaatcagacacttgtcttctgcagctaaagagattactgtcagggaggctctgaactccgcactcgatgaggaaatgtcagctgatcctaaagtgttcttgatgggtgaagaggttggggaatatcagggtgcatacaagatatccaaggggctgctcgacaagtatggccccgagagggttctcgatactccaatcact

SEQ ID NO: 53955 - DNA, 350 bp, Glycine max
  Clone ID: LIB3109-037-Q1-K1-B5
ggagcaagagtgaagagcgaagagaatggctcccaagggtttaatctttttggctgtgttatgcttctcagcactgtcactgagtcgttgtcttgcggaggataatggacttgttatgaacttctacaaggaatcatgccctcaggctgaagacatcatcaaagaacaagtcaagcttctctacaagcgccacaagaacactgctttctcctggctcagaaacatcttccatgactgtgctgttcagagttgtgatgcttcactgttgctggactccacaagaaggagcttgtctgagaaggaaacagatagaagctttgggttgagaaatttcaggtacattgagacca

SEQ ID NO: 53956 - DNA, 392 bp, Glycine max
  Clone ID: LIB3109-037-Q1-K1-B6
ggttgattgggagtagcacgtatggttttaggggcatgctgtgaataccaaatatttagtgaatcatccagcctttgatcatttctctattgtatttagtgggcagctaatagctagctacttaaatgttatgttcacttctggttgacaatttcactaagaatttaaggtaggaatataatgtgttcactctatatcatagcactcaatcttgaaaccagtgctgaacagctgaccctaagaaacctatagcagccacaataccaaagaaagtacatagaatgcaaataatttatactacacatgtataaatgctcaaaaatataaaatacttcagcattaataatcataaatcatataaaaagccgataataattaatctaactaacaaa

SEQ ID NO: 53957 - DNA, 407 bp, Glycine max
  Clone ID: LIB3109-037-Q1-K1-B7
ggagtcaaagggtgtgagtgagtgtgagcaagatgggttctttggcaaagaagggactcaacaattacgtcaaacagctccagcaacaccctttgagaaccaaggtaatcactgcaggggtactatcagcggtcagcgatgttgtgtctcagaaacttactgggatacagaaacttcaactcaaacgtcttcttttcaaagtgattttcggagctgcttatcttggaccctttggacacttttttcatttaatactggataaaattttcaaaggaaagagagattcaaaaactgtggccaagaaggttctgattgaacagttgacatctaatccttggaacaatttgcttttcatgatttactacggattagttgttgaaggccaaccttgggtgaatgtgaaagct

SEQ ID NO: 53958 - DNA, 406 bp, Glycine max
  Clone ID: LIB3109-037-Q1-K1-B8
gaagtcaggatggcagaggtgaagcttcatggattttggtatagtccctacactttgagggtggtatggaccttaaagttaaaggatataccatatcaaaacatagaagaagaccgctacaataagagtcttcaacttcttgaatacaacccagtatacaagaaaactccagtgcttgtccataatggaaaacccttatgtgagtccatgcttattgttgaatacattgatgagatttggtcacataattcattacttcctgctgatccctacgagagagctctggcaaggttttgggttaaatatgctgatgatgacatggtaatttttaaaaacttaatcatgtagtactacttaaagtttctagcctttgatcttgatcaagagcacctgcatttatacaatt

SEQ ID NO: 53959 - DNA, 415 bp, Glycine max
  Clone ID: LIB3109-037-Q1-K1-B9
aggacagctatcaggagtagcagtaggttcttctgtttgcatagcaagcattgtagccggaccaatatcagggggatcaatgaatccagcaaggacattaggtcctgcaattgcgacatcatactacaagggactttgggtatattttgttggacctattactggggcggttttagcagcttggtcttacaatgtgattagggacactgaacaccctggttttcccatttcactatcctccatttcatccaaggtgcgccaaagcattggtggaactgaacaaaaaagcgaccaaagatgcttggtgtgaatgaaataataaacaacaatgttttttctgacaccacaccaccgcccaaatcaacatcaccttcaatttcttgtcttggaggatctcaagtttccacatgtatta

SEQ ID NO: 53960 - DNA, 336 bp, Glycine max
  Clone ID: LIB3109-037-Q1-K1-C1
gatgaggggcaggttcaggagttggaggagcaccgcattgagttgagtctcgggcaagataataatgttgagagggttgaagttgagaaggagcagggtggagaggagcagatgatggatgtgggttttgagcagtctaaggaggaggatatgcctggaatgtggcttttggatcagaagaactgtgtgggggagccatttttgcggccttgtcatggtggtgatgtgaagggtgtggagtttgaacaagtgagagaggacgatggagaagatgtgcaggaacaagaggaggtggaggaggaagaagaagaagaagatggtgaagaggatgggcat

SEQ ID NO: 53961 - DNA, 375 bp, Glycine max
  Clone ID: LIB3109-037-Q1-K1-C10
ggcacaagtgagtttgttgatcgagataactagaaacagtgtgatgaaaatgaaggtccttgttttcttcgttgctacaattttggtagcatggcaatgccatgcgtacgatatgttccctctccgaatgaacactggctatggtgcccgtactccggaagtgaaatgcgcaagttggaagcttgctgtggaagcacacaacatctttggctttgagaccattcctgaagagtgcgttgaagcaacaaaggaatacatccatggcgaacaatatagatcagactccaaaacagttaaccaacaagcttacttttatgccagagacctcgaagtccatcccaaggacacatttgtgttcagtatagatggcaccgt

SEQ ID NO: 53962 - DNA, 377 bp, Glycine max
  Clone ID: LIB3109-037-Q1-K1-C11
ggcacaagtgagtttgttgatcgacataactagaaacagtgtgatgaaaatgaaggtccttgttttcttcgttgctacaattttggtagcatggcaatgccatgcgtacgatatgttccctctccgaatgaacactggctatggtgcccgtactccggaggtgaaatgcgcaagttggaggcttgctgtggaagcacacaacatctttggctttgagaccattcctgaagagtgcgttgaagcaacaaaggaatacatccatggcgaacaatatagatcagactccaaaacagttaaccaacaagcttacttttatgccagagacctcgaagtccatcccaaggacacatttgtgttcagtatagatggcaccgtac

SEQ ID NO: 53963 - DNA, 412 bp, Glycine max
  Clone ID: LIB3109-037-Q1-K1-C12
gaggtgcaagttgagattttgattgttgttgggctcccaaattcccaaaacagtgatgatcttaagtaaaagaaatgtttttggcaccaagggaaaaatgggtatagatttcatgattttggtgttaacattgtcatggttttgtctgactactatatgcgtctcagctacaaaacaagcatacccaccaacaccacaaccgaaccagaacctaaggtttgaccaaaatggagaattcaagatattgcaggtggcagatatgcactatgcaaatggcaagaccacgcattgcttgaatgtgctcccttcccagaatttttcttgctctgacctcaacaccactatctttcttaacagaatgatcaaagcggagaaacccaatcttattgtcttcactggagataatatcttt

SEQ ID NO: 53964 - DNA, 367 bp, Glycine max
  Clone ID: LIB3109-037-Q1-K1-C2
gggacttagacctggagatgtaaatgatggcatgcatccaatgcacagtgaggctgctcttggaggtggaaacagcggtggtccaccttcggctactggtccaaacgatgcacgtggtggaagcaagcaagatgcctctgaggctggaacagctggtggagacggccaaggcagctccgcggctgctcataacagtggagatggtgaagaggcaaagtgacatgtttttatgtgcttttcatgagatacatatgactgttgatagtaggttttcttaaaagggtaggactagtgtgatctgatgacctttgataggtcgaccaaaggacacaagggcttctcttgtttgatagcttaagtagttgtg

SEQ ID NO: 53965 - DNA, 408 bp, Glycine max
  Clone ID: LIB3109-037-Q1-K1-C3
ggccagctgttcgaccatattggtttcactttggtcttcttcaccctgttagggtttgcatcagattcccccaattcttgtttgattttgcgctttcactagtttttcttcgacatgactcaagatctcgagatgagggatcgctcaacgccttccaactctgtttctttgcctgctccatctactttgcagcatttgaaggagatagcgtctcttatcgagaccggttcgtactcgaaggaagttcgtagaattgctcgcgctgttcgccttacaattgcgttgaggcggaaattgacagcatccgctatctcttcttttctcgaccttgttctcactccaggctctgaagttcacgccaaattgtctgcgtatcttcccaaggaggatgatcatgagatggaagtg

SEQ ID NO: 53966 - DNA, 412 bp, Glycine max
  Clone ID: LIB3109-037-Q1-K1-C4
ggatcgagtatgttttctggtttctttcgtcatgctctgagtattctcttgctctttaacttgatcttggttttcttcggactagtagtacgccatccatatgcttaaatcatgtttagcttgccaacatatttcagctttcttcctaaatctgctctttttttctcacattcagcttattgcttacgatttggaatagtgacaagtaaagacaaatcacaactcacggtcatccaattccaagaatagaggtttgttcctttctttatagcttattatattgcctacttcttttgctcatttatttaagatttgaagaaatttcactcataaagatggatatataaagttctcgtttagatctttcaactctcatggctaatttgtagctctttaacaaaattttgacaaa

SEQ ID NO: 53967 - DNA, 413 bp, Glycine max
  Clone ID: LIB3109-037-Q1-K1-C5
ggagaggagaggtgcggcgatggcttttgcagttacgcccaagataataacggtgtcattcgataagcaaaaccaaaggaggagtttcgaaggattgtttgggaaaaggtatcgggtaagggtgaagcgaagtcaagatcattcagtgaagtgtggtattgagcgaagcagcagcgatggaaagaaagggtgcggaggaggaggcgtgtcgaattcgaactacgtggtgccgctggacaacatggcgaactcatcctgcataacacgtgctttagccgagatactcagggacctcaataaaagaatcccggatactatcgtcaaacatgatcgcttcatacgctggtatcatgccaacaggatgctcagtctctaccccccaagttggtgtggcgagatacgtgatggcattt

SEQ ID NO: 53968 - DNA, 403 bp, Glycine max
  Clone ID: LIB3109-037-Q1-K1-C6
ggaggattaccgtggcaagaggaggaaggatgaggaatatcttaggagggagcatattgacaaagaagaagttctgcatggctacagggaaaatgctagtcggcgcaggcgagaaagagatgaagtattggatccacgaaagagggatgacctgcaaagagctagagataaccctgatgatcaatatgctactaggcagaaagatgatgcctgggtaccaagggagaggggtgataggcagagagatagggaggagtggcatcggatgaaacagtcccatgaagaacacctacccaagcgtgaaagagaagaaggacgaagttctgtaagaagtggacgaggggctgaacataaactttctgagaaagaataccaatccagagaagcaatgcggcaaaatgac

SEQ ID NO: 53969 - DNA, 404 bp, Glycine max
  Clone ID: LIB3109-037-Q1-K1-C7
gaagctgaacgtggatggttcacgcgacccatacaaaagttcctccgctggttgtggtggtgttctgagggacgcatcagcaaagtggctccgtggctttgctaaaaaactgaaccctacttatgcagtgcaccagacagagttagaagccattctcacgggcttgaaggtggcttcagagatgaatgttaagaaactaattgtggagtcagacagtgactctgtggtgagcatggtggagaatggggttaagcccaatcaccctgactatggtgtcgtggaacttataaggacgaagcggcgtcgttttgactgggaagtgaggtttgtttctgtctccaacaaggcgaatcgtgtggctgataggctcgccaacgatgctcggaaattggcttgtgatgatg

SEQ ID NO: 53970 - DNA, 407 bp, Glycine max
  Clone ID: LIB3109-037-Q1-K1-C8
ggagccttcaaaaggaaatacacacttattttcatgtatatattttgctatcttaactgttttcaaaaatgttactacatttgtgctcctttgtaggtattacctgataaaccagaaggcagagcctcttagttgttcaaagcagctctacattctattgatggcattaccataggttccttagatgatgtctccctgctggacctgtgacttcatttttcagatctgtcaggaacacccttgattttgacttcgaagatgacaatgaaggtcgttggcaatctactgagcctccatcactctacatattcattaactgcagtacacgtgaacttgcgtatatagagaagtatgtgtgcagatttaggccttccgggcttcccagccaaagatttgcagtaccgctt

SEQ ID NO: 53971 - DNA, 413 bp, Glycine max
  Clone ID: LIB3109-037-Q1-K1-C9
ggaacaagagatcactagcctaagaagccaaattgaaggacttcaaatgagggaattggccttgcgtttgcagtttgagctgtattgtgaaatgaaggaacaagaatctttgcttctagatgtcaaaaacatgttgtctttggagaatgatcgcgctgagttcttgagtaaagagatttcgtcgatagagaccgagactaagaggttggggagttttgtagtccaatacatgagtgttgttgaagagcatcaatattggaaatcacagaatagggtgcttcaaaagagggttcaaaggctacttagggactcaaaggccaaatctcgtttgataaagtgtcaggctttgaagatcaaagagaaagaagaagagatattgagaaaccatgatgccttgcaaacaagggtatgtg

SEQ ID NO: 53972 - DNA, 142 bp, Glycine max
  Clone ID: LIB3109-037-Q1-K1-D1
gaagaaagctgctagcagagggaagttctacacttttttgtttggattgatcgagtgtactttttcttttcgagattggcttggtgtgcagtggaaagagggtggaaaagagtggtaagggggagggcggcgccccttgaac

SEQ ID NO: 53973 - DNA, 415 bp, Glycine max
  Clone ID: LIB3109-037-Q1-K1-D10
gggagcaagagagagcaagagagagagagaaggtttggaagaatcgcgatggagggtgaggaaggaggaggcataaggctgagcaagcgaatcgcaaacggagaggttgactacaagacgaaatccggcaccgcctggagccactcctatctcaaccagaagccatggcaccctctttcttaccccaaccaacgccgcaagtggatcgccgaacagacccacgccaatcgccaacgccgcaccgaagaggtttctcgcgagttcgctcaggagcaagagttctttcgccaaaccggtcttatcttccaaaaaaaaaaagaaaaggtggagctcatgcaagctgttagtttcatgtacgttcgtcctccgggctacaacgccgagagtgccaaagctgctgaaatgaacgacgaga

SEQ ID NO: 53974 - DNA, 373 bp, Glycine max
  Clone ID: LIB3109-037-Q1-K1-D11
gggtggtgaggtgagaagataaagaaagaatggcatttgcaggaacaacacagaagtgtatggcctgtgacaaaaccgtttatctggttgataagttgaccgcggataaccgagttttccacaaagcttgcttcagatgccatcactgcaaaggaaccctcaagctgagcaactacaactcttttgagggagttctttattgtaagccacactttgaccaactgttcaaaagaacagggagccttgacaaaagctttgaaggaacaccaaatattgccaagccagagaaaaatttggaagagaaacctgcagcagccaaagtctcaagtatgtttggaggaacaagggacaaatgtgctggttgtcagaaaac

SEQ ID NO: 53975 - DNA, 300 bp, Glycine max
  Clone ID: LIB3109-037-Q1-K1-D12
tccgaaagggcaacaaaaaggttgggtgatggggcccattgattccgagaaggaaagaaacgatgtctgcgccacaacagctatactctcgcgcgaacaccgatgaattcgacctcgaatcaggagaaaccctctacccacagctgagcggctgcaaaaaccatctccgatggggttccatccggctggtctactgcatccttttcgagcaaatcgttcttagcacgctagtcttcgacaccaccgttttatatactccaatcaatgacctactcattggcagttccaccctacttctca

SEQ ID NO: 53976 - DNA, 409 bp, Glycine max
  Clone ID: LIB3109-037-Q1-K1-D2
gtagcactaatgataagaataatttcaacaatgaacagcatgtggttgtggatgaccacaacaacactagagtagcatctaatcagggagagaatggatctcaagaagtagatcctcagattaggcaaaatagtacttcacaggatttgccagaaccacattcacaaagagataaaatgtataaagctgtttatagaagatcaagatctcatagggctgtgactaatttagctgacagtagtggccagggagaattcaattcaaatgggagaaacagtaatttcaatgctacagcaaacttcagcaatggcacaaatgaagctattcatacaaatggatccttagagttggaaccaaccacttgtgatccaaattatgagcggaataatctcaaagtgctgcaaggacc

SEQ ID NO: 53977 - DNA, 400 bp, Glycine max
  Clone ID: LIB3109-037-Q1-K1-D3
ggacaagagtgtgaactgcagagggcttctccagcctagtttgttctcagatcttcttcttccatggaccagtacgagaaggtggagaagataggcgagggaacatacggcgtcgtttacaaggctcgcgaccgcgccaccaatgagacaatcgctctgaagaagattcgcctcgagcaggaggacgaaggcgttcccagcaccgccattcgcgagatttctcttctcaaagagatgcagcataggaacattgttaggttgcaggatgtagtgcacagtgagaagcgattgtatctggtttttgagtatctggacttggatctaaaaaaacacatggattcatctccagagtttgtgaaagatccgcggcaagtaaagatgttcctttatcaaattctct

SEQ ID NO: 53978 - DNA, 380 bp, Glycine max
  Clone ID: LIB3109-037-Q1-K1-D5
gatgacgagagtgacaacgaccatgaggacggtgaagggaagcatccacatgaaacaagcccacgtaaatttgatgacttccttaccaaggtgcacaatgaatctaaccgtagtccaccaaggttctccgatcacgtgacttcacctgattggtgccactcctcgcagccaaaaccttacaatgtcggatatgctgactacggatccaacaagccacttggaggtgccaataaacatgatggttctggatatggcatcaacaacgaagggatcaagcctttatatggaggtaacactaaaatttttgataaccatcatgcttatacaagttctttctagatgaaccactttgatcatgcttatcatggatacatccaaaa

SEQ ID NO: 53979 - DNA, 386 bp, Glycine max
  Clone ID: LIB3109-037-Q1-K1-D6
ggtgaccgggcgctgggtgcttctcttctctgcagcctctttgatctgttggtgctcacttcgatcccgttgtgccctcttcagtttaggtgttttcattttagtgatattgttgaactgaacatactctgcccagttctcagcttaaagcatggatccggaggctgcacgaactgcacgagaatctctagacctggcattccatatgtccaatatacttgatactggtctagaccgtcacacactttctgttcttatagcactttgtgatcttggagtcaatcctgaagcgcttgctgctgttgtcaaggaactaagaaaagagaaaccctcactatcatcatcacttcccgtagctccttttttgccataaataaatggatttt

SEQ ID NO: 53980 - DNA, 260 bp, Glycine max
  Clone ID: LIB3109-037-Q1-K1-D8
acgcgtccgaacacgcctgagaacgcttgcgaaccgtctacagaggaaggggaacggacaatatctgaggagggcggatattgccaaatataaaggtcagcatgcatacagataacatgctagtctgttcattctagaaaaacatataatattgcaaccactaaacatggataacctctgcatagctattaaactacctgacgaacactatattattatgcacaaacatcatgtcttagtaccaagttagaaaagtgata

SEQ ID NO: 53981 - DNA, 412 bp, Glycine max
  Clone ID: LIB3109-037-Q1-K1-D9
ggagattagggtgagtgatgcgaaactggctaaaacagaaacaaatccaattacgaagaagaagaagaagaaggggtttgagcctgaaagaacataacagtgggactgtgggagttggggactcgtttgccaagttgcttctcttctatctccgtgcttctggatgatcaaaattacagcattattattattattgaagtgatttttgcaggtttgcccaaaaatggaatcggtgccaaacccaaacaacggggaggaacccacttcgtgggatgagctatacaacatcaatttgatgccttcagagttatttctcaagttccgaaaagaacttcagggcattcgagttggtctcaatatggagttctataatgccccggtcaatgaatatcaagcaaagcttgtattgaag

SEQ ID NO: 53982 - DNA, 410 bp, Glycine max
  Clone ID: LIB3109-037-Q1-K1-E10
ggttctagtgtgtgattgtttgttgttgtaactggttcttcttcttttgttgttctgtgtttgtgtttgttttttctctcacctgaaaatgtcttgctgcggtggtaactgtggttgcggaagctcctgcaagtgcggcaacggctgcggaggctgcaagatgtacccagacttgagctacactgagtcaaccaccaccgagaccttggtcatgggagtggcacctgttaaggctcaatttgagggtgctgaaatgggtgtgcccgctgagaacgatggctgcaaatgtggaccaaactgctcctgcaacccctgcacttgcaagtgaggtgttgggagagcaagcttcaagcagagatagcccttaattaggaataatgataaactattaatgtgtagctaaaaactta

SEQ ID NO: 53983 - DNA, 105 bp, Glycine max
  Clone ID: LIB3109-037-Q1-K1-E11
ggttctagtgtgtgattgtttgttgttgtaactcgttcttcttcttttgttgttctgtgtttgtgtttgttttttctctcacctgaaaatgtcttgctgcggtgg

SEQ ID NO: 53984 - DNA, 327 bp, Glycine max
  Clone ID: LIB3109-037-Q1-K1-E12
gaaggcataggtaggcacaagcacaatcatgagttggtgcggactgaatggtgtgtcgcgttgttgacattaaaatttgatcgatttggggttggggcggaagaaagtggaaacgacgccgttggaaagtgggaagaagatgaattcgcagcaaatgcagatgcaaattcaaatccaaaacagtggtggtggcagtggcaacaacaacagcagcaacattccagtgagcgaggttttctggactctcgtcgacaaaaccgacaaaaaattcttcaaaatcagagacctttccttttaccaacgcagcaggcatgatacttactttta

SEQ ID NO: 53985 - DNA, 401 bp, Glycine max
  unsure (1)..(401): unsure at all n locations
  Clone ID: LIB3109-037-Q1-K1-E2
gggacgacatggagaagatctggcatcacactttctacaacgagcttcgtgcggctcctgaggaacaccctgtgcttctcaccgaggcacctcttaatcctaaggctaatcgtgagaaaatgactcagatcatgtttgagaccttcaacacccctgctatgtatgtcgctatccaggccgtgctttccctttatgctagtggccgtacaactggtattgttctagactctggagatggtgtcagtcacacggttcctatctacgaaggttatgccctcccacatgcaatcctgcgtttggaccttgcagggcgtgatctcactgatgccctcatgaaaatcttgactgagcgtggttacactntcaccacatctgcggaacgggaaattgtgagggacatg

SEQ ID NO: 53986 - DNA, 408 bp, Glycine max
  Clone ID: LIB3109-037-Q1-K1-E3
ggtgtgagttcattaacatatacaaattctctgtgttgtgttgtgtacttgtgttaattgtgttgttgttgtaggaaatttaagtgaagagagaatgatgatgaagtctgctatgtgtgcattggtgcttgtggcactggttgtggttgaagtggggcccatggctgaggctgcggtgacttgcaacccaacacagttgactccttgtcttccggcaattaattcaggttctgcaccttcgagtgcttgttgccagaagctgaaggagcaaaagccatgcttctgtggctacctcaaaaaccctagcttgaagcagtatgttaactctcctaatgccaaaaaaaccgttagttcttgtggtattgcctatccaacttgttaagcacctcttatatatatatataaaat

SEQ ID NO: 53987 - DNA, 416 bp, Glycine max
  Clone ID: LIB3109-037-Q1-K1-E4
gggtacgagaggaggattttctcgcacccaaaaccagcatgtgaaatcgaaaagggctcttcgttgaatttgctgttcataaaacccttctccgacaacttgtagctgctgctgctgtttctctttcattttttttttgctaaggactcaaggaatacaacatcctgatatttggaggacagattaaagagaaacatcgtggaggaaacaatggtagcaaggtattggtgtcacatgtgctctcaaatggtcaatcccatcatggatatggaaatcagatgcccgttttgccaaagtggatttgttgaagaaatgggtaacacccccagtagcagcagcattcccaatacatcagaatctgattttgaatctgatcgggctctctcccttgggcgcccatcttgctaggcatgatg

SEQ ID NO: 53988 - DNA, 400 bp, Glycine max
  Clone ID: LIB3109-037-Q1-K1-E5
aacgatggtcaagatgagtctcaaggtgctcaggataagaaaggtgttgagactgatggagatggagaaaagaaagaaaatgtccctgcagaatccaaaacttccaagaagaagaagaagaaggataaagcttccaaggaggtgaaagaatctcaagatcaacccaacagttcagacacaaacaatgggcctgatttggccacaggcgctgaaaatgtggaggatacatctactgttgatgtgaaagagcgtctcaagaaagttgcttctacaaagaagaagaagtccagtaaagaaatggatgctgctgcaagagctgctgctcaagaggctgctgcaaggagtgcaaggcttgctgctgcaaaaaaaaaagagaagaaccattataaccagcaacccg

SEQ ID NO: 53989 - DNA, 395 bp, Glycine max
  Clone ID: LIB3109-037-Q1-K1-E6
gtatttcctgagcacaagtatgagatcgtgaagcgcttgcaagctaggaaacatatttgtggaatgactggtgatggagtgaacgatgcacctgccctcaagaaagcagacattggtatagctgttgctgatgctactgatgcagctcgcagtgcatctgatattgttctaacagaacctggacttagtgttattattagtgctgttttgacaagccgagcaatcttccagagaatgaaaaattatacaatttatgcagtatcaattacaatacgtattgtgcttggtttcatgttgctggctctcatttggaagtttgactttccaccctttatggtgcttattatcgctatcctaaatgatggtactattatgacaatttcaaaagatcgtgt

SEQ ID NO: 53990 - DNA, 400 bp, Glycine max
  Clone ID: LIB3109-037-Q1-K1-E7
gtagcacaaacatactcccgcgaacaccagggtgaaagtgatctttttgatcatctatttgagctgttaaactcttccatccataatgacgaaagtttcccaaaggagttagcatcctgcacaggagctctgcagacgtctgttagtcaacacatggctaaggaagaggagcaggtatttccactgcttcttgagaagttctctcttgaggaacaggcatctttagtttggcagtttctctgcagtattcctgtgaatatgatgacagaatttcttccatggctttcaacatctatatcacctgatgaatcgcaggatttgcggaagtgcttaagcaagatagtgccagaggaaaagcttcttcaaaaggttgttttcacctggatggaagggggaagta

SEQ ID NO: 53991 - DNA, 383 bp, Glycine max
  Clone ID: LIB3109-037-Q1-K1-E8
gggtacgagaggaggattttctcgcacccaagaccagcatgtgaaatcgaaaagggctcttcgttgaatttgctgttcataaaacccttctccgacaacttgtatctgctgctgtacttcttctataacgtggttacaccgtacatgccaccgtccaagatatcaaggatgaacatgagacgaaacatttggaggaaatggaaggagcaaagagtcatctccattttttagaaatggatcttcttgacatcgactccattgccgctgccatatagggttgctccggcgtaatccaccttgcatgtcctaacatcattggtcaagtcgaagatcccgacaaacagatattggaaccggcgattaaaggaactgctaatgtgttg

SEQ ID NO: 53992 - DNA, 329 bp, Glycine max
  Clone ID: LIB3109-037-Q1-K1-E9
gttgaaacaaatgagtgtgaataaggagacctgagagttctgttgagccggtgtgttcatcatacaaaaaaaaacccagcaacaatgggaggcacttctgcagatcttcaccaccatgaatcagatatagaactcactgatgctgaaaggactgacactaaattaggggcttctgattcaaaagctgtcaatgatgttggacttgactgtggcaccaaattccattctgaatctgaaagacaacactacctgtaggtgaccatgtacatttcatcgggactgtggggcattacacagtgttaaaactgttttatacggtgtttacatgg

SEQ ID NO: 53993 - DNA, 396 bp, Glycine max
  Clone ID: LIB3109-037-Q1-K1-F1
ggcagcaaaccccttcaacatttttcaccctcagaattcatatcatgagttttcatgatacatcaaacacggggcttggacttggtcttggtcttggacttgttagcttccatgatcaatcagagaattgcatgaagagtactaatgatcccttgagagaaatccataagataaaaaaggtggagaatccatcaaaatgtaacagcacatacccttcacttacattaggaccaccagatgatgatgatgatgatgatgatgaagtgaataatcaaccaccaagttcaaaaactgagtcctatgaatattttcgtccccatgtttcttctcctagtgcggtgtcttcattttccaactattctagcatcaagagggaaagagatcaggttttgtggg

SEQ ID NO: 53994 - DNA, 409 bp, Glycine max
  Clone ID: LIB3109-037-Q1-K1-F10
ggagcatctgataatcttcgtgaatgggggaaggacaaagtccggtttgatcgaaatggtcctgctgccataaccaagtatcaagctgataacgctattccggggaagaatgatggatgcaatccgatcggtccaacaccacacaccttgcaagagctgcaagacacaaccttgggttctctcttgtcagcactcatgcagcactgtgatcctcctcagaggcgttatccattggagaagggcgttcctccaccatggtggcctaatggtaatgaagagtggtggccccaaataggtttgcctaaagatcaaggtcctccaccttacaagaaacctcatgacctgaagaaggcatggaaagttggtgttcttgactgcagttatcaagcacatgtctcctgatatcgca

SEQ ID NO: 53995 - DNA, 194 bp, Glycine max
  Clone ID: LIB3109-037-Q1-K1-F11
ggttgctaaggggaatcccttttatgaagtgttctcatatgtcttatctgtttgttcagtgtctcccttgaacttgtgctttgcatctctggtttaagtgctgctgtttattatgttttaaaatgatgtattgaactcgtttcagcgaaagtatgttgtttatgtttttattttaaatatcaatatcgtttcat

SEQ ID NO: 53996 - DNA, 194 bp, Glycine max
  Clone ID: LIB3109-037-Q1-K1-F12
ggttgctaaggggaatcccttttatggagtgttgtcatatgtcttatctgtttgttcagtgtctcccttgaacttgtgctttgcatctctggtttaagtgctgctgtttattatgttttaaaatgatgtattgaactcgtttcagcgaaagtatgttgtttatgtttttattttaaatatcaatatcgtttcat

SEQ ID NO: 53997 - DNA, 339 bp, Glycine max
  Clone ID: LIB3109-037-Q1-K1-F2
gacactaaacacgtttaaagaagagcatcaggggactaacaaagcaaccctatgtcgaacgtggtttgagtcaccggagccagcggcgccatcggatcatgggtggtactactcctcctacaacgtggttacaccgtacatgccaccgtccaagatatcaaggatgaacatgagacgaaacatttggaggaaatggaaggagcaaagagtcatctccattttttagaaatggatcttcttgacatcgactccattgccgctgccataaagggttgctccggcgtaatccaccttgcatgtcctaacatcattggtcaagtcgaagatcccgacaaacag

SEQ ID NO: 53998 - DNA, 406 bp, Glycine max
  Clone ID: LIB3109-037-Q1-K1-F3
gggtgaagtgagtagtgaaggtgctgaatcgaatcgaatctccgaagatggccgcgagcgatcgcacagtgttgcaattctcttcatcatcttcttcttcgcagagcttgtccgcgaaggtccaccctctggtcatcttcaacatctgcgattgctacgttcgacgccctgaccaagccgatcgcgtcatcggaaccctactcggctccgtccttcccgatggaaccgtcgatatccgcaattcctatgctgttcctcacaacgaatctatcgaacaggttgcgttggatatagagtaccaccacaatatgttaatatcccaccaaaaagtgaatccaaaggaaatcatagtaggatggtattcaaccggtcttggagtaacaggtggtagtgcattaattcacga

SEQ ID NO: 53999 - DNA, 415 bp, Glycine max
  Clone ID: LIB3109-037-Q1-K1-F4
ggagagaaagtgagagagaattacagagcattgtccaacacgattacacgaccgaatcaaacccctctttctctccgaagctgcttttaatatcgtactggccttcgattgttctcctctttaatacatactgttctctcttcgatttgagggaacagtacaagagtctgagcatcggttaacccaactgcacaggtagtctccaaataatggagcctcatgatgagactggatgccaggctcctgaacgccccattctttgcattaataattgtggcttctttggaagagcagctaccatgaacatgtgttccaagtgttacaaggacatgctgttgaagcaggagcaggacaaatttgcagcatcatccgttgaaaacattgtgaatggcagttccaatggcaatggaaagca

SEQ ID NO: 54000 - DNA, 408 bp, Glycine max
  Clone ID: LIB3109-037-Q1-K1-F5
tcgtgcagatgaaattagtaaaattatccgtgaacgcattgagcaatataatacggaagtaaaaattgtaaatacgggtaccgtacttcaagtaggcgacggtattgctcgtatttatggtcttgatgaagtaatggcgggtgaattagtggaatttgaagagggtactataggcattgctttgaatttggaatccaaaaatgttggtgttgtattaatgggtgatggtttgatgatacaagagggaagttcagtaaaagcaacaggaagaattgctcagatacctgtaagtgaggcttatttgggtcgtgttataaatgccctggctaaaccaattgatggtcgaggagaaatttcagcttcggaatctcgattaatcgaatctcctgctcccggtattatttcgag

SEQ ID NO: 54001 - DNA, 399 bp, Glycine max
  unsure (1)..(399): unsure at all n locations
  Clone ID: LIB3109-037-Q1-K1-F6
gacattggtgacaaagttagaaacaaggagaaagaaagaagatggcaggaaagaaaatcccagatgtgttgctgaattcaggacacaaaatgccagttataggcatgggaacttcagtggagaatcgtccatcaaatgagacccttgcttctatctatgttgaagccattgaggtgggttaccgtcattttgacactgctgcagtgtatggaacagaggaagccataggcctagccgtggccaaagccatagacaaaggccttataaagagtagagatgaagttttcatcacttcaaagccttggaacacagatgcacaccgtgaccttattgtcccagctcttaagaccacattaaagaagctggngacggagtatgtggatctttatctgattcatt

SEQ ID NO: 54002 - DNA, 402 bp, Glycine max
  Clone ID: LIB3109-037-Q1-K1-F8
gggtgcaaaatctgataatggcagaaacagaagacaaaacccttcaagcctcgcccatgaacgaaaccaagaagatgaagaagaataagaataagaagaagagcgacaaaaaaagacctcgggagattgctaccgaggagcgtccagaggaagaggagaatgagaataatacagatagcgatggagaatcctcgaagaagaagaggaagaagaaggtggaaggagaaagtgaagtgaaagagaaaaaggtgaagaacaatggtggctctggaattatgagcactgagtcatttgaatctctcggattgtctgaacctacttataaagccattatggatatgggattccaccacatgactcagattcaagcgagggcaattccaccgcttttgattggaaaag

SEQ ID NO: 54003 - DNA, 383 bp, Glycine max
  Clone ID: LIB3109-037-Q1-K1-F9
ggggtcgaagggcaatacctccaaacaaaatcacttttgttgaagcttctcatcttcccttcatttatctttctctttaacccaatttgattatctgtctctctctctctctctactattcagcctctattgctctttccttctcttcttagccttggagctggttgatggatattgaacccttgtgggctattggggggtggtcttttctttcaaattattgcatggcagaacctaaaacattatcatcatcatcaccaatctcagaacctttctcaaaatcaccctcttttctttacttactctcacttttcttcatcctcctccttctcatcaacctatcccaccaaccacacccttctaccatggcctattcagaaaaa

SEQ ID NO: 54004 - DNA, 349 bp, Glycine max
  Clone ID: LIB3109-037-Q1-K1-G1
gacagcaaatgccaaaagccaagttaattccctttctcgactctgcacaaacacaaacacacgtattctcttgcaaaactaagaatgaaggaggagttggtggttgaagaagggtaccttttcaaagaagagactcacttcacagtgctcaaaacctctctcttcttcaacggtgatggcttcgctgtctacgattgcaaaggccaactcgttttccgcttcgactcctacggtccccgcgcgcgtgacaaggacgagctcgttctcatggatccccatggccgttctcttctcactctccgccgaaagaaaccgagtcttcatcaacgctgggaaggcttaaagggga

SEQ ID NO: 54005 - DNA, 393 bp, Glycine max
  Clone ID: LIB3109-037-Q1-K1-G10
gagtgtagttaattgaaagaggggctaaaagaacaatgcgattctcaaaagcttccttctacactcttcttctccgcaaacctcataaccatcaccatcaaaactacgtcgttttatcgcggcgtcgcgtagtgaccttggcagtgggtgtgttgatcttgctgagtgctctctacattttctggccatcgggtcctgatctgaagatcgtggggctgaaactgaggcgcataaaggtgcaccctgtgccgccaatcaccatagacatctccatgcttctcacgctgagggtgcacaacgttgacgtctacttcatggacttcggagcggttaacgtcgccgtcgcctacagggggaagatgctgggccacgtgacgtccatgcgcatgcacg

SEQ ID NO: 54006 - DNA, 343 bp, Glycine max
  Clone ID: LIB3109-037-Q1-K1-G11
tacttaatgggagtgtacttaatttaaagagaagctaaaataacaatgcgattctcaaaaacttccttctacactcttcttctccgcaaacctcataaccatcaccatcaaaactacttcgttttatcgcggcgtcgcgtattgaccttggcagtgagtgtgttgatcttgctgagtgctctctacattttctggccatcgggtcctgatctgaagatcgtggggctgaaacttatgcgcataaaggtgcaccctgtgccgcctatcaccatagacatcttcattcttcttacactgatggtgcacaactttgacgtctacttcatggacttcgtaacggtta

SEQ ID NO: 54007 - DNA, 413 bp, Glycine max
  Clone ID: LIB3109-037-Q1-K1-G12
ggaggtgaaggggaaaaaaaaaagagtggagtggagaatggcttcgttatcgctttgcatagccatgagagcacccactccctcagcttctctcattctcactaccccaaaaccatcttcactctctttgaaccttacccgcacttgctccagcgctcgctctccgctcctccattgctccttcctctcttctccttcccatctctcttccccttcctccgtttcaggcttgtcacttggattggatttgacatctaatgttgggaccagaagaggaaaaggttctggcctatttgtgagggcaggcaaggctgctctttgtctgactaagagaagcagatcaagaaaatcattgtcacgcactcatggtttccgcaaaagaatgagcacaccacgtggaagagctgttttaa

SEQ ID NO: 54008 - DNA, 408 bp, Glycine max
  Clone ID: LIB3109-037-Q1-K1-G2
gactcgcagttgtattgttgaacaagggtttgtctgtctgcttcttcactttctctcgtttcaatcgaaaccaaaacaaaaacatgggcagaaaattcttcgtcggtggcaactggaaatgcaatgggaccactgaggaggtaaagaagattgttactactttgaatgaggctaaagtccctggagaagatgtcgtagaagttgttgtgagccctccttttgtgttccttcctgttgtaaaaagtttgctgcgccctgatttccatgtttcggcacaaaactgttgggttcgcaaaggtggtgcttataccggtgaggttagtgctgaaatgcttgttaatttgggaattccttgggttattattggtcactctgaacggaggcagcttttaaatgaatcaaacgagt

SEQ ID NO: 54009 - DNA, 403 bp, Glycine max
  Clone ID: LIB3109-037-Q1-K1-G4
gacacacaacatttacatttctctctccaggatgggttctactcacaatgagttttatgcacttatgctagtggtggtggttggctccatggtggcttcctgtggtgctaacttcaaccaagactttgatctaacatggggtgatcaccgtgctaagatattcaatggtggtcagcttctatctctttctctggacaaagtctctggctccggcttccaatccaagaaagagtacctatttgggaggatcgatatgcaactcaagctcgttgctggcaactctgccggcactgtcactgcttactacttgtcgtctcaagggccaactcatgatgagattgattttgaattcttgggaaacgtgagcggtgacccttacattctccacacaaacgtgtttacc

SEQ ID NO: 54010 - DNA, 395 bp, Glycine max
  Clone ID: LIB3109-037-Q1-K1-G5
gtacatacagtggggttttatcagatggttcaaaagtcgcagttaagagattaaagaggtcaagctttcagaggaaaaaggagttctattctgaaattagcagggttgctcggcttcgtcatcctaatctggtggctgtgatgggatgctgctatgatcatggtgaccgctacattgtttatgagtttgtagctaatgggcccttagataaatggctacatcatataccaaggggaggtcgcaacttagattgggctatgaggatgaaaattgcaactacgcttgctcaaggaattgcgtttctgcacgacaaggttaagccacatgttgtgcatcgagatatacgtgctagcaatgttctgctggatgaggagtttggagcacagcttatgggt

SEQ ID NO: 54011 - DNA, 417 bp, Glycine max
  Clone ID: LIB3109-037-Q1-K1-G6
ggtggtagtgtggcagcgacacgtatcaactgcaataatcgcatcgcagaagcagtttccggtgcatctcatcgtctccgaaaatgaacgacgcagatgtctcgaagcaaatccagcagatggtgcggttcatccgccaggaagctgaggaaaaggcccacgagatctctgtctccgccgaagaggaattcaatatcgagaagctgcagttggtcgaagccgacaagaagaagatcaggcaagaatacgaacgcaaagagcgccaagttgaaattcgcaagaagattgagtactcaatgcagctgaatgcttctcggattaaagttcttcaagctcaagatgacgtgatcagttccatgaaagaagctgcatccaaggaacttttgactgtgagtcatcatcatgatgatcatgtgt

SEQ ID NO: 54012 - DNA, 409 bp, Glycine max
  Clone ID: LIB3109-037-Q1-K1-G7
ggctattcattcattcattcctccttctctctgatcgcaaactgcacctctacgctccactcttctcattttctcttcctttctcgcttctcagatccaactcctcagataacacaagaccaaacccgctttttctgcatttctagactagacgttctaccggagaagcgaccttagaaattcattatggtggcaacagctgctacttcatcatttttccctgttacttcaccctcgccggactctggtggagcaggcagcaaacttggtggtgggcctgcaaaccttggaggactaaaatccaaatctgcgtcttctggtggcttgaaggcaaaggcgcaagccccttcgaaaattaatggaaccacagctgttacatctaaagaaagcttcaagcatgatgatgatc

SEQ ID NO: 54013 - DNA, 402 bp, Glycine max
  Clone ID: LIB3109-037-Q1-K1-G8
ggaaagtgttgtggagacaaaaccacaatacagttttagaatggagaagacagcagttaaagttcgatgccagaggattgggtgcgacgccatgttctccgaggccgacaaccccgacggttcctgtcgataccatgattcgggacctatatttcatgatggaacaaaagaatggagttgttgcaagaaaagaagtcatgattttagcttgtttttggaaattccaggatgcaagacaggaaaacatacaacagttaagcaagttattacaccagtggaagaagaacaccatgccctctccaactgctgtttcttctaccaatgcatcatcaaaggagtcttgtcccagatgtcggcagggtttcttttgctcaaatcacggctcgcaaagcaaacctgtaa

SEQ ID NO: 54014 - DNA, 410 bp, Glycine max
  Clone ID: LIB3109-037-Q1-K1-G9
ggatctaaattcttcagcagacacactttccgagaagacggatgaaaattcagttaaaattcgaagagtattcaatgatgtgcgtctagctctgtatgttgtggcagctgtgatgcttcttctggctcttgttggacttgtcctgtctgtccttggatatcaacatgcaatcctcatatttgttatcaccggatggttactggttgcaaccacattcgttctttgtggagtattcataattcttaataacgcaatttctgatacctgtgtggctatgggagaatgggtagcaaatccacacactgaatctgcactaagtaatgtcctcccatgtgttgatcagagaaccacaaacaaaacactctttcagagtaaacaagtgatcaacaatattgcgaatgttgtcaata

SEQ ID NO: 54015 - DNA, 383 bp, Glycine max
  Clone ID: LIB3109-037-Q1-K1-H1
ggaggtagagagctctgacacaattgacaatgtgaaggcaaagatccaagacaaggagggtattcctccagaccagcaaaggttgatttttgcgggaaagcagcttgaagatggacgtacgctggcagactacaacattcaaaaggagtctacccttcaccttgtccttcgtctgaggggaggtatgcagatctttgtgaagactttgacagggaaaactatcaccttggaggttgaaagttcagacacaattgataatgtcaaggcaaaaatacaggacaaggaaggtatccccccagaccaacagaggttgatctttgctgggaagcaactggaggatggaaggactcttgctgactacaacattcagaaagagtctactc

SEQ ID NO: 54016 - DNA, 415 bp, Glycine max
  Clone ID: LIB3109-037-Q1-K1-H10
ggaccaaagaggagacggatcaactatttgacggaggtgagagatttgatctccgatttattgtaatagctgataggtttccatcctctcggactgtagaggaattaaaggatagatattatagtgtttcccgggctatattgattgctagggctccatcttctggggatgtcgcagcacatcctattgttaaggaaacatataattttgcacaagaaatggaacgaaaacgagcactgtccatggtcctctctcaaacaaggcaacaagaacgaagagatgaagaggttcttgttgaagcaaaaaaaatagcggaaaaacgcctacctcccaaggttgctgaacagtctcagttggttgcttctaatgctggtgcaaaagctacagagagggctgtccctggtgaaaccatatc

SEQ ID NO: 54017 - DNA, 223 bp, Glycine max
  Clone ID: LIB3109-037-Q1-K1-H11
ttggggactttatatgagacggatcaactatgtgtcttaggggatatatttgatctccgattcattataatatctgataggtttccatcctctccgactgtatatgaattaaaggattcatattatagtgcttcccgatctatatttattgctatgcctccatcttctggtgatgtctcaccacatcctattgaaaaggaaacatataattttgcacaagaca

SEQ ID NO: 54018 - DNA, 413 bp, Glycine max
  unsure (1)..(413): unsure at all n locations
  Clone ID: LIB3109-037-Q1-K1-H12
ggacagagagaatgagtacggtgggagaagggaaggtgagtagtaatggtcatggatgttgcaaatcaaggccaggctatgcttccncactggaagccatttctggtcccagagagtctctcatttatgtaacctctgtctacacagggaccggattaaagaagccagactatttggcgacagtggatgtggatccaaactttccaacttattccaaagtaatccataggcttcctgttccttatttaggtgacgaattgcttcaaacaggctggaattcatgcagttcttgccatgagaacccttaaacaaaccgacatatttctaatcgaacctgcactcgtataggtcgagtatatgtggttgatgtgaaaacaaatccaagggctccatctttgcacaaagttgtcgag

SEQ ID NO: 54019 - DNA, 454 bp, Glycine max
  Clone ID: LIB3109-037-Q1-K1-H2
cgacccactcctgcttacggatgacaacagacgacagattgagttatctgataacaacacatcttcgggagagagatcattacaatggggtacttggctctccattccgtttacaccttcgtttcgtcgtcatcgccatcgacttctatcacaacgcgtaacctttatccctccatatctgaccaaaacgacgtcgtgctacatcggcagcggacccgtcgatatacatcatggccattaaagcggctcacctgggtctgaacaccacttacttcctataacctgacactctataagcgacctgtctcaacgactgatgcattcattacaaggcactttagcatacataccacatgtaatacgaggctaaacatgcattttccaaccatgacctcaagttttcatttgtcaaaattattttcatacattacttcccaaaagataattcatttct

SEQ ID NO: 54020 - DNA, 384 bp, Glycine max
  unsure (1)..(384): unsure at all n locations
  Clone ID: LIB3109-037-Q1-K1-H3
tacacaaagttgtccaatgttttgtcaaagcaagctcttttctacaccgtgattcttccattcattgctttctttggggctttcgggtttgtgttgtaccctctcagcaattatattcaccctgaggcatttgcggacaagcttctcaacatcctcggacctaggttccttgggccccttgcgataatgagaatttggagcttctgtttgttttatgtcatggctgagttgtgggggagtgtggttatttccgtactcttttgggggtttgctaatcagataactactattgaagaagcaaaacgattctacccactgttcggactcggngccaatgtagcccttattttctctggccggacagtcaaatacttttctaatctg

SEQ ID NO: 54021 - DNA, 273 bp, Glycine max
  Clone ID: LIB3109-037-Q1-K1-H4
atactgaatattgtgacattctcagagttggtttagaacagaaaagggaattgttcgcaaatggatctcaagattcgaagtctggccatacctagagacttacactgaggatgtcgcccttgaacttgccaaggagttgcaagccaagccagatctgattgttggaaactacagtgatggaaacattgctgcctctttgttagcacatagattaggagtaactcagcgtaccattgctcatgctctagaagagaccaagtaccctgagtctga

SEQ ID NO: 54022 - DNA, 411 bp, Glycine max
  Clone ID: LIB3109-037-Q1-K1-H5
ggtgtgagttcattaacatatacaaattctctgtgttgtgttgtgtacttgtgttaattgtgttgttgttgtaggaaatttaagtgaagagagaatgatgatgaagtctgctatgtgtgcattggtgcttgtggcactggttgtggttgaagtggggcccatggctgaagctgcggtgacttgcaacccaacacagttgactccttgtcttccggcaattaattcaggttctgcaccttcgagtgcttgttgccagaagctgaaggagcaaaagccatgcttctgtggctacctcaaaaaccctagcttgaagcagtatgttaactctcctaatgccaaaaaaaccgttagttcttgtggtattgcctatccaacttgttaagcacctcttatatatatatataaaatgtg

SEQ ID NO: 54023 - DNA, 381 bp, Glycine max
  unsure (1)..(381): unsure at all n locations
  Clone ID: LIB3109-037-Q1-K1-H6
ggtgttaggtggtgagaagaacgaatcgaagaaagaaagatcatggcgatggcaaacttggctcgacggaagggttacgccgtcgttttgtcgtcgaggtcgtcgctttgtctgacaaggtggagggggttcgcgtccggatctgacgaaaacgacgtcgtggtcatcggcggcggtcccggcggctacgtggcggccattaaagcggcgcagctgggtctgaaaaccacttgcatcgaaaaacgtggcactctcggcggtacctgcctcaacgtcggatgcatcccttccaaggcactnttgcattcttcccacatgtatcatgaggctaaacatgcatttgccaaccatggngtcaagttttcatctgtcgaggttgat

SEQ ID NO: 54024 - DNA, 207 bp, Glycine max
  Clone ID: LIB3109-037-Q1-K1-H7
agggacggtatctgatgaggaatgggtgatctaactaaattctaattggttgaatttaagtttactctactacaaccataacatataaatgtttcatagaaaagttgttctatactagagtggaaaatgtaacattaattggttatggacacttaaagataaaacctcagaacttaattacttggatcccttaccaatcgggcgttt

SEQ ID NO: 54025 - DNA, 423 bp, Glycine max
  unsure (1)..(423): unsure at all n locations
  Clone ID: LIB3109-037-Q1-K1-H8
gattacacacatcttcctgatcatgggattttccgagacggtagcaaggatatatctgaagcccaaaattctttgtataagagaacattgttgcaagatcttaatagacaaggtgcagttgttcttgaaggaaaaactttagatatggagatggaacacccaagaacagtagcagaaattcttgctcggagaaaacaggaatgtgatggggttgtagatgaggagagacaaaacagaatttctaagatgaccctgattgatgatcttcaggcacaagataatcatccgtatgcaccactctgtatcaaggatcctcgtgactattttgatttccaacaagctaatgctgtaaaaactttggatgattctcaaactggaatggagcanatgaaatgcagtttgggttctgaggaagcctatggt

SEQ ID NO: 54026 - DNA, 392 bp, Glycine max
  Clone ID: LIB3109-037-Q1-K1-H9
gggagcgaagtgaattgaaattgaagtgactcggggggagttgactcagcaatggcggaagaggtgactcgggtgatggtggcggtgaacgagtcgagcattaagggataccctcatccttcgatcagcagcaaaggggctttcgactggaccatcaacaagatcgttcgcgacaacgtctctgccttcaaccttctttttcttcacgttcaagtccccgatgaagatggttttgatgacatggatagtatctttgcttctcctgacgattttaagaacatgaatcagagagatagaattagaggagttcatctgctggaatacttcatcaataggtgtcatgaaattggggtggtttgtcaagcatggataatgcatggtgatcccaaaaa

SEQ ID NO: 54027 - DNA, 172 bp, Glycine max
  Clone ID: LIB3109-038-Q1-K1-A1
ggagcagaggacaagatgggtagtgtgagttatagcaatctgaagaacgccatgatagcattcttggtccctctaccctacatcctattctacctctcattccaatcggtcattagtactccttcttcttggtctactctggggacatggggctatcaccaccctatgctat

SEQ ID NO: 54028 - DNA, 410 bp, Glycine max
  Clone ID: LIB3109-038-Q1-K1-A10
ggtgtgaaattgagttggttgcatttcactttcaattgctccaaatttctattgtaccaagcaaatttaacatagtttttttttttccaaatttttagcctccctagtttctatcttttcatttgctttgcgactaaatcaagcacatccttaattttctcattcccttttgtcaaatatagatggcatgctgttgcttcatggacttgggatgcccaggatgaaacctgtgggatttgtaagatggcctttgatggatgttgtcctgacttgtaacttcctggagatgacttgccattgagtaagctactcttgatgatattattggcgactttcatcggtattatggtttgcaccaaattgtcttgagttatttttcttaactaatcctttatattttgagaattcta

SEQ ID NO: 54029 - DNA, 337 bp, Glycine max
  Clone ID: LIB3109-038-Q1-K1-A11
ggtgtgagttcattaacatatacaaattctctgtgttgtgttgtgtacttgtgttaattgtgttgttgttgtaggaaatttaagtgaagagagaatgatgatgaagtctgctatgtgtgcattggtgcttgtggcactggttgtggttgaagtggggcccatggctgaggctgcggtgacttgcaacccaacacagtcgactccttgtcttccggcaattaattcaggttctgcaccttcgagtgcttgttgccagaagctgaaggagcaaaagccatgcttctgtggctacctcaaaaaccctagcttgaagcagtatgttaactctcctaatgcc

SEQ ID NO: 54030 - DNA, 383 bp, Glycine max
  Clone ID: LIB3109-038-Q1-K1-A12
gggtgaccaaatgcaaagacggcattgaaattgaacacaatccatgactaacacaagcgcagacgacaacataacactgctccaaacatatcaatttcaataatgttttcttctgcaatttctccgaagcccttccttcggtccctcgtcattgatcgttacgctcagagcacaactactgcaaccaggtgggagtgcttggggtttaacaagtcagaaaatttcagtaccaagagagagttgtgtgctgaggggttcaagctgaattgcttggttgaaaatagagagatggatgtggagtcatcatcatcatcatctttgggggatgaagcttccttgagcttaagtgaagaagatttaagggaacctaatatttcaacatt

SEQ ID NO: 54031 - DNA, 269 bp, Glycine max
  Clone ID: LIB3109-038-Q1-K1-A2
ggcacacgtgagtttgttgatcgagataactagaaacagtgtgatgaaaatgaaagtccttgttgtcttcgctgctacaattttggtagcatgggaatgccatgcgtacgatatgttcactgtacgaatgaacactggctatggtgccctgactccggatgtgaaatgcgcaagttggacgcttgctgtggaagcacgcaacatctttggctatgagaccattcctgaatagtgcgttgaagcatacaaggaatacattcatggcgaac

SEQ ID NO: 54032 - DNA, 343 bp, Glycine max
  Clone ID: LIB3109-038-Q1-K1-A3
gggactgtcactgaactcaaaaatgaactgtcttcggaatcttctcgattctctggtttgcccttcgaaacaccttgtacgcgccaccgcaagaaccttcccctttccctgggtttcgtcaacaattctcgtcaatatccaactattgccctcaaggcttgcttaagttctataccaagtgcagacacaagtagtgcccataaggaggaagaaaagtctgagacatatagtcataacatgaccgaagccatgggtgctggtttgacttataggcatgaattaggaatgaactataatttcattcgtccagacttgattgtgggatcatgcctacagactcctg

SEQ ID NO: 54033 - DNA, 259 bp, Glycine max
  Clone ID: LIB3109-038-Q1-K1-A4
ggagagagagagagagagaggcacttggaatccaaaaatgagagaaatcatcagcattcacataagtcaagccgggatccaagttggcaacttctgctgggaactctactggctggaacatggcattcagcccgatggcatgatgcccagtgacttcttcttcggtgtagcccacgacgcctttaacaccttttttagcgaaaccggattcggcaagcacgttccttgcgccgtcttcgtcgatcttgagcccaccgtg

SEQ ID NO: 54034 - DNA, 172 bp, Glycine max; identical to SEQ ID NO: 54027
  Clone ID: LIB3109-038-Q1-K1-A5

SEQ ID NO: 54035 - DNA, 389 bp, Glycine max
  Clone ID: LIB3109-038-Q1-K1-A6
ggtgtcggcctctacctatatattccactcactacccagaaactagggtttagcgccacaccccaatcgtagccgtcgcactctgtgttttcagcgccgtctccgatctccgacaatggcgacccaaatgagcaagaagagaaagttcgtagctgatggagtgttcttcgctgaactgaacgaggttctgacaagagagttggccgaggacggttactccggcgtggaagttagggttacgccgatgcgcaccgaaatcataattagagccaccagaacccaagctgttctcggtgagaagggaaggagaataagggaacttacctctgtggttcagaagaggttcaagtttcccgagaacagtgtcgaactttatgctgaaaaggtca

SEQ ID NO: 54036 - DNA, 239 bp, Glycine max
  Clone ID: LIB3109-038-Q1-K1-A8
gtctcaggatgaacataaccgggatgaacttgctgagaaatctcctgaaagaaagttgtccagtctcacttctccagcagaagtaccattgaactcttcatcctcaactgttcttgaaaaggtgcctgatacttcgatgccaagtgacaatacttccctcttcagccgtttctacctttccaaacttgacatttcggtggacttagtactgccagagttgtatgaccagtgtatgtgtg

SEQ ID NO: 54037 - DNA, 375 bp, Glycine max
  unsure (1)..(375): unsure at all n locations
  Clone ID: LIB3109-038-Q1-K1-A9
ggggacaaagatgtccagcgaagcaagtaaggttgaaatctctatgatcgaaaacagtgtccttgtggctctcctggtgtctcctactctattctcccctttcgttggcttttgaaggtgaaacttttcccctcttccgtgagaacagaacaacctcagaaaaccctaaacccctccaacccattcccacattgtactaccctgttagttagtcaagtagcttcactcactctntctatttccagaatgccaaatccaaatccaaagcaccttttccacgccactctcttcctctcgatacttctccaggcgctgtctaaatccacgattgagccatgctcgaactccgactcatgcaacgcgcttctgggatac

SEQ ID NO: 54038 - DNA, 267 bp, Glycine max
  Clone ID: LIB3109-038-Q1-K1-B1
atatcagaatggagctgctcgaaccgtgtctatcgaagcagtaatgaaccagtctgaggaaactgtactataatcaggcactgagtgctgggcttgctgatgacagttgacttgccacgcactaattgtgcgaatcgagctctatggctgtagacactatgatgcaacatgtggagcatctctatactagatgcagggacactgctcaagtctacatcatgagcatctggacacagactgagactgctatgagccgtgatgcgggac

SEQ ID NO: 54039 - DNA, 419 bp, Glycine max
  Clone ID: LIB3109-038-Q1-K1-B10
ggatgtaaaaaatagaggttgaagaagtaagcaccaacgtgaataccctaattcggagggtttcagttttcgccctcttttctcatctccaacatcttcgtcgtcacggaggctagtcttcctgttatcacaaacaatgtctgacggtcaagaatcagacaagaatattgagatatggaagatcaagaaattgataaaggcattggaagctgctcgaggtaatggtaccagcatgatttctctgataatgcctgcacgtgatcaaatatctcgggtcactaagatgttgggagatgaatttggaactgcttcaaacatgcaaagtacggtgaaccgacagtctgtggtgggagccattacttgtggttcacagaaggtggaactttattaccagggcccttcaaatggtttgggtcttt

SEQ ID NO: 54040 - DNA, 428 bp, Glycine max
  Clone ID: LIB3109-038-Q1-K1-B11
ggcacagaatggggaaaacggcttacaagaggctgaagggaagccagagcttcaggcaacgccttcttctctctactctctcctccactcccattctcatcgaggacattcgcgccgacgagacatggcccggcctccgcaaccacgaaatttctctcctccgactcttcgaaaccgtctgcgacgattgccacgtcgaaatcagcgaaaccggtaccaaattaaagtacaaaccgggaactattatgggtggcagacaacacagtccacacgattgcggcgtctcacggtccattggttactttctggagccactcatggtgttgtgtttgtttgccaaacagccccttactatcaggctcaaaggaattacaaatgattctaaagatccatctgttgataccttcaagtcaacgactttacctata

SEQ ID NO: 54041 - DNA, 425 bp, Glycine max
  Clone ID: LIB3109-038-Q1-K1-B12
ggcacaagtgagtttgttgatcgagataactagaaacagtgtgatgaaaatgaaggtccttgttttcttcgttgctacaattttggtagcatggcaatgccatgcgtacgatatgttccctctccgaatgaacactggctatggtgcccgtactccggaggtgaaatgcgcaagttggaggcttgctgtggaagcacacaacatctttggctttgagaccattcctgaagagtgcgttgaagcaacaaaggaatacatccatggcgaacaatatagatcagactccaaaacagttaaccaacaagcttacttttatgccagagacctcgaagtccatcccaaggacacatttgtgttcagtatagatggcaccgtactctctaatattccatactacaaaaaacatggatattgggtggagaaat

SEQ ID NO: 54042 - DNA, 56 bp, Glycine max
  Clone ID: LIB3109-038-Q1-K1-B2
aggacgactgatgtgtatgaactaattcacattattggggttgatttggcctatta

SEQ ID NO: 54043 - DNA, 388 bp, Glycine max
  Clone ID: LIB3109-038-Q1-K1-B3
ggaccaaattagaaatttacagcggcccacagatgttcctgatacaggtttgctttgtgatctgctttggtctgacccgaccaaagatgttcaaggatggggaatgaatgacagaggagtttaatacacatttggtgctgataaggtctaacaatttcttcagaaccatgatcttgatcttgtttgtcgtgctcatcaggttgtggaagatggatacaagttctttgctaatcgacaacttgtaacaatattttcagcacctaattattgtggggagtttgacaatgctggtgctatgatgagtgttgatgagacgctaatgtgctctttccaaatattaaagccagctgataaaaaagcaaagctcaattttggaagtacaaccact

SEQ ID NO: 54044 - DNA, 210 bp, Glycine max
  Clone ID: LIB3109-038-Q1-K1-B4
gactgctgaaatgggactatatgaggctagaacggtgaaccactttagacttgtagagtgagcagtacataggactattcttggtgctactgatgctgttgacacgctagatgatgcctatgctactgaatgtgctatacgaaatgctggcacaggataagacctttgttgagtgctctactgcagaaatgcattggctaccatggacag

SEQ ID NO: 54045 - DNA, 293 bp, Glycine max
  Clone ID: LIB3109-038-Q1-K1-B5
aggcgtgcgaacaggtgcgagaggacgtctgaatgggcgatagttaaatgatgttttaatttaaatttagcgtatgctattcattgatctttcattctaatgtgagattgaccacacacatgaactatataacgtcatctataacaagatacatgtactaatagttcattaatcaagatagggaaaacactggcgattctcaactcaatatactatttttgattaatgatttcatcagtattcgtaattacgaaacagactagtagattgagagatgcaaacagttgcacatt

SEQ ID NO: 54046 - DNA, 391 bp, Glycine max
  Clone ID: LIB3109-038-Q1-K1-B6
ggcagcaatgagagctgaaacataagctttagaataaaaaaaacggagaaagaaattcaaaagggtatctgaaaaatgccttttcatccgtattccttttgagctcgtctacaatggccgatgatctctcttccttagccaaggatgttttgcttgtgaagggtttgaagagttccactttggtgtggaggcttgttgttttgacccttgcaatggtatgtggcgtgtatatatgttcaatttgtctgaagcagataggcactagcagcaagattggttttctagatatcaaggttgttcaaaagccatgtccagaacctaatattgaaccttgggagattccttatgtgcactaccctaaccccaaaacttacagcagggcggaatgtgc

SEQ ID NO: 54047 - DNA, 406 bp, Glycine max
  Clone ID: LIB3109-038-Q1-K1-B9
ggcagcaaaccagactaaactccgacgatgcctcccgtcgctcctcgatccggtgatgccatattcgccaacgtcgaacgcgtcaatgcggagctgtttactttgacgtatggcgcaattgtgcgtcaattgctcacggatctggaagaggctgaggaggttaacaagcagcttgatcaaatgggttacaatattggaatccgtttgattgatgagtttttagccaagtctaatgtctccagatgcaacgatttcagagagacgactgatgttattgcaaaggttggttttaaaatgttcctcggtgttactgcatctgtgaccaattgggatgctgatggaacatgttgtagtattgttttggaggataatcctttggtagattttgttgagcttcctgacaact

SEQ ID NO: 54048 - DNA, 410 bp, Glycine max
  unsure (1)..(410): unsure at all n locations
  Clone ID: LIB3109-038-Q1-K1-C1
ggagagtgagtgagttaatatgttatcattgttatggtgaaagtgaaaccaaacaccgaagctgttgagtgattttcattgatccagatcgtgtctgttctacgtacgatgtacagcggctccagcgacggcgaaagccatgacgcccctcagagtcagaggaaaattccgccggcatcctccatgctttgggtccgcaatcttcgccgtttcatcggatccggcgccggcctcggatccgaggccttgatggagcttgaaactaagagaattttgctcgacatttttaaggaaaagcagaagaaaaccgccgaagctgctacaattcccactttctacaagaagaaacctgaagatggatcaatcagtcatagagttcagagattggcanagtatcgctttctaaggaa

SEQ ID NO: 54049 - DNA, 296 bp, Glycine max
  Clone ID: LIB3109-038-Q1-K1-C10
cgacaaaacgacatattcatatatataatagcatctggtcgccacaggggaggtgactattgctacaacgacagcattaacatcatctcaggttaatttgcaactacacttactggtgtatttcaattaatttaaacggcgcacttacctccaaagatcccaaacatgttacccagttagccagatttctgtttacaccaacataagatgcaatttccacctcttaataacaacggcaccatcaccaacaactatcaatctcacagtcagaacccttactgggtgaatgaatttat

SEQ ID NO: 54050 - DNA, 425 bp, Glycine max
  Clone ID: LIB3109-038-Q1-K1-C11
ggggtagagaggatccgtggcaccagagattggaagaatgccatgattgggggtgcagtaactggggccctggtatctgcagccagcaacaacaagaaagacaaaattgcaatagatgccattactggggcagcaattgctactgctgcagagttcataaattaccttacctgaatgaatgaaagtggatgtcttgctggttttcttgcatgttttggaaaaggattgcacactcagtctctctttagtcatactctgtaccggttccgtctttgatattggtgcagttacttctaagatatgctatttatttaactttctataaaacccatgttttgataaattatattggccattcggttttctgcatgttagtagctttgccttgcaatttagtcaagctagacttgtgcaattatgtcaaa

SEQ ID NO: 54051 - DNA, 380 bp, Glycine max
  Clone ID: LIB3109-038-Q1-K1-C12
gggggtaggaggtgtcagaaacctggctgccacaaaggagctgagggccgtacagtgtactgcaaggcacatggaggtggcaggcgatgtgaattccttggttgcacaaagagtgcagaaggacgtacagatttctgtattgcccatggtggtggccggagatgcaatcatgaaggttgtacccgggctgccagagggaaatctggattgtgcatccggcatggtgggggcaagagatgccagagagaaaattgcaccaagagtgcagaaggcctatcaggcctttgtatctcacatggtggagggcgtcgacgccaagctcctggatgtacaaaaggggcacaggggagcacaatgttttgcaaagcacatggtggggg

SEQ ID NO: 54052 - DNA, 346 bp, Glycine max
  unsure (1)..(346): unsure at all n locations
  Clone ID: LIB3109-038-Q1-K1-C2
cactatgatgtcaacaacgaaatgctgcacggttcattttaccaagataggctaggcaaggatataagggcaaacatgttcaagactgcaagccaactagacccttctgccacactctttgtgaatgattatcatgttgaagatggatgcgacaccagatcatgtccagataagtacatccatcacattcttgatttgcaagagcaaggtgctccggttgggggaattggaattcaaagccacatagactgtccaatagggcctattgntagttcttccctggacaagttgggtattcttggcctacctatatggttcaccgagcttgacgtgtctttcgtcaacg

SEQ ID NO: 54053 - DNA, 340 bp, Glycine max
  unsure (1)..(340): unsure at all n locations
  Clone ID: LIB3109-038-Q1-K1-C3
gatgatggtgaagaccagaatgattttgtggacattttgctttcgattcaagagactaacaccacagatttccagattgatagaacattcgtcaagactttggtcatggtaagaagatctatcttagtaatgtattctttaaaacctattttttaacatttcttattgatttaaattaatgtggatttcactaattagaggtgaaattcattcaagaagtgtaacccacttagttagtgaaatccaggtgaatttcatctaatacanaaagtatgtaaagactaaagagcattgaaaattaaagaatgtgttgataacatttttctttctaatatatctc

SEQ ID NO: 54054 - DNA, 383 bp, Glycine max
  Clone ID: LIB3109-038-Q1-K1-C4
ggagacacgtggcattgtgtttctcttcatggcgttctctgctactctatcctacacctccttcccttgccttcctcgtttcccgcaaactttgagaacaaaaagtgttcatttccctctgattcgtgcagtgcaaggtggtcaagcagagacacccgagagcaagaagagtgaagggtcatctaatgctcagtcttcaagtgctgctgctcctaaacccaagaaacccgtctattccttgaagaaaggtcagattgtgagggtggacaaggagaaatatctcaatagcgtcaattatctttctgttgggcacccaccttattacaaaggattagattacatttatgaggaccgtggtgaggtcctggatatgcgtatatttg

SEQ ID NO: 54055 - DNA, 400 bp, Glycine max
  Clone ID: LIB3109-038-Q1-K1-C5
ggcattatatttgagttcaaacaaatcaaagccatggccacctccaacttctctattgttctctccgtctccctagccttctttttggtgctacttaccaaggcacactcgaccgataccgtttctttcaccttcaacaagttcaacccagtccaaccaaacattatgctccaaaaagatgctagtatttcatcctctggggtgttacaactcaccaaagttggcagcaacggcgtgcccacctcgggatctctcggtcgtgccctttacgctgccccaatccagatttgggacagcgaaaccggcaaggtagccagctgggctacatcctttaaattcaacattttcgcacccaacaaatcaaactcagctgacgggcttgccttcttcttggcacccg

SEQ ID NO: 54056 - DNA, 391 bp, Glycine max
  Clone ID: LIB3109-038-Q1-K1-C7
aactctgcgaaggtgcaacctgacagcctccaaatccaatggcttcagagaagaaactttcgaacccaatgagggagataaaagtgcagaagctcgtcctcaatatctctgttggcgagagtggagatcgtctcaccagagccgccaaggtgttggaacaacttagtggccaaaccccagtgttttccaaagcacggtacactgttcgttcctttgggattagaagaaatgagaagattgcatgctatgtcactgtcagaggtgacaaggcaatgcaacttttggagagtggtttgaaggtgaaagaatatgaacttcttagaaggaacttcagtgatactggttgcttcggctttggtattcaagagcatatcgatttgggaatcaagta

SEQ ID NO: 54057 - DNA, 81 bp, Glycine max
  Clone ID: LIB3109-038-Q1-K1-C8
gcacgtactcgtccgattcccggtcgaccacgcgtcgcccacgcgtcgccacgctcgtgaccttgcggacgcgtgcggagc

SEQ ID NO: 54058 - DNA, 395 bp, Glycine max
  Clone ID: LIB3109-038-Q1-K1-D10
gacgataaagggtttttgttttgtttccttgggtgctgcatgcactttcactcgaagaaccttgaagcgagtctgggccacagcaaccagcgacaacaactcaatcagctagggttgctttgcttgccatcttgttggaggattttctgttcaagagaagatggtaactagaattgtggatcttcgttcagacacagttacaaagccaactgaagcaatgagagctgctatggcaagtgctgaagttgatgacgatgttctaagctatgatccaactgcttttcgcttaaaaacagaaatggcaaagacaatgggcaaagaagctgctctttttggtccatctggcactatggggaaccttggatctgtacttggtcattgtgatgtcaggggaa

SEQ ID NO: 54059 - DNA, 421 bp, Glycine max
  Clone ID: LIB3109-038-Q1-K1-D11
ggggtagagaggatccgtggcaccagagattgggggaatgccatgattgggggtgcagtaactggggccctggtatctgcagccagcaacaacaagaaagacaaaattgcaatagatgccattactggggcagcaattgctactgctgcagagttcataaattaccttacctgaatgaatgaaagtggatgtattgctggttttcttgcatgttttggaaaaggattgcacactcagtctctctttagtcatactctgtaccggttccgtctttgatattggtgcagttacttctaagatatgctatttatttaactttctataaaacccatgttttgataaattatattggccattcggttttctgcatgttagtagctttgccttgcaatttagtcaagctagacttgtgcaattatgt

SEQ ID NO: 54060 - DNA, 425 bp, Glycine max
  Clone ID: LIB3109-038-Q1-K1-D12
tccaagtcaagactctaaattaactaacctgaggcatacagtgcctagtcccatttctcctgccaaaaggaagagaagtactgacagtaagcaaaacaaaaaagccaaagtcaaagcaaaatctgaaccaagtggttcaaagcaggccacaattacaagattcttcagtaaagtaatacctgagatgcctggtggtactcaatctgataattctgaaccaaagcttgaccaaagctctaaagttgaagacttgttgccaactgatgatggacaaatgtacaaggatgaaattgatcaatttatgcaaataataaatgggactgagtcattaaaaaaatatgccatcactataattgggaagacaaaaggtgatatcaataaggcattggacatatattacggtaattctgaaaatcttggtgaaa

SEQ ID NO: 54061 - DNA, 411 bp, Glycine max
  Clone ID: LIB3109-038-Q1-K1-D2
ggaatgggtgaggctgaaaaactgagtaataagctccttgagcatagttctgatgctggtagtgacttttcagacaaagttttgaagtcaagaatgcctgcaaagtttcatcaaccatcctcttctgaacctgtgaaagagcagtgtccagtaatatgcccgattgagctacggcaggaattgaggccaaaaagggcagatccatctggccatacttcagatgacaataatatagttactgttcccactgcaaaaggagggatgaggaggaagcatcatcgtgcatggactcttgttgaggtgattaaattggtggaaggtgtgtcacggtgtggagcaaggaagtggtctgaaatcaaacggctctcctttgcatcatactcatatcgtacctctgttgatcttaaggac

SEQ ID NO: 54062 - DNA, 388 bp, Glycine max
  Clone ID: LIB3109-038-Q1-K1-D3
ggctgtgaagtgtgaattaaaatatattcaattttgcgtttctctgcctaaaaggattgaaagatgggtcaagcattcggttgctaccaagtcgatcagtcaaatgtggctatcaaggagcattttggaaaatttgatgatgtcctagagcctggatgtcactgcctgccttggtgtcttgggtaccagattgctggtagtctgtcgctgcgagtgcagcaacttgatgttcgatgtgagacgaaaaccagggacaatgtctttgtcaatgtggttgcatctgtgcaataccgagctgtgtctgagaaagcatctgatgcattctataggcttaccaacacaagggagcagatccaatcatatgtttttgatgtcatcagggccagtg

SEQ ID NO: 54063 - DNA, 227 bp, Glycine max
  unsure (1)..(227): unsure at all n locations
  Clone ID: LIB3109-038-Q1-K1-D4
gaagagtttgttgtgagctataagctagtttatcgtgaggagaatatngaagttgttgttttctttgttgctgcagtagttttggtagcatggccatgccatggcgcaagctaccaaaagtttcctcttcgaatgaaaactggctattgtgagcgttcttcggaggtaaaatgcgcaagttttaagcttgctgtggaagcgcacaacattcgagcctttaaaaccat

SEQ ID NO: 54064 - DNA, 409 bp, Glycine max
  Clone ID: LIB3109-038-Q1-K1-D5
gatactcaaattgcttaaggtcttcaacttcacccattcatacgtggtgttgttactgctgctcttttctcttttcttttctctttagttctctcttcccctttctttttctttttcttcttcttctgagcttgtttaagcttttcttccattaacatattatcacaatgtgtggtattcttgctgttcttggttgttctgatgactctcgagccaaaagggtccgcgtgcttgagctctctcgcagattgaagcaccgtggccctgactggagtgggctccatcaacatggtgactgctttttggcacatcaacggttagccatagttgatcctgcttctggggatcaacctctctttaacgaggacaaatccgtcattgttacggtaaatggagagatttacaacca

SEQ ID NO: 54065 - DNA, 405 bp, Glycine max
  Clone ID: LIB3109-038-Q1-K1-D6
ggatgccttatacagagaaagagaatgtggaccagggcgctcgaggtgacgctagcggtacacgaggaagtggagcggttggagcggctgatagtgaaggagctccagaatgaccctgcctccaacaaacagcgcttgtatcagagtcaccgtgtgctaaacatgatcgacaccattacttccaccactgaaaagcttattggggtatatgaagataacgacaatgcaaggaaggaccagattgctgcactcggaggccaaaccgccactggaattaacgtttttagcgccttttatgatagacttaaagagatacgagagtatcataggaagcacccagttgctcgagctgctgacgccaatgacgatcatgaaacacttctcaatgaggaacctcaaattgag

SEQ ID NO: 54066 - DNA, 411 bp, Glycine max
  Clone ID: LIB3109-038-Q1-K1-D7
gctagacaattggctcagaagaaaagaaaagcaaccaagaatggttctcacatccactgccacacacccagatgaacaagaccagagcctaaactatacttttgcttccagatatgtgcgtgaacctattccaaagttcaagatgccggagaaatccataccaaaagatgctgcttatcagataataaacgatgagttgatgttggatggtgcaccaaggctcaacttggcctcgtttgtgaccacttggatggagcctgaatgtgacaagctcataatggcttcacttaacaagaactaccttgacatggatgagaatactgtgaccactgagctccagaaacggggtgtgaatatcatagcgcatatatatcatgcgcctataagagatgatgagactgcactatgtgt

SEQ ID NO: 54067 - DNA, 397 bp, Glycine max
  unsure (1)..(397): unsure at all n locations
  Clone ID: LIB3109-038-Q1-K1-D8
gaaggcaatcaatcaatcttctgagagtgtttggttgaaagtagcaaagatgtttcctttcgggcaaaagggtcaaaagataaaggggactatggtggttatgcagaagaatgtgttggatatcaacagcatcaccagtgttggagggatcgttgaccaaggcttaggcttcataggcagtgcagtcgatgcacttacttttgcagccaccaaaatctccatccagttgattagtgctaccaaagctgatggtgggaaaggaaaaattggaaagagtacaaatttaagaggaaagataacattaccaaccttgggagctggcgaacaagcatacgatgttaattttgaatgggacagtgacttcggaatntcccgtgcattttatattaagaacttc

SEQ ID NO: 54068 - DNA, 431 bp, Glycine max
  unsure (1)..(431): unsure at all n locations
  Clone ID: LIB3109-038-Q1-K1-D9
ggagagaaagtgagagagaattacagagcattttccaacacgattacacgaccgaatcaaacccctctttctctccgaagctgcttttaatatcgtactggccttcgattgttctcctctttaatacatactgttctctcttcgatttgagggaacagtacaagagtctgagcatcggttaacccaactgcacaggtagtctccaaataatggagcctcatgatgagactggatgccaggctcctgaacgccccattctttgcattaataattgtggcttctttggaagagcagctaccatgaacatgtgttccaagtgttacaaggacatgctgttgaagcaggagcaggacaaatttgcagcatcatccgttgaaaacattgtgaatggcagttccaatggcaatggaaagcangctgtggctactggt

SEQ ID NO: 54069 - DNA, 303 bp, Glycine max
  Clone ID: LIB3109-038-Q1-K1-E10
ggcgaggaagccacatagagacacaatacagagtgagttgttgctccttcgccacaactctctgccaacatgggtatctccagagattctatgcacaagaggcgtgccactggtggcaagaagaaggcctggaggaaaaagagaaagtatgagcttggtcgccagcctgctaacactaagctgtcaagcaacaagacagtcaggaggatccgtgttagaggtggaaatgtgaaatggagggcattgagattggatactggaaattactcctggggaagtgaaactgtaactcgcaagaatcgt

SEQ ID NO: 54070 - DNA, 417 bp, Glycine max
  Clone ID: LIB3109-038-Q1-K1-E11
gatgcaaacagtactgaatcatcacctctggttgagaactctcgtgcctcagttgaccttgttacagttcttgatgtgagtggtagcatggctggtactaagctagcgttgctaaaacgagctatgggttttgtcattcagaatcttggtccatcagaccggctgtctgtcattgccttctcctccactgcacgccgcatctttcctctccggcagatgactgacactggacggcagcaggcattacaggctgtcaattccttggtttcaaatggtgggacaaacattgctgaaggcctgaggaaaggtgccaaggtttttttccgaccgacggtggaagaactcggttagcagcatcattttactctctgatgggcaagatacatatacagtcaatagcaagcctaatgttggaac

SEQ ID NO: 54071 - DNA, 249 bp, Glycine max
  unsure (1)..(249): unsure at all n locations
  Clone ID: LIB3109-038-Q1-K1-E12
ggagtgagcaagagtgaagagcgaagagaatggctcccaagggtttaatctttttggctgtgttatgcttctcagcactgtcactgagtcgttgtcttgcggaggataatggacttgttatgaacttctacaaggaatcatgccctcangctgaagacatcatcaaagaacaagtcaagcttctctacaagcgccacangaacactgctttctcctggctcagaaacatcttccatgactngtgctgtc

SEQ ID NO: 54072 - DNA, 414 bp, Glycine max
  Clone ID: LIB3109-038-Q1-K1-E2
gtttccacaggtgccatatccgtggagggtgttccttcaaaggaatacttcattgatgtgaaagctgttcagattgatggaaatgttgtgaacttaaagccttcccttttagctattgacaacaagggaaatgggggaaccaaactcagcaccatgagtcctttcactgaattacaaacaactgtctacaagactttcattcgagatttcatcaagaaggcttcggacagaagattaaagagggtggcatcagtggcaccatttgaggcatgttatgattcaaccagcattagaaattcctcaactggactagttgtgccaactattgatctagtgctgcgaggtggagtgcagtggactatttatggagccaattcaatggttatggcaaagaaaaatgtagcatgtcttgca

SEQ ID NO: 54073 - DNA, 411 bp, Glycine max
  Clone ID: LIB3109-038-Q1-K1-E3
gcagccagttacgtgagggggcttcagggaactgacggtaaccggttaaaggtcgctgcctcttgcaaacactttacggcttatgaccttgataattggaacggtgtggatcgctttcactttaatgcacaggttagcaagcaggacattgaggacacgttcaatgtgccattcagaatgtgcgtgaaggaaggcaaagtggcgagtgtgatgtgttcttacaatcaggttaacggggttcccacctgtgcggaccccatcctcctaaagagaacagttcgtggccaatggggtcttaatgggtacattgtatcagactgtgactctgttggggtgttttacaatagccaacattacacatctaccccagaagaagctgctgccgatgccattaaagctggctagttacta

SEQ ID NO: 54074 - DNA, 409 bp, Glycine max
  Clone ID: LIB3109-038-Q1-K1-E4
ggcattcaactgaaaaaggaagaggaaaacctctcattttctctctctctctctctaaacacagatttcatttccaattctctatctctagaaaatgggaacaacaattcttcgttcccacgattgcctccaaggccggttcctccacaacgaagccttcgccattgccgcatcacgtgtcgcatcgcgaagaaactctaatcctaacaataatagcttcgcctcctccgccaaaccaaaccgctgccggaagcggagtccggtcaccaatcgagaccgccgtcgatctccggcgaaggccaccttgccggcgaatctcgtcatgggacacgttaagatcctgaagcgaggcgagaaattgagcctccagaataataccaaccaaagactcgcggagaacgtttcgatg

SEQ ID NO: 54075 - DNA, 406 bp, Glycine max
  Clone ID: LIB3109-038-Q1-K1-E5
gaagcagtgaagttgtacaaggagcacaaaaggagaatgagcacaaggaacctagaatgcatctgtgaggcttctatagaatggactgctatgaaccttgcattttgttcattgtgtggcattgtagggggaattgttggaggcctacttggttctggaggtggatttgttttgggacctcttcttctagagattggtgtcattcctcaggttgctagtgctacagcaacatttgtgatgatgttttcatcatctctgtcagtggttgaattctaccttctcaagaggttccccattccttatgcattatacctcacctcagtgtctgttttggctggcttctggggacaattctttgtaagaagattgattgcatgccttgggagggcatcaatcattgtattca

SEQ ID NO: 54076 - DNA, 221 bp, Glycine max
  Clone ID: LIB3109-038-Q1-K1-E6
gagatatggctgatgaatcatcaatcgcggtggcagtgaacaatcttgtttcactgaaaggtccaaaagatgtttctgatagcctaaggaaacttgatcgacttaaagacaaggagaatcaaagcttccgactagctcctggactagacttgaaactttcagcaaaaagaaaaggaagcaatatatgcaaatagggggtgtgttactttcttcatgccaat

SEQ ID NO: 54077 - DNA, 405 bp, Glycine max
  Clone ID: LIB3109-038-Q1-K1-E7
gtacttaaggaggatgagtctccttgtatttttggttcaattgaaaagcagagatggtcctatgcctgtgctaagcagttgattgagaggcttgtttatgctgagggtgctgaaaatggcttggaattcacaattgtgaggccttttaattggattggaccacgaatggatttcattcccggcattgatggcccaagtgagggtgttcctcgggttctggcatgctttagcaataatctcctccgtggagagcccctcaagcttgtggatggtggccaatcccagaggacttttgtgtatattaaggatgctattgaagctgtcttattgatgattgaaaatcccgccagggctaatggacatatttttaatgtgggaaacccaaacaatgaggttacagttagg

SEQ ID NO: 54078 - DNA, 406 bp, Glycine max
  Clone ID: LIB3109-038-Q1-K1-E8
gggagcaagagtaataataatgtgtataatgctggagcagcgggtatggtaaaaaaaatcatacgaaaagaaaaagggggatacgaaataactatagtggatgcattggatgggcgtgaagcgattgatattatacctccaggaccagaacttcttgattcagaaggtgaatctatcaaacttgatcagccattaacaagtaatccaaatgtgggtggatttggtcagggggatgcggaaatagtacttcaagatccgttacgtgtccaaagtctcttgatcttcttcgcatctattattttagcacaaatctttttagttcttaagaagaaacaatttgagaaggttcaattgtccgaaatgaatttctagtcccgcatatttatcaacatattaaactcataaa

SEQ ID NO: 54079 - DNA, 420 bp, Glycine max
  Clone ID: LIB3109-038-Q1-K1-E9
ggttgaaacagggattattattattgtagagcggagaactgatgacaatgtctgctgaatcgtcaagttctgctcgtaaagtggttgctcatctcatagccaccggcgatgctcctattctcaagcaattcaaattcaaggtatcctctttcgaccttactctttaatgcccatcttttatttcttcatatttctcatcaaaattgttaattgaacgatccccctttacttgcgttcctttgtttaaaattcttctggtgtcagttatactttatttgttgctaatacaaagttgtgggtgagagagatggtgcttaaatctgaatggatgaaggagatgttatttcgcctgcattatgtatggcagtcaattatgtgggtattctaatttcataattggtgatattaaccctaattgat

SEQ ID NO: 54080 - DNA, 417 bp, Glycine max
  Clone ID: LIB3109-038-Q1-K1-F1
ggagtgagacaatatcacacataatataattccaaaatcactcctattgctatagcaatatgatgggtgacactgagatcaaaccatcagttgaagtagtcatatgtgcttccatgaacaataacaatagcgcaaacaaccacacccttccaaccgacatcaccaagtcatcacaatcacacttaccaatcttgaccaagctccatgctggttactttttcatatgcctttcctttggtgcacaagctttgctctggaagagtttgagtaaacacaacaaggactcacaaactctctggcatggattcaatttgatgccttccattgcgtttctactactttggtgtgtggcactgctcactgccactactttgtctttactttacgtgctcaagtgcatctttcacttggacatgg

SEQ ID NO: 54081 - DNA, 246 bp, Glycine max
  Clone ID: LIB3109-038-Q1-K1-F10
ccgcgtatagtgggcagcgtagctctgaattgggaacgactgttagacaagatagtcacatgaacaaagccaagctaatcaacatgcttgatgaggtggaccaaaggtacatgcagcaccacagccagattcaaattgtgatattctctatcgagcaatctgctgggataggctcaactaggacgtacactgatctagcactgcatacagtttcaaatcaattacagcgcctgaaggatgcaataa

SEQ ID NO: 54082 - DNA, 365 bp, Glycine max
  Clone ID: LIB3109-038-Q1-K1-F11
gactgcaggctgcttggtaatctcctcagtgacattctccagcgtgaaattggcaccaacttgcttgacaagatcgaaaggactcgagtccttgctcaaagtggttgtaatatgaagcaagcgggtattgtaaacatggcacagatgcttgagaagcagttggcttccgagttatcaaagatgaccctagaagaaactttcacccttgctcgtgccttcagccattatcttactttgatgggtatagctgaaaccccacataaggctccgtaaggatggaatatggcacaaattgcaaaatcttgcgatgatatatttaaaccacttgtgcaaggtggagttcccccagaagaactttatgacac

SEQ ID NO: 54083 - DNA, 398 bp, Glycine max
  unsure (1)..(398): unsure at all n locations
  Clone ID: LIB3109-038-Q1-K1-F2
gggggcggtctgtatatgcaaatattcagaaatttatccagtttcagcttacagtaaatgtggccgctctagtgataaatgttgttgctgctatttcatctggtgatgttccattaaatgcagtgcagcttctttgggtaaatcttatcatggatactctgggagcactagccctggcaactgaaccaccaactgatcacctcatggatcgatccccagtgggtcgaagagaacctctcataacaaatattatgtggaggaatttgctgatacaggcaatgtaccaagtgtctgtcttgcttgtgctcaatttccgaggcataagcatactgngtctgagccatgacagaaaagctcatgcaatcaaagtgaagaatactttgatattcaatgcattt

SEQ ID NO: 54084 - DNA, 412 bp, Glycine max
  Clone ID: LIB3109-038-Q1-K1-F3
gacctaaaattccgaagttctttttcttataatggggctcttgtggaaaactcacacgaggatacacgtgattagaacattttttgcaatccttttggttgcactgctgagttcagagagagtagagagcagaaaagccaaagttgtgaccacttccttggagtacaatgctataaactgcagagctcacagtgctgcattgacagattttggtggtgttggggatggaaaaacatccaacacaaaggcatttcagtctgcaataagtcacctgagtcagtatgcttctgaaggtggctctcagctctatgttcctgcaggaaaatggctcactggtagcttcagcctcactagtcacttcaccctctatcttgacaaagatgctgttctccttgcttctcaggatataact

SEQ ID NO: 54085 - DNA, 393 bp, Glycine max
  Clone ID: LIB3109-038-Q1-K1-F4
gatgcacaattgagttatataatcgtctataatcatatctgtgtatcaattttctttcaccatcctagctagctttgctgtaaacatctgatctgagttcatatatatggcgaataaactgaatataagggtaggagaagcaactctggtgccaccagcagaagaaacaaaaaagggtatatacttcctttcaaaccttgaccagaacatagcacatccagttcgaaccgtttacttttataataagtctccatgtagagggaacgaggaagcagcacaagtcataaaggatgctttgtcaaaagttcttgttcactattaccctatggctggaagattgaccatcagttcagaagggaagctgatcatagagtgcacaggtgagggtgttgt

SEQ ID NO: 54086 - DNA, 404 bp, Glycine max
  Clone ID: LIB3109-038-Q1-K1-F5
ggagcagagtatcggcatagcgtagccatggccatgggattgacctcacaactcctcctttctttgttcatcagtacccttcttcttcttcttccctcttccctttcacaatctaaccagttttgtgacgctggaacttcatccaagctgttgatcaagggcggcaccgttgtgaatgctcaccaccaacaggttgccgatgtctatgtcgaagatggtatcattgttgccatcaatcccactattacggttggagatgaggtgacggtcatagatgccactggcaagtttgtcatgccagggggcattgaccctcacacccacctagagtttgagtttatggatacggaaactgtagatgacttcttcagtggtcaggctgcagcattagctggtgggacaac

SEQ ID NO: 54087 - DNA, 155 bp, Glycine max
  Clone ID: LIB3109-038-Q1-K1-F6
gggagccagagtaataataatgggtataatgctgcagcaacgggtattggaaaaaaaattattccaaaaggaaaagggggattccaaattactattgtggatgccttggatgggccttaaatgaatgatattatacctctccgaccagaactttt

SEQ ID NO: 54088 - DNA, 400 bp, Glycine max
  Clone ID: LIB3109-038-Q1-K1-F7
ggttctagtgtgtgattgtttgttgttgtaactcgttcttcttcttttgttgttctgtgtttgtgtttgttttttctctcacctgaaaatgtcttgctgcggtggtaactgtggttgcggaagctcctgcaagtgcggcaacggctgcggaggctgcaagatgtacccagacttgagctacactgagtcaaccaccaccgagaccttggtcatgggagtggcacctgttaaggctcaatttgagggtgctgaaatgggtgtgcccgctgagaacgatggctgcaaatgtggaccaaactgctcctgcaacccctgcacttgcaagtgaagtgttgggagagcaagcttcaagcagagatagcccttaattaggaataatgataaactattaatgtgtagc

SEQ ID NO: 54089 - DNA, 428 bp, Glycine max
  Clone ID: LIB3109-038-Q1-K1-F8
ttccaaaagaccacccaatggggtgtttaagtgagtttgttgatcgagggaacttgaaacattgtgattagaatgaaggtccttgccttcttcgttgctacaattctgagagcatgtcaatgccatgcttactatatgttccctctctgaatgaacactggctatggcgcccgttcttcgaaggtgaactgctcattttggaggcttgctgcataaacacacaacatctttggctttgagaccattcctgaagaatgcgtagaagcaacatatgaatacattcattgccaacagtatatatcatacttcagaacagttaaccaacactctcacttttatgcctgagacctagaactccattccaaggacacatttgtgttcaatatatatgtcaccgtactctttaatattccatactacctcataaa

SEQ ID NO: 54090 - DNA, 300 bp, Glycine max
  unsure (1)..(300): unsure at all n locations
  Clone ID: LIB3109-038-Q1-K1-F9
ggaagtgggaagcgtagctctgaattgtcaactacggagagacaagaaattcagatgaagaaagccaagctaatcaacatgcttgatgaggtggagcaaaggtacaggcagtaccacagccagatgcagattgtgatatcctctttcgagcaagctgctgggataggctcagcgaggacgtacactgctctagcattgcatacaatttcaaagcaatttcggtgtctgaaggatgcaataacggngcaaatcagagctgcatacaagagtttgggggaagaggattgctttggtgctaaa

SEQ ID NO: 54091 - DNA, 396 bp, Glycine max
  Clone ID: LIB3109-038-Q1-K1-G1
ggttctactgtgagatatgatagatcatgtaactcgttcttcttcttttgttgatctgtgtttgagctctgcaatgctctcacctgacaatgtatagatgctgtggtaactgcggttgcgtaatctactgcaagtgctgtaaccgctgcccacgctacttgatgtacccacacttgagctacactgagtcaaccaccaccgagaccttgtacatggaagactcacctggcaatgctcaatttgatggcactgaaatgggtacacccgctaagaactatggctgttgatgaggaccaaactgctactgctacaccttcactcgcaagtgatgaccctgcagagcaagcttcaagcacagatagcccttacttaggaataatgattaactattaatgt

SEQ ID NO: 54092 - DNA, 343 bp, Glycine max
  Clone ID: LIB3109-038-Q1-K1-G10
tgggcccttgagattgggaagcattggtggctagcgaagctaagctaaaactaaactctttcagtttgttttagcttcagcttcttctgcttcttttgctttttccaccacaaccacaaccatgtcttctgccactgcctccaacactttcttccttcactcttgtttcctcctcttctgtctcctctcggatcctttctgtgtttccatgttctctggcattgacacaagagatttagaaaaccgagatgatttgtttccacagattctaagagacgacgcaatcgcaaggctttatgagcttgcgaaagtgaacgattctagctggtatttggagaagaca

SEQ ID NO: 54093 - DNA, 403 bp, Glycine max
  Clone ID: LIB3109-038-Q1-K1-G12
gatagcattcgcaacggtgaggagaattggactatttcgtcgggaactatacaaggaagaaatagtatagaagattttcttgaagaggtgaaagagcgtttgaaatgtgaactgcaaggtaaaattgtcaaaaaaggttctgtggttcgagggagtggaattgagacaccttacaatgaaaagccatctgatcctaaactaatagcccgtcacatagtaaagcaagtcagagaaagtgtgactagagatactgacacaactttactccactcagaatcaacaggatcatacaaaagtgaaatgcagttcaatggaccaaagctcccagaatttttcagcagagataccaagaagttcttgtccaagaggcaaagaaatgttgtgagaagggaagcacatgctg

SEQ ID NO: 54094 - DNA, 420 bp, Glycine max
  Clone ID: LIB3109-038-Q1-K1-G2
gccatactttttgttcttttgaaaccatcaaatgatgaaataacccaaaccttgtaggattttatctattacttgggagtatattaggttgattagtttcttcttatttaacctgcttactttttgtgtgtgaacagatgcttaatgaaagtatagagcaatgtctatttccctacaaacttcaggtaatgcatgaataacatctgcaatttgtcaataactattttatccttcctcaagtttcaataccagctgttattggctcctgctggattaaatcctattgtaaatgtatagaaacaccgatggatgagtgttattttctttctcttttccctgctgggtcttggatgaagaaagttattgggagtgtattcccagttctctttttctgtattatcttccaagaaatatatttgg

SEQ ID NO: 54095 - DNA, 411 bp, Glycine max
  Clone ID: LIB3109-038-Q1-K1-G3
tactaatggtattaatggaaatgctggagatggtgttcaagcagttgagaatcctgtgatgtccgagtctggtgcggaagtttgcgatttccctctagagcgttgcatgaggatagtgcctcatgatcagaacactggagccttcttcattgctgtactgcaaaaagtttctcctctgccagcaattacagaacaaacaaaaataaaaaatgatgagcaatatgtagaacccgcaaaccagagtcttaatgatgcacaagtaccacatattacttcatcagaaagtgcacacgaagaagtcttcaaagcagtgtctgaggaaaatgtagatgatgctgaacccaacactgaagatttggaagttggtcctgttacatgtgaagaacagaattccaaggaaactcatgaacc

SEQ ID NO: 54096 - DNA, 285 bp, Glycine max
  unsure (1)..(285): unsure at all n locations
  Clone ID: LIB3109-038-Q1-K1-G4
ggaggggtgaggaggaacttaatttgaacgtttccctctgactctgaggttacaagaatcctccacccaacctctgttgtgtttccggagattaggatctggttgggaaactgctatagaagtgtacggatctcatccatcggggcatagcttggttttgcgatgggttggagatacaacgctggattntcctcatagtcactggtgttataattggggtcacttccgccgaagttcccaaggatatttttccggattttaaccagccatttgcagtaccaaatt

SEQ ID NO: 54097 - DNA, 216 bp, Glycine max
  Clone ID: LIB3109-038-Q1-K1-G5
gaaggagaaaaagaaatcaggagttccgcccctgcgtaaaatgttttcgcaccctatggaataaagacataaacttggtaatctcaattcatctgcaaatgatgttgggaggtgcaacagcaaggggcgtttccctgattaaacttcttcctccgttccgctttcgctttaaacacttctctggtctttcaaaaaccatttggttttaaggttatt

SEQ ID NO: 54098 - DNA, 209 bp, Glycine max
  Clone ID: LIB3109-038-Q1-K1-G6
ggctcaagtgagtttgttgatcgagagggctagaaacagtgtgatgaaaatgaaggtgcttgatttcttcggtgctacaattttggtagcatggcaatgccatgcgtacgatatgttccctctgcgaatgaacactggctattgtgcccgtactccggaggtgaaatgcccaagtttgaagcttgctgtggaagcacacaacatttttg

SEQ ID NO: 54099 - DNA, 404 bp, Glycine max
  Clone ID: LIB3109-038-Q1-K1-G7
gggtattctgagattacaagtttcagaggccgagggcgataatatttccatacggtttcttgacaggaagacaggtgagactactatggggaagacaaagcctgaaacaatacttaggcaaattacaaccaagaaaggacaggtctacagcatgcttgagggaaaaagagacgtagaaactgtattaactatgggaatcatggaagatgttagcattattccccaaccagctgatacagggaaggttgatttggtgatgaatgtggtggaacgtcccagtggaggattttctgctggtggtgggatatcaagtgggattacaaatggtccactaagggggcttattggaagctttgcctattctcatagaaatgtttttggtaaaaaccagaagctcaatattt

SEQ ID NO: 54100 - DNA, 397 bp, Glycine max
  Clone ID: LIB3109-038-Q1-K1-G8
gacagcagagaaagaagcttcacaattcacattcccaccaacggaaccatggcctccgtgtacagctgtacggagtgcggatccaacctgaatcttaactccgctcatgcctaccctccagacttctacttcgaagtcggcaacaagggctccgtctccttctccgccgtggaccccaccaagttcaagttcgagaaggaggacaagcttcgccccttcttcgaaaccgtcaactactggggaatccagaggaagaggaccaagatcaagtgcaacacctgtgactgtctccttggctacgtctatgacgatggtccacctcttaccaatagtcccggtcaatttcacatgggtcctagccaagttatccccagagcgccaagatataggttcaaga

SEQ ID NO: 54101 - DNA, 338 bp, Glycine max
  Clone ID: LIB3109-038-Q1-K1-G9
ggcttgaagaatgcttaaaggtctggaaaggacaggtatacaacatgaaggtgtcgccaacttgcttgaccatatacgaagggctatcattcttattcatagaatttcccactaccacgctgacctaagttgcaaccttgatccctatgcttgatacgcaactaaatacttaataattccctatctcacttacccaagctttgacccttggttatcacatcgacactatgtatcatcgatggctatatactagatccaccacaagttccattacctatgcaatctggcactcattgccgaatcctgcgatggcatatccaaccagctgttgcacttca

SEQ ID NO: 54102 - DNA, 158 bp, Glycine max
  Clone ID: LIB3109-038-Q1-K1-H1
gggggacccgtgaatcaatatccttggggatagaatgtggggcttggtggtgaatctggtggaccaaagtggtcggtaggtattcctttggtcaagaatggtggatagattgattcattattttaacgtactttggagcattggatgagtgaatggcc

SEQ ID NO: 54103 - DNA, 230 bp, Glycine max
  Clone ID: LIB3109-038-Q1-K1-H10
tggagctgctcatacaacactgcactgtagagcaagtgctgcgataaatctaggaagagactgtaaagatttcgaatccataatcctaagaaagggcaccaccgtatcaacaagtatacgcagacgctcgatatcagtccctgtctgtaacactaatgcctattacaatgccttactagaagtaaaacgcccctgcataaaaagcagtcactctatgtactcgactattc

SEQ ID NO: 54104 - DNA, 408 bp, Glycine max
  Clone ID: LIB3109-038-Q1-K1-H11
gacgatgatgatgatgatgatgatgatgaggtagaatatgaggtgcacgtggtagataagaaagtggttgatggagataataatgatgggaacaaggccaaggagcacgccgcattccgtacccggagacctggttcccggaatccacttgaggttgctaaagagattcagattctatttcagagggcttccgattctggtgcccaaatcgccaagattcttgaggtcggcaagcttccccacaatcgaaagcacgcagcttatcaagcttcttccaagatgttacaagttgttgctccctctttgtcccttgtctcctcccaaccttctacttccaaagatgctgaatccgccttcgctgctaacatggattttaatgttgatctaacaaccggtgcacgcaatctt

SEQ ID NO: 54105 - DNA, 378 bp, Glycine max
  Clone ID: LIB3109-038-Q1-K1-H12
cgaggaacgcagcaatcgcaagtcgtctgtcctgtcccgcgggagcagacgacctgtcttcatcgccaaaccacctcaaaaacattcatcaacgttcactattcatgcatccatcattaagtgagaaaataaggttcgattactctatctgtggtttgcttgtgatccatcatggaagtgcccagttcctgggatgcccttcgtatacatgctagaaaacttgaagctcagctggatgagcagatgaattcttatcgcaaattgggttctaataatgtttctacaaaagctgacgctgcagagagtgatctatagtcttggatttgagcgttactaaaacaacttcaacaagtttacacacagatgcaagcttgggta

SEQ ID NO: 54106 - DNA, 413 bp, Glycine max
  unsure (1)..(413): unsure at all n locations
  Clone ID: LIB3109-038-Q1-K1-H2
gatattaaagtcgtatattttaatgcatgctgtcgagcttgtgttactttgtgacaaatggagggtccttagttctgtttctctttcttctctctgtgctttcaaccaagttctcaaatcactcttcttcttcacccttctgatctgctaattctcaaggtattcaaaattgggtggttttcgattgaactgtgatgtccaagccactgctaggcatatcggaagatgaaggtcaaagcaatgtcactctgttggtttcttcctcatgcaccatggaaagtgtgtgcctgaatagctcanaactgaaagagcgcaactacatggggttatctgattggtcatctgtggacagctccgagccgtccttctcagatgagactaggagcaatctgaacctcaaggctactgagctc

SEQ ID NO: 54107 - DNA, 136 bp, Glycine max
  Clone ID: LIB3109-038-Q1-K1-H3
gatgaacgtggtgagcgcgttaatggtgactcggaaccaactcggagcacctgaaggcatacccttcggatcggtatggttgttcgtctacgccgggatctccttttccctcgtcatcttcgccggaatcatgtca

SEQ ID NO: 54108 - DNA, 271 bp, Glycine max
  Clone ID: LIB3109-038-Q1-K1-H4
gacgcaaaaggatggatgatggaagaaacaaagagaagggaaatatcaggaggtgcgagtaccggagccaaacgcgggtgtgtgtgtgtgtgagggagagagagatgcagttccattcagaaactccaaactaaacatccctggcgacaaccttaggaatctcgatcgctgaaaaaacctatgcagccccgaacacactctctgcattccaacttgtttaagtcatgcctttcgattcacccttctctcaataaatttttaatcagattct

SEQ ID NO: 54109 - DNA, 290 bp, Glycine max
  Clone ID: LIB3109-038-Q1-K1-H5
ggttagtccagatggtacgcaattttccattacatggcctgatcggagaatacgtgcgttccggttcagttcaggttaactaaggcgaggttatgatgaatccctggaggctgctcatgatctgcaaagaagtgatgcttcattataccggttggaatccattgaatgtggttgaagaatggctgtcgagaaagaaattgagacgactgaaagtgctcttcttacaaatgcagtttttgactaaagttccgatgttcttatatatgcaaccttgcttgggattaaaattg

SEQ ID NO: 54110 - DNA, 198 bp, Glycine max
  Clone ID: LIB3109-038-Q1-K1-H6
gggatatatatagccttttttagttacttactcttgttttgggttcaacatttacagcccaagtcaacttgtttgtggaatattttaatgctcaaaatgattacaaggtcataaacacggatcaatggatgggattttttccttattgcacttagattaatttttccaacccttaatgactatgaacctgaactttcc

SEQ ID NO: 54111 - DNA, 271 bp, Glycine max
  Clone ID: LIB3109-038-Q1-K1-H7
ggattacagaatgcggaaatcggtacgggctatgtgagaaatactctgagcgaaaacaccacataatcctttcttgcattttacggccattgtatcttcactctctaactggtcttgaacatgtgcctgatacttgctacacctggagacagatactccttacttatgacgtgctacctatagcttcttgtcatttcggcggacgctgcccttgcacaaatgccttaccagtaaatgtctgcactggatatccacaacaatacttcacatg

SEQ ID NO: 54112 - DNA, 272 bp, Glycine max
  Clone ID: LIB3109-038-Q1-K1-H8
gacgtaaaaggtttgatgatggaagaaacaaagagaaggggggtatcatgaggtgcgagtaccggagccaaacgcgggtgtgtgtgtgtgtgagggagagagagatgcagttccattcagaaactccaaactaaacattcctggcgacaaccttaggaatcttgatcgcttaaaaaacctattgaagccccaacacaattttttgatttccaactggtttaagcaatgcctttcgattaacccttttctcaataaatttttaatcaaatttt

SEQ ID NO: 54113 - DNA, 422 bp, Glycine max
  Clone ID: LIB3109-041-Q1-K1-A11
ggggggtagattggggcgtggacatgagggtctttatgacacaatcaataattcaattcattttcaattaggtcttgctctagcctctttaggggttattacttccttggtagctcaacacatgtactctttacccgcttatgcatttatagcgcaagactttactactcaagctgcattatatactcatcatcaatatatagcgggcttcattatgacaggggcttttgctcatggagctatattttttattagagattataatccagaacagaatgaagataatgtcttagcaagaatgttagaccataaagaagctatcatatcccacttaagttgggctagcctctttctggggttccatactctgggactttatgtccataatgatgtcatgcttgcttttggtactccggagaaac

SEQ ID NO: 54114 - DNA, 434 bp, Glycine max
  unsure (1)..(434): unsure at all n locations
  Clone ID: LIB3109-041-Q1-K1-A12
gacactaaacaagttaaaagaagagcatcactgagctaacaaagcaaccctatgtcgaaggtggtttgtgtcaccggagccagcggcgccatcggatcatgggtggtcctactcctcctccagcgtggttacaccgtccatgccaccgtccaagatatcaaggatgaaaatgagacgaaacatttggaggaaatggaaggagcaaagagtcatctccatttttttgaaatggatcttcttgacatcgactccattgccgctgccataaagggttgttccggcgtaatccaccttgcatgtcctaacatcattggtcaagtcgaagatcccgagaaacagatattggaaccggcgataaaaggaacggttaatgtgttgaaagcggcgaaagaagcangggtggagcgcgtggtggcgacttcatcgatttcgtc

SEQ ID NO: 54115 - DNA, 427 bp, Glycine max
  Clone ID: LIB3109-041-Q1-K1-A9
gctccaagacgtcaccgtctacgccttcaacgccaccgtggcgaacttcctcacttcgaattttcaggtcacgctcatctcgcgtaacccgaacgaccgcatcggtgtttactatgatcgcctcgaaaccttcgtgacctaccgaagccagcaggtaaggtccggaacggcattccttccgacatatcaaggccataaagagatcaaggttgggcctccgttggttaatggcaccaacatcccggtggggccgtacaatttcctgggcctaagccagaaccgaagtaccgttacacgcttggtcaccatccgagccgagggtagggttcgttggaaggtcggcacctatatctccggccgttaccacttatacgtccgttgcccggggtacatcagctttggaccccgcagcaatggaatcgtcgtc

SEQ ID NO: 54116 - DNA, 398 bp, Glycine max
  Clone ID: LIB3109-041-Q1-K1-B10
ggaatcgaatcgatattggtgttttgttccgttctaagcatggggaaggaaggagatctatgggacgattcagtactcatcaatgccttcgaccaagctatttctacttacaacaaaatgcatagcagcggcaaacacaaagacgccgcctcggttcaagaggaggcgaagacactgatcggagaaaatggctccaattttgacactacaaggggtgctgatacgaatattccagctactgatgcgcttgattcaggtgagactggtaatttgtcgaagttggaagaaaatcatgacacagagtcacaggtggatcatctggattcaacaagtggtcaagacatccagaatgcacagaacggttatgcatatgctcaagctgtagatggttataaatc

SEQ ID NO: 54117 - DNA, 426 bp, Glycine max
  Clone ID: LIB3109-041-Q1-K1-B11
gagggatagggatggagaaagtgaaggtgcttcggcgactcctcgagacaccaggggttcaccaggggccagcctgtttcgacgctctgggtgcgaagctcatagaatccgctggcttcccctactgcatcaccagtggcttctccatcgccgcttccaggttggctctgcccgacaccggcttcatctcctacggcgaaatgctggagcagggccaactcatcacccaagccgtttccattcccgtcattggcgacgccgacaacggctacggcaatgccatgaacctcaagcgaaccgtcaagggtttcattgccgccggtttcgcaggaatcattctggaagaccagattgcgccgaaagcgtgtgggcacacgcgcgggaggaaagtgataccgaaagaggagggcgttatgaagattagag

SEQ ID NO: 54118 - DNA, 445 bp, Glycine max
  Clone ID: LIB3109-041-Q1-K1-B9
gagagcctgctgctgaaagtgtttgtgaagggaaagtggggagggctgggaagttggcgagtcccggtgacttgaattacccctctttcgcggtgaagttgggtggggaaggtgatttggtcaagaataaacgggttgttactaatgtgggaagcgaggttgatgctgtttacactgttaaggtcaatcctccacctggtgttggtgttggtgtgtctcccagcacgattgtgttcagtgccgaaaacaagacacaggcgtttgaggtcacgtttagtagagttaagttggatggctctgagagttttggctccattgagtggactgatggaagtcatgttgtgaggagttcaattgctgttacttggagctgtgcatactcatcgtccgtttgaatgaattgctgtggagacgacgtctttctcaggttatggattattggatt

SEQ ID NO: 54119 - DNA, 423 bp, Glycine max
  Clone ID: LIB3109-041-Q1-K1-C10
gacatagatgaagtgaaaaatatcttaaaaaactgcggttatcatcccgaaattggaattgacattttgatcgaaagatgtttggtaactctggataggatgaagaagttggggatgcatgatttgctacaagaaatgggaaggaatattgtatttcaagaatctccaaatgatccaggcaaacgtagtagattgtggtctcaaaaagacattgattatgtgttgacaaaaaacaagggaactgatgaaattcaaggcatagttctgaacttagttcaaccgtgtgattatgaaggacgctggagcactgaagccttcttcaagacaagtcaactcaagttactcatgttatgtgatatgcagcttccccgtggcctcaactgccttcctagttcactgaaagttcttcactggagaggatgt

SEQ ID NO: 54120 - DNA, 431 bp, Glycine max
  Clone ID: LIB3109-041-Q1-K1-C11
gactcagcagaaagagatcttgagaaccaaagtccccggcaaggtttccatgtacgtttgcggagtcactgcctacgacttcagccatctcggtcacgctcgcgctgcggtttctttcgatatcctcttcaggtaccttaagcacttgggctatgagattacatatgtgcggaatttcactgatgttgatgacaagataattaagcgagcaaatgagaccggggaggatccattgatgttgagcaaccgtttttgtgatgaatataatgctgatatggctgatctccagtgcgagacaccatctagggaacctcgtgtttctgaacaccttaacgagataaaggacatgataacccagattatcaacaatggctatgcatacgaagttgatggtgatgttttttatgctgttgataaatgcccaaattatg

SEQ ID NO: 54121 - DNA, 427 bp, Glycine max
  Clone ID: LIB3109-041-Q1-K1-C12
ggtacaaaagggagggttaaattaagccgtttttcagtttcttgccgtaagtaaataggattcaagccattttatcgacatgagtgttctatatcgaaaaaaaaatctaataattttatcgaaaccatttcatttctgtattaacatagtggtagaaagagtactacactgcgtctagacttcaaactattcactttaaccatggtaatagtccaaaattattggttaatagagaatcaaagtggattaccaataaatcgcgaaatgctatagttcttaaatattttttcttaaattattgaaaaaatttcattaattcagaagtaattttcagaagtaattcgcgggattatgcacattttcttagttataactaaaaagtgcagtttgggttggatccaatctattctttgaaataaacaactcg

SEQ ID NO: 54122 - DNA, 418 bp, Glycine max
  Clone ID: LIB3109-041-Q1-K1-C9
ggtgaaacttttcttcagcattgtcgtcgtctgcctctcactcctcttccttctcgcactgctattgccttcttcccttttctctcaaattcacatttatggagaagcctccttaggggaggtggatatatggagtgttcggagactcgtggaatggagaccttgcaattggtggctacaaggccatcaaacagacaattgctttcgtttttttgtttattcttgaaatggtgcagctctaccattacaaactaatggatatatcagagtggattgctatggggggctcaatcagatgcgaagagatttctgtgatggtgtgggcattgctcgtctgttaaatgcaacccttgtcttgccgaagtttgaagtggcatcatattggaatgaaacaagtggttttgcagatgtatatgat

SEQ ID NO: 54123 - DNA, 432 bp, Glycine max
  unsure (1)..(432): unsure at all n locations
  Clone ID: LIB3109-041-Q1-K1-D10
ggagttagggtgagttgcaggcagtgtcatctcgcctttgacgacaagatgagcatcccaattccccatcggcagttattcatagacggagactggaaagtccccgtcctcaagaatcggattcccatcatcaacccttccacccaacacatcatcggggatatcccagcagctactaaggaagacgttgatctcgctgtcgctgccgccaaagctgccctctcccgcaacaagggcgccgattgggcctccgcttccggctccgttcgggctcgctacctncgcgccatcgctgccaagatcaccgagaaaaagcctgaactagcaaaactcgaagctattgactgtggaaaaccgctcgatgaagccgcctgggacatcgacgatgttgctggttgctttgagttctatgctgaccttgctgaaaaattg

SEQ ID NO: 54124 - DNA, 420 bp, Glycine max
  unsure (1)..(420): unsure at all n locations
  Clone ID: LIB3109-041-Q1-K1-D11
ggcagccaagaaaagaaaatccggacccattttcttcgtagccaaacactctgaaattctcagttatgtcgtggcaagcgtatgtggatgatcacctactgtgtgaaatcgaaggtaaccacctcactcacgccgctatcatcggccaagacggaagcgtttgggctcagagcaccaacttccctcagttcaaacctgaggaaataactgccatcaataatgactttaatgagcctggatcacttgctccaactggattgtatatcgggggcaccaaatacatggtcatccagggtgagcctggtgctgtcattcgagggaagaagggtcctggtggtgttactgtgaagaagaccggtgcggncttgatcattggcatttatgatgaaccaatgactccaggtcaatgccacatggtag

SEQ ID NO: 54125 - DNA, 433 bp, Glycine max
  unsure (1)..(433): unsure at all n locations
  Clone ID: LIB3109-041-Q1-K1-D12
gacactaaacaagttaaaagaagagcatcactgagctaacaaagcaaccctatgtcgaaggtggtttgtgtcaccggagccagcggcgccatcggatcatgggtggtcctactcctcctccagcgtggttacaccgtccatgccaccgtccaagatatcaaggatgaaaatgagacgaaacatttggaggaaatggaaggagcaaagagtcatctccatttttttgaaatggatcttcttgacatcgactccattgccgctgccataaagggttgttccggcgtaatccaccttgcatgtcctaacatcattggtcaagtcgaagatcccgagaaacagatattggaaccggcgataaaaggaacggttaatgtgttgaaggcggcgaatgaagcangggtggagcgcgtggtggcgacttcatcgatttcgt

SEQ ID NO: 54126 - DNA, 402 bp, Glycine max
  unsure (1)..(402): unsure at all n locations
  Clone ID: LIB3109-041-Q1-K1-D9
ggggtgcgaagtgaaatgttgcaaaccctaggaggcgtaatccctcgcttcgtgagtcgctcatggctccgaaacctgacggtgcgtgcaatggcattctcttcctcctcctccgattatggagaccagtcacgtggtggccttccccgcttctactccgaaactcttcctccttccaagggtagtgttatacgcgtgcaaggtgatgaattctggcatatgacaaaagttttgaggttaaccaccaatgatagggtacagctcttcaatgggaaaggaagtctggtagaaggatgcatacagagcattgatcgaactggacttgattntgntgcattgaatgatttgatatcaatccctccacaaaatacacaattgcatgtatttgctggttttggtact

SEQ ID NO: 54127 - DNA, 354 bp, Glycine max
  Clone ID: LIB3109-041-Q1-K1-E10
gaaggaaatgacagctagtaaaccacatactacggaaccaatgcataatgtgcagtcattctctacaattcatttgagagagcccccttctgtcttgagaccattggagagcaattcagagaccgaagctgttgaaatcacagtaacaaagttgcttttgaaatcatactatgacattgtcaggaaaaatgttgaggatcttgtccccaaagcaattatgcacttcttggtaaataacacaaagagagagcttcacaatgtcttcattgaaaaactatacagagaggatctgtttgaagagatgttgcaagaacctgaagaggtagccaagaaaagaaaaaactgtcgagaact

SEQ ID NO: 54128 - DNA, 433 bp, Glycine max
  unsure (1)..(433): unsure at all n locations
  Clone ID: LIB3109-041-Q1-K1-E11
ggggtgaagagaaaggtgtgctatttttatgatgcggaggttgggaattactattatgggcaaggtcacccaatgaagccacatcgcatacggatgacacatgctcttctagcccattatggattgctacaacacatgcaggtccataagccatttcctgctagagacagggacctttgtcgatttcatgctgatgattatgttgcattccttcgaagcataactcctgaaacacagcaggatcatctgaggcaactcaaacgctttaatgttggtgaagattgtcctgtttttgatggcctctactctttctgtcaaacatatgcanggggttcagttgggggtgctgtaaagttaaatcatgaccaatgtgatattgctgtcaactgngctggtgggttgcatcatgccaagaagtgtgaggcttctggat

SEQ ID NO: 54129 - DNA, 434 bp, Glycine max
  Clone ID: LIB3109-041-Q1-K1-E12
gtgtgaaagaaaagttggtggacttctgtaatgtgctggatattccgataactaagaccagtatgaagaaggaggaactgtctgcaaagttgttagaatttttggagtccccacatgctacaactgatgttctgcttgctgataaggaaaagaaaggcaaaaagcgagccagaaagcaaaccccaagcaaatcccctgctaagaagcaaaagcaaaattcacaagttgggaaaaagcaaaagcaatcttctgacatcgaggacagtgatgcagctgaaccttcagatgcaaaagttgattcccgggaagatgatgattcaagtcaaaaaagtgaaggtggtaataaggaaagcatatcagagaaagaagaagattaagaaaaggttcacaaacgttcttaaaaaagattctgaaggaagatcaaaccacacctg

SEQ ID NO: 54130 - DNA, 440 bp, Glycine max
  unsure (1)..(440): unsure at all n locations
  Clone ID: LIB3109-041-Q1-K1-E9
ggacagaaattatggcaagaagagatcttgaaagtggcggtggagtaaccaagaacaacagaagtgcagaggaaaactactctgcgcccgaatcttcccatgtttatgattctgagacccattggacatcatggctcgtgcccatgtttgtggttgctaatattgctgtctttgttattaccacgtacatcaacaattgtcccaggaacaacattcgtttccaaggtcgctgcgtggcaaggtttcttggaaggttctcttttcagcctatgcaggagaatcccttgcttggtccttcttcttcaacattgaccaagatgggagctcttcgatgggataatgttgtgaatagacatcanggatggagacttgtcacttgcatttggttacatgcttgggttattcatttgctggctaatatggtgagtctggtcttcatt

SEQ ID NO: 54131 - DNA, 438 bp, Glycine max
  Clone ID: LIB3109-041-Q1-K1-F10
gacgtcgaatcggtgtggtacggtgtgttttattcattagacaagattggaatgcaagtttaattgattaatactaataatcaatcatcgtagcgagatggtgtcgccgagccaggtggtgaaagtaaagagaaatacgctacgaccatgcatgacatgccctctctgccacaagttcttcaaagatgccaccaccatctctctctgccttcacaccttttgcaggaagtgcatatatgagaaactctcggatgaggagatggattgctgtcctgtgtgccatattgacttaggctgccttccggtggagaaactcaggccggaccataatttgcatgatataagggcaaaaatattcccttttaaaagaaaaaagatcaaagcccaagaagtttgtcttcaatatcattgcctgcaaaaaggaaggaaagatcactt

SEQ ID NO: 54132 - DNA, 430 bp, Glycine max
  Clone ID: LIB3109-041-Q1-K1-F11
gggtctttttttattagcgaaaaaaggaataaaagaaaaagatgacggaaatgtcggaggcaaaagacccggcgatcaagctcttcgggaagacgatcccggtgccggagattctgccgggatccaacggagctccggcttcgtcttccggtgatgttgttgttgatgacagtgttgacgcttcttccaccaactcttcaagggagtctcataccaacacagatgcacaagagaaagattttgataaggacacattgggagaaaaaccaactgatgacaagaaggaagatggagcccccgcccaatcatcagaagaggtcgccaatccagatactgcctctggaacctgtgaagaatccatcatccagtccaccgagagggaggctactacattgaaaactacaaagactgaagaagaacagggcgagac

SEQ ID NO: 54133 - DNA, 438 bp, Glycine max
  Clone ID: LIB3109-041-Q1-K1-F12
ggggagagtagagtaccattgctccactgtcgcgggccaccatgtctttctcggagttccgaccactcgacgacacgtccctcatcgaatacataaagtccgtccccgccctctcctccaaactcgccgacaacctcgacgacttatcagtcaaagaagtcggagatggcaatcttaacttcgtcttcattgtttccaaccccgcaggttcttttgtcatcaaacagactctgccgtacgttcgttgcataggggaatcgtggcctatgacgaatgagagagcgtattttgagtcgctggcactgaaagaagagggtcgtttaatccccgaacatgttcctgaagtgtatcactttgaccgtaccatgtctttgatcggtatgcgttacttggagcccccacatataatcctcagaaaagggttgattgctgggattg

SEQ ID NO: 54134 - DNA, 439 bp, Glycine max
  Clone ID: LIB3109-041-Q1-K1-F9
gagaatgagaaggagagaatcccatgaagactcctctgccttacatggtcatatttggtatgtcaactccttttgtaatcttggccattgcttttgcaaatggttggattaaggtgcctgttcgatgagacaacactttacttctcattctcaaacttcaccagagaaattctttactttttcacatatgttatggctcgttttaatgaacaaagttcacttatgaatgtcggattgaggaaagcataaatgaggtttcttgtttcaagaatagcacgttggtgatccgaacaccggacctgcctgctaatatgaaatggttggtaatccgactgttccatggaaaattaacaatggaattttttacaccttaagtttttctttctttctgctccttgcttataaaacaggataaagaaaatgggaagaaggttagatc

SEQ ID NO: 54135 - DNA, 437 bp, Glycine max
  unsure (1)..(437): unsure at all n locations
  Clone ID: LIB3109-041-Q1-K1-G10
ggatgcaatagtagcagcaattcacactggtctgtgcttctcgtgactcatttctcacctaactttctattcttctcagtctcaggtcagaaccttagccatggcagcgttccagaagatcaaggtcgccaaccccatcgtcgagatggacggagatgaaatgactagggttatctggaagtcaatcaaggacaagctcattttgcccttcttggagttggacatcaagtattatgacttangccttccttaccgtgatgagaccgatgataaagttacaattgaaagtgcggaagcaactctcaagtataatgtggcaattaagtgcgcaactattactccagatgaagctcgtgtgaaggagtttggtctgaagtcaatgtggaagagtccaaatgggacaattaggaacattttgaatggaactgtcttcagag

SEQ ID NO: 54136 - DNA, 415 bp, Glycine max
  unsure (1)..(415): unsure at all n locations
  Clone ID: LIB3109-041-Q1-K1-G11
gagcttcagcaacaataaataaggaataatcataacaccgttcatcaatggcggttcggctgcattcctagactactctctttttccgcaatttttcattggctgcgttcgttcgttcgttgcgtgctttagttgttacttttccgttacggcgatggagttggagcacccgaccgcgacgccgctcaactccgccatgacctacgacgaagcctccatggagcgcagcaagagcttcgtcaacgccttgcaggaacttaagaacctaaggcctcaactntattctgctgcagaatactgtgaaaaatcttatctccatagtgaacagaaacaaatggtacttgacaacctgaaagactatgctgtaagagcccttgtgaatgctgntgatcatctaggaacagttgcatacaag

SEQ ID NO: 54137 - DNA, 410 bp, Glycine max
  Clone ID: LIB3109-041-Q1-K1-G12
ggatttgggatgttttatcaagggaagaagtggtggacattgtagcacctgctccacggtctagtgctgctagagcactggttgagtcagctgttcaggcatggaagacaaaatttcctttttgtaaggttgatgattgtgctgccgtatgcctcttctttgattctgattcagatttcaagtcaacagataccaaagacaagttgataccggaggcatctattgaccaatctgagaagtcatctttacttggtgaaaagggagttggaatggaagctgaaaaacagcagcaatagctcaagttttgtaccatgtctctcccaaaccttgctggttttatcgagaaggttgggtaaatggtgctgcaacaacagtcaacagagaaaggatcattattttgatgatttttc

SEQ ID NO: 54138 - DNA, 433 bp, Glycine max
  Clone ID: LIB3109-041-Q1-K1-G9
gatgcgaagcaatgaccatacggtctcagccgggcatggagacatggaccaaaacactcgtgacatcatcatgcgggaatttcgctctggctcttctcgagttctaattaccactgacctcttggctcgtggtatagatgtacagcaggtgtctttggttataaactatgatctgccaacccaacctgaaaattatcttcatcgcataggacgaagtgggcgttttggaagaaaaggtgttgccataaactttgtgactttggatgatgcaagaatgctgtctgatattcaaaagttctacaatgtgactgtataggaattgccatcaaatgttgctgatctgctctgatgggttaattttcattccttggtaaagtcatcagaaggctattacttttttggcaattattaattttgcgcttctttgtttttt

SEQ ID NO: 54139 - DNA, 339 bp, Glycine max
  Clone ID: LIB3109-041-Q1-K1-H10
gaggagctgggagggagtgtgatgaaggtgtgtgctcttgggaactttcaggactcattaagggctttgttgtatttggttaggtttccaattggtgccaagtcacttgtgaatcatgagtggtggattcccaaaggggtttatgtgaatggccgtgctattgagatgaccagcattttgggtcccttttttcatatcagtgctcttcctgatcaagcttttttcaaggggcagcctgatgttgggcagcagtgtttttctgatgcatcaactaggcgaccagctgatttgttatcttcattttccactatcaaaactgtcatgaacaacttatatgat

SEQ ID NO: 54140 - DNA, 419 bp, Glycine max
  Clone ID: LIB3109-041-Q1-K1-H11
gatggaccattgaggagtttggacgatcctcaaaatgcctcatttttagagagcataaaaaaatctgagtgtcccaaagagcttgagcctgaagataggaggtcatctgttaatgttaacctcatacggaggaatgagaactatcgtgaacccgaaaagcagcatgttgcatttcagggagtgggaagaactcttggaagcagctctacatcaatggctcctgactctcctgctgcctcaacacctaccaatgcagcgccaactccttctgctggtctggtagttgatcaatcattgccatcaacctcaatacaactcaggttggctgatggaacccgcttgatatcacattttaattaccaccacacaatcagcgacatccgtgccttcattgatgcatctagacctgggggtcggca

SEQ ID NO: 54141 - DNA, 284 bp, Glycine max
  Clone ID: LIB3109-041-Q1-K1-H12
ggatgtgagcaagagtgaagagcgaagagaatggctcccaagggggtaatctttttggctgtgttatgcttctcagcactgtcactgagtcgttgtcttgcggaggataatggacttgttatgaacttctacaaggaatcatgccctcaggctgaagacatcatcaaagaacaagtcaagcttctctacaagcgccacaagaacactgctttctcctggctcagaaacatcttccatgactgtgctgttcagagttgtgatgcttcactgttgctggactccac

SEQ ID NO: 54142 - DNA, 110 bp, Glycine max
  Clone ID: LIB3109-041-Q1-K1-H9
tttcttttctcattatcccattcataatctccatccacaacctacctacctaccatcacacttaaccctatctcatccatcctaaagccatctcaaaactcaaacttcaa

SEQ ID NO: 54143 - DNA, 264 bp, Glycine max
  Clone ID: LIB3109-042-Q1-K1-A1
ggtgaatttaattgaaattgaaaggttgctccgggggttccctttcgcagttgagatttgagaattgactctgagaatcgagaaaatggccggtttaccagcgaggctccgtcttcaacccaccgacgtcaaagccgccgccttgtggggcgttaccgccgccactggcgctctctacctcattcagccatggggatggttgaagaagacattcttggagaagccagaacctgagcaaaaatgagttggcttctgagaagagtg

SEQ ID NO: 54144 - DNA, 381 bp, Glycine max
  Clone ID: LIB3109-042-Q1-K1-A10
ggatcgcagtgggtatagtagatgaagggaaagggacagcagccagcttcgggactcacggaaccttctaggctatatataaaaaaaaaaaaatattgcacgctcctccgggctcctggcatttcaaattcaaggcctctttccaatcttcaaagcagctactgcggcagctccattttccaattgaagttagcagagcagccatctgtgtgtgaaggggacatgatggatggttcccaaaagcgtagaatcctgatggtctcagattttttctatcccaactttggaggtgtggagaatcacatatattatctctcacagtgtttgctcaagttaggccacaaggtggtggttgcaactcatgcttatggaaatcgatct

SEQ ID NO: 54145 - DNA, 344 bp, Glycine max
  unsure (1)..(344): unsure at all n locations
  Clone ID: LIB3109-042-Q1-K1-A11
ggagctgaagaaagagagaacttctttggagcaggcagtcaaagaagtggctttgcttcaagaggaattggagaagaaaactgccgagtttagagaaacaagtgccgttcttcaggttaaagagtcagagcttgttgatgctaagctagaaatccagcgtttgaaatctgaaaaggcttctcttcagggtatcttggaggagaaagacttggagctttccagtgctaggaaaatgctgggggatgttaaccaggaaatctatgatcttaagatgcttatgcacagtaaagaaacccagctcattgaagcaaacagtatgctaagggacanagatgagcatgtga

SEQ ID NO: 54146 - DNA, 369 bp, Glycine max
  Clone ID: LIB3109-042-Q1-K1-A12
ggaaacgaacgggacgtgtctgtctccgatggcgtcctcataccgtgaccgcacgtcggagttccggttattattggagactctgaagaagatcggaagtccggtgcaacccgagaatgctccttcgacctctcatggcgagtcgtattcgagatccgaattcaaccgaaaggcctcgcgtatcgggttggggatccacgagacctcgcagaagatcgcgaggctcacgcagctggcgaggaaatcgtccatgttcaacgatcccgcagtggagattcaggagctgactgttctgatcaagaacgagatcacggcgctcaactcggctctcttcgattttgcaaccgtcagaacacggatatggctgac

SEQ ID NO: 54147 - DNA, 371 bp, Glycine max
  Clone ID: LIB3109-042-Q1-K1-A2
ggaagaaggaagcatcataaccggccaaagcttgggtctcttccatttatcccccataaataaaactaggtgaaaaaaatataccctgtgcttctcatgatgatagtgtagctgaagctgcttctgctgcagcattggtgatttggacacaaaaaaagtttcaaacttttcagttctctgagcttctggtttatcaattttgaaggagttcaatactttaccctattagttggttccctgaaatttgtattggtattgctgtatcagaaattcttctgaacaatctctttaatcaaccatgtcattattggctaaactacgctgtgtcaccatagatgttactggtaccctaatggcttacaaaggggagc

SEQ ID NO: 54148 - DNA, 381 bp, Glycine max
  Clone ID: LIB3109-042-Q1-K1-A3
ggcgttcattttgtaatatagaagcaagaaagatagagagactgacaacacctctctctctctcccctcgttgatcccaaatctattaggggtttttattcgatgctattcggcctgaagctttcgtttcgcggatttttttaattattttttttcctgcctatcaggttagattgtgtcttgtaatgttcgcagattttattttcgtttctgttgttgcgttcaaaatcatttgttcaggtttgaatttttttccaatgttttttaaggaatatgaattttggttgggtggaaaaatggatattatcagttatgcatgcagatatgagatatgtactaagggtagacaagtaggattgccatattcaatttttaatatgt

SEQ ID NO: 54149 - DNA, 304 bp, Glycine max
  Clone ID: LIB3109-042-Q1-K1-A4
gacattgagagttgagaaggagggatacttgagacgttaaaaattgctaaagacaagccatcaaaatccttgacagaaataaaggtggaggttgataaacttgccaagaaggttgcactttggatgctgctgcttccacaggtggggttatagcagagttagatatagagactttgaccgagaatctgatgagaacattgattgcattggatgaaattaatgctgagggtgaactgaaattgcagagaagatagcaggttaggagagatcaaaaacacattgagactctagatatggtgaggat

SEQ ID NO: 54150 - DNA, 211 bp, Glycine max
  unsure (1)..(211): unsure at all n locations
  Clone ID: LIB3109-042-Q1-K1-A5
gatggngaaagggaatatcatctataggaagctgagatggcatccaagacataaaagtcatcacaccacaacccacagattcatcatggaatagccacatagatcgactaataaacactctgtctttgacttttcataaggtcgctgacgtatcgcattcaaaaaaagttcatacattctcgattattccagaaagcacagacaggaaaac

SEQ ID NO: 54151 - DNA, 355 bp, Glycine max
  Clone ID: LIB3109-042-Q1-K1-A6
ggcagaaatggggaataacagacaaaggagattgagaactcatcgcgcacaatcaagtcgacaccaccaccaacaactcttactagaggacgattctcaaagctctcttccagcacaaaatggtgagggcgaggaagaggaggaggaactcacggaacctaaaataaagcttgctatgtgggattttgggcaatgcgatgccaaaaagtgcactggacgcaagctttcaagattgggcatgctaaaatccggctggaaatcaatgtgtctcaagagaagattactctttaatccataagaaaggattggctggtgtggattgatcatgggcacgcttagatgacgtgcctttcgt

SEQ ID NO: 54152 - DNA, 397 bp, Glycine max
  Clone ID: LIB3109-042-Q1-K1-A7
ggagcagagccgatgtggtagagcagttcctcccagaccacaatgaatccatttctgcagttcttgacaagtttggtgccatgggaattgacacccccggcgtagttgcattgcttggagcacacagtgttggtcgaacccattgtgtgaagttggtgcaccgtttgtacccagagattgatccagctctgaaccctgaccacgtccctcacattctgaagaagtgccctgatgccattccagaccctaaggccgtgcagtacgtgagaaacgaccgtggcacccccatgattctagacaacaattactacagaaatatattggacaacaagggcttgttgatagtggatcaccaactagccaatgacaagaagaccaaaccttatgtgaagaaaat

SEQ ID NO: 54153 - DNA, 349 bp, Glycine max
  Clone ID: LIB3109-042-Q1-K1-A8
ggtgtgagagagcgagcgagcgagcagtttcaaagagaggatttgggattgggaaggcgagggattgcgctgcgtctcttcctcttctctttcgattcatccctcattcataatcttccaatccaacaacctcagcctcacactcacacatacacacatctgaacgcgtatcgtccctcccatggcttcaaagcgcatcctcaaggagctcaaggacttgcagaaagacccaccaacttcttgcagcgctggtccagtagctgaggacatgttccattggcaagcaacgattatgggtcctgctgatagtccttatgcttgaggtgtattcctagtcactattcacttt

SEQ ID NO: 54154 - DNA, 427 bp, Glycine max
  unsure (1)..(427): unsure at all n locations
  Clone ID: LIB3109-042-Q1-K1-A9
gacgatggtggtggtaggcatgctgcgaatgggagagcacagcctgactctttctcttctcagcaatggcctcagagttacaaagagactacagattcttacacaatagctgctgctccaaattttgagtcagttctgcgggggccgagttttatatattctagttttgacaatcgttcaaagagtaacttagacatcgatggaaagacaccttttctgtctgctccagaaggcattagacaatcaacttggtgggagaaagcctcagtagaacggcttgtttccggagaattgcctattggatatggatgcagcttcactcaaacaattntcaatggcattaatgtgatagctggagttggcctctatctacaccatttacagtaaatcaagctgngtggatgagcttggcagtgatgcttctttt

SEQ ID NO: 54155 - DNA, 382 bp, Glycine max
  Clone ID: LIB3109-042-Q1-K1-B10
gtgcgagttgtttatttcaaagaatagattggaggcaaccaaactgcactttttagttataactaagaaaatgtgcataatcccgcgaattacttctgaaaattacttctgaattaatgaaattttttcaataatttaagaaaaaatatttaagaactatagcatttcgcgatttattggtaatccactttgattctctattaaccaataattttggactattaccatggttaaagtgaatagtttgaagtctagacgcagtgtagtactctttctaccactatgttaatacagaaatgaaatggtttcgataaaattattagatttttttttcgatatagaacactcatgtcgaataaatggcttgaatcctatttactta

SEQ ID NO: 54156 - DNA, 406 bp, Glycine max
  Clone ID: LIB3109-042-Q1-K1-B11
gggtcgcgagttcaagtcaagaagcctcacaagtcccgcttctcttccaaatcttctcgcaatcttcataaaacctctgtcaaggacagactcgcaatcgcaaaatcagagcgcaatgtcggcaaaggagctcgtgcagctcgaattcagagaaataaaatgatacgagatcaaaaaagagctgctgttttgaaagaaaaacgagaactcagtgggtcgagaagtcctcctcgagtgatagttctcttcgccctctgtgcgtctgtggatttagaatcacttgctgatgatctcttgtcattattatctaaagatacgtgtgtggtgctgtcaagaaccgttgcttcttcttgatataggacaagaataaccgtactaaaagcaccccatggtgatctactatcat

SEQ ID NO: 54157 - DNA, 316 bp, Glycine max
  unsure (1)..(316): unsure at all n locations
  Clone ID: LIB3109-042-Q1-K1-B12
gggtcgcgagttcaagtcgagacgccttacaagggcggcttggcttccaaatcttctcgcaatcttcataaaacctctgtcaaggacagactcgcaatcgcaaaatcagagcgcaatgtcagcaaaggagctcgtgcanctcgaattcagagaaataaaatgatacgagatcaaaaaagagctgctgttttgaaagaaaaacgagaactcagtgggtcgagaagtcctcctcgagtgatacttctctttcccctctgtgcgtctgccgatttagaatcacttgctgatgatctctttgcattattatctaaagata

SEQ ID NO: 54158 - DNA, 293 bp, Glycine max
  Clone ID: LIB3109-042-Q1-K1-B2
tggcaggggcacaaagaaagaacagggtcaacaaatcatcatagacattaaggtgttcaaagaaagcactaatgttgacaaggtggttgtcctgtggacagccacacacagagaggtacaagcacctaattgtgggactaaacgacaccatgtaaaacctatttgcttccttggacaggaatggggatgagatttccccttccaccttgtatgccattgcttgtgctatggaaaatgttcctttcatgaatggaagcccgtcgaacacctttgtcccaggactcattgatctg

SEQ ID NO: 54159 - DNA, 405 bp, Glycine max
  Clone ID: LIB3109-042-Q1-K1-B3
ggaagtcatcagaagtcaaaatagacaaaggtgggctccccctcaataatatcccttcggctgtggcgactaatggagctgaaattcatatggcatttcagttgcagatgacaaccccatttcagaaacaaccaattttgttggcttttggtagcaaatatccacagaaccaccacctctccaagcatgaagacaaaacagctattgtgtttgacttctctgcaggttctacgggtcctgtatcccgtgaattgattcagatgaggacgaaccatggaattttggctataatagggtggggtctaatcctgcctgtaggggctattattgctagatatttcaggcacaaggatcccttatggttctatctccatgcgatcattcagtttggaggattcacatttg

SEQ ID NO: 54160 - DNA, 381 bp, Glycine max
  Clone ID: LIB3109-042-Q1-K1-B4
gggacgaacgaagggcaatcagttgctcgctcggtcgatccattcttgaaattctcgttatcgctcttcgaactcaagctctctcgctcgcgatttctgcttctgcaccaatttctgcggtttctcaagatttagaggttcaaagtggttcattcctttgaagcatgccggggttaacgtgcaacgcttgcaacaccaaattcaaagatgacacagagcaaaagctccattacaaatccgagtggcatcgatacaatctcaagcgcaaggtggctggggttcctggggtgaccgaggcgctatttctggctagacaatctgagcttgctcaagagaaaaataaactgggtgaaacccccatgctctacacctgtggtcttt

SEQ ID NO: 54161 - DNA, 179 bp, Glycine max
  Clone ID: LIB3109-042-Q1-K1-B5
gcttctcatgagtgatgaacattatagaaggcggagcttgcattcaagacataaagactatcacaccacataccacagctccaccatcatatggcctcatatatacccataacaacactcgttctctgacacctaatagggccactgacagatcgcatataaaaaaagtctatacataa

SEQ ID NO: 54162 - DNA, 365 bp, Glycine max
  Clone ID: LIB3109-042-Q1-K1-B7
gatagaaatataattgaaaggaatattcgccttaaaattcagcaaagtcctgattatgcagaagagccagattttgagactggattgcaagacttcaaaaatcgtctagaaaattatgagaaggtttatgagacagttaatgaaggatcttacataaaaatgattgatatggtcagtgggcatggtggacaaatacaagtgaacaatatcagtggttaccttcctggacgaattgtctttttcttggtaaatacacatcttacaccacgcccaattttacttacccgacatggggaaagtcaggataatgtgagaggcagaattggaggggatacctgcaatagtgaggcctgagaactttattc

SEQ ID NO: 54163 - DNA, 412 bp, Glycine max
  Clone ID: LIB3109-042-Q1-K1-B8
ggttaagaaaaagagcgtgaaggtcgggggagggatagggtttgcctttaccctgctttgctctcggtggtgtcactgattggcgttgccaaatttcctttggcttcttcttctccgaatctttcagaatctctctctcatttatttttgaattgaagtttctttctcattatctaaaatatcctcgcgcgtgttattagcgatgccggaggaagaagtagtggagctcaagttccgtctctacgatggatccgacatcggtcccttccgttactcccctgcctccaccatcgccatgctcaaggaccgcatttttgcagactggcccaaagacaagaagattataccaaaagcagcaaatgatataaaactgataagtgcttggcaaatttttggagaaccacaagacagt

SEQ ID NO: 54164 - DNA, 435 bp, Glycine max
  unsure (1)..(435): unsure at all n locations
  Clone ID: LIB3109-042-Q1-K1-B9
gggttttatgatgaatgtaagcgaaggtttaacgtgaggctttggaaagcctttaccgactgttttaacttccttcctgtggcagcccttatagatgataaaatattgtgcatgcatggtggtctttcccctgaactcacaaacttggatgaaatcaggaatctacctcgtcctactgcgattcccgacaccggcttgctttgtgatttgctttggtctgatcctggtagggatgtgaagggttggggtatgaatgacagaggagtgtcctacacctttggccctgataaggtcgctgagttcttgacaaagcatgacttggacctcatttgtcgtgctcatcangttgtagaggatgggtatgaattctttgctgataggcaacttgttacgatattttcagcttcaaactattgtggtgaatttgacaatgct

SEQ ID NO: 54165 - DNA, 380 bp, Glycine max
  Clone ID: LIB3109-042-Q1-K1-C1
gacgacagaaggggatagcaaataaacataacaatttatatatataaataggggattttgctttagatattttgagtaacatggcatccctcaaggctgacaaacccgttggcactcaactttttgggcagggtaaaaaggaagctgctcccaaagctagtgatggtgcatcatccaaatccaagggttcagcttccaaatctgctaccaagaaagttccagtacagaagccccaagaatccaagaaaaagggaaaaggaggcaaatcatctacaaagcactagccagaaagccttattaatttactgaaggaaagtgtggtttaattgtaagaataaaaagccacacaaatattggatacaataaaaattgtaccttgt

SEQ ID NO: 54166 - DNA, 393 bp, Glycine max
  Clone ID: LIB3109-042-Q1-K1-C10
ggtgagaaaagaaaagaagaaggaagccccagggcgataatcatactcgtacttgagatgatattggataatctcaacctcaattttcctcaataaacaatcaccttcactttttttctctcctcttcatttctgaactcatccccatggatccctttgatttgatacgcgaagggtttggttgaggctgactggacatgtgctgttactacttataaagtctgtttatgctgtagtagttattttgtctatattttagttaataatgaacttaaccaagaaaggacccctaacggatgcaaagctattaagcccaaacaaggcaactactctgaatccaaatgcagcagaagttgttccttttgccctcagatcatcattattatcttgaac

SEQ ID NO: 54167 - DNA, 409 bp, Glycine max
  Clone ID: LIB3109-042-Q1-K1-C11
ctatgaacatgatgatggaaagggtgccttaatctgtgtcacttgtggagtttcctactttggtcttgccttggtcaaccatctcttgctcttaggttactctcttcgagtcaccgttgacaacccagaggacatagagaagctgagggaaatggagaggcgtggtgaagtgagggctacagaaggaaatttggaagtaataatggcaaagctaactgatgttgatgggttggagaaagcatttcagggctgtcgtggcgtctttcacacttctgcatttacagaccccgctggtttatctggctacacaaaatccatggccgagattgaagtaagggctgctgagaatgtgatggaagcatgtgcaagaacaccttccataacaagatgtgtgttcacattatcacta

SEQ ID NO: 54168 - DNA, 377 bp, Glycine max
  unsure (1)..(377): unsure at all n locations
  Clone ID: LIB3109-042-Q1-K1-C12
gagagaggaagagtgaaaatgaaaatgagaagggggtcggggggaatattgaacacaacacccactgcacagcttcataactaaaccgccatcgcctccaagactttccgtgcccaaaagatgagaaaacgcagcatttacgcatggctagtagcacttgtttgcttcctcctactcatgatcgtcaccccagccattccccagtcacaagaataccatgatttcgccgaccaccgcaccttcctcggtattcccaatgcacttaacgtgatatccaatttcccttttctggttattggcctcgttggacttgtactctgtcatcatgggaaatactttaggctcagctttgcaggtgaactnatgggctggacatg

SEQ ID NO: 54169 - DNA, 320 bp, Glycine max
  unsure (1)..(320): unsure at all n locations
  Clone ID: LIB3109-042-Q1-K1-C2
aacatgaacgagatccttaatataagtacctgaactgggtgaaggtgcatctcgggggagactatccaacatcattccaggaggatcattgtgttcaatcttaaatgatgatgacagggatgcctgaggtgatccactgtcttgataacaagacgtggaggatcctttaccactgacttgaagcagatcatgatcttttggattgtctgggtcctcaaaagcagaaggttgtgtgtcaaaatgtggtgaatccaaaattatctccggctgttggcttaagaaattaagacgcatgtcacactggataagctnttcaaaat

SEQ ID NO: 54170 - DNA, 395 bp, Glycine max
  Clone ID: LIB3109-042-Q1-K1-C3
gaatggaaagatgctaatgacaaagtgatgcctgtgaaacaatggcttgaagaacgacgattcttgcagggagagatgcagcaacttcgggacaagcttgctataactgagcgaactgcaaagtctgaagcacagttaaaagaaaaatatcaattaaggcttaaagtgctacaggagagtttgagagaaacttctaacagtattaatcgcggcacctcagagggaagatgtgttagcaatgggccttctcgacgtcaatccctaggtggagctgataacatctcaaaactaacatctaatgggtttttgaagagatcaccgtccactcaaattaggtcttctgtgtcttcaagcacagttttgaagcatgctaaaggcacatctaaatcatttga

SEQ ID NO: 54171 - DNA, 314 bp, Glycine max
  unsure (1)..(314): unsure at all n locations
  Clone ID: LIB3109-042-Q1-K1-C5
gaagaacgactattcttgcangtacagatgcatcaacttccttacaaacttgctataactcagccaactacacactctgaagcacagttaaaagaaaaatatcaattaaggcttaaagtgctacaagagaatttgagagaaacttctaacagtattaatctctgcaccttaaacttacaatattttaacaattggccatatcaacttcaatccctatgttgagcttaatacatcttaaaacttacatctaatgtttttttaagagatcaccgtccaatcaaattaatttttttttttcttcaaacacaattttt

SEQ ID NO: 54172 - DNA, 415 bp, Glycine max
  Clone ID: LIB3109-042-Q1-K1-C6
cggtacagaactgagtacttcaaattaggcctcgttgcagcgtcgacgaaatgaatcgccttcttcttgttcgtcatcctctgctagctctatccaagccaccattatcacccttttcccaaacctattattattcatacacgccggcacgaataaattctgaattatataagattaaggacccacctggagtctcttctgttcacacaagctctacattttgcactaccaacaaagacttatcaactgagaactgtgtaccgtgcaatacaaaggacttgcagcccatgaccgaggatgcagcacgcacaatgcttcaacaggtttatgttatccttaaaacattcaactcaaattgtttaaatccttgatagcagccagatagcagaacaacagctatttttaaattttttat

SEQ ID NO: 54173 - DNA, 372 bp, Glycine max
  Clone ID: LIB3109-042-Q1-K1-C7
gtacgatccagagggatattctctggggttctgtgattacaaatacaatgatgagaacacagtttcctttgttacgttaaacaaggttggtggatttcttcagaggatggatctggctcgcaagtatgcatttggaaagatgctggtgattggatcacaggcaccatttaaggtgaaggggttgtggcttttccgtggacaagagattccaaaatttgtgattgatgaatgctatgatatggagctctacgactggaccaaggttgacatctctgatgaaactcagaaagagcgcgtcaatcagatgatcgaggattttgaaccatttgagggagagtctctttttgatgccaagtgctttaagtgagaaac

SEQ ID NO: 54174 - DNA, 352 bp, Glycine max
  Clone ID: LIB3109-042-Q1-K1-C8
gatgtaaagatcattaagaaacttcccaaagaattggttaatgcaaccagagtcgtcaagcaattcataagctggtctggcatggattactatgagaatgagattgctggcttgtgggaagattaccaagttattcgagcttccaaatctgattcacgattagcaaacaacaatctgcctccagacattcagaagctccgctgccgggcttgttatgaagcacttcgcttctctcctcgcattgaacaaatgggaaaattattggtggagaggatgaggtcatttggtccttatattgcattgcatttgcgttacgagaaggatatgctcgcatttagtgggtgcactcatg

SEQ ID NO: 54175 - DNA, 380 bp, Glycine max
  Clone ID: LIB3109-042-Q1-K1-D1
gaaggcaggtaggtggaagcagtctattgctttggcaaagaaggataacctttacaaagatgccatggagacagcctcccaatccggggagcgtgaacttgctgaggagttgcttgtttatttcattgatcagggaaagaaggaatgctttgcctcatgtctatttgtttgctatgatctcatacgggcagacattgttcttgaactagcttggatgcacaatatgattgactttgccttcccatatctattgcagtttattcgtgagtacactggcaaagtcgatgaactagtgaaggacaaaattgaagcacaaaatgaagtgaaggctaaagagcaagaagaaaaggatgtagttgcacaacagaacatgtatgctc

SEQ ID NO: 54176 - DNA, 301 bp, Glycine max
  Clone ID: LIB3109-042-Q1-K1-D11
ggatgaagatgatcctgaagttgtgtttgctgggaagaagaaggggaagaataagaaaggtggtgggagcagtgcgttcactgcttctggctttgatttgctcggtgatgagagggatgatgatgaagagaaatccgggttaaccggtgaggttgatggtgaggaagaggatgaacctgtggttagttttacggggaagaagaaggcatcgaagaaagaaggtggtagtttgttcagtgcatctgcttttgatgctattgatgatggtgaggaagaggatgggccaatgattagttttaaa

SEQ ID NO: 54177 - DNA, 276 bp, Glycine max
  Clone ID: LIB3109-042-Q1-K1-D12
gagatgaaggaggattccagtgtgaggaagtcgtttagttatgggaaactggcatatgccaatgctggaggggcgtcttactctagcgtgacggtgaatgatgagggtgaggactgggtttactacagcaatcatagatcagatgttgggattttgcataaagagaattcaaccgtgtcaacaaccgagccttctgtgttgcaaagctcaaggcgtagtatactgccttggaagaagaagaaagtgagtttcagatctcctaaatctaaaggggag

SEQ ID NO: 54178 - DNA, 380 bp, Glycine max
  Clone ID: LIB3109-042-Q1-K1-D2
gacaccaaattttgcaacttggtttccaattgcgtgcacccatgtcctcttttctgtccttatcactctctgcgccctccctccacgattcttccttcctccatggaacaaagctctttcccttttctcgaagagtggcaccacgccgcttcaactcttcctctgccaagtgctccctcgaccacatccccaaacagttcagaaaggaaaatctcaaagatggattgatggaaaactacaagaatgcacctcaatctctatatggcctttctccttcacaaatggacatgttcatgacagaagataatcctatccgtcagcaatctgaaagagttacagaggaaagcatctcgtctgccaagaattatattgataatggt

SEQ ID NO: 54179 - DNA, 233 bp, Glycine max
  Clone ID: LIB3109-042-Q1-K1-D3
tagatcgattgcgatgaggcatgctctttcaaggggtaatagtaaattagttgatggcgctttctttagaaccagaaccaactcgcctagttatcaatattgctgcgtggaatatacactaccaaacatcctacacacgatgcctatgaaccacacctggctcttcgtgggatcactacatgaaccacactagagcatattagatgcgtgatgagttgctgaactacatgata

SEQ ID NO: 54180 - DNA, 325 bp, Glycine max
  Clone ID: LIB3109-042-Q1-K1-D4
gagtacaaatccatggtggcatgctctctcaatgctcaattgaaattccgtcaaagccaccttcttttgattcaataaatcaacacccaattgtcaaaattccaacttgtaatcaattgttctttccatctgacacaccataccaatcaaccaaccttgttgcttcttgtgatcactcctgaaccacactaatggatattgatgagtgggagtttctctctgatgatggctaccttgatttcaatgaagagggtgggaagcaaaagcaaaagcatgattcctttggaaaattggactccgagggcaattttgacatggactactt

SEQ ID NO: 54181 - DNA, 334 bp, Glycine max
  Clone ID: LIB3109-042-Q1-K1-D5
gaacaaacaggcaaacaatgctctcttcttccattttccttctcaatccaccactctaaccctcgcacgcttcgttcaattacaaaaatggacagatcaactggccgtggtggtggtggaagtgtggacatgtttctccgaaattataagttgggaaaaacactcggcattgggtcctttggcaaggtgaaaattgctgagcatgtacggactggtcataaagttgctataaagatccttaaccgccacaagattaaaaacatggaaatgggagaaaaagttagaagagaaatccaaattttaagattgtttatgcatcatcacattataagac

SEQ ID NO: 54182 - DNA, 354 bp, Glycine max
  Clone ID: LIB3109-042-Q1-K1-D6
gacagacaagggtttcttccgggttcacgtttcgcaatcactttttgcgcttctctcactcactcactcttcttcctcttcgtgtggttttctttctcgaactcgaacgaagatgcgtgagattcttcacatccagggagggcaatgcgggaaccagatcggagccaagttctgggaggtggtgtgcgcggagcacgggatcgattcaacggggaggtaccaaggggacaacgagttgcaactcgagcgagtcaacgtctactacaatgaagcgagttgcggaaggttcgtgcctaaggcggtgctcatggatctggagccagggaccatggacagcgtcagatctggtcccta

SEQ ID NO: 54183 - DNA, 395 bp, Glycine max
  unsure (1)..(395): unsure at all n locations
  Clone ID: LIB3109-042-Q1-K1-D7
gtgagaagtgttaatgccaaggagcggacagcttgtgtgaggtggttaaaaaaagttgccagagcagaagatccacgagagtttgacaaggaggaagttgtaagtgtgtatgagctagagggccatccagattatgattactgctatggggatgtggttgttcgcctgtcacctgtgtctgtctgtttagaaacagcttctgttggagagtccactgagaaatcaacacagaaaattgaagagagtgggattaaaatcaatgtaaacgtccaaactggtgaaacttgtgtgcaattttctgacctgtcttgngttggaaatataactggccttaagaatggtgatattgaagttacttgngctgatgggatggtatcaatggttggaccccaagc

SEQ ID NO: 54184 - DNA, 193 bp, Glycine max
  unsure (1)..(193): unsure at all n locations
  Clone ID: LIB3109-042-Q1-K1-D8
gttgcttacccaatttnntggtagcnnatggcannattgccattgcgtnnacgatatngnnttccctcnnntccgaattgaacannctggctatngnngtgcccgtaccttccnnngaggtgannaatgcgcaangnnttggaggcttttgctgnntggaagcacaaaacaacatnnctttggcttttttgag

SEQ ID NO: 54185 - DNA, 397 bp, Glycine max
  Clone ID: LIB3109-042-Q1-K1-D9
gaaatagaagaggagataaataatgttactggagatgatgttttactacacctcaagaatggtgatgctgaagaatttgcagttgcactcttaaggctaaaaaagttcatcaggggtggaaaactggatagcggtttaattaacgtggaagctgctgtttccattctttttaaccgtctattttcatgtaagacaggcaatagattgacaatcattcaattgctaagaagtgttgctttgcaaaatgatgagatgaaggagaagatgacaaagaatgagttattatcagcagtggtgaaatctctaacaagagacactgaagagaggaaggaatcagtgggactgttgctagaactctctgaccttccttgcagtagacggaagattggaaagaatc

SEQ ID NO: 54186 - DNA, 421 bp, Glycine max
  Clone ID: LIB3109-042-Q1-K1-E1
ggaggcagaagagattagagaagacaactatggaaggagaaaatggaaagaagctgaaaatattgtgcctccatggattcagaacaagtgggagttttcttaaaaagcaaatcagcaaatgggatccttctatattcactcaatttgatatggttttcccagatggtaaataccctgcaggagggaagtctgacatagaaggcatcttccctccaccttactttgagtggtttcaattcgaaaaggacttcacagtgtactttaacttggaagaatgcatctcatacttatgcgaatatattacagccaatggtccctttgatggcttccttggcttctcacagggtgcaactctttcagcacttttgataggttaccaggcacagggaaggttactaaaggagcattcaccaataaaatt

SEQ ID NO: 54187 - DNA, 375 bp, Glycine max
  Clone ID: LIB3109-042-Q1-K1-E11
ggtgagttgagaggatcgtgagaggggcagtggccgagattccgtgagttgcaaaaatgaagacgattctttccaccgagaccatgaacatcccggacggcgtgagcatcaaagttcatgccaaggtcatcgaagttgagggcccccgcggaaaattggtgcgagacttcaagcatttgaatctcgattttcagctcattactgacgaaaacggtaaaagaaagctgaaaatcgacgcgtggtttggttctcggaaaacatccgccgccattcgcaccgccttgagccacgtggagaatcttatcaccggcgtcaccaagggctaccgctacaaaatgaggttcgtttatgcccattttcccatcaacgcaagca

SEQ ID NO: 54188 - DNA, 422 bp, Glycine max
  Clone ID: LIB3109-042-Q1-K1-E12
ggtcttcaaaagaaggaaaaccaccgattatggcaacaatcgcagggtcccgttttcacattttcatcaatgctgaaagtaccagaacaagaccacatttaatcatcatcaggtccatccccgagcgattaattaatattacattttcgtggtttaacaacaaaaataatgtggaaagcaaatgagaacacaataataggaagagggatagtgatggactcagaatgagaagagaagagaattcgatcaatagttagtggacaaaatcactgtaacgtgatccttgtacgaccttcattaaatctgttagttgtgtcaaggagcatggaagataagatggattttttttttttttgggtttcctaggagagcaaacaaaaagacaaagcgtgactttgaattgtagggttgagtgttttttt

SEQ ID NO: 54189 - DNA, 58 bp, Glycine max
  Clone ID: LIB3109-042-Q1-K1-E2
gggggagggcggcgcccttaaaacagcgggatggaaaaaaaaaaaaaatattaggaaa

SEQ ID NO: 54190 - DNA, 405 bp, Glycine max
  Clone ID: LIB3109-042-Q1-K1-E3
ggaggtagccattgatattctgctaatgactatggtgatcaaaaacacaaaccagttagaggaaagtatggattccacttatgacaggaaggctgaagtgaaagcctttgatgattcaaaagctggtgttaaaggtcttgtagagtctggattgacaaagatccctcgcatgttccattctggcaggttggatatcattgaaacctcagtcagtgactctaagttcggtatccccatcatagacctccaaaatatccactcctatcctgctctgcattcagaagtaattggcaaggttcgaagtgcatgccatgactggcgatttttccaggtgattaatcatggaattcctatcagcgtgtttgatgagatgattgatggaattcgtagatttcatgaacaaga

SEQ ID NO: 54191 - DNA, 290 bp, Glycine max
  Clone ID: LIB3109-042-Q1-K1-E4
ggaagagtgaagagaatggcgtgccaaggtttaacctttctggctgtgttaatatgcgtttcagcactgtcactgagtccttctgttgcgggggaagggcaaaataatggccttgttatgaacttctacaaggaatcatgccctcaggctgaagacatcatcacagaacaagtcaagcttctctacaagcgccacaagaacactgctttctcctggctcaggaacatcttccatgactgtgctgttcagagttgtgatgcttcacttgtgctggactccacaagaaggag

SEQ ID NO: 54192 - DNA, 348 bp, Glycine max
  unsure (1)..(348): unsure at all n locations
  Clone ID: LIB3109-042-Q1-K1-E5
atctgaagaaagaggcatggccgaacaaaccttgatcatgatcaagccagatggcgttcaaagaggccttattggcgagattattagcagattgagaggaagggtttttacttgaaagggttgaaactcgttactgtggaccgtccttttgctgagaagcactatgctgatttgtctgcaaagcctttctttagtggtttggtggattacattgtctctggccctggtgttgccatgatctgggagggtaagaatgntgttacaactggccgaaagattatcggagccacaaacccagctcaatcttagccttggactattcgtggtgactttgctattgacattgga

SEQ ID NO: 54193 - DNA, 324 bp, Glycine max
  Clone ID: LIB3109-042-Q1-K1-E6
gttggagaagagagcgagaagaacagcagccctaatgcaagctttgtcaaagttagcatggatggagcaccttaccttcgcaaagtggacttgaagatgtacaagagttaccgagagctctctgattctttaggcaaaatgttcagctccttcacctttggcaattgtgaatcccaaggaatgaaggatttcatgaatgagagcaagctgaatgatctcttgaacagctctgattatgtcccaacctatgaggacaaggatggtgactggatgcttgtcggtgatgtcccatgggagatgtttgttgaatcatgcaagcgttta

SEQ ID NO: 54194 - DNA, 440 bp, Glycine max
  Clone ID: LIB3109-042-Q1-K1-E7
acctaggatggcatcaaatcaattctattggaggtgtttgtagcaggaagtgaaacaaccgcatcagcactagaatgggctatggcagagctcatgaaaaatccaatgaaattgaagaaagcccaggatgaggtgagaaaatttgtagggaataaatcaaaagtagaggaaaatgacatcaatcaaatggactacatgaaatgtgtaatcaaagaaactctaaggttacatccacctgctcctctcttggctcctagagagacagcatctagtgtgaaactgggagggtatgatattccagcaaaaacactggtatatgtcaatgcatgggcaattcaaagggaccctgagttttgggaaagacctgaaaagttcattccaaagagacatgataacagccgggttcattttaatggccaagacttgccatttattacatt

SEQ ID NO: 54195 - DNA, 273 bp, Glycine max
  Clone ID: LIB3109-042-Q1-K1-E8
gggtggaggggacattgacaatgtagggctgtcacaataagctgacacttcaaagtgctatatcaagaccacatcttaagattatgagacccaaacacctgccatgcattaatgttatatattgatggagaaacaactatattgcatgtgatcagccaatgtgatcacaatattgatgctgagggaaggtgactgacatcagaatgctaagagaatagattttgtccatatgtagtgcacgaaaatagatctacatactggccagtataccta

SEQ ID NO: 54196 - DNA, 364 bp, Glycine max
  Clone ID: LIB3109-042-Q1-K1-E9
ggttggaagaagagaaggagaatgacggaaaggtgcatccgatccgtcggggaagccattcactcctctcctttccaagccgttctccatctcgccggtggagcttctcaggtggtgggttcgttgctatcagttcccggtgcttcgaatactgtgctcgaagttgtggttccttactctaagatgtctctcattcagttactcggaaagattccatcccaattttgtggccaacagactgctgaagatatggctatattggcgtataatcgcgctcttaagctgtccaagccaggatccccggctgttggagtgggtttcactggttctttggccagcagtcggtcaaaacttcgggaacaca

SEQ ID NO: 54197 - DNA, 363 bp, Glycine max
  Clone ID: LIB3109-042-Q1-K1-F1
ggatgaagaactatactatctatgctgtgtcaggcgaccattcgtattgtgtttggtttcttgtttattgcgttgatctggaagtttgattttgcacccttcatggttttgattattgccatactcaatgatggtaccattatgactatatccaaggatagagtgaaaccatcaccacttcctgatagctggaaactgagggagatatttgctactggcgttgtgctaggaagttacatggcactaatgacagtagtatttttctgggcaatgaaagataccaacttcttctcgaacaagtttggtgtgaggccattgagagatagccccgatgaaatgatggcagccttataccttcaagtc

SEQ ID NO: 54198 - DNA, 247 bp, Glycine max
  unsure (1)..(247): unsure at all n locations
  Clone ID: LIB3109-042-Q1-K1-F10
ggggagcggagtatttacagaactgggggggtancaaaaaaggtctgggcagaggttttcttctaccttgctgagaacaatgtcctttttgagggtattcttcttaagcctagcatggttacacctggagctgagtccaaggacaaggccagtcctcagacagttgctgattacaccctcaagctccttcacaggagaattccccctgctgtccctggaattatgtttttgtctggtggacagtctg

SEQ ID NO: 54199 - DNA, 382 bp, Glycine max
  Clone ID: LIB3109-042-Q1-K1-F11
ggtctcactgacagttgaagtgttaaagaatgagattgctctggagcaggaatcagtggttttagctgaagatgctgtaaatggtctcgttcttgtggacatcataaatggcttttgcacagttggtgctggaaatctggctccaagagaatccaatacgcagatttcgggaatgatcagtgaatcagcagggctggctagagtgttctgtgagaagaatttgccggttatggctttcctggattctcaccatcctaacaagccagaggacccttatccccctcactgtattgttggctctgatgaatcaaaatctgtttcagcattaaaatggctagagaatgaacctaatgtaacaatcaggcgaaaggattgttttgat

SEQ ID NO: 54200 - DNA, 338 bp, Glycine max
  Clone ID: LIB3109-042-Q1-K1-F12
ggaaaccgagaagaagaagatggagatgtatgagatctggagcaggagaatagcgttgggagcgttcgcgtttgttctgcttttcctatcggcctcggcagacgacgtcgttgtgctctctgaagataacttcgagaaggaagttggtcaggacagaggagctctcgttgagttctatgctccttggtgtggacactgcaaaaagcttgctccagaatatgaaaagcttggtagcagcttcaagaaagccaaatcttgtttaatcggcaaggttgactgtgatgagcacaagagtttgtgcagcaaatatggagtctctgggtacccaacaattcagt

SEQ ID NO: 54201 - DNA, 333 bp, Glycine max
  Clone ID: LIB3109-042-Q1-K1-F2
gatccccaatcagagagaaaagggagggttcacaacttttccttttccttttgcttgcgaatctgaatcaaataatcaatcatccattcattattcatcatgtcgtcggcgaagaaaatcacgctgaagagttcggacggcgaggctttcgaggtggaggaggcggtggcgctggagtcgcagacgataaagcacatgatcgaggacgactgcgccgacagcggcatccctctgccgaacgtgacgagcaagatcctggcgaaggttatcgagtactgcaagaagcacgtcgaggccgcgaatcccgaagacaaaccctccgaggacgatctc

SEQ ID NO: 54202 - DNA, 352 bp, Glycine max
  Clone ID: LIB3109-042-Q1-K1-F3
gaaacaaggtcaagggataaatttgggttccaggaagagaacaaatttgattctcttaacttgagcatgttgaacctggactctaaatttactgagaatgtgagcaaaagctcacttcgaaatggtgtttatggtatgaatgcagtgtatcagaaaaacaatgcaaacttggtgagtaatgtgatcagtaacaagtacaatggcagtattcagcataacaaagagatcaacaacaacactggcaacaacatcaacaccaatgaaagcaacaacacaaatgcaactgacaaaaggtttaagaccttgcctgctgcggagacactcccccgcaatgaggtgcttggaggataca

SEQ ID NO: 54203 - DNA, 391 bp, Glycine max
  Clone ID: LIB3109-042-Q1-K1-F4
ggaacttcaaggatgagaatgtgctcttattgggttttctctttctattattctatataaggttgcttctcctcccttgatgactccaaattagcagagcacaaaaatattctgcaattttttttctttttgttttttaaggaaaagactaaccttctgactttccaaagaagagagtctagtaatacaccaatggatggaattttcgcttacatcattctcattttggttaccatattttcatttatgttcttaccaaaaccaaacagaagaagacctcagaaccagacacttgcaaagctccctccaggctcaatggggtggccgtacataagagaaacccttcaactctacttccaagacccaaatgcctacttttccaccaaacaca

SEQ ID NO: 54204 - DNA, 174 bp, Glycine max
  Clone ID: LIB3109-042-Q1-K1-F5
gattacagaggtgtttggaagactcttagaatgggggaccactttagatgctggactactgcatcggaataacttgctaaatactattgaggctcaatatgagcaatgggatgtttaggtgaggaaggagaaatctattcatgataccactaacatgctgagtcttgatgtgac

SEQ ID NO: 54205 - DNA, 332 bp, Glycine max
  Clone ID: LIB3109-042-Q1-K1-F6
gggtaatgagaataaagtaaatggtcttgaagcgtcttcagttaaatccatatctaaacagtctaatgtggtcagtaataccaaaggtgattcattgatgggtctggaaagccataaccaacagcttgccagttcctctgctgatgaacaggccaaagcagaagaagaatttaagaaatccttgtacggagctgctgctgatggaagcagtagtgatgaagaaggagtatccaaaatgaaaaaattacgcataaaaatacgagacaaaccaattgcctcttctactgtggatgtgaataagattaaggaagccactaggcaagttaaacttg

SEQ ID NO: 54206 - DNA, 326 bp, Glycine max
  Clone ID: LIB3109-042-Q1-K1-F7
ggtgcaaaacgcgggtgtgtgtgactttcgttggagagagatgcagttccattcagaaactccaaacaaacatccctcgcgacaaccttaggaatctcgatcgccgaaaaaacctatgcagccccgaacacacacactctgcattccaacttgtttaaatcatgcctctcgattcacccttctctctcaataaatcttttggcctatgaaatcagattcttcgccaccgccacagtcataataaagttttatttttccaaataaagggaatggcgactcctgttgagcctcctaacgggatcagaactgaagggaagcattattat

SEQ ID NO: 54207 - DNA, 356 bp, Glycine max
  Clone ID: LIB3109-042-Q1-K1-F8
ggaatcaattgttgatagtgcgtttgaaaatgttgagcaggtcatcttagaacactttgatcaagtagtgggagactgtttcatggattgcgtgaattgtctgatcaggtttgccaacaataaaacttcgcatcgtattagcttgaaggctattgcactcctgcggatctgtgaggaccgtcttgcagagggtcttattcctggaggtgctttaatgcctattgatgctactttggatgcaactttcgatgtaactgagcattattggttcccaatgctggctggtttatctgatctaacatcagatcaaaggccagaggtcagaagttgtgcacttgaagtcttgtttgatttac

SEQ ID NO: 54208 - DNA, 281 bp, Glycine max
  Clone ID: LIB3109-042-Q1-K1-F9
ggaatcaattgttgataggggattttaaaatgatgagcgggtggatcttacaacactttgatcaagtagtgggagactgtttcatggattgcgtgaattgtctgatcaggtttgccaacaataaaacttctcatcgtattagcttgaaggctatagcactcctgccgatctgtgaggaccgtcttgcagagggtcttattcctggaggtgctttaatgcctattgatgctactttttattcaacttttgatttaactgagcatttattggttccaatgctt

SEQ ID NO: 54209 - DNA, 368 bp, Glycine max
  Clone ID: LIB3109-042-Q1-K1-G1
ggacaaggtggggtggactcgatgaacaatatcgtttcccattaccagtattatcttgaccttctaggtgttggtcgagaacaggctgggccccatgaaatccttacatgcgctgagcaggttcctttcaacccatcttccaaacctgcttcttcatcttaagattatatttattagcatatgatattgttgtaccaatccctttgaaagtgaaagttaataagggttcttgaaattattggtatgcaataattttgaactgcgtggtagtgtgggaattcattatatagcttttgttcgttgttatctagaaggtttagtcatttgtaatatcatatgtcgtgaaaaattttgatctggaatatatg

SEQ ID NO: 54210 - DNA, 375 bp, Glycine max
  Clone ID: LIB3109-042-Q1-K1-G10
gtccaacaaaacaaaaaaagggtccaatttttggaaaattattaccatcggttcgtattcatcaacgacccctcttctgtgcccacttccaaatcttctcctctcgctatgggttgcggctcctcccttccagataggggctcaaggcagttgggtcgacccaattcagagaatggtggagggcaggacgccaagaatctgagggtcaagcttgttctcttaggtgattctggtgttggtaaaagctgtattgttctacgatttgttcgtggtcagtttgatccaacatctaaggtaacttgtggagcttcttttttgtcgcaaacaataactctgcaagactctacaacagtcaagtttgaaatatgggatact

SEQ ID NO: 54211 - DNA, 337 bp, Glycine max
  unsure (1)..(337): unsure at all n locations
  Clone ID: LIB3109-042-Q1-K1-G11
gttgaaagtgagtgagagaaagagatcacatggcanaatggcttctactgaatgtttcttgcaccaccatgctcttaccacccctgccagatccccatcacaacgcatcatggttagcaccaagcctaaccagcttgtttgcaaggcacagaagcaagaggatattgatgtcagcccaatctctcgccggttagctctaaccgtgctcattggtgctgctgctgttggctccaaagtccaacctgctgatgcagcttatggggaagctgccaatgtgtttggaaagccaaaaacagacacaaatttcctgccatacaatggagatggattcaaacta

SEQ ID NO: 54212 - DNA, 336 bp, Glycine max
  unsure (1)..(336): unsure at all n locations
  Clone ID: LIB3109-042-Q1-K1-G2
ggcggaaagtgggtttaatggtttttttctagagagagagagaggcatgatggccaccaatcccatgaacatagctttggcctcttattcttattctcagtgttgagagagagagggtgtggtagtgattccagatgctttggaaatggggaaaaatgaacaacaacaacaacatgtgcaggaagaagggcaggttgaggctccaccctgttgttgggtccttcttcgaccattcagtttcaagtgtctgttccttctcctactcagtttgtcggctctgctttctgcactctnttgggttcttcctagacacaccatcacatatagttttgatgc

SEQ ID NO: 54213 - DNA, 372 bp, Glycine max
  unsure (1)..(372): unsure at all n locations
  Clone ID: LIB3109-042-Q1-K1-G3
gagacaaaaacagagaatatagaacagtgacaaagaggcaaaacctgagactgggaaaatcagagaaatgaacatgcagagcctaaggtgagtccagtcgccagcaagttgctgaagaaggaactgtaaattgaagagaaaaccgcaggaagatgcttggcttttagatatcccttttctgatttctcggatataacaaaaatgtcctttacaaaaagctctggaccaccatgttgatgttgtcatgacgcttgcagccaccatttgccatcacgaggaatcctcaactccaagtgtcccacacagtgatttactgggtggcgctgccctgctgccatngtggctgtttaacaaacactaattacatttttt

SEQ ID NO: 54214 - DNA, 187 bp, Glycine max
  Clone ID: LIB3109-042-Q1-K1-G5
ggttgcagatgacaagataggtaaagtgagttggcgcactatgaagaacgcgatgatagcattcttggaccctgtaccctccattctatgctacctgtcataccaatctaccattagtactcattcttattgaacttctatgcggacgtagtgctatcaccaccctctgatattggacaatgtcctt

SEQ ID NO: 54215 - DNA, 372 bp, Glycine max
  Clone ID: LIB3109-042-Q1-K1-G7
ggcgaagagaaatgaaattgcctctttcaagaagcatctgagtgtttactattttgtactatatttatatatagtcactcaagcttctaggatttctgcctgctgcatcaaaatgggaagcaacttgaggtttttgagtctttgcctcttggcattgattgcatcaactcatgctcaacttcagcttggtttttatgctaacagttgcccaaaagcagagcaaattgttttgaaatttgttcatgaccatatccacaatgctccatcactagcagctgcattaataagaatgcactttcatgactgttttgtaaggggatgtgatgcatcagtccttctgaactcaacaaccaatcaggctgagaagaatgc

SEQ ID NO: 54216 - DNA, 186 bp, Glycine max
  unsure (1)..(186): unsure at all n locations
  Clone ID: LIB3109-042-Q1-K1-G8
aaacccgggccgacgcacgcaaccgtacgtctncaaaaaaacaacataatggtgtcttaaacaaacaatctacctatttcacgtcggtatttttataaatgctggtgggccctaaaaatataaatattcacaacctcatttaatttcaatcccatctccattaattttttaaacacctacacctta

SEQ ID NO: 54217 - DNA, 409 bp, Glycine max
  Clone ID: LIB3109-042-Q1-K1-G9
gttatagggggaggatttgttcttgtgatctgcaactcttgattctgagcgtgggtgcaaaaaagtcctttttttgggcttatgagagtgcggtcctttgcaggttttcagcagataagtagcttaacttccttgttgataagccttgaaggcttttgatgctgattttctgcacttgttgaacctttttcctttgttttgcatctgggtgttgttttggaactgtgtcactctgttggcatgtgagttttttatgtatgtggatttgagatattggtctaatggtctttctgaaatgatatttggtagaaagatttctgttaaaatgatggctatttttatttgaagatatatagtgtaatggatgagatcgaataaacttgtggatgattgagcataaatgggtttg

SEQ ID NO: 54218 - DNA, 178 bp, Glycine max
  Clone ID: LIB3109-042-Q1-K1-H1
gaggaacgtgaaaggcatagcagcgttgatttcaccagggctgtggttttctttgtctgtattgaggttgtcattgggagcactcaacctaaccattcaagttgtgaaaccacatcgcaagaaaattcacaagcgatggatccgaagctgaaagaagtttctcagctcttcgatcgct

SEQ ID NO: 54219 - DNA, 271 bp, Glycine max
  Clone ID: LIB3109-042-Q1-K1-H11
gacttattgaagatatctgtaaggacaatgatgctgttattcattttttggtcagaaaatcagatgccaaggtaaggactaaaccagttgacaaggattttgaattatcaattgaagcatcatatgtgcacaatctggtaccaaatttacatgcagaccagttagggtcagtctctgtaacaaatgaggtcctggagaggagccaattaacaagagattttgttctggaaccaattattatgaattccaacatcaaaattccacttgtgat

SEQ ID NO: 54220 - DNA, 385 bp, Glycine max
  Clone ID: LIB3109-042-Q1-K1-H3
gggtgagagaaaaaatgttaaccttcctggtgttgtggtggatctacccacacttactgagaaggataaggaagacattcttggatggggtgtacccaacaagattgacatgattgctctttcatttgttcgtaaaggctcggatcttgttaatgtccgcaaggttctggggccacatgcaaagaatattcagttgatgtcaaaggttgagaatcaggagggagtcctgaattttgacgaaatcctgcgggagactgatgcattcatggtggcacgtggtgatcttggaatggagatcccagtagaaaagattttcctggcacagaagatgatgatatacaagtgtaatctttgtgggaagccagtggtgactgctacccaaatg

SEQ ID NO: 54221 - DNA, 168 bp, Glycine max
  Clone ID: LIB3109-042-Q1-K1-H4
gaagctgactgagaaagtctgagacttttagagcaactgggtggtctgggcgcaaaccactctttagttggggagatagtctgtattctgcaccttgcaagatgtctcacgcagttatcaacgaatatgaagtgcacattgttattggcgcaccgctctgtgatctta

SEQ ID NO: 54222 - DNA, 244 bp, Glycine max
  unsure (1)..(244): unsure at all n locations
  Clone ID: LIB3109-042-Q1-K1-H6
ggagtggtggcatcaaaatcaaagggtgtctntcagaaacgaagaaaatgggaagaatcttcacggtggagcttgagggtaggtcttacagttgcaagtcctgcaaaacccacctagcccttgcagatgatctcatctctcgttcattttattgccagcggggaaaagcatatctcttcaataatgttgtgaacttcacaattggagagctagaggaaaggttgatgctttcgggactgcatac

SEQ ID NO: 54223 - DNA, 338 bp, Glycine max
  Clone ID: LIB3109-042-Q1-K1-H7
ggttaaagaaagggaatagaagcgaaaagaaaggaccaattaatgaagagggtggaatcggatcgaatacaaacttgacgtccgcaatgaccctctctctcaatactttctctctctaaaacgcacggcatgaagcagcagcagcagcagcagcagcaacagcaacagtacgttgtttcactgagattaaagacgatgctgcttctgcactgagaaaaccctagacacttatagtggacgcgaattcagaaaccccaagtggaaagtccgagccttttcgttccttctcagttccttgatcagttcccagattctgttactgttcaatttcacaattt

SEQ ID NO: 54224 - DNA, 364 bp, Glycine max
  Clone ID: LIB3109-042-Q1-K1-H8
ggagaaagaaagggaatagaagcgaaaagaaaggaccaaagaatgaagaagattcaatcggatcgaatacaaacttgacgtccgcaatgaccctctctctcaatactttctctctctaaaacgcacggcatgaagcagcagcagcagcagcagcagcaacagcaacagtacgttgtttcactgagattaaagacgatgctgcttctgcactgagaaaaccctagacacttatagtggacgcgaattcagaaaccccaagtggaaagtccgagccttttcgttccttctcagttccttgatcagttcccagattctgttactgttcaatttcacaattttcaactctcggtgattgcttgaagac

SEQ ID NO: 54225 - DNA, 242 bp, Glycine max
  Clone ID: LIB3109-042-Q1-K1-H9
gttacaaccaggggtaatggtgtgtgactggatggtgatgtaactgggccagtgcatattaacgtacacaagttatgccagcatctgctctatccagatgcagactctctgccaactgaactcgcggttcattgagctgctgaaaatacgaaagcagacgttgacaattcccgaagtacatatactagagcatacatcaatctcaaatcacatatacctgttggcatgcaaatgatgcctac

SEQ ID NO: 54226 - DNA, 387 bp, Glycine max
  Clone ID: LIB3109-043-Q1-K1-A1
gattgcgaagacaaacacgattatgcctatcattggcaaactgtactgttcatcgtctgagacggtgcttgtggtgaggaggaggccacacgtggtgaatggtgggggttttgtagtcatggattgtagtgcccagagggttgtgttcagggtcgatggttgtggtgttcgtggcaaaaagggagacttgattctaagagaaggagatggagacgctttgcttctcatgcgtcgaatgggaggcatggttgaggccttaagcatttacaagaagtggaaatgctacagcttggactacgaaggatctcggaagctggttttcagcttgagagaacccaattcttgtttggttaagaacaatgcaatcagaatcttcactaggaacag

SEQ ID NO: 54227 - DNA, 394 bp, Glycine max
  Clone ID: LIB3109-043-Q1-K1-A10
gggatatttgttgatgtgcgcgataaggcgaggctgagcagagagtggtaaagtaaaatggcttacaatctttgctcttccccttcctctctcttccatgaccttccctccatttcttcttcttcttcttcccgcaaattcaaacttcgaaacttgtcctcttcttctctcactcctcattccaaaacccttctccatgtctccttgcacgaacacgaacccattcccgaacacctaccacccgacgcaaaatcctcgtcttcgtcgaaaagtaattacatctgggtcaacccccgaagccccatggccaaacaactcgagagtagatcctacgatgccaggtacacttctcttgtaaatctcgcccactccttggactcttgcaatccctctc

SEQ ID NO: 54228 - DNA, 404 bp, Glycine max
  Clone ID: LIB3109-043-Q1-K1-A11
gggcaaaggtgttttgaagaattttacaagatctgcgggggatgttgcagagacaaagatagcagctgattggaaaggtggagaaaattgcccaaagggtacacgtcctgaggaaattgatgcatctggggatgtaaacatggaggcatcaataacacctgatgatgttattcgggctggaggatttggtgccagggatgatatcagtagctttcttcctgttgcaagtgattctaccgacttcgaagcttcaatccgagatgcacgagattatgaagaaccacagggtcaagtaagcaggcccggccttggttggactggtgctactaagggggaatgaatgttgttgctgttatgtgctccagtattagcaactttttgttttagctgggaagaccatgtgt

SEQ ID NO: 54229 - DNA, 354 bp, Glycine max
  Clone ID: LIB3109-043-Q1-K1-A12
gacggcgaaaagctaaatatcatcaaagtactcaaattatcatggctgtcatggttgcattcttgaatttgatcatcatcttttcagtagtctctacaacaggcaagtcactgagcttaaactactatgcaaaaacatgccctaatgtggagttcattgttgccaaggcagtaaaagatgccactgctatggacataactgttccaacaaccattctgcgaatgcacttccatgattgtttcgttcggaggtgtgatgcctctgtgctgctaaattcaaaaggaaacaacaaagcataaaaagacgggccaccaaatgtttctttgcatgcattctatgtcattgatgcagcaa

SEQ ID NO: 54230 - DNA, 375 bp, Glycine max
  Clone ID: LIB3109-043-Q1-K1-A2
ggagcaagagtgaagagcgaagagaatggctcccaagggtttaatctttttggctgcgttatgcttctcagcactgtcactgagtcgttgtcttgcggaggataatggacttgttatgaacttctacaaggaatcatgccctcaggctgaagacatcatcaaagaacaagtcaagcttctctacaagcgccacaagaacactgctttctcctggctcagaaacatcttccatgactgtgctgttcagagttgtgatgcttcactgttgctggactccacaagaaggagcttgtctgagaaagaaacagatagaagctttgggttgagaaatttcaagtacattgagaccatcaaagaagctttggaaagggaatg

SEQ ID NO: 54231 - DNA, 253 bp, Glycine max
  Clone ID: LIB3109-043-Q1-K1-A4
cgaccgaggcggaagctagaggctgatgacgctagcaccctcgtgaataccctaattccgagggtttcagtcttcgacctgtcacttgagctgcaacatcttcagccataaggctgctagccagactgcaatcacacacaatgactgacggctacgaatgagacaggaaccctgagatactgcagatcatgaacacggtctaggcgttggacgccgatctaggtcatgagaccagcatgaactcactgatgat

SEQ ID NO: 54232 - DNA, 393 bp, Glycine max
  Clone ID: LIB3109-043-Q1-K1-A5
gacggacgagggtttcgtttcgggtttgacgttgttcacaatcactttctgcgcttcactcactcccttcgtgcggttttctttctttgtcgaactcgtgcgaaaatgcgtgagattcttcacatacagggagggcaatgcggaaaccagatcggagcgaagttctgggaggtggtgtgcgcggagcacgggatcgattccacggggaggtaccagggggacaacgagttgcaactcgagcgagtcaacgtctattacaatgaagcgagttgcggaaggttcgtgccgagggcggtgctcatggatctagagccagggaccatggacagcgtcagatctggtccctacggtcagattttccgacctgataacttcgtcttcggccagtccggc

SEQ ID NO: 54233 - DNA, 389 bp, Glycine max
  Clone ID: LIB3109-043-Q1-K1-A6
ggaggcggagacgaagaagtgaagagaagagaagagaagggatttggatctgaaaagagaagatggggggaggaatggaagcaaacaagaacaagttcatagaggattggggcactgccagagagaatctggagttcaatttccgttggactcgccgcaaccttgctcttgttggcatcttcggcatcgctattcccgtcctcgtctacaagggcatcgtccgtgaattccatatgcaagatgaagataatggtcggccgtacaggaagttcatgtgagagagtatggagagtcttttgtaataattcgtcaagttagaccttgatattatgaggctacaaaccatgttttttttccttaattcgcaaaggcttgcttgcttttaagta

SEQ ID NO: 54234 - DNA, 386 bp, Glycine max
  Clone ID: LIB3109-043-Q1-K1-A8
gggaaagaaatggagcgtaatcgggacttctctgaagcatcgattacattggataggtctcaagcattgatgatcccagtgatgagctcttttagcttgcttttgatgttctacttgttctcatctgtctcacagcttctcactgcattcactgctgttgcttctgcgtgctgccttttcttctgcttgtatccttatgctgcctatttgaaggcacagtttggtttagctgatccatttgtttcacgctgttgttcaaaatctttcacacgtatccaagcaatactattgttagtgtgctctttcaaggtggctgcttggcttgctactggtcattggatactgaacaatttgttaggcatatctatatgcgttgcggttgtaag

SEQ ID NO: 54235 - DNA, 376 bp, Glycine max
  Clone ID: LIB3109-043-Q1-K1-B1
ggagcaagagtgaagagcgaagagaatggctgccaagggtttaatctttttggctgtgttatgcttctcagcactgtcactgagtcgttgtcttgcggaggataatggacttgttatgaacttctacaaggaatcacgccctcaggctgaagacatcatcaaagaacaagtcaagcttctctacaagcgccacaagaacactgctttctcctggctcagaaacatcttccatgactgtgctgttcagagttgtgatgcttcactgttgctggactccacaagaaggagcttgtctgagaaggaaacagatagaagctttgggttgagaaatttcaggtgcattgagaccatcaaagaagctttggaaagggaatgc

SEQ ID NO: 54236 - DNA, 381 bp, Glycine max
  Clone ID: LIB3109-043-Q1-K1-B10
gaacaacacgtagtattatttcggtgatttggccctcttcgctctctctcagtgaccagagacagatgatgatggagatggcgaagcgaaacgctgtcgttgcggcactcgcggcgttggtgctactcgcggcgagtgtggcggtggatgctcaggagaactcggacgtgaagacgctggtgaagtacaagcacgggaagaagtactgcgacaaaggatgggaatgtaagggctggtcaatttactgttgtaacctcaccattaccgattatttccagacctaccagttcgagaatctgttctccaagcggaactcgccggtggcgcacgcggtcggattttgggactaccactccttcattggcggccgccggctttttg

SEQ ID NO: 54237 - DNA, 393 bp, Glycine max
  Clone ID: LIB3109-043-Q1-K1-B11
gggacaattccaaatgaaatctgcaatatctcccgattgcaggacttgctgttggatcagaatttcattacaggagagatccctcatgaaattggaaattgtgcaaaacttcttgaattacaattgggcagtaatattttgactggaactattcctcctgagattggtcgcattaggaacttgcagatagctttaaatttgagcttcaatcatcttcatggatcactgccccctgaattaggaaagctggacaaacttgtttctctggatgtttcaaacaatcggctatcgggtaatatcccacctgagcttaatggaatgttgagcttgatagaggtgaacttctcaaataatctggtcggaggttctgtgccaacatttgtaccattttag

SEQ ID NO: 54238 - DNA, 213 bp, Glycine max
  Clone ID: LIB3109-043-Q1-K1-B12
ggttctagtgtgtgattgtttgttgttgtaactctttcttcttcttttgctggtctgtgtttgtgtttgtttcttctctcacctgaaaatgtcttgctgtggtggtaactgtggcttcggaagctcctgcatgtgccgcaactggtgtagatgcttgaagatgtacccactcttgttcttcactgttttaaccaccaccgagaccttcgtcat

SEQ ID NO: 54239 - DNA, 385 bp, Glycine max
  Clone ID: LIB3109-043-Q1-K1-B2
ggtgggtgtggatggaggtgatggttggggtataagatctgcgactgaaagtagagaatagaatctggatgtgaataggtacagttgcacaggacaacgtactagggaggtaccattactcagactaagcgctgtcagactatcacctgcttggggatgagctcaatcatgtgtacatgggcattctacacagtgctgcatgatgggtcagatgcattgagcatgactcatccttggaaaggtgaccatcttgactattgctgggctcattatcattgctcatgcatgagcttgaagaacatgaagtacagaatttgaaatatctgacgttgatgaagaccatttcaaatgcttactatgagcaatgtactaaatttgtctgcta

SEQ ID NO: 54240 - DNA, 405 bp, Glycine max
  Clone ID: LIB3109-043-Q1-K1-B4
actacaaaatggggtaccaataaatgccaaaccacagcttaaaagggtcgacacagctacttacaaaaggccttcacttgattttctacaggatacgagtgattaagtcattttttgtgttgcttctgctattcagaggatgcaatggaagttttcttctaccaatgtgtgccactttacaagcatgcattagatggcaattggcaagcaacaaagcacatcttagatgcaaaccctgcactgaagactgctgccatagcacctgggtggcccacagtgctgcatgttgctgcaagcacaaaccattatcactttgtggaggagttgctcaacatattagacaatgatgcaattcaattgcaggataaaaagggcaacactgccttttgctttgatgctggggct

SEQ ID NO: 54241 - DNA, 368 bp, Glycine max
  Clone ID: LIB3109-043-Q1-K1-B5
gcccagaacagagtgtgataatagtaagacagagcacctactcactcgtaaatggcgaggaagaagatcagagagtaccactccaagaggcttctcaaggagcatctcaaacgtctcgcctctatcgacctccaaatcctctcagctcaggtgacagaatctacggatttcactgagctgacagaccagcatccatggctttcgtcaaccagattggtcgtcaagccagacatgctgttcgggaagcgcggcaagagtggcttagttgctctcaatttagacatagctcaagtcgccgagttcgtcaaagcacgcctcggcgttgaaggtgagatgggaagttgcaaggcgcctataaccacttttat

SEQ ID NO: 54242 - DNA, 394 bp, Glycine max
  unsure (1)..(394): unsure at all n locations
  Clone ID: LIB3109-043-Q1-K1-B7
gatcgaagcaaaaaatgaaaacccagagtgcttctctcctctgtctttttctctctcttgctatccttttggctagtggtactgctgcaagtgcaactccaagaagcgcagtgccaagccaccatgtttcaacattcaacagaagcctttttccttccacttttctctttggaattggttcttctgcttaccaggcagaaggagcagcaagtgtagatgggagaggaccaggcatatgggacacctacactagacagcatactgaaaagatttgggatcatagcaccggtgacatgggagctgatttttatcatcgatacaagggtgacataaaaatagcgaaagaaattgggctggactctntcagattctctatctcatggtcaagaatatt

SEQ ID NO: 54243 - DNA, 399 bp, Glycine max
  unsure (1)..(399): unsure at all n locations
  Clone ID: LIB3109-043-Q1-K1-C1
gacaggataaagcactgacgaagcggcactgtgaccatgtccctattttttcatgcttgttagagagacaggtaaagttgctgaaaggagctgctttttctcgtgtatctgctagagctgttataggcacttgagcaatttggaaatgtcgaatttattgcggcattctttgagcaaattcactttcagtccaaacggaacaccaactgggagagaaaaagtaacaccaaaacataagcatctgagaccatttcaatgtgtgctgacacaggataacagaagcattgccgtcaagaatggcaatgattcattggtcatatgtcgggttgtgaatgggatgtggcagacgagtggtgggtggggcagaattgatagggatgatgctgntgatgctatgct

SEQ ID NO: 54244 - DNA, 413 bp, Glycine max
  Clone ID: LIB3109-043-Q1-K1-C10
gatttatgggtcttttgataagccctctgagaagaggaaggggtacttgcttcccaggcccaagatggttaactctgatcttgccaggattattaattctgacgaggttcagtctgttgtgaggcccattaagaaggatgtgaagaaggccacgctgaagaagaaccctcttaagaacctgaactctatgctgaagctgaatccttatgccaagactgctaagaggatggctcttcttgctgaagctcagcgcgttaaggccaagaaagagaagctcgacaagaagaggaagactgtctctaaagaagaagcttctgccatcaagtctgctgggaaagcatggtatcacactatggtgtcagattctgattatacagaattcgacaacttttctaagtggctgggtgtttcac

SEQ ID NO: 54245 - DNA, 218 bp, Glycine max
  Clone ID: LIB3109-043-Q1-K1-C11
ggatccaaacaacaaatattcatggctttctttagtctctccgtcctcttccttcttcttgtttcatctgccactgcttgtgatcgctgcttgtatcaatccaaggcttcctatttctccaaagcttctgctctttcatctggcgcatgtgggtatggctctttggcactagacataagtggtgtacaccttgcaccccgtgtgtattctctctttaa

SEQ ID NO: 54246 - DNA, 347 bp, Glycine max
  Clone ID: LIB3109-043-Q1-K1-C12
tttttcactctttcatacttcttttatattacgactattggggacacattttattccctttaccaaaataactattaacatttaattaaaatcaacatccatcattttcttctattctacaattttattatcatcacaattccattcattaccatattattcctctccaaattaacactatctattctcccctactcataaataaatcccaattaatctttctattaacacaacacattttttctttaaaacattccttaaatttcttttatacaacaaaatattacatacattgctaacattatatatcatactccaaaactattaaccaacaatttttactttta

SEQ ID NO: 54247 - DNA, 407 bp, Glycine max
  Clone ID: LIB3109-043-Q1-K1-C2
gtgaaaaggaagtgatgcgtaactatgagggggatactgatgctgaagtgttggacttgcttgacaccgcttctaggcagaaacaggggaatgtggtggcaaagctatactggggggatgcaagagagaaaattgtggaaaccgttggggatatgaagcttgactctctggtcatgggtagcataggcttggatgccatacaaagggtattactggggagtgtgactaattatgtcaccgtatatgccaattgccctataacgattgtgaaagactctgacccttctactatctgataagctactgaatatgggtggcctttgcaatcgggagtggatatcttcatcagtgaccagagtgtgtttgccttcgttcttactatttacacatggctaattgggattatg

SEQ ID NO: 54248 - DNA, 404 bp, Glycine max
  Clone ID: LIB3109-043-Q1-K1-C3
gtgaaaaggaggtgatgcgtcactatgagggggatactgatgctgaggtgttggacttgcttgacaccgcttctaggcagaaacaggtgaatgtggtggcaaagctatactgtggggatgcaagagagaaaattgcggaagccgttggggatttgaagcttgactctttggtcatgggtagcataggcttgggtgccatacaaagggtattactggggagtgtgactaattatgtcaccgcatatgcgagttgccctattacgatggtgaaagactctgccccttctactatctgataagctactgaatttggttggcctttgcaatcggctgttttatcttcatcagtgaccagagtgtgttttcctccgttcttacttcttacacatgtctaattgggatta

SEQ ID NO: 54249 - DNA, 394 bp, Glycine max
  Clone ID: LIB3109-043-Q1-K1-C6
gcactaataatgatataattctttgtgatggtgtttgtgatcgtggatttcaccagctctgtttggatcctccgttgttaactgaagacattccacctggcgatgagggttggttatgcccaggatgtgattgcaaagatgactgcatggaccttgttaacgactcctttggaacaagtctttctattagtgacacctgggagagagtctttcctgaagcagcatcatttgctggaaataatatggataacaacttgggacttccttctgatgattctgatgatgatgattataatcctaatggttcagatgatgtgaaaattgaaggggatgagtcaagttctgatgaatccgagtatgcttctggttctgagaaattggaaggtggttcaca

SEQ ID NO: 54250 - DNA, 402 bp, Glycine max
  Clone ID: LIB3109-043-Q1-K1-C7
ggagagtgtagggggaagacgtgtgggagcgggagaagagaaatgaacaagactgaaaagtggattgagggagacgagagtggcgcggagatgctgagtagagtgagcagcgtgcgacctttcctgattcctccgccgatccacagggttcctcttcgcgtcggaaacgtcctcgagcttgtggggccctatccctacgccaaaacgcacattctcatacacgccgtcatcacttccgttctccccaaacgccactgaggcctcgaccacttggtcctctttctcgaccttgattcccgcttcgatgtcacgcgcttctgccaattgctcattcaccgcattaccctacacggaacggattcttatgataaaaccctatatgatctctgcatggcccgtttt

SEQ ID NO: 54251 - DNA, 417 bp, Glycine max
  Clone ID: LIB3109-043-Q1-K1-C9
ggatgcaggtcatttgataggaaacttgtggaggaaggaatggggaggactattctcaccttgcctcttgaggatcaacaaagcattttgctttcatggttggggagtttcttgaaaactggtgatagctgtcccaatcttcaaagggcatttgaggtgtggtggaggagaaccttcattaggccatatgtggagaaccaaggtaatgttgctgtgtcagatagtagttcaatgttgccaaagcagcgtgagtgaataaagggttcatgaatatgtttcattggttgaggagatggagctatatattaacaaggacgaggaagacgaaagatatgtgttgaattgcacaatgtgggattatctccaacagctaacaagtactgagaagtgtcatgtgatttgcatggcttttactct

SEQ ID NO: 54252 - DNA, 407 bp, Glycine max
  Clone ID: LIB3109-043-Q1-K1-D1
ggactatagtcagactatcaattccgctaactgcaacccatcttcagaggccgatctttctatagcgactctacgcatgaaccttaagctcattgttgtacatactagactatggctatgatcttacatttacgggctctcttggcttcttttactattcctgtgctgatcaatgcgactactgggcatcctctaatcactgcaactatcacatctacgaactcacttgcagatactcgcattcataaccaccaattgactatgggctagacaaactcctctcgatatacaacggactgctagaataagcttcgacctagaaggctctgcaacctataactctcgacatacttgattgctaatatgcttggaatgacctatgatcaaccaatctacctcaacttaaa

SEQ ID NO: 54253 - DNA, 277 bp, Glycine max
  Clone ID: LIB3109-043-Q1-K1-D11
ggctcaagtgagtttgttgatcgagataactagagacagtgtgatgaaaatgaagggccttgttttcttcgttgctacaattttggtagcatgtcaatgccatgcgtacgatatgttccctctccgaatgaacactggctatggtgcccgtactccgtaggtgaaatgcccaagttggaggcttgctgtggaagcacacaacatcttttgcttttagaccattccttattattgcgttgactcttcccaagtattcattcattgcgaacaattttta

SEQ ID NO: 54254 - DNA, 300 bp, Glycine max
  Clone ID: LIB3109-043-Q1-K1-D12
accgtttcaacaacactacataaggggacttttattgtttcagaactcaaaacaaatgaagcttctatgttaacactatatgaaatacacacacaaccttcactttacatcatcttctatccaattccaaaataacccatcaaatcaaacttgaatttatatacaccctctacccttgtctatcccacgctaaataccaacttcgatgtttattcatccacaatatctaatcattcttttccatccaatttatcctacttcatctcattctttcatcaccgaattatctaccctaatcta

SEQ ID NO: 54255 - DNA, 406 bp, Glycine max
  Clone ID: LIB3109-043-Q1-K1-D2
gggaacaggggcctgttgaatttgtaagactgaaaacctgcgtcaaacctactgagtaattactaagttttcattggatggttcatctgctcccaaaaagcatatgtatgtgcttggtgagaaagaagtccttttaggttatagggaaagggatagtgtcaggttcctctctattgccaagaagtcaaaaagacaaaattccaccagaaggtatatcctgaagatatgatcaatcagtccaatgggcacctgaaagccaggtaaatagccgggataacttccttcactctctggtagcgagaaagcttctggtaatcagaaggttgaaagtgaatcggtggtggtgatctagtcttcaaaagataatctcggaaaactagacaatactttacttaccagccttact

SEQ ID NO: 54256 - DNA, 389 bp, Glycine max
  Clone ID: LIB3109-043-Q1-K1-D3
ggatgatgaggaaacattggtagaagaaattgaagagagagagagagagagagagagagagagagggttggattggttttcttcttccttttctctaaagagaatctaatctcaatcctcattacagatttcttcattcctctctcagtcttttctgttttccccctttgacatcctcgttttcgccgaaacaaaaacaactaagattttttgtttgttttgtgtttcttctacttgttgttatttgactcggttgtctgaataggttgttgcagcagggtcgggagccacagctatgcagagccaaattgtgtgcaatggttgtaaggaccttctgctttacccaaagagggcaaccaatgtttgttgtgcattgtgcaacacaatta

SEQ ID NO: 54257 - DNA, 392 bp, Glycine max
  Clone ID: LIB3109-043-Q1-K1-D4
gatcaaaccaagacatagcatacgatccaaactcttttttcatttgcagcatcaaaatgagtggtagcaacgatggtagcggcagctggagctctaggtttttgaaggtggctagtgcagctgccgctacagccggcgttgccggcggtttatatgccattctttcatcctcaacctctgctagctctgagatggaagtgccgtttggcagcgcacggcgtgagagcaaagaacgtgacgatggtggctccgggtctcatcctcgcgagggtgccaccacggtcagtcgttggaagaaacctgagattggttgggggaagcttaacgtggatggttcacgcgacccatacaaaagttcctccgctggttgggggggtggtctgagggacgca

SEQ ID NO: 54258 - DNA, 400 bp, Glycine max
  Clone ID: LIB3109-043-Q1-K1-D5
ggaaagagaggggatagatagatagatagatataagagagagagacaatctcacacaacgcatatatacagagagagaaacaaaagacgacttgttggggtctatagtgattttgttcttacttatcagattctcatttgttcttttcaatcatcatttcatacaagagatctctcttctcctcaactccttctgtctaaaagactcaatctttaatctgaacgctgcgtttttcattccgggctcccctttttttgttgtcccaaaatataataaaaaaatttcattttttctttcattgcacaaatggcacccagttttgattgtgtttcgagccttctctgtgtggaagacaacaatatttttgacgaaaacgattatggtggttcggtggaggtgt

SEQ ID NO: 54259 - DNA, 400 bp, Glycine max
  Clone ID: LIB3109-043-Q1-K1-D6
ggagtggaagaaggatatagtcatagagtcggagaagaggcggcgagtgttgggttgagaatcctatcttgttcgtgtttctcgtcttctttattttcttttgattttcttgtggatgcgaaacagaatctatgacgagtcaatcggagaagaacctattggctttgttggggctgggtttagctggaatagttctaatcaccagaaagctcaagaagtctgtcagaaaggatttgggggctttcattgagaagcttcagctgcttcctactccccagcctgctcctgccaaggctccccatcccctcaccgcactcaccttcgcactttccgacctatttgacatcgaaggacacgtgtcgactttcgggcatccggagtgggctcggactcacgaacc

SEQ ID NO: 54260 - DNA, 401 bp, Glycine max
  Clone ID: LIB3109-043-Q1-K1-D7
gagaacaaacctgtcactaacagtagggatacacaagaggtaatgttggagcctggcctgaaattaatcaaaattttcaaggaatataccatcaagacatgcattctggatgattttggcttctatgaggcccgtcagaagactattttggagaagaaagcaaagcaacaattcccaaagcaggtatgggaagggaaacctgctgatgagaagattgagataaatggggaagtcaatactcaaaaatctgaagttagctcggaagtgctcaaggagtcccttgctgataaggatagtgatgaccacaaagttcccgagaatggatgtgctacaaaaactggagatgccccaaagggtgctaaaccagttggtcctgagagcaagattgtagccaatggggt

SEQ ID NO: 54261 - DNA, 310 bp, Glycine max
  Clone ID: LIB3109-043-Q1-K1-D8
cgacagcaagcgtgtgactaacaatgggcaggcggaacaggaaatgcaggatgctgtgctgaacctaatcttatcttcagaaggaatataccaagctcacaagcatactggatcagatcgccttacatgagacaagccagaagactatgatacagaataaggccaagcaacagttactatagcacgtacgggaaggaccacctgctgatgagaacattaagataaatgggcaagtcgatgactgatacatgttaattagatccgaagtgctcaagagagctcctagctgagaaggatcgtcatcaccaca

SEQ ID NO: 54262 - DNA, 115 bp, Glycine max
  Clone ID: LIB3109-043-Q1-K1-D9
ggatgaatagataggtactgttgggtcgtaatttgcattttgctgtgctgtgcgggtttcctcttcagattcatggcggcaacccaaccaacgcaaggtccggatcgtaccaccg

SEQ ID NO: 54263 - DNA, 395 bp, Glycine max
  Clone ID: LIB3109-043-Q1-K1-E1
ggatgactttgagaatattacaaactggcatgtacccattttagccatgaccgcagatgtgatacaggctacacacgaggaatgcctaaggtgtggcatggatggatatgtttcaaaaccatttgaagctgaacagctgtatagagaagtctcacggtttttccagtcatcttgaaaagaaaatacggtgccgagttaaaccagaatatttgataatggaagcgtagctgtccgtaatccaggacactcccaagtgggcaaataggttccgaagtctcctgagaggagtgtacataagagccaagtttgattggttgcaattgagttgtaattggttgttaagggtaccaaaacccattaattcttcttccatgtaaagtcagccgaaatgattg

SEQ ID NO: 54264 - DNA, 418 bp, Glycine max
  Clone ID: LIB3109-043-Q1-K1-E10
gactgaaaaaaagtgagaaacacgaacctcaaacgtcagacagaaccaagaacacacttcttctcttcttccattctctaacgctatcagcatcaacacagtgtcacatccattaacgtgctatggtgtttagttaggaaacaccggtggtaaaattgtacgaagcagaaagaacatggctccgtctagcaaggctgagaaaaaggctgccgtggatgcagctgcatggatgttcaatgttgttacatctgttggaatcatcattgtaaacaaagctttgatggcctcttatggcttcagttttgccacaacattaacaggcatgcactttgctaccacaactttgatgacagttgtactaaggatgctgggatatgtccagccttctcatttacccttgccagatcttctaaaattt

SEQ ID NO: 54265 - DNA, 399 bp, Glycine max
  Clone ID: LIB3109-043-Q1-K1-E12
ggagagagaacatataacaggtgtggacttttgggttactggtagacgttaaatttgtgagagaatagagatatttatttttctagatatccaatttctttagtacatgaaagagtgctgacaaaatggacacctctattttataaatatttcatcaatatttatctttttctcttttcctatagtgtcataatactatatgtaatgatatttgaacatcaatttattttaaatatttcattaattatttctttttattttttttctttttatcacatcataagcgcatgatcataataaggtgttttttttttttttttaaaaaaagctaaaaattcttcttatatattatacctggtaattaggttaatacttaacacatatttgtgataactcatg

SEQ ID NO: 54266 - DNA, 315 bp, Glycine max
  Clone ID: LIB3109-043-Q1-K1-E2
ggagagagctgttttagttagaaaaaaacgaaccgggttttctttctttgtttctctctctatctatctctatttctcacataaaccgcctacttgcatgcggttcataaatcagcaaagccttgaaaagttgctgtgtgtgttcgaagaagacaacttttcctttattatttatttttctcactgagcttcagttaaagtagctagctagctagagggaattctgctgttttccatggctaaagcatgaaagtttttgatttgatctcaatcaagctcctgatatatactagagagagagagagatgctgtgtt

SEQ ID NO: 54267 - DNA, 402 bp, Glycine max
  Clone ID: LIB3109-043-Q1-K1-E3
gcaactgcaattatttatagcggagaacacaagcatcaatgtcctcatcctaacaagtgctcaaaagacaccatgacttcaaatgaaaattcaaatatgcaagggaatgtatgattcaacgtatcaagggacgagtacaaactcaatgtctaagatggatcccgagtcaagtcaggcaacagctgatcgtctatcaagaacacgtgacagcgaggaagtagctgatcatgaaactgaagtggatgagacaaatgttgagcctgagcccaagaggagaaaagcacaagtctcgcagtcagatccaccttcttcacataggacttgtaccgagcctcgaatcattgtgcacacaacaagtgaagttgatctcttagatgatgggtatagatggcgaaaatatgg

SEQ ID NO: 54268 - DNA, 240 bp, Glycine max
  Clone ID: LIB3109-043-Q1-K1-E4
gacactaaacaagttaaaagaagagcatcactgaactaacaaagcaaccctatgtcgaaggtggtttgtgtcaccggagccagcggcgccatcggatcatgggtggtcctactcctactgcagcgtggttacaccgtacatgccaccgtccaagatatcaagggatgaaaattgagacgaaaacatttggaaggaaatggaagaagcaaagagtcatctccatttttttgaaatggatct

SEQ ID NO: 54269 - DNA, 378 bp, Glycine max
  Clone ID: LIB3109-043-Q1-K1-E5
ggagcaagagtgaagagcgaagagaatggctcccaagggtttaatctttttggctgtgttatgcttctcagcactgtcactgagtcgttgtcttgcggaggataatggacttgttatgaacttctacaaggaatcatgccctcaggctgaagacatcatcaaagaacaagtcaagcttctctacaagcgccacaagaacactgctttctcctggctcagaaacatcttccatgactgtgcttttcagagttgtgatgcttcactgttgctggacttcacaagaaggagcttgtctgagaaggaaacagatagaagctttgggttgagaaatttcaggtacattgagaccatcaaagaagctttggaaagggaatgccc

SEQ ID NO: 54270 - DNA, 403 bp, Glycine max
  unsure (1)..(403): unsure at all n locations
  Clone ID: LIB3109-043-Q1-K1-E6
gacggcaacagaagaataatcaaatttctcagatctatccgacgtcgtcgcagatccaccaaccgttatggctgccttcagcggtgatgaaacggttccgtttttcggcttccttggagccgcagctgccctcgtcttctcctgtatgggagctgcctatggtacagcaaagagtggtgtgggcgtggctttcatgggtgtgatgagacctgagctggtgatgaagtctattgtccctgttgtcatggctggagttttgggtatttatggccttattattgctgntattatcagtaccggtattaatccaaaggccaaatcttattacctctttgatggttatgcacatatctcctctggtcttgcctgtggcttggctggcctttctgctggcatggctatt

SEQ ID NO: 54271 - DNA, 377 bp, Glycine max
  Clone ID: LIB3109-043-Q1-K1-E7
aggcagaagaagaagaagaagaagaaaacgggaaaaacgcacgacaaacagaggaagatcgatcgagagcgtgactaagcgggtctgagttgaagaaatcaagaagcagaactagagcaactcaacggcctgataatagccaggctatggcagcacttacaaatggtgggcttccggacttgaatgggaagaagaacaaataggctgctagtggcttcaattgttcctgggggcagggcagacttgttagatatttaaaatattgacaatgctaaaagcaaaaggacagaagggaatgaatcggcgaacacgaaagacgcatatcatgaccatacccaagtagctttaggcctggcggaagacctgctcggaaagag

SEQ ID NO: 54272 - DNA, 357 bp, Glycine max
  Clone ID: LIB3109-043-Q1-K1-E9
aggcgtccttacacctcaaaaaagacgttcgaaagtttgagtgaatatttcattaaagggtcttctgtaatatataaatgatcatattctacttttgtatccataaaagacttttaccatcatactgaacacaaacttctatcgattgctgataagaatgatgaaaattcatttcaggaatcaacatctcggggaggataaagcctgtattgaaaacaacattaagttggttacttttgttgaatctaatgattctgcatttaatctttatattccttttgttatctcaactactttcttcaataataatatttacaatagtcaacttttcagatgaaataaatgcttccccattca

SEQ ID NO: 54273 - DNA, 407 bp, Glycine max
  Clone ID: LIB3109-043-Q1-K1-F1
gaaggtaagggggtgtggtcggtcatagactgcagaaaacctattaaaatttcatttggaaaagaatctgccaattttgcggtgtgatatttaggttggagagaagaaaagatgccgttgaaggtgttagaggcgacagtgtcgagtttcgatgtggtttttgagaagttccgatcagaggctccacaaaacaaggccaatctcatcctcttcttggcggacaatgacccggctacctctctcagctggtgccctgattgtgtgagagcagaacctgtgatatacaagaagctggaggcttcacctgatgacattgcactattgagagcttatgttggagatagaccaacatggaggaatccccaacatccatggaaggtggatcctaagttcaagctcactggggt

SEQ ID NO: 54274 - DNA, 393 bp, Glycine max
  Clone ID: LIB3109-043-Q1-K1-F10
ggagagagagagagaaacaaagcagcacccatttggatcctctcttctcttctttgatctccgttaccctttttgttttctcaacagagagagagagagagaatctttcgaagttcgtttgcgtgtgttgtgtggtcagtcaccgatggcagcaccacctgcgagggcacgtgccgattacgattacctcatcaagcttcttcttattggcgatagcggtgtgggaaagagttgtctgcttttgcgattttctgatggttccttcacaaccagttttatcaccaccattggcattgattttaaaataagaaccattgaacttgatggccaacgcattaagttacaaatctgggatacagctgggcaagagcgatttccaactattaccacagc

SEQ ID NO: 54275 - DNA, 259 bp, Glycine max
  unsure (1)..(259): unsure at all n locations
  Clone ID: LIB3109-043-Q1-K1-F2
cagggggaagcgaagagtgaagagaatggctcccaaggggttaacctttctggctgtgttaatatgcgtttcagcactgtcactgagtccttctgttgcgggggaagggcaaaataatggccttgttatgaacttctacaaggaatcatgccctcaggctgaagacatcatcacagaacaggtcaagcttctctacaagcgccacaagaacactgctntctnctggctcaggaacatcttccatgactgtgctgttcag

SEQ ID NO: 54276 - DNA, 382 bp, Glycine max
  Clone ID: LIB3109-043-Q1-K1-F3
gataattgttgaagagagagagacagagagagagagaggatgggttgttgccaatcatcgatgttgctgatagtgggagagagggagactcaccctgaaaaggagaaggaaagggataaggagaaagagcaagcgtacggaaaccaccagaggcagtctgagggaggagaggtctacggcgagaaagaggcggctgatttctcgttcttagagttctcgctggctgagcttaatgcggacaccaacaattttagctttgagtatatcgtgtcagaaagtggcgagaatgcacccaatctggtgtacaagggtcgcctgcagaaccagagccgcttgattgctgtgaagaagttcatcaagtctgcttggcctgatcccaagc

SEQ ID NO: 54277 - DNA, 352 bp, Glycine max
  Clone ID: LIB3109-043-Q1-K1-F4
gactgcaaactatgaataagcccttttctcatttctttcatcttctcttactgctgtctgctaattctaatcttaattttctgtttactgtttctttcttccttcatattttatacgcttcttcttcttcaactactactctctctctcaaccttcaaagcttcaaactcaaaagcaatggcatttgatcccgtgcaacccgtcgcaaagaaagcaaggtcaggtggtgagattgtgagtgcaagagagcctctgcttaatggggttcatgactctgaaagctattccgtctctgctgcaattcttccatgtctcttcccagctttgggtggcctactatttggctatgata

SEQ ID NO: 54278 - DNA, 402 bp, Glycine max
  Clone ID: LIB3109-043-Q1-K1-F5
gagggagttgtagagaggcgcatgatagcagaatgagttggcgttagggggtggagcccaccgacggttcagcgacatgcggttccggctcgggacaggacctcgtcctctatcggtccactccgcttctgcgaaatttcttcgtctctgtctctgaccccttaacgccttctcgattccgaactccttcaaccctttgtaccattcaacacgccatcgtcatgctcccttcaactctcgctaaataacaatgccaccataaattcactcctccttcttcctcttcttttgatttttgttgattggttcaaactgaagataccctttccatttctctctcgtttctcgtcttcgtagcttgatcaggttttccgattcgtcggcgatctctctctgcattcg

SEQ ID NO: 54279 - DNA, 100 bp, Glycine max
  Clone ID: LIB3109-043-Q1-K1-F6
ggagtgagcaagagtgaagagcgaagagaatggctcccaagggtttaatctttttggctgtgttatgcttctcagcactgtcactgagtcgttgtcttgc

SEQ ID NO: 54280 - DNA, 400 bp, Glycine max
  Clone ID: LIB3109-043-Q1-K1-F7
cgacaaccgattacattattaacgggataaatgtctaccttgcaaccaaacatacacaaaatgctatacttgtcaacagctgcactgtaccagaatgtctcataggataggcagcgcatctttgtctattgcggtcacatgtggatgcaatactgcgcctttacaaacgtgataactcaggaacttactctgatggatgacctgcgagatggacctttgacactaatgcttgtcccattggatatagattcagagctggtgatatactaatcttaaactatgactcatcatccgacaatgtgtgaagctgaggacacaaatggtatacaactgtttcaagacaccacacatcgctccagtgatcatgccagggaatgacctggtcaaactagtgagatgg

SEQ ID NO: 54281 - DNA, 194 bp, Glycine max
  Clone ID: LIB3109-043-Q1-K1-F8
cagacggtttcaacaagactacagaacgggaagcaggagtcccacaacatagatcgtcctaccagaggactattacgaagatattgcactaacgcgacatcgaaatggttgtcatcctctagttcttaaccatctagcagataatcaccctactaaaaggagaatcgtcatcactgatgaactcgcgcatacat

SEQ ID NO: 54282 - DNA, 386 bp, Glycine max
  Clone ID: LIB3109-043-Q1-K1-G1
ggaagtgtgaagcactgagcagttgaggaaatgggaacccttgggagagcgatctacagcgttggtaactggattcgagaaactggacaggccattgatcgtctcggttcccgtcttcagggcggttactacttccaagagcagctctctaggcatcgaactctgatgaacatatttgataaggctcctggtggtgataaggatggatttgttgcgccaagcgccttcgtcattggagacgttcaacttggtagaggatcatccatttggtatggagttgtcttgagaggtgatgttaacatcatcagagttggaaatggaactaacattcaggacaactctctggtgcatgttgcaaagtcaaatttaagtgggaaagtgttggc

SEQ ID NO: 54283 - DNA, 397 bp, Glycine max
  Clone ID: LIB3109-043-Q1-K1-G10
ggttctagtgtgtgattgtttgtggttggagctcgttcttcttcttttgttgttctgtgtttgtgtttgttttttctctcacctgaaaatgtcttgctgcggtggtaactgtggttgcggaagctcctgcaagtgcggcaacggctgcggaggctgcaagatgtacccagacttgagctacactgagtcaaccaccaccgagaccttggtcatgggagtggcacctgttaaggctcaatttgagggtgctgaaatgggtgtgcccgctgagaacgatggctgcaaatgtggaccaaactgctcctgcaacccctgcacttgcaagtgaggtgttgggagagcaagcttcaagcagagatagcccttaattaggaataatgataaactattaatgtgt

SEQ ID NO: 54284 - DNA, 299 bp, Glycine max
  unsure (1)..(299): unsure at all n locations
  Clone ID: LIB3109-043-Q1-K1-G11
tcnaagacgactttgggggtaaaggaaaagttggaaaggctgcaaatttgagaggacaagtgtcgttaccaaccttgtgagctggcgaagatgcatacgatgttcattttgaatgggacagtgacttctgaatttccggtgcattttacattaagaacttcatgcaagttgagttctatcttaagtctctaactctcgaagacattccaaaccacggaaccattcacttcttattcaactcctgtgtttacaactcaaaatcctaccattctgatcgcattttctttgccaacaattca

SEQ ID NO: 54285 - DNA, 422 bp, Glycine max
  Clone ID: LIB3109-043-Q1-K1-G12
gacagaaaagaaaaaggaaaccctagctggatagggcaaacggcatcatgtcggacgaagagcaccatttcgagtccaaggcagacgccggtgcctccaaaacctaccctcagcaagccggtaccattcgcaagaacggctacatcgtcatcaaaggacgcccctgcaaggttgtggaagtttcgacttccaaaactggaaagcacggtcacgccaagtgccactttgttggaattgatattttcactgccaagaaacttgaggatattgtgccctcttctcacaactgtgatgttcctcatgtgaatcgtactgattaccagctcattgatattgctgaggatggatttttgagtctgcttactgaaaatgggaacaccaaggatgacctcaagcttcccactgatgagagtctgctcact

SEQ ID NO: 54286 - DNA, 70 bp, Glycine max
  Clone ID: LIB3109-043-Q1-K1-G2
ggaagtgagtcgcactgtggagttgaggaaatgtccaccatttgcacagcaatcaacaacgttggcaacc

SEQ ID NO: 54287 - DNA, 398 bp, Glycine max
  Clone ID: LIB3109-043-Q1-K1-G3
ggagatggcgaagcgaaacgctgtcgttgcggcactcgcggcgttggtgctactcgcggcgagtgtggcggtggatgctcaggagaactcggacgtgaagacgctggtgaagtacaagcacgggaagaagtactgcgacaaaggatgggaatgtaagggctggtcaatttactgttgtaacctcaccattaccgattatttccagacctaccagttcgagaatctgttctccaagcggaactcgccggtggcgcacgcggtcggattttgggactaccactccttcatcgccggcgccgcgctttttgagccggaagggttcggcaccaccgggaacaagacgatgcagatgatggagatcgccgccttcttcggacacgttggcagcaagacctctt

SEQ ID NO: 54288 - DNA, 167 bp, Glycine max
  Clone ID: LIB3109-043-Q1-K1-G4
ggttctagtgtgtgattgtttgttgttgtaactcgttcttcttcttttgttgttctgtgtttgtgtttgttttttctctcacctgaaaatgtcttgctgcggtggtaactgtggttgcggaagctcctgcaagtgcggcaacggctgctgatgctgcaagatgtacc

SEQ ID NO: 54289 - DNA, 403 bp, Glycine max
  Clone ID: LIB3109-043-Q1-K1-G5
gcaacaagtgaggatgcatcttctgccattcagggcatggatggtcaggatcttcatggtcgcaggatacgggtgaattatgctacagaaaggtcacgtccagggtttggtggtgatggtggatataggggcagtggtggcagcgatggctacaataggggtggaaactatggaggtggatataacagtggcagcgatggctacaataggggtggaaactatggaagtggcaattataatgttacaagcagctatagtgatggcaatgctgaaactagttacactagtggtgctaatgctggtaattaccaattcaatgaaaattctggtggagtttttggctcagctagcggtgaattcagcagcaaccaaaatgacgcaacaggtgcagacaatgatgaat

SEQ ID NO: 54290 - DNA, 381 bp, Glycine max
  Clone ID: LIB3109-043-Q1-K1-G6
cgacggaggttgctgcgaaattaaacgtctgctgagagcatcaatgtctggacctgaatgatgctcaaacccaccagttctgaaccccaatgcatgaactggccatgttgaaaaactcgctggtctcaattcctatctctccggttcccctaattccattgccattcttctcatctccgacatttatggctatgaagcaccaaatttgaggaatattgcagacaatgttgcagctgctggttattatgtggatgatcctgacttcttccatggtgatccatataattctgagaatgctagctggtctatccctgtatggctaaaagaacatggcacggacaaaggatctgaagcttcataatccataattgaagctttgaa

SEQ ID NO: 54291 - DNA, 371 bp, Glycine max
  Clone ID: LIB3109-043-Q1-K1-G8
ggatgaaccgggcggtccaaagagtctctgctccactttggaacgccttttggcgtgggagaagaagctctacgaggaggttaaggctagagaaggtgtgaagattgaacatgaaaagaaattatcagcgctgcagactcaggaatacaaaggagaggatgaagctaagatattcaaaaccaaggcttccataaataggctgcagtcactaatagctgttacatctcaggctgtgtctaccacctcaactgccactattggccttagggactctgatcttgtccctcagcttggtgatctcattcatggattcatgtacatgtggagatcaatgcaccactaccatgaaattcaaagcaatatagtgcaac

SEQ ID NO: 54292 - DNA, 295 bp, Glycine max
  Clone ID: LIB3109-043-Q1-K1-G9
ggttgacaaaggaaacgtgtagtacgagggccaatttccaaaaaccttttgtctcgcaacctcacctcttcctccttcaatctctttcggaatttcccaaaatccttagtgggaggaagagatggttctgactcagaagattcacgaagctttcaaaggcaccgtcgagaggatcactggcccccgaaccgtttccgccttcaaagaaaaaggagttctcagtgtctccgagttcgtcaccgccggcgataatctcgttgccaaatgccccacctgggcctgggaatcgggtgat

SEQ ID NO: 54293 - DNA, 402 bp, Glycine max
  Clone ID: LIB3109-043-Q1-K1-H1
gacagagatagaataaaaacagaggccccatttgcgatcttaaacaacctataccctaacgcccttatatcggttcgagcttgctgtactcgacgacttaactgtcaaacggacgccacagtatttatataaagctgcacagccctttacgctagtgcgttaattaatcagcaataccatgaccaactgccgaattatgagtccctcaattgtctcaccttatattttccaaggatataatcggattcccgaatccgcaggaaattcatggggcttttgacttttctatcgcgatcatatgttatcacgagatcagactgttgatggtgctgcataagtatctaatctcactaacataactgcagatgtaagattacatagagatgatgcgtgatatacatc

SEQ ID NO: 54294 - DNA, 452 bp, Glycine max
  Clone ID: LIB3109-043-Q1-K1-H10
cgaccgacgcgttcgtaaactactacaaaacgacagatttgggagttttaagggaaaaaaaaaagagtggtgagggggaggtcttccttatcgctcgacatatccataagagcacccactccctcatcttctctcattcttactaccccaaaaccatcttcactctcttttaaccttaccctcactttctccagcgctcactcttcgttccttcatttctccttcctatcttatgcataccatctgtcttccccttcctccactttaggcttgtcacttgaattgaatttctcatataatactgggaccatattacgtataggttctgtcctatttgttagatcaagcaaggctcctctttgtctgactaacagaagcataccaagaaaatcattgtcacgcactcatgttttcctcaaaataattatcacaccacgtctaagatctaattt

SEQ ID NO: 54295 - DNA, 306 bp, Glycine max
  Clone ID: LIB3109-043-Q1-K1-H12
acccacgcgtccgaccactcctacggactgcttgataaaaaacgtcttgaggctatactgatgatctcacttctggaacaggtggtcagtatttatggagcttgattacctgcataagtggcattctttcatcccccaatggatgacatttctggtaccagagagtctcttatttatgttacctctttctacacagggtccggattaaacaaaccagactgtttgtcgacagtgtatgtgtatccaaactattcatctttttccaaagaaatacataggcttcccgctgcttatttaggtgactaa

SEQ ID NO: 54296 - DNA, 290 bp, Glycine max
  Clone ID: LIB3109-043-Q1-K1-H2
gaagggcagaaattgtagtgaaagcgataattctagtactagtataataactagtacgaatgatacaaatgatagtgattccactataggagaaagttctaataatctcgatgaaagtcaaaaatataagcatttgtggcttgaatgcgaaaattgttatggattaaattatcaaaaattttttaaatcaaaaatgaatatttgtgaatactgtggatatcatttgaaaatgggcagttcagatagaatcgaacttttgattgattcgggtactttgaatcctatggatg

SEQ ID NO: 54297 - DNA, 380 bp, Glycine max
  Clone ID: LIB3109-043-Q1-K1-H3
ggcgtgataccatttaatttgacagcgattaattatttatagttaagtgtggagtgcagtgcaggtcaaggcctgagattcggctctttacttgttgggttgttctgatcttctgtcatagcagtcagatcacactcccatcttctcatctcgtaaaccctaaaccccgttttcagtgacatcgagatcgatcgatcatggatgaggagtacgatgtgatcgtgttgggcacgggtctcaaggagtgcattctcagcggtcttctctccgtctatggccctaaagttctgcgcatggacaggaatgactattacggaggagaattcacttcgcttaatcttattcagcttttggaagagattcaagggagatgacaagcc

SEQ ID NO: 54298 - DNA, 409 bp, Glycine max
  Clone ID: LIB3109-043-Q1-K1-H7
ggtgtaatgtaatgaaacgaatgaaatgataggttggtggaggattgagagagtgcggtgttggttaaacatgtggaagtttggtgcttgaacttgaacgccgaacattgcgattcagagagagagagagaagagaatggccatggcccgaagagtccctcgtaatgttttgggattggtcaaaaggaacatgtccttcaaatctttggatcccccttcctccctcacccacggaatccacgtctttcattgccccgatgccgttggaattgtagccaagctatccgactgtattgcctctagaggtggaaacattctcgccgctgatgtttttgttcctgaaaataaacatgtcttctactccagaagtgattttgttttcgatcctgttaaatggccacgggtgcaa

SEQ ID NO: 54299 - DNA, 163 bp, Glycine max
  unsure (1)..(163): unsure at all n locations
  Clone ID: LIB3109-043-Q1-K1-H8
ggggaaaggtaaggaaacgaangaaanganagggngggggaggattgagagagtgcggtgttggttaaacatgtggaagaaggaagcaagaactagaacgccagacattgcgaggcagagagagagagagaagagaatgagcaggggcccgaagagtccctcg

SEQ ID NO: 54300 - DNA, 379 bp, Glycine max
  Clone ID: LIB3109-043-Q1-K1-H9
agggatttcacacatcttcctgatcatgggattttccgggacggtggcaaggatatatctgaaccccaaaattctttgtattagataacattgttgcaagatcttaatatacaatgtgcaattcttcttgaaggaaaaactttacatatggagatggaacacccaagaacagtagcataaattcttgctcggagaaaacaggaatgtgatggggttgtagatgaggacagacaaaacagattttctaagatgaccctgattgattatcttcacgcaccagataattatacgtgtgcaccactctttatcaaggatcctttttactattttgattttcaacaagctaatgctgtaaaaaacttggatgattgtcaaactg

SEQ ID NO: 54301 - DNA, 375 bp, Glycine max
  Clone ID: LIB3109-044-Q1-K1-A1
gggggaattgaatatatataataagaaaaaggcacaaaaaagaggtgaaaaaaatttgtctggtaaattgttaattctgttgttttgcgtgtttctggactcagggattgccaattgatgtcatggtcttcaccattgccaccacagtttctttgaaactgctcaaggtctagggttctatttaacttctgcacctgagcttttatatttaagagtgtttatagatattgggctagttgatagaaatggaagcaaaaatcgcaaaggcattggatagggttgcactcaatctgaagcgcaagcgagcgacccgatatgccgcacatttaagtggagcttcacaaccaatgttagggcattggtcatcttttacgt

SEQ ID NO: 54302 - DNA, 295 bp, Glycine max
  Clone ID: LIB3109-044-Q1-K1-A10
gggtggacaaagttaacagcaaaggtatgtacttttattttgtagggcgttccctccctcttttcaccgattgctttagccttagtcatcattatatgtactgtattccatcaccatccatgaactagttgtcctaaccaaataagaatgcagcgaaagcagaattcttcttctacacagcaaaagaacacacttcattgcaaaccaacccatatcaaagagaaaggtattcctggttcttgatttggggtcctaattttcaattcctggttaagtttggctttaaaaaatggaa

SEQ ID NO: 54303 - DNA, 415 bp, Glycine max
  unsure (1)..(415): unsure at all n locations
  Clone ID: LIB3109-044-Q1-K1-A11
ggtgtgaaaagtgaaacaaaaaacagaacaacaatggcgacacttaaggttcctcagcctcttccccccgttgcagatgattgtgagcagctccgaaaagccttctcaggttggggaactaacgaggagctgattgtatcgatcttggctcataggaatgctgctcagaggaagcttatcagagaaacttatgcccagacctatggagaagatctcctcaaggccttggacaaagaactcacgagtgattttgagaggctggttcatctttggacacttgattctgcttgacgtgatgcatttttggcaaacgaggcgactaanaaatggacttcaagcaatcaggttctggtggaaatagcctgcactaggtcctctgaacaatngttngctgcnaggaaggcttaccatgttc

SEQ ID NO: 54304 - DNA, 394 bp, Glycine max
  Clone ID: LIB3109-044-Q1-K1-A12
gaggtgacaaggcaatgcaacttttggagagtggtttgaaggttaaggaatatgaacttctcagaaggaatttcagtgatactggttgcttcggctttggtattcaggagcatatcgatttgggaatcaagtaagttgaagaactcttggatttttatgctggtgttttgacttttgcctgaggtaaacattttaggacttaagggaagctgattatttgatatgggttgtggtgtgcacaatgcattttcaaaattttggatatgacataacatatctcttcccctttaatggtgattccagttttgacttgaaccaaatgctaactggtttataaataatgggaagttaagaattttccttttggtggtttggactttggtgcttatatgaa

SEQ ID NO: 54305 - DNA, 398 bp, Glycine max
  Clone ID: LIB3109-044-Q1-K1-A2
gacacagacaaggaaaaagggagaaagaacagttttttttttcttttttttgaataagtctttttctaccctcagttgctctcatagactcttgactctttcagttgtttactaattaacactcatcacattcgttgtgtttggcttcttcactcgctttctctatttttttctcactaaaaagttccatcttttttttttttttttaatttctggggttattattgctttctgtgattctgtctcagttccattttggtatctttgagggaaattcattgggtttgcagggttttatcttgttagaatttagaccaattggctaacagataatagtcttcattgaacatcaatttcaagcattctctctgatttttttgatcaagtggctcttttct

SEQ ID NO: 54306 - DNA, 382 bp, Glycine max
  Clone ID: LIB3109-044-Q1-K1-A3
gggttcaagtaagtctcattaagtttccagaagttgctattcgctcactttctctctctctctagctacctccaaccttataatagtcaaacaccctttctttcttctcccccaaccttcttccttcgacacaaaaatttcccaaactccaacaaaacccaaatccaaataccctttttagtattcaatccaaaggattcacctttgtattctcctcacagtggggcatcatctctcagaagaaatttttttacaaagaaagaggaaaaagaaaagaaaaatgttgcagttgttcttcactgtggctttctctgcggttcctctgaccctttacgtgccaccaatccgaagcctaaacctgtttgtggaaacaatggaatat

SEQ ID NO: 54307 - DNA, 413 bp, Glycine max
  Clone ID: LIB3109-044-Q1-K1-A4
ggtgcacaagtgagtttgttgatcgagataactagaaacagtgtgatgaaaatgaaggtccttgttttcttcgttgctacaattttggtagcatggcaatgccatgcgtacgatatgttccctctccgaatgaacactggctatggtgcccgtactccggaggtgaaatgcgcaagttggaggcttgctgtggaagcacacaacatctttggctttgagaccattcctgaagagtgcgttgaagcaacaaaggaatacatccatggcgaacaatatagatcagactccaaaacagttaaccaacaagcttacttttatgccagagacctcgaagtccatcccaaggacacatttgtgttcagtatagatggcaccgtactctctaatattccatactacaaaaaacatggata

SEQ ID NO: 54308 - DNA, 424 bp, Glycine max
  Clone ID: LIB3109-044-Q1-K1-A5
ggaggaagcgcagcagcagcagctataccacgttgcttgaagaaactgataaaaagcgctgccgttgtgtctttcagtcttcgttggatcatcttcacaatcacatcatcagaacacaaagaagagaagagacccttcatcttgttattccactcgggctaggccaattttccctctaacagtcaattttcattcagattcgtaaatttctcgattagatcacgaggtgttggtgtgattgtttgtaccttctggtggtggagcttgttggaaattggagatgagtcagaggggtttaatatatagctttgttgccaaaggaactgttgttttagcagagcacacgcaatatacggggaatttcagtaccattgctgttcagtgcctgcagaaactgccttcaaatagcagcaaatacacatat

SEQ ID NO: 54309 - DNA, 402 bp, Glycine max
  unsure (1)..(402): unsure at all n locations
  Clone ID: LIB3109-044-Q1-K1-A6
ggttgtgttgttttgtgtgtgcaatcctcattaccattgccgccgccaccaccaccgcctatcaccctctcatccaccaactgatacccgtaacttcttcaccttcctctccttccccaatttaaaactaaataaaaaaactgtccactaaggttgaggcacgtcaccatctcgtccttcccctcgctcatctcaaatccatggttcggaattagggtttccatttggatttcgcaattctggtgcccgatttcttgactccgagagagggaaaaggggaaagcgatgaggatgaggatttgggtattggagatcgtgttcgccatatttctctgtgggaccctctcatgcanccgccaacctcatcataatagggtttctctcttaaccaccacaagtatc

SEQ ID NO: 54310 - DNA, 67 bp, Glycine max
  Clone ID: LIB3109-044-Q1-K1-A7
gaaccaagtatatgtaattaattatgttagctgcttttaacagcttggatatatagatggtttgatt

SEQ ID NO: 54311 - DNA, 374 bp, Glycine max
  Clone ID: LIB3109-044-Q1-K1-A8
ggagaaaagagtgacactaatttcaaatggaaattgctctctcataacagaattcaagaggaggaagaacaagtatataaaaactatatctacatagttatatctctctcttgagatttcaaacgtagagatatggaatggaggaagtgctacttggatgtgatattggtgcccttgggatttctaacaagcattgggtaccatttctggctatggcacaaggttcgaactcagccacacacaaccatcattggcatcaatgctagtggccgtagaaattgggttaatggcatgatgaaggacaatgacaagaaaaacattctggctgttcaatcactaaggaacacaataatgggtgctactctaatggccac

SEQ ID NO: 54312 - DNA, 157 bp, Glycine max
  Clone ID: LIB3109-044-Q1-K1-B1
gggaagtgcaagtgtggcactaactgcacttgcacggactgcacctgtggccattaaggaatatgtatgaaaatgtaattgccatgtgtttggcaatacaaatatccaaataatgtaatcttcgtatgaataaatgtgtgtgctgttatcctactgc

SEQ ID NO: 54313 - DNA, 398 bp, Glycine max
  Clone ID: LIB3109-044-Q1-K1-B10
ggcgatcagcagcatcagctatactactactacgactactaattcctctggaagtgggagcagctccataaatagcaagttctcagtgtcaagcggtgatcagccttatccaaatggacagatcttacctacctctaatttgaggattttcacttttgccgagttgaaggctgcaactaggaatttcaaagctgatacagtgcttggggagggaggttttggaaaagtcttcaagggttggcttgaagaaaaggccacttcaaagggtggaagcggaacagtcattgccgtcaaaaaactcaactctgaaagcttacaaggacttgaggagtggcagtccgaagtaaattttctaggacgtctttctcataccaatcttgttaagctgttgggatact

SEQ ID NO: 54314 - DNA, 195 bp, Glycine max
  Clone ID: LIB3109-044-Q1-K1-B11
aggcgtgcgaacaggtgcgagaggaccaccgacggatgatcgtgagcacgaggacaggccacgttaaagttgttctagtacagagaaaaggagacacattagctactgtgttgcaactgttgcagtggccattaagggaacctcttgctgtgagacaatggtatcgcacatggcaccttggactgctgaagaaga

SEQ ID NO: 54315 - DNA, 409 bp, Glycine max
  Clone ID: LIB3109-044-Q1-K1-B12
gacggctaaaagctaaatatcatcaaagtactcaaattagcatggctgtcatggttgcattcttgaatttgatcatcatcttttcagtagtctctacaacaggcaagtcactgagcttaaactactatgcaaaaacatgccctaatgtggagttcattgttgccaaggcagtaaaggatgccactgctagggacaaaactgttccagcagcaattctgcgaatgcacttccatgattgtttcgttcgggggtgtgatgcctctgtgctgctaaattcaaaaggaaacaacaaagcagaaaaagacgggccaccaaatgtttctttgcatgcattctatgtcattgatgcagcaaagaaagcactagaagcttcatgccctggtgtggtctcttgtgctgacatccttgc

SEQ ID NO: 54316 - DNA, 385 bp, Glycine max
  Clone ID: LIB3109-044-Q1-K1-B2
gaggacaataggtggccaccgtggttgaagccactgctgaaagagagcttctttgttcaatgcaagttgcatgttgattctcacaagagcgaatgcaacatgtattgcttggactgtatgaatgaccctctctgctctctctgcctcgcccaccacaaagatcaccgtgcaatccagattaggaggtcctcataccatgatgtgatcagggtctctgagattcagaaggtgttggacatcactggtgtccaaacctacattatcaacagcgcaagggtggtgtttttgaacgagaggcctcaaccaaagcctggaaaaggtgtcacaaacacttgtgaagtctgcgagcgtagccttcttgattctttccgcttctggtctcttg

SEQ ID NO: 54317 - DNA, 365 bp, Glycine max
  Clone ID: LIB3109-044-Q1-K1-B3
ggcgtaggcaaagagagagagagaaaagcgtgaatcatgtcggacgaagagcatcacttcgattctcaggcggatgcgggagcgtccaagacgtatcctcagcaggctggtaccattcgcaagaatggctacatcgtcatcaaatccaggccttgcaaggttgtagaggtctctacgtcaaagacaggcaagcatggacatgcaaagtgtcactttgatgcaattgatatttttaatgggaaaaagcttgaagatattgttccatcatcccacaactgtgatgttccacatgtgaatcgcactgactatcagcttattgatatctctgaagacggctttgtgagtctgctgactgataatggaaa

SEQ ID NO: 54318 - DNA, 399 bp, Glycine max
  Clone ID: LIB3109-044-Q1-K1-B4
gggctcggagttggtcttatgttgaacgtccgggtttgttacttgttgcagcttttgttatcgcccagctgatagctaccttaattgcagtttatgcaaattggagtttcgctgctattgaagggattggatggggttgggctggtgttgtttggctttacaacctcatcttttatatcccacttgactttatcaagttcataattcgatatgccttgagtggaagggcttgggatcttgttattgaacaaaggattgcttttacaaggaaaaaagattttggaaaggaagaacgtgaacttaaatgggcacatgcacagaggacgcttcacggccttcacccaccagagactaagatgttcaatgaacgtacaagttacacagaacttaatcagatgg

SEQ ID NO: 54319 - DNA, 396 bp, Glycine max
  Clone ID: LIB3109-044-Q1-K1-B5
gagcgaaacagagagtgatttcagtgagtgatcggtgttcacttgatctcatcataatcgtcagcgtcaattgaagaagatgccgatcagaaacatcgccgtcggaaggcctgaagaggcgactcaccccgacacgttgaaggcggctttggctgagttcatctcaaccttcatcttcgtgttcgccggctcaggctccggcatcgcctacaacaagctcaccgacaacggcgctgccacccctgccggcctcatctccgcctccatcgcccatgcattcgccctcttcgtcgccgtctccgtcggcgccaacatctccggcggccacgtcaaccccgccgtcaccttcggcgccttcgtcggcggcaacatcaccttccttcgcggcatcgtcta

SEQ ID NO: 54320 - DNA, 396 bp, Glycine max
  Clone ID: LIB3109-044-Q1-K1-B6
ggaatgcgatttttgtgtgttgaactatcaagctacatcatcggatctatctgaatggggaaagcactatcgcgaattcaccgtgtcagtgtcagatacattcaattcacactctttattgctttcgtctccattagtttcgcattgcattgcttccttatcttttccgccacttcactctttctgttcttttccccgcttccgtttattatatttatataatatataattttttgaagtcgatgcattctgagaatgtaaaacctcgttttagtttttggaaaatcaaatcccctccattcttcttcttattaattaaacctgaaaaactgtttaactgagtggctaggaatacttgaaagtggagtgtaactcattttacacttcacaattttg

SEQ ID NO: 54321 - DNA, 419 bp, Glycine max
  Clone ID: LIB3109-044-Q1-K1-B7
ggagcaaaggttcatcttgaacagaagattgatccaagcatacttggtggtcttgtgcttgaatttagccagaaggtctttgacatgtcaattaagaccagggcacaacagatggagaggatcctccgtgagcctgtatcgattgccaacatctagaagacaacagttgctcctgacaatctgtgttatcatggtttaaagaaagaagtattacattcttgttcattacaaattgtgtggatctatatttttatgggatggaatgccatcattttgcaaataaaagctacctcttcccaacttcttgttatgcttcattgccatttcagtgtatctgaatatattttgatttggtattttgagattttaattagtgggcttctctcgtaatctggatgcctaataatgatgcttcttac

SEQ ID NO: 54322 - DNA, 399 bp, Glycine max; identical to SEQ ID NO: 54318
  Clone ID: LIB3109-044-Q1-K1-B8

SEQ ID NO: 54323 - DNA, 398 bp, Glycine max
  Clone ID: LIB3109-044-Q1-K1-B9
gaagaagcagggtaaacattaaaatcaatcggaaagtggagatgtcacggagaatcgggacaaagctcttcgtccacagagcagctcaagaagttgttctctccattcggactagttacccaagctgatctagctttggatcctataaccaaaaggcccaaagggttcggctttgtctccttcaaatctgaaattgaagcggaaaaggctttgagagccatgaatggcagggtaattttctcttatctatatccactttattaaacaaaaatgtgctaggcatcgtatattggtatgcttggattaactacattgttgttgtaagtgactatgcactgaaggtgtttgttgaaatgaccgattgattggtgattgcaatttataaagatatataatat

SEQ ID NO: 54324 - DNA, 345 bp, Glycine max
  Clone ID: LIB3109-044-Q1-K1-C1
ggccctaaactgtggaatggaaaaagggtgacagtgatactgtgtcatcacacacacatgatgaacgagtttaggtattcatgcaagagcgctcaccaaactcttcaatggatcaacgaaattatacacttcctcacgccttactcttccttaatcaatgctcacgtcgttaatttcttcaaggataggctatgggagaatgttgacgccgaatggatcgaatgcctgcgccgagaatctgttcaaaatcttcttctcataccttctggtgcagtacaggatcaatggccaacttctttgaaggagttcatcctaaaaataaggtctatggtattttgtcaagaa

SEQ ID NO: 54325 - DNA, 381 bp, Glycine max
  Clone ID: LIB3109-044-Q1-K1-C10
ggaaatcgagaagaagaagaagaagaagatggagaagtatcagatctggagcaggagaatagcgttggcagcgtttgcgtttgctctgctgttccaatcggcctcagcagacgacgtcgttgtgctctctgaagataacttcgagaaggaagttggtcaggacagaggagctctcgttgagttctatgctccttggtgtggacactgcaaaaagcttgctccagaatatgaaaagcttggtagcagcttcaagaaagccaaatctggtttaattggcaaggttgactgtgatgagcataagaagttgggcagcaagtatggagtctctgggtacccaacaattcaatggtttccaaaaggatctcttgaagcccaaaagta

SEQ ID NO: 54326 - DNA, 410 bp, Glycine max
  Clone ID: LIB3109-044-Q1-K1-C12
ggtatttggaggaaggaaggtaaaggaagcaaacgcaagagcaagagcaagagcgaaagcggcagagaagatggaaggagaagagggttctcagcagccacagttggtgctcgcggacaagctattccttctccggcaacccgatgtgcaagacattgacaaggttcgctacaaagaggatgtcttcactcatgtcaaggaaaacgatatggtccctctgtacgaaaccctagtcgctgattccgtgttggacttggatcgtgcccttttggactctatgcgcgctaaaattgacgacgagctcaccaagctcgacgaaaagattgctgatgccgaggaaaacttaagagagagtgaaattcgtgaggctcatttggcaaaatccttggttttcattcggattatggaca

SEQ ID NO: 54327 - DNA, 400 bp, Glycine max
  Clone ID: LIB3109-044-Q1-K1-C2
gatcgacatggagggtctcatcaacggcttcatcaacgttgctctcggagctgatggtggcgatcgggaagaacaacaacacgggagagacgaccgtagtagaagctcctgggctgaagtcgtctcccaggatcaacaagatcaccctcttcctcatcaccaacacaaggaacaatatcgtcctcagtacgaggagccccaatctcaaagttcctacaaaccccagaaggtggatgaaggtgaagatggatggcagactgttggtagaaagccttcaaggcatccacataaggttcaaaaggacaactggaacagctataaacgacctgctgatgagcaagaatactctaatgaagttgaagttggtgctgatgtggagccctcaaaagatgaacttact

SEQ ID NO: 54328 - DNA, 396 bp, Glycine max
  Clone ID: LIB3109-044-Q1-K1-C3
gactgagcgtggttattccttcaccacctcagccgagcgggaaattgtaagggatgtgaaagaaaagctgtcttacattgcccttgactacgagcaagaactggagacagccaggaccagctcatccgtcgagaagagctacgagttgcctgatgggcaggtcatcactattggcgatgagcgtttcagatgtccagaggttctgttccaaccatccatgatcggaatggaagcttcaggcattcatgagacaacatacaactccataatgaagtgcgatgttgatatcaggaaggacctttatggtgacattgatctttcaggaggaacaaccatgttccctggtattgctgacagaatgagcaaggaaatctctgcattggcacccagcagcat

SEQ ID NO: 54329 - DNA, 359 bp, Glycine max
  Clone ID: LIB3109-044-Q1-K1-C4
ggttgggagggaagcatgaaggaaatttagtaaagggaagtatactcctgcattgtttaaattcacttcttaagcattcagctgtgctggtgcagcccctaagtaggtttgaccttgatgaatctggaaaggtgattacaatggatatccctttgcccttaaagaattctgatggatcaaatacctatgttggaaaagacttaggattatgtgaaggggaaagttcaaaactgaattctctcctgactgatttggcaaacaagatggaactgtggacggttgggtatattcgcctactgaaattatataatggacgagaatcaaaccagttctcacctgaagaagagaagtatgaatgg

SEQ ID NO: 54330 - DNA, 372 bp, Glycine max
  Clone ID: LIB3109-044-Q1-K1-C5
tagagagggatgagaaagaaattactattgcacaagatgaacgtagtggcatggctccccctctctttggtgaactggtatatgatattgcatacttttcctttaattttaatttatttgtcatcagtttttttttttaaattgttataattatattaactgtatacgtgcttgcttgcaggttgaaattccaaacttagagagcttgaatttatcctcagtcagtatccataagatatggagtgaccaaccactgtcaagtttctgctttcatagcttagtaaaattagttgtgaaaggttgtgataatttgagatatttatgttcattgtctgtggctagtggtttgaagaaactgaaaggactcttcgt

SEQ ID NO: 54331 - DNA, 431 bp, Glycine max
  Clone ID: LIB3109-044-Q1-K1-C6
gataaggatgcagccagtatcttgggcaaactcacttctgaagcaggcaatgaagagtgggatgatagcttactgaccaaagaggaagtagaggcaagattgcagaggaaggtggaagcaatcatcaaaagagaaagagcaatggcatttgcatattcacatcagctatggaaagccactccgaaatcaactcacaccccgatgacagatacacgatccagtggattcccttggtggtggaactggttggaaagacaaacacctgcagcaactccacaagaaagacaaagcttgaagaattttcaaatcacaccttcaagaccatactcagagcaaaagactagtccaagacctggctccagcactcaaaggcagccgcagtcgcagcagcagcagcctcatgtttcctttgataatatggacacttccac

SEQ ID NO: 54332 - DNA, 375 bp, Glycine max
  Clone ID: LIB3109-044-Q1-K1-C7
ggcacaaaaatacaatacaaaacaaaacagagcaaagagagagtgtgtgaaaagtgaaacaaaaaacagaacaacaatggcgacacttaaggttcctcagcctcttccccccgttgcagatgattgtgagcagctccgaaaagccttctcaggttggggaactaacgaggagctgattgtatcgatcttggctcataggaatgctgctcagaggaagcttatcagagaaacttatgcccagacctatggagaagatctcctcaaggccttggacaaagaactcacgagtgattttgagaggctggttcatctttggacacttgattctgctgaacgtgatgcatttttggcaaacgaagcgactaaaaaatggac

SEQ ID NO: 54333 - DNA, 390 bp, Glycine max
  Clone ID: LIB3109-044-Q1-K1-C8
ggaggaaaaggaaaggaaagggaagccaaagcgaaaccctaaccctaacggagagatggcggagcacttggcatcgatattcgggacggagaaggacagggtgaactgtccgttctacttcaagatcggcgcgtgcaggcacggcgaccggtgctcccggcttcacacgaagcccacaattagcccaacgttggttctgtcgaacatgtaccagaggcccgacatgaacatgaacatcatcaccaaccccgatcagccccagccccaatctctcgaccccgataaggtccaggatcacttcgacgacttctacgaagatctctttgaggagcttagcaagtacgggcccattcagagcttgaatatttgcgacaacctcgccgatcatat

SEQ ID NO: 54334 - DNA, 402 bp, Glycine max
  Clone ID: LIB3109-044-Q1-K1-C9
gaatagaatatgaaaaagaaaaaaaagattctaaagaaatataactaatattctttagaataatcaaaaagaatattaaattcaaataaattttagatagaaaaaagacttaaaaaggaggatttgaaatgcgagatctaaaaacatatctttccgtggcaccagtagtaagtactctatggttcggggctttggcgggtctcttgatagagatcaatcgtttttttccagatgcattgatattcccttttttttcattctagttattgacacggaaaggggtgaagaagattatagatccaattaagtattaaatatatgtaattaatatgtaattaatctcctcttctttatttcgtcttttatttcttcttttttttacaattgtaatagaataagtca

SEQ ID NO: 54335 - DNA, 367 bp, Glycine max
  Clone ID: LIB3109-044-Q1-K1-D1
ggagagaagaagaggttgttgggttgagttgggtttggattggatttctaatctaatctatacctttctttttcctatgcttttaaggcacaaatccttctcccttctctcttctttcttcttcttctcctgacccttattattattccttgcccttaccctttaggcaagggaaggaagaaagaataactatattattatctttattgtaatctatctttttattataattataattataattattgttgttattattccttaaatatggattcgccgtgtctctccaacgattcggtttctggattcaaagacaaggagtcaatggttgacccctttttggtcgaggctcttcagaaccctcgtc

SEQ ID NO: 54336 - DNA, 406 bp, Glycine max
  Clone ID: LIB3109-044-Q1-K1-D11
ggagactcgaagtgtgaagcactgagcagttgaggaaatgggaacccttgggagagcgatctacagcgttggtaactggattcgagaaactggacaggccattgatcgtctcggttcccgtcttcagggcggttactacttccaagagcagctctctaggcatcgaactctgatgaacatatttgataaggctcctgttgttgataaggatgtatttgttgcgccaagcgcctccgtcattggagacgttcaacttggaagaggatcatccatttggtatggagttgtcttgagaggtgatgttaacatcatcagagttggaaatggaactaacattcaggacaactctctggtgcatgttgcaaagtcaaatttaagtgggaaggtgttgcctacaattattggg

SEQ ID NO: 54337 - DNA, 399 bp, Glycine max
  Clone ID: LIB3109-044-Q1-K1-D12
gatggagcgacgggacaaggaaagacttctcaagattcgaacccttggaaatatccgtttaattggtgagctgttgaagcaaaaaatggttcctgaaaagattgttcatcacattgttcaggagcttttaggacctccagatatcaaggtctgtccagctgaggaaaatgttgaagccatatgtcagtttttcaacacaattggtaagcagcttgatgaaagcccaaaatcacggcgtataaatgatatgtactttatccggttgaaagaattgagcaccaacccccaacttgcaccacggctgcggtttatggttcgtgatgttctagatttgcgttctaataactggattccaagacgtgaagaagtgaaagccaaaaccatcacttgaattcattc

SEQ ID NO: 54338 - DNA, 393 bp, Glycine max
  Clone ID: LIB3109-044-Q1-K1-D2
ggagtaagggcggtgcagtgcttcaaacccctttttctcttctcatttcctttcatcactctcttgcttcttttcttcttctcgcaattttccattttcacacttttagcaacatcttttaatggcgtcccaaatccgtgagtggtctggaatcaatacattcgcacctgctacccagactaagttgcttgaactcttgggaaatcttaaacaagagaatgtgaactccttgactatacttgtgatgggaaaaggaggtgttggaaaatcttcaactgtgaactccatcattggggaaagagtggtttcgattagtcctttccagtcggaagggccaagacctgtgatggtgtcacgatcaagggctggttttacattgaacattattgacac

SEQ ID NO: 54339 - DNA, 392 bp, Glycine max
  Clone ID: LIB3109-044-Q1-K1-D4
ggtggaagagaaagaaaagaaaacagaggacagcgaggagtgagagagaacaaaagacgaatccagagagagaggagaagaaaagaaagaaaaaggaagtggctgctaacaaggatatactgtgatgccgactctaagaattcatggatatgccttgcttgtttcatcttgtttcatcatcctcatagcagcctcacaaacagatccttcagaagtaaatgcactgatagacatcaagaaaagtttgattgatcccatgggcaatatgaggaactggaattcgggagatccgtgtatggcaaactgggcaggggtttggtgctctgatagggaggaggctaatggttacttccatgtccaaaagctctacttaatgactatgaatctctcgg

SEQ ID NO: 54340 - DNA, 408 bp, Glycine max
  unsure (1)..(408): unsure at all n locations
  Clone ID: LIB3109-044-Q1-K1-D5
ggagtatcaaatatatagcaagacatagcaagacaagatatgagggagaaaagaaaagggtggtgaatgtgaaaatagagggagcatgtggaatggttgtggtcactattatatatgttgtctcttacgctttgcatgtgactttctttctttctttatatcctttatatattaagtatatgctgcaatatatttaattaaagagagaagtaacatcaaggtgcagagagaggaattgaagcatgggaagagggaaggtggttctggagagaatacagaacaaaatcaatcgccaagtaaccttctcaaagcgcagaaatggtttgctcaagaaagctttcgagctatctgntctatgcgatgctgaaatcgctctcgtcatcttctccaaccgtggcaagctttttc

SEQ ID NO: 54341 - DNA, 430 bp, Glycine max
  Clone ID: LIB3109-044-Q1-K1-D8
ggaagaaaggcagagttattgccattgcctctgcctcttgcaacaccaaactgatacacacttaataatattatagtaaaaattagccaccaaagtacactaaccccttttttcatacaactcaatagctggattggagcaaggtgaaagtaaaatcatttgcaaccaatgccgttgaacatatttcaggacaaagatggattgccacggattatattgactgagccaaagggttcatcagctgaggttcttctttatggagggcagattatttcttggaagaatcatcgaaaggaagaacttctttttatgagcagtgaggctaacaagaaacagcataaagcaatcagaggaggaatatcagcttgcctagcacggtttggtgatctcagttcacttgaacaacatggatttgcaagaaacaggatgt

SEQ ID NO: 54342 - DNA, 420 bp, Glycine max
  Clone ID: LIB3109-044-Q1-K1-D9
ggaaggtgatgatggaattggaagtcgacgagaacgacttgaaagccgccggtgctgagctcttcgtcgacggtggtcggcgcggcattcgcatcaatggctgggtgatcgagactcggaggcactccatactcaactcttccacactccaagagtgggaacagaatctcgatacgtctcatttaccagaaatggtttttggggaaaacactttgattctaaaacacttgagcagtggcaccaacattcattttaatgcatttgatgctctacgtggctggaaacaggaagcattgccgccagttgaagttcctgcggcggctaaatggaaatttagaagcaagccctctcagcaagtaatacttgattacgactatacatttacaacaccttattgtggaagtggcactatggagattg

SEQ ID NO: 54343 - DNA, 405 bp, Glycine max
  Clone ID: LIB3109-044-Q1-K1-E1
cagtgaaagccacctggagatggtgaaagctggtgagaaatgggcaaaagacacagctggttctttcactcttgtgggtactctcatcactaccatcatgttcgctgcggctttcactgtccccggtggaaaccatcaagaaactggagcacccatcttcttacacgatcacatattcactttgtttatcatagcagatgcaatatctctctttacttcttccacttcagttctgatcttcattgggatcctcacgtcgcgttatgctgagaaggatttcctcaagacactgccgttgaagttactttgtggccttgtgacccttttcttgtcagtggtggcaatgatggtagcattttgtgcttcgcttgctatgatgctgaagggatatcaacgactcataat

SEQ ID NO: 54344 - DNA, 411 bp, Glycine max
  Clone ID: LIB3109-044-Q1-K1-E10
ggggattaggctgtacatgcaagagattgacactaaggcaggcaaagcaaattccacaggattggtgatgcttagtactagaaacattggaagttaccaatcaatccaagaaatgatgaaggctgattccaaatctccttgggggaatcatatttctttcttgcacgtacccatacctaagctaagccaagccagcctatccaacccccttgaatttgtttggagagcccaaaaaataatcaagaggaagagaaagtctttcactgattttctcattgaatggcttttagatatggagctgaaattaagaggacacgaggccgtggctaaacatatctatgggacactaagagactcaagtgttgtcgtatccaacttgattggaccaatagaacctatggctttggcaaa

SEQ ID NO: 54345 - DNA, 409 bp, Glycine max
  Clone ID: LIB3109-044-Q1-K1-E11
ggtggaagtattcgcagaactttgtttcccaatttccattgcctccgcttccacctcgcaaccatgatcatcccggagaagaaccgcaaggagatctgcaaatacctcttccaagagggagtttgcttcgcgaagaaggacttcaatttggccaagcaccctgagatcgacgtgccgaatctgcaggtgattaagctgatgcagagtttcaagtctcgcgagtacgtgagagaaacttttgcttggatgcactattactggttcctcaccaacgatggcatcgagtttctcagaacttaccttaaccttccttccgaaattgtccctgctactttgaagaagcaagccaagccacctggcaggccctttggaggcccatccggtgatcgccctagaggtccaccacgct

SEQ ID NO: 54346 - DNA, 305 bp, Glycine max
  Clone ID: LIB3109-044-Q1-K1-E12
tgagataaatggggaagtcaatactcaaaaatctgaagttagctcggaagtgctcaaggagtcccttgctgagaaggatagtgatgaccacaaagttcccgagaatggatgtgctacaaaaaactggagatgccccaaagggtgctaaaccagttgttcctgagagcaagattgtagccaatggggttgtttctaatggttgctaagctctactgtgtttgaaggaggcggtcctatccatttcagtggcatatattgggtcttagaaagtatttatcagaaaacttgtacccgcctgatttatc

SEQ ID NO: 54347 - DNA, 412 bp, Glycine max
  Clone ID: LIB3109-044-Q1-K1-E2
gtctgcggatgatggtaaaagtgttgttatgaagggtgtgactcatggtgcttgtgattacttaattaagcctgttcgcattgaggctttgaagaacatatggcagcacgtggttcggaagaggaagaatgagtggaaagacgcggagtaatcagggagtgctgaggaaggagatcggcaaccaagggcttctgacgaagcagattactcttcctcagcgaatgaaggcagttggagaaactcaaagaagagaagggatgaggaagaggaggcagaggatagagatgacacatccacactaaagaagccacgggttgtttggtccgtggagctccatcaacagtttgtggctgctgtggatcaactgggaattgacaaggctgttcctaaaaaaattctggaattgatgaat

SEQ ID NO: 54348 - DNA, 375 bp, Glycine max
  Clone ID: LIB3109-044-Q1-K1-E3
gcgagcaggagaaggaacgagcccgcagagaccgtctctaccacatgaaccgctcaaaccctaaccaacagcgccgcgaagccgccgtcttcaaatcctccgtggatatccaacccgagtggaacatgcacgaccagatccccttcagcaccttctccaagctctccttcaccgttcccgaacccgaagacctcctcctctgcggcgccctcgagtattacgaccgcacctacgatcggatcactcccaaaaacgaacgccgcctcgaacgcttcaagaatcggaacttcttcaaagtcaccaccaccgacgaccccgtcattcgcagactcgccaacgaggacaaagccaccgttttcgccaccgacacgattc

SEQ ID NO: 54349 - DNA, 402 bp, Glycine max
  Clone ID: LIB3109-044-Q1-K1-E4
gatgcacttgccattgcagcagatattggatacccagttgttgttcgtccttcttatgttttgggtggtcgagcaatggagattgtatatagcgataataaactggtgacttaccttgaaaatgctgttgaggtggatccagaacgccctgtattaattgacaagtatttatctgatgcctgtgagattgatgttgatgcactggctgactcacaaggtaatgtagtcattggtgggataatggagcacattgaacaggctgggatacattctggtgactctgcctgctctattcccaccagaactgttcctgcttcttgcttggagacaatcaagtcgtggacagtaaacttggctaaacaattgaatgtttgtgggctcatgaattgtcagtatgcaata

SEQ ID NO: 54350 - DNA, 425 bp, Glycine max
  unsure (1)..(425): unsure at all n locations
  Clone ID: LIB3109-044-Q1-K1-E5
gaagccaaagacggtgcaaggccaagatcttcttcagctccttcataggtgcatgagtttcagattgaattggtttttgggcaccaaatagcaatggccacggtggagaggatcctgttggccctgcagaatgagggtgcaggaggagaatccttgttggggtcaataaaaattgctgtgatgcccatagttaaagtgttcaccatgtgttccttgggactccttatggcttccaagtatgttaacatcttgcctgcttctggaagaaagcttttgaatgggctggtctttacactcttgctaccttgcttgattttctcccaattgggacaagctgttactttggagaagatgcttgcttggtggtttattcctatgaatggtgtcctgagttccataacaagctcactcattgngtttggtgg

SEQ ID NO: 54351 - DNA, 350 bp, Glycine max
  Clone ID: LIB3109-044-Q1-K1-E6
ggtgagtgtgtgagagagagagcgagcagtttcagacacagagagaggggtttgggattggagggattgacgctgcgtctcttcctcttctctttcgatccatccctcattcctaatcctccaatccaaccacctcagcctcacactcacatatacacatatctgaacgcgtatcgtccctcctatggcttcaaagcgcatcctcaaggagctcaaggacttgcagaaagacccaccaacttcttgcagcgctggtccagtagctgaggacatgttccattggcaagcaacaataatgggtcctgctgatagtccttatgctggaggtgtattcctagtcactattcact

SEQ ID NO: 54352 - DNA, 399 bp, Glycine max
  Clone ID: LIB3109-044-Q1-K1-E9
gacggcaaggactaccaggagccggcgccggcgccgctggttgacccgacggagtttacgtcatggtcgttttacagagcagggatagcagagtttgtggccacttttctgtttctctacatcaccgtcttaaccgttatgggagtcgccggggctaagtctaagtgtagtaccgttgggattcaaggaatcgcttgggccttcggtggcatgatcttcgccctcgtttactgcaccgctggcatctcagggggacacataaacccggcggtgacatttgggctgtttttggcgaggaagttgtcgttgcccagggcgattttctacatcgtgatgcaatgcttgggtgctatttgtggcgctggcgtggtgaagggtttcgaggggaaaacaaaatac

SEQ ID NO: 54353 - DNA, 359 bp, Glycine max
  Clone ID: LIB3109-044-Q1-K1-F1
ggcacagattagggtaatccaacttccaaaccctaaaagtctacgcttttaattttctgttgttttctctctcaaatcggtgctcccttcggcggcgcgtgagggtttccagcggcgcgtgagggtgttattcgcgcgttattccaagttccccgctgacctatgctttgtccgacccacattggagagttcacgccggagagaaggcggaatctcactggacggccgtgatttggcacctccatggcttccgccgtccttgctaatcggaacgaacctaattggcaacggcatagaggcggtggagctggattcatgggaaaaacacctttctctaaccctaattctaaattagcgaa

SEQ ID NO: 54354 - DNA, 416 bp, Glycine max
  Clone ID: LIB3109-044-Q1-K1-F10
ggggagaaggaagaagattgacagagagagaggaaggagcgcgaaaagactaaattgaccttggatcttcgtctttcctctctctccgattcgtttttcgttggtcttctaaaagcttcttccaccatgaacagcaaggccaacgtttccaaagagctcaacgccaagcacaagaagatactggaaggacttcttaaattaccagagaatagggaatgtgctgactgcaaagctaaaggtccaagatgggctagtgtaaatcttggcatctttatatgcatgcagtgttcaggaatacatcgaagtttgggggtacatatatcaaaggttcgttctgcaaccctggacacttggcttccagagcaagttgcattcattcaatcaatgggaaacgagaaagcaaattgtttctggga

SEQ ID NO: 54355 - DNA, 347 bp, Glycine max
  Clone ID: LIB3109-044-Q1-K1-F11
ggaagaaaaaaggaagggtaagtaaattgggaatggtggtggtagtgccaggtgtctgtctgaggagaaaatagaataaaaagctatgaaattttggcacaaggtctgattgtagaattgaagaagatgactggggggggtatcactatgcaatcgacgccgggaagctcaggatacttggatttgtatccagagcggaagatgtcctttttcaaaaatccttacattctcggactggctgctgtcgccggcatcggtggtctcctcttcggctacgacactggtgtgatatcaagggttcttttatacattaaagatgattttgaagaagttagaaacagcaatct

SEQ ID NO: 54356 - DNA, 315 bp, Glycine max
  Clone ID: LIB3109-044-Q1-K1-F12
aggcagccaaagaaaagaaaatcctcaattttctgagcagccaaacactctctctctgtctctcgaaaattctcagtttgcagagaaaatctgaatcatgtcgtggcaagcgtatgtcgacgatcaccttctgtgtgacatcgaaggtaaccacctcactcacgctgctatcatcggccaagacggcagcgtttgggctcagagtaccgacttccctcagttcaaacctgaggagataactgccatcatgaatgactttaatgagcctggatcacttgctccaactggattggatctcggtggcaccaaatatat

SEQ ID NO: 54357 - DNA, 373 bp, Glycine max
  Clone ID: LIB3109-044-Q1-K1-F2
ggcgtcggaaggaagagaagatgagtgtgaatttgatggagaaagtgagcgcactgggagagcgcctgaaaatcggaggcgtggaagtggggagaaagatgagcgaggggatgagctccatgagtttcaagctcaaggagttcttccagcctgggcccaatcaggccgacaagcttgtggaggacgctacttccgaggccctggacgagcccgaatgggccctcaatctcgatctctgcgacctcgtcaacaccgacaagctcaactgcgtcgaactcgtccgcggaatcaagaagcggatcattctcaagagccctagggttcagtacctcgcccttgtcctcctcgaaaccctagtcaagaactgcgagaa

SEQ ID NO: 54358 - DNA, 386 bp, Glycine max
  Clone ID: LIB3109-044-Q1-K1-F3
gaaagagcaaggaccagagataacaatttgttgggcaaatttgagctatctggcattcctcctgcacccaggggtgttcctcagattacagtgtgctttgacattgatgccaatggtatcttgaatgtctctgccgaagataaaaccactggccagaaaaataagatcactatcaccaatgacaagggtagattgtcaaaggaagatattgagaagatggttcaagaggctgagaagtacaagtctgaggatgaagagcacaagaagaaggttgaggccaaaaacgctttggaaaactatgcatacaacatgaggaacaccgtgaaagatgacaagattggtgagaaacttgacccggctgacaagaagaagattgaggatgccat

SEQ ID NO: 54359 - DNA, 424 bp, Glycine max
  Clone ID: LIB3109-044-Q1-K1-F4
ggactcacaatatatcaaactatattgttggactacttggcttcaaccaagttctcattagaatccaagatgatggagaaggaaagagaagatgagattgaggacatgtcaatgtcacctccatctattggctccatgcagattgcagggagcaatggctttggtcacagcatggagttcatgtctcaggcataccttccaaatatgtacacagagattgacataaaagttcaggattcaagtttcaaccaagatccccccctccccatttatctcaagtttgaagatgtagagttcagggtaatagatagccaatcggcttccaataaccctgtgaagacaatgatgtcaaaagtaggcacccaacaccacgtggaggaagatagatgcaagaaaattttgaagagtatcacaggaagcattg

SEQ ID NO: 54360 - DNA, 362 bp, Glycine max
  Clone ID: LIB3109-044-Q1-K1-F5
gtcctagtcaaagtgttgatggtattctgccagtcagtgccaactttgtcagcaagaaccagaaaatgaatctcaggaccataatcatcattgctttatcttcctttgtactcttgctggttttggtgggagcattttcaattattttgaaatggaggaagactgggagaccctcaagtgctgttggccctgcattcacatcatctctaaacaagagatcaggcttggggtctatgttgtcaagtagtattacaagctcgacatcaatttcacttatgtccacaatggctacttcccttctctctgttaaaacattttcactttctgagcttgagaaagcaacagataagtttagttcaaag

SEQ ID NO: 54361 - DNA, 409 bp, Glycine max
  Clone ID: LIB3109-044-Q1-K1-F9
gatgatagggtttggagggaacagttgcagtgagctttctgagatggacatgatgaacatggaaactaataataggaagtttctttctctgcctctcagtaacaacaacaacaactctggtaatgcccaaatgcgcagtagtagcgataatagaagggtacctgtcactagcaatagcaatatcgctcaggaacatcactacagccaccacaaccccaccgacacttgcagtgtgagggataaaatcatggcacaccctctttttcctcgtctcttgtcctcttaccttaattgcctcaaggtgatgatgaactctaaattgttctccatattaacataaattacacacatatctttccctttcttcctaacacaaattgtccttatatagaatatgtaaggttggttt

SEQ ID NO: 54362 - DNA, 279 bp, Glycine max
  Clone ID: LIB3109-044-Q1-K1-G1
gaaagaggggtgatcatgaaggccactggtgttaggcacacttgggatgcttggtatatggcaggtacacatcggtgtagcgctgagtacagctggagttttccttggattcgaggggactttctattgatcaggcctatggagagccactggtcgaaaaaggattatatcggtcttcgactgcaaagggttatttataaagggaggatttgataataaggagtagctcctgtatgaaaccgaagttaagcaaaagctgtcaatggaatagatgcgggc

SEQ ID NO: 54363 - DNA, 414 bp, Glycine max
  Clone ID: LIB3109-044-Q1-K1-G10
gaccacaagaagaagaagaagaagaagaagaagaagaaagagaagcaaggagaaagagaagggttagaaggcgaagaagcatggcttcactcaagaagaagaaaccctattacccgcttccgttaattcctatctattactacttcttattcaaagggtgatatgatcttcttcttccaagagtctcatgcatgctactttcttctctcttctcggggaattgaagcgttgtggtccgattgtttgctagatcaagcaaattaacctgtatactggtttatatatcttcaccttgcacctttctctctctctctctatctctctctctctatatatatatatgggtttaatctcttactttctttatcttttcactttttttcagttttggtttgatttaattacgtgattaaa

SEQ ID NO: 54364 - DNA, 401 bp, Glycine max
  Clone ID: LIB3109-044-Q1-K1-G11
ggtagagaaagagagagaaagatgtcgaagcgtggtcgtggtggttcggcggggaacaagttccgcatgtcgctgggtcttccagtggcggcgacggtgaactgcgccgacaacacgggggcgaagaacctctacatcatttcggtgaaagggatcaaaggccgtttgaaccgtcttccctcggcctgcgttggcgacatggtggtggccaccgtgaagaagggaaaacctgatctgaggaagaaggtcttgccagctgtcatcgttcgccagcgcaagccatggcgccgaaaggacggcgtctacatgtacttcgaagataatgctggtgttattgtcaatcccaagggagaaatgaaaggttctgctatcactggtcccattggaaaagagtgtgctga

SEQ ID NO: 54365 - DNA, 351 bp, Glycine max
  Clone ID: LIB3109-044-Q1-K1-G12
ggcttcgaaagagagagaaagatgacgaggcgtgggcatggtgactcggcggagagacaagttccgcatgtcgctgggtcttccagtggcggcaactgagaactgcccagaaaacacttgggctaagaacctctacatcatatctgtgaaacggatcataggccatcttaatcgtctaaccttggcctgcgttggtcatatggtgtgtgtcctccgtgaacaaggtacaacctcgatccgatgatgatcgtcttgccagctgtcatactttctccgcgcatgtcatggcacacaatggaccgcgtgttcatgtactttgactataatgctgtagatattgccaatcccata

SEQ ID NO: 54366 - DNA, 403 bp, Glycine max
  Clone ID: LIB3109-044-Q1-K1-G2
gacagcgaaacagagagtgatttcagtgagtgatcggtgttcacttgatctcatcataatcgtcagcgtcaattgaagaagatgccgatcagaaacatcgccgtcggaaggcctgaagaggcgactcaccccgacacgttgaaggcggctttggctgagttcatctcaaccttcatcttcgtgttcgccggctcaggctccggcatcgcctacaacaagctcaccgacaacggcgctgccacccctgccggcctcatctgcgcctccatcgtccatgcattcgccctcttcgtcgccgtctccgtcggcgccaacatctccggcggccacgtcaaccccgacgtcaccttcggcgccttcgtcggcggcaacatcaccttacttcgcggcatcgtctacgtca

SEQ ID NO: 54367 - DNA, 432 bp, Glycine max
  Clone ID: LIB3109-044-Q1-K1-G3
ggtgttaagaaatttaagtgaggagctagagaatgatgatgaagtctgctatgtgtgcagtggtggttgtagcacttcttcttctggcggaggtggggcccatggctgaggctgtgacatgcaccccaacagagttgagtccgtgtcttccagcaatcacttccggtgctaaaccttccaatgcttgttgcacgaagctgaagcagcaaaaaccatgcttatgtggctacctcaaaaacgctagcttgaagcagtatgttaactctcctaatgcccgaaaaaccgttgcttcttgtgggattccctttccaacttgttaattaattaagccttcttataattaaagtgtgggatatatatatatatataaattaaacttatatttattatttactctatatatgtcactctacggttgtgtgatatattata

SEQ ID NO: 54368 - DNA, 157 bp, Glycine max
  Clone ID: LIB3109-044-Q1-K1-G4
cgagcaagctgcattctacagataatgcctgccactggggattgagatcatctgaagatgaactcaacaggtttatatatagaactctataccgcttacctactcagatcaagcctatatcttaaggaaatctgatcctccaaccaaatgcactggt

SEQ ID NO: 54369 - DNA, 407 bp, Glycine max
  unsure (1)..(407): unsure at all n locations
  Clone ID: LIB3109-044-Q1-K1-G5
gggggtgatgatgatgaccactattttagtaactcttgttatgcttcttatatggcagatacacatcattgtagtgctgagttttgctgtagtcttcctgggattggagttgactttcttttcatcagttctgtggagtgtaacggatggaagttggattatattggtctttgctgtaataatgttttttataatgtttgtatggaattatgggagtaagctcaagtatgaaactgaagtaaagcaaaagctgtcaatggatttgatgcgagaattaggctgcaatcttgggacaatacgagctcctgggattggtttgctctataatgagttggtcaaaggaattccaggcatttttgggcattttctaaccacacttncagcagtacactctatgatcatatttg

SEQ ID NO: 54370 - DNA, 343 bp, Glycine max
  Clone ID: LIB3109-044-Q1-K1-G7
gatacaaaaccctgaagaaagacacagccattgtttgtttactttccattgattgagcgaaagctttgttttttctgcgatcattttccattgggtggaagaaagtctcaacctttagtcgaaagagcaaggatctgagtgagtgagcgatcatgtgtggtggtgcgattatctccgacttcattccagcgggtcccgccggcggggcgcagcgcgtgaccgccgacatcctgtggccgaatttgaggaagcggttctcgaagtcgctgctggacgatgatttcgaggcagggttcagagaattcgaggatgactcggaaatcgaggatgtcgatgatgaaga

SEQ ID NO: 54371 - DNA, 413 bp, Glycine max
  Clone ID: LIB3109-044-Q1-K1-G9
gagctgaaatcgagaagaagaagaagaagaggatggagaagtatcagatctggagcaggagaatagcgttggcagcgtttgcgtttgctctgctgttccaatcggcctcagcagacgacgtcgttgtgctctctgaagataacttcgagaaggaagttggtcaggacagaggagctctcgttgagttctatgctccttggtgtggacactgcaaaaagcttgctccagaatatgaaaagcttggtagcagcttcaagaaagccaaatctgttttaattggcaaggttgactgtgatgagcataagagtttgtgcagcaagtatggagtctctgggtacccaacaattcagtggtttccaaaaggatctcttgaagccaaaaagtatgaagggccacgcactgctgaatcactt

SEQ ID NO: 54372 - DNA, 335 bp, Glycine max
  Clone ID: LIB3109-044-Q1-K1-H1
cgcctcccttcggatggtcgacgacgacggatagtggttacgagagattattattataacgtgattcgggaatgttgctgcaatagagcgggagacagaattcatagaacctcgcaaacaatgggctctgacaagtaacaccggatcgggattagtgatatccagaactgacccgattctggattccctttccgacacatcaaatgacgctactctgttctacgaacttcaacgaacatagtccgagctgctcctccaggcagagatacactacgtgccatttcaaactgtgtggatggcctctaacccatcatccaaacccgacttgacccgac

SEQ ID NO: 54373 - DNA, 400 bp, Glycine max
  Clone ID: LIB3109-044-Q1-K1-H10
ggaagctaaagtcaacaacacatagcagaggatagatagtttgttcgttgcgttgccatgtcggcgtcggagattgttcgggaactggattcgctgaaggacgaaaagaccataattgagcagaaaatctctgcgcttgaagctcaactcagagagattaatctccaaaacgacgccgcaccacccaacggattgacgcaggacatgattcacagatacagtcgccaccttgtgcttgcttcctttggtgttcaagggcaggcaaatctgttgaagtcttcaattttagttgtgggagctggagggttgggtgctcctgcattgttatactttgcagcttctggtgttgggcgcttgggagttattgatcatgacgtggatgagctgaataatatgcacc

SEQ ID NO: 54374 - DNA, 407 bp, Glycine max
  Clone ID: LIB3109-044-Q1-K1-H11
gatagtagcagtgcttagtggcgcagaaaaataaacctaatttaccaaattcagacacagattctcattcctcaagatcttcttcttatttcttgtctcaaattaatcctcaaactttcctctctgtgtctctctaacaatgtgctccatttcctcactccaccaaaatcatgtctaaggatattgctaacatgaaggactcttggtttttcgacaataactttaatggtctctcagacgagatttttgatgatgtcattaacttttttgatttcccgctggaagacgtggaagctaatggcgtcgaagaagactgggatgctcaattaaaatgccttgaagacccgcgtgttgatggttatacagcatcatcagctgggttgtgtgccaaaactcaaaatgaaaag

SEQ ID NO: 54375 - DNA, 381 bp, Glycine max
  Clone ID: LIB3109-044-Q1-K1-H2
gggcaagctgcggactacaaataatgccggccggtgtggtttgtgttcatctgaggatgaacttaacagtgttatatatagtttacaataccgcatacagcatgagagcattcctttgactgaggaaaaacaaatcctccgagaaatcaaacagcttgaggggacaagggagaaagttattgctaatgctgcaatgagggccaaattacaggaatctatggggcaaaaagaagccattcaagatcaggttaagcttattggtggggatttggatggagtgaagaaagagagagaagcaattcggtccaaaatcaagcaaattgatgatgcactgaaagccatagacaaggatatccagtctctacaggaagaactgacagc

SEQ ID NO: 54376 - DNA, 418 bp, Glycine max
  unsure (1)..(418): unsure at all n locations
  Clone ID: LIB3109-044-Q1-K1-H3
ggttctagtgtgtgattgtttgttgttgtaactcgttcttcttcttttgttgttctgtgtttgtgtttgttttttctctcacctgaaaatgtcttgctgcggtggtaactgtggttgcggaagctcctgcaagtgcggcaacggctgcggaggctgcaagatgtacccagacttgagctacactgagtcaaccaccaccgagaccttggtcatgggagtggcacctgttaaggctcaatttgagggtgctgaaatgggtgtgcccgctgagaacgatggctgcaaatgtggaccaaactgctcctgcaacccctgcacttgcaagtgaagtgttgggagagcaagcttcaagcagagatagcccttaattaagaataatgantaactattaatgtgtagctaaaaacttaatgattat

SEQ ID NO: 54377 - DNA, 352 bp, Glycine max
  Clone ID: LIB3109-044-Q1-K1-H4
taagagggggctcacaatatatcagactatattgttgcactacttggcttcaaccaaggtcttattagaatgcaagatgatggagaaggaaagagaagatgagatagaggacatgtcaatgtcacctccatctattggctccatgcagattgcaaggagcaatggcttcggtcacagcatggaggttatgtctcaggcataccttacaaatatgtacacagagattggcataaaagttcaagagtgaagctgcaaccaagatcccgccctgccgatttatctcatgtttgaagatgtagagttcagggtaatagatagcccatcggcttccaataaccctgtgaagacaatg

SEQ ID NO: 54378 - DNA, 377 bp, Glycine max
  Clone ID: LIB3109-044-Q1-K1-H5
ggtaacaagagattattattatcttgtgattcgtgaatggtgctgcagtagtgcgggagacagagcacagagaaccaagcaaacaatgggtactgacaagtcaaaccgggtcgggttagtgatatccagaactgacccgattcgggatttcctttccgacgcatcaaaagacgcgactctctccgacgaacttcaacgaacatcctccgatctgctcctccagtcggagataccctacgtgccatttcgcactgtgtggatggcctctgacccatcaaccagacccgacttgacccgactcttttcgggcacccgcttcatcttctccagccctaagcccagggaaaagagtgaagaattgaaagcgaagctgaaaa

SEQ ID NO: 54379 - DNA, 375 bp, Glycine max
  Clone ID: LIB3109-044-Q1-K1-H6
ggagcaagagtgaacagcgaagagaatggctcccaagggtttaatctttttggctgtgttatgcttctcagcactgtcactgagtcgttgtcttgcggaggataatggacttgttatgaacttctacaaggaatcatgccctcaggctgaagacatcatcacagaacaagtcaagcttctctacaagcgccacaagaacactgctttctcctggctcagaaacatcttccatgactgtgctgttcagagttgtgatgcttcactgttgctggactccacaagaaggagcttgtctgagaaggaaacagatagaagctttgggttgagaaatttcaggtacattgagaccatcaaagaagctttggaaagggaatg

SEQ ID NO: 54380 - DNA, 232 bp, Glycine max
  Clone ID: LIB3109-044-Q1-K1-H7
acacagactatgaaaaagggagaatgaacagcgggtagcatcttttttctgaatcagctcttttttataccctcagttagctctcatagagctattgactctttcagcagcttactaattaacactcattacattcgacgtgtttggctgcttcactcggttgctgtatgtcattctcactaaaaagctccatctcatctcacattcacttaatttctggtaggattatcgc

SEQ ID NO: 54381 - DNA, 363 bp, Glycine max
  Clone ID: LIB3109-044-Q1-K1-H8
aacatgattgagaggtccacaaaccttgactggtacaagggtcctactctgctagatgcacttgaccagatctctgagcccaagaggccttctgacaagcccctcaggctaccccttcaggatgtgtacaagattggaggaattggaactgtgcctgtgggacgggttgagactggtgtcttgaagcctggaatggtggtgacttttgcaccaactggactgacaaccgaagttaagtctgtggaaatgcaccatgaagctctcacagaggctcttcccggtgataatgttggattcaatgttaagaatgctgctgttaaagatctcaagcgtggttatgttgcctcgaactcaaaggatgat

SEQ ID NO: 54382 - DNA, 413 bp, Glycine max
  Clone ID: LIB3109-044-Q1-K1-H9
ggagggagagaggatccaaatccaagtacggttgggttggagagaaaatgcgtccctgctgaaaacaccaaaccctaaaacgcgaaaagggttctaagaatttgcgaaggaaagagctagcggagatggagattcactacagtaacagctatttcgagaggcgccccatcctcaagtccaaggctgccgctgtcaaatgggtcaaagaatgggttccccaagatcttgtgacaacaggagggaagtgcatgatcttaaaatgggtaacagaggataccttgaagaccttgaaagaaaaggtaaaagagccttcagtgccagagccagaacctgagccaactactgaagtactttttctttgcagctatgatggctgtggaaagacattcatagatgctggtgcattgaggaaa

SEQ ID NO: 54383 - DNA, 274 bp, Glycine max
  Clone ID: LIB3109-045-Q1-K1-A1
ggagcaagagtgaagagcgaagagaatggctcccaagggtttaatctttttggctgtgttatgcttctcagcactgtcactgagtcgttgtcttgcggaggataatggacttgttatgaacttctacaaggaatcatgccctcaggctgaagacatcatcaaagaacaagtcaagcttctctacaagcgccacaagaacactgctttctcctggctcagaaacatcttccatgactgtgctgttcagagttgtgatgcttcactgtttgtggac

SEQ ID NO: 54384 - DNA, 282 bp, Glycine max
  Clone ID: LIB3109-045-Q1-K1-A11
gggcggatgcaagcagacaacagacaggggagacggaagggagtaccttctctggcttcttcctgagtcataagccagagcaggccaacgccattcatatcgatgcgaggctgtctataacaacagagcacaacgtctcatatcggcggcataaatcacatacttaacaccgcactacacataaagagagggcacctatgagctggtgtagaggactagctacaaaatagaccctgttgtggtgcctgctgatatatgagatgcaagatcctgacattattg

SEQ ID NO: 54385 - DNA, 374 bp, Glycine max
  Clone ID: LIB3109-045-Q1-K1-A12
gataacaaaacagaacaaatattatcaaaaggggcagactttgaaaccaaaatcagattttattttttatttttttgctgaatctgaatagatcagaaggtgatgtcgtgttcgtcgtcatctgggtcggaggaagacgatgagggattcgactcttaccggaaaggaggctaccacgccgtcagagtcgccgatcagttcgccgccggcaggtacatagcgcagagaaagttgggttggggtcagttttccaccgtgtggctcgcttacgatactaaaactgagtcatatgttgctctcaagatccaaaaaagttcggcccaaattgctcaggctgcccttcatgagatcaatcttctttcatccattgctga

SEQ ID NO: 54386 - DNA, 322 bp, Glycine max
  Clone ID: LIB3109-045-Q1-K1-A3
ggaggtagcttagaaaatcgttgtcggtgtccactaatggttgtgaaggctgtatgtgatgacattggagctgacaaagttggtgttaggctatcccctttcgccaattattgtaattgtgtagactctaatcctcaagcgttaggcatttacatggcacaatccttgagccaattgggcattctttattgccatgtcattgagcccaggatgctcacaatgtttgaaaaacatgagacagacgtgtcccttttgcctattcgaaaggccttcaacggaacatttattgttgctggtggctacaacaggagtgagggaaaca

SEQ ID NO: 54387 - DNA, 325 bp, Glycine max
  Clone ID: LIB3109-045-Q1-K1-A4
gatagcgaagacagagagtggtttcagtgagtgatcggtgttcacttgatccttcataagtcgtcatcatcatcatcatcatcaccgttgattgaagaagatgccgatcagaaacatcgccatcggaaggcctgaagaggctactcaccccgacacgttgaaggcggggttggctgagttcatctccaccttgatcttcgtgttcgccggttcaggttccggcatcgcctacaacaagctcaccgacaacggcgccgccactcccgacggcctcatcttcgcttccaatcgccatgctttcgccctcttcgtcggcgtctccgtc

SEQ ID NO: 54388 - DNA, 385 bp, Glycine max
  Clone ID: LIB3109-045-Q1-K1-A5
ggcacaaaaatacaatacaaaacaaaacagagcaaagagagagtgtgtgaaaagtgaaacaaaaaacagaacaacaatggcgacacttaaggttcctcagcctcttccccccgttgcagatgattgtgagcagctccgaaaagccttctcaggttggggaactaacgaggagctgattgtatcgatcttggctcataggaatgctgctcagaggaagcttatcagagaaacttatgcccagacctatagagaagatctcctcaaggccttggacaaagaactcacgagtgattttgagaggctggttcatctttggacacttgattctgctgaacgtgatgcatttttggcaaacgaggcgactaaaaaatggacttcaagcaat

SEQ ID NO: 54389 - DNA, 423 bp, Glycine max
  Clone ID: LIB3109-045-Q1-K1-A6
ggaacacaactgtgttgtagttgttgttgttgatgtttgctttgttctctttctctctctctctagggtttcaagagtgttttgaactactccagaaccctctcttgtttttcacaaatttgggttcagtagagtactgacccagaaaagaagattcaacaggtacctaagagaaggaaagagggggatagaaagaaagaaaaagaaatagaaactgcacgtataaaagaagaaagaaagaatcaaagaaaataggaaaaagggcaaatattttgtttgaataagatataaggcaatagtaatattagtattgttgataataattaggtagaaaaaatattatggggaggggaagagtggaactgaaaaggatagagaacaagataaacaggcaggtaacgtttgcaaagaggagaaatgggc

SEQ ID NO: 54390 - DNA, 251 bp, Glycine max
  Clone ID: LIB3109-045-Q1-K1-A7
caagagaatggctcgcgcgggcttaatcttttttgctgtgttattcctttaacacacccacttctgcaatttgcattgttcatagtatgaattgttatgaacttctacaaggaatcatgccctcaggctgaagacatcatcaaagaacaagttaagcttctctacaaacgccacaagaacactgctttctcctgactcaaacacatcttccataaatgtactagccaaacacaaggctcaccactattgct

SEQ ID NO: 54391 - DNA, 149 bp, Glycine max
  Clone ID: LIB3109-045-Q1-K1-A8
ggactgggatggcggatgcgtggggaatggtgcggcggcgcgcctatggttttgcgcggttcatatgggaagacacgctctacacacaccaaggtcttccttatgctggtacgcatgtcgaccaatcgaggaccttattctatgactgg

SEQ ID NO: 54392 - DNA, 155 bp, Glycine max
  Clone ID: LIB3109-045-Q1-K1-B1
gcccacgcgaacgtcctgataatacaacacaacggagttcacttctatgttccaaacttacaccaagagctcggctataatactaacatcgctttctctaaacaaacaagagctaattcaactactccataaccctcttttttttttcacatatt

SEQ ID NO: 54393 - DNA, 415 bp, Glycine max
  unsure (1)..(415): unsure at all n locations
  Clone ID: LIB3109-045-Q1-K1-B10
gggcaacaaacaggcttctgaccgtggttcaccctattaacaaacttctgtttcctcactatcgtgacaccatgaacattaattcacttgcccgcanatccttggtcaatgccgacggtattatagagaaaacattcttgtggggtaggtactctttggaaatgtctgctgttatttacaaggattgggttttcaccgatcaagcattgcctaatgatcttgtcaagagaggagttgctgttaaggatccatctgctccccatggagttcgacttttgatcgaggactatccttatgcttctgatgggctagagatatgggatgctatcaagtcttgggtggaagaatatgtctcattctactacaagtcaaatgaggaacttcaaaaagaccccgaactccaagcttggtggaa

SEQ ID NO: 54394 - DNA, 390 bp, Glycine max
  Clone ID: LIB3109-045-Q1-K1-B11
gattgcaggcataagtcattttagtccgtgacttttcgaaacccctcatctagttcgtgactttgtaaaaagttattcattagatgattaatctagttcgtgacacaatggaaagtaagtttgactttgcaaaaacttattcaccaactaattagaaccctcatctagtttttgcgaccatgtaaaaaagttagggactaaatacctgacgcttttaataccatagactaatttgctattttctggaccactaatctccatttatttttatttggttaaaatatgtttagttctttaaaaatatcttgaaattcagttgtagtcttttgatagataccaactggtaagggaataaggactgaattttattcaaagaaacagaacagaaat

SEQ ID NO: 54395 - DNA, 395 bp, Glycine max
  Clone ID: LIB3109-045-Q1-K1-B12
ggaagaagaaaggtcatggggaattcagggaagtaaccgagggtgatttcttaggtgaagtcactggaagtgaaaaagtgatttgtcacttctaccatagggagttctatagatgcaagataatggataagcatttaaagtctcttgcaccaatgcatattgatacgaagttcatcaagcttgatgcagagaatgcaccattctttgttacaaaactggctatcaagactttgccttgtgtcttgttgttcagacaaggagtagcagtagatagattggtaggatttcaagatgtgggaggtaaagatgattttaccacaagaacgctggaagctcttctgataaagaaaggtataattgaggagaagaaagctgaggatgatgaagatgatgaa

SEQ ID NO: 54396 - DNA, 420 bp, Glycine max
  unsure (1)..(420): unsure at all n locations
  Clone ID: LIB3109-045-Q1-K1-B2
gggttctataatcatgagnaacaaatctcttggtggtatggagtaccatgcnncaaatggannagtttaggtgagggttcttttcatggcaagaaaagggggggccacttttgcattggtacancannaggtataagaattgctnnngtggaggctttnncaaagggcnnctttgcttattctacnnaccatgactnnngttcaccacttcnnattgtccattagagaaatgttannaatccannacaacatcnncttcttgnnattccaannntttgaagcacaaaatgttgcnttgatttttgggctttcgctaanaattcctgcaagaaattctgnngagcatcnntgaatgnncatgtctgctattttgctggtntnncttacggataaccatagctttcagagtattgccctaca

SEQ ID NO: 54397 - DNA, 369 bp, Glycine max
  Clone ID: LIB3109-045-Q1-K1-B3
ggggattggttttggattaagctgtagagttgctgcacttgatccaaacttcaagaagctctcaatggagcacatagtttcagcttacaagcggacggcaactagagcaatccttgttgactatgatggtacactaatgcctcaatcattcaccattgataagagttcaagcagtaaatccattgaaattcttagtagtttgtgtagagataagaacaacatggttttccttgttagtgctagaagccgaaagatgctttccgaatggttctctccttgtgagaatctgggagtcgcaactgagcatgggtactttctaagaatgaaacgagatgaagagtgggaaacacatgttgcagcagcagacac

SEQ ID NO: 54398 - DNA, 343 bp, Glycine max
  Clone ID: LIB3109-045-Q1-K1-B4
ggaacacaactgtgttgtagtcgttgacggtgaggtttgctttgttctctttctctctctctctagggtttcaagagtgttttgaactactccagaaccctctcttgtttttcacaaatttgggttcagcagagtactgacccacaaaagaagattcaacaggtacctaagagaaggaaagagggggatagaaagaaagaaaaagaaatagaaactgcacgtataaaagaagaaagaaagaatcaaagaaaatacgaaaaagggccaatattttgtttgaatcagatatacggcagtagccatattagtattggtgataataattacgtagaaaaaatattat

SEQ ID NO: 54399 - DNA, 370 bp, Glycine max
  Clone ID: LIB3109-045-Q1-K1-B5
ggagccaaggcccagacagacaccgcatgctcttctctctcactaccattgatttccccgcacgttcctctcctaattcccctcctttttcgctactctttttcttttggggtgaaaactgaaaactagaaagaagcgtacggagagaaccaaagaaaacgaatccaatgggaggatgtgcaactaagccgaaggtctcccaggacgatcccgatggaaagcccaaggcaccccaaccagaaccagaacctgaacctgaacaccaacaacccaacaacaaagacaccctgcaaaccaaagtaccccaagtggaacaaggtgctgctcacaaagaccacaacaaccttaatgtcaacgaaattgttgacga

SEQ ID NO: 54400 - DNA, 419 bp, Glycine max
  Clone ID: LIB3109-045-Q1-K1-B6
gaatttaatttgattttgcagcgacgagaccacagtccacaagacccagaagcaccaccgcgaccggcgaatccagccaccgtgtgcggcttcgaattgagtccgagaacgcagttagacaggctttatattgaaacttgagacttgaagggaagctgttataattggtcagtcttcccatggcgtatcccttctcagatttcaagtactcagatggcctcactgtagtgggtatctccttctgcacagctattgtctgtgaggctatctcatgggttcttatctatcggaccaattcttacaaaaaccttaggtcctccattgacaaagcctccaagaaactcgagaccatgaagacagacagcaatgaaatcaacatcaagaagttcaagaccaaaaaaattgaccgtgttgagaca

SEQ ID NO: 54401 - DNA, 305 bp, Glycine max
  Clone ID: LIB3109-045-Q1-K1-B7
ggattgtgatggcggatgaagggggaattgagaagcggcgctacgatgtttttctgcgttttagaggggaagacacgcgctacaccttcacaggtaatctctatgctgctttgcggcaggcgagattgaggaccttcttcgatgatgggttcaagagtggcgaccaaatctttgacgttgttcttcaagcaattcaggaatcaaggatttcaatcggtgttctctacgaaaacttcgcttcttactcgtggtgccttgaagaacttgtgaagatccttgagtgcaaggaaacaaagaagcaactc

SEQ ID NO: 54402 - DNA, 260 bp, Glycine max
  Clone ID: LIB3109-045-Q1-K1-B8
ggatggattgactgggcatggaaaagatgggcgggaaggggtcctctgtctgtccgccttcataccccaaaccgaccatctcagctcgttcatttctctctctactcgctatctgactgactacatgatgaactttttgacatgacgttcacacacgcatgccacaaacttctgatttctcttaatttcacaagaaagagttaatgtcccgtggattgtttatgtggacaatgacttcttgactttcaatgctcgcaaaa

SEQ ID NO: 54403 - DNA, 363 bp, Glycine max
  unsure (1)..(363): unsure at all n locations
  Clone ID: LIB3109-045-Q1-K1-B9
ggaggcaaagtggaggaggaggctcacgattcaaaggaatgatcgtgaagttgtcggttgctgctgtggtgctcttgatctgcacgctctcattgttcttctcctcaacaggaacttcttccaatcttcaatccaactatcgctccgagatccgtttagaagagctttggagcaacgcaggttccggtggttggcggccgtcgtctgctccgagaactcattgggcccctccttcgactgagagcaacggctatttgcgtgttcgatgtaatggtggcctgaatcagcagcgtagtgcgatctctaatgctgntcttgctgcgcgaatcatgaatgctacacttgtgctacctgagttggatg

SEQ ID NO: 54404 - DNA, 345 bp, Glycine max
  Clone ID: LIB3109-045-Q1-K1-C1
gggagacttaaatgaaaaggaaataatcttaagtggaaccttctgcgaaattagccttccttcgtcccttgattgaagtataaattaggggtgttgaaattcaaagccatatccgtcattaaccaaatttgtgtttctccgattgcaagcaatggactccttcaattccttcttcgattcaacaaaccgatggaattacgatactctcaaaaacttccgtcaaatttctccggtcgttcagaatcacctcaagcaggtttattttactctgtgtttcgccgtggttgctgcggctgttggggcttaccttcatgtcctcttgaacatttggggttttcttactac

SEQ ID NO: 54405 - DNA, 393 bp, Glycine max
  Clone ID: LIB3109-045-Q1-K1-C10
caaacaggctttggaccgtggttaaccctattaacaaacttctgtttcctaactatcgggacaccatgaacattaattcacttgcccgcaaatccttggtcaatgccgacggtattatagagaaaacattcttgtggggtaggtactctttggaaatgtctgctgttatttacaaggattgggttttcaccgatcaagcattgcctaatgatcttgtcaagagaggagttgctgttaaggatccatctgctccccatggagttcgacttttgatcgaggactatccttatgcttctgatgggctagagatatgggatgctatcaagtcttgggtggaagaatatgtctcatcctactacaagtcagatgaggaacttcaaaaagaccccgaac

SEQ ID NO: 54406 - DNA, 144 bp, Glycine max
  Clone ID: LIB3109-045-Q1-K1-C11
ccggaccggaggggccggctcgacccacccgtcgcgttctagaagaccccagctgcgggacgacatcagtgttggagcatcaaacgagacccgtacggtgcgccagaaatgtttccgtcttcgaaaaaagggggcttttgtgat

SEQ ID NO: 54407 - DNA, 406 bp, Glycine max
  Clone ID: LIB3109-045-Q1-K1-C12
ggtacaggtgagtttgttgatcgagataactaggaacagggtgatgaaaatgaaggtccttgtattgttcgttgctacaattttggtagcatggcaatgccatgcgtacaatatgttacctctccgaatgaacactgtctatggtgtccgtactacggaggtgaaatgcacaagttggacgcttgctgtggaaacacacaacatctttggctttgagaccattcctgaagagtgcgttgaagcaacaaacgaatacatccatggcgaacaatatagatcagactgcaaaacagttaaccaacaagcttacttttatgccacagacctcgaagtgcattccaaggacacatttgtgttcaaaataagacgcaccgtactctctaatattgcatactacaaaaaacat

SEQ ID NO: 54408 - DNA, 402 bp, Glycine max
  Clone ID: LIB3109-045-Q1-K1-C2
ggaatggggcgacgagaaatgagatagaaaggggaagtggcactggcgaatgagaatgagtgtagaaaagaaagtccatggccatgagtgtgggcgtggcattgccatccaccaccaccagtctcagtttccttcgctaccgctctcgctctccaattcaaaataaaatccgttttccccgtcaaattgtttctaaattaaacagtgcagaggtccaggttcaaacctggtaattttgctttctgaatcacgtaattttatttttatttttctgttttttgaaacagtcttcaggccttgtattgtagcgtgtgggattggaggggttactctattcgctatcaacattctggaaatattggccctgcactagttttagtccacggtttttgagctaacagt

SEQ ID NO: 54409 - DNA, 331 bp, Glycine max
  Clone ID: LIB3109-045-Q1-K1-C3
ggagaaaaggaaagcatacattcacatttcacacacacacacatactactctctctctctctctctctctgatggattcgagggagtaaaagcaagaaagcaagcatttggatttggattgagatccgcaatggcaccgaacaacaacagaaccaagggatcccatttccctcttctcgctttcctctttctctgcctcctcgcgccccttctcttcttcttcttcgcatcgccccttcacgatcgaagtgataattcagctgtttcgattgaaaaggttgccaaattgaaagaatggcaggcactgcaggatcttaaatcgcttttttcg

SEQ ID NO: 54410 - DNA, 416 bp, Glycine max
  Clone ID: LIB3109-045-Q1-K1-C4
ggggatgtgaagctacttcaccactccaaacccaccacaccaccattattcatatctcattctctaacctttcactctgccttactcactctctactttgctcatcatcgtagatgaaccaacacttctagtctctcttactttataaccatgtaaaaatgagtcacctaatgaaaaattagtagcttcttgttgtgctttttattttgtttgtgttgagataaatttgtttgtttgtttggtattgttttgtgttttatgaattatttgatgggtgaagaaggagaagtggtgagaaagtaaggacaaaggggtgttggtggagataagtggtacttgtatagctgcttacaagactggaaatattggtgctggttaatacacgagactagttctctttcgatggtcccttttga

SEQ ID NO: 54411 - DNA, 147 bp, Glycine max
  Clone ID: LIB3109-045-Q1-K1-C6
ggggtgcatcatgggaggaggacctgccgacgctaatttttccgtcttagaaggacgcctcttcttatgatggaataattattatcttcttctcctttttttatctggtgtagttgagggccttttttgttactataacaccgtaat

SEQ ID NO: 54412 - DNA, 256 bp, Glycine max
  Clone ID: LIB3109-045-Q1-K1-C7
gaccaacacaaacaatagtgcatagcgtttttcattgtgcattattcaatggccaccacagcagctctatccggaaccatggtgagcacctccttcatgaggaagcaacctatgacgaccaagagcctaaagacattccccaacgctctttttggtctgaaaggtggacgaggtggtcgtgtaacttgcatggcctcgtacaaggtgaagctcataaccccagaaggagaagtggagtttgaatgcccagatgatg

SEQ ID NO: 54413 - DNA, 406 bp, Glycine max
  Clone ID: LIB3109-045-Q1-K1-C8
ggcacaagtgagtttgttgatcgagataactagaaacagtgtgatgaaaatgaaggtccttgttttcttcgttgctacaattttggtagcatggcaatgccatgcgtacgatatgttccctctccgaatgaacactggctatggtgcccgtactccggaggtgaaatgcgcaagttggaggcttgctgtggaagcacacaacatctttggctttgagaccattcctgaagagtgcgttgaagcaacaaaggaatacatccatggcgaacaatatagatcagactccaaaacagttaaccaacaagcttacttttatgccatagacctcgaagtccatcctcaggacacatatgtgttcagtatagatggcaccgtactctctaatatttcatactacaaaaacatg

SEQ ID NO: 54414 - DNA, 335 bp, Glycine max
  Clone ID: LIB3109-045-Q1-K1-C9
ggatgtaaaaaatgttatgccttcttgtgtgaggagaacagcatactacataggttcgaaatacacaacaacttcacagaagtgagcaaaacagcttcatgttttatgccccaccacctcgtgactgtgtgattaacttgaggttctcataagcctcagcacaggcatgagcatagtctgacaatgcacggaagagttcaggcaagcgagttatgagactctgcagtgatttctctcgcacctgaatgcaatgtttttggtgggattcaatttcctgttctaatctcttctgcaagctctcaacaacaaactgcctctccgagacaggattattt

SEQ ID NO: 54415 - DNA, 419 bp, Glycine max
  unsure (1)..(419): unsure at all n locations
  Clone ID: LIB3109-045-Q1-K1-D12
gatagtgaggttgaagatgatgatgatgatactggaaaggataacatgcctgtggctaaaaagaagggttggttttcctcgatgttccagagtattgcaggaaaggctaatttggagaagtcagacctggaaccagctttgaaagctctgaaggacaggctcatgaccaagaatgtggccgaggaaatagctgagaaactatgtgagtcagtggcagcaagtcttgaaggcaaaaagctagcttcgtttacaaggatatcttcaacagtgcatacagcaatggaagaagcacttgttcgtattttaacccccaggcgttccattgacatattgagggatgttcatgctgccaaggagcaaaggaagccatatgttgntgtgtttggtggagttaatggagttggaaaatctactaatct

SEQ ID NO: 54416 - DNA, 335 bp, Glycine max
  Clone ID: LIB3109-045-Q1-K1-D2
gatagaaaggggagggacatatttgacaggtcagcaaccgcgttcttttctacggagcctcgaccaagaagaatcgcagtgagaagaagagggggtcagagtgagaaagagaaagagagaattcgtaaaccctaatttcggaaagatcggcgatgactgcctccaaggatcgcgagaacttcgtctacatcgccaaactcgccgagcaggccgagcgttacgaagagatggtggaatcaatgaagaacgttgcgaatctcgacgttgaactgacggtggaggagcggaatttgctttctgttgggtacaagaatgtgattggtgctcgcagagcg

SEQ ID NO: 54417 - DNA, 417 bp, Glycine max
  Clone ID: LIB3109-045-Q1-K1-D3
ggttctagtgtgtgattgtttgttgttggaactcgttcttcttcttttgttggtctgcgtttgtgtttgttttttctctcacctgaaaatgtcttgctgcggcggtaactgtggttgcggaagctcctgcaagtgcggcaacggctgcggaggctgcaagatgtacccagacttgagctacactgagtcaaccaccaccgagaccttggtcatgggagtggcacctgttaaggctcaatttgagggtgctgaaatgggtgtgcccgctgagaacgatggctgcaaatgtggaccaaactgctcctgcaacccctgcacttgcaagtgaggtgttgggagagcaagcttcaagcagagatagcccttaataggaataatgataaactattaatgcgtagctcaaaacttatgtattat

SEQ ID NO: 54418 - DNA, 414 bp, Glycine max
  Clone ID: LIB3109-045-Q1-K1-D4
gagggaagcacaaccaagcttctctgttaaaaaaaaattaggcgtctaaagggccaaagcttagaaagttgaagctttttttgttgaggtgaaagtgaaatggttggcaaggataatctgagggctgaggacttgaacttgtgctttaagaagcttatgatggtggccgggagtgggaacagtgagaaaggggtgaacttgaaggttggggtgatcaccgagtggaaggatattcctgtggagcttctgatgcaaattctgtcccttgtggatgatcagacggtgatcatagcttctggagtttgtcgtggatggagagatgctatttactttggccttgctcgtttatcactctcatggtgtagcaagaacatgaataacttggtcctatctcttgttcctaaattcgcaaaa

SEQ ID NO: 54419 - DNA, 411 bp, Glycine max
  Clone ID: LIB3109-045-Q1-K1-D5
gggtggagagcaagagctataagtgtgagaagtgattggaagttgttggaacccaccctatcaacaaggagaagctgttttcgttcgtcgccactaacactaatcgtttcttcaatgccttacgagaaggaactcgccgctgcaaagaaagcagtcactctcgctgctcgtctctgccagaaggttcagaaggctcttctgcaatccgatgtgcactcaaagtcagacaaaagtcctgtcacagtggctgattatggttcacaagcattggtcagctttatacttgagagagaacttccttctgaatcattttcattagtagctgaggaggattcaagtgatcttcgtaaggaaagtggccaggatactctgaatcgcattacagaacttgtcaatgatactcttgctagt

SEQ ID NO: 54420 - DNA, 398 bp, Glycine max
  Clone ID: LIB3109-045-Q1-K1-D6
ggtggctggctgtagtagtgctttgctgtccgagagtaaagagtaagcctctttctcactctctaatctatttgtgaactaggttttggttgcagagacatgggagaaaggattccgtgtgggagtggcatgtatttccccttccctcctccgccatctcccattcgcccttcttcttcttcttcagatcgcgataggtatttggccgaactactcgctgagaggcaaaagttggtaccctttctccaagttcttccacaatctaccaaactcctaacccaagaaatcagacgcatgtccgttggtggcggcggcggcggcggcggctttaatcatgagcctgcagcagacactcctcctccatattttaggcctatggatctcgagggatgggcaat

SEQ ID NO: 54421 - DNA, 397 bp, Glycine max
  unsure (1)..(397): unsure at all n locations
  Clone ID: LIB3109-045-Q1-K1-D7
ggacataatgatgatgtttgatcaaaggacatagctttagtagcagtggcagtagagacatgtacagaggatcgtctgcttgctgtctcttctttcccctccttttcgtgtgtgagagagttcagtgttattctctgttctaacttcactttttggcaccatttatcatgcttcactccttcttcttcttcttcttcaccctccaacaggccaagaaagatagctcttttctacgggtatatatatatatatactcttggacactttttgtttgagtttggagacaatgattgtgtgttgacgctcttccttcggtttcaattcacttctccaacatctactacatatngcagggctctttaggatgggacaagaattggagtttgatctgaatgac

SEQ ID NO: 54422 - DNA, 321 bp, Glycine max
  Clone ID: LIB3109-045-Q1-K1-D8
aggatgacgaagacgacacatggatgacgtatgcacgatgaagataatggacgagcggacagggggttcatgtctgagaagatagaaaggctttaggaatggttgcacacgatagcccgttgatatatgagggctgcactgcacagagagaatctcgtgatcaatatacgctggactcgctcgtaacttcgctagagcctatataacctgtatatgtatgcctgtcctcatttacaagggcgtcgtgctggcatctcgtttgcaagatgaagataatggtcggccgtacaggaggttcatgtgtaaaagattcgagagtct

SEQ ID NO: 54423 - DNA, 345 bp, Glycine max
  Clone ID: LIB3109-045-Q1-K1-D9
gacggctaaaagctaaagatcatcgaagtactcgaatgagcatggctgtcacggttgcattcttgaatttgatcatcatgttttcagtagtctctacaagcaagtcactgagcttaaactactattcaaaaacatgccctgatgtggaatgcattgatgccaaggcagtgaaggatgccactgctagggacaaaactgttccagctgcacttctgcgaatgcacttccatgactggttcgttcgggggtgtgacgcctctaggctgctaaattcaaaaggaagcagcatagcagaaaaagatcggccaccaaatgtttctttgcatgcattctatgtcattgatg

SEQ ID NO: 54424 - DNA, 408 bp, Glycine max
  Clone ID: LIB3109-045-Q1-K1-E1
ggttctagtgtgtgattgtttgttgttgtaactcgttcttcttcttttgttgttctgtgtttgtgtttgttttttctctcacctgaaaatgtcttgctgcggtggtaactgtggttgcggaagctcctgcaagtgcggcaacggctgcggaggctgcaagatgtacccagacttgagctacactgagtcaaccaccaccgagaccttggtcatgggagtggcacctgttaaggctcaatttgagggtgctgaaatgggtgtgcccgctgagaacgatggctgcaaatgtggaccaaactgctcctgcaacccctgcacttgcaagtgaggtgttgggagagcaagcttcaagcagagatagcccttaattaggaataatgataaactattaatgtgtagcttaaaact

SEQ ID NO: 54425 - DNA, 422 bp, Glycine max
  Clone ID: LIB3109-045-Q1-K1-E10
ggccggcaccaaagaaaaattcaaatttctcaaatctatccgacgtcgtcgcagatccaccaaccgttatggctgccttcagcggtgatgaaacggctccgtttttcggcttccttggagccgcagctgccctcgtcttctcctgtatgggagctgcctatggcacagcaaagagtggtgtgggcgtggcttccatgggtgtgatgagacctgagctggtgatgaagtctattgtccctgttgtcatggctggagttttgggtatttatggccttattattgctggtattatcagtaccggtattaatccaaaggccaaatcttattacctctttgatggttatgcacatctctcctctggtcttgcctgtggcttggctggcctttctgctggcatggctattggtattgtcggtgatgct

SEQ ID NO: 54426 - DNA, 377 bp, Glycine max
  Clone ID: LIB3109-045-Q1-K1-E12
gagaggaaaagtaactccacacaacacatcacagcctaagagaattggattctaagctctagagagagagagagagagagagagagagaagaaagaatcatgtggtgctggaaaggagacggaggctagaagaagaagaaaaaaagaagagctagagagagggtaccctcttgttaatttgcactgtttttgtgtctgttgctgcacttttaggagttcttctattctaacaacctctgccaaccaacacaagcctgaaaataaaataaagatgctgcctccttgctggagatcgttcgggaagaaacaagaatgctactgacatgggaaagaaagggagttggttttctgcaatcaaaagagttttcacacaccac

SEQ ID NO: 54427 - DNA, 359 bp, Glycine max
  Clone ID: LIB3109-045-Q1-K1-E2
ggaagaagaaggttggttgattggtcccgttgagtccgaagagaaaagaaaagatgtttgagccacaacagctatacactcgcgcgaagaccgatgaattcgacctcgaatcaggagaaaccctctacccagggctgagcgtcggcgagaaccagctccgatggggtttcatccgcaaggtctacggcatcctctccgcgcagatcgtcctcaccaccctcgtctccgtcaccaccgttttctatactccaatcaatgaccttctcaagggcaattccaccctcctcctcatcctccttttccttcccttcatctttttgattcccctgttgaagtaccagcagaagcattctcataat

SEQ ID NO: 54428 - DNA, 358 bp, Glycine max
  unsure (1)..(358): unsure at all n locations
  Clone ID: LIB3109-045-Q1-K1-E3
gtaacatggttaggtggttatagtaaacgcataccttgggcttctcgtccattccccttttttttgttagttgacaaatagatacctttttcccccgttcgtaatgatgcgcatcctgtaactcttgccgtccattgaattcaattgccttcttggcggtgctattttgatacaaggaaaataacactcgctgaaaagaaaaaaaaaaaaaaaaaaaaaaaaaaaaaaaaaaaaaaaaaaaaaaaaaaaaaaaaaaaaaaaaaaaaaaaaaaaaaaaaaaaaaaaaaaaaaaaaaaaattttttnnnaaaaaaaaaaaaaaaaaaaaaaaagggggccctttaaagggccccaatttt

SEQ ID NO: 54429 - DNA, 368 bp, Glycine max
  Clone ID: LIB3109-045-Q1-K1-E4
ggggaaagtgggctgctgagattcgcgacccaagaaagggggttcgtgtttggcttggaactttcagcactgctgaagaagctgcaagagcttacgatgctgaagcaaggaggatccgtggcaagaaagccaaggtgaatttccctgatgagccttcaggcgctgcttcctcaaaacgtctcaaggcgaatccagaggctcagccaatgaagaaaaatctgaactctgtgaagccgaaaataaaccagatgttcaattttggtgacaatcttgagggctactacagccctatagatcaggtggaacagaaaccactggttaaccagtatgttaaccgtgccccgtttgctggaaatggagttcaagtc

SEQ ID NO: 54430 - DNA, 209 bp, Glycine max
  Clone ID: LIB3109-045-Q1-K1-E6
gacggcgatgatgatgcaaatcaacatcacctccaccacctcaatcgtcacggcgttctcttcggatcattccccgaatgttctaccttgagccatgtccaacctcgttcagattcgcgtcgccggcgacgctagcgatggcttcgactctccggcgaagcagaaagcagccaaccgcagctcctacagcaatcgcccctttctctccc

SEQ ID NO: 54431 - DNA, 416 bp, Glycine max
  Clone ID: LIB3109-045-Q1-K1-E7
ggaaacaagagggaaagccttatgacaaacccaacattgtcactggagccaacgttcaggtttgctgggagaaatttgcaaggtactttgaggtggagttaaaggaggtgaagctccgtgatgattattatgtaatggaccctgaaaaggccgtggaattggtggatgagaacactatttgtgttgctgctatccttggttccacactaaatggagagtttgaagatgtcaaacgcttaaatgatctcctaattgaaaagaacaaaataactgggtgggacactcctattcatgttgatgcagccagcggtgggttcatagccccatttatttacccagagcttgagtgggacttccggttacaactagtgaagagcatcaatgttagtgggcacaagtatgggttggtctatgct

SEQ ID NO: 54432 - DNA, 391 bp, Glycine max
  Clone ID: LIB3109-045-Q1-K1-E8
ggaaatcggcaggggacggaaatatcgaaagagacagacagagcgacgtcggagaaagaaagaaaggaatgaatgaaagagggatggtaggagaaaaatgagaatggcgtgaatgtgaggagagaagagcctgaatattagaatcggatacccttaaagaagcggagataggagtgtgcgcctccaaacccaaggggcttcggaggggctcttcatcggaggcggtgctatattcccctccggattcccccaccatgaagagcctcttcaagcccaagccccgcactccttccgatatcgtcaaacaaacgcgagatcttcttctccgtctcacctcccgagatgacgataacatgcccgacttgaccaaaaaccttcaggacttaaagtc

SEQ ID NO: 54433 - DNA, 394 bp, Glycine max
  Clone ID: LIB3109-045-Q1-K1-F1
ggggtaagagattctctttctttgagttgcgtgtgcaaagaaaagtggtctataaaaatctgctctcagtcccacttcccaattcattttcattccacgagatatggcttcaactctgcttcccctggcaaccttcttcttagttctctccgcttcttatctccagattgctggggcgaaagcacaaccgttgactagtctcaagcttaactctccgatccttcaggagtctattgctaaagagatcaatgaaaatcctgaggcaggatgggaggctgctataaatcctcatttctccaattatacagttgaacaatttaagcgccttcttggagtcaaaccaacgcctaagaaggaactgagaagtacacctgctatatctcacccaaagtca

SEQ ID NO: 54434 - DNA, 410 bp, Glycine max
  Clone ID: LIB3109-045-Q1-K1-F10
ggagagagagatgagggaggtgtaagaaactggaaggagtaggtgttgttggcattctgacctaaagcttgtgtctttctgcttcgtttgtatcttctgctgcgtaaagaggatccctttctgattcttccgtaaatttcgtctctgaaactagggctaatacttcatctaccgatctctatattctggatgaaggtttgcttttgatccggcttgggagttttgatcgacttgattttaactccaacttttaagagttagtagtctctcttctggtccttggtgttcgcaataatagccaaaggaaaaagaaatttgaaagctttctatttctgtaccctgctaaatggccagtgaattgaatgtcattccgcagcatagttcgtgatgtaggggatagtttcggagct

SEQ ID NO: 54435 - DNA, 385 bp, Glycine max
  Clone ID: LIB3109-045-Q1-K1-F12
cgcgaacaaaaactacagcgggcgcttagttttcggctgcggaatgacaacaggggggggggtggttttataaagggacaaaccacaatcgacgatctttcctccttatatggagggtgtgttttctaaaacgcaaccaaatataactttcgcgcaaacttcagatttgtataggtccctctctgacggtaagaaaatcaacgaccaacgcactatgggcaagagctattgttttgttactttcacaaatcctaggtctgcaatttgatgccattaacgacctgaatggcaaaatcattgacgggcgtgagattaaagttaatggggtgagggcctctgggggcatgtcaaattttgggagaaaacggtattatttataaaaata

SEQ ID NO: 54436 - DNA, 411 bp, Glycine max
  unsure (1)..(411): unsure at all n locations
  Clone ID: LIB3109-045-Q1-K1-F2
gaccacatagacacacacataggaaacaagccggtcatcccgcacacccacttacacaaattgtataattagtaaacgaccacatagacacacacacaacgaccacacactaatatatatatatatactcaattacatttccacacctcacttaacgttcgatacaattctctaagagtgcgtttggatagagaattttaactgaagaaagtaatttatgaagaatttaaagttttggaattttattttctttataaccttattctcttccacctgaaagtttccaaaatctcattcttgaactctcgaccttccctcgcattgatggtcctcttcttcaagaaacaccgtcagagcttgtggagtgtcnatcggttgcgaacgtgaagggacacgtagaactgtacctac

SEQ ID NO: 54437 - DNA, 391 bp, Glycine max
  Clone ID: LIB3109-045-Q1-K1-F3
gggagcagaggacaagatgggtagtgtgagttatagcaatctgaagaacgccatgatagcattcttggtccctctaccctccatcctattctacctctcattccaatcggccattagtactccttcttcttggtcttctctgtggacatggtgctatcaccaccctctgctattggccaatgtccttttcttcttcaatgtcaatttcctcttctggctcatcggcctaatccaatccagccactggatgattgacccgtattggacagtgatacctgtgatgcttgttcattactattcaactcaccctttggcacagtatcagtggtggaagtcgaggaatcgaacgttgttgacttgggcgtggagtggtaagctgatccacaactac

SEQ ID NO: 54438 - DNA, 405 bp, Glycine max
  Clone ID: LIB3109-045-Q1-K1-F4
gtaaccagagagaaacagccagatatgaatgacaaaaagctaattcaaacattatggttcaagccaaatgcattggatgaaccagtttctgcagttttaggacaaaacagttggctctatcttagcattatcatctcatcctcctttatgttattccttctacttattgccatcctaactagatattacatatatccaattgaccataatactgacatgatatacccttatttctcaaggtccagtctaagcatgttattcatatgcatatctatagcctttgtagcaacatctgctttcctatggaacaagaaacagaacaaggatttggggcagattaaaaacatttacacatccaattcatcaacttctccgggttcaggatactacaatgctgacagagaa

SEQ ID NO: 54439 - DNA, 127 bp, Glycine max
  Clone ID: LIB3109-045-Q1-K1-F5
catgaatggaactttacatggtcctgcaggtcagtgttgttatagtcttcttgacattgtacacaggctttggactccaatagatggtgaatttgatgactacatcattaattcgaagcctaatggc

SEQ ID NO: 54440 - DNA, 267 bp, Glycine max
  Clone ID: LIB3109-045-Q1-K1-F7
ggcaagtgtgagtgatatttgagcttaaaccctagccgctcttctcttcattcttcactttggaaacaatcataatggcgttctgtaataaggttggaaatgtcttgaggcagggtgctgctcgcagcacacatgcccctgttgcgtccatgcttaattacatccgctgcatgtcttcaagcaagcttttcattggaggcctttcatatggagttgatgaccagtctcttaaggatgcattttctggctttggagatgtggttgatg

SEQ ID NO: 54441 - DNA, 432 bp, Glycine max
  Clone ID: LIB3109-045-Q1-K1-F9
aaaagaacaacaaagggggaattaaaacccgtgaagcataccattgccccataccaccaagtcatgaaaaattggcctagggacaacatgagcagattagcacttcatgggaaatcagaattcaagaatcaagtctttggaccagagtcactcgagttcgatcacatgggtcgtggcccctacactggtttagccgatggacgcgttgttcgatggatgggggagcaacttggttgggaaacatttgcagttgtcacatctaattggacggagaagctttgctttaggggcaatgattcgaccactgcgaagcaatggaagcatgagaaaacatgtgggcgtcccctaggcctaagatttgacaaagtgaatggagatctatacatagcagacgcatactatggacttcttgtggttggacctaatggggga

SEQ ID NO: 54442 - DNA, 332 bp, Glycine max
  Clone ID: LIB3109-045-Q1-K1-G1
ggcagcatcgtagagaaataagggaaaaatggtgtcgctgaaactgcagaagcgcctctccgcaagcgtgctcaagtgcggcagaggaaaggtttggcttgaccccaatgaagtcaacgaaatctccatggccaattctcggcaaaacatcaggaagttggttaaggatgggtttatcatcaggaagccaaccaagattcactcccgctcacgtgctcgtaggatgaaggaggcaaagaggaagggccgccactccggttatggtaaacgtaagggtacaagggaggcaaggcttcccaccaagatactctggatgaagaagatgcgtgtgc

SEQ ID NO: 54443 - DNA, 265 bp, Glycine max
  Clone ID: LIB3109-045-Q1-K1-G10
gactgcaagaagagaaagtggcatcgctcacgtacagatgcagatacagacacaacctgcaaaagctgccgaccccagccctggactcttctttctgcagcggaggagtggatatatagctatacatgcctgctcaaaattctacacgccaagacagagacggacaatagagatcaactaactatcccaacttgccaatgtatactgagaagagtttctataaatgcaggactggtagcatactgatgatagattaaccaagctc

SEQ ID NO: 54444 - DNA, 340 bp, Glycine max
  Clone ID: LIB3109-045-Q1-K1-G11
ggttgctcagtggatgcttcaagcaccaggtgccacaagtgacagaggttgcataggaaaggacaaatttggagaggagatgaagaagaaatgtacacttgatggtgtaaaggttaactattatgaaatcgacaatacacctactggaacttgtgctgtttgtgtggttggcggtgaaaggtcccttgttgccaacttatcagctgcaaattgctataagtctgagcatttgacgagaccggaaaattgtgcattagttgaaaaggccaagtatttctacatttctgggctttttcctcactgaatctcctgattccatacaattagttgctgaacatgc

SEQ ID NO: 54445 - DNA, 267 bp, Glycine max
  unsure (1)..(267): unsure at all n locations
  Clone ID: LIB3109-045-Q1-K1-G12
gggaagggtggtggcgcttgggttggtagcggcgaagaacgtcgttaatggaagaagagaaagaagcagtgatggtaacaccgggagaagtgttgggtagaaccagcgatgtcaaagctggaagaggagcatacgcggcgcttcacaacaacaccgtatacgcctccctaaccggcttncgccacaccgtaccttccgaccccgactcttccgacctgagaccgactgttgaagtaactggtcacaaggcccatggacctgttccac

SEQ ID NO: 54446 - DNA, 367 bp, Glycine max
  Clone ID: LIB3109-045-Q1-K1-G2
gcgtacgcccacgcatactacatctgcgagatttcttcttaaggggaaggagcaacatattggcgttgtctataatctaggttatcgcgacgagaatatgaagttgtttgatatctttgatgctgcagtagatttggtagcatggccatgccatggcgcatgctaccaaaggttccctctccgaatgaaaactggctatggtgagcgttcttcggaggtaaaatgcgcaagttttaggcttgctgtggaagcacacaacattcgagcctttaaaaccattcctgaagagtgcgttgtaccaacaaaggacttcattaatggctaacaatttagatcatacattaaaacagcttaaccaacaagcttt

SEQ ID NO: 54447 - DNA, 411 bp, Glycine max
  Clone ID: LIB3109-045-Q1-K1-G3
taaaagacctggattgctaaaagctaaaaatcatcgaagtgctggaattatcatggctgtcacggttgcattcttgaatttgatcatcatgttttcagtagtctctacaagcaagtcactgagcttaaactactattcaaaaacatgccctgatgtggaatgcattgttgccaaggcagtgaaggatgccactgctagggacaaaactgttccagctgcacttctgcgaatgcacttccatgactgtttcgttcgggggtgtgatgcctctgtgctgctaaattcaaaaggaagcaacaaagcaaaaaaagatgggccaccaaatgtttctttgcatgcattctatgtcattgatgcagcgaaaaaagcactagaagcttcatgcccaggtgtggtctcttgtgctgacat

SEQ ID NO: 54448 - DNA, 359 bp, Glycine max
  Clone ID: LIB3109-045-Q1-K1-G4
ggacgaggaatgacttgagcagctgcaataaaaagagggtaactttcttcttcttctttctctccccagagaattcaattaatccaaacatgttcttttgaggttttggtcccggatcagccatgtttcttttcatatttctctcaaccctcgttttaatcgcggttcgagcgaagaagctatggatagcaatcgaagactggttccacgtgtaccagttcttcaaagtcccagaactcaacgaaaccacgcagcataaccacctctacaggaaggtctccctctacttacattccctaccttccatcgaagactctgtcttcgccaacctcatcactggcaaagaagcaaaacgacat

SEQ ID NO: 54449 - DNA, 402 bp, Glycine max
  Clone ID: LIB3109-045-Q1-K1-G5
gacggctaaaagctaaatatcatcaaagtactcaaattagcatggctgtcatggttgcattcttgaatttgatcatcatcttttcagtagtctctacaacaggcaagtcactgagcttaaactactatgcaaaaacatgccctaatgtggagttcattgttgccaaggcagtaaaggatgccactgctagggacaaaactgttccagcagcaattctgcgaatgcacttccatgattgtttcgttcgggggtgtgatgcctctgtgctgctaaattcaaaaggaaacaacaaagcagaaaaagacgggccaccaaatgtttctttgcatgcattctatgtcattgatgcagcaaagaaagcactagaagcttcatgccctggtgtggtctcttgtgctgaca

SEQ ID NO: 54450 - DNA, 369 bp, Glycine max
  Clone ID: LIB3109-045-Q1-K1-G7
ggggaggaagttgaaaagttggttacacaacttccagaaggtggtgttttgcttctagagaatgtgaggttctacaaggaggaagagaagaatgatcctgaatttgcaaagaagttggcttctctagctgatctctatgtgaatgatgcatttggcactgcccacagagctcatgcttctacagaaggagttgccaaatacttgaagccctctgttgcaggattcctaatgcagaaagagcttgattatctagttggggctgtgtcaaaccccaagagaccatttgctgctattgtcggtggatcgaaggtgtcttccaagattggagttattgaatcctttgtggagaaaggtaatgttctcttgctt

SEQ ID NO: 54451 - DNA, 403 bp, Glycine max
  Clone ID: LIB3109-045-Q1-K1-G8
gtctacaaaattggtggtattggtaccgtgccagtgggacgtgttgagactggtgtcgtgaagcccggtatggtggtgacttttggtcccactgggctgacaactgaggttaagtctgttgagatgcaccatgaggctctcacagaggctcttccaggtgacaatgttggctttaatgtgaagaatgttgcagtcaaggatctcaagcgtggttttgttgcatccaactccaaggatgaccctgccaaggaagctgccaacttcacatctcaagtcattatcatgaaccaccctggccagattggaaatggatacgcaccggtgcttgattgccacacttctcacattgctgtcaagttttctgaaatcttgaccaagattgacaggcgatctggtaaggagc

SEQ ID NO: 54452 - DNA, 423 bp, Glycine max
  Clone ID: LIB3109-045-Q1-K1-G9
gtacgacaaaacgggaagatggtggatatgaaaatactgggtttctaggagctaaagacattagaacagtgttcgaagatggagaaaatgatgcgactgagaccattgttccgatcactgagttgcagatcttatcatttcgttcttcgtccttctcttctctctcgctctcccaatcctcttccttctccttcaccctcagaatgcaggtctcctctctcaatgggtttagggagtatgagattctatagtgaagatgtgacccacatgcccaatattaaggaccctgtgctttacaatgctttcaaggatttgatggcggtaagttggagtgagcttccggattctgtcatatctgatgttaagaatgcactgtctaaaaacactgatgacaaagctggcaaggaggttgtggaaaatgtg

SEQ ID NO: 54453 - DNA, 475 bp, Glycine max
  Clone ID: LIB3109-045-Q1-K1-H1
ccggaacggactgggccggctcgaccgacccgcccacccgctgtaacaggacgacaaaaccggaagctgatagatatgattttactgcatttctaggacctaaagaaattctctttctgaataaatgttgaatgcaatgaacctctggctattatcattcgatgcaaattacacaggaacagacttaatttttttagtcaaaagttatgttaaacattaaagaaaggtctattcttttatgtaattaaaagaaagtttaacaaaaatcgattgaattattttcttaaaatataaagatgttagcaaaatagaatgtgccatcaaagtagccaatgctggttgatttgattatagcctatactaaattagtttgtaattagttttcatgagcttaactcaactctacaaaatcaacttgtaaggtgaggatttgttcccacttatataagttatctcgacactatctttatttgat

SEQ ID NO: 54454 - DNA, 333 bp, Glycine max
  Clone ID: LIB3109-045-Q1-K1-H10
gactcgcagttgtattgttgaacaagggtttctctgtctgcttcttcactttctctcgtttcaatcgaaaccaaaacaaaaacatgggcagaaaattcttcgtcggtggcaactggaaatgcaatgggaccactgaggaggtaaagaagattgttactactttgaatgaggctaaagtccctggagaagatgtcgtagaagttgttgtgagccctccttttgtgttccttcctgttgtaaaaagtttgctgcgccctgatttccatgtttcggcacaaaactgttgggttcgcaaaggtggtgcttataccggtgaggttagtgctgaaatgc

SEQ ID NO: 54455 - DNA, 309 bp, Glycine max
  Clone ID: LIB3109-045-Q1-K1-H11
ttggggcagttgtattgttgaacaggggtgggtctgtctgcttcttcactttctctcgtttcaatcgaaaccaaaacaaaaacatgggcagaaaattcttcgtcggtggcaactggaaatgcaatgggaccactgaggaggtaaagaagattgttactactttgaatgaggctaaagtccctggagaagatgtcttataagatgttgtgagccctgcttttgagttccttcctgttggaaaaagtttgctgcgccctgattgccatgtttcggcacaaaactgttgggttcgcaaaggtggtgcttata

SEQ ID NO: 54456 - DNA, 275 bp, Glycine max
  unsure (1)..(275): unsure at all n locations
  Clone ID: LIB3109-045-Q1-K1-H12
gtggggcacccagagaggaggaagctttgagagaagagagagggaggagggagagtgttgacgctcaatcaggatgggtatttctagggattccatgcacaagaggcgtgccactggtggcaagaagaagcatggagaaagaagagaaagtatgagcttgggcgtcaggccgcanacacaaagttatcaagcaacaaactattcggaggattcgtgttcgaggtggcaaatgttaaatggaaggcattgaggttggataccggcaattactcatg

SEQ ID NO: 54457 - DNA, 194 bp, Glycine max
  unsure (1)..(194): unsure at all n locations
  Clone ID: LIB3109-045-Q1-K1-H2
ggacttcagagagaagaagaagaatcatggtgtggggactcttccccgtcgatcctctttcatgtgtagataagtactacatttactatactggactctacaaagaatgacgaaaagggtgagattaaatactctctaaggcttgaggaacggctgtggtgctcgcataaatagnngntaatacagngaacccg

SEQ ID NO: 54458 - DNA, 349 bp, Glycine max
  Clone ID: LIB3109-045-Q1-K1-H3
ggacgatgaagtagcagtgctgccgttgaaatctatacaaatcacaaaaactgggatgtataacttgtatttcatccattgcgatacgaggcttaaagaattggttgttgaagggaaaactgtatggaaaaatccctctggttatctacctggtagaatggcgcctatgaaagttttctaccaattcatgtcttttgcgtatgtactgcttgggatcttttggttctctcaatatgctagattttggaaggaagtatttcccctgcagaactgcattaccgcagtgataaccctaggcatgtttgagatggctctgtggtactttgactatgctgaattcagtgagact

SEQ ID NO: 54459 - DNA, 286 bp, Glycine max
  Clone ID: LIB3109-045-Q1-K1-H4
gactcgcagttgtattgttgagcaagggtttctctgtctgcttcgttcactttctctcgtttcaatcgaaaccaaaacaaacgcatgggcagaaaattcttcgtcggtggcaactggaaatgcaatgggaccactgaggaggtgaagaagattgttactactttgaatgaggctaaagtccctggagaagatgtcgtacaagttgttgcgagccctacttttgtgttccttactgctgtaaaaagcttgctgcgccctgatttacatgtttcggcacataactgtt

SEQ ID NO: 54460 - DNA, 374 bp, Glycine max
  Clone ID: LIB3109-045-Q1-K1-H5
ggagtgagtagtgagaatggagtttcaagggttaccggaaggttgcattgctagtatactctctcgcactacgccggcggacgtgtgtaggttttccgtcgtatcaaagattttccgttcggccgctgaatcggacgctgtgtggaaacgttttctcccttccgattaccattccatcatttcccagtctccttcgcctctcaactatccttccaagaaggagctctatctcgctctctcggatcgccctatcatcatcgatcagggtaaaaagagctttcaattggagaaaaagagtgggaagaagtgttacatgcttgctgctagagctctcagcattatttggggtgacactgagcaatactggaactgga

SEQ ID NO: 54461 - DNA, 263 bp, Glycine max
  Clone ID: LIB3109-045-Q1-K1-H6
attggatgggggcagtagtataattggaacaagggttaggtgtgactgcgtcgtcactttctctctttgcaaaccaagcctatacatacacatggacagaaaatgcttcagcggtggcaacttgcttagcaaagggaccactgaggaggcaaagagggattgaactacagggaatgatgctaaaggctctggaaaagatgccttataaattgttgtgagccctacctgtgggagcattacagtagcaaaacggacgactagcc

SEQ ID NO: 54462 - DNA, 327 bp, Glycine max; identical to SEQ ID NO: 50362
  Clone ID: LIB3109-045-Q1-K1-H7

SEQ ID NO: 54463 - DNA, 423 bp, Glycine max
  unsure (1)..(423): unsure at all n locations
  Clone ID: LIB3109-045-Q1-K1-H8
gaccagacaatgctaatttaatgaaagtacatattttctgaactcagcattgtagggtggactacctttataggtggtccgtgaaccactattaatgaccctagggtgaatgatgttggtagtcagtctagatccgctcaaggccatggcaaacggtggtggtgctcgatccacatccacacaaggcccggacaaacaatggtggtgctcggtctagatccggttaaggccactacaaacgatcaaagtggtgctcatgatgttctctcgcgtttccagatctgatcatagagatcctcatccccgcctttgctgctacaactcttattatttactttaattatttttagtttggttgtattcgttaactgaagaattaggaatcttcaattntcttgatctgggtatatgtattttgggaac

SEQ ID NO: 54464 - DNA, 398 bp, Glycine max
  Clone ID: LIB3109-046-Q1-K1-A10
gattttggggaggcctaatccctgaaaatgcacttaatacaagtattcttgatggtctcttaagtgctggtgttcttggtgtgaagtcttttatgtgtccttcaggaatagatgacttccccatggctactattgaccatatcaaggcaggattgtctgtgttggcaaaatatagaaggcctatagttgtgcatgctgagattcaacaagattttgaaaatcatttggagcttaatgaggataaccttgatccacgtgcttacttgacctatctcaataccaggccaccttcatgggaggaggcagccattaaacaacttgtaagtgttacgaaggacacaagaaaaggtggccctttagaaggagcacatgttcacatcgtccacttgtctgattca

SEQ ID NO: 54465 - DNA, 326 bp, Glycine max
  unsure (1)..(326): unsure at all n locations
  Clone ID: LIB3109-046-Q1-K1-A11
ggacctccaatggagaaaacgcaacacattagacgagtacatttctaaaattcagaagacgtaatgccctttcgacctcttctagagccaccttaacattttccattcaataattaaattatcatcattattataataaactttacctataaacgcatccatgccttccccttcagttcgcagactcacaatggccgcaatatccaactccttatcactgaagcacaggttctctctgagtcgagctcctncttcttcctcttccatcaaattcanattcagaagatgttacgccgcgttcgcccatgagaatcgcgagtacgtga

SEQ ID NO: 54466 - DNA, 405 bp, Glycine max
  Clone ID: LIB3109-046-Q1-K1-A12
ggccttggagttaatgatgaacatatggctgaacaagctttgaccttttataaaatagcgcttgagcgaaatttcacccgtggacgtaaatcagaacaagtacatgctgcttgtctctacattgcattccggcacaacaataaaccataccttcttattgatttttcaaattatttaaggacagatgtttatgtgctaggagcagttttcttgcagctttgtcaagtgttaaggcttggagagcacccaattgttcaaaagcctgttgatcctagtctttttattcatagatataccaagaatttgttaaagcgagggagtaaggctgtctctgatactgcactggccattgttgcaagcatgaaacgtgactggatgcagacagggaggaaacctagcggatta

SEQ ID NO: 54467 - DNA, 366 bp, Glycine max
  Clone ID: LIB3109-046-Q1-K1-A2
ggagagagtgagtgagatagagagagacgcttcgcaaatttcaatcgaatctcagaaaaatgagagaaatcatcagcattcacatacgtcaggccgggatccaggtcggaaactcctgctgggaactctactgcctcgaacatggcatccagcccgacggcatgatgccttatgactccaccttcggtgtagcccacgacgccttcaacaccttattcagcgaaaccggatctggcaagcacgtcccccgtgctgtcttcgtcgacctcgaacccaccgtcatcgacgaggtccgctgcggcacctaccgtcaactctttcaccccgtacaacttatcttcggcaaggaagactccgtcaacaact

SEQ ID NO: 54468 - DNA, 238 bp, Glycine max
  Clone ID: LIB3109-046-Q1-K1-A3
gggcgcgggtgaggtagaacccttacacggtggtgactgcgcgatgggtgcctacaagtatgtctcagagctatggcgcaagaagcagtctgatgtcatgcgcttcttgcaacgggtgaggtgctgagagtataggcagcaaccttgcattgttcgcttgacaaggtcgacccgtgctgacaaggctcgttgcttgagcttcaaggctaagcacggctatgtgatataccgtgttcgt

SEQ ID NO: 54469 - DNA, 385 bp, Glycine max
  Clone ID: LIB3109-046-Q1-K1-A4
gatacaaaattggctcaatggcagggcaagctatgctagttccctttatattaccaaaagcctgtcttattttcttggtttctgacacaagatttttggtgaatgggattctggcacttatttttttgaaaatcactgcagaagaaagaacactcatttgagggactgttatagcctcattatctttatcctttagcactaaaataccatcaggtgtttccaatacttgtaattggttcttagatattcttccaatccaattgaatggggaaaccaagaagagaagatgttctttggtttgtgctttttttctggttttgtagcttttccaatgccttgctttcttcaaagggtgtgaactttgaaatgctagctttaatgggca

SEQ ID NO: 54470 - DNA, 400 bp, Glycine max
  Clone ID: LIB3109-046-Q1-K1-A5
ggaacttatggcgtattcgaattaattaagagagtgggtagaataagctacttcactgccatgtaataacttgtcattggttctatatatgtttgatgtcgttgtatattcgagacttgtgaaagattaggttgatcctcttttgagcctcttttgtttacttttagtctttttctaatccatgttgaaagcacaaacatggtgtgttgttttatacaattcctcataacaacaattatgcaacagttagaaatttgtctcagaattctaaaccattataatttattttctgttgctttagaggaagcgtcctagcagaatattcgaattggaatctcagaattctcaactcaaagaggatttgaaggtcgtgaggaaccagctcggtgtgtctgaatca

SEQ ID NO: 54471 - DNA, 299 bp, Glycine max
  Clone ID: LIB3109-046-Q1-K1-A6
tggacagattcaattgttaacttgcattttcatggtgtgccaatcgaagatctctgcttagattttacactccctggttattctgaatacaccttgaagccaggagatgaaatcgctgatatcaacaataaggaggagtatatatccttggttgcatatgcagctgtcatgactggaattatgctgtatacttaagcacttagagcacgtttgaaccatgcaatacgacatcattggctctcaaatatttactccatacgaactagttgggttgccttgcagatgcaatgatctttggt

SEQ ID NO: 54472 - DNA, 373 bp, Glycine max
  Clone ID: LIB3109-046-Q1-K1-A7
caagcctacaagaagttgctcgatgctcttggccagcgaacggatacccttaacaggctggaggctgaaattaaagttaacgagaagcgtatgtccacgtttgaattgttgcgcccgaagaaggaactagtagaggaagttccattggaaccttttattcctcttactaaagaggaagaagttgaggttgcacatgccttttctaccaaccggaaaaagatcttggtttcccatgagaaatctggcattgagatctcgggagaaaagtttcaatgccttagaccgggtgcatggttaaacgatgaggtaataaatgtgtaccttgaattgctgaaagagagggagagaagagagccacagaagtttctgaact

SEQ ID NO: 54473 - DNA, 405 bp, Glycine max
  unsure (1)..(405): unsure at all n locations
  Clone ID: LIB3109-046-Q1-K1-A8
gggtttattgagtttaatagtcgtgctggagctgagagaattcttcaaacatataatggggcaataatgccaaatggggggcagagtttcaggttgaattgggcaacttttagtgctggtgagaggtcgcgccacgacgattctccagattacaccatatttgttggtgacttggctgcagatgttactgattatcttcttcaggagacatttagggctcgttataactcggtgaagggtgcaaaagttgtcattgataggctaactggccggaccaagggatatggctttgtaaggttttcagatgagagtgagcaagtgagggctatgactgagatgcanggggttctttctcaacaagacccatgaggatggaccccgctctaataaacccccaccattaat

SEQ ID NO: 54474 - DNA, 311 bp, Glycine max
  Clone ID: LIB3109-046-Q1-K1-A9
gggcgcgggtgaggtagaacccttccacggtggtgactgcgcgatgggtgcctacaagtatgtttcagagctatggcgcaagaagcagtctgatgtcatgcgcttcttgcagcgggtgaggtgctgggagtataggcagcaaccttccattgttcgcttgacaaggtcgacccgccctgacaaggctcgtcgcttgggcttcaaggctaagcagggctatgtgatataccgtgttcgtgttaggaggggtggccgaaagaggccagttcccaaaggtattggttatgggaagcccacaaaccagggtgtta

SEQ ID NO: 54475 - DNA, 384 bp, Glycine max
  Clone ID: LIB3109-046-Q1-K1-B10
cgaggcctgttggtcttcgtacatgtcaaggttctgcaggcagttaacttacagaggaaagatcttcttggagcatctgacccttacgcgaagcttaagcttactgaggataaattgccatcgccaaagactactgtgaagcactacaacttaaatcctcaatggtacgaataattcaatatggttgttaaagactcaaactcccaggctttagagattaatgtttatgactggtacctgcttgagaagcatgacaagctgaccatgaatgtgatccctttaaaagaagtttcccctgaagagactcaacgtctttctcttgacctgctaactgatatggctcctaatgatgtccaaaatgagaagtcactagtgcagattgtt

SEQ ID NO: 54476 - DNA, 401 bp, Glycine max
  unsure (1)..(401): unsure at all n locations
  Clone ID: LIB3109-046-Q1-K1-B11
gatgcctggttgaatggtgaattcattactactgttcaacaacgtggtgctgcaattatcaaagctagaaagctttcaagtgcactatcagctgctagtgctgcttgtgaccatattagagattgggttcttggaactcctcagggcacctgggtgtcaatgggagtatattctgatggttcctacaatgttccagctggactgatctattcattccctgtcacttgtgccaatggggaatggacaatagttcaaggacttcccattgatgagttctcaaggaagaagttggacttgaccgcagaagagctttctgaggagaaggcattggcttactcatgcctaaattagagaccatcgctccttcttggctactgtccttgntagtaggttcccatggt

SEQ ID NO: 54477 - DNA, 403 bp, Glycine max
  Clone ID: LIB3109-046-Q1-K1-B12
gggcatatgaggttggtgcacaatcaatggtttgtccaatcattgttgaggatctcaatcctcctcgtcagatgctagtagagatgctttgtgaggaatgcggtttctttctggaaatagctgacttaatcagaggattaggtttaaccatcttgaagggagtcatggaagctcgcaatgacaagatctgggcacgctttgctgttgaggcaaacagggatgtaaccagcatggaaatatttatgtcactggttcgtcttttggatcaaacgatgaagggtggtgcatcttcgtcgaatgcaattgataacaacatgatgctgtatcattctttcccacaagctacccagataccagcaactggcaggcctagtagtttgcaatgaactacctacttatagtt

SEQ ID NO: 54478 - DNA, 320 bp, Glycine max
  Clone ID: LIB3109-046-Q1-K1-B2
gtcctcaggtttgtcaaatatcgttgctcttcatcagctcttcaccctgaacactttgttaaccatgaccattgcttcaattcagactcattctatgcatctcttattgatcattctacccacaagggacaccttgatcaaatacataaccggttaggtatcttcgggctgcaacataatgggtttcctatggcccaaccggttaatggggggtccaatctttgaccaatttggtatgcccggcagcctgttggatgaatttggttcccctgcctggttaatgtggaaggctatctttgggagttattcaaggaccattt

SEQ ID NO: 54479 - DNA, 422 bp, Glycine max
  unsure (1)..(422): unsure at all n locations
  Clone ID: LIB3109-046-Q1-K1-B3
cagggaaacaagggaggaagcaaatgcagatgtagaagtaatttctccatttgcccaattggatattcctttaattggccaagtgagaaagaagctttgatttatttcttttattattttctttatttttttctttttatttccttgattaggtagagaattttgatcatgattatggaatgtttgaggcagagttacatgatattcttagcaaagctgaagaagcaccatttttcacctggtccagaatcatcagcatgccaactttttccacttgatgatatacctttcaattctctatccttttcatcaatggtggttaccttaagtttggtatgattcacaatcagatatttaaacatgctggctttagttgtttnttttttgtcgcctactcatactgtaaccatgtatttgtcatg

SEQ ID NO: 54480 - DNA, 419 bp, Glycine max
  unsure (1)..(419): unsure at all n locations
  Clone ID: LIB3109-046-Q1-K1-B5
ggcacaagtttgttgagatagctagaagcaataagatgaaaatgaaagtgcttgttttgtttgttgctacagttttggtagcatatgaatgccatggctcagactaccagaagttccctctccaaatgaaaactgggtttggtgggcaatacagcaatgaggtggcatgtgccagttggaggcttggcgtggaagcaaacaacgtagtcaagtggcaaactgttcctgcagcttgcggagagtacatagctgactacgttctaggagaccaatatagatcagattccaaaacagttaaccaacaagcttatttctatgctaaatccctcaaactcaccaacaaagatgtctntgtcttggacgttgacgacactactctctctaatctccagtattttgctaaccatggatttgtgtgg

SEQ ID NO: 54481 - DNA, 400 bp, Glycine max
  Clone ID: LIB3109-046-Q1-K1-B6
agaaaaggtatttgtatttcttatgcttatttgctttctagagagtattaatctgtgttttaaggcaattgtaatattctgctttatattaagtttcttgatagcttttgtacaaaaaacaaagctttttcccatctacttttgcccaactttattactgctgaatattgatttactttctatgcattcagcagtgaaaaaaaaagcgctttaagtttgcacaacaataaatctcttagcaataataaatactctttgattaattgcaattaatttttcatataaaacaaaattccatctcatcaccacttgtgattcgttgtaggaagctgtggaatgggagtacacatctaaagttgccggcataatgcatgcttgtcggcacgactcacatgttgct

SEQ ID NO: 54482 - DNA, 418 bp, Glycine max
  Clone ID: LIB3109-046-Q1-K1-B7
gggagcagaggacaagatgggtagtgtgagttatagcaatctgaagaacgccatgatagcattcttggtccctctaccctccatcctattctacctctcattccaatcggccattagtactccttcttcttggtcttctctgtggacatggtgctatcaccaccctctgctattggccaatgtccttttcttcttcaatgtcaatttcctcttctggctcatcggcctaatccaatccagccactggatgattgacccgtattggacagtgatacctgtgatgcttgttcattactattcaactcaccctttggcacagtatcagtggtggaggtcgaggatcgtaacgttgttgacttgggcgtggagtgttaggctgatccacaactacttcaggcgagaaaagtggcagtggggt

SEQ ID NO: 54483 - DNA, 383 bp, Glycine max
  Clone ID: LIB3109-046-Q1-K1-B8
ggcacgattcctgtttgagtttgcatcctaaagttcatcagctaaatgtgagcacagagacacttgttccaactcctttgtcaatgactggcctatacaatatgaatttactggggcgccaattccaacccaagatgctgcggaataaaaatctcggaacctctttgcaattgagctcaaatccaacgccaatccacccaccagagcatgcggtgagcccaaagcaaatgcctgtaacaaccgacctggtccttgggcaaacaaagccagctgatgccgttccagaagaaacacacaaagaaggcattaatgacttcttgagctgcctctcttccgagtcacaggacaagttcgatgaattacagagcaaaaagcttgatgat

SEQ ID NO: 54484 - DNA, 368 bp, Glycine max
  Clone ID: LIB3109-046-Q1-K1-B9
cagacagcggaagcgtgaaatcgtacggtgaagatttgccggaggatgcggtgagagtgacgcgaagtatcatgatcgtgaaaccacctggtggtaaccagagtccgagcggatccgctccggcttcccccgccggttctactcctccggtgtctcctttttcgggagctagagagtccttccgttttcggagaaggtcgacatcagatgcgtacgagaagacaggccagaacagaccaagctcttcttctcctttcgatgtgtgacaaatgagcccgaccactatctcctccatatatggatgactgaaaatacaaatatatagtttgttttcctctggcctttgctgatgatgctgtgttccattt

SEQ ID NO: 54485 - DNA, 304 bp, Glycine max
  Clone ID: LIB3109-046-Q1-K1-C1
gacaccaggcaagatatatggtgagcatcaccgtgctatcatggcccccctctgacagatgtggactgtgtcaactgagccagtttctccgtctgatcatgggtgatcctactcgtgctactgcgtggatacaccgaacatgccagacgatcaagatatgctcaatgaaaaggatacgctacatgtgcaggtgatatattgagcaaagagtcatcttcaggtgagtcaaatggatcttcttgacattgacttcattgcgcgactcatacatggttattacggcctaatccaacttgcatgtact

SEQ ID NO: 54486 - DNA, 404 bp, Glycine max
  unsure (1)..(404): unsure at all n locations
  Clone ID: LIB3109-046-Q1-K1-C10
ggagggggagagtttcattgggaaggtaaacccagcctttgtttgcaccattccctcaaaccatttacatcagcatccaccactctctcctccctcctttctgctttcttctttctatttcaacaacccaagttatagattatttatgcgtgcgtgcatcttcttttttcctctcactagtgaatgctctagtgggtggtagtaagttttaagagactaaacacccgtttttccaaggaaatttgtgcagactttgtcagggaagttacagtgggaaaaaaaaccctcttccacttcatgtaacagacacacaactacagcactagatcactgttttggattttttatgtaaaaaaggcctgcaacttgtagcataaaatccggnggtgccctgaagtaactca

SEQ ID NO: 54487 - DNA, 400 bp, Glycine max
  Clone ID: LIB3109-046-Q1-K1-C11
ggccggagacagaggtagtttccacgacggtgcaggtcgcgacacgaaggggcttcttgcggcgtgagatcgtgcgattataccgatcctaacagagtgagatttcagggttacataatgaccaagaagaagaaacaaaatggggttgttgttggagagggtgatggtgttggtggtgttgtagatttggagtctgtcatacacaaccacgctctttttttcgacaagttgattgaattgattcccgccaagttctatctgccaactgatgacaaggagaagccatggtttcagggtctaaacaaggctgcaaaagctaaggcaaagaaagagaccaaggagaatatcaagaagtctcggaaggaccgtttagaccctgacaaaccttttgcaactaccc

SEQ ID NO: 54488 - DNA, 399 bp, Glycine max
  Clone ID: LIB3109-046-Q1-K1-C12
ggatgtaaagccaagctaagctaaggttgacactgttttacaccaacttttctctctctctgtgtacagcctaagcttaagcttatccctccccacttgttgcctctgccgtatgttatagccaaaagggtgtgtgagagagagaaacataaacacaaccaaccatcaagggaagttagagagagagttgagttgtgttgagagagatagagagatagaggagaagatgaacggtggtgaatcttacggtgctattgagacacaatacataaggaggcatcacaaacatgaaccaagggaaaaccagtgcacctctgcacttgttaaacacataagagctcctgttcaccttgtgtggtcactggtgagaagatttgatcaacctcagaaatataaacc

SEQ ID NO: 54489 - DNA, 370 bp, Glycine max
  unsure (1)..(370): unsure at all n locations
  Clone ID: LIB3109-046-Q1-K1-C2
gatagcagcatcatacaaagcattgaattcaaaaactaagttcatttcttgtgctttgctttattcctcaaaaccaaacatgtcgaacacatgcggcaactgtgactgcgctgacaagactaactgcaccaagggaaacagctatggtgttatagtagagactgagaagagctacatcgagactgttgacatggatgttccagcagctgagcatgatgggaagtgcaagtgtggcactaactgcacttgcacggactgcacttgtggccattaaggaatatgtatgaaaatgtaattgccatgtgtttggcaatacaaatctccaaataatgtaatcttcgtatgaataaatgtgtgctgntatcctact

SEQ ID NO: 54490 - DNA, 433 bp, Glycine max
  Clone ID: LIB3109-046-Q1-K1-C3
gtactttcacgggacattcaacatctgttatgtcactagatgttcatccaaataaagatgacctcatctgctcttgtgatggtgatggtgagatacggtattggagcataaacaatggcagttgtgctagagtgtccaagggtggcaccacacagatgagatttcagcctcgtctcgggaggtaccttgctgcagcggcagagaatattgcgtctatatttgatgtggagacacaagcgtgtcgatattcactaaagggacacacaaaaccagtggattgtgtttgttgtgatccttctggggagttgctggcatctgtgagtgaggactctgtcagggtttggactcttggatcagggaatgaagggaaagtgttcatgaactaagctgtatggcaataagtttcatgcatctgttttccacccaacgtacc

SEQ ID NO: 54491 - DNA, 269 bp, Glycine max
  Clone ID: LIB3109-046-Q1-K1-C4
gacagcacaacttgtttatcggaacgttgctataaacgttgttgttttcagataaacacgtgactcactatctatctatcaatcgatatctccgagttcagccgaaccaaactccgaagctatggcagagctccaaaccaaggttgaacctgttacggtcccggctccggtggatcccgagccaccgctagctgaggctccgccgctcgagaagaaagcggtggcggtgccaccacctgttccggctgcggcagaggaaaccaaagctc

SEQ ID NO: 54492 - DNA, 415 bp, Glycine max
  Clone ID: LIB3109-046-Q1-K1-C5
ggagggagagaggatccaaatccaagtacggttgggttggagagaaaatgcgtccctgctgaaaacaccaaaccctaaaacgcgaaaagggttctaagaatttgcgaaggaaagagctagcggggatggagattcactacagtaacagctatttcgagaggcgccccatcctcaagtccaaggctgccgctgtcaaatgggtcaaagaatgggttccccaagatcttgtgacaacaggagggaagtgcatgatcttaaaatgggtaacagaggataccttgaagaccttgaaagaaaaggtaaaagagccttcagtgccagagccagaacctgagccaactactgaagtactttttctttgcagctatgatggctgtggaaagacattcatagatgctggtgcattgaggaaaca

SEQ ID NO: 54493 - DNA, 394 bp, Glycine max
  Clone ID: LIB3109-046-Q1-K1-C6
agaaaaggtatttgtattttttatgcttatttgctttctagagagtattaatctgtgttttaaggcaattgtaatattttgctttttattaagtttcttgatagcttttgtacaaaaaacaaagctttttcccatctacttttgcccaactttattactgctgaatattgatttactttctatgcattcagcagtgaaaaaaaaagcgctttaagtttgcacaacaataaatctcttagcaataataaatactctttgattaattgcaattaatttttcatataaaacaaaattccatctcatcaccacttgagattcgatgtatgaagctgtggaatgggagtacaaatctaaagttgcccgcataatgcatgcttgtgtgcacgacgcacat

SEQ ID NO: 54494 - DNA, 325 bp, Glycine max
  Clone ID: LIB3109-046-Q1-K1-C7
caaaggggattaaaggcagaggtattgccattgcctctggggcttgcaacaccaaactgatacacacttaatactattatagtaaaaattagccaccaaagtacactaaccgctattatcatacaactcaatagctagattggagcaacgtgaaagatctatcatttgcaaccaatgccattgaacatatgtaaagacatatatatattgccacggattatattgactgaaccaaaggattcattaactgatgttctgctttatacatggcatatcatttattggaagaattatctaatggaagaacttctttttatgagcagta

SEQ ID NO: 54495 - DNA, 388 bp, Glycine max
  Clone ID: LIB3109-046-Q1-K1-C8
gaagggtgtggtgcgtgtaagtaatttgaaagatgctgcagaccatataggtgaggttttgaaacgtgtgaagaaagagcatttggagagagcatataaaataaaagagtgggatgatgagaatgacttcttactgcagctttgcaaatcaactggcaaacttctgaagggtggtgagcctgacttgatgactgcggcaaagatgatacttcatgactggcagaggggtcgaattcccttttttgatccccctcctatgcaggaggacttgtctgaggaacctaatgttaatggtgttgacctagatgattcagttgatggcaactaggcttctgctgctatgaaggctatcgcagatgttctttcatcgcagcaacaaataaatgta

SEQ ID NO: 54496 - DNA, 296 bp, Glycine max
  Clone ID: LIB3109-046-Q1-K1-C9
cgattacaattttgcgtggcaaggattttcattcgtatcggaatgacattcagagacgttgactccctttgactcccgaatcattggccaacctttctgccttttactccattactttcaataccgatgatgccgatggacggaattgcaagcctgaagtggctaaaactggtttgggctcttctgcagcgattgcaatggctgtagttgctgctctactgcattacctggatgctgtcaagctttcctcttcgaacgatcctcgggaaaggaatgatgttgcagatcttgatatg

SEQ ID NO: 54497 - DNA, 395 bp, Glycine max
  Clone ID: LIB3109-046-Q1-K1-D10
gaaaacaacggtgacaacaacaacaatggctcttcacacacgacaacgttgctcattggctcaaagacgcatcatcattccttttacaaaagtaacaactatccattccctcattcatcatccgcggcatgctagatatatatacatatatatatagttccgagctaatatatatatgtaattaaagataggtgattagtgattattactattagagatcaatcccccatgcaccacatgctttcttatatatatgtatacttcataaatggaaagatcaattcatagagatttttctaatttgttgtaatttattttatatgtaatatatttatggtctatgcgtacattacatatgaataacaatgcaaggttatcacatagttcaatcaaaa

SEQ ID NO: 54498 - DNA, 292 bp, Glycine max
  Clone ID: LIB3109-046-Q1-K1-D11
gatatatatgtaatagaaggtgtcaaaacacttgaactttaggctccatctcaaaaaaatgggtggtttagctagcaatcttcctctaattgttatggtgggtctgcaaattcattatgcagcacttgctatattcacaagagccgctttgttagatggattgagtacgacggtctttgtagtgtacaagcaaggcatagccactttggctttggcgcctatgtttttctctcctaagcggagacaatcagtgaaagattctttgggattcaagagcttctttttgatggtt

SEQ ID NO: 54499 - DNA, 375 bp, Glycine max
  Clone ID: LIB3109-046-Q1-K1-D12
gacatggatcgatttggagatgttgatgctttagatgataatgttgaatcctttctatcaaatgatggcggagatggtgggaatctctatggaacagtgaaacaaagtccagctgagcaacagaaagagtcttctaaaggtttcacctttgctgaagttggttgcagaagaacaaggaacagcaaagttacttgttgtcacttttcctcagatggaaagtggctagccagtgctggagatgacatgaaggttgacatctggaacatggacactttagaaacagagagcactcctgcagaacacaaatcagttattacagatgtccgttttagacctaattcatctcagttggcgactgcttcaactgataaatct

SEQ ID NO: 54500 - DNA, 285 bp, Glycine max
  Clone ID: LIB3109-046-Q1-K1-D2
gtgactgatcgaaagttaaatcagatcagaagactctacgcaggcgtgctcataaccgtgaagttgccagaaaaagccgcttgcgaaagaaagcgtatgttcaacagttggaaagtagtcgattgaatctgacccaactagagcaatgagcttcagcgagctaggcagcaatggattttcatatcaagctccggtgatcaagcacatacattgagtgtaaatggggcaatgcaatttgactcactatatgctatgtggctggtatagcaaaatcgacaaaataat

SEQ ID NO: 54501 - DNA, 425 bp, Glycine max
  Clone ID: LIB3109-046-Q1-K1-D3
ggcggtttctgcaattggttttgaaggtttcgagaagaggctggaaatatcctttttccagccgggactttttgctgaccctgagggaatgggtttaagagctcttgcaaagtcccagttggatgagatacttacaccggctgcttgcaccattgtttcatctctcagaaatgatcatgtcgactcctatgttctgtctgagtccagtctctttgtttatgcctacaagatcatcatcaaaacctgtggtactacaaagctactgcttgcaatcccacccatattgaaatttgctgaaatgctttccctcaatgttagatctgtgaattacaccaggggaagtttcatctttcccggagctcagccctatccccatcgcaacttttctgaggaagttgctattcttgatggctactttggcaagc

SEQ ID NO: 54502 - DNA, 286 bp, Glycine max
  Clone ID: LIB3109-046-Q1-K1-D4
gaagagaatgatgcggatttggaatcggaatcactgaaagcgttgcttaacatgagaagaaatgcaaaagagaaagagctagaggcattgctttctggggagcaagattcttggtcgtgctacattgagggtcaagctggtgctgggggtactgagagcatggactgggctgcaatggtcatgcagatgtataagtcatgggcacagcaacgtggatataaagtaactgtagtggatgaaatgcctggtgagattgcaggaatcaagcgagctaccatcaaagtag

SEQ ID NO: 54503 - DNA, 411 bp, Glycine max
  Clone ID: LIB3109-046-Q1-K1-D5
gattcatatgttgtctattgttatgttaattggtcttgctagttgctagcacatcaatttctattatgtgttggatgacatcatggttcagccagattctatttttttctggttcttttccattttcatctttggtttatgattgatcattgctgagaaaattatcctcaactgggattttcatttccggggggagcatgacctgaattgcatggtttttttttttgttttttggctagattatatcaaatcaattaagattctgggttggatggcatgatggtttagccagattctgttttttctggttcttttttagtttcgatcgttggcttatgatttatcattgctgaaaaagttattctcaactaagaattttctttttctggggggaacctgaaatgaattgca

SEQ ID NO: 54504 - DNA, 352 bp, Glycine max
  Clone ID: LIB3109-046-Q1-K1-D6
gagagaatgatgatgaagtctgctatgtgtgcagtggtggttgtagcacttcttcttctggcggaggtggggcccatggctgaggctgtgacatgcaccccaacagagttgagtccgtgtcttccagcaatcacttccggtgctaaaccttccaatgcttgttgcacgaagctgaagcagcaaaaaccatgcttatgtggctacctcaaaaacgctagcttgaagcagtatgttaactctcctaatgcccgaaaaaccgttgcttcttgtgggattccctttccaacttgttaattaattaagccttcttataattaaagtgtgggatatatatatatatatagataaacag

SEQ ID NO: 54505 - DNA, 347 bp, Glycine max
  Clone ID: LIB3109-046-Q1-K1-D7
ggagttgaaggaggtgaagctccgtgatgaatactatgttatggaccctgaaaaggccgtggaattggtggatgagaacactatttgtgttgctgctatccttggttcaacactaaatggagaatttgaagatgtcaaacgcttaaatgatctcctaattgaaaagaataaaataactgggtgggacactcctattcatgttgatgcaacaagtggtggcttcattgccccatttctttacccagagcttgagtgggacttccgggtaccacttgtgaagagcatcaatgttagtggccacaagtatggtttggtctatgctggaatcggatgggttatctggagaa

SEQ ID NO: 54506 - DNA, 355 bp, Glycine max
  unsure (1)..(355): unsure at all n locations
  Clone ID: LIB3109-046-Q1-K1-D8
ggagtgagacaatatcacacataatataattccaaaatcactcctattgctatagcaatatgatgggtgacactgagatcaaaccatcagttgaagtagtcatatgtgcttccatgaacaataacaatagcgcaaacaaccacaccctcccaaccgacatcaccaagtcatcacaatcacacttaccaatcttgaccaagctccatgctggttactttttcatatgcctttcctttggtgcacaagctttgctctggaagagtttgagtaaacacaacaaggactcacanactctctggcatggattcaatttgatgccttccattgcgtttctactactttggtgtgtggcact

SEQ ID NO: 54507 - DNA, 399 bp, Glycine max
  Clone ID: LIB3109-046-Q1-K1-D9
gtagtacaaatataaaaaacatatttaggtcttcttaagttggttactaatattaatactaataatcgttgaaataaaatatgaattttaattaaaaaacaatactaataatatttatggtattgtgtttgaatttaataagagcaaattatactgacaaagcgtgaagtgtcttagattcgacgaaacctcaaattattctatgttcgagactatttggactttggctaggctctgtttgttatactcacctagttaagttatatttcctccaattttaaatattagaaaaaaaaacaccccattttttttgtctcaattataagaaaattcaactaacgttatcttatttattattatctctaaattatccttcatttaattgatggattaattata

SEQ ID NO: 54508 - DNA, 434 bp, Glycine max
  Clone ID: LIB3109-046-Q1-K1-E1
gaaggcatgtagtggtactagggaagaaaagctagtaaaagttctctagtaagatcactttcaggggatattatagggaagaaattctagattaagaatagaacttgtctatagtttggaattatgcactcgatttgagattccatttgaatggatatgtcaaccataacaactatattgaattacaatatgctatctttgtgaattaaatatgcatatgacatggaaaatggaaataagtcatgacacatcctgacaaagcaagggtatagataatgatatcttctttctatgaatcctttgcaagaaaaatggaaagagcaaataatgattccttaggtaatgaaaagagcatgtagtggaatatcctgagtcccaacacgaaactattaagtaaaatacagagattccttaagtaatatttggatattgat

SEQ ID NO: 54509 - DNA, 388 bp, Glycine max
  Clone ID: LIB3109-046-Q1-K1-E10
gttagagagagagagaaacaagtcagcacccgggtgtagcctctcttctattcttagatcgccgataccctttttgctttctcaaccgagagagatagacagaatctttcgtagttcggtcgcgtgtgttgagttgacagtcaccaatggcatcaccatctgctaggacacgttcccattacgattacctgatcaagcttctatcttataggcgatagacagtgtgtgaacgagctgactgcttatgcgatgtcctgaggggtccttcacaaccggatgttatcaccaccattggcattgagattacgatgacatccattgaacttgatggcaaacgcataaagctacaaatctgtgatacagcttgccatgaaccgatttctactat

SEQ ID NO: 54510 - DNA, 390 bp, Glycine max
  Clone ID: LIB3109-046-Q1-K1-E11
tcattaagtcatggtcagcacatagattgtggtggcagcacaatggatcctggcagtggaggaaatggtcttagcaacaactctaatctcacctcaaaacaacgtttacggtggacacatgaattgcatgagcgctttgttgatgctgtggctcaacttggtgggccagatcgtgccacacccaaaggcgtgctcagagttatgggtgtacaaggcttgaccatttaccatgtcaaaagtcatttacagaaataccgacttgcaaaatatttacctgactcttcatctgatgaagggaaaaaggccgacaagaaagaaacaggggatatgctttccaatcttgatggttcatctgggatgcagattactgaagcactaaagcttcaaatg

SEQ ID NO: 54511 - DNA, 346 bp, Glycine max
  Clone ID: LIB3109-046-Q1-K1-E12
ggaggagactgagaaaacagaagaaaacaaagtggaagacacagtttctgcgttgaggtctttgatggtttctcactctccgccgctggatgccttagtggtgccctctgaagattatcacctgagcgaatatgtgtctgcacgagacaagcgccgcgaattcgtttccggcttcactggaagtgccggcttggcacttataacaaagaaagaagcactgctgtggacggatggacggtattttttgcaggctgagaaagaacttagtgctgggtggaagctaatgcgaattggtgaagatcctgctgtagatatctggatggccgataatttgccaaaagaagca

SEQ ID NO: 54512 - DNA, 335 bp, Glycine max
  Clone ID: LIB3109-046-Q1-K1-E2
ggcacaccaacaccaaaacaaacccactaagatggcttcctttgtatccttcctagtgctgcttcttgcagcccttatcctcatgcctcaagggcttgctacttactacaaaccaattaagaagccaccagtgtacaagcctccagtgtacaagccaccagtgtacaaaccaccggtttataagccaaaaccaccggtttacaagccgaaaccaccggtttacaagccaccatataagaagccaccatacaagaaaccaccttatggaaagtaccctccagtagaggacaacacccatgcctaaagcaagcaatgaggtctattatctacttaat

SEQ ID NO: 54513 - DNA, 402 bp, Glycine max
  Clone ID: LIB3109-046-Q1-K1-E3
ggaggattgaggcagagaagaagccgaagacgaagatcgtgtgcactctgggccccgcatcacggtcggtcccaatgatcgagaagcttctgcgagcaggcatgaacgtggcgcgcttcaacttctcccatgggtcccacgagtaccaccaggaaaccctcgacaacctccgcgccgccatggagaacaccggtattctctgcgccgtcatgctcgacaccaaggggcctgagattcgaactggttttctcaaggacggtaagcctatccaactgatacaaggtaatgaaataaccatttccactgactatgacctaaagggagatgagaagacgatttgtatgagctacaaaaagctgcctgaggatgtgaaacccgggatggtcatactctgtgcggatg

SEQ ID NO: 54514 - DNA, 292 bp, Glycine max
  unsure (1)..(292): unsure at all n locations
  Clone ID: LIB3109-046-Q1-K1-E4
ggaggattgaggcagagaagaagccgaagacgaagatcgtgtgcactctgggccccgcatcacggtcggtcccaatgatcgagaagcttctgcgagcaggcatgaacgtggcgcgcttcaacttctcccatgggtcccacgagtaccaccaggaaaccctcgacaacctccgcgccgncatggagaacaccggtattctctgcgccgtcatgctcgacaccaaggggcctgagattcgaactggttttctcaaggacggtaagcctatccaactgatacaaggtaatgaaat

SEQ ID NO: 54515 - DNA, 414 bp, Glycine max
  Clone ID: LIB3109-046-Q1-K1-E5
ggtagagtgaagagaatggctcccaagggtttaacctttctggctgtgttaatatgcgtttcagcactgtcactgagtccttctgttgcgggggaagggcaaaataatggccttgttatgaacttctacaaggaatcatgccctcaggctgaagacatcatcacagaacaagtcaagcttctctacaagcgccacaagaacactgctttctcctggctcaggaacatcttccatgactgtgctgttcagagttgtgatgcttcactgttgctggactccacaagaaggagcttgtctgagaaggaaacagatagaagctttgggttgagaaatttcaggtacattgagaccatcaaagaagctttggaaagagaatgccctggagttgtttcatgtgctgatattctcgttctc

SEQ ID NO: 54516 - DNA, 328 bp, Glycine max
  unsure (1)..(328): unsure at all n locations
  Clone ID: LIB3109-046-Q1-K1-E6
gtacccagacttgagctacactgagtcaaccaccaccgagaccttggtcatgggagtggcacctgttaaggctcaatttgagggtgctgaaatgggtgtgcccgctgagaacggtggctgcaaatgtggaccaaactgctcctgcaacccctgcacttgcaagtgaggtgttgggagagcaagcttcaagcagagatagcccttaattaggaataatgataaactattaatgtgtagctaaaaacttatgtattatgtctgtgatggttttcgtgcactctggtgttttgtgttaaacanacatccttagaataaagtggtcatgtct

SEQ ID NO: 54517 - DNA, 402 bp, Glycine max
  Clone ID: LIB3109-046-Q1-K1-E7
cggggaacatagtccgaggaacaggcaccacatgtatggcagggagttccgatcgatgttggacggactcgacgaggaagggtgtgttgaagaaccggggcatcaatctgagaagaagcgtcgactaagtgtggaacaagtgaaggctttggagaagaactttgaggttgaaaacaagcttgaacctgagaggaaggtcaagcttgcccaagaacttgggttgcaacctagacaagtagccgtttggttccaaaaccaccgagccagatggaaaaccatacaattggagagagattatggtgtcctcaaagccaattatgatgctcttaagcttaactttggcaccctcaatcaggacaacgaagccttacgaaagcagataaaggaattgaaatcgaggct

SEQ ID NO: 54518 - DNA, 366 bp, Glycine max
  Clone ID: LIB3109-046-Q1-K1-E8
gaccaaaaacaaaacaagccaagtgaaagagagaagaaaagtcaaagacaatgtcagggatcattcacaagattgaggagacccttcatgtgggaggccacaagaaggaggaggagcacaagggtgagcagcaccatggtggagaatacaaaggggagcatcatggtgaacacagtactgaatacaaaggagagcatcatgttggtgagcacaagccggagcaccatggaggagaagagcacaaagaggggttcctagacaagatcaaggacaagatccacggctaggagggtggcgccaccgccgagggcgagaagatgaagacgacgaaggagaagacgaagcatgaacatggccatgacagca

SEQ ID NO: 54519 - DNA, 389 bp, Glycine max
  Clone ID: LIB3109-046-Q1-K1-E9
gagagaaagagagagaaagatgtcgaagcgtggtcgtggtggttcggcggggaacaagttccgcatgtcgctgggtcttccagtggcggcgacggtgaactgcgccgacaacacgggggcgaagaacctctacatcatttcggtgaaagggatcaaaggccgtttgaaccgtcttccctcggcctgcgttggcgacatggtgatggccaccgcgaagaagggaaaacccgatctgaggaagaaggtcttgccagctgtcatcgttcgccagcgcaagccatggcgccgaaaggacggcgtctacatgtacttcgaagataatgctggtgttattgtcaatcccaagggagaaatgaaaggttctgctatcactggtcccattggaaaag

SEQ ID NO: 54520 - DNA, 399 bp, Glycine max
  Clone ID: LIB3109-046-Q1-K1-F1
ggagccaacaacaacatcattgatgcaatttctgttcccataaataatgcccgggagaaggagaaggaagttgaaatcgttgagtgatacaattaccgacagcagactggcatcagtggaggtggaaaatgaatatttagagctgcaaacttggtctgatctccctactgaactcttggaattaatactatcccgtttaagtctagatgataatgttcgagcttcggttgcttgtaagagatggcattctgttgccacttctgtatgtgtggtaaaccaatcaccatggctaatgtattttccgaaatttggtgactggtatgaattctatgaccccgcgcactcgaaaacctattccatcgagttgccacaattgaggggatctagagtttgttacac

SEQ ID NO: 54521 - DNA, 388 bp, Glycine max
  Clone ID: LIB3109-046-Q1-K1-F10
gaagagagagagagagagcgagatttttttgtacacttgacatgtcttcatattttccaagctttgctacaaaaatcccacgtatgggaaagggatacgatgatgtgttgttcacagtgaccaaccaattagtaaaatcaggttcatggtccaacaactataaagtgccctgcaacctctcaaagcagcacattggttttgtatcgaaattcgaccaaatttgttcttctcctgtgatggaggacgagcataaaaagttggattctttgcctgaaattgaattatcagagtcagaggaatattccaaggaattggaagtggctgttagagcagtgcaaatggcgtgttccctctgccagagagtgcaggacactttgatttccaacgc

SEQ ID NO: 54522 - DNA, 381 bp, Glycine max
  Clone ID: LIB3109-046-Q1-K1-F11
gaggcaacagataagaaaaaatagatcagtggcggtacgtgaaagttaacgccattaatggagtctgagaagaatttaaggctgccactctctgatgatcgcaatcagagggatgaaagacaacgaaaagtttcagccatgacaagaagaggagtcttcgctgccttatcatatatggcctattcggttctcttggtcatgttcaacaaagcagccctctactgttacaatttcccatttgcaaatgtcatcacacttgctcagatggtgtttgcatttattattctctacgtgttgagatccttgaagataatttctttcacagctggtgaatcgctgagcagttctaagaatacaataatatttgtgtcctataggaca

SEQ ID NO: 54523 - DNA, 394 bp, Glycine max
  Clone ID: LIB3109-046-Q1-K1-F12
ggcaggaggtggtggagctccagcacctaagattgatgagccacaacctcatcccccgaaggatcagttaccgaatgtttcttactgcattacgagtcctcctccatggcctgaggccatacttcttggttttcaacattatcttgtgatgctcggtacaactgtgctaattcccactgctcttgttccccagatgggaggtggcaatgaggagaaggcaaaagttatccaaactctactttttgtagctggaattaacacattgctgcaaactctgtttggaactcgattgcctgcagtaattggagggtcttatacttacgttgcaacaacaatctctattattctttctggtcgattcagtgatgagccagatcctatagagaaattcaag

SEQ ID NO: 54524 - DNA, 379 bp, Glycine max
  Clone ID: LIB3109-046-Q1-K1-F2
gcagcaaggagatgatcatctctctgaatctagaatttcaacacaagcttcagtggaggaatcaatcttccagcaagttagtggtgaggtggaagaaaatcaccatgtagaccctgtttatgatcttagtccacaagcttctgaaacactccaattgtttccttcaatatcttctcatgattctgctatggagttgtctgagagggcattgcctcctgcttcagtagaaatgactgctaatgcggcagaagaagagtccaaagtgcatgatcacagactggaaggtaatacttctgatcatgataaaactcaagcagcctcttccgaactacatgaggaagccaaaaatgaattgagttctgagaaatctgaagatgtg

SEQ ID NO: 54525 - DNA, 412 bp, Glycine max
  Clone ID: LIB3109-046-Q1-K1-F3
ggagcaagagtgaagagcgaagagaatggctcccaagggtttaatctttttggctgtgttatgcttctcagcactgtcactgagtcgttgtcttgcggaggataatggacttgttatgaacttctacaaggaatcatgccctcaggctgaagacatcatcaaagaacaagtcaagcttctctacaagcgccacaagaacactgctttctcctggctcagaaacatcttccatgactgtgctgttcagagttgtgatgcttcactgttgctggactccacaagaaggagcttgtctgagaaggaaacagatagaagctttgggttgagaaatttcaggtacattgagaccatcaaagaagctttggaaagggaatgcccaggagttgtttcctgtgctgatatcctcggtctc

SEQ ID NO: 54526 - DNA, 244 bp, Glycine max
  Clone ID: LIB3109-046-Q1-K1-F4
ggattttcttgtaattttgaaaaaacacagtgaaagtggtggcacggcagcaaaacaagcgacggggaagcacttactcttccgatttgggaactaaccaaacagatcacagcttctagggttttaggttccgtccaattagcggattctctctctctctcttcagaaatggataacagtagctcagaacagaccgtgcaagatggcaaactctacagaaacctcaattgtctcattggcggtt

SEQ ID NO: 54527 - DNA, 427 bp, Glycine max
  unsure (1)..(427): unsure at all n locations
  Clone ID: LIB3109-046-Q1-K1-F5
ggaaaaaaggaagaggaacgaagcaatcgcaagtcgtctgttctgtcccgcgggagcagacgacctgtcttcatcgccaaacaacctcaaaaacattcatcaacgttcactattaatccatccatcattaagtaagaaaataaggttcgatttttttatctttgttttgcttctgatccatcatggaggtgccgagttcctgggatgcccttcgcaaacaggcaagaaaacttgaagctcagttggatgagcagatgaattcttatcgtaaattggtttctaataatgtttctacaaaagctgacgctgcanagagtgatctagagtcttggatttgagcgttactaaaacaactgcaacaagtaaacacacagatgcaagcttgggtatcatctggtggttcagaaatggtttctcatactttgac

SEQ ID NO: 54528 - DNA, 321 bp, Glycine max
  Clone ID: LIB3109-046-Q1-K1-F6
gatttcaaagggatataatataaagtaagcactctacttccttacccttttgccctgaacatgtatatataatatatatatataatattgtcttaatatttttgctacctttctttgtgcttcatcgtcaaccgtacggtaaagaaactatagccacctggaattctgtctctgacatggtcgatgatgacaagagaaataataatctacgacagctgctagtgatttgtctctgaaagaattaggagcttattttatttctagtgccatgaagagagcaagtgaatgggcttattctcatgagattccaagtgatgtcac

SEQ ID NO: 54529 - DNA, 317 bp, Glycine max
  Clone ID: LIB3109-046-Q1-K1-F7
ggtttcaatgggatattatattgagactggactctgctttgttaaccttgagatctgagcatctatctctacgctagtatactatgatattggcccaatagctcgtgctacctatatttgcactttattgttaaactcacgagaagagctctcttggcgaatgcaatcatgcctgtgactgccaacgagcatagcccagatcctcagtctgaatatgctgtgaaatctgatgcatgtgaagggaagcccgatcatcaaatatgtgccactgcatgaagaggacctgaccctgatctgattgccattgcagaacgaat

SEQ ID NO: 54530 - DNA, 386 bp, Glycine max
  unsure (1)..(386): unsure at all n locations
  Clone ID: LIB3109-046-Q1-K1-F8
ggaagcaagtagtagaagaagaagagggtggagaatcaaaaatgggagaagagagagaagatccacagaagctaaagcgattagcggcagattcatacgactacgacaacgactctcgatggcccgattactggaacaacgttctcatccctccccacatggcctctcgtgacgacgtcgtttcccacttcaagcgcaagttctaccatcgctacgttgatcctgattttgtggtggagccaatgtctgttggtggcagttcatcccagccagtgcgttcatcaactacctnctcatcgtcgcccctgacaaataatcaacctcgtgcaagaagttctggatcaactaatagaacttcagggacatccacaactgcaggtccaggt

SEQ ID NO: 54531 - DNA, 351 bp, Glycine max
  Clone ID: LIB3109-046-Q1-K1-F9
ggtctctctggtctacaatcaacgtctctgtctcggttcgggctacattcctgggatcagctggctatgcttttcaagggcaaaaaatgacagatgcaaagccagataaacccttgatggcatcttcatcgcgaaaccttcctgatttcaagaagtctgttaagttgaagtatgtcaagcttgggtatcattacctcatcacccatggaatgaacctctgactgtccccccttgtggtgctgattgcatcccagctatctaccttctccctacgagacttgtatgatctttgggagcatctacaatacaacttgatatctgatattctttgcttaactctccttgtttcct

SEQ ID NO: 54532 - DNA, 394 bp, Glycine max
  Clone ID: LIB3109-046-Q1-K1-G1
ccagatgaactattgataggagagaatgacatcatggagcaaatattagtacaagggcactgcaaagatcaaagaacggcaatggagacagcaaaaacaatcattttcttgggacttcttgaccagactgaaatccctgcttcctgcaaaagtgcttttgatgttgcttgtttccgcatggaggagaggttatcatacaccagcacagaaaaggatatggtgcttttgcatcatgaagtggaaatagaatacccagatagccaaattacagagaagcatagagctactttacttgaatttgggaagactcttgatgaaaaaaaccacaactgccatggcccttactgttggtattccagctgctgttggagctttgcttttattgacaaacaaa

SEQ ID NO: 54533 - DNA, 399 bp, Glycine max
  Clone ID: LIB3109-046-Q1-K1-G10
ggaagaaggggaagaagggaaaggtccattcaacattattgtcattcagagaagagaagaggttttgcatcgcatcgcacagagatgaattcaattacaagaagcggatcgcttagtatcatcctcgttgttttcttctctttgcacttcattcttggtttttccgacgactcatcacctgcttcaaaagatgctacaaagacagaacctcatgccggaagaagcactagtgctatagttatcattgtattaattgtgcttgtgttcttttctttgttctcctttgtactttttaagctgtggcggaagaagaaaagggaggagcaatatgctcgtcttttgaaattatttgaagaggatgatgagttagagcttgagcttggcctaagggactgagac

SEQ ID NO: 54534 - DNA, 354 bp, Glycine max
  Clone ID: LIB3109-046-Q1-K1-G11
gggaacagtgaagagcagcaagagtcttattcatcttgatctgggggcaaggcaacccaaactatgacgtttcgtgtgttgctgttactggtggtgttggtggatgagattggcgcggactccgactatgccaaacgcgactaccacaggtctcccaagtcgtaatcctgcaataaccccttccaattggtgacagtggagagctcgctggactgtgaggaaggacatgttcacaatggcgttagtgccagatttgggtctgtgttgccggtcatacctgtcaagagtgttacaactgccgcaatattcgctaatcccatagactgctgttacaattcaacttcaaagttatct

SEQ ID NO: 54535 - DNA, 369 bp, Glycine max
  Clone ID: LIB3109-046-Q1-K1-G2
ggccgaggaaaagaaagaaatagaaaaagaagaaaaaaacacagcgtcctagatttcctcttctctgcttcggaagaaagagaaaacaaacaaaacaatggcgttcgcttctttcctcggcagagtcctcttcgcttctgtcttcatactctctgcttaccaacaatttaatgaatatggagttgatgggggacctgctacaaaagcactcagacctaagtttgatgcctttacacatcgggtgcattctcaagtgggctttcaaattccagagattaatctgaaatttttaattgctggggctattgctctgaagggtcttggaggggttcttttcatatttggcagctcttttggagctttgcttct

SEQ ID NO: 54536 - DNA, 318 bp, Glycine max
  Clone ID: LIB3109-046-Q1-K1-G3
gggttcaatgaattaattcccagggagttaatatctatattcaatgacaaagagctggaattattgatcagtggacttcctgaaattgatttggatgacttgagagcaaatacagaatattctggatatagtggtgcgtcaccagttatccaatggttttgggaggttgttcaaggtttcagcaaagaagacaaagctagactgctgcagtttgtgactggcacatccaaggttcctctggagggatttagtgctcttcaaggaatttcaggtgcccagaggtttcagatacataaggcatatgggagttctgatcac

SEQ ID NO: 54537 - DNA, 382 bp, Glycine max
  unsure (1)..(382): unsure at all n locations
  Clone ID: LIB3109-046-Q1-K1-G4
gataccaaaaacaaaacacaagccaagtgaaagtgagaaagaataaaaatcaaagagcataatgtcagggatcattcacaagattggggagacccttcatgtgggagggcgcaagaaggaggaggagcataagggtgagcaccatgctggagaatacaaaggggagcaccatggtgaacacagtagtgagtacaaaggagagcatcatggtgaacacaaagctggagagtaccatggtgagcacaagccagagcacaaagaggggttcctagacaaagtcaaggacaagatccatggtgagggcggcgccgccgagggcgagaagaagaagaaggagaagaagatgaaagagcatggncatgagcatggncatgacagcagc

SEQ ID NO: 54538 - DNA, 375 bp, Glycine max
  Clone ID: LIB3109-046-Q1-K1-G6
ggagcaagagtgaagagcgaagagaatggctcccaagggtttaatctttttggctgtgttatgcttctcagcactgtcactgagtcgttgtcttgcggaggataatggacttgttatgaacttctacaaggaatcatgccctcaggctgaagacatcatcaaagaacaagtcaagcttctctacaagcgccacaagaacactgctttctcctggctcagaaacatcttccatgactgtgctgttcagagttgtgatgcttcactgttgctggactccacaagaaggagcttgtctgagaaggaaacagataggagctttgggttgagaaatttcaggtacgttgagaccatcaaagaagctttggaaagggaatg

SEQ ID NO: 54539 - DNA, 417 bp, Glycine max
  unsure (1)..(417): unsure at all n locations
  Clone ID: LIB3109-046-Q1-K1-G8
ggaagtgcgaaggacaatgagtgttcggtccaaaaacttgaactctgtattctatgcagattcgtaccatcccattcaagctggcagcatcgacggcaccgatgttgttcctcacgataacgccgtttatcgcgctcaactctgttcctccatcggcctctatgacccatttggtgatcccaaggccactggagacccttattgcactctctttgtcgctcgtctctctcgcctcaccaccgaagatgatctccgcaaggtcatgagtaagtatggtcgagtgaagaacttacgcttggttagggacattgtgacgggagcttctcgtggttatgcttttgttgaatacgagactganagggagatgcgacgagcatatatggatgctcatcatttgattggtgatgattctgaaat

SEQ ID NO: 54540 - DNA, 216 bp, Glycine max
  unsure (1)..(216): unsure at all n locations
  Clone ID: LIB3109-046-Q1-K1-G9
ttggggttgttcttgataatatgtgccactcggcaggccaantgaaggatgctctacgtgtaaaccctttctatattgtgctctaacattaggctctatcattcatgctcgtcatgatatgcacaggatgagataaattacaatgtttatagtttgttgaaagatgaaagcttgattccgtttcttacagatcgtagcatcttgaagcaagtgtca

SEQ ID NO: 54541 - DNA, 396 bp, Glycine max
  Clone ID: LIB3109-046-Q1-K1-H11
ggaagttcttggtaatatgtgccactcatcaggccaagtgagggaggctctaggggttaccctttctatattgtgctctaacattaggctctatcattcaagccgtcatgataatgcacaggatgagagaaatgacaatgttgatagtttgatgaaagatgaaagctgggttccgtttcttacagagcgagcagctgaagcagttgtcaacattcagattgctacccaatcagataaagtagtgaatcctgtagattcaagttctcaaaatgggcatctagatggtgattcacaagatgacattaaatggatggaaacgctactctacttcatcatctcatcattgaagtctgggagatcctcatatctgctcgacgtgcttgtgggacttctata

SEQ ID NO: 54542 - DNA, 379 bp, Glycine max
  Clone ID: LIB3109-046-Q1-K1-H2
ggagcgaagaagatattagggtttttgagtgcggtgcggcgatcctagcactctcttctgcagctttcgccgacagcttcattcaccatggctgagcaaaccgagaaggcttttttgaaacaaccaaaagtgtttctcagctcgaagaaaactgggaagggaaagagacccggaaagggtgggaaccgcttttggaaatccattgggcttggatttaagactcccagggaagccatcgaaggaacctacattgacaagaagtgccccttcactggcaatgtttccatccgtggccgtatcttggctggaacatgtcacagtgctaagatgaacaggactattattggtaggaggaaatatctccattttatcaagaagt

SEQ ID NO: 54543 - DNA, 366 bp, Glycine max
  Clone ID: LIB3109-046-Q1-K1-H3
ggagaaaagaggaaacgagaggagcattgcagaggtggggaacctggaatggaatctctgatccattttgtgtgttgaatttgattttgtattgttatagattacagatttggtgggcaatggatagggacaacaaatctcctccaccttcttctctttatgtgaaatcatcatcttcatccttcagccacgacgacataagcgccatgccggagaatccacccaagaacagaggccacagacgcgcccattccgagattataaccctaccggacgacctatccttcgacgctgatctccttcccgacgacgacaacgacttgctctccctctaccttcaattcgatcagctcgattcctcttcac

SEQ ID NO: 54544 - DNA, 321 bp, Glycine max
  Clone ID: LIB3109-046-Q1-K1-H4
gtttccaagatcaaaccacaggcccagtgaaggggagaaggactaaaaatcaaagagcataatgtcagggatcattcacaagattggggagacccttcatgtgggagggcgcaagaaggaggaggagcatacgggtgagcaccatgctggagaatacaaaggggagcaccatggtgaacacagtagtgagtacaaaggagagcatcatggtgaacacaaagctggagagtaccatggtgagcacaagccagagcacaaagaggggttcctagacaaagtcaaggacaagatccatggtgagggctgcgccgtcgaaggcga

SEQ ID NO: 54545 - DNA, 433 bp, Glycine max
  unsure (1)..(433): unsure at all n locations
  Clone ID: LIB3109-046-Q1-K1-H5
gaagacaaagtgggttgtgactgggtggggaaagagagaaagtaataatggaggaatcgttagggcagaaatggaagcagccagagttcgctttggcatcagtttccgacctctctttggctccttcttcttcggcttcgccgggaattgctcgcttcaactctgacggtctccaaattcatcaccaatctcaccagattccattcaatgttgatcctcgaactgttcagttattcaaggtgagtcctgttctatcggtttgcttggtggaaggatccgatgttggtaaaaagacattgtattccaggggagtcacaatccagtttagaaatgatgaggagagtgcagccttccattgtgtagttcaacagttggaagaagggaagtaatgctcaagaagganatggacgaaatggaacnntatacacttcta

SEQ ID NO: 54546 - DNA, 428 bp, Glycine max
  Clone ID: LIB3109-046-Q1-K1-H6
ggacaaaactcgaagcagaaactgagctcaccaacacagttgcattattttctttccagatccaactcaaaattgcaatgggagtagaagatacagatatttgtatcatcaaggagccagatcatgttgtagtctattcagatggcatttcccatgattcaggtcatgaagctggaagtgatcatcacaatattacagagtcttatgaacaaatcaatgagactactgaacatcatagttcagaggagagtgcaaaggaatatgcggtgaaggaatgtacaacagaaatttctgttaaggtctctgatgtctctaatgttaaaaaatgtgaggataagttaacctcagattctgagggtgtcctcagtgagaaaagttttaaatctcacataacagggggtaaacatatgcacgagataccgggaaga

SEQ ID NO: 54547 - DNA, 433 bp, Glycine max
  unsure (1)..(433): unsure at all n locations
  Clone ID: LIB3109-046-Q1-K1-H7
gtcagaggaggttcctgttgaggagtcaaagaaggcaaatcctaaggaactgaatccatatttgaaggataatggaagtggatacccggaagaaagtggagctaaagttggtgccgaccaacttctatcttcttcccttgttggggatggaggagcaagttggagacttaaagccttaaagcgtgcacaagagcaagcagctcgagatggacgaagattcaatgaggttgtggaagaaaggtggggttctcttggtgagttgactgcagctgttgcatctcatgcagctgccccagctcgtgctcatctgcgtgctataaaaaatagacaaagagggataactgaagaaaattcacaagattctgataagcatggtcgaagggattctaaaagggactactntaaagatgtttctgttcggcaccatgaaatg

SEQ ID NO: 54548 - DNA, 318 bp, Glycine max
  Clone ID: LIB3109-046-Q1-K1-H8
ggtgcacaagtgagtttgtgggatcgagatatctagaaacagtgtgatgaaaatgaaggtccttgttttcttcgttgctacaattttggtagcatggcaatgccatgcgtacgatatgttccctatccgaatgaacactggctatggtgcccgtactccggaggtgaaatgcgcaagttggaggcttgctgtgaaagcacacaacatctttggctttgagaccattcctgaagagtgcgttgaagcaacaaaggaatacatccatggcgaacaatatagatcagactccatatcagttaaccaacaggcttactttta

SEQ ID NO: 54549 - DNA, 360 bp, Glycine max
  Clone ID: LIB3109-046-Q1-K1-H9
tgggtgtagttcagcaattgaagaaaggtatggatccgaatagtgtttatgaagatcttattgagattcatcggttccttgaccgcttctacatgtcaagaattggaatccgtatgcttatcggacagcatgttgagtttcacaatcccaatactactccccacgtcagagggttacatacacacgaaaatgtctactgtggaagaggcaaggaatgcctgtgaaaatgctcgttctatttgtctatcgtaaatatttaagtgccccttatgaacttatttagggagatcctaattttactttaccgtatgttccagctcacttgcatcctatggtatttgaattggctaagaacttact

SEQ ID NO: 54550 - DNA, 349 bp, Glycine max
  unsure (1)..(349): unsure at all n locations
  Clone ID: LIB3109-047-Q1-K1-A1
ggcagtatggaagcccgctgaggccatatactcctgttgtggttacactatggtacagagcacctgaacttttgctgggtgctaaagaatactcaactgcaattgacatgtggtcagtgggttgcataatggctgaattaattgccaaggaacctctgttcaggggtaaaagtgaacttgaacaacttgataagatttttcgaaccctgngtacgcctgatgagaaaatttggccaggattatccaaattacctggggctaaagcanattttgtaagcaactgtttaatacactaaggaagaagtttccagctgcgtcgtttattggtttgccagttttatctgagctt

SEQ ID NO: 54551 - DNA, 422 bp, Glycine max
  Clone ID: LIB3109-047-Q1-K1-A10
gacggctgagaaaatagcgacgcggatacacactcgtcttgacgatccagcgattctactctccgatgagtctttgcagggtgaagaatcgcgagtccagccgccggtgaagaatcacgcgattcgtctggaaatcgcgattcatccctgatacagagattcaagcacgattcaggaacaaaaacgagacaacctccgattcgtatcggtagcagctggaatcgtatcgaatcctgtgatacgtatcgtgaattgtacaatactaactatcatgatttaggctagtgctggagcttatttgactaggttatataatgttgttaaatagctgccaagtgctactgcattgccgaatttcttgaattcgcaatcaccacttcgtcaactattgcggtcgctatgggtgtcgtgggtacagaaag

SEQ ID NO: 54552 - DNA, 392 bp, Glycine max
  Clone ID: LIB3109-047-Q1-K1-A11
ggagcaacaaaaaaattaaattcttatcatttacagaatatggagtcccagacttccacacgagagaaggagtctctcaatctcagggaagtcccagaagcagataaaaccttgggcttggacatggccaagggcagcgcattctgcaagatgggtgaaggttggacatgcatcataactaaaactgaggggcctgatgctggcaaagttttcgttaaatgtggtgaaaattgcacctgtaccattgagggcgaagcagtgtcccaagaattgaatttgccacctgatgttgtgagcagcagtggcagtggagcattctgcaagtgtggtgaaaggtggagttgtgtcattttcaggactgaaggccctgatgcaagctctggcaagggctt

SEQ ID NO: 54553 - DNA, 420 bp, Glycine max
  Clone ID: LIB3109-047-Q1-K1-A12
gggccagaactgacagcactgtaccgtaagtcttgttatctccgaaagctttctaagaagagagagagagagagaggaaatgggtaaggggggaatgtcaattgatgaacatggagaaggcaaagaagagaatatggctgcttggcttgttggaatgaacactctcaagattcagcctttcaagcttcctactttgggactccatgatgtcagagttagaatgaaggctgttggtatctgtgggagtgatgttcactacctcaagacactgaggtgtgctcactttatagttaaagaaccaatggttattggtcatgagtgtgctgggatcatagaagaagttggtagtcaggtaaagagtttggtgcctggtgaccgtgtggcaattgagcctgggatcagttgttggcattgcaacca

SEQ ID NO: 54554 - DNA, 381 bp, Glycine max
  Clone ID: LIB3109-047-Q1-K1-A2
ggcagagtaagagagaggaggtggacaaataaagctataatttttagaggggttaccaccctcaccttctgccaaaccaaacccacccttttctgtcttcaagctactatcgataaatcagtttaaatttttgtggggtagtaataattgtaccatattgaggtaccttaaaaaggatctggggtttgcatattttccttgcaaatctctcagctactttggcttggctttctgaattttggtttttcagtgctgagagctgaacaagaagatggggggtggaaatcaagaggcagtcaagcagctgtagaccctgatggaaaatgtggatgatgagcagctgaagaatacattccagattatgcacccaggttatcaaac

SEQ ID NO: 54555 - DNA, 291 bp, Glycine max
  Clone ID: LIB3109-047-Q1-K1-A3
aattccgacccacgcgtccgcgcacgcacccgtacacttcagatacgacttcagatttagacatacttcgagcaagaagggccacggtgtgaatctataatagttacaggcgttcccacactcaccaacatccacaccatactgaccctttattaacatcactctactatcaatgtatcacactaaatttacatggacgattactaattcacccataacgacttccctcatctaggactctctcattctatagtttccttgcatatctttaagctactccttaatcacttt

SEQ ID NO: 54556 - DNA, 383 bp, Glycine max
  Clone ID: LIB3109-047-Q1-K1-A4
gggtgcaggtgggaggaaatagtcggggtctttttcgttccctgtaccaaacgaaagcagagagcgaaaaatggctttgaaactctcgtcactatctcttcactcctctctccgccaccagcaccctaattcgtcgcattcaaaccatcgcattccccttcgtttctttgcaccttcccttcctcccacttcgtgtctctccggcgcagcctcagtctccacatttcatcgcactctcttcgccgtaaccgttcgcgcacttcaaagccaagacgaaagcaaaagcagtgatgtttttgaagaagaagaaaaagacgaagaaatatcgaggcagggtgagaaaaaagaactcgcgaagcaaagcatatggagtcagattaagg

SEQ ID NO: 54557 - DNA, 433 bp, Glycine max
  Clone ID: LIB3109-047-Q1-K1-A5
gatgaacttaaagatgcaatcaccaaagggcctaaaaagctatgaccttggtggtgttggtctaggaattgtggtggcccttgataaatcatcatccgaggaacaaggccatgtttgcacatcaaattcaaaccgatccgtaccaatcccagttactaaccaacgtgggtttcaaaagggtgtgaatgaaattcccgctggaagctccgaggattacacgtttgtgacataccatgtacctaacaacaagaccatcactaaggtttattatgatggcggtgaaggtggaattctaacacatggctactataatattaataataataacaacaacaacgttggtgttggtggtgttagaagaatcccaccaacgcaaactttaattgaagaagatgaacagtcatatcccacctcggattttctcagctcgtgt

SEQ ID NO: 54558 - DNA, 320 bp, Glycine max
  Clone ID: LIB3109-047-Q1-K1-A6
ggtgttgaatgggtggaattggaaatcgaagtgaaaagaacggttgaaagtgaaagagtaagatgctattgcaattgcgctgctctcattctcaccacaaactgacacttgcctgcagttgaagaaagaatagaggatcgtggtcgatggcgtctgctagccttggaagtggtggggtcggcagttcgaggtctgttaatggtggcttcaggggttcttccagttccgtcgattggcttggcagagagatgcttgagatgaggttgagagaccccgaagacgatagagatagtgagcctgacatcattgatggtgtgggt

SEQ ID NO: 54559 - DNA, 439 bp, Glycine max
  Clone ID: LIB3109-047-Q1-K1-A7
ggaaagatggaaaatataacagaacttgacttgagcgaatgtcccataacaaaactcccaccttcatttcgaaatcttactcggcttcaagagttggagttggatcatggacccgaaagtgctgatcagttaatggactttgatgctgccaccctcatttcgaacatctgcatgatgccagaactatatgatattagtgctcgccgtttgcaatggaggctattgccagacgatgctttgaaattgacctcagtcgtgtgttcaagcgttcattctctcactttggaactgtcagatgagcttcttccgctatttctctcatggtttgtaaatgtggagaatttacggctagaagggagtaaatgcacagtcattcccgaatgcatcaaagaatgccgctttttatctatccttattttgagtggttgcgatcgtcttc

SEQ ID NO: 54560 - DNA, 390 bp, Glycine max
  unsure (1)..(390): unsure at all n locations
  Clone ID: LIB3109-047-Q1-K1-A8
ggcgaggaagccacatagagacacaatacagagtgagttgttgctccttcgccacaactctctgccaacatgggtatctccagagattctatgcacaagaggcgtgccactggtggcaagaagaaggcctggaggaaaaagagaaagtatgagcttggtcgccagcctgctaacactaagctgtcaagcaacaagacagtcaggaggatccgtgttagaggtggaaatgtgaaatggagggcattgagattggatactggaaattactcctggggaagtgaagctgtaactcgcaagactcgtgtactagatgtggtttacaatgcctcaaacaatgagcttgtgcgtactcagactcttgtcaaaagtgctatcgntcaagttgatgct

SEQ ID NO: 54561 - DNA, 439 bp, Glycine max
  unsure (1)..(439): unsure at all n locations
  Clone ID: LIB3109-047-Q1-K1-B1
acatcaaaatcataaaccaacactacagcacctgtagaggtttattttcttcactgttcacactattttctcctttcctttcacattatcccttccctttttttaaacaagccatcttgcttttgtttcttctcttctcatcaccaacacggtgtgtgtccttcatcctggattagagccacaaacataacacattccgctttgactttggaggctaagggcctaaggcaggttcccaatcactgtgatatcatggaatccccacaatccgttgtgtcaccattcaagagctctgtcttgggtgaagctgagaagtataggtctgatgttttcacacaaagctcgggtcctttgtctaaggacattgaagtcaatggaaaggaagctgccgtggttaatccagaggaatcccatcgtgttgntgatgtttacattcatc

SEQ ID NO: 54562 - DNA, 419 bp, Glycine max
  Clone ID: LIB3109-047-Q1-K1-B10
ggaacaagaggaaaagaaaaacaaacaaacactggttgaggttcaacgaacgcacagagtcgatcatactgaaagtgattaagggccgagttgcatgagttgaatcggcggaaatgggagctagtcgaaagcttcagggcgagattgatcgtgttctcaagaaggttcaggaaggcgtcgaagtcttcgatagcatctggaacaaggtttacgacaccgataatgccaaccagaaggagaagttcgaggctgacctgaagaaggagattaagaagctgcagaggtacagggaccagattaagacatggattcagtccagtgagatcaaagacaagaaggttagtgcctcatatgagcaagctctggtggatgcacgcaagattattgagcgtgaaatggaaagattcaagatctgtgag

SEQ ID NO: 54563 - DNA, 382 bp, Glycine max
  Clone ID: LIB3109-047-Q1-K1-B11
ggttctagtgtgtgattgtttgttgttgtaactcgttcttcttcttttgttgttctgtgtttgtgtttgttttttctctcacctgaaaatgtcttgctgcggtggtaactgtggttgcggaagctcctgcaagtgcggcaacggctgcggaggctgcaagatgtacccagacttgagctacactgagtcaaccaccaccgagaccttggtcatgggagtggcacctgttaaagctcaatttgagggtgctgaaatgggtgtgcccgctgagaacgatggctgcaaatgtggaccaaactgctcctgcaacccctgcacttgcaagtgaggtgttgggagagcaagcttcaagcagagatagcccttaattaggaataatgat

SEQ ID NO: 54564 - DNA, 426 bp, Glycine max
  Clone ID: LIB3109-047-Q1-K1-B12
ggcgctcccagagaggaagcttagagagagagagagagagagagagagagaggagagagtattggcgcttcatcaagatgggtatttctagggattccatgcacaagaggcgtgccactggtggcaagaaaaaggcttggagaaagaagagaaagtatgagcttgggcgtcaggcagcaaacaccaagttatcaagcaacaagacaatcaggaggattcgtgttagaggtggcaatgttaaatggagggcattgtggctggatactggcaattactcatggggtagtgaagcagttactcgcaagactcgtattctagatgttgtttacaatgcctcaaacaacgagcttgtgcgaactcagaccctggtcaagagtgctattgtccaggttgatgctgctcctttcaagcagtggtaccttcagc

SEQ ID NO: 54565 - DNA, 437 bp, Glycine max
  Clone ID: LIB3109-047-Q1-K1-B2
acagatacaattgttaacttgcattttcatggggtgccaatcgaagatctttgcttagattttacactccctggttatcctgaatacaccttgaagccaggagatgaaattgttgatatcaacaatttggaggagtatatatccttggtggcagatgcaactgtcaagactggaatcatgcggcaaatagaagcatttagagcagggtttaaccaggtttttgacatctcgtctttacaaatttttactcctcaagaactagataatttgctttgcggctgcaaggagttgtgggagtctgagacacttgctgatcatataaaattcgaccatgggtacaatgcaaagagccctgccattattaatttacttgaaattatgggagggttcacaccagagcagcaacgtgccttctgtcaatttgtactggtgcacct

SEQ ID NO: 54566 - DNA, 433 bp, Glycine max
  Clone ID: LIB3109-047-Q1-K1-B3
gttggtgtggtagagataataagagaggatcatagtagtgctagaaattgaagtgtgtaatagaatagtgatagagagagagagatatggggagaggaagggtgcagttgaagaggatcgagaacaagatcaataggcaagtgacgttctcaaagagaaggtctggtttgctcaagaaagcacatgagatctctgtgcattgtgatgctgaagtggccctcatagtcttctccaccaaaggcaaactctttgagtacttcagcgatccctgtatggaaaaaattcttgaacggtatgagaggtattcatatgcagagaggcagcttgttgcaagtgatcaaccactaactgaaaattggactctggaacatgcaaagctgaaagcaaggttggaagtcctacagaaaaatcaaaggaattttatgggacaaga

SEQ ID NO: 54567 - DNA, 420 bp, Glycine max
  Clone ID: LIB3109-047-Q1-K1-B4
gcgcgaagacagtgagaagaacatcaaatggagatatggtgctcctccaaattatgacgttgtcaacaaattatttgatgaaggcagaaccaaggtatggcctccgggttcacttgaagaaaaggtgcagactttagtgaagaattgggagatggaaatgttccacaaggaggatttcaaggataacagatcagtggacccagagaaatacactttcagcctaaacggaaggaagcctattagtttggaagagaaaaggaagcttggaggagggtatattccactgctgcaaacctctataccagagaaactgaggccttacaacccatatgaagaaacaacagattcatcccacaaggccttcacgacaaacattccacgtgggtttgcttttgaattctgcacgtgtactctggacca

SEQ ID NO: 54568 - DNA, 442 bp, Glycine max
  unsure (1)..(442): unsure at all n locations
  Clone ID: LIB3109-047-Q1-K1-B5
tcactactgacgtaatagctagctagctaatcatggaaatctttcaagccacagcagaaaagatggagattaatcccaagagatttacaacattattctttgttgtacttttcatatcatttcctgttgctttcatagtttcttcaatctatcgaaactcaagtttcgctattttttatgaggggttaacagaatcatcggctcaaaacgttacaaacaatggttttccgttgggaggaagagtccacaatactacatcggatgatgagattgagactcacttaagaacaagacacaatgataccgtgtcggtggtacgtaacagtttttctttttcgtttatataactgntgtattcttttgttctggactaaaactcactctacttccgtaataatggacttggcaaagttaaagtgttgcccggcaatattcaaaacgg

SEQ ID NO: 54569 - DNA, 401 bp, Glycine max
  unsure (1)..(401): unsure at all n locations
  Clone ID: LIB3109-047-Q1-K1-B6
gaggaaagtgagtgagagaaagagatcacatagcagaatggcttctactcaatgtttcttgcaccaccatgctcttaccacccctgccagatccccatcacaacgcatcatggttagcaccaagcctaaccagcttgtttgcaaggcacagaagcaagaggatattgatgtcagcccaatctctcgccggttagctctaaccgtgctcattggtgctgctgctgttggctccaaagtccaacctgctgatgcagcttatggggaagctgccaatgtgtttggaaagccaaaggcagacacagatttcctgccatacaatggagatggattcaaactatcgattccctcaaagtggaacccaagcaaagaggttgagtacacaggtcangttgttagatatg

SEQ ID NO: 54570 - DNA, 425 bp, Glycine max
  Clone ID: LIB3109-047-Q1-K1-B7
ggttctagtgtgtgattgtttgttgttgtaactcgttcttcttcttttgttctgtgtttgtgtttgttttttctctcacctgaaaatgtcttgctgcggtggtaactgtggttgcggaagctcctgcaagtgcggcaacggctgcggaggctgcaagatgtacccagacttgagctacactgagtcaaccaccaccgagaccttggtcatgggagtggcacctgttaaggctcaatttgagggtgctgaaatgggtgtgcccgctgagaacgatggctgcaaatgtggaccaaactgctcctgcaacccctgcacttgcaagtgaggtgttgggagagcaagcttcaagcagagatagcccttaactaggaataatgataaactattaatgtgtagctaaaaacttatgtattatgtctgtgatg

SEQ ID NO: 54571 - DNA, 250 bp, Glycine max
  Clone ID: LIB3109-047-Q1-K1-B8
ttttgctctgtgtttctatcgcattatctctcacctgaaaatatctcgctgcaatgccaactctgattgcagaaactcctgcaagttcggcaacacctgcagaaactgcaagatgtacccaaacttcaactacactgattcaaccaccacctacaccttgatcatgggagatgcaccatgtaaagctcaatttcatggtacctaaatgggtacacccgctgagaactatggctgcaaatgctgaccaaac

SEQ ID NO: 54572 - DNA, 377 bp, Glycine max
  Clone ID: LIB3109-047-Q1-K1-B9
gatcacatagatgggaactggtgcatcgaaggacgcagaggaagggagcaaggaagagcgtgacaggctcgatcatgcaggtggccaactctacgtctctctcaagatggagaatcggaagctcacaggggaccttgttcctcacgtttatggctctgttcctcttgttggctcttgggatccttccaaagctcttttcatggagcgggaatcggtgtcaatgtgggaacttagctttgttgtcccacctaatcacgaaactttggatttcaaattcctgttgaagcctaaggacagcaatacaccttgttttgttgaggagggtcctagccgcctgcttgtggggggagcgttgcaagaggatgccaagcttgcgt

SEQ ID NO: 54573 - DNA, 425 bp, Glycine max
  Clone ID: LIB3109-047-Q1-K1-C1
gggatagggaaggatggaacagagatcttcttcaaggatatttggccatccagtgaagaaatagcaaatgttgtacaatcaagtgtgctgcctgatatgtttagggacacatataatgcaatcacccaagggaatcccatgtggaataatttatctgttccaacgggcactctttatgcttgggaccctacatcgacttatattcatgagccaccttattttagagatatgagcatgtctcccccaggctctcatggagtgaaggatgcttactgtttgctcaactttggagacagtatcacaactgaccacatctctccagctggcagcatacataaggacagtcctgcggccagataccttatagaacgtggggttgatagacgggacttcaactcctatggaagtcgccgtggtaatgatga

SEQ ID NO: 54574 - DNA, 400 bp, Glycine max
  Clone ID: LIB3109-047-Q1-K1-C10
ggtgtgggatgagaagatgatgaggaaacattggtagaagaaattggagagagagagagagagagggttggattggttttcttcttcctcttcctaaagagaatctaatctcaatcctcattacacacatatctacagatttcttcattcctctctcaatcttttctgttttcttttcccctctttgacatcctcgttttcgccgaaacaaaaacaactaagattttgttttttgttgtatttttcttcctgttgttatttgactcggttgtctgaatcagttgttgcagcacggtcgggagccacagctatgcagagccaagttgtgtgcaatggttgtgggagccttctgctttacccaagaggagcaaccaatgtctgttgtgcattgtgcaacaca

SEQ ID NO: 54575 - DNA, 341 bp, Glycine max
  Clone ID: LIB3109-047-Q1-K1-C11
ggctagagagagaagaagaagttgttgggttgagttgggtttggattggatttctaatctaatctatacctttctttttcctatgcttttaaggcacaaatccttctcccttctctcttctttcttcttcttctcctgacccttattattattccttgcccttaccctttaggcaagggaaggaagaaagaataactatattattatctttattgtaatctatctttttattataattataattataattattgttgttattattccttaaatatggattcgccgtgtctctccaacgattcggtttctggattcaaagacaaggagtcaatggttgaccc

SEQ ID NO: 54576 - DNA, 397 bp, Glycine max
  Clone ID: LIB3109-047-Q1-K1-C12
ggcactgcatagatggaaaaagcatggaaagaggcgcattgttagcaacgtgtggtctgctgttgcagcataaaacggagtagagcttcatcctctgctcttgcacactaagacccttctcttccttagcaaccccacttcttagttacacatccacatttgcttgtcttgtttaggtggttggtgagaatgtcagagacattcatattcacactttctctggttatgctatgtgctgcttcagcttttgcagcagttccacacaggttgccagaagtttacctcaagaatggtaactttgaggagaatccaaaccccaaatacctcaagaaaacgacactgattgggaaatatgctcttccaaaatgggagatcagtggtcatgttgagtatgtct

SEQ ID NO: 54577 - DNA, 381 bp, Glycine max
  Clone ID: LIB3109-047-Q1-K1-C2
gaggcgaatgcaattacagaagaaccaacagaattttcatttcctcatttaacctcactgaatctgcatatgttgccacaactcagttgcttttatcctggaagatttacgctggaatgcccagccttaaatcatttagaggtgttgtcttgtgataacttggagaaatttcaaaaccaacaagaggcacaatgttctacttcagttactaagctaccccttttctccgaaggaaagactattttcattctggagtcattgaagctctattgggaaattgcaaggatgctatgcaacaaaaaatttctgaaggacatgcttcataaattagttgaacttgagctggattttaatgatgtcagagaggtaccaaatttcgtg

SEQ ID NO: 54578 - DNA, 440 bp, Glycine max
  unsure (1)..(440): unsure at all n locations
  Clone ID: LIB3109-047-Q1-K1-C3
gatgctcacttgcacaaactccacttgatatctcggaaacggtaacgtccaaattctggacataaccctcgacagtaaaatggtcgtgcttgccttcatctcgaaagtttgcaaaatcgaatcttttggtagagtagacacgaaaggtaacgaagccagtctcacaactccggcttttaccgtctctagcgaggacaacaagttcgtaaccgtagggtgcgatacctatggctatctcaacagctttaacaacgacatcaggtctcgaatggggtgcttcacaaggtgtgacaccatagagagtgtgcaaagcatgcaggaagatggaaagtgtacggggatagggtgttgccagatggatacctnctcgaatgaagaatattagcatacaagcattcagctattacaatttcaattactcttcggacttcaacaaatgc

SEQ ID NO: 54579 - DNA, 432 bp, Glycine max
  Clone ID: LIB3109-047-Q1-K1-C4
ggaagtgaaagagagattctgcgtgcaggaagagcgaagcgagtgagtgtggcaatggcggaggagcaaggtgaattcaggatttacaattccatgactcagcagaaagagatcttcaaaaccaaagtccccggcaaggtttccatgtacgtttgcggagtcactgcctacgacttcagccatctcggtcacgctcgcgctgcggtttctttcgatatcctcttcaggtaccttaagcacttgggctatgagattacatatgtgcggaatttcactgatgttgatgacaagataattaagcgagcaaatgagaccggtgaggatccattgatgttgagcaaccgtttttgtgatgaatataatgctgatatggctgatctccagtgcgagacaccatctagggaacctcgtgtttctgaacaccttaacgag

SEQ ID NO: 54580 - DNA, 407 bp, Glycine max
  Clone ID: LIB3109-047-Q1-K1-C6
gggggaaggaaagaaattagaaatatttattcattgtcaccaaatcttgttccctgcaagagaaagaaagaagggagagaagaagttgttgggttgagttggattggatttctaatctaatctatacctttcttttttcctatgcttttaaggcacaaacccttctttcttccctcttctttcttcttcttattgttattccttgcctttaccctttagggaaggaagaaggaacaactatactactattatccttattattgttattattgtaattaatctttttattatagttattgttgttgttattattcctcaaatatggattcgttgtgcctctccaacgactcagttgtttctggattcaaagacaaggagtcaatggttgacccctttttggtcgaggc

SEQ ID NO: 54581 - DNA, 269 bp, Glycine max
  Clone ID: LIB3109-047-Q1-K1-C7
ggttcagattagggtaatccaacttccgaacccgaaaagtctacgcttttaattgtctgttgttttctctctcaaatcggtgctcccttcggcggcgcgtgagggtttccagcggcgcgtgagggtgttattcgcgcgttattccaagttcctcgctgacctatgctttgtccgacccacattggagagttcacgctcgagagaaaggcggaatctcactggacggtcgtgatttggcacctccatggcttccgccgtccttgctaatc

SEQ ID NO: 54582 - DNA, 425 bp, Glycine max
  Clone ID: LIB3109-047-Q1-K1-C8
gaagctttgagatggtggacccttcaataggaactcaagagaacgaagatcatgctgctccatccaatgatggatcgaattctaacggaaatggggctggaaccagtacccgggataggtccgttcctatcttcgtttccgaccctgatgtccttgattgctgcatttgctatgaacccttgacttcccctgtgctccagtgtgagaatggacatattgcttgctctatttgctgtgtgagactcagtaacaagtgtcccatgtgttcaatgcccattgggtataaccgttgccgggctattgagaaggtcttggagtgtattaaaatgtcatgcccgaatgcaaattatggctgcaaagagacacttagttacagcaagaaaaacgaacatgagaaggaatgcatctatctgccatgttcatgc

SEQ ID NO: 54583 - DNA, 373 bp, Glycine max
  unsure (1)..(373): unsure at all n locations
  Clone ID: LIB3109-047-Q1-K1-C9
aggtgggagggggttcttctgtgttccatgtggggttcaaggatggctcttctgatagtgactcaagcgcgatcttgaacgaggagaacaacaaccacagccccaacaataacgcggcgatttcgtcgtgtggggttctgcaaagtcacgggcttttgttgtcgccttcttcgtcgtcgatgaacaactgtttccagttccagaaacagtaccagacgacgacgacgcactacgtaaagatggaggagcacaattttcttagcgccgacgaggcctgcaatttcttctcggatgaacaagcaccaactctgcagcggtactgttcaaaagaatggagntaaaaggaagaagcttaatgaggcttaatttattg

SEQ ID NO: 54584 - DNA, 421 bp, Glycine max
  Clone ID: LIB3109-047-Q1-K1-D1
ggaccttggtgattcagggcttatacccttagagataaggtttttgcatgatcctgctaaagatacaggttttgtcggcagtgcattgacaagtaacatgatacgattttttaagacccaagatgaatcatggagccatgaggttgccatatcagtgaaaccattgaaagtgcaaaactggattcttcctgaaatgcctgggcttataactgattttctgatttctcttgatgatcggtttttgtattttgtaaactggcttcatggggatataaggcagtataacatcgaggacgttaaaaatcctaaactgactggacaagtatgggttggtggacttatccagaaaggaagccctgtagtagctataactgatgatggtgaaacatggcaagctgaagttccagagattcagggaaac

SEQ ID NO: 54585 - DNA, 404 bp, Glycine max
  Clone ID: LIB3109-047-Q1-K1-D10
gagtgaaagagtgagacagatgtcgaaccgtgggcgtggtggttcggcggggaacaagttccgcatgtcgctgggtcttccagtggcggcgactgtgaactgctccgacaacacgggggcgaagaacctctacatcatttcggtgaaagggatcaaaggccgtttgaaccgtctttcctcggcctgcgttggcgacatggtgatggccaccgtgaagaatggataacccgatctgaggaagaaggtcttgccagctgtcatcgttcgccagcgcaagccatggcgccgaaaggactgcgtctacatgtacttcgaagataatgctggtgttattgtcaatcccaagggagaaatgaaaggttctgctatcactggtcccattggaaaagagtgtgctgatttgt

SEQ ID NO: 54586 - DNA, 309 bp, Glycine max
  Clone ID: LIB3109-047-Q1-K1-D11
ggggctttggcctatgcaaccggtgctgattttgcgaaatacatgacagaattttacaagtatttggagatgggtctccaaaatttcgaggactaccaggtttgtgctatcacagtgggtgtggttggtgatgtatgcagagccttggaggagaaaatactgccttattgtgatgggataatgacccaacttcttaaggatttgtctagcaatcagttgcataggtccgttaagcctcctattttttcatgttttggagacattgccttggcaattggagaaaactttgagaaatacctgttatatgca

SEQ ID NO: 54587 - DNA, 383 bp, Glycine max
  Clone ID: LIB3109-047-Q1-K1-D12
ggttgcataatatgatgacactagatgcattgccagtggccaagcggcagaggtttgctaaggagactttggagatttttgcacctttggccaatcgcttgggaatttctacttggaaggaacaattggaaaatttatgttttaagcatctcaacccaagccaccatgaggagctttcatccaagcttgtggaatcgtatgatgatgcaatgattacttctgcaatagagagattagaggaagcacttaaagatgaaggcatttcttataatgtcatttctgggcggcataagagcttatatagcgtttattgcaaaatgttaaagaagaaactaaccatagatgatatccatgacatttatgggctgcgcttgattgttgac

SEQ ID NO: 54588 - DNA, 409 bp, Glycine max
  Clone ID: LIB3109-047-Q1-K1-D2
gaagcaaaggtgagttgggactacgagacaaggcgtaatttgtcgcatttagatgaaactcacaactttacttggcactattttttggtaaacaagatcaatattcgttaaagcagcatttctgcgccaaatctagttagtttccatcgccaatacaatacgacaccgcttaatgcaagtcctcgtcgtcgtttaacgctcacgttttctgttctctgagaaggtaaaaagcgttaaaacgcagcatctcaaacacgcgattccgaagcttttctgcgatcaatggagttcgacccgatcccaatcggttcgtgctccaaagaacaccagatgatctataaggagtggttcaattacgctgattcagatagcgatggccgcattacggggagtgatgccaccaagtttt

SEQ ID NO: 54589 - DNA, 394 bp, Glycine max
  Clone ID: LIB3109-047-Q1-K1-D3
ggatgtggtgtggcattcttgtgaagagttctgcacttctgtctatatggatatttgttatcccagtgcttattgggcttctctttgagcttttggtcattgtgccaatgagagttccagtggatgaaagtccagtattcctcctttatcaagactgggcattaggccttatatttctcaagatatggactagattggttatgttggaccacatgatgccgctggtggatgaaagttggcgagtcaaatttgagcgagtgagagaggatggtttctccaggctgcaaggtctttgggtccttcgggaaattgtacttccgatcataatgaagctgttgacagcattgtgtgtaccctacgttttggccaaaggtgtatttccagtgcttgggta

SEQ ID NO: 54590 - DNA, 435 bp, Glycine max
  Clone ID: LIB3109-047-Q1-K1-D4
gggggagaagggtggattgttagtgtggacgatttggaagatataattggggggcatgtatggttgggttccatttgtatacttggtggaatctggcatatcttaaccaaaccttttgcatgggctcggcgtgcacttgtatggtctggagaagcttacttatcttatagtttaggtgctttatctgtttttggttttattgcttgttgctttgtctggtttaataataccgcttatcctagtgagttttacgggcccactgggccagaagcttctcaagctcaagcatttacttttctagttagagaccaacgtcttggggctaatgtaggatctgctcaaggacctacaggtttaggtaaatatctaatgcgttccccgacaggagaagttatttttgggggagaaactatgcgtttttgggatttgcgtgct

SEQ ID NO: 54591 - DNA, 328 bp, Glycine max
  Clone ID: LIB3109-047-Q1-K1-D5
taatctgatgacactagatgcggctccgttgccataatcagcggacgtgggctaaggagactttggagatttttgcacctttgtccaatcgctagcgaatttctacttagaaggaacaattgcaaaatttatgttttaagcatatcaacccaagccaccatgatgagctatcatccaagcttgtataatcgtatgatgatccaatgattacttttgcaatagagagattacaggaagcacttaaagatgaatgcatttcttataatgtcatttcttaactgcataagatcctatataaagtttatcgcacaatgttaaagaagaaact

SEQ ID NO: 54592 - DNA, 400 bp, Glycine max
  Clone ID: LIB3109-047-Q1-K1-D6
ggcccaaattttttcatagcattttcagaggaacaatggcgggtagggtttcgacgtgcttcttcttcgtgtttgctctttctctccttcttccttttcagatctccgctgaggaatcatcggagaaagagttcgtactcacattggatcactctaactttcacgacactgtcagcaagcacgatttcatcgtcgtcgagttctacgctccatggtgtggccactgtaagaagcttgctcccgagtatgagaaagctgcttctatcttgagtagtcatgatcctccggttgttttggctaaaattgatgccaatgaggagaagaacaaagaccttgcatctcaatatgatgttaggggatacccaacaattaagattctgagaaatgggggaaagaatgt

SEQ ID NO: 54593 - DNA, 409 bp, Glycine max
  unsure (1)..(409): unsure at all n locations
  Clone ID: LIB3109-047-Q1-K1-D7
ggtctctgaagactgaagctctgacaaaaaaaaacaaaaaaggcttaccttagcgtgttatttgtttgacccggataagtgtgtgttcttatgaaggttgcagtgctatggagtctatagatttcatgctgcagcttcattagataccaattttggtgaatcatcttgatagcttgttcttggatttttgttttggggtgttgatgaagatgtttatgggtggccaaattttcggtgctggtgttattattggtagtttctttctgctgatcctctgtggcatggtttgtgggactgacagtgatatattctgcttgaaaagtgtaaagagaacacttgacgaccnctacaattatttgcaatcctggaatttcaataacaatacagaagggtatatatgcaagtttac

SEQ ID NO: 54594 - DNA, 428 bp, Glycine max
  unsure (1)..(428): unsure at all n locations
  Clone ID: LIB3109-047-Q1-K1-D8
ggaaccaaattctagctcctttcagctgcacaagagtctccgatcccaactctctctctctctccacttgccaaaggaaaaaggctaaagagaaacccacacacacacacacagaaatatgtcttccccaagcaagcgccgagagatggacttgatgaaactgatgatgagtgattacaaggtcgagatgattaatgatggaatgcaagaattttatgtgcaattccatggacccaatgacagtccttatcatggtggtgtgtggaaagtaagagttgagttgccggatgcttatccttacaaatctccttccattggatttatcaacaagatctatcacccgaatgttgatgagatgtcaggatcagtttgtctggatgttatcaatcaaacctggagccccatgttcgatcttgntaatgtgtttg

SEQ ID NO: 54595 - DNA, 371 bp, Glycine max; identical to SEQ ID NO: 9962
  Clone ID: LIB3109-047-Q1-K1-D9

SEQ ID NO: 54596 - DNA, 425 bp, Glycine max
  unsure (1)..(425): unsure at all n locations
  Clone ID: LIB3109-047-Q1-K1-E1
ggaagtgaaagagagattgatttgactatgagcatgcagtgagtgtgatcaataactctacccattgcttcaaattcaatatgctttttggtttcgtttcgtctcggcttgtctttcactttctcaaccacccaacacaacacaaattccctttcttcttcttcttcttcttctaaatagatagaaggaatttagattaattaaaacaacctttcattcattctgttgtgttgggaaatatgatgttcgactttgccaggatttggacccgaaacacgttaataggtctcggcttgggtcagtttctttctcttctcatcacttccaccggcttcacttcctctgaattggctaanaaaggaattaatgctccaacttcacagtcngttctgaaaatatgtgtcttgacgcttgtctatggaact

SEQ ID NO: 54597 - DNA, 376 bp, Glycine max
  Clone ID: LIB3109-047-Q1-K1-E10
ggagcaagagtgaagagcgaagagaagggctcccaagggcttaatctttttggctgtgttatgcttctcagcactgtcactgagtcgttgtcttgcggaggataatggacttgttatgaacttctacaaggaatcatgccctcaggctgaagacatcatcaaagaacaagtcaagcttctctacaagcgccacaagaacactgctttctcctggctcagaaacatcttccatgactgtgctgttcagagttgtgatgcttcactgttgctggactccacaagaaggagcttgtctgagaaggaaacagatagaagctttgggttgagaaatttcaggtacattgagaccatcaaagaagctttggaaagggaatgc

SEQ ID NO: 54598 - DNA, 414 bp, Glycine max
  Clone ID: LIB3109-047-Q1-K1-E11
gcacaaaggatggaaactctggggaggacttcagtgaagattctattgagcgcgatgaaaggcgtctcacagaattaggtcgcaggactttggaaatatttgtccttgcccatatattcagcaataaaattgaggtttcctaccaggaagctgttgctctaaagagacaagaagagctcattcgtgaagaagaagcagcatggctggctgaatgtgagcagaaagcaaaacgtggaaatgagagggaaaagaagtcaaagaagaaacaggccaaacagaaacggaacaatcggaaaggaaaggataaaggtagagaggagagacctattgtggctgtatatgacaagcagcaacacaatcctgctgatgagaaaaaggattctaacatggaagaagttcaagctcttgatgaaa

SEQ ID NO: 54599 - DNA, 349 bp, Glycine max
  Clone ID: LIB3109-047-Q1-K1-E12
ggcgtcgcaacacaagaagagaggagagcgttttccttttctttttaattttttctttggttaagcttaagcaacaaccgtcaccaagcacacgcgcagacgcaagctctttaaacggtggagaacgtgaactgaaccacttcaaagttcaaacccagattttgcaacaaaataagcacgccacaactcacctccactttgcttgagggttatattctattctatataaggggaagctcaacttcttcctccttgtcgcatacatagatacatgggttcggcaccagaagtgttggctcagagaagttgtggaaagctcattgggactcggttcctacagtacttgaat

SEQ ID NO: 54600 - DNA, 437 bp, Glycine max
  unsure (1)..(437): unsure at all n locations
  Clone ID: LIB3109-047-Q1-K1-E2
gattgaatcaatgactattcatgattccataattgaatcaattacatactggatccaagctaaaggaatgttatggtaaaacttcgtttgaaacgatgtggtaaaaagcaacgagccgtttatcgaatcgttgcaatcgatgttcgatctcgaagagagggaagagatcttcggaaagtgggtttttatgatccaataaagaatcaaacctatttaaatattcctgttattctatatttccttgaacgaggcgctcaacctacaggaactgttcaggacattttaaaaagggctggtgtttttatggaacttagctcgaatcaacaaacgaaattccattaatgaaataaaaaaaagggggtgtggatgacttgtatatagatttctaaaactcttttctcttttatccccccgctctcttgntctattcataccta

SEQ ID NO: 54601 - DNA, 404 bp, Glycine max
  unsure (1)..(404): unsure at all n locations
  Clone ID: LIB3109-047-Q1-K1-E3
ggaaagaaaaaggaatgtagtgtgtgtgagtgagtaacagattctaaacgctattgagagtaaaatggcggattcagtgtcggtggacatggaagccatctctcctccacccgaggaacatgttgttagaactcgtcatggttgtgtctcagttgctgtgtatggggaccaggacaagccagcgcttatcacgtatcctgatttggctttaaattgggttattattttgtccagaagcctgttcattgctgctccacaatttctgcatatatcatattagtccacctgggcatgagttgggagctgctgccattgatccagatgatccaattctntctgctgatgacttggttgatcaaatagctgaagttctaactattttgtcatagtacagttatgtgtat

SEQ ID NO: 54602 - DNA, 439 bp, Glycine max
  unsure (1)..(439): unsure at all n locations
  Clone ID: LIB3109-047-Q1-K1-E4
ggaagaaagttgttttgtggtggatgagtactgagtagtggtgccttattgtgggtggagagttccaaagggatcgcattgatctaattcttgtagatgtttacacttgcaagctttgcatgcaattcctggattcagatgtgattcagtggttcacttattggatcatgcgatcccttaggaactttccatcaactctaaacatcttgttgatccatttgagccaaccataacttcaatgtcctgcagtctccactggcagatctcgatgattgccaagctcaataaaataagacaaattaatattattgaaattgtccatatcatatttcactttctatcgttaggttagtccataagctagaaatgagtaaaatatatagtttcacagcaatatcatctcttcattccattagagtggggaagaagtggngaaagg

SEQ ID NO: 54603 - DNA, 429 bp, Glycine max
  Clone ID: LIB3109-047-Q1-K1-E5
ggaccagaaatagatatgtggagtgcaggagtaattctctgcatcttattgtgtggagttcccccattttgggctgaatccgagcaaggagttgcacaggccattcttcgagggcttatagatttcaaaagggaaccttggcccagtatttctgaaagtgctaaaagccttgttaggcaaatgttagaacctgaccctaagcttcgattaactgccaaacaagtgcttgagcatccctggctccaaaatgctaagaaggctcctaatgttccacttggagatgttgtcaagtcaaggcttaagcaattttcgatgatgaacagattcaaaagaaaagcccttagggtcattgctgatttcttatccaatgaagaagttgaagacatcaaagatatgttcaagaagatggattatgataatgatggcatt

SEQ ID NO: 54604 - DNA, 439 bp, Glycine max
  Clone ID: LIB3109-047-Q1-K1-E6
gaagaagaagaaggttggttgattggtcccattgattccgaagagaaaagaaaagatgtttgagccacaacagctatacactcgcgcgaagaccgaggaattcgacctcgaatcaggagaaaccctctacccagggctgagcgtcggcgagaaccagctccgatggggtttcatccgcaaggtctacggcatcctctccgcgcagatcgtcctcaccaccctcgtctccgtcaccaccgttttctatactccaatcaatgacctcctcaagggcaattccaccctcctcctcatcctcctcttccttcccttcatctttttgattcccctgttgaagtaccagcagaagcatcctcataattacatcttgcttgcactcttcaccgtgtcgatcagttccaccatcggagtcacctgtgccaacaccgacgggaaaatt

SEQ ID NO: 54605 - DNA, 412 bp, Glycine max
  Clone ID: LIB3109-047-Q1-K1-E7
ggttcaatagaagactaattgggtagtgtcaatggaagaaatggagaggatatttttccgtcttttgggactaggcattgtgggagataaacttattgttgaaaagaaaccttaattgcggtcacccctagcccgtggactagagaaatgctaggaatacactttattctattggttgaaatttattgaaaattacaaaattttgtggattttacatcatatttaatgtacctctcctgatttttgtactttccaatagattttaactaaggggagagtgtgtgttagagagtgtgttcccagcactcctcttgtggcttaagagttggttgctagtgtcttagaaaggaatacctacagaaggctgattagaaaggctgaatgaagtgtcatagtttgtctcgatacctat

SEQ ID NO: 54606 - DNA, 436 bp, Glycine max
  Clone ID: LIB3109-047-Q1-K1-E8
ggtggcaggtgtgggttcttcaattcattctaggtctggattccgactagccgcgttgactcggttccgtttttcattctcgcggatctaatattaaggaatagcttaagggcacattacaatgaaggcattgattctggttgggggatttggaacaaggctgaggccactgacactcagtttccctaagcctcttgttgattttgctaacaagcctatgattttgcatcagatagaagcccttaaggccattggagtgactgaggtagtgctagccatcaattaccaaccagaggttatgttgaatttcttgaaggattttgaatcaaagctcggcatcaagatcacatgttctcaggaaactgaaccactgggaacagcaggtcccctggctcttgctagggataagctgatagatgattctggagaacccttt

SEQ ID NO: 54607 - DNA, 416 bp, Glycine max
  Clone ID: LIB3109-047-Q1-K1-E9
gaaagcaagtgtgctcttgtgtacggtcaaatgagtgagccccctggtgcccgtgcccgtgttggtcttactgggcttactgtggctgaacacttccgtgatgctgaagggcaagatgtgcttcttttcgtagacaacattttccgttttacccaagctaactcagaggtgtctgctttgcttggtcgtatcccatctgctgttggttaccaaccaaccttgtctactgatcttggagctcttcaagagcgtattacaacaaccaagaagggttcaattacctctgtccaagctatctatgtgcctgctgatgacttgacagatcctgctcctgctaccacttttgctcacttggatgccacaacagtgttgtcacgacagatcttcgagcttggtatctatcctgctgttgatcc

SEQ ID NO: 54608 - DNA, 399 bp, Glycine max
  Clone ID: LIB3109-047-Q1-K1-F1
gatctcgaaagcgtgagaagaataatatcaggattcgtggagaaagaaaatggcaacgcggttttcaccacggccgagttcaaagagccttgctccgctgcgatgcagcgcgtcgtgaaaaccgtcgatgcctacctctctgagatcgccgcatacggcgatctcagcatctcgaagttcaacggcatcgctactcttattcctaaaagcgcgcgtaagatcgacgacgatctttaccgcgccgttgatatctatctcaaggcgcatccacagttggatgagatagagagagagaaggtgtgcagcgtgatggatccgttgaagctttcatacgaggcgcgtgtgcacgcgtcgcagaacaagcgattgccggtgcagattgtgctgcacgcgctttac

SEQ ID NO: 54609 - DNA, 281 bp, Glycine max
  Clone ID: LIB3109-047-Q1-K1-F10
gacatacattttctcttcgtctggctcaaacaaaagaagagttacacccacaagttcgacaagatctgcaagcttgtatcctacccaccctaagtcactggtcatgttcaacaaggtaaaattaccaaactgaccggagttaataccaaggagctcttgctctggatcacgctcacttatatctatgtttatgaccctaccactcgcaaaatcacctttaagacccctgtcggcctattcatgaattttccattcttccctttcgagattcacaatgagcc

SEQ ID NO: 54610 - DNA, 357 bp, Glycine max
  Clone ID: LIB3109-047-Q1-K1-F11
ggctaaagagagtgtgaagatgctaaagacataaacataagaaagagcacaaaacaaaacataaaaaaggcagtgcgagtggagtgaagtgaagtgagtgagagaagcgcaaacaagtagaagagaaaatcatggcagtttctgtaaccattttagttctcatcatcgctctgcatctcatagccttcgtctttgccattggggccgaacgacgtcgtagcgaggccaaagtggtccccgacgagtacgacgaccgaaccttctgcgtttacaccaccgacgctttctccgtctacggcctcgccgccgtcgcccttctgctcctcagccacaccgtccttaacggcgtcacccgat

SEQ ID NO: 54611 - DNA, 317 bp, Glycine max
  unsure (1)..(317): unsure at all n locations
  Clone ID: LIB3109-047-Q1-K1-F3
ggcacaagtgagtttgttgatcgagataactagaaacagtgtgatgaaaatgaaggtccttgttttcttcgttgctacaattttggtagcatggcaatgccatgcgtacgatatgttccctctccgaatgaacactggctatggtgcccgtactccggaggtgaaatgcgcaagttggaggcttgctgtggaagcacacaacatctttggctttgagaccattcctgaagagtgcgttgaagcaacanaggaatacatncatggcgaacaatatagatcagactccaaaacagttaaccaacaagcttacttttatg

SEQ ID NO: 54612 - DNA, 398 bp, Glycine max
  Clone ID: LIB3109-047-Q1-K1-F4
gacagaacacaacacaaacacagagaaagagagtgaataaatccagcattgttctgttctctgcaacattctccactctcaaccatggcttcaaagcttttactcatcactgtcttcgtttttgatttgattgcttttggacttgccgtggctgctgagcagagaagaagcaccgctagtgttgtgacggacaatgaaaagaattataattgctgtgtctataactctgatatagcaactggctatggtgttggagcatttttgtttctcttggttagtcaagtcctgataatggtggcaagtcgatgcttctgttgcgggaagcctcttaaccctggaggctcaagggcctgcgcagttgatcttttcataatctgctgggtggttttcatcatagc

SEQ ID NO: 54613 - DNA, 432 bp, Glycine max
  unsure (1)..(432): unsure at all n locations
  Clone ID: LIB3109-047-Q1-K1-F5
ggaggaaaaggaaaggaaagggaagccaaagcgaaaccctaaccctaacggagagatggcggagcacttggcatcgatattcgggacggagaaggacagggtgaactgtccgttctacttcaagatcggcgcgtgcaggcacggcgaccggtgctcccggcttcacacgaagcccacaattagcccaacgttggttctgtcgaacatgtaccagaggcccgacatgaacatgaacatcatcaccaaccccgatcagccccagccccaatctctcgaccccgataaggtccaggatcacttcgacgacttctacgaagatctctttgaggagcttagcaagtacggncccattcagagcttgaatatntgcgacaacctcgccgatcatatgggtggaaatgtgtacgttcagtttagggaggaagaccatgc

SEQ ID NO: 54614 - DNA, 436 bp, Glycine max
  Clone ID: LIB3109-047-Q1-K1-F6
ggaagaaggaagcatcataaccggccaaagctgctctctcttccatttatcccccataaataaaactaggtgaaaaaaatatactctgtgcttctcatgatgatagtgtagctgaagctgcttctgctgcagcattggtgatttggacacaaaaaaagtttcaaacttttcagttctctgagcttctggtttatcaattttgaaggagttcaatactttaccctattagttggttccctgaaatttgtattggtattgctgtatcagaaattcttctgaacaatctctttaatcaaccatgtcattattggctaaactacgctgtgtcaccatagatgttactggtaccctaatggcttacaaaggggagctcggtgactattattgcatggcagccaaagctgcaggcaaaccttgcccagactacaaacgtatg

SEQ ID NO: 54615 - DNA, 396 bp, Glycine max
  Clone ID: LIB3109-047-Q1-K1-F7
ggagtagcgatggagaagaagaagggtgagctaaagtcaattgtccttcctttcctttccactagtcacataatcccgctagtggacatggccagactcttcgccttgcacgacgtcgacgtcaccatcatcaccaccgcacataacgccaccgttttccaaaagtccatcgatttagatgcgagtcgcggtcgccccatcagaacgcacgttgtcaacttccccgccgcacaagtgggtctccccgttgggatcgaagccttcaacgtcgatacgcctcgggaaatgacccccagaatctacatgggcctatcccttctccaacaagtcttcgaaaaactcttccatgactttgcaaccgatttcatcgtcaccgacatgttccacccttggagt

SEQ ID NO: 54616 - DNA, 433 bp, Glycine max
  Clone ID: LIB3109-047-Q1-K1-F8
gacaattgatttgaggaaactgaatatgggtgagccttttgctcaaggagcttttgggaaactttaccgaggtacttacaatggtgaagatgttgcaatcaaaatcttggagaggcctgaaaatgatccagcaaaggctcaattgatggaacaacagttccagcaggaggtcacaatgttggccacactaaagcattctaacatagttcgtttcattggtgcatgccgcaagccaatggtatggtgcattgtaactgagtatgccaaaggtggttcagttcgacaatttttaatgaagcgtcaaaaccgctcagttcccctcaaattggctgtcaaacaagctttggatgttgcaagggggatggcttatgttcatggccttggatttatccacagggacttgaaatctgataatcttttgatttttggtgac

SEQ ID NO: 54617 - DNA, 416 bp, Glycine max
  Clone ID: LIB3109-047-Q1-K1-F9
gacatacaaaccggcttcgtctggctcaaacaaaagaagagttacacccacaagttcgacaagatcggaaagcttgtctcctacgcgcccgaggtaactgctcatgtgcaacaaggtaaaattaccaaactcaccggggttaagaccaaggagctcttgctctggatcacgctcagtggtatctatgttgatgaccctcccactggcaaaatcaccttcaagacccctgccggcctatttaggtcttttcctgtctccgctttcgagattcaggaggagcctgaggctaaggacactactaagcgcgtgccggataccgctgagcctgtgcaagtcaaggaactctgattttattctcaaacaaggtcgccgtggtggttagcgtgcaaaatatatttatatatatgtttattaat

SEQ ID NO: 54618 - DNA, 416 bp, Glycine max
  Clone ID: LIB3109-047-Q1-K1-G1
ggaggcatttctggcacagttttttccacttttattttaactttaagactgcacagagagaagcatataattcctgagtcaatatagaatttgtgaagtcagtccaaacttcagtttcaaagatgcctcgtggaacgcttgaagttgttctgatcagcgccaaaggaatcgatgacaatgattttctctccagcattgatccttatgtgattctcacatacagggcacaggagaaaaagagcactgtgcaagaagatgctggatccaagccacaatggaatgagagctttcttttcactgtctctgacagtgcatctgaacttaatctaaagataatggataaagacaactttagtcaagatgattgtcttggcgtggcaaccattcatctggatcccagtgttgaaagcggtagc

SEQ ID NO: 54619 - DNA, 386 bp, Glycine max
  Clone ID: LIB3109-047-Q1-K1-G10
ggagagtgagtgagttaatatgttatcattgttatggtgaaagtgaaaccaaacaccgaagctgttgagtgattttcattgatccagatcgtgtctgttctacgtacgatgtacagcggctccagcgacggcgaaagccatgacgcccctcagagtcagaggaaaattccgccggcatcctccatgctttgggtccgcaatcttcgccgtttcatcggatccggcgccggcctcggatccgaagccttgatggagcttgaaactaagagaattttgctcgacatttttaaggaaaagcagaagaaaaccgccgaagctgctacaattcccactttctacaagaagaaacctgaagatggatcaatcagtcatagagttcagagatt

SEQ ID NO: 54620 - DNA, 425 bp, Glycine max
  Clone ID: LIB3109-047-Q1-K1-G11
ggaggcaaaggtgcaaaagaaggaaagtagttcagatgattcttcttcagaatctgaagatgagaaacctgcacccaaatctgctgttctttcaaaaaagatacctgctaagaatggtgctgcccctccaaagaaaggcaagctcgcctccagttcttctgaagatgactcctctgatgaggatggtgtgcgtgcaaagaagccacagaaaatggttgctgagaaacaaaagaatggagcaactgtgcaaaagaaaaaggtggaaagtagttcagatgattcttcttcagaatctgaagctgagaaacctgcagtaaaagctactgtaccttcaaaaaagacacctactaaaaatggcaatttaagtaccccagcaaagaaaggcaaggcagctagcagctccagttcttctgattcatctgaag

SEQ ID NO: 54621 - DNA, 324 bp, Glycine max
  Clone ID: LIB3109-047-Q1-K1-G3
gagagaaagaggagtagtactagtgataaggtgatcataatagagcataatataagagagtgaaaactcatggaggttggcctcaacaagaaggagaacatggggtttgaggaaactgagctaaggcttggactgcctggaaacgtaggaggcactggcactgaagaagtgctcatcaggaagagaggtttctctgagactgaaactgaaactgaggaggatgagtctgctaccactgtggatttgatgcttaatctttcttctaaggaagctgctgctgctgcagatacaactgataagcacaagactttgcctaaggagaag

SEQ ID NO: 54622 - DNA, 392 bp, Glycine max
  Clone ID: LIB3109-047-Q1-K1-G5
gtgagaagccttgacttctctgcgacaggcatatcgacaatagtgcaggtgaacgaccttaagaactctcctgggcttggcaagagggagctgaggcaggccaccaatcaggtccttcaattgtttcaggataactaccctgagtttgtggccaagcagatattcatcaatgttccctggtggtaccttgccttttctaggatgatcagccccttcttcacacagaggaccaagagcaaatttctctttgctggcccatccaaatctgctcacacccttttccaatatatagctccggagctggtgccggttcaatatggtggacttagccgagaggctgaacaggaattcaccacttctgatcctgtcactgaggttacaatcaaacccgc

SEQ ID NO: 54623 - DNA, 367 bp, Glycine max
  Clone ID: LIB3109-047-Q1-K1-G6
ggactcaaactgctcctgcaacccctgcgcttgcaagtgaggtgttgggagagcaagcttcaagcagagatagcccttaattaggaataatgataaactattaatgtgtagctaaaaacttatgtattatgtctgtgatggttttcgtgcactctggtgttttgtgttaaacaaacatccttagaataaagtggtcatgtcttgcctttcagcaagttcaagtgttttggacttgtgatgggtgtgttaagctcatggttgcttctcttttttttttttttaatgtttggtaattggtcgcttctgtataaagttcggctaatctgaattatgaatctctgcttataatattaaatactattactgc

SEQ ID NO: 54624 - DNA, 421 bp, Glycine max
  Clone ID: LIB3109-047-Q1-K1-G7
gactcaagtgaagagaaagagccttccaaaatggtcaagctatctcgcatgctccctctcacttccacttccaggcataggctgttggaagtgctgtcctctaggaaagttgaagtcggagaccgtcttagccattcagctggcatttctactgctacaaataactatgctgccaaaggatatgcttccgatcgaatatttgctccttatactgtttacaagggcaaagctgcattctcgttgatcccttgtcttccaactttcactaagttgaattctgggactgttgtagttgatcgacgtggttcaatcatgatgactttcatgcattctattggagagcgcaaatatgactgggagaaaagacaaagatttgctctctcagcaacttgagttggttctttgataacaatgggcgctc

SEQ ID NO: 54625 - DNA, 430 bp, Glycine max
  Clone ID: LIB3109-047-Q1-K1-G8
ggttagacgagggtaaggtcgcgttgtgttgcgtcgtgtcgtgcgctgttcctctgtctgtcgtttttgttttcagaccaaaccctagctccgcatcgcaaccatgtcgaccaagcaaggtggaaaagctaagcctttgaagaaacccaagtctgataagaaggattacgacgaggttgacatggctaacattcagaagaaaaaggaagaggagaaggcgctaaaggagttgaaagccaaggcgcaacagaagggaagctttggaggttctgggctcaagaaaagtggaaagaaataagggctctttatcatgattgtatacatccaatattgagccctgtagtttattaccatgataacttctgtcttattgtggccttctttattgctctaatgttagtactgaactgaggtatttcgtgatgtaagc

SEQ ID NO: 54626 - DNA, 419 bp, Glycine max
  Clone ID: LIB3109-047-Q1-K1-G9
ggcatgagtttgttgtgagctataagctagtttatcgtgaggagaatatgaagttgtttgttttctttgttgctgcagtagttttggtagcatggccatgccatggcgcaggctaccaaaggttccctctccgaatgaaaactggctatggtgagcgttcttcggaggtaaaatgcgcaagttttaggcttgctgtggaagcacacaacatccgagcctttaaaaccattcctgaagagtgcgttgaaccaacaaaggactacattaatggcgaacaatttagatcagactctaaaacagttaaccaacaagctttcttttatgctagtgaacgcgaagtccatcacaacgacatatttatattcggcatagataacaccgtactctctaatatcccatactatgaaaaacatggatat

SEQ ID NO: 54627 - DNA, 422 bp, Glycine max
  Clone ID: LIB3109-047-Q1-K1-H1
gggattaaagattaaaaaatgccgcccagtgcttgaaaaatgaagcagcagcagtggcagaagatgttcgacctttaactccgtggcaaactgtatataaacgcgtgaactgcaccttttttcgtcctattttcttaccataagtattcaattcaatgcttcatcctcatctattttctattgcattcgtacctcgctttgttttcgctattgctgttgatgctgttgctgtgtctcttgagtattgtctcaattgagttggtgttgaatccgagcttatttaggcacgtttattttagctggtgtgaaatcatttcaacattatctggaagaagactttcagatttttagtcaaatttaatacttaaagatggggttatatgagcatccaaatgttgtgcagtggggtattaaatctttca

SEQ ID NO: 54628 - DNA, 386 bp, Glycine max
  Clone ID: LIB3109-047-Q1-K1-H10
aattcagatgttattacgcaaattccaatggtaaaagcatacaatcttcatgcaggtgccactgttgttagaggacccgggtttacaggtggtgatatcctgagacgaacaagtaatgggatggtcgtaacactaagagtagatgcctctgcagtaaggaaccaacgatatcgcataagattccgttatgctgcaacatcaaatttctattttgtcgtaaggcgtgggaatcttggtgttaatggtcgagagatcatgaaaacaatgagtacaggcgaggaattaaaatctgcatcttttgttttgggagagtttattacgccttttaatttttttgaaaatcaggttccacttcaaatagaaatacaatcactttctcctggggg

SEQ ID NO: 54629 - DNA, 401 bp, Glycine max
  Clone ID: LIB3109-047-Q1-K1-H11
ggagcaagagtgaagagcgaagagaatggctcccaggggttgaatctttttggctgtgttatgcttctcaacactgtcactgagtcgttgtcttgcggaggataatggacttgttatgaacttctacaaggaatcatgccctcaggctgaagacatcatcaaagaacaagtcaagcttctctacaagcgccacaagaacactgctttctcctggctcagaaacatcttccatgactgtgctgatcagagttgtgatgcttcactgttgctggactccacaagaatgagcttgtctgagaaggaaacagatagaagctttgggttgagaaatctcaggtacattgagaccatcaaagaaactctggaaagggaattcccagaagttgtgtcctgcgctgata

SEQ ID NO: 54630 - DNA, 361 bp, Glycine max
  Clone ID: LIB3109-047-Q1-K1-H2
gacagagagaatgagtacggtgggagaagggaaggtgagtagtaatggtcatggatgttgcaaatcagggccaggctatgcttccccactggaagccatttctggtcccagagagtctctcatttatgtaacctctgtctacacagggaccggaatagagaagccagactatttggcgacagtggatgtggatccaaactcttcaacttattccaaagtcatccataggcttcctgttccttatttaggtgacgaattgcatcacacaggctggagttcatgcagctcttgccatggagacccctcagcagaccgacgatttctcatcgtacctgcactcgtatcaggtcgagtatatgtg

SEQ ID NO: 54631 - DNA, 380 bp, Glycine max
  Clone ID: LIB3109-047-Q1-K1-H3
gaagcagaagctgaagaagaataataagcagtatgaggacttgattaataagtgcagggagaaccctgagagcgaggaggaaaaagaagaagaggagagcgatgaagagtatgacagtgatggtgagattattgatccggatcagcttcaaaaacccgaagcaaaatctgattcggaagcctctcaatatgaagatgaaaagccagatgctggtgaaggtccttgggaccaaaagcttagcaagaaggacaggcttttggatagacagttcatgaaaaaccctagtgagatcacgtgggatgcggttaacaagaagtttaaagaggttgtggctgccaggggaagaaagggaactggtaggtttgaacaggttgagcagc

SEQ ID NO: 54632 - DNA, 428 bp, Glycine max
  Clone ID: LIB3109-047-Q1-K1-H4
aggggacatcgaggcaaaaaatgaaaacccaaagtgcttctctcctctgtctttttctctctcttgctatccttttggctagtggcactgctgcaagtgcaactccaagaagcgcagtgccaagccaccatgtttcaacattcaacagaagcctttttccttccacttttctctttggaattggttcttctgcttaccaggcagaaggagcagcaagtgtagatgggagaggaccaagcatatgggacacctacactagacagcatactgaaaagatttgggatcatagcaccggggacatgggagctgatttttatcatcgatacaagggtgacataaaaatagcgaaagaaattgtgctggactctttcagaatctctatctcatggtcaagaatatttccaaagggcaagggaagcagtaacccc

SEQ ID NO: 54633 - DNA, 366 bp, Glycine max
  Clone ID: LIB3109-047-Q1-K1-H5
gatttgaaagggtcaattaaaagcaagggcttggtcactcctatctatatctggtctcacttaatcttgagttgtctaaccacacatcacacttgaacggagagataacaatggctcctgagaaggccgagactgatattgcatagaattacttataaatggaaaaggatgaggaaggtactaagtccaccagtggccaattgtctaggctatttcaccatgctggctctgtctatgatgcaatgattcagctgtgctcataattaggtagcacaagtgttactgacactaccatattccttatcacaactgcctgatgaactctgtcatcataaatactttcagatatttactcaaatttaatac

SEQ ID NO: 54634 - DNA, 444 bp, Glycine max
  Clone ID: LIB3109-047-Q1-K1-H8
gatcttgaaatagtgttcaatagaggtcgagttcgtattgccacatggaacaagactctattggcatcaaatttacaaccatctagtgagagctgcgggaatgccggatttctgatgttcaactcaaaatttcttaaaccaaatggaagcaagttattgagcaatcaaaatcaacatatcatcacccatggtgagagaaacattgttactgaacacacaacacaacttgcttgtgtttttaccgaagaagtgtgtggagatggagattgggctcatggaagttttccgcttgaggaatacattcaggctctggatcgttccaaagatgagatgtactataatcactctcttggtatgcgctatagtaagattacagagcaaatatatgtgggatcctgtatacaaacagaagatgatgtagaaaccttgtcaaaagttgaggga

SEQ ID NO: 54635 - DNA, 298 bp, Glycine max
  unsure (1)..(298): unsure at all n locations
  Clone ID: LIB3109-048-Q1-K1-A1
gaacgaaggatgggcatatccattcatggaacgatcgttagaaagcatgacgtttttttcttaaaaaaaaataaaatcaaagtaattaatagaaattagaaagtacaaaatggtccctatataacttgagtgtcctaagctcgcaataatacgataaagggtttttgttttgtttccttgggtgctgcatgcactttcactcgaagaaccttgaagcgagtctgggccacagcaaccagcgacaacaactcaatcagctagggttgctttgcttgctatctngttggaagattttctg

SEQ ID NO: 54636 - DNA, 411 bp, Glycine max
  Clone ID: LIB3109-048-Q1-K1-A10
ggaattgaaaatcgagaaacggaatgatgaaagagcgtagggagttggatctgtggtttggttgcgatgcggtgtgttgcgaatcactgtccaatcccgatcgcttgatccagacagtgaatcagaatcagaatcagaatcagaatcagagagaaacgatgagggcagtaagtgcgttaatggtggctcggatgttgacgcgggaccactcgctccctgtccttggcaacgaaagcatacccttcggatcggtgtggtggttcgcctatgccggcgtctcctgtttcctcgtcctcttcgctggcatcatgtccggtctcaccctcggactcatgtctctgggcctcgtggacctcgagatcctcgaacgcagtggttctcctgccgagaaaatgcatgctgcgattatac

SEQ ID NO: 54637 - DNA, 365 bp, Glycine max
  Clone ID: LIB3109-048-Q1-K1-A11
ggtatttgatttgtcaaatacatcattattggatactcttttatatgtatggcgcaacccaatttttgttttttttttcaatttttaatctcctatccctttttttaattttggaatcgaaatatctaatctaaataatccaaaaattcactcttaatcttgacagtgatatatgttgtatatgtaaatcctagatgtaaaaataggcatacttctcccgggaaaaaaagtaggtaaaaaaatatgctaagtataaattgtctactgatgaaatacgaaagctgatgatattgaaaaaaaaagaattgtaaataaggttcaggttcgacttccatagagattatagatgatatcgtctataatga

SEQ ID NO: 54638 - DNA, 420 bp, Glycine max
  Clone ID: LIB3109-048-Q1-K1-A12
ggtgacagaacagcagaagggaagaagatggagttactggagttatgggcaattttcggccccggcgtcgccggcgctgtcttcggcgccggatggtggatctggcttgacgcggtcgtctgcagcttggtcaccgttcccttccttcactaccttcccggaattttcgcatcttttgcggctttgatgttcaattgcgttagaaaagaagacatcgattattctccatatgacgaaggcgagtggagactgaagctgtggctcttcattgcatatgttgtatcctttgattctttagctggatcagctggcctactgatccaagattcacttgataaatctgccccttcagtttggactggagttgcaggtgttttgcagtgtgtttttgacttgatcagtggactggtatattggact

SEQ ID NO: 54639 - DNA, 294 bp, Glycine max
  Clone ID: LIB3109-048-Q1-K1-A2
ggatgaggcaagaagttgtattttggcatccccgtggcttcaagaagagaatctcaatggaggcccaggagctgaagcgcgtgttccagatgttcgaccgcaacggcgacgggagaataacgaagaaggagctgaacgactcgctggagaacctgggcatcttcatctctgacaaggacctgagccaaatgatccagaggatcgacgtcaacggcgacggttgcgtggacatggacgagtttggggagctgtatcagaccataatggacgagcgcgacaatgaggaggacatga

SEQ ID NO: 54640 - DNA, 392 bp, Glycine max
  Clone ID: LIB3109-048-Q1-K1-A3
gggccctctccgagcagcaaatccaaacatccaatttagaaaaagaaaaacagcctcctcgccccttacatgtccaactaattttgaagggctctaatgggacaccagagaataagattggtgtgcatgattcacatgtttctagtgagaggcaggagagacatgttagacataaagatagacctgatcgtggtgtctggacaagtcgttccaatggagctgacgactctttctcatcttctgcttcctcacaagtagatcctttggaaggaagccatgcagatttgaaacatgacacgccaaatgcaagaagtggggaggtaaaatctcttggaagtgtccgtactagtcactcatcagaaaatggtttcaataagcattttggtcgtcgt

SEQ ID NO: 54641 - DNA, 361 bp, Glycine max
  Clone ID: LIB3109-048-Q1-K1-A5
gagacaaggtaggactggctttcctttggttgatgcaggaatgagagaactttgggcaacaggatggatacacaacagaataagagtaatagtttccagttttgctgtgaaaatgttgcttctaccctggaaatggggaatgaaatatttctgggacacacttctggatgcagaccttgaaagtgatatcttgggttggcaatatatctcaggaggcttaccagatggccatgagcttgagcgcttggacaatcctgagattcaaggggctaaatttgatccagaaggtgaatatgtgaagcaatggctacctgagttggcaagaatgccaactgaatggatccatcatccttgggatgca

SEQ ID NO: 54642 - DNA, 422 bp, Glycine max
  Clone ID: LIB3109-048-Q1-K1-A6
gagtgtgtgagttcattaacatatacaaattctgtgtgttgtgttgtgtacttgtgttaattgtgttgttgttgtaggaaatttaagtgaagagagaatgatgatgaagtctgctatgtgtgcattggtgcttgtggcactggttgtggttgaagtggggcccatggctgaggctgcggtgacttgcaacccaacacagttgactccttgtcttccggcaattaattcaggttctgcaccttcgagtgcttgttgccagaagctgaaggagcaaaagccatgcttctgtggctacctcaaaaaccctagcttgaagcagtatgttaactctcctaatgccaaaaaaaccgttagttcttgtggtattgtctatccaacttgttaagcacctcttatatatatatataaaatgtgtgaacaat

SEQ ID NO: 54643 - DNA, 327 bp, Glycine max
  Clone ID: LIB3109-048-Q1-K1-A7
ggagaaaaagaaaaagaagaagagagagagagagaaagagagaagagaggagggtgtgtttctggtttttggaaatttcagcccccatcgaaaaacaagaagccccaacgatagtaatcatcgaaggaatttgaaaggtcgaaacttgagcatctgggatcgcgaaattggggattttggttaaaagggtttaatcttcggaactgattgatggcaaaactgtacgtgaaggccgtgccaccggcgggatctggacaggaacacggattggttcacgtaccctggcctttggacccattacattcttattcttttcttttcttggat

SEQ ID NO: 54644 - DNA, 420 bp, Glycine max
  Clone ID: LIB3109-048-Q1-K1-A8
ggcggtggagaaggaaagaatatctatctctcattctctcgtgcctcaacgcttttgtaactcctttcgcttttccattccaacctctttcacacttcagatctgtttcttcatcggttgttcaagtaaatggcctttgtcaccactgctgaagtgtgtgatgcgaacccacagttaattttgagtggggagcttcgtgcccttcagccagtttttcagatttatggccgtcgacaggttttctctggacctatagttaccttgaaagtgtttgaagacaatgttttggttcgtgagttccttgaagagaaaggcaatggaagagttctagttgttgatggaggcgcgagtttacgctgcgctatattgggtggcaaccctgtggtacaagctcaaaacaatggatgggcaagtattatt

SEQ ID NO: 54645 - DNA, 424 bp, Glycine max
  Clone ID: LIB3109-048-Q1-K1-A9
gaagcgaatgaggttatgaagaagcaggaggctgagcttgaggagctaaagagggtggttcgagagaaagaggaggagattgaggttttgttggttcagagggaggttgagagggagaagctgaaggtggctgaagcgaatttggagaagcaggcaatggactggatgttggcgcaagaagagctgaagaggctgggtgaggatgctgcgaggcatgctgaggagagtagtgagaccttggaggatttcaggagggtgaagaagcttctcaatgatgtgaggtctgaattagtttcgtctcagcaagcgttggcatcttccagaagcaaaatggaagagcaggagcggttgttggaactgcagctgagtgagcttggggagcagagggcaagtgtgatgtcctacatggaaaatttgaaggatg

SEQ ID NO: 54646 - DNA, 390 bp, Glycine max
  Clone ID: LIB3109-048-Q1-K1-B1
ggagaaagaaagaagtaaaagacgtgagtctcagccggggcatgttctgaagtcttcttctctgcttgtatgcaacggccacagccatagtcgcctgaaaccgattgttgttgcagggaaaacacagagatccgggtcgacccgttgcagatccgatccaaataagaaaagatgaatattttcaggttagccggggacatgacccatttggccagcgtcctcgtccttcttctcaagatccacaccatcaaatcctgcgccggtgtctcattgaagactcaagaactctatgcactcgtttttgcttgtcgctacctagatatctttactaattatgtatctctctataataccactatgaagttgatattcttgggaagctcattttct

SEQ ID NO: 54647 - DNA, 409 bp, Glycine max
  Clone ID: LIB3109-048-Q1-K1-B10
ataagaggttcacgaggaattgaagaagccttattgaaacacttgggagtgaagcgcaatgaagtaacaccagatggtttgttttctgttggagaaatggaatgcatgggatgctgtgtgaatgctcctatgattacagtggccgattattcaaatggatcggagggatatacttataattactttgaagatataaccccagagaaagtagttgagatagtagaaaagctgagaaagggtgagaagccaccgcacggcaaccaaaaatcccggcgaattaaaagtggaccttgaagaaggaacactactttgttaaaggagcccaaaccttcttcctgccgtgacctggattactgctgaagtgttgtatactttttgcctttaataatgtgaggcttgcatgtcttgg

SEQ ID NO: 54648 - DNA, 407 bp, Glycine max
  Clone ID: LIB3109-048-Q1-K1-B11
gtattcggttcacgaggaatctatgatgcctcagtgaaacacttgggagtgaagcgcattgaactaacacctcatagtttgcaatctgatgtacaaatgcattccatggcatgcttcttgaatgctcctatgaatactgaatccaattattcaaatggatccacatggatatacttaatatcactttgaatatataacttactcataatgtaattcatatagtataaaagctcatacatgatgacaaaccaccgcacagcacctcaaaattcccaacaaattaacagtgctacctgacggatggaacactactctgttaagtgagcttaagcctgctgcctgccgtgacctggatcactgctaaagtgtcacatactatttgcctacaataatgtgatgcttgcatg

SEQ ID NO: 54649 - DNA, 399 bp, Glycine max
  Clone ID: LIB3109-048-Q1-K1-B12
ggtctgaaggcgaggttaagcatagaagaaaggggagaatggctagagacagcgtcctaacacgcgtggcgaccggagccgccgttggcggtgctatcggcggcgcagtcggtgagataattttcacttcttattcacggtttggttggatccttttcattaataggcaaacacggcacagctttcgctctgttcttaggttagtgtgaattttggaactggtgtgttgcatgcaggtgctgcttatgggacttacgatgcaattaggtataaggtatgcgattcaaatcctttatttatgtaatcgattattgaatgagtgaatttggaaaggcaattgcaatcttttgtaatttgattgggggcagtttagtctcaaaagctatgctgattatgact

SEQ ID NO: 54650 - DNA, 237 bp, Glycine max
  Clone ID: LIB3109-048-Q1-K1-B2
gacaacagtggatccataaatagaaaagtggaaaatagtcaactggaaggtttctatgtagacctatcaattaccaaggaagttattgtcgaaaactctatcagtgtctccattaggaagtgctctgagacagctaggaatattttatatttagaaacagatatacctggagatattctccttaactggggggtttgtagggatgatttgaagtggtgggaaattccacctgttccc

SEQ ID NO: 54651 - DNA, 339 bp, Glycine max
  Clone ID: LIB3109-048-Q1-K1-B3
ggagggcagagggaagggttagggaacaattggagtgcacgaaagcgatgccaaaaaaaccaaacaatcattaacaacagccctaaccccccccgacgtctttcaaaactgattcggagcaattaatgtaaaatctatggacatcaacgaggaatcttcattctctctccgtttttgtttgcatcattaatagacccaaatggacccgaacccgacagcctcgctggactccgacccggacccgcttcgcgtgaagaggaagaccctcgaggccgtgcctctgcagtgtcagaaagcttttgaatcgattaacgcctcttctgctactgcttcttcttc

SEQ ID NO: 54652 - DNA, 177 bp, Glycine max
  Clone ID: LIB3109-048-Q1-K1-B4
ggaacagagtgtgataatagtaagacagagcacctactcactcgtaaatggcgaggaagaagatcagagagtaccactccaagaggcttctcaaggagcatctcaaacgtctcgcctctatcgacctccaaatcctctcagctcaggtgacagaatctacggatttaactgacctga

SEQ ID NO: 54653 - DNA, 204 bp, Glycine max
  Clone ID: LIB3109-048-Q1-K1-B6
ggcagtgagtagtagtgagattgaattgaggttgaagtgtgttgtgttgtggcaaagctcagaaaaagagagagagattgaagaagcgatttttttatatgaaattttgaagagtgaatgaaaaatctcaatcccatggatgagcaattgaatttgagctgaatcggcgtcggttcgatttctctcagtcacacactactgact

SEQ ID NO: 54654 - DNA, 405 bp, Glycine max
  Clone ID: LIB3109-048-Q1-K1-B7
ggcacaagtgagtttgttgatcgagataactagagacagtgtgatgaaaatgaaggtccttgttttcttcgttgctacaatcttggtagcatggcaatgccatgcgtacgatatgttccctctccgaatgaacactggctatggtgcccgtactccggaggtgaaatgcgcaagttggaggcttgctgtggaagcacacaacatctttggctttgagaccattcctgaagagtgcgttgaagcaacaaaggaatacatccatggcgaacaatatagatcagacttcaaaacagttaaccaacaagcttacttttatgccagagaccttgaagtccattccaaggacacatttgtgttcagtatagattgcaccggactttctaatattccatacttcaaaaaaca

SEQ ID NO: 54655 - DNA, 249 bp, Glycine max
  Clone ID: LIB3109-048-Q1-K1-B8
caagaaaggtggcgagaagaacattctagtctttgatcttggtggtgggacctttgatgtcagtatcttgacaattgataacggtgtttttgaagttcttgctacaaatggagatactcatcttggaggtgaggattttgatcaaagaataatggagtacttcattaaattgatcaagaaaaagcatggaaaggatattagcaaggacaacagagcacttggaaagctgaggagagaggctgagcgtgc

SEQ ID NO: 54656 - DNA, 406 bp, Glycine max
  Clone ID: LIB3109-048-Q1-K1-C10
ggagcgaaagaggggttttggaacgtgcatgagccggtgctctaatctctgcattctgtgatggctctaaatccgttcacgtgtcctcgtcccgattcgtggtaccccacgctctccgttttcacactcgccatcggcctggtcttaaccgcctctttcttcatttatgaagcaacatcttctacgaaaagtcgttcacttgttcaggagctgacaactggtgcagtggcttcagtcttcttgtgttttgggtcctcgatcctactacttgcttctggtgtgtatgtctaatttaaacattgtatcggatgaaaatgttgctaatccgatagctgtaaatgaaaaattgcattggacgttttagttggatattctactcttaggcatgttcttaatctatcgataa

SEQ ID NO: 54657 - DNA, 340 bp, Glycine max
  Clone ID: LIB3109-048-Q1-K1-C11
ggcacccagagaggatgaagcttcgagagagagagagggatgaggcaaaggggtgacgctccatcaagatgggtatttctagggattccatgcacaagaagcgtgccactggtggcaagaagaaggcattgagaaagaagagaaagtatgagcttgggcgtcaggccttaaacaccaagttatcaagcaacaaaactatccggaggattcgcgttccaagtggcaatgttaaatggagggcattgatgttggataccggctattactcatgtggtattgaaacagttactctcaagactctgattctagatgtttgatacaatgcctcaaacaatgagct

SEQ ID NO: 54658 - DNA, 247 bp, Glycine max
  Clone ID: LIB3109-048-Q1-K1-C12
aggcgtgagaacacctcagagaggactacacaggggggatgatgaatatggagacggatatctaaacgccagtgaagtctcacatttttactatgtgtatgactccgaagctgcagcacaagacgcatcccaaagcagagcagtagagacacttaacagatcagaaagtacacattcttgagccgagttgctcatacacatgtattaagagcataaactctatgcagatgattccttgtacaagtgg

SEQ ID NO: 54659 - DNA, 368 bp, Glycine max
  Clone ID: LIB3109-048-Q1-K1-C3
ggacgtaagattttagtattgtcaggggtagtgtcggtgatgaagtaactagaataaatatagttacaacatcaacttccatgttcttcatgtttcacttctgctttaagtttgtggctttctactttctctttctagagtaggactaaactcatacactgatcatgggagtggatttaagacaagtggtggcgggtgtcctcaccctcacaatgttcgtcatgcttatacacatgatcaaaagagaccattttgatgctgttgatgataaactttctgaaacggaggatgtcaacttttgaaggtccaaccttggttcctactaaggttggaaggaccttcggaatttgaaaggaaaatgggattag

SEQ ID NO: 54660 - DNA, 365 bp, Glycine max
  Clone ID: LIB3109-048-Q1-K1-C4
gacaggagggaggtgagggactgatgactgagatagcggtgattcaattgcatcatcacaatcacaacattgcttattgacattcatatcctctcattctctctctttttctttctcttcaattccaaacctatggcggatcagagccccaaaccagagaccttcgaactcaacaatggcagcatgcaagtcctcctcagcaatctcggctgcaccatcatctgcttatccgtacccggaaaagatggattgttatccgacatcgtccttggcctaaaatctgtggaatccaatcaaaaaggtttggttcctaatttgggttgaatggtggccaggtttccaacccgatttaaggttgccaggtt

SEQ ID NO: 54661 - DNA, 403 bp, Glycine max
  Clone ID: LIB3109-048-Q1-K1-C5
ggggaaagtgagggaagcacgagaaagcttgcgagaatttcacgttcttcttctatttgcaaacactgattttccattccattactgctattgttatcattcttattttgctgtgatcaaattggtttttcgtattaagaattctcattattattactgttgagactttcctatcgccttgcaccaaagaactcggttcccacttttctctaattctagggcaactttttcggccaaatccttttctttccatcgaaaccagctctcattggcaaattaacgcgctttgcgtggtgccatcttcggtgggatggaaactagggcatgaattggccgtacagaagaaaaaagcgattaaaaatgttcttcagcggcgatccttcgacgcggaagcttgtcgatt

SEQ ID NO: 54662 - DNA, 414 bp, Glycine max
  Clone ID: LIB3109-048-Q1-K1-C6
gacagcgatggtggcagcacgagtggctcgcgaagatgttaggcataaagggtggcttcttgatgggtaccctcggagttttggccaagcccagagtctggagaaaatgcagatacggcctgatgtgtatatcgtattagatgttcctgatgaaattctgatcgacagatgtgttggtagaaggctagacccagtgacagggaagatatatcatctaaagttttttccaccggatacagaagaaattgaaagcaggctgataactcggcctgatgacactgaagagaaagtcaaatctcgcctaaacatatacaagcaaaatgcagaagcagcattttcctcttactccaacataacacataagattggatggagtcattcaaaagaatcagttttcaaagagattgaattttt

SEQ ID NO: 54663 - DNA, 390 bp, Glycine max
  Clone ID: LIB3109-048-Q1-K1-C7
gggctttctcatgtctctcccgtccttggattatctttcatgtaagattagtcccagaaagccaattgtaaagaccctttatttgtgttgttgttttttagtttttttttttctttttattatatgttttgagttatggaagcttgctgctgcaaccttgaagtggatgtaaatggagaagagactttcatggtggacaagactgttattactcagtattcaaacaaatttgctagactggttggaaaggcttaatgttgccccaggaaacctaaaggtattattcctggattttccagaagggcctgaaggctttaacctaaggtaaaaatcttttaccaccatgggaccacttgttttaatcccttcaaattggttctggcctggtgg

SEQ ID NO: 54664 - DNA, 299 bp, Glycine max
  Clone ID: LIB3109-048-Q1-K1-C8
gggtggcggggggagagagagagagagagatgtcgagattgcgaagactgatccaagcttcagttgatgctactaagaaagttatatccggtaatcttgatgatttgatgccaccaccggagagacccatcttcagcttcaattccaagcaagagttaagcaagtggcatttgtattctgattctgaatttggaggtttgtcctctgcgtctctgcagataactgagtcggaaaatggagcaacttctggaatcttctccgggaacctttctctggatgtctctgaaggctctaaatgg

SEQ ID NO: 54665 - DNA, 416 bp, Glycine max
  Clone ID: LIB3109-048-Q1-K1-C9
cgggataagcattcattttcatcaactgctaagctaggtgaactctctctcgttgttcccttggcctctcgctctataaatacacatcgcatcattctctcacttgcacattgaaatctgaaccttccggatttcgttttgctttgttcaggtagccagccagtcatggtgctcttcaatgtttcacgcgtagagaccactcccttcgatggccagaagcctggaacctctggtctccgcaagaaggtgaaagtgttcgtgcaacctcattacctccataactttgttcagtcaacatccaatgcattaactgtggaaaaagttagaggtgcaacgctagttgtatctggtgatggtcgttatttttcaaaggaagctattcagattataactaaaatgtcagcagcaaatggagt

SEQ ID NO: 54666 - DNA, 371 bp, Glycine max
  Clone ID: LIB3109-048-Q1-K1-D1
ggaagaagaagaaggtgtgtttcgacgcgcctaggcttgcggtgcggtgtgtgaaagcctcggcgcggcgaaccggtgatactatcgacgatggagagactcggactgggttcaccacacctgccatggaagtcaccacattcaatcgaaccactttcaccgatgctgctgactttcccgtttgggaaaagattggtgctgtcgtcagactcagttatggcctcgggatttatggtgccatggcagttgccggggagttttatatgttcaatcacgggaattgactctctggggggtttcaatcaatcgttggatcccatttggaaaggcctggattttccagttcttcaattattggccttttggttatt

SEQ ID NO: 54667 - DNA, 346 bp, Glycine max
  Clone ID: LIB3109-048-Q1-K1-D10
ggaaatagacgggaatagagtggtaatcctaggaggtggcgttgcgggatccgtcgtcgctaaatctcttcaattccatgcccatgtcacactcgttgatccgaaggaatattttgagattacatgggcgagtttgaggtcaatggttgagccatcttttgcagagaggtcagtgatcaatcacagagattactttaccaatggcgacatcgttacgtccaatgccgtcaatgttacagaaacagaagtgttgactgcagatggccatcgaattggctatgactatcttgttattgccactggccatgcagatcctctccccaaaagtatgagggaaagacttaat

SEQ ID NO: 54668 - DNA, 327 bp, Glycine max
  Clone ID: LIB3109-048-Q1-K1-D11
ggatgatgacgatgataatgggtttatgatagcctgtaacgttgcaaaatccgagtatgttgatgaggccgaagctgctgcacatgacgcactacataatacagcagtggatacacttaacacatcagaaaggacacatttctgggaggagccgttaagagacaagtatcaagagcataaagacgaggaattcaatgccttatgcaaacgtaagccaaaccagaagtccatgtgttacagagaagaggatgaccttgctggatctggcagatgtaagctctgatcgtaatatgacagtcattaagcataccttacttatggtgattc

SEQ ID NO: 54669 - DNA, 291 bp, Glycine max
  unsure (1)..(291): unsure at all n locations
  Clone ID: LIB3109-048-Q1-K1-D2
ggcacaagtgagtttgttgatcgagataactagggacagtgtgatgaaaatgaaggtccttgttttcttcgttgctacaattttggtagcatggcaatgccatgcgtacgatatgttccctctccgaatgaacactggctatggtgcccgtactccggaggtgaaatgcgcaagttggaggcttgctgtggaagcacacaacatctttggctttgagaccattcctgaagagtgcgttgaagcaacanaggaatacatccatggcgaacaatatagatcagactccaaaac

SEQ ID NO: 54670 - DNA, 245 bp, Glycine max
  Clone ID: LIB3109-048-Q1-K1-D3
gaattcagacttcgtgaagcatagcattgcaccatgccaccaagtcatgaaaaattggcctagggacaacatgagcagattagcacttcatgggaaatcagaattcaagaatcaagtctttggaccagagtcactctatttcgatcacatgggtcgtggcccctacactggtttagccgatggacgcgtatgtttatggatggggtagcaacttggttgggaaacatttgcagttgtcacatcta

SEQ ID NO: 54671 - DNA, 291 bp, Glycine max
  Clone ID: LIB3109-048-Q1-K1-D4
cggggaaggtatagaatcaattgacgcgagcggccattcatggattggcttcatgcccatacactcacactagcgcgccctttgaccgcatactctacatactaccgttttctaacatgctccctaaattctgaccacatgcgaagaagaagcatctccattactgcttcttggcacgagcagctagcgatagttttactattctgcgcgaatcctattactgccgtgaaagctatagctaaaagtacgctaggggagacgctctataggaaaacggctgagagaaagaca

SEQ ID NO: 54672 - DNA, 141 bp, Glycine max
  Clone ID: LIB3109-048-Q1-K1-D5
gacgaatgtttcgaccacaaggatactgagtctgcttctgctaactctgcaaaagatgggattcacttttttttttgcaaattatacaatggctatgattctgatggcaggtgttaaagcaaagggagagaaaggtggagt

SEQ ID NO: 54673 - DNA, 276 bp, Glycine max
  Clone ID: LIB3109-048-Q1-K1-D7
gaaagagagaagtaacatcaaggtgcagagagaggaattgaagcatgggaagagggaaggtggttctggagagaatacagaacaagatcaatcgccaagtaaccttctcaaagcgcagaaatggtttgctcaagaaagctttcgagctatctgttctatgcgatgctgaaatcgctctcgtcatcttctccagccgtggcaagctttttcagtatagtagcactgacattaacagaatcattgagaagtatcgtcaatgctgcttcaacatgtctc

SEQ ID NO: 54674 - DNA, 423 bp, Glycine max
  Clone ID: LIB3109-048-Q1-K1-D8
gacggacgagggtttcgtttcgggtttgacgttgttcacaatcactttctgcgcttcactcactcccttcgtgcggttttctttctttgtcgaactcgtgcgaaaatgcgtgagattcttcacatacagggagggcaatgcggaaaccagatcggagcgaagttctgggaggtggtgtgcgcggagcacgggatcgattccacggggaggtaccagggggacaacgagttgcaactcgagcgagtcaacgtctattacaatgaagcgagttgcggaaggttcgtgccgagggcggtgctcatggatctagagccaggggccatggacagcgtcagatctggtccctacggtcagattttccgacctgataacttcgtcttcgggcagtccggcgccggaaacaactgggccaaaggtcactac

SEQ ID NO: 54675 - DNA, 410 bp, Glycine max
  Clone ID: LIB3109-048-Q1-K1-D9
gatagaaaacagtaggagtaaagagaaaaaggatgaggtagagagaaggtgggagtggcagagagaagattacaaagaaatggggagatgggtgaattgtaggggcaatatattcccattcctggggatggtgatggctatgctagctcaaagtggaagcatggtggtaatcaaagttgccatgactgatggaataaacaaatatgtcatggttgtgtactctttggcactctccaccatattgcttcttccctttgccttgtttcttcacaggtcagagcgtcctgctcttacattctctgcactttgcagtttcttcttgcttgcattctttgggagttcaggacagataatggcttatgttggcatagatctaagctctcctactcttgcatcagccatgcttaatc

SEQ ID NO: 54676 - DNA, 276 bp, Glycine max
  Clone ID: LIB3109-048-Q1-K1-E1
tgggacggctaaaagctaaaaatcagcgaagtgctcaaattagcatggctgtcacggttgcattcttgaatttgatcatcatgtttacagtagtctctacaagcaagtcactgagcttaaactactattcaaaaacatgccctgatgtgtaatgcattgttgccaaggcagtgaatgatgccaattgtttggagcaaaactgttccagctgcacttctgcgaatgcacttccatgactgtttcgttcggtggtgtaatgcctctgtgctgctaaat

SEQ ID NO: 54677 - DNA, 379 bp, Glycine max
  Clone ID: LIB3109-048-Q1-K1-E10
ggagtgagcaagagtgaagagcgaagagaatggctcccaagggtttaatctttttggctgcgttatgcttctcagcactgtcactgagtcgttgtcttgcggaggataatggacttgttatgaacttctacaaggaatcatgccctcaggctgaagacatcatcaaagaacaagtcaagcttctctacaagcgccacaagaacactgctttctcctggctcagaaacatcttccatgactgtgctgttcagagttgtgatgcttcactgttgctggactccacaagaaggagcttgtctgagaaggaaacagatagaagctttgggttgagaaatttcaggtacattgagaccatcaaagaagctttggaaagggaatg

SEQ ID NO: 54678 - DNA, 424 bp, Glycine max
  Clone ID: LIB3109-048-Q1-K1-E11
tgggcggcaaagtggtttcatctactgttgttacagatgttcagcctccaatggatgctgtggagtatgcaaagtgtgaaactgttgtaaaggactttactacatttcgcgaagcactgaagaagagagggattgcagatatggatctgctgatggttgatccctgatgtgctggatatcacagtgaagttgatgctactagccgaagacttgctaaaccactaatattttgtacgactgacagtgactgtcccatggaaaatggctatgcccgtactgtagatggaatccatgtacttgttgacatgcagaatatggtcgtgcttgaatttgaagaccgtaaacttgtcttacatttacctgctgatccactaagaaattatacttctggtgaaaccctgagaggagtttactcgaatgatgt

SEQ ID NO: 54679 - DNA, 411 bp, Glycine max
  Clone ID: LIB3109-048-Q1-K1-E12
gcgacaaggaatgggtgttaaggcaggtgtctttcagcagcatcttacatcaggtcaacactcaacatattcccatcagcagctgaaacaagggagtgcatttcctgtttcttcaccccaactccttcaggctgcctctactcagattcagcaacactcatctccccaggttgaccaacaaaatcatctcccatctaaaacaaaagtcacaactcctctgcaatcttctaattcaccctttgtgggacctaccccttcaccttccctggctccatctgctatgccaggagagtctgagaagtctattccttgtgtttcatcaatatcaaatgctgcaaatattggacttcaacaaacagggggtgcagtagcaccagctcaatcccttgccattgggactcctgggatatc

SEQ ID NO: 54680 - DNA, 371 bp, Glycine max
  Clone ID: LIB3109-048-Q1-K1-E3
gattctctctatgagggaattgatttctactccggtgttactcgtgccagattcgaggaactgaacatggatctctttaggaagtgtgtggagccggtggagaaatgtttgagggatgctaaaatggacaaaagaagtgttgatgatgttgtccttgttggtggttctaccagaattcccaaggttcaacaactgctgcaggacttctttaatggaaaggagctgtgcaagagcatcaatcctgatgaagctgttgcatatggtgctgctgttaaggctgcaattttaagtggtaaggccaatgaaaaggttaaggaccttttcttcttggaggtaaccctttaatttttgggttggaaacctgttgccgt

SEQ ID NO: 54681 - DNA, 317 bp, Glycine max
  Clone ID: LIB3109-048-Q1-K1-E4
ggggccaaggtagtggctcagcgtgcccgatatcttccaccctttggctattcctaaccattgagtacaacttcacattttagaagaataccccctcttttgctgcatcagaggagttgtaaattaatagcatggctgcacaagctcttgtatcatcatcttctcttaccttctcagcggaggctgcaagacaaagtcttggaccaagatcactccaatctccatttggcttctccagaaaagcctcctttcttgttaaggcagctgctaccccccctgtcaagcaaggatcagacagacctttggggtttgcatca

SEQ ID NO: 54682 - DNA, 370 bp, Glycine max
  Clone ID: LIB3109-048-Q1-K1-E5
ggttgatgccattaaagagttgcaatctcatggaaatattcgtttgaagagaatgggggaacttgatactagaccattccttgaagcaatgaagcaaagatataatgaggaggatgctgaagagagagcttcagaactgtgttcattgtgggaagaatatctaaaggacccagattggcatccattcaaagttatcatggttgaaggaaaagaaaaggaaattattagagatgacgatgaaaagctgaatgggttgaaaaatgacttgggtgaaggggcatataaagcagtggtggaagctttgttggaaataaatgaccttaatcctaggggacgatcctaaacctaagattaatggaactttaaccaa

SEQ ID NO: 54683 - DNA, 400 bp, Glycine max
  Clone ID: LIB3109-048-Q1-K1-E6
gacgcggagatggagttaaaatagaagaattatgaccagggtcggttgcgtcgccgttcaggaaaattgaattcaatctgaaacgccctgtggtcatagttccaattccgaaagaatttcggggtgtttccgatttccaaacactcactcacacccatccttctttctttcaccgcaatattttttcctttttgaatcaaacttcggtttcttaatttctcattatcatatcttagatcttcagttttggatccacacaataatttgggggaaattgaattgaagcatcatcatcatcgtcatggatagcataatgagcaagctccgcaacctcgacgcgtaccctaaaatcaacgaggatttctacagccgcacgctcttcggcggtgtcatcacgctc

SEQ ID NO: 54684 - DNA, 393 bp, Glycine max
  Clone ID: LIB3109-048-Q1-K1-E7
ggaatgagaagagaagagaatctccaaacccaacactttgtttgacattcccattcattcacgctaaaatgattcgtcaatctctttacacccctccttccatcaccttctcaaccccatctccaaaacgtcaccgtttcgctcctcctagttggagaattcgatgcgacgcgtcgtcggtgtcggtggagcagaaggttgttgggccttaccctggtgggctgggcccacacacgggtagagacccaaacgcgaagaacccaaattggctgaggcaaaaagctcctaaggccaaagggttccagaagattaaggattcctggtccaattggaggttaacaattgcttccaagaagcacaatgccccaaccttagaaaatggtggaatggaag

SEQ ID NO: 54685 - DNA, 217 bp, Glycine max
  Clone ID: LIB3109-048-Q1-K1-E8
ggggagtggaagtagtagcaagtacgtcgtatatgtggttgatcttttgctggttgtttgttttgttccttccaattgtcagatctgaatcaccggactcactcttcacactcactcacactgaatggcttctgaaggcgaccatcaccaccactcaccaccaccatcaagatcacgatcatcatcatcatgatcatgatcaccatcatcattacga

SEQ ID NO: 54686 - DNA, 417 bp, Glycine max
  Clone ID: LIB3109-048-Q1-K1-E9
ggtggctaggggtaaccaactctatggaaacacgacaacagattaggattacgtaccatttccttgatcctttttctgactcttactaaaagtctaagctcaactgcatttgatgtcagtgaatatgaagattgggagagcgttgatacagcagattctatcttaagttatggaagtgaattgggagacatggaagaaaatgaatggcagatggtgcaaacgaaaggaaaccaatttgtggtgaacgaccaacctttctatgtcaatggattcaacacatactggttgatggtatttgctgctgatgagtccacacgagggaaggtcactgaggtgttcaaacatgcatcctctgtgggtatgtcagtttgtaggacttgggccttcaatgatggccaatggcgtgctcttcagaaa

SEQ ID NO: 54687 - DNA, 417 bp, Glycine max
  unsure (1)..(417): unsure at all n locations
  Clone ID: LIB3109-048-Q1-K1-F10
gaatgacagagaggccaacgaggaagagaaaggtgggagacacaaaggagagagctacgaagaaacccgcggcaaaatggcctctcatcaaacccaaaaagaatcttcagattagccgactccgagatttcgatctcttcacggtccagaattttttctcctccgctgaatcaaaggcattcgttaaaattgctgaagaaattggttttactcatcaggggagtctaggtccaacttatggcgaagcattcagagataatgatcgaatgttggtggatgatcctgtccttgcagatactatttgggagtctggacttagcanactattttctgatattaaaattcgaggaaagggtgctgtangcctcaatccaaatattagcatctataggtacaaggatggtcagcgctttggac

SEQ ID NO: 54688 - DNA, 373 bp, Glycine max
  Clone ID: LIB3109-048-Q1-K1-F11
gatagagtagaatgataaccaaaacgaaaaaacaagcgtcatcaccttcttcactccctgtttctgttggttccatcccttcattcacaccttgatccgcgatctcctaatttctcacttgaaagtatgaagcaagaatagataagtaatggcaggagcagaagcaagggctctgtggcagagaactgctaatcggtgctttgtccaagaagatgcaaaaagagctcccaagttggcttgttgccaatcttcatgtgcaacatcaaaatcaagtgatgcttgacctgccagtacagcagatgaatctgatcatactacagttaatgttacccattttaacaagaaatcgtcaatttctaatctatcaccagac

SEQ ID NO: 54689 - DNA, 228 bp, Glycine max
  Clone ID: LIB3109-048-Q1-K1-F12
acgcgtgagacgactcctgagggggctcgtgtattcgaccattggggatagagtataatgctaccagtctacaaatcagcttatgacctcattactcgctggtatgtggaaaacatcccttcattcacaccttgatccgctatctggtaattggtcatttgaacttctgaagctggtatatatgacatatgaccctatcacaaaccaagactttgtggcatataacta

SEQ ID NO: 54690 - DNA, 402 bp, Glycine max
  Clone ID: LIB3109-048-Q1-K1-F2
atagtcaaagagtatgttttgggctcgcagatggagctggggaggagggaagttaaggacaatatagtacgacagcaggagcttgcagcatatttcactcactgcaaccttcagacacctcacttgaggctagctttgcagaatgcaatgactgtctgcttcagggcgaagaaccttgccactgctgcaaactttgcccggaggctacttgagacaaatcctaccaatgaaaaccaagctagggcagcaaggcaagtggtagcagctgctgaaaaaaacatgactgatgctacccagttgaactatgatttccggaacccatttgtaatttgcggtgcaacctacatgccaatctatcgaggacagaaagatgtctattgcccatattgttcttcacgtttt

SEQ ID NO: 54691 - DNA, 349 bp, Glycine max
  Clone ID: LIB3109-048-Q1-K1-F5
ggagattcaaagcaacaaattgttttccttttctgttcaattcattttcctaagagaaaaaaacaaaccgaaatttcgagcaaaatgagagaaattgtttctgtcatggaaaactagttttttttttttttgttagttcacttcggattctccgacaattcgccgatcttacattcgccggaatttcgcttcgtctggttaaaatcgcgacctctgaacagcaggctttcaaattgagtgctcattaatctgatcacgggtcttggattgctggtttttggggttggatccatcaattttggcatggttcctaaaatttggattggcaaaaagggttaaagtccggttt

SEQ ID NO: 54692 - DNA, 405 bp, Glycine max
  Clone ID: LIB3109-048-Q1-K1-F6
gtattataataataatattattattattacttgggtatattcattattcatcctaagcaataataaacccatatttaagtgtagtatacccatttgatttgcctcattagatcgggttggctacgaatttattttcaaaaaccttctcttttctcaattgggtttccatctttgatttgatttcattgccatggctccaaaggatcccaagcaagttgctgatgctgcttcttctggtggtgggggtggcttttttgcttctattgcttccagcttgtccaatttcggtagtgccatgtccaaatccgttaatggtttggtgggctacgaggggctggaggttgttaatccagatggaggaactgaagatgctgaagaggaagcaagaaagggacgatggaaaca

SEQ ID NO: 54693 - DNA, 413 bp, Glycine max
  Clone ID: LIB3109-048-Q1-K1-F7
ggacgatacaagggtagggtattaagccgtatggcttgagcctttcccataaacacaaacacaagcactgaattgagttcactgtccacaagtttcgccccaacactcaactcggctcgtcgctattgttgttgttcttcttctccatatcaaacaaagtatagataaaatatcattgcagctttaattgtcatcctccaattaattagcaatggggcacacatcccttttaactccctcttcctttctaaggttcaactctctcctggtttcttcaaccccttttcttctttaagcttcaaccagggttcttttcccggccttttcaagaaccttagggaattcggtgaagattgaaaggattattaaaattctgcttggaaagccatgtattgtgatgaattttggacacc

SEQ ID NO: 54694 - DNA, 405 bp, Glycine max
  Clone ID: LIB3109-048-Q1-K1-F9
gaaagcaaaagggaaagagggtgtctttaatttcacagtttcatagcaattatcgacaaaaaaatccaaaatttccactcacatctctctttgtttatgacatctcaaacatttatctactctctacccactttctcagttccaggtaagcaagagaaacaatactcatctttattacagggttgtgtgaactgaagagggagggtactggtttgcggaggcagtgacacttctgcaagcctagaatcctctctcctagttttttgtgaaaacagatagtgtggtgcttttggaggatccttttctcaaagcttgcatgtaacactatctacattttggtgatcagttgaagtgtggaaaaaatcttaagctaaaggcaatttgggaagctggaacaatgggttc

SEQ ID NO: 54695 - DNA, 427 bp, Glycine max
  Clone ID: LIB3109-048-Q1-K1-G10
ggcacaagtgagtttgttgatcgagataactagagacagtgtgatgaaaatgaaggtccttgttttcttcgttgctacaattttggtagcatggcaatgccatgcgtacgatatgttccctctccgaatgaacactggctatggtgcccgtactccggaggtgaaatgcgcaagttggaggcttgctgtggaagcacacaacatctttggctttgagaccattcctgaagagtgcgttgaagcaacaaaggaatacatccatggcgaacaatatagatcagactccaaaacagttaaccaacaagcttacttttatgccagagacctcgaagtccatcccaaggacacatttgtgttcagtatagatggcaccgtactctctaatattccatactacataaaacatggatatggggtggagaaattt

SEQ ID NO: 54696 - DNA, 421 bp, Glycine max
  Clone ID: LIB3109-048-Q1-K1-G11
ggttacagtgggagtagcagctcaaacttggagactacaaaagcagagagatctgtgtggctgatgaagtgccctttggtggtggctaagtcatggcaggctcatcctccttctcaacctctcgccaaggttgtgctctaccttgatcctctccaccctgaagaagacgatccctctgcagtccagtttacaatggagatggctggctccgaagctgtgaatatgccaaaaacttattcattgaatatgtttaaagactttgttcctatgtgtgtcttctccgagactagccaaggtggcaaggttgcaatggaagggaaagtagaacataagtttgatatgaagccccatggtgaaaacattgaagagtatggtaaattgtgtcgtgagaagacaaacaaatctatgattaaaaatcgac

SEQ ID NO: 54697 - DNA, 392 bp, Glycine max
  Clone ID: LIB3109-048-Q1-K1-G2
ggggaataccaatattagagacgctccacatcaccctgggttttggactcaatcagacggtgatggtgtgtccatctttaattcgaagcatatttgggttgatcattgctctttgtctaattgtcgtgatggtctcattgatgccattcatggatccacggccatcaccatctccaacaattacatgacccatcatgacaaggttatgcttttggggcacagtgattcgtacactcaagacaaggacatgcaggtcactatagcattcaatcattttggagaaggccttgtccaaagaatgccaaggtgtagacacgggtatttccatgtggtgaacaacgactacacccactgggaaatgtacgccattggtgggagtgcaaaccctacca

SEQ ID NO: 54698 - DNA, 348 bp, Glycine max
  Clone ID: LIB3109-048-Q1-K1-G3
gaaggggaagaagggaaaggtccattcaacattattgtcattcagagaagagaagaggttttgcatcgcatcgcacagagatgaattcaattacaagaagcggatcgcttagtatcatcctcgttgttttcttctctttgcacttcattcttggtttttccgacgactcatcacctgcttcaaaagatgctacatagacagaacctcatgccggaagaagcactagtggctatagtaatcatggatttaattgggctggggttcttttcttggtcttccttggactttttaaacctgtggccgaagaagaaaaaggaagggccatatgctccgcttttggaattattt

SEQ ID NO: 54699 - DNA, 399 bp, Glycine max
  Clone ID: LIB3109-048-Q1-K1-G4
ggttgaagtggggcccatggctgaggctgcggtgacttgcaacccaacacagttgactccttgtcttccggcaattaattcaggttctgcaccttcgagtgcttgttgccagaagctgaaggagcaaaagccatgcttctgtggctacctcaaaaaccctagcttgaagcagtatgttaactctcctaatgccaaaaaaaccgttagttcttgtggtattgcctatccaacttgttaagcacctcttatatatatatataaaatgtgtgaacaatatatatatattgattaaaaaatatagtttaatttatatacacactttgatcctataaaaacatcttgacacaagcattcaatagaatttcaccactttatcatgacattttactataatgatgt

SEQ ID NO: 54700 - DNA, 338 bp, Glycine max
  Clone ID: LIB3109-048-Q1-K1-G5
ggtactttcgatgatgaaaatgataacccttctgaaggtgatgtggcgttgagcaaggggctccagccttttgtcaggaatagcaaaaacaagcatatgattgagcaactacttatgaaggagtcattctcaagggaagaatgtgaccggttaataaaaataataagatcaagagtggtagatcctgcaaatgatgatgatggggataagagccaacggatatgtccaccaggatcctggaaagtgattaacctaacctcaatgatgttgccataatgaaggcaaagaaatggctgcaggaaaggaattcagctttggatccaattccggatttaggt

SEQ ID NO: 54701 - DNA, 430 bp, Glycine max
  Clone ID: LIB3109-048-Q1-K1-G6
ggcacaagtgagtttgttgatcgagataactagagacagtgtgatgaaaatgaaggtccttgttttcttcgttgctacaattttggtagcatggcaatgccatgcgtacgatatgttccctctccgaatgaacactggctatggtgcccgtactccggaggtgaaatgcgcaagttggaggcttgctgtggaagcacacaacatctttggctttgagaccattcctgaagagtgcgttgaagcaacaaaggaatacatccatggcgaacaatatagatcagactccaaaacagttaaccaacaagcttacttttatgccagagacctcgaagtccatcccaaggacacatttgggttcagtataaatggcaccgtactctctaatattccatactacaaaaaacatggatatggggtggagaaatttaac

SEQ ID NO: 54702 - DNA, 390 bp, Glycine max
  Clone ID: LIB3109-048-Q1-K1-G8
atattaatcttttattagaagtgcaatgttcaaacatcattctccttcctaggtaactactttttacacttctaccttgaaagcactggagacttggaagttcttcatcctttaaatcactgtataggcaatgcattttacgattttatgctctggttaattgatgtcggttttggacattcttcaaagtaacattagaccttgattgacattttgtattttcaaaatagaaatttatgccatctgttgcatgttcagggcggctgaagtggatatcacgagaggaaactctggagatgtttccactgcagtaaggtcaaaagatgacgtaaagatgttgatgtcacagatgcatgatctctcctttatgcttgagaataatctttcaat

SEQ ID NO: 54703 - DNA, 424 bp, Glycine max
  Clone ID: LIB3109-048-Q1-K1-G9
cattgacaagcgtgttattgagaggtttgagaaggaagctgctgagatgaacaagaggtctttcaagtatgcctgggtgctggacaaacttaaggctgagcgtgaaagaggaatcaccattgatattgctttgtggaagtttgaaacaacaaagtattattgcacagttattgatgcgcctggacatagggatttcattaagaatatgattactgggacatcccaagctgactgtgctgttcttatcattgattcgaccactggtggttttgaagctggtatttccaaggatggacagactcgtgaacatgctctgctttcattcacccttggtgtgaaacagatgatttgctgctgtaacaaaatggatgctactacacccaagtattccaaggccaggtatgatgaaattgtgaaggaagtc

SEQ ID NO: 54704 - DNA, 284 bp, Glycine max
  Clone ID: LIB3109-048-Q1-K1-H1
ggttgttgttttcagtgtagtggaagaatcactcgcttatgcatttccacaccacaccatggcctcaaccaacgctctctcttcagcctccattctacgctctcccaaccgccagtctctgacccgaagagcgaaccataatggaagagtaaattaccggaaaccgaataaccgtttctccgtgaaagcctccggcaaagagattgcctttgaccagcattcccgctctgctatgcaggccggcattgacaagctcgccgacgctgttgggctcacttctgggc

SEQ ID NO: 54705 - DNA, 398 bp, Glycine max
  unsure (1)..(398): unsure at all n locations
  Clone ID: LIB3109-048-Q1-K1-H10
tcaatcagcatgaggcaatttcaaagtttatacaaggaactgttgctgatggtgcaccagtagtacctatttcagcacagttgaagtataatattgatgttgtgtgtgagtatattgtgaagaagatcccaatccctgaaaggaactttgtttctcctcctaatatgatcgctattcggtcatttgatgtcaataaacctggttatgaggttgatgaaataaaaggaggtgtagttggtgggagcattttgaggggtgttttgaaggtcaatcaattcattgaagttcgtcctgggattgctggtaaagatgagagtggaaatatcagatgcacgcccatatactcaagaatagtttcattgtatgctgaacaaaatgagcttcaatntgctgttcct

SEQ ID NO: 54706 - DNA, 403 bp, Glycine max
  Clone ID: LIB3109-048-Q1-K1-H11
gagtactagcagtggggtccggggtgaggatgttgtatcctttggaaatcagagtgagctttccccccaacgtgctatttttggctgtgaaaatgatgagactggtgatatttataatcaacgtgctgatggcgtcatgggtttgggccgtggagatctaagtatcatggaccaactggttgagaaaaaggtgataagtgatgcgttctcactgtgctatggtggaatgggtgttggtgggggtgctatggttcttggtggcatatctcccccatctgacatggtctttacacattcatatcctgttcgaagtccatattacaatattgatctgaatgagatacatgtttcggtgaagcgactgcatttaaacccataggtttttgatgggaaacatggaact

SEQ ID NO: 54707 - DNA, 431 bp, Glycine max
  Clone ID: LIB3109-048-Q1-K1-H12
tatggggatatacagccttggtaagaacgccgttctgcggaatatatgactcatgctcctttaggttccttaaattccgtgggtggcgtagctacagagattaatgcagtcaattatgtttctcctagaagttggttagctacttctcattttgttctaggattcttcctatttgtaggccatttatggcacgcgggaagagctcgcgcagctgccgcaggatttgaaaaaggaattgatcgagattttgaaccagttctttccatgactcctcttaattgagacatgagatccgatgaagtagaaatcacttttattttactataaatattactataaatattgggttgaattgagcgggtcgtatttaaataagaatttctttttcttttttcttaggttctatcgaaaaaaaaagattcgatagaaac

SEQ ID NO: 54708 - DNA, 299 bp, Glycine max
  Clone ID: LIB3109-048-Q1-K1-H3
gagagagagagagaaacaaagcaaaagccatttggatcctctcttctcttctttgatctccgttacccttttcgttttctcaacacagagagagagagagagtctttcggagttcgtttgcgtgtgttgtgtgatcagtcaccgatggcagcaccacctgcgagggcacgtgccgattacgattacctcatcaagcttcttcttattggcgatagcggtgtcggaaagagttgtctgcttttggcaattttctgatggttccttaacaaccagtttattaaccaccatggccttgaatt

SEQ ID NO: 54709 - DNA, 333 bp, Glycine max
  Clone ID: LIB3109-048-Q1-K1-H4
tccggtgaaggcgaggaagaaccagaatcagcggaaacagagtcacagagccaagaacaacgaacctgaaaacgcggatttagcttcgaagaacaaagtcgatgtctctgaaaatagcaataacaatagcaacatcaaaagcaagagcgatagtaatctcaaccaatctctgaaaccaactctttctccgtccgtagaggctgtcagtaatatcgataggttcttggagtttacaacaccgtcagttcctgttcagtatttctccaagacaacgatgagaagatggaagttttgcgaagtggagtatcagtcttactttacattgagtgatct

SEQ ID NO: 54710 - DNA, 420 bp, Glycine max
  unsure (1)..(420): unsure at all n locations
  Clone ID: LIB3109-048-Q1-K1-H6
gaccaacaacacgtagtattagttcattgatttctccctcttcgctctctctcagtgaccagagacagatgatgatggagatggcgaagcgaaacgctgtcgttgcggcactcgcggcgttggtgctactcgcggcgagtgtggcggtggatgctcaggagaactcggacgtgaagacgctggtgaagtacaagcacgggaagaagtactgcgacaaaggatgggaatgtaagggctggtcaatttactgttgtaacctcaccattaccgattatttccagacctaccagttcgagaatctgttctccaagcggaactcgccggtggcgcacgcggtcggattttgggactaccactccttcatcgccgncgncgcgctttttgagccggaaggggtcggcaccaccgggaacgagacga

SEQ ID NO: 54711 - DNA, 375 bp, Glycine max
  Clone ID: LIB3109-048-Q1-K1-H7
cactgaaatgatcaggggactgaacaagaagaggaaaattcttctgtagtaattccaaatcatttacaactccattctgctgaatgcttaaatctgagctttggaagttttggatctgcaaacgatgcttccctttctggatctggcccatatgcatctaggcccttgaaaagtaacttggaagatacatctggagcaaacgatgtttcaacaattgggtcctcagatgttagaaaccctgactattatggcgatgagcatcttactactacctctgatgggaatgtagctcacataactggtgtggatgctgggacttatgagcattcctccatttcgcaatcagaggctttaaaatctgaaccccctgaaact

SEQ ID NO: 54712 - DNA, 381 bp, Glycine max
  unsure (1)..(381): unsure at all n locations
  Clone ID: LIB3109-048-Q1-K1-H8
ggattcttcttcttcttcaccaccctgtgatcgcggactcaacactctcgctagacacttccttccgcaaatggcttctcacgacagcatctccgcttctccaacctccgcttctgattccgtcttcaatcacctcgttcgtgctcccgaagatcctatcctcggggtaactgtcgcttataacaaagatccaagtccagttaagctcaacttgggagttggtgcttaccgaactgaggaaggaaaacctcttgttttgaatgtagtgaggcgagttgaacagcaactcataaatgacgtgtcacgcaacanggaatatattccgatcgttgggcttgctgattntataaattgagtgctaaagctatttttgggctgaca

SEQ ID NO: 54713 - DNA, 418 bp, Glycine max
  Clone ID: LIB3109-048-Q1-K1-H9
ggctcaagtgagtttgctgatcgagataactagggacagtgtgatgaaaatgaaggtccttgctttcttcgttgctacaattttggtagcatggcaatgccatgcgtacgatatgttccctctccgaatgaacactggctatggtgcccgtactccggaagtgaaatgcgcaagttggaagcttgctgtggaagcacacaacatctttggctttgagaccattcctgaaaagtgcgttgaagcaacaaaagaatacatccatggcgaacaatatagatcagactccaaaacagtttaccaacaagcttacttttatgccagagacctcgaagtccatcccaaggacacatttgtgttcagtatagatggcaccgtactctctaatattccatactacaaaaaacatggatatggggtg

SEQ ID NO: 54714 - DNA, 412 bp, Glycine max
  Clone ID: LIB3109-050-Q1-K1-A1
ggattttgaaggacgttcagatggaagatccattaaaaaggttctgtctcatgtggctcccttgaagctggttttggtgcatggatcagctgaagctacagagcatctgaaacagcactgcctgaagcatgtctgtccacatgtttatgctccccaaattgaagagacaattgatgttacctctgatttatgtgcttataaggttcaactgtccgagaagctcatgagtaatgtactcttcaaaaagctgggagattatgaaatagcttgggttgatgctgtagtagggaagacagaaaatgatccgctttcgctgctccctgtttctggagcagctcctccgcataaattctgtcttgttggtgatttgaaattggcagatatcaaacaggttctcttccagcagggtgtt

SEQ ID NO: 54715 - DNA, 292 bp, Glycine max
  Clone ID: LIB3109-050-Q1-K1-A10
tactacaataccacacaatgtttttcctataatatattaacgcttaattgggcggctcttttaacctaacagggacttcttcaactttcacccacatcttcattcaccattactcatcaaaccgaaaattcttttttaaaacaaccaaaaatatttcttatttcccataaaactttcaaattacaataaacctctcaagctttataaccacttaaacaaatccattattctttcatttaacactaccaggtaagccattaaactaacctacactcacaataatatccccttc

SEQ ID NO: 54716 - DNA, 400 bp, Glycine max
  Clone ID: LIB3109-050-Q1-K1-A12
gatgtgcagtgcaactactcatgataagatgaacaaatcaatcaaaattatcacagatccatatggactacaacccattattaatttttggccaaagaaaaggaagaagctgtttaccttgtagctcatacatatttcagtgtagagactagagacagacagatcctgtgtgcacttgttccgatccaacaccatatcgtatttctctgggtactgtttttcttggttattttcaaaactgaagggtgtagaggaaaaaaccatgtcaaacaacaacactactactcaaataaagtatgatatttttgttagctttaggggcaaggacatccgcaacgggtttcttagccatttggttgaggcttttgacatgaaaatatatgcttttgtagatgataag

SEQ ID NO: 54717 - DNA, 290 bp, Glycine max
  Clone ID: LIB3109-050-Q1-K1-A2
ggagacagagagaatgagtacggtgggagaagggaaggtgagtagtaatggtcatggatgttgcaaatcaaggccaggctatgcttccccactggaagccatttctggtcccagagagtctctcatttatgtaacctctgtctacacagggaccggaatagagaagccagactatttggcgacagtggatgtggatccaaacctctccaacttattccaaagtcatccataggcttactgctccttaattaggtgacgaattgcatcacacaggctggaattcatgcagc

SEQ ID NO: 54718 - DNA, 311 bp, Glycine max
  Clone ID: LIB3109-050-Q1-K1-A3
ggcagatgagggtgctatttctctatggagaggaagcactgctaatgttatccgttatttccccacccaggctttgaactttgcatttaaggattacttcaagaggcttttcaactttaagaaggatagagatggctactggaaatggtttgctggcaacttggcctctggtggtgctgctggtgcatcatcccttttgtttgtttactctcttgactatgcccgtacccgtcttgccaatgatgcaaaggctgcaaaaaaaggtggagagagacaattcaattggtctcgtgatgtctacaagaagacat

SEQ ID NO: 54719 - DNA, 432 bp, Glycine max
  Clone ID: LIB3109-050-Q1-K1-A6
gaacacaaagggggtgttagtttatttaccatatccaaatctttggggtggggttgtgtactggggttaatggtgttgttgttgtaggaaatttaagtgaagagagaatgatgatgaagtctgctatgtgtgcattggtgcttgtggcactggttgtggttgaagtggggcccatggctgaggctgcggtgacttgcaacccaacacagttgactccttgtcttccggcaattaattcaggttctgcaccttcgagtgcttgttgccagaagctgaaggagcaaaagccatgcttctgtggctacctcaaaaaccctagcttgaagcagtatgttaactctcctaatgccaaaaaaaccgttagttcttgtggtattgcctatccaacttgttaagcacctcttatatatatatataaaatgtgtgaacaat

SEQ ID NO: 54720 - DNA, 259 bp, Glycine max
  Clone ID: LIB3109-050-Q1-K1-A7
ggattttgaaggacgttcagatggaagatccattaaagagattgtctctcatgtggctcccttgaagctggttttggtgcatggatcagctgaagctacagagcatctgaaacagcactgcctgaagcatgtctgtccacatgtttatgctccccaaattgaagagacaattgatgttacctctgatttatgtgcttataaggttcaactgtccgagaagctcatgagtaatgtactcttgaaaacgctgggagattat

SEQ ID NO: 54721 - DNA, 333 bp, Glycine max
  Clone ID: LIB3109-050-Q1-K1-A8
gggaaaaagtttatgcaagatgatgttgctgacggcatggaacagtcactgggtccaagagcctctagttttcgatccttgagaaggtctgttggggtccaagctgaagcataacatacaaccattggattaactggaagagacaggccaggattgctttcacaagtgtctgctgttgttgcagacctcaaatgcaatgtggtagcagcagaagtctggacccacaattcaagaatggcatctgttgtttacatcacagacgaagcgacgggattggccattgacgatccggatcgccttgccaagattaagcagcttctactgtatgtgctg

SEQ ID NO: 54722 - DNA, 351 bp, Glycine max
  Clone ID: LIB3109-050-Q1-K1-B1
gagggtcagttggagtttaaggctatactgtttggtcccaagagggcaccttttgacctctttgacacaaggaagaagcctaacaacattaagctctatgtccgccgtgtctttattatggacaactgtgaggagttgattcctgagtatttgggctttgtcaagggtattgttgattctgaagatctcccactcaacatttcaagagaaatgttgcaacagaacaagatcttgaaggtcatccgtaagaacttggtcaagaagtgccttgagctcttctttgaaattgcagagaacaaggaggattacaacaagttctatgaagctttctctaaaaacttaaagcttggt

SEQ ID NO: 54723 - DNA, 316 bp, Glycine max
  Clone ID: LIB3109-050-Q1-K1-B10
ggagaacaaacaagaatcaagagagagaggtgttactacgttagtctatgaacagtcaccccgagagactgaaatttccagaccctcaaatcaaactcttctattctctcatcaatcaatcaatccagttccctctcggataggaatgggaatatatctcagcactccaaaaactgaaaagttttctgaagatggtgaaaatgactgtcttagatatggtttatcatccatgcaagggtggcgtgcaacaatggaagatgctcatgctgcatatactgatctggatgagtccacttcattttttggtgtctatgat

SEQ ID NO: 54724 - DNA, 423 bp, Glycine max
  Clone ID: LIB3109-050-Q1-K1-B11
gacggctaaaagctaaaaatcatcgaagtactcaaatgagcatggctgtcacggttgcattcttgaatttgatcatcatgttttcagtagtctctacaagcaagtcactgagcttaaactactattcaaaaacatgccctgatgtggaatgcattgttgccaaggcagtgaaggatgccactgctagggacaaaactgttccagctgcacttctgcgaatgcacttccatgactgtttcgttcgggggtgtgatgcctctgtgctgctaaattcaaaaggaagcaacaaagcagaaaaagatgggccaccaaatgtttctttgcatgcattctatgtcattgatgcagcgaagaaagcactagaagcttcatgcccaggtgtggtctcttgtgctgacatccttgctctagcagcaagggatg

SEQ ID NO: 54725 - DNA, 375 bp, Glycine max
  Clone ID: LIB3109-050-Q1-K1-B12
gatagaagaagcagaaagagaagcattagcaagagcaagaagaactagtctaagcagaaatggcctcttcggtgatggcatctgtggccctcaaacctgcccctttcactgttgagaagtcctcagttagaggccttccctccctctcaaggaactcctcttcattcagagttgtggccagtggtggcaagaagatcaagactgacaagccttatggaattaatggtggcatggctttgagggaaggagttgatgcatctggcaggaaaggaaagggaaagggcgtttaccagtttgtagacaaatacggtgctaatgtcgatggttacagtcctatctacgacaccaaggactggtctccaccggtgatgtcta

SEQ ID NO: 54726 - DNA, 368 bp, Glycine max
  Clone ID: LIB3109-050-Q1-K1-B2
gggaagaggaagggttgttctggaaagagtagagaacaagatcaaccgtcaagtaacattctcaaaacgcagaagtgggttgctgaagaaggcctttgagctttctgtgctatgtgatgctgaagttggccttatcatcttttctagccgtggcaagctttttcagtacagcagcactgatattaccaaaatcattgagaggtatcgccaatgtcgttacagcaagtcacacactggtgattcattggaacacgattcacagagcgcataccatgaattcttgaaattaagagcgaaatatgaatctcttgagcggacacaaaggcattttcaagggagaagaccttgagccacttagctttaaaaga

SEQ ID NO: 54727 - DNA, 359 bp, Glycine max
  Clone ID: LIB3109-050-Q1-K1-B3
gatcgtggatttctctgaagaaaagggaagacaagctgcaatcctcgtcgagaaaattaactccaattttcattctaagttaggatttccgtctgccatatttgtgaaatgtgatgtgagtaatgcaagggatctagctgctgcatttgaaaagcattttttgacatatggaggactagacatttgtattaacagtgcggggattagtagttctgtaccattccgtgatgatcaaacggatggcacccgaacatggagatacactgttaatgtgaatttcactgctgttatcgattccactcgccttgcgattaaaatcatggaagcttccaaaaggcctggtgtgattatcaacttgg

SEQ ID NO: 54728 - DNA, 391 bp, Glycine max
  unsure (1)..(391): unsure at all n locations
  Clone ID: LIB3109-050-Q1-K1-B4
gaggaaagggaagggaagggagccaaagcgaaccgctaccctacggagagatggcggacacttgcatcgatattcggacggagaagacaggtgaactgccgtctacttaagatcgggcgtgcggccggcgaccgggctcccggcttacacgaagccacanttagcccaacttggttctgtcaacatgtaccagaggcccgacatgaacatgaacatcatcaccaaccccgatcagccccagccccaatctctcgaccccgataaggtccaggatcacttcgacgacttctacgaagatctctttgaggagcttagcaagtacggccccattcagagcttgaatatttgcgacaacctcgccgatcatatggttggaaatgtgtaccgtcag

SEQ ID NO: 54729 - DNA, 371 bp, Glycine max
  Clone ID: LIB3109-050-Q1-K1-B5
gggccaggtaaccagaaaggtgtaccattccaaggggggtggttgttctttggcaacacttccttgccaacatgggtttctcaaaaaattctatccccaaaagccgtcccactggtggcaggaaaaaggctggaggaagaaaagaagtatgagcttgtcgccagcctgctaacactaaactgtcaagcaacaagacagtcagggaggatccggtttagaagtgaaatgtgaaatggagggcactgagattggatactggaaattactctctgggaagtgaagctgtaactcgcaagactcgtatactaggatgtggttacaatgcctcaaacaacgagcttgtgcgtactcagactcttgtaaaagtgcta

SEQ ID NO: 54730 - DNA, 424 bp, Glycine max
  unsure (1)..(424): unsure at all n locations
  Clone ID: LIB3109-050-Q1-K1-B6
ggaggtgggaggggaaggacctgaaccttaacttggcgggattggaaagtgcccccaaaccagtgtattttttccatgaatcccaaaaaatctgtacaaaatgaggccccaaatgatttctgtggcaaacgcttgttatagggctattgcctttgatttcaaaggctatggactttctcagcaaccagcaaagcctgaaaaggaaaccatgtttgatctggttcatgaaattgtaagccttttggatgctttgaacatcttcaaagccttccttgttggaaaggattttggtgccattccaggacatcttactactgcagtgcacccaaaaagagtagctggtatcataactttaggcattcctttcatgcttncgggtccctctgctgtggagagccaccttcagctttccaaaggggtttat

SEQ ID NO: 54731 - DNA, 401 bp, Glycine max
  unsure (1)..(401): unsure at all n locations
  Clone ID: LIB3109-050-Q1-K1-B8
gtatggaaaatgatggaaagcttgcaactttaacgttgcagatatggaaaatttggtattgatttgattccccgaattatttacattctggtcttcttgagtttctttgcaacaaaaccaattttctgaggaaaaaccaacatgttgggagtttgtttactttgctttgcatttatgggagcttgtgttttggcattcttgtaggaatggatgaaaaactgagaaataaaccatgtgtcatgtctaaatatacattctaattttcattttgtgtcccttcattcttctcagtctcattttggcttctatatggcacactctactcttcttgtgattgtggaggagtgtagggtttttggtaccctctgcttcacttgacanatgttgagaatgcatgcatg

SEQ ID NO: 54732 - DNA, 383 bp, Glycine max
  Clone ID: LIB3109-050-Q1-K1-B9
ggagagggggagaaagaaaaaagccctttgaattcgaaggttaaaagaatcatcaggattcacataggtcaagccgggatccaagttggcaactcctgctgggaactctactgcctggaacatggcatccagcccgatggcatgatgccaagtgactcctccttcggtgtagcccacgacgccttcaacaccttcttcagcgaaaccggatccggcaagcacgtccctcgcgccgtcttcgtcgatctcgagcccaccgtcatcgacgaagtccgttgtggcacttaccgtcaactcttccaccccgaacaactcatctccggcaaggaagatgccgccaacaactttgccagaggccactacaccgttggcaaagagatcgt

SEQ ID NO: 54733 - DNA, 393 bp, Glycine max
  unsure (1)..(393): unsure at all n locations
  Clone ID: LIB3109-050-Q1-K1-C1
gaggcagagagagagagagaaaagcgtgaatcatgtcggacgaagagcatcacttcgattctcaggcggatgcgggagcgtccaagacgtatcctcagcaggctggtaccattcgcaagaatggctacatcgtcatcaaatccaggccttgcaaggttgtagaggtctctacgtcaaagacaggcaagcatggacatgcaaagtgtcactttgttgcaattgatatttttaatgggaaaaagcttgaagatattgttccatcatcccacaactgtgatgttccacatgtgaatcgcactgactatcagcttattgatatctctgaagacggctttgtgagtctgttgactgataatgggaataccaaagatgatctgaagcttnctactgatg

SEQ ID NO: 54734 - DNA, 375 bp, Glycine max
  Clone ID: LIB3109-050-Q1-K1-C10
gacgatgagtcgatttgataactaagatattgttattcgtgatattgatccaatttgatatcatcgaaatccaatttataccattgttgaattaattatcgatgaaagatttatcatctctatgggattaaatcccgaattttttattggaaatttaagagaaataaaacataataaagattatggaagtaaatattcttgcatttattgctactgcactgtttattctagttcctactgcttttttacttataatttacgtaaaaacggtaagtcaaagtgactaatttcactgaaatctgacttcttcatttttatcaatgtaatcaatgattaaaaaaaatgaaaaaggttttcaatttttggtcttagtct

SEQ ID NO: 54735 - DNA, 400 bp, Glycine max
  Clone ID: LIB3109-050-Q1-K1-C11
gatcactatggatgtgaaaggtataaaatgggggggaaatatgtaccagaaatttgagaatatgttcctggaggtggaagacgtgatgtacgaggatacagttaaatacatagagaatcagatgcaagctgctggggaaagtgttaaaaagttatattcagaaattgtgggagatttacttcccccagaaaaggtaggcattgaattgcctatagataagcgtgcggatgctgggctctgtaggaagccattccatgtatataaggaaagacatgcaaaagctgataccaagcaaagaactgaagattcaaggattgttcatggtgttgataatgttgcaacacttgctgctttatatgatggaaactgcaaggctgatgcttcatccatgttatctttg

SEQ ID NO: 54736 - DNA, 392 bp, Glycine max
  Clone ID: LIB3109-050-Q1-K1-C12
agatcaaagtgactttcccatcaggtcaagagcggaatgcaccatcacaggcaattaggaaatgcttgcactgtgagataaccaagacaccacagtggagggcagggccaatggggccgaaaacactctgcaatgcttgtggcgtgcgctacaagtcaggccggcttttccccgaatatcgccctgcagcgagtccaacgttttgtgcggccatgcactccaactcccataagaaggtccttgaaatgaggaacaagacaggcaccaaatctggctttgcaactgtttctgctgcctcaccagaactcattccaaacactaacagcagccttacccttgaatatatgtgaaagggggaaagggaggattctagttggaagaatctctaattc

SEQ ID NO: 54737 - DNA, 382 bp, Glycine max
  unsure (1)..(382): unsure at all n locations
  Clone ID: LIB3109-050-Q1-K1-C2
ggttgtcagtgtcttacgagggtagggctcagctcaggcatattctatctctacgccgctaactctctctcactctcgcgctctctctttcacaaccttcactttactctctctgctaaaatgcaaggaggatttcaatcatttttgtcacacgggaatgtcattagaaatgctgttctacaacgggtgcgcatggtgaaccccctgttacagccaattgtctcttcgcggtttgaatctgttacacctgctcgcattgaggagcatggttttgagagcaccacaatttcagacatcttgaatgataaaggcaagggtgctgatggctcctggctttggtgcaccacagatgatacccgttatgatgccgntaaatcgatga

SEQ ID NO: 54738 - DNA, 405 bp, Glycine max
  Clone ID: LIB3109-050-Q1-K1-C3
gtcggtggtacagaccaaggatccggaatgggtctggttctgtccacaggaccggaagtatccaaatgggcatcgattgaacagagcgacaaataatgggtattggaaggcaacggggaaggatcgtagaatcaagtctgggaaggatttaattggaatgaagaagactttggtgttctacactggtcgtgcacccaaagggaataggaccaattgggttatgcacgagtatcgtcccactttgaaggagcttgatggtactaatcctggacagaatccatatgtcctttgtcgtttgtttaagaaacatgatgagagccttgaagtttcacactgtgatgaagcagagcagactgcttccactcctgtggcttactccacagaggaaatacaatctgatcttgc

SEQ ID NO: 54739 - DNA, 390 bp, Glycine max
  unsure (1)..(390): unsure at all n locations
  Clone ID: LIB3109-050-Q1-K1-C4
gagaccagagcaggatcaaaccaaaccctaatatcaacttcatctgtttcatttgattttgattcgaacccagacagagacatagcctctttctttcgtttggagaaacanacccctcgtttcaatcattgatcctttcctgttagatacgaattactcttccaatttcatcatggccaaaacctccttcaagcttcagcatcctttggaaagaaggcaggctgaagcttctcgcattagagagaaatatcctgatagaatacctgtgattgtggagaaagctgaaagaagtgacattcctgatattgataagaaaaaataccttgtccctgctgatttgactgttggccagtttgtatatgttgtccgcaaaaggattaagctcagtgc

SEQ ID NO: 54740 - DNA, 209 bp, Glycine max
  Clone ID: LIB3109-050-Q1-K1-C6
gaatctaaagattaattaaattgagggaaaaaaaaaaaaaaacatggtggtgaaagtgtattgtccaacctatggatcccccaagagggtcctggtgtgtttgattgaaaaggaaattgagtttgaaacaatgcatgttgatcttttcaagggagaggataaggaaccttggttccttaagctgcaaccatttggatccctttctggta

SEQ ID NO: 54741 - DNA, 333 bp, Glycine max
  Clone ID: LIB3109-050-Q1-K1-C7
gacgagtaaaaagaaagaaggtttttgtagtatagttaacagcatggagagggaggaagatgttaaagttggagcacagaaattctcggagaggcaagcactgggtacaggagctaagagtgacaaggactacaaggaggcaccaccagcacccttgtttgagccaggggagttaaagtcatggtctttttacagagctgggatcgcagagtttgtggccacattcttgttcctctacatcactgtcttgactgtcatgggtgtcaacagggcacccaacaagtgctcttctgttggcattcaaagaattgcatgggcttttggtggcatgat

SEQ ID NO: 54742 - DNA, 386 bp, Glycine max
  Clone ID: LIB3109-050-Q1-K1-C8
ggcggcaacagagtagagaagagtgggcaagagtggcgacggagatggaagaactcgtctcctttctttcttccacgtcgcctcagatcacaaaagccgccgttgacatagtccgcggcttaaccggctccatggagggcttgcagtccctggcaaattactcaaacgccctcttacccgctttgtctcgcctcttaacgttacccaaggaggtttcggaggctgctgcggaggcgctggtgaacctgtcgcagaattcgagcctcgcggaagcgatggttggaattggtctggtcaaaacgacgatggatgttctgtacaagcccgagtgtagcattgctcgcttgcttgtcatgctgttggtcaacctcactcaactcgaagct

SEQ ID NO: 54743 - DNA, 378 bp, Glycine max
  Clone ID: LIB3109-050-Q1-K1-C9
ggctgcaaatgtggaccgaactgctcctgcaaccgctgcacttgcaagtgaggtgttgggagagcaagcttcaagcagagatagcccttaattaggaataatgataaactattaatgtgtagctaaaaacttatgtattatgtctgtgatggttttcgtgcactctggtgttttgtgttaaacaaacatccttagaataaagtggtcatgtcttgcctttcagcaagttcaagtgttttggacttgtgatgggtgtgttaagctcatggttgcttcttttttttttttttttaatgtttggtaattggtcgcttctgtataaagttcggctaatctgaattatgaatctctgcttataatattaaatactattactcg

SEQ ID NO: 54744 - DNA, 395 bp, Glycine max
  Clone ID: LIB3109-050-Q1-K1-D1
gacactcatctactccacattgtcctctcaccggttctccaattgaaaaggcttcttcatcaaaagaaaaatggctcaaatttgtttgctcttggtggggcttctctcaatgttctcctctgcctatggctacggatatggtggtggctgggttaatgcacatgccaccttctatggaggaagtgatgcctcaggaacaatgggtggggcatgtggatatggaaacctctacagccaaggttatggaacaaatactgctgctttgagcactgctttgttcaacaatggtcttagttgtggctcatgctatgagataaggtgtgtgaatgaccataggtggtgcctccctggctccattatggtcactgccaccaatttctgtcctccaaacaatg

SEQ ID NO: 54745 - DNA, 392 bp, Glycine max
  Clone ID: LIB3109-050-Q1-K1-D10
gggagcagaggacaagatgggtagtgtgagttatagcaatctgaagaacgccatgatagcattcttggtccctctaccctccatcctattctacctctcattccaatcggccattagtactccttcttcttggtcttctctgtggacatggtgctatcaccaccctctgctattggccaatgtccttttcttcttcaatgtcaatttcctcttctggctcatcggcctaatccaatccagccactggatgattgacccgtattggacagtgatacctgtgatgcttgttcattactattcaactcaccctttggcacagtatcagtggtggaggtcgaggatcgtaacgtttgtgacttgggcgttgaagtgtaggctgatccacaactact

SEQ ID NO: 54746 - DNA, 421 bp, Glycine max
  unsure (1)..(421): unsure at all n locations
  Clone ID: LIB3109-050-Q1-K1-D11
gggttacgaggtaaacataatggtagtagcgcagctatttctccattagctggtaagctgtttgttgttattggggctggtggtgctgggaaggcacttgcttatggtgcaaaagcaaaaggagctagggttgtgattgcaaaccgtacctatgaccatgccagaaaacttgcttatgcaattggaggagatgctttagcccttgctgatttagataattaccatccggaggatggtatgattcttgcaaacacaacatcaattggaatgcaacctaaagttgatgagacgcctgtttctaagcacgctttgaaatattactccctagtttttgatgctgtctacacgcccaagattactagactcttgaaagaagcagaagaatcaggagccactattgtaacaggatnggagatgttta

SEQ ID NO: 54747 - DNA, 354 bp, Glycine max
  unsure (1)..(354): unsure at all n locations
  Clone ID: LIB3109-050-Q1-K1-D12
gatgcatggagaaaggtggcacctattgaagagaaacctgaaactccaatcagtttctgcaacgaacaggttccaaactgtatccattttttttttatacatctattttgttgctttaatcatagtgtctactaattttttgctctttggtgatttgttgcacatgtaatatatgcaaagttctctaagcaacataatttcttaatttcgtgtctttctttaatttgattctaactggagttaaagccttctaacatgccttgtgctcttagtcaagatcctttctatatattaatagcatgttttctttataaataaataaaaaacatctaacatgcatatgncttctttttc

SEQ ID NO: 54748 - DNA, 396 bp, Glycine max
  Clone ID: LIB3109-050-Q1-K1-D2
ggttctagtgtgtgattgtttgttgttgtgactggttcttcttcttttgttgttctgtgtttgtgtttgttttttctctcacctgaaaatgtcttgctgcggtggtaactgtggttgcggaagctcctgcaagtgcggcaacggctgcggaggctgcaagatgtacccagacttgagctacactgagtcaaccaccaccgagaccttggtcatgggagtggcacctgttaaggctcaatttgagggtgctgaaatgggtgtgcccgctgagaacgatggctgcaaatgtggaccaaactgctcctgcaacccctgcacttgcaagtgaggtgttgggagagcaagcttcaagcagagatagcccttaattaggaataatgattaactattaatgtg

SEQ ID NO: 54749 - DNA, 331 bp, Glycine max
  Clone ID: LIB3109-050-Q1-K1-D3
ggaagtgggaaagagacagaggcgaaaatggttgcgactttgagtcttccgatcatagacctctcttctccccatcgtctttccacagccaattccattcgtcaggcatgcgtggaatatggtttcttttaccttgtgaaccatggggtggacaccgattttgtgagcaaagtcttcgaccaaagttgcaagttcttctcgcttccggtccaacgcaaaatggacctggcccgcaaggaatatagaggctacactcctctctatgctgagacacttgatcctacttcactctccaaaggtgatccaaaagagacctattacattggtccta

SEQ ID NO: 54750 - DNA, 333 bp, Glycine max
  unsure (1)..(333): unsure at all n locations
  Clone ID: LIB3109-050-Q1-K1-D4
ggatctgtgggtggattgcatttgcagagagagagagagagagagagggaagacggttgtggggattcgatgggggccaccgttcactcgccgctagtcacttatgcttccgacatatctctgcttacactccgtcctgcgtttgtcatacttctatggtacaccatgactcttgctgacggatctgtttccgagacattccattatttaaggcagaatgggttgcagggtttgctacatatatggcccaccctcactcccaccgnctgcaaaatcattgcagtctatgctgcatttgaggcagcacttcagcttcttcttcccgggaaaacc

SEQ ID NO: 54751 - DNA, 221 bp, Glycine max
  Clone ID: LIB3109-050-Q1-K1-D5
ggtccttaacagcatgccaaaaaaatccgcgcggttcgtttgatccgaacataaccatggtgttccaaagccctcttctgggcctgggtaacccttttcttgacattttcggcggcggcgattaaaacctcttaaaaaaatattatatcaccttcaacaatgcgattcttgccggggaccagcaccagcctatttattaagaattggctgagaaatataat

SEQ ID NO: 54752 - DNA, 181 bp, Glycine max
  Clone ID: LIB3109-050-Q1-K1-D6
ggagtccttgccttggaccatattccaaaggggcggggggaaaataatttggaatcctgattaatggcttggcccaaatccttccagcttaaaccttgccttccaagggggggttgttgtccaaaccggaaaaaacctgtcatagaaaaaccctgaggaagcctttttgggtaaagggccc

SEQ ID NO: 54753 - DNA, 379 bp, Glycine max
  Clone ID: LIB3109-050-Q1-K1-D7
ggactcaacaaattcttaagcactggtcaacctggagggagctcttgaggagtttcaaagagtggtgggaagatagaagattcaactttctggatcccacacccacgcacaggaatttacttcccaaaaaggcatgagtgggtgatggatgatgttccaaaagatgcagttcgtttaaaccagacttattggttcaaaaatgttgatggtgttgaccaccccagacactaaccataatatatgctccacaacattccaaaaataactacataatcgggaatcatatggtggtgaccaatctttatgtgatgtgttattaactagttttcatacattagaaaatatatgaatactatatatagtttaatagaatcatata

SEQ ID NO: 54754 - DNA, 415 bp, Glycine max
  unsure (1)..(415): unsure at all n locations
  Clone ID: LIB3109-050-Q1-K1-D8
ggaacacanntttggaaggaagctcttacgtgaaagctgctaaaaagttgcatgagattgatcctttacaaaagcctaaacaggaccgttatgctcttaggacttcaccacaatggcttggtcctctaattgaagtgattagattctctaccaagtcaattgagagggagattaactcagtcaatgacaaccctttgattgatgtgtcaaggaacaaggcacttcatggtggtaacttccaaggaactcctattggagtctccatggataatacacgtttggctcttgcttcaattggtaaactcatgtttgctcaattctctgagcttgtcaatgattattacaacaatggtttgccttcaaatctcactgccagcagaaaccccagcttggattatggattcaaggggagctg

SEQ ID NO: 54755 - DNA, 221 bp, Glycine max
  Clone ID: LIB3109-050-Q1-K1-D9
gggccaaaccattttattttattttgggatcaaaggtgagggccttccatggctttcgcttgtgctttcttttcaattacaagtgttgtcatctgttccccgaggttccggcggaagaatggatcaagcgggtggtttcttaatggaaggaaatttaaggtgtaaaaaggacgagcaacaattggcggacgatctatgggcactacaaagagcgctattgc

SEQ ID NO: 54756 - DNA, 391 bp, Glycine max
  unsure (1)..(391): unsure at all n locations
  Clone ID: LIB3109-050-Q1-K1-E1
caagctatggtgggctaatcgggatagcattcgcaaagatagtactacaagtgggaatggtgtgattgtaactccccgtgggcaagcacctgcttttgttccatctcatcctgttgtcactgataggggtaaagacatccatcaagctgatgcttcaaagactatgtatgaagtatcatcgcctactgatcaatctaagcctgtcatcacagatggacccaaggttccacctcctttgcagaagaagcttgtaaacttagagagtctaaaggaagaactgcgcaagaagcangaaatgctagatcaaaaacgcaatgagttcaagcgccaagtgaacaaatttgagaaacaagcttctggactcaagggtgaagtatctactgagccagct

SEQ ID NO: 54757 - DNA, 401 bp, Glycine max
  Clone ID: LIB3109-050-Q1-K1-E10
gtcacgttaaagtttctttcatgtttgaacaggcgactatccatttgggagcaactgagctgcttggattgtatttttcttcttctagaaaaaattacagaccctcaccacccagacttagttgtatgaacggttggccaccttccgttatccttgaaggagattgttcaaggatacaggttaccttagaggctgaaatcacagctgcgtataatttgaattccagcatttgctgcctctgaatatctctggaactttgtaagtcaacaaacatggctttacagaacattggtgctgcaaacagtgatgatgccttctacaggtataagatgcctaggatgattaccaaaattgagggcagaggtaatggcatcaaaactaatgttgtcaatatggttgac

SEQ ID NO: 54758 - DNA, 407 bp, Glycine max
  Clone ID: LIB3109-050-Q1-K1-E11
ggagcgaagagtgaagagaatggctcccaagggtttaacctttctggctgtgttaatatgcgtttcagcactgtcactgagtccttctgttgcgggggaagggcaaaataatggccttgttatgaacttctacaaggaatcatgccctcaggctgaagacatcatcacagaacaagtcaagcttctctacaagcgccacaagaacactgctttctcctggctcaggaacatcttccatgactgtgctgttcggagttgtgatgcttcactgttgctggactccacaagaaggagcttgtctgagaaggaaacagatagaagctttgggttgagaaatttcaggtacattgagaccatcaaagaagcttttgaaagagaatgccctggggagtgttcatgtgctgata

SEQ ID NO: 54759 - DNA, 146 bp, Glycine max
  Clone ID: LIB3109-050-Q1-K1-E12
caacaaataatccttcctctcggccgatttcataaaaaactctgccctcccctacatccattctcaacaacaaaccaatctttcttataaaaaaaatctctcactttttccaacttctacaattccaacactctccatctttccca

SEQ ID NO: 54760 - DNA, 108 bp, Glycine max
  Clone ID: LIB3109-050-Q1-K1-E2
gatttccacatacaatggatacccctgcctcggggcacactgcacatcctcctatcgccgctgctttattcattctcaaaatcaaaccaatttttcttagaaaatgat

SEQ ID NO: 54761 - DNA, 426 bp, Glycine max
  Clone ID: LIB3109-050-Q1-K1-E3
gacacgcagttgtattgtagaactgaacaagggggtctctttctctttctctgtctgcttcttcactttctctcgtttcaatcgaaaaaaatcatgggcagaaaattcttcgtcggtggcaactggaaatgcaatgggaccactgaggaggtgaagaagattgttactactttaaatgaagctaaagtccctggagaagatgttgtagaagttgttgtgagccctccttttgtgttccttccttttgtaaaaagtttgctgcgccctgatttccatgtctcggcccaaaattgttgggttcgcaaaggtggtgcttatactggagaggttagtgctgaaatgcttgttaatttgggaattccttgggttattattggtcactctgaacggaggcagcttttgaatgaatcaaatgagtttgtggga

SEQ ID NO: 54762 - DNA, 405 bp, Glycine max
  unsure (1)..(405): unsure at all n locations
  Clone ID: LIB3109-050-Q1-K1-E4
ggatcgggggtttcttttgaaaaaaagggaagccaggcggcattcttcgtcaggaaaataaactccaattttcattctaggttaggatttccgtctgccaaatttgtgaaatgtgatgtgagtaatgcaggggatctagctgctgcatttgaaaagcattttttgacatatggaggactagacatttgtattaacagtgcgggggattagtagttctgtaccattccgtgatgatcaaaccgatggcacccgaacatggagatacactgntaatgtgaatttcactgctgntatcgattccactcgccttgcgattaaaatcatggaagcttccaaaaggcctggtgtgattatcaactngggttctgcttctggtctttatccaatggtggctgacccaattta

SEQ ID NO: 54763 - DNA, 384 bp, Glycine max
  unsure (1)..(384): unsure at all n locations
  Clone ID: LIB3109-050-Q1-K1-E5
ggaaggcaggaaaggtagggttttggtccttgccgaaggaaagagaaaagaggatggtgtaaggttcgggaatctgcccaaaccccgtggtggtggacccccgccacaacatgctgggtcggctcgcctcgattgtggcaaaggagctgctgaacgaacaaaaagtggtggtcgtgcgatgcgaaaagatttgcatttccggtggtctggtgaggcaaaaaatgaagtacttgaggttcctccgcaaacgcatgaacaccaagccttcccacggccccatccactttcgcgcacactgcaagatcttctggcgcaccgntcgtggaatgataccacacaagacaaagcgtggggaagccgctctcgctcgtttgaaggtttatg

SEQ ID NO: 54764 - DNA, 222 bp, Glycine max
  Clone ID: LIB3109-050-Q1-K1-E6
caccgaagggggtgtcccagtcccattgattagcccttcttttgggaggaggccaaaccttcttttccccgttctttatttaattttaaccaccaacccattttttttaaaaaatggaggggggcttggggccacctgggccatccatcacttccccgcttggccaatgagataaaaaagcttgtgcttctccatggtttgccttaaaagctgaacttgaaa

SEQ ID NO: 54765 - DNA, 71 bp, Glycine max
  Clone ID: LIB3109-050-Q1-K1-E7
aggcgttagaacacctccgaaggggccaccgtttaggctaacaaacgaaaaggcaaagggcggggtcccaa

SEQ ID NO: 54766 - DNA, 395 bp, Glycine max
  Clone ID: LIB3109-050-Q1-K1-E8
gagagaagagaaggttacagaaaaacaaaaacctggctgtgtttctccgtcgtggcaattgaaggaagcactgactgtctctgcaactttagtcacattcacatggcagcaacaacatcagggaagattatccaaaatgtttttgtttcacactgccaccaacagaatacacggggtcgaagggactattattgatttggcccatctccgctagggaagttggcatggactgactcttccatgcaattgcgcactttattcaaaccccagaatcattttagtttccagagaaaatttcactgcaatgcttctgcatctgctactgctgtgccatatctagacaagacagattttctaaagcttcaaaatggcagtgacattcggggtgtggctgc

SEQ ID NO: 54767 - DNA, 336 bp, Glycine max
  unsure (1)..(336): unsure at all n locations
  Clone ID: LIB3109-050-Q1-K1-E9
gatagtgagtaaaaagccaagagacgagaaccgggatagccatctcatctcattcatttcaatggccactcaagggcaagtcattaccttccaaacttcggtgggctgggaacccaacaaggccttaactgtccaaaaccttcaaggggcttccccctaaggccgcgagggccgggttcaaattctcttcacccgttcttgccacaccgatgcttacacttggggcggcaaggatcccgaaggtctcttcccctgtattcttggccatgaagctgcanggattgtggagagtgttggagaaagtgttactaatgttcagcctggggatcatgtcat

SEQ ID NO: 54768 - DNA, 393 bp, Glycine max
  Clone ID: LIB3109-050-Q1-K1-F1
gatggtatatcattccaagaatctcagctgcagtaaacagcgaccatgaaactaatgacagcaacaacaacgtttgatgtctctgccacttgcttccgtgcccctcctccttcgtgctcaatgaatccatgccacaccagtttttcagttataaactccctgaatcctcacaagggacgacggataagcgttgctgttccacccaagtttccaaacttccggagggaagcatctctgcaggggaatttggaggctattagagtcccaacttcggtgcctgtgcgtgtagcatacgagcttcttctagctggtcatcgatatttggatgtaaggaccccggaagagttcgatgctggacacgctcctggcgcaattaacataccttatatgttc

SEQ ID NO: 54769 - DNA, 404 bp, Glycine max
  unsure (1)..(404): unsure at all n locations
  Clone ID: LIB3109-050-Q1-K1-F10
ggagagagagagagagagggaggcacttggaatccaaaaatgagagaaatcatcagcattcacataggtcaggccgggatccaggttggcaactcctgctgggaactctactgcctggaacatggcatccagcccgatggcatgatgccaagtgactcctccttcggtgtagcccacgacgccttcaacaccttcttcagcgaaaccggatccggcaagcacgtccctcgcgccgtcttcgtcgatctcgagcccaccgtcatcgacgaagtccgttgtggcacttaccgtcaactcttccaccccgaacaactcatctccggcaaggaagatgccgncaacaactttgccagaggccactacacccgtggcaaaagatcggagatctgtgcttggatcgcgtc

SEQ ID NO: 54770 - DNA, 389 bp, Glycine max
  Clone ID: LIB3109-050-Q1-K1-F11
ggcgacagagagggacgatgacggacgaaaccgaagaattggaaccgttgtttgattacagccgggttcagcctctgaaccccatcgacctcgatgatgattttgatgattacgaggatgtgatttgcgttgatagtaaaaagaggaagaattcccaggctgttgggaatgagaagactaatgggaaaggagtaacagtggtggacattgaggatgatgattggttgcctcctccaccaaagatcgcaagtaatgcacagaagaccacggacgaggactcaactttgaaaaaattgagattaaagaagcaggaacttgcctggtttgctgaatcagcaaaagaattgttaaaagatgttgaagagtcatcaaaattgggaaataataat

SEQ ID NO: 54771 - DNA, 370 bp, Glycine max
  Clone ID: LIB3109-050-Q1-K1-F12
ggcacttcaattgcaatcaaattagttcattcggtttgcgcagttccctacctctcctttcaagatgcagatcttcgtcaagaccctcaccggaaagaccatcacccttgaggtggaaagctctgacaccatcgacaacgtcaaggccaagatccaggacaaggaaggaattcccccggatcagcaacgtctcatcttcgccggaaagcagctcgaggacggccgtaccctcgccgactacaacatccagaaggagtcaacccttcaccttgtccttcgtctccgtggtggcatgcagatcttcgtcaagactctcactgggcaaaccataaccctagaggtcgaaagctctgacaccattgacaacgtc

SEQ ID NO: 54772 - DNA, 400 bp, Glycine max
  Clone ID: LIB3109-050-Q1-K1-F2
atagcattggagttcaatgataagctcaagaaggtgaccattaagctaaaccaagagctccctggactcaaattggtgttttctaatccttattacattatgttgaacatcataaaaagacctcaactttatggatttgaatcgacctcagtggcatgttgtgctactggaatgtttgagatgggttatgcatgcagcaggggccaaatgttcagttgcactgatgcttccaaatatgtgttttgggactcttttcatccaactgagatgacaaatagtatcgttgcaaagtacgtggtgctgcgtgttttatatcaattcttacaataaacaaatagctactagtgaaattttatttatgtacggctatctcttcatgtctgcacattcgccataaagt

SEQ ID NO: 54773 - DNA, 424 bp, Glycine max
  unsure (1)..(424): unsure at all n locations
  Clone ID: LIB3109-050-Q1-K1-F3
ggcttcagttggtgtggcaccaacatcatgaggcttgagagaatccagtggtgttgataggttgccagaggagatgaatgatatgagaattagggatgataaagaaatggaagccaccgttgtcgatggtaacggaacagagaccggacatattattgttactaccattgggggtagaaatggtcaaccgaagcagactataagctatatggcagagcggattgttggacatggatcatttggggttgtcttccaggctaaatgcttggagactggtgaaactgtggctatcaaaaaagttcttcaagacaagaggtataaaaaccgggagctgcaaacaatgcgccttcttgaccacccaaatgttgtctgtttgaagcatngtttcttttcaaccaccgaaaaggatgaactataccttaat

SEQ ID NO: 54774 - DNA, 430 bp, Glycine max
  unsure (1)..(430): unsure at all n locations
  Clone ID: LIB3109-050-Q1-K1-F4
ggccaccggaggggggcgccaccagatgatggaaacgacggcaaagggaggcgctgtcgttgcgccaatcgcggcgttgttgttggtggtgctactcgcggcgagtgtggtggtggaggctcaggagaactcggacgtgaagacgctggtgaagcacatgcacgggaagaagtactgcgacaaaggatgggaatgtaagggctggtcaatttactgttgtaacctcactattactgattatttccagacctaccagttcgagaatctattctccaagcggaactcgccggtggcgcacgccgtccgattttgtgactaccactcgttcatcgccgctgccgcgcttttcgagccgcatgggttcggcaccaccggggacaagacgatgcanatgatggagattgcggcgtttctcggacacgtcggcagc

SEQ ID NO: 54775 - DNA, 363 bp, Glycine max
  Clone ID: LIB3109-050-Q1-K1-F5
ggcccctttgaccaaaattaaggttttgtagtgtggcgggaaaaaccaccattgcccccgaaaataaaacgtaaggttagaaaaaaccttgaattgataaggggaatcggaaagtactcgaggtcgcagatgtaccacaagaggggcatttgggctatcaaggccaaaaacggtggcgttttacctcgccacgaccctaaacccaagcctgaagctcctgctgaaaaaccacccaaattttaccctgctgatgatatcaagaagccccttgtcaacaagcacaaaccgaaaccagctaagctcagggctagcattactcccgggacagtgttgattctcttgcccgtagatttaagggaaaga

SEQ ID NO: 54776 - DNA, 373 bp, Glycine max
  unsure (1)..(373): unsure at all n locations
  Clone ID: LIB3109-050-Q1-K1-F7
gacccaagaacagagaagaatcagagaatggcaactatgactggtgtgagcctttcatgccccagggttttcttcaacgcatcaagctcaccgcaaaacgcgcatgcttattgtattttgtccagcagattctatgacttgacaggactgcagaatggaattctgaagcgagggagagagattttcctcactggttgctacctacgaactcccactggaggttctggacattcacgtcttttgccaacagagtatcttgtgattctattggatgaagtaatggtcaaagattctttaattttaaatntgtccactgtgaagtttaattgggctaacaagaggagtgagtgagtaggctcaacatacataaatg

SEQ ID NO: 54777 - DNA, 427 bp, Glycine max
  unsure (1)..(427): unsure at all n locations
  Clone ID: LIB3109-050-Q1-K1-F9
ggttcaaaggaaactatcaagggggcaagggggggaaagattttattaataaccacttgggtttcaaaagtatgtatcacaaggatcctgaaactggttctgctcgtattgttggatttgaggtcaccccaaacagtataaatcacgaatacaaggagtggaatgacaagaatccacaggtaacaacatgcaataaagataccaagaatttgatgcaaggtagtactgtcccacaagaagtagatacaaacaaggatatcgtattcacatatgatgtttccttcaaggaaagtgatatcaaatgggcatcacggtgggacacatatcttttaatgaatgatgatcagatccactggttctncatcattaactctttgatgatngntcttttcctgtctggaatgggtggcatgatcatgatgagaac

SEQ ID NO: 54778 - DNA, 366 bp, Glycine max
  Clone ID: LIB3109-050-Q1-K1-G1
gggtgacagaggagtatattaattaatatgtatgtgatttattgaattcgaagagaacaacaacacacacagagagaggtgtgaaaaggtgatggtttttggagcttatgcaacgtcttgcattttaagaagcacctaattacgaatatctatcttagcacacacaaccaccaccaccaccaccactactccaccattgtcactgccactgccaccttcaatttcaacctttctccaaaaataacataaaatcataatccgaatatctcagcattctctcattgctgcatcagctactcgcattttcgctttttttttccttccgggtgtccgcacttttcaatggaccgacgctggccatggaag

SEQ ID NO: 54779 - DNA, 340 bp, Glycine max
  Clone ID: LIB3109-050-Q1-K1-G10
gagtgtgtgagttcattaacatatacaaattctgtgtgttgtgttgtgtacttgtgttaattgtgttgttgttgtaggaaatttaagtgaagagagaatgatgatgaagtctgctatgtgtgcattggtgcttgtggcactggttgtggttgaagtggggcccatggctgaggctgcggtgacttgcaacccaacacagttgactccttgtcttccggcaattaattcaggttctgcaccttcgagtgcttgttgccagaagctgaaggagcaaaagccatgcttctgtggctacctcaaaaaccctagcttgaagcagtatgttaactctcctaatgcc

SEQ ID NO: 54780 - DNA, 334 bp, Glycine max
  Clone ID: LIB3109-050-Q1-K1-G11
ggcacacaaccactctttcttcttcttctctgaagagagcctttgctttttctttaggcctttccgaattaagtacttgtttcattttctctcgaagcaagaaaaatgttcatcgagagtttcaaggttgagagtcctaacgtgaagtacacagagactgagattcagtccgtgtacaactatgaaaccactgaacttgttcacgagaacaagaatggcacttatcagtgggttgtcaagcccaaaactgtcaaatatgaatttaaaaccaacacccatgtccctaaactaggggtaatgcttgtggggtggggtggaaacaatggctcaaccc

SEQ ID NO: 54781 - DNA, 356 bp, Glycine max
  unsure (1)..(356): unsure at all n locations
  Clone ID: LIB3109-050-Q1-K1-G12
gggaggaaggaagagatccttgtgttgtgggttgaggtgagaagggaagggatgtgganttcaacttcaagcacagcagcgattccctccgacgaggaacctagcgaatcctcctcctcgtcctccttctccacctctctcttcaatttctcttctggaaacccgagaatcgaggagacccgtggcctcatgcatctcttcccagacgacactccttctactctacccgttggacggaagcctctcgtttgcgttgtcggcgtcccaaatcacatgacctatgcggatttctgccagttctgtggttccttcattcagcacatgctanagatgcgcatagtcaggatggatgggat

SEQ ID NO: 54782 - DNA, 344 bp, Glycine max
  Clone ID: LIB3109-050-Q1-K1-G2
ggacgagaaatgagtagaaaacaaatgaaatggagacggtgttgtaagaaagagatttggggaggtttgactttttgagagttggaagatctcatcctctctatattcctcttctcgtctcagagagaaagagaaccagaaaagaccaaagcaacaacatcaccagacaatacaaacgcagatagatcactttgacgccaccctgaatcttgatacctttgaccgcaacaaaattcttaattgatcactgggtatgtttttgatcgtgcaccttgtgggccagtaatcgttcaaaacgtgaacaagtcttacttttgattccgaaatcctcttatcacttgatg

SEQ ID NO: 54783 - DNA, 401 bp, Glycine max
  unsure (1)..(401): unsure at all n locations
  Clone ID: LIB3109-050-Q1-K1-G3
gaggaagtgattgagaagatcatcgccaacgggggcgaggaagaggttctggggaaggccatacaggaacacgggagagggaaggttctggaaacagtggttgagattcaggacaggcatgatgctgccaaggaggtggagaagagtctactggagctgcaccaggtgtttcttgacatggctgtgatggtggaggcacagggtgagaagatggatgacattgagcaccacgtgctgcatgcttctcactatgtcaaggatgggaccaagaatctccagagtgcaaaggagtaccagaagaagagcaggaagtggatgtgcattgngatcattctgttgctcattcttattctgtttattggtattcctgttgtcaccagtttaagcagttcttgagtttt

SEQ ID NO: 54784 - DNA, 346 bp, Glycine max
  unsure (1)..(346): unsure at all n locations
  Clone ID: LIB3109-050-Q1-K1-G4
gacagaacaatagtagcaagcagagccccaagacgagcgttaccttgcgccgaagggccacagatggttgaaaccgatatggatgccgaaactgttgcaaatgtggttccaccaaaggagactccaaacagtgttcccatctcttatcattcctcacactcacaccctcctnttaatgagaggattatttcatccatgaccagaagatctgttgctgcacacccgcggcacgaccttgagatagggcctggtgctccaacgatcttcaattgtgtgattgagattgggaaagggagcaaggtgaaatatgaactggacataaaatcgggtcttatcaagatcgacc

SEQ ID NO: 54785 - DNA, 319 bp, Glycine max
  Clone ID: LIB3109-050-Q1-K1-G5
agggggcacaagtgagttttgtgatcgagataactagagacggtgtgatgaaaatgaaggtccttgttttcttcgttgctacaattttggtagcatggcaatgccatgcgtacgatatgttccctctccgaatgaacactggctattgtgcccgtactccggaggtgaaatgcgcaagttggaggcttgctgtggaagcacacaacatctttggctttgagaccattcctgaagagtgcgttgaagcaacaaaggaatacatccatggcgaacaatgtagatcagactccaaaacagttaaccaacaagcttactttta

SEQ ID NO: 54786 - DNA, 166 bp, Glycine max
  Clone ID: LIB3109-050-Q1-K1-G9
ttgtaaaacacctcccaagggggcaccgtataagttaaaaactgaaaagtcaaagggcgggcttccttaacatcaatctaatttttttcaccaaactctctcttcctgtttctgttatttccaaccaggtttaatttcatttccccaaaccctccattttaaattt

SEQ ID NO: 54787 - DNA, 410 bp, Glycine max
  Clone ID: LIB3109-050-Q1-K1-H1
ggtgttgtgttggtgttgtgtggtgtgtcgttgggaggggggaactcttggtctagctttggagccatcccaccaatccatcacccgatcacatttcaaagccccaacacatcacaatttacacaacacacatcacaattccgaacttagtgtacaacgaaagtccaacacacgaatcaaatcagacacacaacacaaacacaacacacactcactctccgttatccacacacaccattactctgttctgttctgttctgttctgctctgttctgtttcccaccacacccccccatggattgttggtactctcctcaccctctccatgatgaattcgagaagcttgtcattcgaatgaaccccccaagagttgctgtggataacatttcaagcgggacagacactgtcat

SEQ ID NO: 54788 - DNA, 323 bp, Glycine max
  Clone ID: LIB3109-050-Q1-K1-H10
gggtgaaagagttgaattgattcattttcatattccacaaccatggcggtcccatcctcttctctcacaaacaacaacattcattcttatatataaacacaacgaacgatacgagggaaaatctcatcgcatctctcattgtatttgcctttgcacatcatcaaccacactcaatctcttgcttcattcccaaacctcttattcccctcaagtatctacaaagctaaccttttttccttttttatcatcacttccaagagttgaaagataaaagccttgactttcttagcttcaaccaaatgcgatccccttcttgaaggata

SEQ ID NO: 54789 - DNA, 317 bp, Glycine max
  Clone ID: LIB3109-050-Q1-K1-H11
accacaaaggggagtagcgatggagaaaaagaagggtgagctaaaggcaagggtccttcctttcctttccactaatcacataaacccgctagtggacatggccagactcttctccatgcacgacctctacgtcaccatcatcaccaccgcacataacgccaccgttttccaaaagtccatcgatttagatgcgagtcgcgggcgccccatcagaacgcacgttgtcaacttccccacctcacaagtgggtctccccgttgggatcgaagccttcaacgtgaatacgcctcgggaaatgacccccagaatctacatgg

SEQ ID NO: 54790 - DNA, 134 bp, Glycine max
  Clone ID: LIB3109-050-Q1-K1-H12
ggtgggaaggttagaagaagcatgtgcatctggggcagtgataatggcaggtggaacagccagcataggcgaggatccagcgctggatcagttcatggaggcttactgtgagatgctgatcaagtacgagcaag

SEQ ID NO: 54791 - DNA, 76 bp, Glycine max
  Clone ID: LIB3109-050-Q1-K1-H4
caaaaaaccgaccagaaaggggttccttttattgtgaacctctatttctaactggcggggttttaaaaactgttgc

SEQ ID NO: 54792 - DNA, 308 bp, Glycine max
  unsure (1)..(308): unsure at all n locations
  Clone ID: LIB3109-050-Q1-K1-H5
ggaatcacagtggtgccttatcgctgtgggtttgagcgncttccttctcttatatttctttttttttttgtcttcgccgcacgccgaaacaatggccggaaaaggagagggtcctgctatcggaatcgatctcggaaccacctactcttgtgtcggtgtgtggcaacatgaccgagttgaaatcatcgccaacgaccaagggaacagaacgacgccgtcttacgtcggcttcactgataccgagcgtctcatcggtgatgcggctaagaaccaagtcgccatgaaccccatcaacaccgtcttcgatg

SEQ ID NO: 54793 - DNA, 106 bp, Glycine max
  Clone ID: LIB3109-050-Q1-K1-H6
cagttggagaaggtgaagacggtgaagaccgagggaaggaaaccggttgctgttcctgccaataaaagaactcgagcaagcaacagcaatggaggtccaatgccac

SEQ ID NO: 54794 - DNA, 406 bp, Glycine max
  unsure (1)..(406): unsure at all n locations
  Clone ID: LIB3109-050-Q1-K1-H8
gtatcatttgataatccaatgggtgtctgattctgtggttgaataaatagacttttttaattttaaatggaggaatctcgagcatatttagaactccatagatctcgacaccaggacaccctataccctctttttttccgggaatctatttacggactagcttgtggtcatgggtccatttttgtagaaaatgtcggttataacaataaatttagtttactaattgtaaaacgtttaattactcgaatgtatcaacagactcatttcatcatttttactaacgattctaacaaaaatccttttatgggttataacaatcatttttattctcaaataatattagaaggttttggtgtcgtcgtggagattctattttccctacaattntgtatatcttccttaaggg

SEQ ID NO: 54795 - DNA, 330 bp, Glycine max
  Clone ID: LIB3109-050-Q1-K1-H9
gacaataacaaactaaccaattcaaagttcacacgcacacacagcttgggaagaaaatcgagaattttccgagaaaatccgaagaaggcgggccatggtttccccggaaaacagcaattggctgttcgattacccgctgatcgacgacgttattcccgtcggcgacgcctccttttccgtctccgcctccgccttctcccggcccccacctcccgccaatgtcagtgttgaaattgatgcttcgcttggggattctgatggccccaaagatactgctttgaagaaaagggctagatgtgattcaagtactgcttctagctctaaaggctt

SEQ ID NO: 54796 - DNA, 378 bp, Glycine max
  Clone ID: LIB3109-052-Q1-K1-A10
gaaagaaagaggtggtaacacgaagggcgcgtggcagccgctggtttaaccgaaaagaaagcaactttgtcctacatcagaggcaacggaaaagaggatcctttctgcttcttctcttctcttccacacaaagacatcgtttcattgctctctctcttgtgcggacacaatttttgatggggatatacctcagcactcccaaaacagagaaagcctctgaagatggtgagaacgacaagcttcgcttcggtttgtcttccatgcaaggctggcgtgctaccatggaagatgctcatgcagctcatccatgtttggacgagtccacgtcatactttggtgtttatgatggccatggaggcaaagcagtttcaaaattct

SEQ ID NO: 54797 - DNA, 332 bp, Glycine max
  unsure (1)..(332): unsure at all n locations
  Clone ID: LIB3109-052-Q1-K1-A11
gagatcagaacagaacacagacaaacagaggaagagagaaagacccaagatgggcctttgctttggttgcttcggcgtagacaaacgcatgagcaaggaagaagagagattggcctctgaagaagcgcgtgccaaagctgctgaagccgcacagaaaaggcaagagcaatttgagaattctgcagcaggacgagctgctcgtgcacagcaacaagcaatggcaaagcaatctgcaaacgccaacaaagggcgaaccagttctaaagtggcanatgggttgaggttagacaatctgtctgttggagtaaacttttattacgttatcgatgaca

SEQ ID NO: 54798 - DNA, 435 bp, Glycine max
  Clone ID: LIB3109-052-Q1-K1-A12
ggttctagtgtgtgattgtttgttgttgtaactcgttcttcttcttttgttgttctgtgtttgtgtttgttttttctctcacctgaaaatgtcttgctgcggtggtaactgtggttgcggaagctcctgcaagtgcggcaacggctgcggaggctgcaagatgtacccagacttgagctacactgagtcaaccaccaccgagaccttggtcatgggagtggcacctgttaaggctcaatttgagggtgctgaaatgggtgtgcccgctgagaacgatggctgcaaatgtggaccaaactactcctgcaacccctgcacttgcaagtgaggtgttgggagagcaagcttcaagcagagatagcccttaattaggaataatgataaactattaatgtgtagctaaaaacttatgtattatgtctgtgatggttttcg

SEQ ID NO: 54799 - DNA, 66 bp, Glycine max
  Clone ID: LIB3109-052-Q1-K1-A2
gggagaagaggtgactacaacaccaaaaaaaatagttcagcttttgggtgagataatccaagctct

SEQ ID NO: 54800 - DNA, 313 bp, Glycine max
  Clone ID: LIB3109-052-Q1-K1-A3
gggagaagaagttcctacaacaccaaaaaaaatgggtcagcttttgaatgagataattgaagctctttcttctgtatcatctcctgaactggccctgagactgtatctgcaatgtgctgaggctgctaatgactgtgaccttgagcctgttgcttatgaatttttcactcaggcatttgtattatatgaagaagaaattgcggactccaaagcccaagtaaccgcaatacatttaattattgggtctcttcagagaatgaatgtctttggcattgagaacagggatacattaacacacaatgccacagggtat

SEQ ID NO: 54801 - DNA, 410 bp, Glycine max
  unsure (1)..(410): unsure at all n locations
  Clone ID: LIB3109-052-Q1-K1-A6
agtgtgtgagttcattaacatatacaaattctctgtgttgtgttgtgtacttgtgttaattgtgttgttgttgtaggaaatttaagtgaagagagaatgatgatgaagtctgctatgtgtgcattggtgcttgtggcactggttgtggttgaagtggggcccatggctgaggctgcggtgacttgcaacccaacacagttgactccttgtcttccggcaattaattcangttctgcaccttcgagtgcttgttgccagaagctgaaggagcaaaagccatgcttctgtggctacctcaaaaaccctagcttgaagcagtatgttaactctcctaatgccaaaaaaaccgttagttcttgtggtattgcctatccaacttgttaagcacctcttatatatatatataaaat

SEQ ID NO: 54802 - DNA, 406 bp, Glycine max
  Clone ID: LIB3109-052-Q1-K1-A8
ggaagaacaacggcagggtaagtatattgggaatggtggtggatgagccgaagctctgtcttatgaaaaaattccagaactggctctgaaactgtgtcacaaagtgtgcatgggcaattgaagactatgaccgtgagcctgatgactatgcaatcgacactcaggcactcaggatacttggataagaattcacagccgacgatgtcctttttaaccgaatacttactactatgactgctttctagagactgcatgtctttggcattgataacatggatacattaacacacatggccgcatggtatttagcatagcttttgaagaaacctgatcagtgccgagcagtttatgcatgctctcatctcttttgggttgatgatcaagatggtattaaagatggaaaagg

SEQ ID NO: 54803 - DNA, 186 bp, Glycine max
  Clone ID: LIB3109-052-Q1-K1-A9
gacgatgagtcgatttgataactaagatattgttattcgtgatattgatccaatttgatatcatcgaaatccaatttataccattgttgaattaattatcgatgaaagatttatcatctctatgggattaaatcccgaattttttattggcaaataaattatatgaagaaaaaattacaaagcgca

SEQ ID NO: 54804 - DNA, 118 bp, Glycine max
  Clone ID: LIB3109-052-Q1-K1-B10
acctacgaaggacaacacacgcattcaagcccagttatgggtcgctccaacaactttggttcggaattatgtctggatctgctggaaactacatgtcccaatattatcagcagcagca

SEQ ID NO: 54805 - DNA, 383 bp, Glycine max
  unsure (1)..(383): unsure at all n locations
  Clone ID: LIB3109-052-Q1-K1-B11
gagggtggaaattgaagaagaagaagagaaagaaagggaaagggagagggatcagctttctattttgacccttttgattgctacgttcaggaaatctttgattgggtgcagcaccactacaacttcttcttcttcttcttcttcttcttccatggagattgggtggccttccaatgtgagacacgtggcacatgtcacctttgatcgcttccatggctttctcggtttgcctgttgagttcgaacccgaagttcccaggagacctcccagcgctagtgcaaatgtttttggagtttcaacagaatctatgcagctttcttttgatgccaganggaatagtgtacctacaaatactgctgtaatgcaaagacatttgtatgcac

SEQ ID NO: 54806 - DNA, 312 bp, Glycine max
  Clone ID: LIB3109-052-Q1-K1-B12
gacacagagtgggatatagaatcactgaagagcttccttcaatggcgggttcttctctctctggtactcctctttcgctctcaaattcttccccctctctatcttccaagccaaagattccatctttgtgttttctctctggcaacaacaccacattgagggtaacatgcccaaaacctctgcactcatccactgttgttcatgttgctaccgaagcgttggattcatcccctgatcccttggacccactttcaaaaacccttgatgatgactctgacgccaccacctttgaggttggtgacttggggactc

SEQ ID NO: 54807 - DNA, 188 bp, Glycine max
  Clone ID: LIB3109-052-Q1-K1-B2
gcaattaacgggagtgtaaaggtgcataccaaattgcaaaacctaggtgatatgctaccacgccttaatataagcgaatttgatatctaccaaccactgtacgaatagtgcacaaaaccttatgaaaacggattttttgaattatggaacgtttggtgtggaacggggtggataaaactatttatttt

SEQ ID NO: 54808 - DNA, 404 bp, Glycine max
  unsure (1)..(404): unsure at all n locations
  Clone ID: LIB3109-052-Q1-K1-B3
ggtagcaaagggttgctgagaggagcttcgttaactgcaaacgcagtgtggcatagaagcagtttcttcccaaaggtaacggttagcgtccaccgcaagttggtgaaatttcgaagcttctcattaaccaccacttgctcctctcttctacctccggatttgccgcgtttggcaaaaacggctcaaatttcacttaccccaaacgaggttgaagaaattactcccaaaattcaacaagttatagaatggtttggacagcttcagggtgttgatcttgaaagtgttgaaccctcgatcagagcagctganaatgcgtggttagtgtggttgttttatgccaatccgtttncagaggcacattaaatgtcaatcccatgctcgctcatggattattagcattcaat

SEQ ID NO: 54809 - DNA, 388 bp, Glycine max
  Clone ID: LIB3109-052-Q1-K1-B4
gataccaaaaacaaaacaagccaagtgaaagagagaagaaaagtgaaagacaatgtcagggatcattcacaagattgaggagacccttcatgtgggaggccacaagaaggaggaggagcacaagggtgagcagcaccatggtggagaatacaaaggggagcatcatggtgaacacagtactgaatacaaaggagagcatcatgttggtgagcacaagccggagcaccatggaggagaagagcacaaagaggggttcctagacaagatcaaggacaagatccacggcgaggagggtggcgccaccgccgagggcgagaagaagaagatgatgaaggagaagaagaagcatgaacatggccatgacagcagcagcagcagtgacagtgat

SEQ ID NO: 54810 - DNA, 398 bp, Glycine max
  Clone ID: LIB3109-052-Q1-K1-B5
gacacaagattgagacacgaaacagaaaatgccaggactcacagcaccttccgattactcccaagaacccccccgccactcttctcttctcatcaacgccaaggaacctttcaatgcggagccaccgcgtgctgcgttggttgcttcctacgtcaccccttccgatttcttctataagaggaaccacggtccaatccccatcgttgagaacatcaacagatattccgtgaacgtgtccggcttggtggagcgtcccaaacagctcttcatgaaagatatatggatgcttccaaagtataatgtcactgccacgttgcagtgtgcaggtaatcgaaggactgctatgagcaagaccaaaacagtgaagggagttggctgggatgtttctgctattggaa

SEQ ID NO: 54811 - DNA, 301 bp, Glycine max
  unsure (1)..(301): unsure at all n locations
  Clone ID: LIB3109-052-Q1-K1-B7
gagagtgaaggggataataatatcaagtatgtcgcagctgagttggcaactgacatagtcattaatgttggaaatgtaaaatttcatctccataagtttcctcttttgtcaaaaagtgcacgcttgcaaaagctgattacaaacagtaatgaagagaacaatgatgaagtccatatccatgacattcctggcggatctgctgcttttgaaatatgtaccaagttctgttatggtatgacagtcactcttaatgcatacaatgtcgttgcagctcgctgtgcagcanaatatcttgagatgt

SEQ ID NO: 54812 - DNA, 308 bp, Glycine max
  Clone ID: LIB3109-052-Q1-K1-B8
gagtgtgtgagttcattaacatatacaaattctctgtgttgtgttgtatacttgtgttaattgtgttgttgttgtaggaaatttaagtgaagagagaatgatgatgaagtctgctatgtgtgcattggtgcttgtggcactggttgtggttgaagtggggcccatggctgaggctgcggtgacttgcaacccaacacagttgactccttgtcttccggcaattaattcatgttctgcaccttcgagtgcttgttgccagaagctgaaggagcaaaagccatgcttgtgtggctaccttaaaaacccta

SEQ ID NO: 54813 - DNA, 262 bp, Glycine max
  Clone ID: LIB3109-052-Q1-K1-B9
cttagaaaaggaaacagaaaagtcaaaaggtgacaaaacagagaaggaacaaggtgatgcagccaactcacaagagaaaaccctgaagaagccagataaagtgctaccatgcccccgctgcaaaagcatggacactaaattctgttactacaacaactacaatgtcaaccagccgcgttatttctgcaaagcctgtcaaagatactggactgcaagtggcaccatgaggaatgttcctgtgggggcaggacggcgaaagaac

SEQ ID NO: 54814 - DNA, 414 bp, Glycine max
  Clone ID: LIB3109-052-Q1-K1-C10
gaaagggaagcagaagaagaagaatgatagttagaactccaccgccacccaagaggccacgcgccgatggcgatgacggacagctagtcatctacgaggatccgccggagtcatcccctccttcggagcaaatgctctgcacctatcaatgtcgccaaatggtcaaatccgattttattgatgccttaagcaaagctgaaaatcaagctcgtcattatcaatccaagtttgagacattggagcctcatttccgcaaagttgaatctgagaggaagaaatttcaggaccaattcttatacgcccaacaggaacttgcagctgcaaaaggccgcgagcaggcactccaagaccaactcttgaaggaggccactcagtctcaagaacgattaagaaaacaaattcaattaaacactc

SEQ ID NO: 54815 - DNA, 433 bp, Glycine max
  Clone ID: LIB3109-052-Q1-K1-C11
gatcaaacagatggtggtgatggctatgtttctgttgaagtatctcccaggctcgctgatgacactgagggaaccatagaagctgcaaaatggcttcataaagtggttgatcgccccaatgtgtatattaagattcctgctacagaggcatgtgtgccttcaattaaggaagttattgctaatgggataagtgtgaatgtgacgctgatattctctcttgcaagatatgaagctgtaatagatgcttacttggatggtcttgaggcatctgggttaaatgacctctctagagttacaagtgttgcctctttctttgtcagtagagtggacactctcattgacaaggcccttgagaaaattggcaccccagaggctcttaatctacgtgggaaggcagcagtagcccaagcagcattggcttaccagctctacc

SEQ ID NO: 54816 - DNA, 235 bp, Glycine max
  Clone ID: LIB3109-052-Q1-K1-C12
acgtgccatcacttgcctgtctcgggtgcgggttttaatggtggagctcttgttgctagtgaaattaagactccattaaaaatgaaggttgaaggtggaagttattgaatgttgaattattcaacttgaggagttgccaagttggaacttacttttggaagtattcatcttgtgggtgtgattactgagttgacgagtgtccaaattaggttggattggaggcattcaaaattag

SEQ ID NO: 54817 - DNA, 391 bp, Glycine max
  Clone ID: LIB3109-052-Q1-K1-C2
ggacctaatgccaatcctttagatctctttccccagggccttccaaatgttgggtctggtgctgctggtgctggctctttagactttcttcgcaacagtcaacagttccaagccttacgcgctatggtacaggctaatccacaaatattgcagcctatgctacaagagcttggcaaacaaaatcctcatcttatgcgattgattcaagagcatcaagttgacttccttcgcctaattaatgaacccgttgaagggggtgagggaaatatactgggacagctagctagtgccatgccgcaagcagtgacagtcacccctgaggaacggcaagcaattgaacgtctcgaagcaatgggatttgatcgtgcaactgtattggaggtgtacttcg

SEQ ID NO: 54818 - DNA, 167 bp, Glycine max
  Clone ID: LIB3109-052-Q1-K1-C3
gcattttatgagtgctttaacaaatacactaaaggggaaacttggggtgtatttgaagaaattatttcccatattaaacaaatttaatttaacacacactaattatttattttgctatctcattcatcgctaacttgctgcactcacttacctacaaattagaccca

SEQ ID NO: 54819 - DNA, 371 bp, Glycine max
  Clone ID: LIB3109-052-Q1-K1-C5
ggtgaacaagagagataaaatgaagttagggacaaaaaaatttgttgattatgtcttataaatagtaacaaaagtagtattgttaaaaacaatattagtagaagtgttaaaattcaaatttaaaaagagcaaatagatacataatattatctctataggctgtacaattgaatctaaatcctaagttcaagacattgattctcacatagtcacgtaaaaacaggccttgttccaaataatcaatttccaggagcatggaaaagtcatcagcatcctctccatgcaaaagcagcaagaggtatagctggcttgcaattgtacattggcaggatacttgttcctctaaatgatggcagaattgcagaattaca

SEQ ID NO: 54820 - DNA, 135 bp, Glycine max
  Clone ID: LIB3109-052-Q1-K1-C6
gccgactaaggcgggtaggaacaggttctctacgggcccatccgttatataatggaacgcttcctcattgcgcctattgaccacgggaaatccgcggtggggggtacagtgattgaagttaccggcgcggtgcac

SEQ ID NO: 54821 - DNA, 372 bp, Glycine max
  unsure (1)..(372): unsure at all n locations
  Clone ID: LIB3109-052-Q1-K1-C7
ggacctaatgccaatcctttagatctctttccccacggccttccaaatgttgggtctggtgctgctggtgctggctctttagactttcttcgcaacagtcaacagttccaagccttacgcgctatggtacaggctaatccacaaatattgcagcctatgctacaagagcttggcaaacaaaatcctcatcttatgcgattgattcaagagcatcaagttgacttccttcgcctaattaatgaacccgttgaagggggtgagggaaatatactgggacagctagctagtgccatgccgcaagcagtgacagtcacccctgaggaacggcangcaattgaacgtctcgaagcaatgggatttgatcgtgcaact

SEQ ID NO: 54822 - DNA, 125 bp, Glycine max
  Clone ID: LIB3109-052-Q1-K1-C8
gaagcaagctcggaagctaaaatagccaatgaagcaagcacagctcttcttgttgggtcttctgaacaggaaactgctccttgtcctgaaactgaaatacatttttctgatacatcaggacaact

SEQ ID NO: 54823 - DNA, 370 bp, Glycine max
  Clone ID: LIB3109-052-Q1-K1-C9
ggaagcagtggaacaaagcaaggaagagaaagaaatttgtttctctctaaagagtctccgctgaactttttggtttcttgaagatgtcgttactctccgatcttatcaaccttaacctctccgacatcaccgataaggtgatcgccgagtacatatgggttggtggatctggcatggatatgaggagcaaagcaaggactctctcgggactggttaatgacccttccaagcttcccaagtggaactatgatggttccagcactggtcaagctcctggacaagatagtgaagtgatcttatatccacaagcaatttttcgggatccattcaggaggggtaacaatatcctggttatgtgtgatgcttacac

SEQ ID NO: 54824 - DNA, 409 bp, Glycine max
  Clone ID: LIB3109-052-Q1-K1-D1
ggaggaccgaggaacacacaaagacaagacaaaggttcgcttttccatccctcccaatcacaaacccagaaccagaagaagggccttcaccttgaacatggcacacaccccagttacccttttagctgttgagcaacacaaagtgataatacccaacaagcacggtgaaaaactagtgggtatattacatgaatctggaagcagggagattgtaatcttgtgccacggttttcgctcctcaaaagaatccaattccttagtgaatcttgctgctgctttggaaaatgccagaatgagttctttccgctttgactttgctggaaatggggaaagtgatggctcatttcagtatggttactattggagggaggcagaagatttgcgtgctgtaattcaacattttcatgaa

SEQ ID NO: 54825 - DNA, 358 bp, Glycine max
  unsure (1)..(358): unsure at all n locations
  Clone ID: LIB3109-052-Q1-K1-D11
ttcttagggagttaagaannaaaaantgggttgccaggagggttggatgagagcaaggttactagatagtggcgcaccaccatattacaaggtttccacctttgaatcagtgtataagccaagcttttgtttccatattggttctaaggaattggccgcttatgctcttgttttcaccgctctcattatgttcgccaatggtgttctgttatgaatggcaagtgccttgtcaacactttgtggacaagcatatggggcaaaagaatatggcatgatgggagagtatcttcaaagatcatggatagttgtgttcttaactgcaaaactgcttcttcctgtgttcatcttcacaagcccc

SEQ ID NO: 54826 - DNA, 433 bp, Glycine max
  Clone ID: LIB3109-052-Q1-K1-D12
ggggttagggtggttgttgcatatggtggagcaccaataaaccagcagctgcgggatcttgaaagaggggtggacattcttgttgcaactcctggaagactggtagatttgctggagagagctagagtttcactgcagatgattcgatatctggccttagatgaggcagatcggatgctggatatgggttttgagccgcaaataaggaagattgtagagcaaatggacatgcctccaccaggtgccagacagactatgttgttcagtgcaacatttccaaaagagatacagagattggcttctgatttcctttcaaattatattttccttgctgttggaagagtgggttcaagtaccgatttaattgtccaaagagttgagtatgttcaagagtctgacaagagaagtcacctaatggaccttcttcatgcac

SEQ ID NO: 54827 - DNA, 439 bp, Glycine max
  Clone ID: LIB3109-052-Q1-K1-D2
gagagcgagagagagagagaaacaaagcagcacccatttggatcctctcttctcttctttgatctccgttaccctttttgttttctcaacagagagagagagagagaatctttcgaagttcgtttgcgtgtgttgtgtggtcagtcaccgatggcagcaccacctgcgagggcacgtgccgattacgattacctcatcaagcttcttcttattggcgatagcggtgtgggaaagagttgtctgcttttgcgattttctgatggttccttcacaaccagttttatcaccaccattggcattgattttaagataagaaccattgaacttgatggcaaacgcattaagttacaaatctgggatacagctggtcaggagcgatttcgaactattaccacagcttattaccgtggagccatgggtatcttgctcgttatgatgt

SEQ ID NO: 54828 - DNA, 231 bp, Glycine max
  unsure (1)..(231): unsure at all n locations
  Clone ID: LIB3109-052-Q1-K1-D3
ggacagaaaggtggcagtggaaaaacaaaaaagcaaggatgggttgaggaatactaaattttctccattactgcaaaaattatctaataaggctcttcaaaagccatttaaaaaagcagcgtcttacaaatgcttctattgcttctgaaaatggtgatgcatctaatgatagcgacaaggaaacaaagnttgacggcatattattctgctgcaatgggctttttagtgata

SEQ ID NO: 54829 - DNA, 285 bp, Glycine max
  unsure (1)..(285): unsure at all n locations
  Clone ID: LIB3109-052-Q1-K1-D4
ggtgacaaatggagggtccttagntctggttctctttcttctctctgggctttcaaccaaggtctcaaatcactcttcttcttcacccttctgatctgctaattctcaaaggattcaaaattgggtggttttcgattgaactgggatgtccaagccactgctaggcataacggaagaagaaggtcaaagcaatgtcactttgttggcttctttctcaaccaccatggaaagtgtgtgccttgatagcttaaaacttgaagagcgcaactacatggggttatctga

SEQ ID NO: 54830 - DNA, 394 bp, Glycine max
  unsure (1)..(394): unsure at all n locations
  Clone ID: LIB3109-052-Q1-K1-D5
ggcttatagagagggcaaaacatattattttcattttcatctttttttgagtgtcaacaaatggcaaccactgtgatgaccactctcccccaattcagtggtcttaaaccccaattctcaacttgccctgtgaagaacttggttgctgtgcaacccatgagtcgcaaggggaaaggtgcattgggagctcgatgtgactacattggttcatccactaatctgattatggtggctgctacaaccctgatgctgtttgctggaaggtttggattggctccatcagcatacangaaagccactgcanggctaaagcttgaggtgagggactcangcttgcaaactggtgaccctgctggcttgacccttgctgacaccttggactgtggatctgttg

SEQ ID NO: 54831 - DNA, 435 bp, Glycine max
  Clone ID: LIB3109-052-Q1-K1-D6
gagtggaaagacagtatggaaaaaccctgatgggtatttacctggtaggatggccccattaaagaagttctatgtatttatgacactggcttatgtttgccttagcatcatttggttttttcagtatgtgagattttgggatgatgtactgcaacttcagcactgtatcacagctgtcattgctcttggattgtttgagatgattctctggtattttgagtatgtcaatttcaacaatactggaatgagacctattgtgctcacaatatgggtcgtcactgttggggctataagaaaatcaatatcacgacttctcattctctctgtctcaatgggttatggtgttgtgcgacccactctgggtggtcttacatcaaaggttcttttacttggaataacttactttctagcatcggaggtactgaatattactga

SEQ ID NO: 54832 - DNA, 424 bp, Glycine max
  Clone ID: LIB3109-052-Q1-K1-D7
ggtcaaaataatgaggtctttgatcctaaagctcatttgcctgtgaagacaaccttgaaggtgactatatatatgggggaaggatggtttcatgatttcaagcatacacactttgataaattctcacccccggacttctatgcaagagtgggaattgctggagtccctaatgatactgttatgaaaaaaactgagaaagtagaggataattggtcaccttcgtggaatcaagtatttgagttcccacttgctgttccagaactggctctgcttcgcgtagaagttcatgagtatgacatgtctgagaaggatgactttggtggccaaacgtgcttacctgtgtgggaactaagaagtggaattcgagcagttccactgtattcccgcaatggagataagtatgccaatgtgaagcttctcatgc

SEQ ID NO: 54833 - DNA, 283 bp, Glycine max
  Clone ID: LIB3109-052-Q1-K1-D8
cgtgaagacgaccgacggaggggcacgagtgaagagcgaagaaaatggctcccacgggtgtaatctttttggctgtgttatgcttctcagcactgtcactgagtcactgtcttgccgaggataatggacttgttatgaacttttacaaagaatcatgccctcatgctcgagacatcctcaaagaacaagtcatgcttttctacaagcgccacaagaacactgatatctgctggctcagaaacatattacatgactgtgctgctcaaacttgtgatgcttcact

SEQ ID NO: 54834 - DNA, 434 bp, Glycine max
  Clone ID: LIB3109-052-Q1-K1-D9
gacaaacaaatggcgagcactctgctgtccgtacaccactttctcccctctcaaaggagggaaaagatcggttgcttgagtggtgtcagaacttcattttgtggtcaagttgtgtgcaattcaagtttctgtgggagacaaataactagaagccatggaaaccgtcttgttgttcactcactgcttggaaggaaggtgaagtctgtgaagagcagagagactgtaattcctgaaccagattacaggattccaattgtgctactcggtatagctggtggattggtttacacagataatttggtacctgcagtacctgttggtctccttggattgcttctgttgtttcagaccactagagtgagatttgtctttgatgatgaggctctggaggtaaagataggtgaacagctccaggaatcatgtgagaatgtttt

SEQ ID NO: 54835 - DNA, 132 bp, Glycine max
  unsure (1)..(132): unsure at all n locations
  Clone ID: LIB3109-052-Q1-K1-E10
naaaaaacactttttaaaaaaatttttaacaaacaaactacacggaaaaaaactgctctatttcaaaaccatccctctcttaaaaacataaatattcattattctacccctaactaaaataattcataattt

SEQ ID NO: 54836 - DNA, 406 bp, Glycine max
  Clone ID: LIB3109-052-Q1-K1-E11
gatcaacaatggcgagaaaaatctgatacccatgtgctacacagcccacccgctatttataccccacaaactctacccaaccctctctgctgttgcgttgcgtctttcattttcacactcaaccctttcttcatccttttatctcgtctctgccaaaacgatgccgtttgctctggagaataacggaggagttacgatcggacggtcctccttcgcttactgcgtcgcgatctgcgatcgtgattttccggaggatgattccgactccagctccgactcctccatcggaaggaacagcatctcgtcggaagattcctccgaccgggaagacgccgtcgaagttgaggttcagagttccttcaaaagccctttggataccatcaatgatctagaggaagatttaccc

SEQ ID NO: 54837 - DNA, 441 bp, Glycine max
  Clone ID: LIB3109-052-Q1-K1-E12
gatcctgaaaaggttctgcgtcgtggtacacagattacactctatttaagagaggatgacaagtatgaattctcagagccaagcaggattcagggtttggtgaagaattactcacagtttgtttccttccccatctacacatggcaagaaaagtcaagaactgtggaggtggaagaggaggaagaacccaaagaaggggaggaaccaaaagaagagggtgagaaaaagaaggtgaaaaagactaaaactgagaagtattgggactgggaattggccaatgaaacgaagccaatatggatgcgcaatccaaaggaagttgaaaaggaggagtacaatgaattttataagaagacttttagtgaattcttagaaccacttgcacatactcacttcactaccgagggtgaggttgagttcagaagtattctgtacgttccggga

SEQ ID NO: 54838 - DNA, 152 bp, Glycine max
  Clone ID: LIB3109-052-Q1-K1-E2
gtatttttaagctgttttaacatatacaaattcggggaatttgggggacttcttgaagcaaatatgtctttcattgctacaattgaagcggatactacaaaactatattgacaagacatctctcattggtaattgatcactcattatgattg

SEQ ID NO: 54839 - DNA, 397 bp, Glycine max
  unsure (1)..(397): unsure at all n locations
  Clone ID: LIB3109-052-Q1-K1-E3
ngatatatctaagcagcagtaccattgcagtggttgtggaatttgcagaactggaggaagcgaaaatttcttccattgctacaagtgtggttgttgctactcaactcttctgaaaaacagtcacccttgtgtagaaggagcaatgcatcatgattgcccggtttgttttgagtatttgtttgaatcaagaaatgatgtcactgttatgccttgtggacatacaatccataagagctgcctgaatgaaatgagagaacatttccagtattcgtgccctctctgcttgaaatcagtctgtgacatgtcaaaggtttgggagaaatttgatatagagattgctgctacaccaatgcctgagcaatatcaaaataaaatggtttggatcctgtgcaacgat

SEQ ID NO: 54840 - DNA, 401 bp, Glycine max
  Clone ID: LIB3109-052-Q1-K1-E4
gaaggagagagggttcaagaaaagccccgaacagtgtaaatgcgggtggaagaatctcgttaatcgctacaagggaaaagagacatctgacccagagcatggcaagcaatgtccattttttgaagaattgcatgcggtctttacccaaagggcacataatatgcaacgattacttcttgaatctgaaactcgttcagctcataccaagaaaggggtgaaaagatcaagtggagatcggtcatcagaggaactctcagaagatgacaatgaggttgaatatgatagtgaagaggaaaaaccttccagaagtaatacccgcaaaaagaaagttgacaaagttggagtggagaagtcttcaagggcaagcaatccatcaaattctgccagtaatagtactagta

SEQ ID NO: 54841 - DNA, 115 bp, Glycine max
  Clone ID: LIB3109-052-Q1-K1-E6
gctgaatgaggaggatagacaaaggctcttaccgtgccaatccgttgggatgtggaatgctaatcggtgctgactataaacgacagattatccgcggtgagtgttacagtgataa

SEQ ID NO: 54842 - DNA, 181 bp, Glycine max
  Clone ID: LIB3109-052-Q1-K1-E7
agaagaagaagaagaagagttatcattggccaagagggtgtggaatgagagcaaggttatgtggatagtggcggcaccagccatattcacaaggttttccacctttggaatcagtgttataagccaagcttttgttggccatattggttctaaagaattggccgcttatgctctcgttttc

SEQ ID NO: 54843 - DNA, 422 bp, Glycine max
  Clone ID: LIB3109-052-Q1-K1-E8
gggattgggaagtacatagcgtcggatatattctcggtgggagggtacgattgggcgatctatttttaccccgatgggaagagcgttgaggacaatgcaacgtacgtttcgctcttcatcgcgctcgctagcgaagggaccgatgttagggcgctttttgagttgacgcttttggatcagagtgggaaggagaggcacaaggtgcatagccattttgagaggaccctcgagagtggaccctacacgttaaaataccgtggtagcatgtggggttacaagcggttttttaagagaacagcactagagacatcagattaccttaaagatgattgccttagtgttaattgtagtgttggtgttgtgaagtcacacacaggaaggccctaaaatatataaaatcccaattccgccttccaacatgg

SEQ ID NO: 54844 - DNA, 334 bp, Glycine max
  Clone ID: LIB3109-052-Q1-K1-E9
ggagggtcagagtgagaaagagagagagagagagagaaactgagagaaattcgcaaaccctaatttcggaaagatcggcgatggctgcctccaaggatcgcgagaacttcgtctacatcgccaagctcgccgaacaggccgagcgatacgaagagatggtggaatcaatgaagaacgttgcgaatctcgacgttgaactgactgtggaggagcggaatttactttctgttgggtacaagaatgtgattggtgctcggagagcatcgtggaagatcctgtcttccattgagcaaaaggaagaaacaaaagggaacgagttgaatgcgaagcggat

SEQ ID NO: 54845 - DNA, 143 bp, Glycine max
  Clone ID: LIB3109-052-Q1-K1-F1
gctgctagaggaggatagacacttgttcttactgtgccataccgttatgatgtggaatgcttatctttgtcgactatagacacactgaatatccgctgctgcggtgataacgatagacgctccagctcctgcacatccgctaa

SEQ ID NO: 54846 - DNA, 230 bp, Glycine max
  Clone ID: LIB3109-052-Q1-K1-F10
tgatgccaaacgccgaaaaaaagacgattttcgagatcgaaaacgtgaggaaattaaggtggaagagaaggagcgggaaagagagaaagcaaacattctgaaagaagagttggatttaaatgccgcatccaagagacgtaaacccaagaaggagcatttaccaactggtgaacctggtgagtactcgcctgtggcccatccaccttcttccgctggtattggcatgtcac

SEQ ID NO: 54847 - DNA, 406 bp, Glycine max
  Clone ID: LIB3109-052-Q1-K1-F11
ggcacaagtgagtttgttgatcgagataactagaaacagtgtgatgaaaatgaaagtccttgttttcttcgttgctacaattttggtagcatggcaatgccatgcgtacgatatgttccctctccgaatgaacactggctatggtgcccgtactccggaagtgaaatgcgcaagttggaagcttgctgtggaagcacacaacatctttggctttgagaccattcctgaagagtgcgttgaagcaacaaaagaatacatccatggcgaacaatatagatcagactccaaaacagttaaccaacaagcttacttttatgccagagacctcgaagtccattccaaggacacatttgtgttcaatataaatggcaccggactctctaatattccatactacaaaaaacat

SEQ ID NO: 54848 - DNA, 133 bp, Glycine max
  Clone ID: LIB3109-052-Q1-K1-F12
ggctcaaataaattagctgagcgagagaactcgaagcagtgtgacgaaaatgaaggaccttgatttttatcctgctacaatattcgtagcatggcaaagccatgcgtacgatatgttaactcttacaatgaac

SEQ ID NO: 54849 - DNA, 58 bp, Glycine max
  Clone ID: LIB3109-052-Q1-K1-F2
gcctcagagaggggcctcaaacacgttaataaatgggctgctggggctactttaaaaa

SEQ ID NO: 54850 - DNA, 422 bp, Glycine max
  Clone ID: LIB3109-052-Q1-K1-F3
gcgtgagcgtgaattccggtgtgacattgcactctcttacactgcgccacctcgttctctccgtctaaatagctgtcacttactcattcttcttcttcgtgcgtgcgtgtttctgtaaaatcgaatctcaagtctctgaatctgaatctcaacacaaccttcgttgttctcaacactgtgttcgtttttgctgccaaggttacaacactgaaagagacaccggagtaacataaataagatggaccaacaaaaccaaaataacactccagatggttcaggagaggtgcctttgaagcgcaaacgtggtcgtccacggaaatacccaaagccagattcagaggagagttcctatatcctagttagtcaaaataaaaggcagaatcctgttcgtgcggaacaagctccagtacctcctggatttg

SEQ ID NO: 54851 - DNA, 365 bp, Glycine max
  Clone ID: LIB3109-052-Q1-K1-F4
ggagtgagtagcgagaatggagtttcaagggttaccggaaggttgcattgctagtatactctctcgcactacgccggcggacgtgtgtaggttttccgtcgtatcaaagattttccgttcggccgctgaatcggacgctgtgtggaaacgttttctcccttccgattaccattccatcatttcccagtctccttcgcctctcaactatccttccaagaaggagctctatctcgctctctcggatcgccctatcatcatcgatcagggtaaaaagagctttcaattggagaaaaagagtgggaagaagtgttacatgcttgctgctagagctctcaacattatttggggtgacactgagcaatact

SEQ ID NO: 54852 - DNA, 339 bp, Glycine max
  Clone ID: LIB3109-052-Q1-K1-F5
gtatgaacagagctgaaaaagaagctaggatgaaaggcatgcaggatagccttgagaggagtagagctgaaatgaaagtcaagttttcggggtctgcaaacagacaagattcagcatcaagtgctcaccgtgccgagaaacttagatatttcaaatcaaatattaagagagagcagcatccaatagattctcttcagaatgaagatgatgaagatctatctgagttctcagaagagaagacttatggtgcttcaaggcaaagtaagaaaatttttcccaacagacatataccttcaagcacacctcgtacaacagctgtgtcggtctctcgttcatctg

SEQ ID NO: 54853 - DNA, 186 bp, Glycine max
  Clone ID: LIB3109-052-Q1-K1-F6
ggagcgggtgcgttcattaacatagacagattgtctgtgcagtgttgtgtgcttgcgtcaattgtgtagccgtatcatgaactttaaatgacgcacgaaggatgatgcattgtgctatggactcatatgggcttgtggcacaacactgaacctgcaaggggccaccatgtgttatgcgtgggggac

SEQ ID NO: 54854 - DNA, 416 bp, Glycine max
  Clone ID: LIB3109-052-Q1-K1-F8
gaagtggaagaagagaaagtggcatcgcttaggtacagatacagatacagacacaacctggaaaaaattccgaccccagcccttcactcttctctctgcagcggaggagttgttataaagctattcatccctgctcaatattctacaccccaagacagagaaggacaatagagatcaactaactatcccaacttgccaatataaactgtgaagagtttctataaatgcaggacttctagcatactgttgtttgattaaccaagttcttccatattggttgaagaagcctcgagtcaatatttagtttttgctaccatctgtgggtttctgatggatgatgctgggcatcgtgagaatggaagacacaaagcaggagatcaatataaatctgctcagggtcagtggttgatgcaaca

SEQ ID NO: 54855 - DNA, 415 bp, Glycine max
  Clone ID: LIB3109-052-Q1-K1-F9
gtcattagaattaatgcttactgactttattgtggccattgattctggcgttcctcgtcgaccccctgctggaaaacgtgcagatgaccaggttaattatcctaagttggtcgagttactactcaatagctcagagttttcctctaacctgttacatgatataaccggagggagactaggattccctcatccagaagacacaaatacaatcattgatgttcatactactgatgtaacatcagtagttcatgcgttccgtagtggttttcgtgctgctcttaaggatctgcaaggattccacatattcctactcacactgcatcaaaaacttgataatttgttaagatcatttatgaatactataggcaaaatatcatcaagggagtctgaaaaagaggatgcagtggttcctgac

SEQ ID NO: 54856 - DNA, 249 bp, Glycine max
  Clone ID: LIB3109-052-Q1-K1-G1
aggcgtccgaacacgtcagaaagggctacagaagggggcaacaaacaagttagtgaatgagctgctgggtctgattcacacagctccttgtccattcatctccacctactaatgctactcctacactatcattgtcttgagccctcttgtctcttaaatcctatacacagcgtgtggagtcatacaagactaatcctatttttttgcctctgagagtctgtcgaactgacccatgctgggagaccaaaa

SEQ ID NO: 54857 - DNA, 342 bp, Glycine max
  unsure (1)..(342): unsure at all n locations
  Clone ID: LIB3109-052-Q1-K1-G11
tttataagggggttgtacataaaaaataccgggtgggatacaggcgggaataataagcttgcagagcaaancaatatttggatgttttatggcataaataggtgcacggcaggcatgggtttcagcttttgtgactcaatcacccaccataaccattattatcagtacataatactagttaatctcagtcatgcctattcctaggattatactcttttcattccaacatctctccactgctgcggccctcgctcttcttctaacgtgcgtttcctttactacaactcaatctgttaggtattcaaaaacaacaagtcacggtaaaacaaaacattatcttca

SEQ ID NO: 54858 - DNA, 344 bp, Glycine max
  Clone ID: LIB3109-052-Q1-K1-G12
gggtgctgtgagtgagattacccatagatagagagcgcggcataacctaaacttacccttcttctctctgtgtgtgtgcgcatcaaacgcaaccagaagcagccatggccactgcaagaactgtgaaggacgtttctcctcatgagttcgtcaaagcttactcttctcacctcaagcgatctggcaagatggagctgccagagtggactgatattgtgaaaactgcaagatttaaggagttggctccttatgatcctgactggtactatgtcagagctgcttccatggcaagaaagatctacttgagaggaggacttggtgttggtgcctttcagaggatttat

SEQ ID NO: 54859 - DNA, 446 bp, Glycine max
  Clone ID: LIB3109-052-Q1-K1-G4
gacagcagcagagcaaaagaaagaaagaaagaaagtgcaacttcctctgttttgctcccctgtttaagccttatcataagcttagaatggcacacaaggaattttccattgccctagtgactctcattgttctctttgtcaacacgaacctccaaggtgccacggctgactatggtggtggttggcagagtgctcatgccactttctatggtgggggtgatgcttctggcacaatgggtggagcatgtgggtatggaaatttgtatagccagggatatggaactgacactgtggctctaagcactgctttgttcaacaatggcttaagctgtggatcttgctatgaaatgagatgtgatgatgacccaagatggtgcaaacctggctctattaccgtcactgctactaacttcttgccaccaaacccatctttgctaacaacaatg

SEQ ID NO: 54860 - DNA, 225 bp, Glycine max
  Clone ID: LIB3109-052-Q1-K1-G5
gggggaaacaagggacccctatgctatgctatatggagttctgaaacggtctaacgacacgcctactcattgcactcttcgatcgcaactctctttttcttccaaaaaggaaaacgaatctcaaacttcacaagtgtttgacgcgccatggcggatcggttgacgcgtattgccatcgtcagcaacgacaggtgcaagcccaaaaagtgccgccaggagtgcaag

SEQ ID NO: 54861 - DNA, 415 bp, Glycine max
  unsure (1)..(415): unsure at all n locations
  Clone ID: LIB3109-052-Q1-K1-G7
ggagcaagagtgaagagcgaagagaatggctcccaagggtttaatctttttggctgtgttatgcttctcagcactgtcactgagtcgttgtcttgcggaagataatggacttgttatgaacttctacaaggaatcatgccctcaggctgaagacatcatcaaagaacaagtcaagcttctctacaagcgccacaagaacactgctttctcctggctcagaaacatcttccatgactgtgctgttcagagttgtgatgcttcactgttgctggactccacaagaaggagcttgtctgagaaggaaacagatagaagctttgggttgagaaatttcaggtacattgagaccatcaaagaagctttggaaagggaatgcccaggagtntgttcctgtgctgatatcctcgttctctct

SEQ ID NO: 54862 - DNA, 397 bp, Glycine max
  unsure (1)..(397): unsure at all n locations
  Clone ID: LIB3109-052-Q1-K1-G8
ggaagcaggtgggtgttatttccgtggtctaaagcaaagtgaattagacttagattctgattctgggattggatggagctaggcctcatggataagaatccaacgaagctggaacactttgatgacatgtggaggctcgaatccactgccacactattatctcacttgaagggggatgatggtcgacatgtcttgacattggatcgtacaatattctatccgcaaggtggtggtcaacctgcggatactggctttgtactcattcatggctttgataacaacaaatttctggtttctgatgttcggtccaaagatggaattgtttttcactatggtttctttgagaacctgggcggngaatttgggcctacactcgagaaagggaaggaggtttcac

SEQ ID NO: 54863 - DNA, 198 bp, Glycine max
  Clone ID: LIB3109-052-Q1-K1-G9
cggttgtagtgtgacatcgtatggtggatgaactcggacatcatgttttgttgatacatggttgcatatcgattttactattacctaacaatacattgctgccaaacatactgagtgctccaaagctcctgcacctgctatatccggctgatatgcttgcatatgtaccgagacttgagctacactagttcatccaca

SEQ ID NO: 54864 - DNA, 423 bp, Glycine max
  unsure (1)..(423): unsure at all n locations
  Clone ID: LIB3109-052-Q1-K1-H10
ggagtgtagaaaagaaagtccatggccatgagtgtgggcgtggcattgccatccaccaccaccagtctcagtttccttcgctaccgctctcgctctccaattcaaaataaaatccgttttccccgtcaaattgtttctaaattaaacagtgcagaggtccaggttcaaacctggtaattttgctttctgaatcacgtaattttatttttatttttctgttttttgaaacagtcttcangccttgtattgtagcgtgtgggattggaggggttactctattcgctatcaacattctggaaatattggccctgcactagttttagtccacggttttggagctaacagtgaccactggaggaataatatttcagttcttgcacaatcccaccgggtgtactccatcgatcttgatggatatggata

SEQ ID NO: 54865 - DNA, 358 bp, Glycine max
  Clone ID: LIB3109-052-Q1-K1-H11
ggttgtggtggtgttctgagggacgcatcagcaaagtggctccgtggctttgctaaaaaactgaaccctacttatgcagtgcaccagacagagttagaagccattctcacgggcttgaaggtggcttcagagatgaatgttaagaaactaattgtggagtcagacagtgactctgtggtgagcatggtggagaatggggttaagcccaatcaccctgactatggtgtcgtggaacttataaggacgaagcggcgtcgttttgactgggaagtgaggtttgtttctgtctccaacaaggcgaatcgtgtggctgataggctcgccaacgatgctcggaaattggcttgtgatgatgttt

SEQ ID NO: 54866 - DNA, 242 bp, Glycine max
  Clone ID: LIB3109-052-Q1-K1-H12
caattgagtgatcagtcatggggaaagccgtattcgaatactaaacgcgactcacatcggtggatgatcgtctgatcctatccgaaccttcatctgaggtggatctgttaatcggaaagatcaactacactttgtgccggaccttactatttgatctcattcccacccaacacaacaactccggcgagccctcctgctgcctgaccgagcctgacaagaataagggccccaaatctaaatcc

SEQ ID NO: 54867 - DNA, 386 bp, Glycine max
  unsure (1)..(386): unsure at all n locations
  Clone ID: LIB3109-052-Q1-K1-H4
nagaggggaccacaaaacatgggttaacttctacccctgttcattgctcctctttcgttcttctctctttctctttcaacgcattccaaccctgtggcgctataccctcctagatctactctctaaccggctgggactaagagcagtggttagtcatacatggcactcttggcttcgcgagcaatgtcgaagggtgtggtggtatcagtgcctgttcttgttctatctgctttagaggccactgttttcctgttcttccttttgtactctctttcatcctgctcctgccctactccttcagaaatatctgcctccaatgctatgagtgttggtgttggcattggtgtttctgagtctagcagcagtaatgttcctgtagcaacaac

SEQ ID NO: 54868 - DNA, 370 bp, Glycine max
  Clone ID: LIB3109-052-Q1-K1-H6
ggtcacaaaagatgtttcacttctatctagatggatggcgattgacctctatattcgggaagtggatagcctcagatttgagctatccatgaaccactgcagtgataggttgtcaagattggcacatgaaattctagaagctaagcatgagaatcgccgtgagaattggaatcagtctgcgaatagaagtctcacacttccaacacaacttccagctagagctcatttaccttctattgctgaaaatggtgaatctcggcatcccagactagacattccagcacctgattacatgcaatccaatcacaaggatggtggggtttctgtaagttcaactacatcaaaacttgccaatcccaatactcgatta

SEQ ID NO: 54869 - DNA, 342 bp, Glycine max
  Clone ID: LIB3109-052-Q1-K1-H7
ggtagcacataggaattgccgaattggatacaatccggaagaataagcttggagagcaaggcaatatttggatgttttatggcagaaataggtgcacggcaggcatgggtttcagcttttgtgactcaatcacccaccataaccattattatcagtacatagtactagttaatctcagtcatgcctattcctaggtttatgctcttttcatcccagcatcgctccactgctgcggccctcgctcttcttcgaaggtgcgttccctctacgacaactcaatctgttaggtattcaaaatcaacaagtcacggtaaaacaaaacattatcttcatcctgtattc

SEQ ID NO: 54870 - DNA, 216 bp, Glycine max
  Clone ID: LIB3109-052-Q1-K1-H8
gggtcactgtggtttctgtcatgggtggtagaaaatctgaatcctcaaaaatctaaacctctctttctggggttttggtcatcacaaacccttttgctggggcataattgtgaaaagggaaaaatggaaaaagatgatgaagatgaaaaatattagtagtagcaacaataataataagacaaatggtctttcttccatcatgaatggaagaagctc

SEQ ID NO: 54871 - DNA, 433 bp, Glycine max
  Clone ID: LIB3109-052-Q1-K1-H9
gggaccacgaggttgaggattcttgttttcgatgaggctgatcaaatgcttgctgaggatggatttagagatgattccctgaggataatgaaagatatagaaaaagagaattctaagtgtcaggttcttttgttttctgctacatttaatgacaccgtcaagaatttcgtttcaaggacagtcaggatggatcataataaactctttgtaaagaaagaagaactatctttagatgcagtgaagcaatataaagtgtattgtcctgatgaacttgctaagattgatgtggtaaaagattacatatttgaaataggagagaatgtggggcaaacaattatatttgtgcgctcaaaaattactgcaagattaacacatgaagcacttgttaagttgggctatgaggttacatctatacaaggttctcttagtaatg

SEQ ID NO: 54872 - DNA, 305 bp, Glycine max
  Clone ID: LIB3109-053-Q1-K1-A1
ggaaaaaagaaatgggatttttttttctttcaacgccaccccaagttcccagctttgaagtttgagctcaaggtccaaacattccaaaaacttgcatagagagatagatacatactacaaagacttcagatttttggggggagagaaaagatctgcgggggtgtaagtttgtggggattttttttttgagaaaagaggaagccgtttgtgtctgtgtgtgtttgtgaaatagtgtgttaatatgagtaactggttggggttctctctcactccacacttgaggattgatgaagaatttgagagag

SEQ ID NO: 54873 - DNA, 289 bp, Glycine max
  Clone ID: LIB3109-053-Q1-K1-A10
tcaacaaaggacagaaacagatccactatctgttttacgtcaggcaatacgtggagtaactcccgatatagcagtaaaagcaagacgcgtaagcggatcaactcatcaaggtcccgttgaaataggatccacacatggaaaagcacttgctattcgttgggtattgggggcatgccgaaaacgttcgggtcgaaatatggctttcaaattaagttccgaattagtggatgctgccaaaagtagtggcgatgccatacgcaaaaaaaaaaaaagcacgcaaaaaataaaa

SEQ ID NO: 54874 - DNA, 373 bp, Glycine max
  Clone ID: LIB3109-053-Q1-K1-A11
gatgacagaaaagtaaacagcatcgacttgaatttgagtgatgaatttgttgttgaagcttcactttggaaattttgaatgttacgagacacaagtttctccaacttgctgggtcccacacagtttcttcctctgtctatttccctcgcagatctcaaccaattcttatatataaacccctttcgagatctgcttcaagctctgtccccttcttccacttccaccctcctctcaggtttttgtggataagagtgagctataatggctgccaagagaccgggtttaattgctttgtttgatgttgacgggactcttacagctcccaggaaagtggtcacaccggaaatgttgacattcatgcaagaactacgaa

SEQ ID NO: 54875 - DNA, 397 bp, Glycine max
  Clone ID: LIB3109-053-Q1-K1-A12
ggagaaagagagagagagagagagaaactgagagaaattcgcaaaccctaatttcggaaagatcggcgatggctgcctccaaggatcgcgagaacttcgtctacatcgccaagctcgccgaacaggccgagcgatacgaagagatggtggaatcaatgaagaacgttgcgaatctcgacgttgaactgactgtggaggagcggaatttactttctgttgggtacaagaatgtgattggtgctcggagagcatcgtggaggatcctgtcttccattgagcaaaaggaagaaacaaaagggaacgagttgaatgcgaagcggattaaggagtacaagcagaaagttgaattggagctttcaaacatctgtaatgatgttatgacagtgattgatgagca

SEQ ID NO: 54876 - DNA, 312 bp, Glycine max
  Clone ID: LIB3109-053-Q1-K1-A3
ggagaggaaggatgtgatgactaagaacgtctccatttacaagtcccaggcttctgcccttgaaaagcatgctgctgccaactgcaaggttcttgttgttgctaacccagcaaacaccaatgcattgatcttgaaagaatttgctccatctattcccgagaaaaacatttcttgtttgactagattggaccacaatagggcactgggccaaatttctgagagactgaacattcaggtttctgatgtaaagaatgtcattatctggggcaatcactcatcaacccaatatccctgatgttaaccatgcaactg

SEQ ID NO: 54877 - DNA, 287 bp, Glycine max
  unsure (1)..(287): unsure at all n locations
  Clone ID: LIB3109-053-Q1-K1-A5
ggcacaagtgagtttgttgatcgagatagctagaaacagtgtgatgaatatgaaggtccttgttttcttcgttgctacaattttggtagcatggcaatgccatgcgtacgatatgtgccctctccgaatgaacactggctatggtgcccgtactccggaggtgaaatgcgcaagttggaggcttgctgtggaagcacacaacatctttggctttgagaccattccttaagagtgcgttgaagcaacataggaatacttncatggcgcacaatatagatcagactcca

SEQ ID NO: 54878 - DNA, 60 bp, Glycine max
  Clone ID: LIB3109-053-Q1-K1-A7
acagtgtggttggagcacagccgtgtatggaaaaaaaaaaaaaaaaaaagaaaaaagaaa

SEQ ID NO: 54879 - DNA, 376 bp, Glycine max
  unsure (1)..(376): unsure at all n locations
  Clone ID: LIB3109-053-Q1-K1-A9
ggaacagttttcagtcaccaaacattttttttccatgaactttgcatctttctatcatcacatccatggccacagttgtgaagctccacgttttcccagaaagtttgaaccaacacaaaacgaggttgctcaggagaggctttggctcatgtccttcacctggggtgcttggttttggccataaaaattatgatcagttctctgtgaaagtgtgcagggcttttaggactgaggatggtggggatgtgaaggagaaaaagtttcgaaatttgaagaanaatgaagagaaaaccaaaagggaaagtgggttttggaagttcctcaagtctatcttgctgaggaanttcatgggtgggtcaaaatcagatgatgagta

SEQ ID NO: 54880 - DNA, 331 bp, Glycine max
  Clone ID: LIB3109-053-Q1-K1-B1
gagaatgagaatggattggatacttctattaatggggctgaggtgaagcatgtgatgaaggtgagcctggatgatgatagacatgattactattcaattgggacttatgatgagaagaatgttctgttcacaccagatgatgctaagaatgatgttggcgttggattgaggtatgactatgggatattctatgcatccaagacgttttatgatcagaataaggagaggagagttttgtggggttggattggggagtctgacagtgaatatgctgatgtggccaaaggttgggcttcagttcagagtattcctagaactgtggaacttgata

SEQ ID NO: 54881 - DNA, 380 bp, Glycine max
  Clone ID: LIB3109-053-Q1-K1-B10
aaggaacaaaagcagtatgggatgacacccttaaagaaagctgtggatctagagagattgaaggaattggtctctattggatttgacaaggagcttgctgctgaagcccttagaagaaatgaaaatgacactcagaaagcattggatgatttgacgaatccagaaactaattctgctttgcaggtcaatatcgagtcaaggaaaaggaagagacagaaacaagcacgagattctgaaattagaaacgttgtgcaaatgggtttcgaaagatcaagagtggttgctgcttttgaggccggaggtagtttagaagaagtattgcaaagactaacagcacaacctgggactgaccccacacaacctcaagaaaattcagcttc

SEQ ID NO: 54882 - DNA, 396 bp, Glycine max
  Clone ID: LIB3109-053-Q1-K1-B11
ggaggcggagacgaagaagtgaagagaagagaagagaagggatttggatctgaaaagagaggatggggggaggaatggaagcaaacaagaacaagttcatagaggattggggcactgccagagagaatctggagttcaatttccgttggactcgccgcaaccttgctcttgttggcatcttcggcatcgctattcccgtcctcgtctacaagggcatcgtccgtgaattccatatgcaagatgaagataatggtcggccgtacaggaagttcatgtgagagagtatggagagtcttttgtaataattcgtcaagttagaccttgatattatgaggctacaaaccatgtttttttttccttaattcgcaaaagcttgcttgcttttaagtactctag

SEQ ID NO: 54883 - DNA, 412 bp, Glycine max
  Clone ID: LIB3109-053-Q1-K1-B12
gcaacaataattcttctgatccgtttcgttcaaatcaaaataaaaaatcgcctctttggaacgctgcctccttctgacaaaaaaacattgtaccatccgaaatgtcggccatggtggaacatacggatcaaagagctgaagctattccccaatccacagctgcaccaaattggactattcatgtgtcagacataaaaacagttaaggttagcaacatatcattggttactttcaagaaggacattgaagaattcttttcattctcaggtgatattcgatatattgagatgcaaagggaaagtggtcacactcaggttgcttatgttacattcaaagatacacaaggagcagacacggcagttctcttaacgggttccaagataagtgatctatatgtcaccattacacctgt

SEQ ID NO: 54884 - DNA, 299 bp, Glycine max
  Clone ID: LIB3109-053-Q1-K1-B3
gactctgaaacagttaaccaacaagctttgttttatgctagtgaacgcgaagtccatcacaacgacatatttatattcggcatagataacaccgtactctctaatatcccatactatgaaaaacatggatatggggtggaggaatttaatgaaaccttatatgatgaatgggttaacaagggcgacgcaccggcattgccagagactcttaaaaattacaacaagctgttgtctcttggcttcaagattgtattcttgtcacgaagatatcttgacaaaatggccgtaacagaagcaaa

SEQ ID NO: 54885 - DNA, 346 bp, Glycine max
  unsure (1)..(346): unsure at all n locations
  Clone ID: LIB3109-053-Q1-K1-B5
ggagggagttttggtggatattgagaacatgttagctcgtggtaggatggacctaccagtgagtgtgtgctttgcggcagcaagaggagatgacttgttgttgcatcaattactcaaacgaggcatggatccaaatgaatccgacaacaatcgaaggacagctttgcatatagcggcatctcaaggaaaacagaactgtgttttgcttctgttagactatggtgcggatcccaacattagagatttggaaggtaatgtgccactatgggaggctatagtgggaggacatgaatcaatgagcaagctgttatcagagaatggagcaaatttgcaatgcggngatgtg

SEQ ID NO: 54886 - DNA, 379 bp, Glycine max
  Clone ID: LIB3109-053-Q1-K1-B7
atggcgagaggattgaagaagcatttgaagaggcttaatgccccaaagcattggatgcttgacaaactgggtggtgcatttgctcctaagccctcatctggaccacacaaatccagggaatgcctgccactcatactcattttgcgaaaccggctgaagtatgctctgacataccgtgaagtcattgctattctgatgcagcgacatgtccttgttgatggcaaagtcaggacagacaagacatatcctgctggtttcatggatgttgtatcaatccctaagacaaatgagaactttcgcctgctgtatgacaccaaaggccgattccgtcttcactcagtcatagatgacgaggctaagttcaagctttgcaaagttc

SEQ ID NO: 54887 - DNA, 380 bp, Glycine max
  Clone ID: LIB3109-053-Q1-K1-B9
gagagacgtcattaaaagaaaaatatttctctctctctctctccctctctgcattcattccttaccccaactctgtttgttcctccctcgccgccgcagaatagctcagtgaatcgcgtcgtattttggagttggttgaagggttggattggagatttgggaagaaggtacagaacgagaacgtgggtctgcaaatgcagttgttggaggtttattggttgtgtctaacaactcatatttaatttaggggtgtgtgtctttctctcctagagcctagtgaagtagaagagatgagcgtgaaaaatgatgttcctgggaaagaggtaaacgtgctgaagggtcacgagggtggtgtgttagccgcgaggttcaacacccga

SEQ ID NO: 54888 - DNA, 336 bp, Glycine max
  Clone ID: LIB3109-053-Q1-K1-C1
gatcgtgaggtgttcaagaagattctcaaggacggagtcgatggacccattttagtctaccctctcttgcgaaacaagtgggatagtcgtcattcagtggtggtgccggacagtgacatgttctacatagtagccttgctccgattcactccaccacccccaaagggcccagcagctgaactcttggtggcgcaaaataatgagattattgagttctgcacaagcagaagccttgatttcaagctatactttcctcactaccagtcacgggaggattggatcaagcactttgggaatcaatgggccagatttgcggagcgaaaggccaattttgat

SEQ ID NO: 54889 - DNA, 427 bp, Glycine max
  Clone ID: LIB3109-053-Q1-K1-C10
ggtatacatatatataatagcatttgttcgggacatgttaatgtactattgcaacaacaacaacattaacatcatctgaggttaatttgcaactacacttcctggtgtatttcaattaattcaaatggcgcaattacctccaaagatcccaaacatgtcaccaagttggccagatttctcttcacaccaacagaagatgcaattgccacctcttaataacaacggcaccatcaccaacaactatcatcagcacaatcagaacccttcttgggtggatgagtttctcgacttctcctcggcccggcgcggcgttcaccggcggtcggtgagcgattccatcacctacttggattcaccaatgaaatgtggaaggaattaaagcaacaacaacaatgggaaccagttttacaaggttgatgatgaacaa

SEQ ID NO: 54890 - DNA, 431 bp, Glycine max
  Clone ID: LIB3109-053-Q1-K1-C11
ggttgtattactactaaggaacttgggactgtgatgcggtcactagggcaaaacccaactgaggcagaactgcaggatatgattaatgaggttgatgctgatggcaatggaaccatcgacttcccagagttcctcaacctgatggctcgcaagatgaaagacaccgactccgaggaggagcttaaggaggctttccgtgtgttcgacaaggatcagaatggtttcatctctgcagctgagctccgccatgtcatgacaaatcttggggagaagctgaccgatgaggaggttgatgagatgatccgcgaggccgacgtcgatggtgatggacagatcaactatgaggagttcgtcaaagtcatgatggccaagtgaggaccattcaaccataacctaaatttgaaaagcatataaagagaagagggacagtg

SEQ ID NO: 54891 - DNA, 394 bp, Glycine max
  Clone ID: LIB3109-053-Q1-K1-C12
gatggttagcgggaggaggaagaagtgtgtgaaaaaatggcggcggcgaactctgagggtaatggtcagaaaccgagattggaaacgtttcagttattctcttcctccgcttccgccttcggaatcttcgacgatgctgcgcaacaagttcctcatatacctcctcctccctgcgttgaagtccttgcttctgaggttccttcatccatcaaacacaacgtggactctgtaaatttggatggagttactttgttaaaggtaggatctggtcatggactccctggaatctttgcattgcttgagggggcagctgctgtacattttcaagacttcaatgctgaagtcctacgtttcctcacaattcctaatttaaatgctaatctttctagagata

SEQ ID NO: 54892 - DNA, 346 bp, Glycine max
  unsure (1)..(346): unsure at all n locations
  Clone ID: LIB3109-053-Q1-K1-C3
ggaggagagagagagagagagagatggaggataagacggagaaggtgaagtctgaggcagttcagataattgaagcgtttgaagttctgccaaagctcgtggttttcgatctcgattacactctctggcctttctactgtgagtgtcgatcgaagcgcgagattccttctatgtatccccacgccaaaggcatattgttagctctcaaagagaaaggcatcgacattgccatcgcttctcgctcgccaacggcagacatcgcaaccgctttcctcaacaaattgaacctcacgccaatgttcgtctcacaggaaatatattccaatggacacatatnaccgatcat

SEQ ID NO: 54893 - DNA, 409 bp, Glycine max
  unsure (1)..(409): unsure at all n locations
  Clone ID: LIB3109-053-Q1-K1-C5
ggagcagaggcagagcataaacgttgttgtgtgtttccttagaaaagagagaaagaaataatgagctccatgggtgagagccagcagcggagcttgtttgggagtacaaaggcatcgtctctgccagtgtcaacgtcgcgttcagactctgaaggaggccttcgcagacgtctttcttctctgtctctgaagatccaattagagagcccgaattcctcctcatggtcatttcccagatccaagtccctctcatccatgggtgactatgcaaggacatggtgggactggagctgggcctggatcctctccaggaagctcatcttcgctacagatctcgaaatgaaccgaccagaaaccaagctccttgcttctcataacaggggcacttggagacatgtnttctataagc

SEQ ID NO: 54894 - DNA, 429 bp, Glycine max
  Clone ID: LIB3109-053-Q1-K1-C9
gagaatctgagagtagtgtgtggttgaaagttaagaagtagcaaagatgtttccattcgggcacaagggtcaaaagataaaggggactatggtggttatgcagaagaatgtgttggatatcaacagcatcaccagtgttgacgggatcgtcggcaccggcttagacttcttaggcagtgcactcgatacagttacttttttagcctcctccatctccatccaacttattagtgctaccaaggctgatggtgggaaaggaaaagttggaaaggctacaaatttgagaggaaagataacattaccaaccataggagctaaggaagaagcatacgatgctcaatttgattgggacagtgacttcggaattcccggtgcattttatattaagaacttcatgcaaaacgagttctacctcaagtctttaattct

SEQ ID NO: 54895 - DNA, 364 bp, Glycine max
  unsure (1)..(364): unsure at all n locations
  Clone ID: LIB3109-053-Q1-K1-D1
tggcgcaaaaggttagggagatatgcggttgagtcatacttggaacaaattttatcacatggtttcttccatgctgaccctcatcctggaaatattgcagttgatgatgtcaatggtggaagattgatcttctatgattttggaatgatggggagtatcagtccaaacattcgagaaggtttgcttgaaacattttatggagtttatgagaaagatccagacaaggttctacaagcaatgattcanatgggagttcttgtccctactggagatatgactgctgttagaagaacagcacaattcttccttacagttttgaagagcgccttgctgcacaaaggcaagagagagaggaggcaacaac

SEQ ID NO: 54896 - DNA, 262 bp, Glycine max
  Clone ID: LIB3109-053-Q1-K1-D10
gaagaaagagaggtaaatgagactggtatgccggtttccatctggtttttgccgggggttttgccaaaattgggttcaactccaatagtcccgcggatttccccttgacctcagattaaattgaaaaaccggccattaaccagttggatggttaagggtcccataattcatttagtaagggaattttaatggaaccggccttgaattcctttattccccaatttgccaattcaacctgttttaccaccaccagatattccaa

SEQ ID NO: 54897 - DNA, 320 bp, Glycine max
  Clone ID: LIB3109-053-Q1-K1-D12
tgcacaagaagatgagacattaaggaatgctgttgcagtttttaagggaaagagttggaagaaaatagctgagttttttcctgatagatcagaagttcagtgtctgcacagatggcaaaaagttcttaatccagaacttgttaaaggaccttggacacaggaggttgaaacttggtccttttctttttaatttttcctacagctttattcaagcaataacttcttttgattggcttacaggaggatgataaaattgttgaactggtgtcaaaatatgggcctacaaaatggtctttgatagccaagtctttacctggtcg

SEQ ID NO: 54898 - DNA, 313 bp, Glycine max
  Clone ID: LIB3109-053-Q1-K1-D3
acctgaaagaagctaagatctattttccatcaagagtgcgttgaaatttgtttcacagacacaaattgccttgccccggaaggctatttaacatcaactattatgaacttctacattcaatatttgcagcaacaagcattgttgacaaatagatcgttatctgcctaccattttttcaatacatatttctacaagaagcttaaagaagctgtttcctacaagcaaagtgattgagagatctttgcaaagttcagaagatggtggaaaggtgtaaatatttttcagaaagcttatgttttgattccaatacacg

SEQ ID NO: 54899 - DNA, 415 bp, Glycine max
  Clone ID: LIB3109-053-Q1-K1-D5
gaatgtgcaagagtttgttgtgagctataagctagtttatcgtgaggagaatatgaagttgtttgttttctttgttgctgcagtagttttggtagcatggccatgccatggcgcaggctaccaaaggttccctctccgaatgaaaactggctatggtgagcgttcttcggaggtaaaatgcgcaagttttaggcttgctgtggaagcacacaacatccgagccttttaaaaccattcctgaagagtgcgttgaaccaacaaaggactacattaatggcgaacaatttagatcagactctaaaacagttaaccaacaagctttcttttatgctagtgaacgcgaagtccatcacaacgacatatttatatgcggcatagattacaccgtactctctaatattccatactatgaaaa

SEQ ID NO: 54900 - DNA, 295 bp, Glycine max
  Clone ID: LIB3109-053-Q1-K1-D7
ggagcaagagtgaagagcgaagagaatggctcccaagggtttaatctttttggctgtgttatgcttctcagcactgtcactgagtcgttgtcttgcggaggataatggacttgttatgaacttctacaaggaatcatgccctcaggctgaagacatcatcaaagaacaagtcaagcttctctacaagcgccacatgaacactgctttctcctggctcagaaacatcttccatgactgtgctagtcagagttgtgatgcttcactgttgctggactccacaagaaggagcttgtct

SEQ ID NO: 54901 - DNA, 391 bp, Glycine max
  Clone ID: LIB3109-053-Q1-K1-D9
ggcaacaaagagagcaaggagagaggagatgtcggtggagcagaaagcagcagggaaggaggaggagggaaaactgcagaagggaattgcagagttctacgacgagtcgtctggcatatgggagaacatttggggcgatcacatgcaccacggcttttatgacccggattccaccgtttctgtttctgatcatcgcgctgctcagatccgaatgatccaagaatctcttcgttttgcctctctgctttctgagaacccttctaaatggcccaagagtatagttgatgttgggtgtggcatagggggcagctccagatacctggccaagaaatttggagcaacgagcgtaggcattactctgagtcctgttcaagctcaaagagcaaattct

SEQ ID NO: 54902 - DNA, 364 bp, Glycine max
  Clone ID: LIB3109-053-Q1-K1-E1
ggagagaaagagtgaggagagaattacagagcattttccaacacgattacacgaccgaatcaaaccctctctttctctccgaagctgcgtttaatatcttactcgccttagattgttcttctctttcattatactgttctcttttcgatttgagggaacagtacaagagtgtgaggatcggttaacccaactgcacaggtagtcactaaaataatggagtctcacgatgagactggatgccaggctcctgaacgccccattctttgcattaataattggggcttctttggaagagcagctaccatgaacatgtgttccaagtgttacaaggacatgctgtttgaacaagagcaggacaattttg

SEQ ID NO: 54903 - DNA, 302 bp, Glycine max
  Clone ID: LIB3109-053-Q1-K1-E10
ggtgaagaaagagactaccagttatcgagtgacaggtttatcttcttctgcttggtagcttcaattccatctacctgcttagtgttatttatattccacactgtcatcaatcagtaaacaaagttaaatctgatccttcattcccttcttccatggcagctctcactgttggccactgttgctgtagcaaaagggtaccttcatctcatcatgaattcactaacagaagcagatcacccaggatttttattctatcatcttgccatggtagaacaccagatcccaaagaaaagaaagatgat

SEQ ID NO: 54904 - DNA, 228 bp, Glycine max
  Clone ID: LIB3109-053-Q1-K1-E11
tgggatgcatacagtactgaatcatcacctcgtggggagaactctcgtgcctcacttgaccttgttacagttcttgatgtgagtggttgcatggctggttctaagctagcgttgctaaaacgagctatgggttttgtcattcagaatcttggtccatcagacctgctgtcttgcattgccttctcctccactgcacgccggatctttcctcttcggcagatgactgac

SEQ ID NO: 54905 - DNA, 241 bp, Glycine max
  Clone ID: LIB3109-053-Q1-K1-E12
gacacaaaagggtatctaaaggacacaacattggagattatggagctagaaccaaaggaaggaccggttcatgatcaatacgatgatcttgttggttctttttcttcttcttcttcttcaacatcatcttctgtttctggaatttcaagtgggtcatcattggaatctgattcttttgaagaagtaacatcctctgcctcctcttcttcatcatcagcagctgatgatcaacttgtagttg

SEQ ID NO: 54906 - DNA, 269 bp, Glycine max
  Clone ID: LIB3109-053-Q1-K1-E3
ggccaccagaggggggagagcgagagagcggagcgtattgcagaccagagagcggcacgattacacgtccgattcaaagcctctatcacgctcctaatctgcgcataatatcttactcgccttacattgctaacgtctttcattatactgttgttgatcctatttgaggttacagtacaagtgtttgaggatcggacgacccaactgcacaagctgtcactcacacgctggattctgacgatgagactgagtaccatgactatgaacag

SEQ ID NO: 54907 - DNA, 387 bp, Glycine max
  Clone ID: LIB3109-053-Q1-K1-E5
ggggacaaacaatgagaaattactaaatggtgagttttacattgggcttatacaaaagagggcaactgggcaggaatattctgaacttttgcacgagttcatgactgctgtcaagcaaaactacggagaaaaagttcttgttcagtttgaagattttgcaaaccacaatgcttttgagttgcttgcaaaatatggcacaactcatcttgttttcaacgatgatattcaggggactgcatctgttgatcttgctggggttgtggcagccttgaagctcattggaggtactctggctgaccacacattcttgattcttgatgctggagaggcaggaactggaatagcagaactaatagctcttgagatgtcatagcagacaaagacacc

SEQ ID NO: 54908 - DNA, 226 bp, Glycine max
  Clone ID: LIB3109-053-Q1-K1-E7
gtgagagacaacttttatctgatcctgctgttcaccagaacaaatgttggttttataggaagcgtatcattcatgcaatcaattgatgcacgttcatcacagtgtatcttgatactatttatctgtatctctctggtgctcatgatttatattgggatacgtaagataaaaacactgagaactgtaagaacatattgatttattgggtgggatacccacattatta

SEQ ID NO: 54909 - DNA, 426 bp, Glycine max
  Clone ID: LIB3109-053-Q1-K1-E9
ggagtttaggaagtgtttggttacttctgagattctgctgttccttagagagcgagcgatgacggtagcagcaggaatgggttacgctctgctagcgttaggaccctctctctccatcttcgtttctgtcatttccaaaaaacccttcctcattctcaccgttctctccagcacactgctgtggcttataagtttgattgtgctgtctggaatatggaggggggttttgcctctcaacacaacagcttggtggccttttggaatactcattttctcatctgttgcttttcaagaagccctcaggcttttctcctggaaaatatataagaggttacaagatatgttagatgcctttgctgatagaatatcaaaaccacatcttcacctgacagataagatgctgattgctctggctggtgggttggg

SEQ ID NO: 54910 - DNA, 387 bp, Glycine max
  unsure (1)..(387): unsure at all n locations
  Clone ID: LIB3109-053-Q1-K1-F1
gttgaagctaaatggaggcttgggcacaactatgggttgcactggtcctaaatctgtaattgaagttcgtgatgggttgacatttctagatttaattgtgatccagattgagaatctcaattccaaatatggaagcaatgttcctttgcttttgatgaattcattcaacactcatgatgacactcaaaagattgttgaaaaataccaaaactccaatattgagattcatacttttaaccagagccagtatcctcgattggttgctgaagactttntgccattgccttcaaaaggcatactgacaaggatggatggtacccttctggccatggaaatgtctttccatcattattgaacagtggcaaacttgatgcactattgtcacaa

SEQ ID NO: 54911 - DNA, 276 bp, Glycine max
  Clone ID: LIB3109-053-Q1-K1-F10
gacaaagagtgatagatagaatacagcatttcatttctcatcatcaatggctttctcttgtaaacttgacagcttcattctctctgcctataaaccccaaaactccattctcccactttcaatccaaccttcctccttccttccatctccttcttctttgaagcctcagaagcttcccttcagaattcgctatggttctaccatcagagccacgtcatcatcctcaaccccttccgcaaccattgccgaacctgaaggcattaagattaaatcgat

SEQ ID NO: 54912 - DNA, 414 bp, Glycine max
  Clone ID: LIB3109-053-Q1-K1-F11
ggaaaaagggagtgcctgataacccataaccgaccgcaccaccgttttcctttgctttgcgttctacaatgtcgaaaacctcagagattattacatgcaaagctgctatttgctggggaataggaaaacctgtgactgtggaagagatacaagtagaccctcccaaagccaccgaagttcgagttaagatgctttgtgccagtatatgctccacagacatctctagcacaaaaggattcccacataccaattttcctatagcacttggacacgaaggagttggtattatagagagtgtcggtgatcaagtaacgaatctgaaagaaagggatgtggtaattccaacatacataggcgagtgccaagaatgtgagaattgtggttcagaaaaaacccatttgtgtatgacatacc

SEQ ID NO: 54913 - DNA, 283 bp, Glycine max; identical to SEQ ID NO: 12063
  Clone ID: LIB3109-053-Q1-K1-F3

SEQ ID NO: 54914 - DNA, 319 bp, Glycine max
  Clone ID: LIB3109-053-Q1-K1-F5
ggcacaaaaatacaatacaaaacaaaacagagcaaagagagagtgtgtgaaaagtgaaacaaaaaacagaacaacaatggcgacacttaaggttcctcagcctcttccccccgttgcagatgattgtgagcagctccgaaaagccttctcaggttggggaactaacgaggagctgattgtatcgatcttggctcataggaatgctgctcagaggaagcttatcagagaaacttatgcccagacctatggagaagatctactcaaggccttggacaaagaactcacgagtgattttgaaaggctggttcatcttttgaca

SEQ ID NO: 54915 - DNA, 326 bp, Glycine max
  Clone ID: LIB3109-053-Q1-K1-F7
gatagacatcagtgtatctgatgcattgagtaggaaattccagtgtgcaactttgcagcttgacttccagcttcctgatcgttttaagttggaattctcagctgaggatgaagccaaaattgagagacctgtaatgatacacagagccatcctaggatctgttgaacgcatgtttgccatacttttagagcactacaagggtaaatggcctttctggctcagtcctcgtcaagcgattgtatgccctgtgtctgaaaagtcacaatcttatgcactacaggtgcgagatcagatccaccaagcagggtatcacgttgatgctgata

SEQ ID NO: 54916 - DNA, 241 bp, Glycine max
  Clone ID: LIB3109-053-Q1-K1-F9
gttccagcagctgagcatgatgggaagtgcaagtgtggcactaactgcacttgcacggactgcacctgtggccattaaggaatatgtatgaaaatgtaattgccatgtgtttggcaatacaaatatccaaataatgtaatcttcgtatgaataaatgtgtgtgctgttatcctacttcaggtctgtgtagtcatgcagtctgaatcatttcaaaaaactgacttagttaatataacaaaaa

SEQ ID NO: 54917 - DNA, 319 bp, Glycine max
  Clone ID: LIB3109-053-Q1-K1-G1
gagacaaagatgagaagctctaataataaccatgatgctcctgcaccttcacctctacttcaagacctgaaggtgatcatccacaatgcctccatgattttcccatccaaagagatcgagagaaagtcccttttcttgtcaaacattgacaaggtcctcagcttcgatgtggaaacggttcacttctttggtgcccacaaagattttcctcctcgtgttgtgaatgagaggctaaagaatgccctagaggatgcccttgtggtttatgacttcttgggtggaagattgaagctcaactttgacaccaaaagattggaga

SEQ ID NO: 54918 - DNA, 259 bp, Glycine max
  Clone ID: LIB3109-053-Q1-K1-G10
ggagtcgaacaagaaagaaaagaaaagaagaggaaaaggagagtggagaggaagaaaaggattgaagttgttgctgtgagaaagagaaagagtgaaatcggagtttgggaaggaattgcaatcaatggatgtgataaagacgcagcaaatctcatctcgaccaatcgagaaggtggtggttcaccctctcgtgcttctcagcatcgtcgacaactacaacagagtcgccaaagacactcgcaagcgcgttgtcggcgtc

SEQ ID NO: 54919 - DNA, 395 bp, Glycine max
  Clone ID: LIB3109-053-Q1-K1-G11
gggtaggcgaaatggaggtttgggccttggaaggatttggtgttgctcatattttacaagagatgcttacttataaatctgatcatattaaaactcgccaagaagtactcgggactacgatcattggaggaacaatacctaaacctacagatgctccagaatcttttagattgctagttcgagaattacgatctttagctatggaactgaatcatttccttgtatccgagaagaacttccggattcataggaaggaagcttaattggactgaatcagaatttttattctatgattgatcagtataaacatcaacaactccgaattggatcagtttctcctcaacaaataagtgcttgggcaaaaaaaatcctacctaatggagagatagtggggg

SEQ ID NO: 54920 - DNA, 330 bp, Glycine max
  Clone ID: LIB3109-053-Q1-K1-G12
gactcttcatttgtgttgtagtaacttgtgatgagcctgaaaagcagtgaaaggaaaattatgagaaggggtttcatgtgtcgctctcaggcttcaacagctgtgtgcatgagtactcgtgaccctcgatctgtagttgtgcctaagaagcttgaaagaagagtgtttcttgatgatacaaggttgatcaactatgccaagtactccaaacttgttgaacctccaaggtctaatccagttccaaagatcaagcttagagggcaagatcaggttcaagccaatgaaccaagggaacttctgaaaacacagacagataataatgtctttcaa

SEQ ID NO: 54921 - DNA, 378 bp, Glycine max
  Clone ID: LIB3109-053-Q1-K1-G9
ggcagcgcttgatttgaggccaggcaagccccactcaaccaccacacctctcctcgttcacgctacccctttctgctcttcttctacctttcaagttttaaaagtataaagatggcagagacattcctatttacctcagagtcggtgaacgagggacaccctgacaagctctgcgaccaaatctccgatgctgtcctcgacgcttgcctcgagcaggacccagacagcaaagttgcctgcgaaacatgcaccaaaaccaacttggtcatggtcttcggagaaatcacgaccaaggccaacgttgactacgagaagatagtgcgtgacacctgcaggaacatcggcttcgtctcaaatgatgtgggactggatgccgac

SEQ ID NO: 54922 - DNA, 355 bp, Glycine max
  unsure (1)..(355): unsure at all n locations
  Clone ID: LIB3109-053-Q1-K1-H10
gacggattcaaagtgaagttagtgcaacttcacttttagttctctctctccctggtcctttgagcttcaagaagttgttcctgtttgttgtagcagttcctgtccttaatttcttcaaccttctcaacacataaccaccttggtctgtgtttgtttgtgtgtgcttattacttggtctcttcatattgtacatataaaaattatggatgatgaatatgccaatcttattagaaggatgaacccaccaagggttgtgattgacaacaatgcctgtgaaaacgccactgttattcangttgacagtgtcaacaaacatgggattctcctcgatgttgtccaagttatatcagatatg

SEQ ID NO: 54923 - DNA, 332 bp, Glycine max
  Clone ID: LIB3109-053-Q1-K1-H12
gggtactcaaacaacactttggtgtagagcaagaactactataagtgtaggaggtgattggaagttgttcgaatccagaatccgaaaaaagggcaccaccgtgtcaacaagtagaagcagaagctgtttttgttcttcgccgctgacactaatcgtttcttcaatgccttacgagaaggaattcgccgctgcaaaaaaagcagccactctcgctgctcgtctctgcaagaaagtacagaaagctcttctgcaatccgatgtgcactcaaagtcagacaaaagtcctgtcacaatggctgattatggttcacaagcattggtcagctttatac

SEQ ID NO: 54924 - DNA, 387 bp, Glycine max
  Clone ID: LIB3109-053-Q1-K1-H9
tgctgatggggggacggatgtgggcgtatacggtgattgcataaatgggagtctctgcagagctgaacacgcgctcaaacgatgatactgctaatactcatgatgagctattgcggtcgaccctgtcagcatatgaccatgttgttacctgatctgaagccggagaatgagtgttgccacttataacgacgacgaggacaacgctcaatggccattgaattgtgatgcagtctgactatgtaaagccacctgagacgttgagtgatattgcagggcgtggttaatacgtggcttgagaccttttgcatgtatcttatgggacacaggcaagaatagcagagcattgctgtaagtgcttatattaccagatgcggaaaacagcccttt

SEQ ID NO: 54925 - DNA, 348 bp, Glycine max
  Clone ID: LIB3109-054-Q1-K1-A1
ggtgaaaggacatatttggggaggcagtcagaaggcagctctgatgcatatgagacagatgacaataataatcgtacaccttcacattctttgccaaaagattccaaacctttactaagatttaaattcaagaaacccagcattgaaagtcaaaattctcctcatcaggaggaagagaagatgacaatcaagggccagaggtcaaaaaggaagagaccttcaccttttaaggagaaagcatcttttaatgagtctgaaggtgtaagtcaatcacatcaagacagtgcaatggatgggataatggatgcaaactggatattgatgaaattgggcaatgatgcaattgga

SEQ ID NO: 54926 - DNA, 426 bp, Glycine max
  Clone ID: LIB3109-054-Q1-K1-A10
gattcgggcacggttataacccggttcgtggaggccgtttacaacgcggtgagggaggagttcaggaagcaggtgggaggcactacattcacgagcattggagccttcgatacgtgttttgtgaaaacctacgaaactctggcgccgccaattacgctgcacttcgaggggttggacctgaaactgccgttggaaaacagcttgatccacagcagcgcgggttcgctggcgtgtcttgcaatggcggtggcacccgacaatgtgaactcggtgttgaacgtcatcgccaactttcagcaacagaaccttaggaatttgtttgataccgtccataataaggttggcataacccgtgaggtttgtaactagctggttggctacatttttatttatttatttattaatatgtaccagtggctttcttga

SEQ ID NO: 54927 - DNA, 438 bp, Glycine max
  Clone ID: LIB3109-054-Q1-K1-A11
ggtgactaacataaaataattagagagagagagagagagagaggatatgggttcgaagaggtatgcgctattgatgtgcggtgaggattcggagtacttggtgaagatgcacggaggcacctatggggtattcatgaagttgctccaagagcaagaggaaaagtgggacctctacaagctcgtccaaggagagttcccggagcagcatgacttgcctctctacgatggctttgtcatcagtggaagctgctatgatgcacatgccaatgacccatggatccttgacctcattgctctcgttatcaaattggactccatgcacaagcagatccttggcatttgctttggccaccagataattgggcgtgcattgggaggaaaagtgggtcgctctcccaatggttgggacattggtgttaaagctataaacgtgtcatt

SEQ ID NO: 54928 - DNA, 237 bp, Glycine max
  Clone ID: LIB3109-054-Q1-K1-A12
gggtcccagttgtggatgagtggaatcttctgcacagggccgagtatgataacctgaagcttgaaatgccgtggtatgtggcggaatacttctaccccttggccggaataaggctcataagggaggacttgaattacaagaacaaacccatcatccctgtgctcaaccctcaaggaagagtggtcaactacaatgccatgcacatgattttcgtctggggcatcgatgcattccctt

SEQ ID NO: 54929 - DNA, 323 bp, Glycine max
  Clone ID: LIB3109-054-Q1-K1-A2
gttcccaacatgattagtggtgcatctcaagctgatattggggtgttggttatttctgctcggaagggagagtttgaaactggatacgagagaggtggacaaactcgtgaatatgtccagcttgcaaaaacgctgggtgtgtctaagcttcttgttgttgtcaataaaatggatgagcctacagtgcaatggtcaaaagaaaggtatgatgaaattgagtcaaagatggttccatttctaaagcaatctggatacaacgtaaaaaaagatgtcttgtttttaccaatttctggtctaatgggtgcaaacatgaaaacaagagt

SEQ ID NO: 54930 - DNA, 387 bp, Glycine max
  Clone ID: LIB3109-054-Q1-K1-A3
ggctggcgatggaaactatgctcacaacaagtgacagagacagagtagaaccaaaagattcataataactaacattagaaactaggtgaaagtaactgcacagacacacaacacatcttccttaatttctccgtccatttccctcccataaataaatctttcatttccatctttcttgggtgatccaatggcgacccttttccagggattgggagttgtgaacccatcattggcttcttcaaactccaacaagttccatcttccttctcgtacatccctctcagagaggaaagatggcatttttgtggtcagatctgatgcaacaagggtaagcagccaagttctgaaagctggagctcgtaagcatgaattgttagttactaatgc

SEQ ID NO: 54931 - DNA, 384 bp, Glycine max
  Clone ID: LIB3109-054-Q1-K1-A4
ggaacaagaaacgcgtctggatttaacagttgtagagagaaggaagaagatggtgcttccgcaagatttgataactgaaatcctgttaagattgccggtgaagtctctagttcgtttcaagagcgtgtgcaagtcatggctttttctgatatctgatccccgctttgcaaaatcacattttgaactagctgcagcacttgcagatagaattttgttcattgcatcttctgctcctgaactccggtccatagacttcaacgcatcacttcatgatgactctgcctctgttgcagtaacggtggaccttcctgcccccaaaccctattttcactttgttgaaataataagttcctgcagaggctttatacttttgcactgtttatc

SEQ ID NO: 54932 - DNA, 399 bp, Glycine max
  Clone ID: LIB3109-054-Q1-K1-A5
gtgaaaacaccacaaagggggtggggatgaaaactaatcttacaacacgtgggtgaggcggaatgtaaccaccggattaataataactttcatttgcaactatgtgattgtaattgaactgacactccatacatatatattaaattatacgcccatataccttcgattaataaatctttcattaacatcttttttgggtgatccaatagagactcttttccatggataataagctgtgaacccttcatgggcttcttataactataacaagtactatctttcttatctaacatccttctaagataggaaagatcgcatttttgcggtcagatctgatgcaacaactggaaacaatcactttctaaaaacaggatcttataaacatgaattgttcattac

SEQ ID NO: 54933 - DNA, 387 bp, Glycine max
  Clone ID: LIB3109-054-Q1-K1-A6
gtgagaaaatatagggaaaagaaaggtgtttgatgtaaagctaaacaaggaagatatatggaaaagattaataggtgagaaataaagtgaaaataactagtgggtctcttgccttttttatttcccacctatttcttattggcttaatgtcacttttggtctactatatttcagagttgttttgctttggtacatcaagttttaaaagtttcattctaatcatttttgttttcgaaatatatcgttttggttcttttttcaatttttcgttagaaacgttagtgttctggtaacctttaaattttaaaaaaggaccaaaatgatacattttgaaaacataaaaggacgaaaatgaaacttttaaaacttaatgtatcaaagtgaaac

SEQ ID NO: 54934 - DNA, 291 bp, Glycine max
  Clone ID: LIB3109-054-Q1-K1-A7
cacccctccgagcggatgaaactttacgacagaaagaggaatgatgcagaataaatactctccattaatatgtaattggataggaatctcatgcacaagatgacatcaactactggcaggagaaaagaatggccaaagacgcaaaagtatgagcttgaactgttcatgcacatacaccacggatattgaacaaccgacctatactgttgattatcggatcctgcaacaatggtaaacgcacgctattatcgctagagacctgtgatgactcatatgatgctgaagcatcta

SEQ ID NO: 54935 - DNA, 363 bp, Glycine max
  Clone ID: LIB3109-054-Q1-K1-A8
ggttagggagcccgtggagcaattacctatggaagaggatgaaatattatccccacgggaggaggaagaatcaattgatgaggttggtagttggtacttaacagttatcggtcttgtttggtttcattttatctcttcttcgtgtcatgccaatttccttcattttctttattatgctcgctttgatttctgattttgcacatcttgaattgggttcatacatgtatacttgtcaacatttgtattcattgttaaccatgtggaataacattgtgtgatccatgtagccggtcttacctagtgggataaggttttgttgtatagaagtgtgaaagttctaaatacacaagatagagaatttga

SEQ ID NO: 54936 - DNA, 437 bp, Glycine max
  Clone ID: LIB3109-054-Q1-K1-A9
gattcgggcacggttataacccggttcgtggagcccgtttacaacgcggtgagggaggagttcaggaagcaggtgggaggcactacattcacgagcattggagccttcgatacgtgttttgtgaaaacctacgaaactctggcgccgccaattacgctgcacttcgaggggttggacctgaaactgccgttggaaaacagcttgatccacagcagcgcgggttcgctggcgtgtcttgcaatggcggcggcacccgacaatgtgaactcggtgttgaacgtcatcgccaactttcagcaacagaaccttaggattttgtttgataccgtcaataataaggttggcatagcccgtgaggtttgtaactagctggttggctacatttttatttatttatttattaatatgtaccagtggctttcttgattagctaacta

SEQ ID NO: 54937 - DNA, 381 bp, Glycine max
  Clone ID: LIB3109-054-Q1-K1-B1
gatggtgaaacatggcaagctgaagttccagagattcagggaaacaagttgagagggggccctcagatgattcaattgagtttagatgggaagcggctctatgctaccaactcactatttagtacttgggacaaacaattttatccagagcttgtccagaaaggctcccacataatacagattgatgttgatactgagaaaggtggactgaaaatcaaccccaacttctttgtggactttggaactgagcctgatggtccttctcttgcccatgagatgagatatcctggtggtgactgtacttcagatatatggatttaaacatacgtgtcattatttccctttaataaacggatctgtcatatggttgtaatgagctac

SEQ ID NO: 54938 - DNA, 275 bp, Glycine max
  Clone ID: LIB3109-054-Q1-K1-B10
gtacaaggacaagagtattgtcggaaatgacgggggtgaaggagctgttgaagatttaatagtagcaactaatgcaattgtggtgcctgtgggagctgctttggctattgctgttgctagctgtgcttttggagcacttgcttgctactggcgttcgcagcaaaagagtcggaagtattttcaccacctacactctctaaagaacatttgataattaggagggcctagaagaacgtggaagtaggaaattggaaaaaaggtacactttaaaggca

SEQ ID NO: 54939 - DNA, 420 bp, Glycine max
  Clone ID: LIB3109-054-Q1-K1-B11
ctgagattggttgggtgaagctgaacgtggatggttcacgcgacccatacaaaagttcctccgctggttgtggtggtgttctgagggacgcatcagcaaagtggctccgtggctttgctaaaaaactgaaccctacttatgcagtgcaccagacagagttagaagccattctcacgggcttgaaggtggcttcagagatgaatgttaagaaactaattgtggagtcagacagtgactctgtggtgagcatggtggagaatggggttaagcccaatcaccctgactatggtgtcgtggaacttataaggacgaagcggcgtcgttttgactgggaagtgaggtttgtttctgtctccaacaaggcgaatcgtgtggctgataggctcgccaacgatgctcggaaattggcttgtgatgatg

SEQ ID NO: 54940 - DNA, 423 bp, Glycine max
  Clone ID: LIB3109-054-Q1-K1-B12
ggagcggcggggcagaggaaggggcagagttttggagtttgaaagagaaaatattgattgcagttgagttctaatgagtaacgaatacgattacctgttcaagcttctcctaatcggagactcttccgttggaaaatcctgcttgcttctcagattcgctgatgactcctatgtcgacagctacataagtaccattggagttgatttcaaaatcagaacggtggagctggaagggaaaaccgtcaagctgcagatttgggatacagctggacaggagcgattcaggactataacaagcagttattatagaggagcacatggaattattattgtctatgatgttactgagatggaaagctttaacaatgtcaaacagtggttgaatgagattgacagatatgcaaatgacactgtatgcaagct

SEQ ID NO: 54941 - DNA, 387 bp, Glycine max
  Clone ID: LIB3109-054-Q1-K1-B2
ggtaccaaaaacaaaacaagccaagtgaaagagagaagaaaagtcaaagacaatgtcagggatcattcacaagattgaggagacccttcatgtgggaggccacaagaaggaggaggagcacaagggtgagcagcaccatggtggagaatacaaaggggagcatcatggtgaacacagtactgaatacaaaggagagcatcatgttggtgagcacaagccggagcaccatggaggagaagagcacaaagaggggttcctagacaagatcaaggacaagatccacggcgaggagggtggcgccaccgccgagggcgagaagaagaagaagaagaaggagaagaagaagcatgaacatggccatgacagcagcagcagcagtgacagtga

SEQ ID NO: 54942 - DNA, 351 bp, Glycine max
  Clone ID: LIB3109-054-Q1-K1-B3
gattcaattgtgattcttattagagatatccctgatgctaaggaaagtgggttgcttcatctttgtgagtttattgaagattgtgaattcacttatttgtccacacagatgctgcacttcctgggagttgaaggaccaaaaacttctgaccccagcaaatatattcgttatatttataacagagtacatcttgagaatgcgactgttagggccagtgctgtgagcacattggcaaagtttggtgctgctgttgatgcactaaagccccgcatatttgtactgctaaggcggtgtctttttgatagtgatgatgaggttcgtgacagagcaacactttatctgaacacactt

SEQ ID NO: 54943 - DNA, 298 bp, Glycine max
  unsure (1)..(298): unsure at all n locations
  Clone ID: LIB3109-054-Q1-K1-B4
gtatcagagagagtgagagaagagagagaatatttctgttcgtgcagatagatagatagatggctcggagctccacaagaatgaaatgggtctccatcttcacacttctattcctctcccactcgcccctcacaaccttcgcagaagatgggctagtggcgaatggagattttgaggttagcccatcaagtgggttccctaacgaggcgattgtggagggccccagcgaggtcccaaactggaagtcaaacggcaacgttgagctagtggaatcggngcaaaaacagggtgggatgat

SEQ ID NO: 54944 - DNA, 335 bp, Glycine max
  Clone ID: LIB3109-054-Q1-K1-B5
gacagaacaatagtagcaagcagagccccaagacgagcttcaccttgcgccgaagggccacagatggttgaaaccgatatggatgccgaaactgttgcaaatgtggttccaccaaaggagactccaaacagtgttcccatctcttatcattcctcacactcacaccctcctgttaatgagaggattatttcatccatgaccagaagatctgttgctgcacacccgtggcacgaccttgagatagggcctggtgctccaacgatcttcaattgtgtgattgagattgggaaaaggagcaaggtgaaatatgaactggacaaaaaatcgggtcttat

SEQ ID NO: 54945 - DNA, 362 bp, Glycine max
  Clone ID: LIB3109-054-Q1-K1-B7
cacacaagtgggacaaggaaagtttgttatttccaatagaatatcttttcccatgtacatgaacttaccgatatctgattaaatgcaggtggctgcaagttttgcgtcagaaggatccgtaatgaatgagttgaagcagtggaatgatttgtatggagaaggaggttcaaggaagaaacaacaactcacttacttcctatagattgtggaatgctacttttatttttggttttgtgaccattcatcctcaacgatacatttcaacaaaggaaggaatccttcaccagagatgttgaattgaaagcatgccgaaatgtcagagatcttatgattcccagaaaagctcgagttcttgcacacac

SEQ ID NO: 54946 - DNA, 192 bp, Glycine max
  Clone ID: LIB3109-054-Q1-K1-B8
ggaggagggaatgggggtactcacaatccggagacatcttttcttactccatcgaagccggtgatttggattacacacatttttgtatttgacagctccacactaacatataatggtaacattacattcatcagaacggctgcattactgataaaagaagccatacaagccatcagtgggggccatgaatac

SEQ ID NO: 54947 - DNA, 434 bp, Glycine max
  Clone ID: LIB3109-054-Q1-K1-B9
gtacaaggacaagagtattgtcggaaatgacggaagtgaaggagctgttgaagatttaatagtagcaactaatgcaattgtggtgcctgtgggagctgctttggctattgctgttgctagctgtgcttttggagcacttgcttgctactggcgttcgcagcaaaagagtcggaagtattttcaccacctacactctctaaagaacatttgataattaggagggcctagaagaacgtggaagtaggaattggagacaagtacacttcaaggcatgaggtgcatagcagctttcataggcaaccaattattatggtctcactccaaagagccttgccaaagttcctttttgaatctatcctgaatagaaaaatgtacagaatacaattcttgatttggagaccattactgatctgtgctattttctttcacttttt

SEQ ID NO: 54948 - DNA, 356 bp, Glycine max
  Clone ID: LIB3109-054-Q1-K1-C1
gaagacaagagtgattagggttttggtttggtgtttttcttaagcttgagatcaggaattaatttcagaggttcagagaatggcaacggattcttctaatggtaatggacatcaccaaacaacaacaaagcaacctcctttgccgtctcccctgcgcttttccaaattttttcagtccaacatgagaatcttggttactggaggagctggattcattgggtctcacttagttgacagattgatggaaaatgaaaaaaatgaggtaattgttgctgacaactacttcactggatccaaagacaacctcaaaaaatggataggtcatccaagatttgagcttatccgtcatgatgtca

SEQ ID NO: 54949 - DNA, 430 bp, Glycine max
  Clone ID: LIB3109-054-Q1-K1-C10
gagagtgagaaagagaaagagagaattcgtgaggcctaatttcggaaagatcggcgatgactgcctccaaggatcgcgagaacttcgtctacatcgccaaactcgccgagcaggccgagcgttacgaagagatggtggaatcaatgaagaacgttgcgaatctcgacgttgaactgacggtggaggagcggaatttgctttctgttgggtacaagaatgtgattggtgctcgcagagcgtcctggaggatcctgtcttccattgggcagaaggaagaaacaaaagggaacgagttgaatgcgaagcggattaaggagtacagacagaaggttgaattggagctatcgaacatctgtaatgatgttatgagagtgattgatgagcaccttatcccttcggctgcagctggtgaatccactgagttgtacta

SEQ ID NO: 54950 - DNA, 423 bp, Glycine max
  Clone ID: LIB3109-054-Q1-K1-C11
gacattttcccccctacaaaaagatccattgaagctttctctgagcatttcaccaaggaaggattggtggccttggtggagtataatgaaaagaaaatttttgaggtgaaacttaaggaaatgaagtcttctttaacagcacagataacagaggaggctgatacatctgaagtcattgagactgtgaagctgcgagttagagatgctaaattgccggaaattgaggtggtgcggatcttgtgggatgttttaatggatgctgttcagtggtctggaaaaaatcagcaacagaatgcaaatgcagcccttcgtcaggtaaaaacttgggcagaattgttgaatacattctgcaccagcgggaaacttgagctggagctgatgtacaaagtacagatgcaatgctatgaggatgctaaactgatg

SEQ ID NO: 54951 - DNA, 430 bp, Glycine max
  Clone ID: LIB3109-054-Q1-K1-C12
gagagtgagaaagagaaagagagaattcgtaaaccctaatttcggaaagatcggcgatgactgcctccaaggatcgcgagaacttcgtctacatcgccaaactcgccgagcaggccgagcgttacgaagagatggtggaatcaatgaagaacgttgcgaatctcgacgttgaactgacggtggaggagcggaatttgctttctgttgggtacaagaatgtgattggtgctcgcagagcgtcctggaggatcctgtcttccattgggcagaaggaagaaacaaaagggaacgagttgaatgcgaagcggattaaggagtacagacagaaggttgaattggagctatcgaacatctgtaatgatgttatgagagtgattgatgagcaccttatcccttcggctgcagctggtgaatccactgtgttttacta

SEQ ID NO: 54952 - DNA, 367 bp, Glycine max
  Clone ID: LIB3109-054-Q1-K1-C2
ggactgaggggtttaagagcataagtggcttgtgcggttgagctgaacactcagttgttgaaccatgctttctcgcactcgcacctttcctctcatttccctcgcttccaaagtgtgtgcccctccactggaagccctctactccacccacattgtcggcgacaagcccgttctggttcgggattttattcattctgcactctaccatccgttacatggctacttctcccaaagatcgcggtccgttggagttcttcctaatgctattaagttcaaccaacttcaaagccggaaagcttatatgaagtacttggataatatttacaagcagagtgacatatcatggtttacaccagtgggacttttt

SEQ ID NO: 54953 - DNA, 375 bp, Glycine max
  Clone ID: LIB3109-054-Q1-K1-C3
gacggctaaaagctaaaaatcatcgaagtactcaaattagcatggctgtcacggttgcattcttgaatttgatcatcatgttttcagtagtctctacaagcaagtcactgagcttaaactactattcaaaaacatgccctgatgtggaatgcattgttgccaaggcagtgaaggatgccactgctagggacaaaactgttccagctgcacttctgcgaatgcacttccatgactgtttcgttcgggggtgtgatgcctctgtgctgctaaattcaaaaggaagcaacaaagcagaaaaagatgggccaccaaatgtttctttgcatgcattctatgtcattgatgcagcgaagaaagcactagaagcttcatgcc

SEQ ID NO: 54954 - DNA, 275 bp, Glycine max
  Clone ID: LIB3109-054-Q1-K1-C4
ggatctaaggataacgttagaaaaatagacaggtattgttagtcatatgatagaaattgcactatgatagttgtatttgtattatgacttcaaaaataccaaaataagtcatggtggtatttatttcatgaagttttgctgaagtaaattccagggtacaagtgttaactgttaactagagatacctgaaggctgatgctcaaaaaggcaaatatattcatttttttaattttttcataaaattatattttacagctcaacaaaattaaatatca

SEQ ID NO: 54955 - DNA, 389 bp, Glycine max
  Clone ID: LIB3109-054-Q1-K1-C5
gggggaaagcaagagtagtgacagagagaggcgaggatcgttcacataaaacatcgacagagatcgacgaggaaaagctaagcctaacaatgtggagctccaaaacgacattgatgtttggcgtcgcagccattgctctgatgatgtttctctcatctgcttcagcggacgacgtcgttgcactcacagaggaaaccttcgaaaacgaggttggcaaggatcgtgccgctctcgtcgagttttacgctccctggtgtggacactgtaaaaggcttgcaccggagtacgaacagctcggaacgacttttaagaaaacgaagtccgttttgattgccaaggtggattgtgatgaacagaaaagtgtttgtagtaaatatggggtatctggt

SEQ ID NO: 54956 - DNA, 397 bp, Glycine max
  Clone ID: LIB3109-054-Q1-K1-C6
gggagaaggtaattgggatgcatgacacaaaaagcgtttgcataagggcactagcaaggttgccagtggtgatacccatatggttcttggccataatcttccctttctttgggcccataaactctgcagttggagctcttctggttagtttcacagtctacatcattcccgccacagctcatatgcttacttacagaaaagcctcagccagacagaatgctgctgagaagcctcctttctttatgccaagctggactgcaatgtatgtcttcaatgcattcattgtggtgtgggttttggtggttgggtttgggtttggaggatgggccaacatgaccaacttcgttaagcaaattgacacatttgggctctttgccaaatgctaccaatgcaagcc

SEQ ID NO: 54957 - DNA, 389 bp, Glycine max
  Clone ID: LIB3109-054-Q1-K1-C7
ggattctccaacagccacaaaaagcagaacagatgatggtcttatatgggtgagtcaatggaactctttgcaacatcctgttgcatctgcattcttagctgctgtttacagtgactatatgctaacatcgcagacaccaaaactaaaatgtgattcagattcctttaccccatcagatcttcgagactttgccaaatctcaagctgattacgtattgggcaagaatcctatgcatatgagttttctggtgggctatggagataaatacccacaatttgtgcatcataggggtgcttcaattcctgctgatgcaaaaactggctgcaaggatggcttccagtggcttgaatcatctgatcctaatcccaatgtagctactggagcacttg

SEQ ID NO: 54958 - DNA, 387 bp, Glycine max
  unsure (1)..(387): unsure at all n locations
  Clone ID: LIB3109-054-Q1-K1-C8
ggcattttaagaggcaataaggggcacaagatcaagggtactgtggtgttgatgagcaagaatgtgttggacttcaacgaaatagtgtccactactcanggtggtttggatggtgctgccaccaccatcttcggtgctgacaccgatattgatggtggagttgtcaatggagctactgacatcttcagtcgcaacattgccatccagttgatcagtgccaccaagactgatggacttggaaatgggaaagttggaaagcaaacctatttggagaaacatctttcttcgttaccaaccttgggagacaggcaagatgcattcagcgtttattttgaatgggataatgattttggaattgcaggagcattttacatcaaaaattttatg

SEQ ID NO: 54959 - DNA, 312 bp, Glycine max
  Clone ID: LIB3109-054-Q1-K1-D1
ggaggttgaagtgtgttgtgttgtggcaaagctcagaaaaagagagagagattgaagaagcgatttttttatatgaaattttgaagagtgaatgaaaaatctcaatcccatggatgagcaattgaatttgagctgaatcggcgtcgtttcgatttctctcagtcacacactactgactcggccagattcaagtaaacgcttcttctcagcaaaccctagatattggagattgctgtgatgacatcttcacctacctatctgcatgcagggctgaattggtacctctgggttttatctcatgctattttaagt

SEQ ID NO: 54960 - DNA, 412 bp, Glycine max
  Clone ID: LIB3109-054-Q1-K1-D10
ggagcagaggaagaacaaaggagaagagaaaaaatggtgggtaatgaaatagtagtaccaatggacgacaaagcgaagaggatgcgagatctgctatccagtttctactccctagacccttccatctccaacaccaccttcaaacacgcttctctcgacgacatcaattccacctccttcgatcccgatcagtacatgaacattctggcacacaagtccaatttggaaggccttctacaacgccacgttgcaatggctgctgaaatcaagaatctcgacaccgacttgcaaatgctagtttacgagaattacaacaagttcatcagtgccacagacactataaagaggatgaaaagtaacatttcggggatggagacgaatatggagcagcttcttgagaaggtaaccgtag

SEQ ID NO: 54961 - DNA, 373 bp, Glycine max
  Clone ID: LIB3109-054-Q1-K1-D11
ggaggggacgaggaacatagtagaagagaaaaaatggtgggtaatgaaatattagtaccaatggacgacaaagcgaagaggatgcgagatctgctatccagtttctactccctatacccttccatctccaacaccaccttcaaacactcttctatcgacgacatcaattccacctccttcgatccctatcagtacatgaacattctggcacacaagtccaatttggaaggccttctacaacgccacgttgcaatggctgctgaaatcaagaatctcgacaccgacttgcaaatgctagtttacgagaattacaacaagttcattaatgccacagacactattaagaagatgaaaagtaacatttccgggattg

SEQ ID NO: 54962 - DNA, 403 bp, Glycine max
  Clone ID: LIB3109-054-Q1-K1-D12
gagaagaaggaggagctttgtgctgatcttgagcttaatcaagttatagatcgtaatgttggtgatctttcgggtggtgagctccaaaggtttgccattgcggttgttgcgatccagaatgctgagatatacatgtttgatgaaccttctagttatcttgatgtgaaacagaggctgaaagctgcccaagttattcgatcattgcttaggcctaatagctatgtaattgttgttgagcatgatcttagtgtcttggactacttatcggactttatttgctgtctatatggtaaacctggtgcatatggagtggtgacacttcctttctcagtcagagaaggaattaacattttcttggctggctttgttccaacagaaaatcttaggttccgtgatgactcac

SEQ ID NO: 54963 - DNA, 384 bp, Glycine max
  unsure (1)..(384): unsure at all n locations
  Clone ID: LIB3109-054-Q1-K1-D2
gatgaaaaagaaggatggtgatcatgatgacgacgaagatgaggatggtcctcgtgaagcaaatccagaggggagagtagaaaagtacattggagtgaaagtgaaggtctcatttactggacaaggggagacacagtccatgaagcagttgtctgggggtcaaaaaactgttgtcgcccttacacttatctttgccatacagcgatgtgatcctgctcccttttatctatttgatgagatcgatgcagcgctggatccacagtacagaactgctgttggaaatatgattcgtcgcttggtgacatagcaaacactcaatttatcacaacaacattccgnccggagctagtgaaagttgctgataagatatacggagtaacacat

SEQ ID NO: 54964 - DNA, 385 bp, Glycine max
  Clone ID: LIB3109-054-Q1-K1-D3
ggacatagagagggaaggatggcagtggcagagattctaaaccttggaggcccgccaagcttaagtgggaggaaactgccgccatgccgttcgaattcccaaaactggacttgtttgcagcacaagctcaagtgcaacggcagattcctttgccttttctccgacaacagaaaggaggaacaagccagaaaagcattagaaggtgcactaagtgggaagaaaaatgaatttgacaaatgggacaaggaaattaaaagaagagaagagctgggaggtggaggtgacactggtggaagtggttggtttgggtgggggtaatggtttggctgggctaatgatgataatttttggcaagaagcaaaacaagctattcttactatacttg

SEQ ID NO: 54965 - DNA, 392 bp, Glycine max
  Clone ID: LIB3109-054-Q1-K1-D4
gatcatttatttgtcatccaattttcgctctttcggtctctccaaattgagttcagagtcaccaccgaatccgttcctacaatggcgacggtgacgttttccttttccgctaaaaccttaactctaccctatcaccccaaaacctcaatctcgagcttcgctccggtaacgaatcttcgcctctctcattctatcgtcacccgaacccgaaattgtaaccggattcgggcggcgctggatggggatttctcggcgaaaaggagcaacaacaacgagcagagggagacgataatgttgcccggctgtgactacaaccattggctgattgtgatggagtttccaaaggaccctgcacccactcgtgaacaaatgattgacacttacctcgacac

SEQ ID NO: 54966 - DNA, 384 bp, Glycine max
  Clone ID: LIB3109-054-Q1-K1-D5
gagtgttgagctgtgtgacatgtaacaccaaactcactcaaacttacctttgtttttctcctttttctcagtttcattctcttgctcgtggacatggatgtttgccgaaatgtatcagtttcttcaagtgagtgtcagcaagagcttcccacccttgatgaccttttctctcatcagaacacggaagtggattttggcctggaatggttatcagtgtttgtggaagactgtttctctagtaggccaagctgcctcttggcacctggtggtgttcaaaccacaagcactagcacaagcaccaagccttcttcaggcactatattgcaaagaccccaacaattaagtcatcactgtcctttgcagaattttgctgtgccagggaaa

SEQ ID NO: 54967 - DNA, 104 bp, Glycine max
  Clone ID: LIB3109-054-Q1-K1-D6
ttattttttagctgtgtgacatgtaacacccggcggactcaaacttacctttgaatctctcactttatctgagattcattatattgctcgtggacataaatgtt

SEQ ID NO: 54968 - DNA, 385 bp, Glycine max
  Clone ID: LIB3109-054-Q1-K1-D7
ggaagaggggagcgcaaggaacttgataggatctatgattatgatgtctataatgatttgggcaacccagacgagaatgacgatctagctcgtcctattcttggcgggtctagtaagcatccataccctcgcaggggaagaactggtagaaaaccaacaaagaaagaccccagatgtgagagaccaaccagcgacacttacatcccgagagacgaaaattttggtcacttgaagtcatcagacttccttacatatgcaataaaatccttaactcaaaacgttttacctcaattcaacactgcatttggtttcaataatgagtttgatagcttcgaggacgtgcgttgtctctttgatggcggagtttatctccctacagatgtac

SEQ ID NO: 54969 - DNA, 324 bp, Glycine max
  unsure (1)..(324): unsure at all n locations
  Clone ID: LIB3109-054-Q1-K1-D8
ggccattgttgctggcatcatcccgagctgctgttattcgcaccgcaaacaaacagtgagccatgggcggaggaaagaacacgcgcatgtgcaaacggaaaaagggtggtaagaagaagcagctgatccattgccaagaaggattggtatgacattaangcccgttatatttttgaggtgaaaaatgttggcaaaaccgtggtatttcgtacgcagggtaccaggattgcttctgaaggacttaaacatagagcgcttgacgactacttggctgatcttgatggggatgaggatcatgcattgaagaagattatgttgagagct

SEQ ID NO: 54970 - DNA, 412 bp, Glycine max
  Clone ID: LIB3109-054-Q1-K1-D9
ggagcagaggaagaacaaaggagaagagaaaaaatggtgggtaatgaaatagtagtaccaatggacgacaaagcgaagaggatgcgagatctgctatccagtttctactccctagacccttccatctccaacaccaccttcaaacacgcttctctcgacgacatcaattccacctccttcgatcccgatcagtacatgaacattctggcacacaagtccaatttggaaggccttctacaacgccacgttgcaatggctgctgaaatcaagaatctcgacaccgacttgcaaatgctagtttacgagaattacaacaagttcatcagtgccacagacactataaagaggatgaaaagtaacatttcggggatggagacgaatatggagcagcttcttgagaaggtaaccgtaa

SEQ ID NO: 54971 - DNA, 427 bp, Glycine max
  Clone ID: LIB3109-054-Q1-K1-E10
ggcagccactctgtgagagaaagagatagtgtggtagagagagaggagcggaggagagaaaatgacgacgaggttcaagaagaacaggaagaagagaggccacgtcagcgccggtcacggtcgtatcgggaagcaccgcaagcatcccggtggtcggggtaacgccggtggcatgcaccaccaccgcatcctcttcgacaagtaccatcccggtttcttcggaaaggtgggtatgcgctacttccacaaactccgcaacaaattctactgccccatcgtcaacattgataagctatggtccctcctaccccaggaggccaaggacaaggccaccgccgacaaggcgccattgctcgatgtcacccagttcggttactttaaggttttgggtaaaggggttttgcctcagaaccagcctctggtcgtg

SEQ ID NO: 54972 - DNA, 424 bp, Glycine max
  Clone ID: LIB3109-054-Q1-K1-E11
gctatctccgaaggtgcaacatcctttcttttcagctgaatatcaatatgtggggatcttcatggttgcttttgcaatactgatcttcctttttctgggctctgtggaaggcttcagtactaagagccagccctgcacatatgataagagcaagctatgcaagccagcccttgcgactgcattgtttagcactgtatctttcttgcttggtgctataacttcagtcctatctggtttccttgggatgaaaattgcaacctatgccaatgcaaggacaaccttggaagccagaaagggagttggaaaggctttcattactgcatttaggtctggtgcagtgatgggtttccttcttgcagcaaatggtcttttggtgctctacattaccatcaatctcttcaagctatattatggtgatgattgg

SEQ ID NO: 54973 - DNA, 280 bp, Glycine max
  Clone ID: LIB3109-054-Q1-K1-E12
tttggctttatacgaagatacaacatcctttcgtttcgctgaatatcaatatgtggggatcctaatccttactttagcaatactaatcttcctttttctggactctgttcaacgctacactactaatatccatacatacacatatgataatatcatgctatactagccattccttgctaataaattatatatcactgtatatttctagctttattctattaacttcaatcctatcttatttactttatattaaaattgcaacctatactaatacttatac

SEQ ID NO: 54974 - DNA, 392 bp, Glycine max
  Clone ID: LIB3109-054-Q1-K1-E2
ggagcagacaaagactatatctaaattcatctggtaggagacaaggtagtgaaattgttatttttgtctacctggagtccatatagcaagaagatatttgcctggatcatcaggctctcgtgtgtcccactgtaatgcacaaataattaataaaagatgaacatacagggtaaagcatagctttgattaatagatacatcaatttactaaccccttgtagaagaggatgcgtatctgggagttcataactgtacaagagtaaacacaatcaacataaattgttagaaatttcccctacgttagcatggtggttgtgatgtctgctaaactctctggttttattacatgcaagattcttttacactcatatttgaatattggtggatttataa

SEQ ID NO: 54975 - DNA, 177 bp, Glycine max
  Clone ID: LIB3109-054-Q1-K1-E3
cgggaagaggagtggggcacaatcagatcgagattgaagtctgcacttctcgcaactgcaaatactatgactctttctctcactgtgatggatccttcatcagacgaacaagcaaacatacaaacacacataagatgaatttcctgatgcgctccaccacacacgtctactccgaca

SEQ ID NO: 54976 - DNA, 164 bp, Glycine max
  Clone ID: LIB3109-054-Q1-K1-E4
gggctttcatttgatttgatccaaggccaatcctctataataacaacgagaagtgatacaaacaataaatgatgagttcgatagtctcataagatttagctttcattaactgacacatatattgtattaaattaaaaagcctcaatgttgtgaagatatactta

SEQ ID NO: 54977 - DNA, 383 bp, Glycine max
  unsure (1)..(383): unsure at all n locations
  Clone ID: LIB3109-054-Q1-K1-E5
ggggctcagcaagtatttccaggcaattgtgacagaagaggatggaatggagtcaatagctcatagatttctttctgctgctgtcaagttggatcggaaaccttccaagtgtgtggtttttgaagatgatcctagaggagtaactgctgcgcacaattgtacaatgatggccgtagcattaattggagctcatcctgcgtatgatttggggcaggctgatcttaccgttgctaactntagtgaactttctgtgatcaacttgccgaaactattttcttaccagggttcttcatttatggacttacagaagcagatcatagagaaaactcctcccaaaaggaaacttacgatagacaccattttttaatacattttccttccca

SEQ ID NO: 54978 - DNA, 96 bp, Glycine max
  Clone ID: LIB3109-054-Q1-K1-E6
gaagacaggagagagagaagctgcgcaccttgtcatactagtgctgattgctgaaactgccatcgatcgccatttgcacaaagatcccaacaacac

SEQ ID NO: 54979 - DNA, 384 bp, Glycine max
  Clone ID: LIB3109-054-Q1-K1-E7
gatagaaagaatgagcaaacagctgccatactgaagatgcaagcagttcaactagctgaaatggaattgctttataaggaagagcaggttctcagaaagcgatattttaataccatagaagatatgaaaggcaagataagagtttattgtcggttaagacctcttagtgaaaaagagattgcaagcaaagaaagagattctcttactactactgatgagtttactgttgagcatccttggaaagatgataaaccaaaacaacacatttatgaccgtgtgtttgatggtgatgccactcaagaagatatatttgaagatacaaggtacttaatgcaatctgctggggatggttataatggttgcatatttgcttatggtcaaact

SEQ ID NO: 54980 - DNA, 427 bp, Glycine max
  Clone ID: LIB3109-054-Q1-K1-E9
ggcagccactctgtgagagaaagagatagtgtggtagagagagaggagcggaggagagaaaatgacgacgaggttcaagaagaacaggaagaagagaggccacgtcagcgccggtcacggtcgtatcgggaagcaccgcaagcatcccggtggtcggggtaacgccggtggcatgcaccaccaccgcatcctcttcgacaagtaccatcccggtttcttcggaaaggtgggtatgcgctacttgcacaaactccgcaacaaattctactgccccatcgtcaacattgataagctatggtcccttctaccccaggaggccaaggacaaggccaccgccgacaaggcgccattgctcgatgtcacccagttcggttactttaaggttttgggtaaaggggttttgcctcagaaccagcctctggtcgtg

SEQ ID NO: 54981 - DNA, 224 bp, Glycine max
  Clone ID: LIB3109-054-Q1-K1-F1
gggcgagtgaagtagacacttgaaataatgccaagtgtactaaatgtcttagtcttaagaggggggaaaaactggaattccaatgattcttaatttcttacaatccaatctgcaaactgagtgagatatataacttgtttttgatttcttcctcatcattttgcatatacaaagattaaaatggaaaggttttttggaaattgcttcaatatgattttgctgat

SEQ ID NO: 54982 - DNA, 76 bp, Glycine max
  unsure (1)..(76): unsure at all n locations
  Clone ID: LIB3109-054-Q1-K1-F10
ggttcaagcagcaagcaatggagggaagagagagcaaatcttctctcacctcacaaacggaacctngcgacaaccc

SEQ ID NO: 54983 - DNA, 414 bp, Glycine max
  Clone ID: LIB3109-054-Q1-K1-F11
gagagcaagagtgaagagcgaagagaatggctcccaagggtttaatctttttggctgtgttatgcttctcagcactgtcactgagtcgttgtcttgcggaggataatggacttgttatgaacttctacaaggaatcatgccctcaggctgaagacatcatcaaagaacaagtcaagcttctctacaagcgccacaagaacactgctttctcctggctcagaaacatcttccatgactgtgctgttcaaaagtgtgatgcttcacttgtgctggactccacaagaaggagcttgtctgagaaggaaacagatagaagctttgggttgagaaatttcaagtacattgagaccatcaaagaagctttggaaagggaatgcccaggagttgtttcctgtgctgatatcctcgttctct

SEQ ID NO: 54984 - DNA, 408 bp, Glycine max
  Clone ID: LIB3109-054-Q1-K1-F2
ggagctgaaaccgagaagaagaagatggagatgtatcagatctggagcaggagaatagcgttgggagcgttcgcgtttgttctgcttttcctatcggcctcagcagacgacgtcgttgtgctctctgaagataacttcgagaaggaagttggtcaggacagaggagctctcgttgagttctatgctccttggtgtggacactgcaaaaagcttgctccagaatatgaaaagcttggtagcagcttcaagaaagccaaatctgttttaatcggcaaggttgactgtgatgagcacaagagtttgtgcagcaaatatggagtctctgggtacccaacaattcaagggtttccaaaaggatctcttgaacccaaaaagtatgaagggccacgcactgctgattcacttgct

SEQ ID NO: 54985 - DNA, 107 bp, Glycine max
  Clone ID: LIB3109-054-Q1-K1-F3
aaacaacagaaaggggagctttattctaaaaaaacaacatcaaaatgccggaggtcttaagcaccataattgcgcaaggagcaatcacctttattctaatttttcta

SEQ ID NO: 54986 - DNA, 188 bp, Glycine max
  Clone ID: LIB3109-054-Q1-K1-F4
ggagcgagagacgaagagaagaggaaagagcgcgttatgtggcctcttgtctcgttatttgcagaaacacccgcaaagccagaacagaaatcgcatataaaatgcgaaaagaaatgaattcaatgttcggagatctgcacaagatctctctccgtcaaactttctttaccccgtcctcataacatatt

SEQ ID NO: 54987 - DNA, 383 bp, Glycine max
  unsure (1)..(383): unsure at all n locations
  Clone ID: LIB3109-054-Q1-K1-F5
ggaaattaaagacactactaaagaaggatatagttttgaagagctatgcatcaagaaagaagccattgagggagaagagaagttttgtgcaaaatccttgggaacagtaattggttttgccatttcaaagctgggaaagaacattcaagtactttcaagttcctttgtcaataagcaagaccaatacactgtggaaggagtgcagaatcttggagacaaagcagtgatgtgtcataggctaaatttcagaactgcagtattttactgccatgaagtccgtgaaacaacagctttcatggttccattggtggctggtgatggaaccaaaactcangcacttgctatttgccactcaaatacttctggaatgaatcatcaaatgc

SEQ ID NO: 54988 - DNA, 215 bp, Glycine max
  Clone ID: LIB3109-054-Q1-K1-F6
gggtggagagtggtgagtagtgaccaaagcaaacgcactcactctattattgaagggaagatgaaagatgaagatggcacaccccaaagtgcaggtaagggacagtacaagttgtgggtgttgggtgctatcattcttcttgctctttggtccatgttcactgcttctctcactctcaaatggtcagctgggaacctcaaccgtgacttcgattc

SEQ ID NO: 54989 - DNA, 175 bp, Glycine max
  Clone ID: LIB3109-054-Q1-K1-F7
caccaacaagggagctagcacagcagatcgagaaagttatgcgagctcttggtgattacttgggagttaaggtccatgcttgtgttggtgggacaagtgttcgtgaggatcagcgcattctccaagctggtgtccatactgttgttggcactcctgggcgagtgtttgacatgct

SEQ ID NO: 54990 - DNA, 363 bp, Glycine max
  Clone ID: LIB3109-054-Q1-K1-F8
ggctgagagtgttgaaggaactgtcattgatcgtgatggtgatgaagttacagatggtggacaatattcagctggtccttcaaaacgtgcacgtgactctgatattttcgacacatattgttcacctcaacaaagagactcatctggtgccggtccgagtcattcaatgggtttagaggcttacattactggaaatcgagtttcttcataccgtcaaggtagtgacctcccaatgggtatccaatcagctagagactcaacccgtgcatcattgtgtattgcaatggacacaatatgtcatagtgtgaatggtgattctatggaaagtgttgaaaactaccctggaaaccttgatgatgttca

SEQ ID NO: 54991 - DNA, 433 bp, Glycine max
  Clone ID: LIB3109-054-Q1-K1-F9
ggttcaagcagcaagcaatggagggaagagagagcaaatcttctctcacctcacaaacggaacctcgcgacaacccccattcccgtttctccactccaatgcaacaacaccaatctcatgaaatggtggctttgaagaaggcatatgcggatgtgattctgaacactgtgaaggaggctgcaggtcgggtaatggtggcggaaaggagagctcttatgttccagcaagagcatgcttcatcgaaagaagaggctcttcatatgttaatgcgtttgaagcagatgatggatgctaagacagctgaagcagaaaaggcatcattggagaagcaaagaaaaattgatgagcttgaagcacaattgaatgaagccgaggatatcataacagatctaagggcagagttgaagcttgtatatctggagttagagatggc

SEQ ID NO: 54992 - DNA, 353 bp, Glycine max
  Clone ID: LIB3109-054-Q1-K1-G1
ggatcgcagactcaacactctcgctagacacttgcttccgcaaatggcttctcacgacagcatctccgcttctccaacctccgcttctgattccgtcttcaatcacctcgttcgtgctcccgaagatcctatcctcggggtaactgtcgcttataacaaagatccaagtccagttaagctcaacttgggagttggtgcttaccgaactgaggaaggaaaacctcttgttttgaatgtagtgaggcgagttgaacagcaactcataaatgacgtgtcacgcaacaaggaatatatttccgatcgttgggcttgctgattttaataaattgagtgctaagcttatttttggggct

SEQ ID NO: 54993 - DNA, 423 bp, Glycine max
  Clone ID: LIB3109-054-Q1-K1-G10
tggggttcaagcagcaagcaatggacggaaagtagagcaaatcttctctcacctcacaaacggaacctcgcgacaacccccattcccgtttctccactccaatgcaacaacaccaatctcatgaaatggtggctttgcagaaggcatatgcggatgtgattctgaacactgtgaaggaggctgcaagtcgggtaatggtcgcggaaaggagagctcttatgttccagcaagagcatgcttcatcgaaagaagaggctcttcatatgttaatgcgcttgaagcatatgatggatgctaagacagctgaagcagaaaaggcatcattggagaagcaaagaacaattgatgagcttgaagcacaattgaatgaagcccaagatatcataacagatctaatggcagaatttaagcttgtatatctgg

SEQ ID NO: 54994 - DNA, 374 bp, Glycine max
  Clone ID: LIB3109-054-Q1-K1-G11
ggagcaagagtgaagagcgaagagaatggctcccaagggtttaatctttttggctgtgttatgcttctcagcactgtcactgagtcgttgtcttgcggaggataatggacttgttatgaacttctacaaggaatcatgccctcaggctgaagacatcatcaaagaacaagtcaagcttctctacaagcgccacaagaacacttgtttctcctggctcagaaacatcttccatgactgtgctgttcagagttgtgatgcttcacttgtgctggactccacaagaaggagcttgtctgagaaggaaacagatagaagctttgggttgagaaatttcaggtacattgagaccatcaaagaagctttggaaagggaat

SEQ ID NO: 54995 - DNA, 405 bp, Glycine max
  Clone ID: LIB3109-054-Q1-K1-G12
gaagtagacagttttttgggtgagcgtcgtggaacagatcacgaggctatgttaaacatgaaaactgaattcatggctctgtgggatggatttacaacagatcagaatgctcaagttatggttcttgcagcaactaatcgtccttcagaacttgatgaagcaatacttcggcgtcttcctcaagcctttgaaattggaattccagaccaaagggagagggctgaaatattgaaggttgtcttaaagggtgagagggttgaagacaacatagactttggtcatatagctggtttgtgtgagggttacactggttcagatctatttgatctttgcaagaaagcttgctattttccctatagagaactactggatgaagagaagaaagggaaacaatctcatgcccct

SEQ ID NO: 54996 - DNA, 173 bp, Glycine max
  Clone ID: LIB3109-054-Q1-K1-G2
tggggatttttttctccaacacaatactaaacactcggtttgttgcctctctaatcaatacttcctaaaacaccctccaacctccacctctgattccatgtttaattcccaaaaaaatacattcaatgatcctatatctgcacaacatctctcttatacaaaaaaaatttacc

SEQ ID NO: 54997 - DNA, 392 bp, Glycine max
  Clone ID: LIB3109-054-Q1-K1-G4
ggaaacgaaagagaatggagaacagggtaatattacaggaatggtttgaccgcgttgactcggagaaaagtggaagcataacagcggtacagctgaagactgctcttgctgtgggcaacctggaatttccgctctcagttgttcagcaaatgatcaggatgtacgatttcgacaggaatggtactatgagctttcaaagtatctctaactaacctattatccaattcaaccattttgtctatcactctctctggttctaaccctaaactctcaaaatttgttgcactcaacaacttctttcttaaggttcaacatgcattttctgatctagagagattaactaaatgatggacgaccttttggaaagaaactaataatatgaaggctcataa

SEQ ID NO: 54998 - DNA, 85 bp, Glycine max
  unsure (1)..(85): unsure at all n locations
  Clone ID: LIB3109-054-Q1-K1-G5
ggtggactaactagcgaaagaaaaatagaactaggaaaattcttaaaagaaaaaggtggaacttactatatatgatgatgatgna

SEQ ID NO: 54999 - DNA, 259 bp, Glycine max
  Clone ID: LIB3109-054-Q1-K1-G6
ggtttttgagactgtgagcacttagcagagaggaagaaagatgatcatccctgttcgttgtttcacctgcggaaaggtctcttcgcatcccaaatactctgattcttcctcttttcactttatttcgtaaattaaaaacaaaaaatgtctggactttatgtgtgattaaggtttacggtttacggttttggttaattaatgatcaatgtgacttcttttctccgatttaggtcattggaaacaaatgggatacctattt

SEQ ID NO: 55000 - DNA, 224 bp, Glycine max
  Clone ID: LIB3109-054-Q1-K1-G7
ggagcagtgtgaatgattccattgtggaacagatggctgggaggctttctatgatttctttcttggatgtgagctactgtattaaaattggtccctatgcgcttgagatgattggcatgaactgcaagcttctataagggttgtgtcgaaacatgcacccattggatactgcggagaagccgcatcaagacgatgaagcctatgcaattgtctccacaatgcct

SEQ ID NO: 55001 - DNA, 107 bp, Glycine max
  Clone ID: LIB3109-054-Q1-K1-G8
gacacacagcaagccaattactctctgctcgctgatggctgaaatagtgatactggcatatgaaattttgctcccaaaattttgattttttgtatttagggaaaaat

SEQ ID NO: 55002 - DNA, 427 bp, Glycine max
  Clone ID: LIB3109-054-Q1-K1-G9
tgtgggtttaagcagcaagcaatgcacgctagagggatcgaatcttctctcaccttacaaacggtacctctctacaacccccatttccgtttctccactccaatgcatcaacaccaatctcatgaaatggtggctttgaagaatgcatatgctgatgtcattctgaacactgtcaaagatgctgcatgtccaataatggtggccgaaaggatagctcttatgttccagcaagagcatgcttcatcgaaagaaaatgctcttcatatgttaaatcgtttgaagcagattaaagatgctaatacagctgatacacaaaaagcatcatttgagaagcaaagaacaattgatgagcttgaagcacaattgaatgaaaccctagatatcataacagatctaatggcaaagttaagcttgtatatcttgagtt

SEQ ID NO: 55003 - DNA, 351 bp, Glycine max
  Clone ID: LIB3109-054-Q1-K1-H1
gactccaagccctcaccaaatacttctcttggcattttgtgtcccttctctctttctcttgctcgatattttccaaccaaaataattattaaaaccaaacgtagctaggcaccactgctaggaatggcaagtgagatatttcttgcccttctgatcacaacctttgtggttgcagcctctgctggtaacttcaaccaagactttgagataacatggggtgatggtcgtgccaaaatcctcaatagtggggaacttctcacctttgtcctagacaaaacctctggctctggatttcgttctaagaatgaatacttgtttggaaaaattgacatgcaactaaaactcgtgcct

SEQ ID NO: 55004 - DNA, 411 bp, Glycine max
  unsure (1)..(411): unsure at all n locations
  Clone ID: LIB3109-054-Q1-K1-H10
ggagaaggaaaggctgaagaacacatagagagagagagagaagtgcagaaaaaatgagactgttcgatccatggcctgttttcttcaagagagaatggaagcggaattggcccttcttggttggattcgccatcaccggaactctcatcaccaaactttcccttggtctctctgaggaggaagccaaaaagtcgaaattcgtccaggcacacaagaggtgactttagaatggaagatttgcagtggctttgcacattgtattagatgtgtgaaaagagcttttgttgtaataaatgaagagagatgttgtatacactccatgttcctatttncattttggttggttactttaatgtgattgagaaattcatacctagcagttctgaatcgatggattcacattatgattag

SEQ ID NO: 55005 - DNA, 393 bp, Glycine max
  unsure (1)..(393): unsure at all n locations
  Clone ID: LIB3109-054-Q1-K1-H11
gacaccagtgtgacagtgtgtagtgtgttcgtgtccgtgtctcaagttgaaacgttgtgtcgtgtttgtcattgtctaagaaagagggagaaatgggagtagtgaacagaagaaattctgcagctcataccagtaaccaaaacaaaacaacttcaattcaactccctttaggaatttttggaacagtgctggcagtgttgttcattgggtttgtagcatggagttatcaaactattcaaccttcttctccaaagatatgtggatctcttaatggtcccactattacagcacccagaatcaaactaagagatggaaggaatttagcatacaaagagcatggtgtcccaaaagatgttgccaagcataaaatcatctttgtccatggttntgatg

SEQ ID NO: 55006 - DNA, 269 bp, Glycine max
  Clone ID: LIB3109-054-Q1-K1-H12
gggagagaaaaacgaagagtgagtcaccgttccgtgttcccgccgagtcggtataaacgagtgagcgagtcacaactcaccgcgctgcatggaccctctagaagctttggtcgcccaaatccaagggctttcgagcactcccggcgacctcactcgcctccacagtgttctgaagcaagccgatgactcgctccgatccgagtcaactcgcctcgctccgattctcacccagctcgaccccttcattcattccctcgggtttctctaca

SEQ ID NO: 55007 - DNA, 385 bp, Glycine max
  Clone ID: LIB3109-054-Q1-K1-H3
ggttctagtgtgtgattgtttgttgttgtaactcggtcttcttcttttgttgttctgcgtttgtgtttgttttttctctcacctgaaaatgtcttgctgcggtggtaactgtggttgcggaagctcctgcaagtgcggcaacggctgcggaggctgcaagatgtacccagacttgagctacactgagtcaaccaccaccgagaccttggtcatgggagtggcacctgttaaggctcaatttgagggtgctgaaatgggtgtgcccgctgagaacgatggctgcaaatgtggaccaaactgctcctgcaacccctgcacttgcaagtgaggtgttgggagagcaagcttcaagcagagatagcccttaattaggaataatgataaa

SEQ ID NO: 55008 - DNA, 135 bp, Glycine max
  Clone ID: LIB3109-054-Q1-K1-H4
ggagccagatgaagttctgcaagccgtttccaaatctgggaagaagactgcattctgggtggatgaagcaccacaatctaaaaacaagcctttaaaaagtgcacctgtttgctcaaaaaacaagcctttaaaaac

SEQ ID NO: 55009 - DNA, 327 bp, Glycine max
  unsure (1)..(327): unsure at all n locations
  Clone ID: LIB3109-054-Q1-K1-H5
ggttctagtgtgtgattgtttgttgttgtaactcgttcttcttcttttgttgntctgngtttgtgtttgttttttctctcacctgaaaatgtcttgctgcggtggtaactgtggttgcggaagctcctgcaagtgcggcaacggctgcggaggctgcaagatgtacccagacttgagctacactgagtcaaccaccaccgagaccttggtcatgggagtggcacctgttaaggctcaatttgagggtgctgaaatgggtgtgcccgctgagaacgatggctgcaaatgtggaccaaactgctcctgcaacccctgcacttgcaagtg

SEQ ID NO: 55010 - DNA, 407 bp, Glycine max
  unsure (1)..(407): unsure at all n locations
  Clone ID: LIB3109-054-Q1-K1-H6
gctcacaaatcaagaaaaaagtattccattggaggtgatattaatcaactttttccagctcttggaaattaaaactctttttaaaagcgcaagttcatcacgttacacaaaaaagcgctcttaaagggccaataaaagtcactatatctcacgcatcaaaaattgatatctcagaccctgtaagtttaacgcacgcacttagagggttgtgcatctctcaggcctcanaaatggctgctttgaagagactgactaagccatgcagttcatctatagtatcagaggcgggcaccatcaaaaggttgtacacggcactggtcgatgaggggaaagggaacttggttgaaatttctcttgtgccagacatatctgcaccttctgataaattgtcccgtgtaactatatca

SEQ ID NO: 55011 - DNA, 368 bp, Glycine max
  Clone ID: LIB3109-054-Q1-K1-H7
gagagaaaggaggagaaacagcatcggcggtggatgggttgcctccgaggtttctggaaccgttaataatgaacgctcttaaggtcgatctcatcgaaactggtcgcgttgtctgctccatgaagatacctccgcgtttactcaatgctgggaattcgttacacggtggcgccatcgctgctctggtcgacgtggtggggtccgctgcgattcccaccgttggatattcggctcccaatactggggtttctgttgagattaatgtttcgtatttggatgctgcctatgccgatgaggagattgagatcgaggccagggctttgcgtgtaaggaaagctgttgccgttataagcgtggagttcaagaag

SEQ ID NO: 55012 - DNA, 412 bp, Glycine max
  Clone ID: LIB3109-054-Q1-K1-H9
ggagaaggaaaggctgaagaagacatagagagagagagagaagtgcagaaaaaatgagactgttcgatccatggcctgttttcttcaagagagaatggaagcggaattggcccttcttggttggattcgccatcaccggaactctcatcaccaaactttcccttggtctctctgaggaggaagccaaaaagtcgaaattcgtccaggcacacaagaggtgactttagaatggaagatttgcagtggctttgcacattgtattagatgtgtgaagagagcttttgtttgtaataaatgaagagagatgttgtatacactccatgttcctatttccattttggttggttactttaatgtgattgagaaattcatactaagcagttctgaatcgatggattcacattatgattag

SEQ ID NO: 55013 - DNA, 338 bp, Glycine max
  Clone ID: LIB3109-055-Q1-K1-A1
ggagtgagcaagagtgaagagcgaagagaatggctcccaagggtttaatctttttggctgtgttatgcttctcagtactgtcactgagtcgttgtcttgcggaggataatggacttgttatgaacttctacaaggaatcatgccctcaggctgaagacatcatcaaagaacaagtcaagcttctctacaagcgccacaagaacactgctttctcctggctcagaaacatcttccatgactgtgctgttcagagttgtgatgcttcactgttgctggacttccacagaaggagcttgtctgagaaggaaacagatagaagctttgggttgagaaatttc

SEQ ID NO: 55014 - DNA, 391 bp, Glycine max
  Clone ID: LIB3109-055-Q1-K1-A10
ggagagagaaagagatagagaacccgttcttgtttttttccattaacattttcaatctctttcacctaagacacgttcctctttccattcctttcttcctccgtcccattctcgaattggcgtgtgcctcttgctatccctcaaaggtcttttgaagcagaagaatggacttctttactagagacataaatgaggactctatgcttagatgtccattcttgaggaacatcaatgagcctactaacttctcattcttttcacctttggctttaccaatgcctgttcgtggagctaaaggtccaatttttgaagatggtcccaattttgatttggcatttaggcttttccacgggagtgatggtgtagtacccttatctgacagatcttttcg

SEQ ID NO: 55015 - DNA, 392 bp, Glycine max
  Clone ID: LIB3109-055-Q1-K1-A11
ggaaggaagaaggggaagaagaggccaatctcacaaacccagaaacgatagagcggaagaggttgaaatccttggccatttcccacaacattctctctgagacacctgcacggagctccgttcagctgaacccttcctccgtcgtggccaagcaccacggcaaagacatcatcaagaagtctcagaggaagagcagcaggtacctcttctccttccccggcttaattgctcccatcgccggtggcaagatcggtgacctcaaggacttgggcaccaaaaaccccgttctctacctcgatttcccccagggtcaaatgaagttattcgggaccattgtatatccaaagaacagatacttgactctacagttccctaaaggtggaaagagtgta

SEQ ID NO: 55016 - DNA, 404 bp, Glycine max
  Clone ID: LIB3109-055-Q1-K1-A2
ggatcgcagtgggtatagtagatgaagggaaagggacagcagccagcttcgggactcacggaaccttctaggctatatataaaaaaaaatattgcacgctccttcgggctcctggcatttcaaattcaaggcctctttccaatcttcaaagcagctactgcggcagctccattttccaattgaagttagcagagcaggttgcagtggaattcttagagacagtactttaaattgcagaactttgggggacctatcatggcctctgcttgatttggcatgaagccatctgtgtgtgaaggggacatgatggatgattcccaaaagcatagaatcctgatggtctcagattttttctatcccaactttggaggtgtggagaatcacatatattatctctcacagtg

SEQ ID NO: 55017 - DNA, 408 bp, Glycine max
  Clone ID: LIB3109-055-Q1-K1-A5
gcgtgacgattggtgggtggcgccgtacgcctcatcccatccatcgccatcggcaccttccttaaacgacatcgcgtccatcaccccttttctcttcctcacagtcacagcagtggtagcttcccaaaaaagagtgccaatggcatcttcttcagactcatgggcgaaggaatataatgaagcactgaaacttgctgatgatatcagtggcatgatttctgagcagagttcatttcctgcatctggaccagaaacccaacatcattcatctgctataaggagaaagattacaatattggggaccaggcttggtagcttgcagtcccttttgtcaaagcttcccagcaagcagcccatatctgagaaggagatgaatcggcgcaaggacatgctttcaaatttgagatc

SEQ ID NO: 55018 - DNA, 433 bp, Glycine max
  Clone ID: LIB3109-055-Q1-K1-A7
aagacgacagaaggggccattgtcatggatgccgatgctacctcagcgttgcacaaaaggggcattgtcccaacaaatgatagcttcaaatatgcttggttcaaggaccatgagagtgtggtaaaagcaatatatactggttctgagtttgttgatactgttaacaccggtgatgatattggtgtagttctggagtctacaagcttctatgctgagcaaggtggtcagatttttgatactggatcacttgagggcccacatgctttatttgaagtgcgtaatgttcaagtttatggaggctttgttcttcacattggtaatgggactgggggctcagttggcgacaaaatattgtgcaaggttgattatggaagacgcgccctttatgcccctaaccatacctgcacacacatggtaaaatttggccttaggg

SEQ ID NO: 55019 - DNA, 331 bp, Glycine max
  Clone ID: LIB3109-055-Q1-K1-A8
ggttgtagaaaggaggaaggtttggtcattgttgcagcactctccaactttcttctttgctttctataacttactgggcacatatatagaaatagatagatagtctttgctttcaaagtttacactttgcttcgcgattaatccacgctcctagctcttctaaataccctttctttcttttgcaaccatataataccccgaaaccgttctcttttacatcggtatcgttgtcgcagatggagctagctttgagcttaggcgacacacccaagcccttctctttgcccgcaaaaaatgattctgtgagtttcaaaatagcactgggtgacga

SEQ ID NO: 55020 - DNA, 289 bp, Glycine max
  Clone ID: LIB3109-055-Q1-K1-A9
ggcaatcagcagggaaaaggactcaagcccagatgcaaccagttaaactcggaacccaaggctttgaggtactattaactacattacttgctcttattttgatgattgatacaattaatgtgattctatgtttcaaaattgggattcggatgtatgggccttactggagcgtacagcgaccctctccaagaacaggatggcatatctgttatcaaatatgcgttcagaaagggaatcacatttctgatactgcggatgtttatggagccaatgctaatgaacttttggc

SEQ ID NO: 55021 - DNA, 356 bp, Glycine max
  unsure (1)..(356): unsure at all n locations
  Clone ID: LIB3109-055-Q1-K1-B1
ggttccaccattgttttcttgtgagaaaaaagtgtaaactgaagactgaagagagccgcgggaccctattccagccaaatcccaggattgtgaacactgactgaacaaacaccagagacagtatttggggcagcaattttcttttccagattccaaacctattttattttttctatttttcagttcatccttttcaaagttctggtttattgaaaacatttctcacaccgtccaacttcaattcaacaanccgcccttttgcaaatttggttcttttctctttctctgtcaccactttccttcgtcgtaggtcacagcgcgcgcttccgcattacccgcttctctctgcaaatgta

SEQ ID NO: 55022 - DNA, 391 bp, Glycine max
  Clone ID: LIB3109-055-Q1-K1-B12
tgatgtaatgtgatgttttgtgtgtcagtgggtgtgaattttattggtggattcgcattcgcctctggaattcccaaatcatcagtttcagcgaccatggcttccaactccgtccgagttgccgccgctcagatgacatccatcagcgacctcgctgccaatttggccacttgctctcgtctcatcaaagaagcagcatcagctggagccaaattgctttgctttccggaggccttttcttacgtgggtactaaagatggcgacagtgttcgtgttgctgaaccattggatggaccaattatgagccactactgctctttggccagagaatccagcatttggttgtcacttggaggcttccaagaaaaaggatccggtcctcaacgcttgt

SEQ ID NO: 55023 - DNA, 362 bp, Glycine max
  Clone ID: LIB3109-055-Q1-K1-B2
gtagtggatgaatactgctttgacttcagggatttatggtctattgtattcccatctgaatcagaaaagattattgcaacagtaacaagaaaatcaaatgaggtagttcatactcaagcaaaagttatgactgatcacgatgtcatgtataagtatgtatcgaagaatgtacttattgtcgcaaatgcagcaccaaaagccataagggaaattggaacagccaccccagaggaggcattgttggtcatctatatcattgatactgtgactggtcgcgtattgcatctcatggcacatcatgggtgccagggtcctgttcatgcttgatttattgaaaacttggttgtctaccaatattttta

SEQ ID NO: 55024 - DNA, 377 bp, Glycine max
  unsure (1)..(377): unsure at all n locations
  Clone ID: LIB3109-055-Q1-K1-B4
ggagacagagagaatgagtacggtgggagaagggaaggtgagtagtaatggtcatggatgttgcaaatcagggccaggctatgcttccccactggaagccatttctggtcccagagagtctctcatttatgtaacctctgtctacacagggaccggaatagagaagccagactatttggcgacagtggatgtggatccaaactctccaacttattccaaagtcatccataggcttcctgttccttatttaggtgacgaattgcatcacacaggctggaattcatgcagctcttgccatggagacccctcagcagaccgacgatttctcatcgtacctgcactcgtatcaagtcgagtatatgtggntgatgtgaaaa

SEQ ID NO: 55025 - DNA, 408 bp, Glycine max
  Clone ID: LIB3109-055-Q1-K1-B5
ggagtgagtagtgagaatggagtgtcaagggttaccggaaggttgcattgctagtatactctctcgcactacgccggcggacgtgtgtaggttttccgtcgtatcaaagattttccgttcggccgctgaatcggacgctgtgtggaaacgttttctcccttccgattaccattccatcatttcccagtctccttcgcctctcaactatccttccaagaaggagctctatctcgctctctcggatcgccctatcatcatcgatcagggtaaaaagagctttcaattggagaaaaagagtgggaagaagtgttacatgcttgctgctagagctctcaacattatttggggtgacactgagcaatactggaactggacaaccgataccaattccaggttcccggaagttgc

SEQ ID NO: 55026 - DNA, 392 bp, Glycine max
  Clone ID: LIB3109-055-Q1-K1-B6
gaggaaggaaggaatcgcaagtcgttgtgccgcaggtgcagacgacctgtcttcatagccaaacaacctcaaaaacattcaacaacgttcactattaattcatcataaaataaaaacaagtttcgattttttatctttgttttgtttctgatccattcatggaggtgccgagttcctgggatgctcttcgcaaacaggttccaattattctcctccttatcatgctttaatttgccagattctgcttctgattatgttgtaaatgattcaattaatctgggcatgcacaattcgagtgccaaattggtaaaacttcggttttttcttcttctagggtttcttcattttgtcggtgatggggaattcatgggatcaaggatgggattctacta

SEQ ID NO: 55027 - DNA, 211 bp, Glycine max
  Clone ID: LIB3109-055-Q1-K1-B7
ggattagggaaggaatttgttgatcttgcattcagaggaagtgtgtcgaaaattggcggattaacttttgatgaggtggcaatagagactttgtctttctgggtgaaggcattctctgaagatacatctaaaaggtttgaaaatttcgtatttatacagttcataccaggaggggagtatcatgcagataacccataaatgtcaaagttgc

SEQ ID NO: 55028 - DNA, 334 bp, Glycine max
  Clone ID: LIB3109-055-Q1-K1-B8
ggaagctaaggtcaacaacacatggcagaggatagatagtttgttcgttgcgttgccatgtcggcgtctgagattgttcggtaactggattcgctgaaggacgacaagaccataattgagcacaaaatctctgcgcttgaagctcaactcagagagattaatctccaaaacgactccgcaccacccaacggattgacgcaggacatgactcacagatacagtcgccaccttgtgcttccttcctttggtgctcaagggcaggcaaatctgttgaagtcttcaatcatagttgcgggagctggacggttgggcgctcctgcattgctatactttg

SEQ ID NO: 55029 - DNA, 379 bp, Glycine max
  Clone ID: LIB3109-055-Q1-K1-B9
ggagcaagagtgaagagcgaaaagggtggctggcaagggtttaatgcggtttggctgtgttatgcttctcatcactgtcactgagtcgttgtcttgcggaggataatggacttgttatgaacttctacaaggaatcatgccctcaggctgaagacatcatcaaagaacaagtcaagcttctctacaagcgccacaagaacactgctttctcctggctcagaaacatcttccatgacttggctgttcagagttgtgattgcttcactgttgctggactccacaagatagagcttgtctgataaggaaacagatagaagctttgggttgagaaatttcaggtacattgagaccctcaaagaatcctttggaaagggaatgc

SEQ ID NO: 55030 - DNA, 413 bp, Glycine max
  Clone ID: LIB3109-055-Q1-K1-C1
ggaatgaatgattttaattgagcggcggggcagaggaaggggcagagttttggagtttgaaagagaaaatattgattgcagttgagttctaatgagtaacgaatacgattacctgttcaagcttctcctaatcggagactcttccgttggaaaatcctgcttgcttctcagattcgctgatgactcctatgtcgacagctacataagtaccattggagttgatttcaaaatcagaacggtggagctggaagggaaaaccgtcaagctgcagatttgggatacagctggacaggagcgattcaggactataacaagcagttattatagaggagcacatggaattattattgtctatgatgttactgagatggaaagctttaacaatgtcaaacagtggttgaatgagattgaca

SEQ ID NO: 55031 - DNA, 255 bp, Glycine max
  Clone ID: LIB3109-055-Q1-K1-C10
gtgtgcttgctgctatacaacggcgcgattgggattcacctactggggcgtcaattcttccccttggcaccggaaatgatttgtccagggtacttatctggggaagaggcttctttacacttgatggacaatgcggattgactatgcttttgcatgacattatcattgcagcattttctatgctacatcgcttggaagtaaaaatcgttgaataaagctctgaacgaaaatcaaattaagttgaaaacctaatct

SEQ ID NO: 55032 - DNA, 377 bp, Glycine max
  Clone ID: LIB3109-055-Q1-K1-C11
ggtacgaaggaggtgcattggtccgttacctatcgttaatggaaggggaagtagcacttccattttccattttgcatttcccagtagagtaggcaaagccaaatccaaagggaacacgttcattcaattgcaattatttatattaattaataataattcacaaattgtgtgtggccagcactccaatcccctccctcaactacccgacaaattttccattcccggcatctcctcccagcctcgtaccccagataccttaaattcgcttcataacacaatttcgtttctttctttgccgaccaactcgggtctttttttttctttcaccttcacctatggccatggcttctttgattcagtgttctgcaacttccctc

SEQ ID NO: 55033 - DNA, 383 bp, Glycine max
  Clone ID: LIB3109-055-Q1-K1-C12
ggttgtcttctgaagagaatttttggttttgtgatcattcatgggtttttttgtagcacatgtagtgcaaggatcagcactagcccttcttggattatggcacaccatccacaccatcagatcttacctggtgaagggccctgccaacttcactgtaagattctggtaccagtttaacactacccctcagtctagacttaaacacttagaacttgtttctattttatccttttccatccttgcatttttcgatcaaattctagacttccctcatttccactatgcctttaagcttgacaactttgagcatgcaactatgttcatacaccttgctttgtttgctggtttctccctctccactgagttgactgattcaattgacc

SEQ ID NO: 55034 - DNA, 401 bp, Glycine max
  Clone ID: LIB3109-055-Q1-K1-C2
ggaagcacaagagaagagaagagaagagaggagagggggggagaaggggttgcagagagagagagagagagatgtcatcatcttcagacctggacaggcaaatagagcagttgaagaggtgtgagcctcttaaggagtctgaagtgaaggcgctttgcctcaaagccatggaaatccttgtcgaagagagcaacgttcaaagggtcgacgcccctgtcaccatatgtggtgatattcacggtcagttttatgacatgaaggagcttttcaaagtaagaggggattgccccaaaactaactatttgtttctgggggattttgttgatagagggttttactcgggtgaaacgtttctgcttctgctcgctcttaaagtgaggtatcccgatcggataacactc

SEQ ID NO: 55035 - DNA, 383 bp, Glycine max
  unsure (1)..(383): unsure at all n locations
  Clone ID: LIB3109-055-Q1-K1-C3
agcagtaatttaaccatcaacaataggcaaattacgggagccagtcttttcgtaaatttgccacccaataaagccttttctctgatccttgcgactgatgctaagcttgctaatgcgacatttcgagatgctgaactttgtaggcctggaacacttgatcctgaaaaagtaaaacggaaaatagtgcgttgtattagagatggaaaaataaaatccgttggcgagggtcaggaagctctatctaaaggcgccgtggcaatgcttttgggcaatcaaaagcaaaatgggagaacccttcttgcagagcctcatgttttgtctactgtgaccgacagtaaaagacatgcaagggcacagnctggttacataactgccattgggga

SEQ ID NO: 55036 - DNA, 383 bp, Glycine max
  Clone ID: LIB3109-055-Q1-K1-C4
agcagtaatttaaccatcaacaataggcaaattacgggagccagtcttttcgtaaatttgccacccaataaagccttttctctgatccttgcgactgatgctaagcttgctaatgcgacatttcgagatgctgaactttgtaggcctggaacacttgatcctgaaaaagtaaaacggaaaatagtgcgttgtattagagatggaaaaataaaatccgttggcgagggtcaggaagctctatctaaaggcgccgtggcaatgcttttgggcaatcaaaagcaaaatgggagaacccttcttgcagagcctcatgttttggctactgtgaccgacagtaaaggacatgcatgggcacagcctggttacataactgccattgggga

SEQ ID NO: 55037 - DNA, 397 bp, Glycine max
  Clone ID: LIB3109-055-Q1-K1-C6
actacaaaatgagtcagttactctgaaatggccaagaaagactggaatttctgaagctgatttctttgaatctgatgactcatggtttgatgctccaccagagggtttcagtttgactttgtcaccttttgcaactatgtggaataccctcttttcatggacaacatcatcttctttggcatatatatatgggagggatgaaagttttcatgaagaatatctatcagttaatggcagagaatatccttgcaaagttgtcttggcagatggtcgctcatctgaaataaaacaaactttagccagttgtcttgctcgagctttacctgcgcttgttgctgtgctccggctgccaataccagtatctatcatggagcaagggatggcatgcttgctggaa

SEQ ID NO: 55038 - DNA, 395 bp, Glycine max
  Clone ID: LIB3109-055-Q1-K1-C7
ggttagagtaaagtattaaggaaagagaaagaaaacctcgtttattagcagtagcttgggtgttcttaatgggcgtcctttgggcctcttcaaaggctcctgaccctgtccgtcatatgatagagggactttgagaatttaagcgatcaattatcaacgattgaaggaagagttgagaaatgagtcaaatgtcatctggaattgttggtgttggttatattggcaccaactatatggtcccattattactaccaccaccattttcttccttgagttttaacacctttatcaaacacaagggattggtgttggatagtaatcatacaggaaggagaagaggacatgggattgtggcatctagcaacgttgcttcaccttccatatgggatgattgg

SEQ ID NO: 55039 - DNA, 284 bp, Glycine max
  Clone ID: LIB3109-055-Q1-K1-C8
cgtgggagcgaagtgaattgaaatcgaagtgactctacctgagttgactcagcaatggccgaagatgtgactctgttgatggtggcggtgaacgattcgagcattaaggcataccctcatccttctatcagcatcttaggggctttcgactggaccatcaacatgaccgttcgcgacaacgtctctgccttcaaccttgtttgtcttcacgttcaaatacccgaggaacatggtcttgatgacatggatagtatctctgcttctgctgacgataataagaacat

SEQ ID NO: 55040 - DNA, 389 bp, Glycine max
  Clone ID: LIB3109-055-Q1-K1-C9
gttgataaaggtcttggtaacccgggtgttggttggtttctggagcatgttcgagatgaatttaaaaagctagctagaaaaggttcaagaggaattttgccaaacatgaattcaatttacattcaggaaaaactggttcctgtcattcgtggtctgatcacttcattggagagtgtttcacatggtggtagtaattggagagatgaaacttccttgtcttttcaagtggatctgtctccatcaccaagtaatttgaatggacaaattgaaggtgctagttcaacaaaagccccattattgggaaaatctaacaagccagataagaagaaagtaaaagatcatgtcattgctatgagagatgttgagttggaggagcatcagaaatctac

SEQ ID NO: 55041 - DNA, 397 bp, Glycine max
  unsure (1)..(397): unsure at all n locations
  Clone ID: LIB3109-055-Q1-K1-D1
ggcaagcagaagaagaagaagtggagcaagggtaagcaaaaggaaaaggtgaataacatggtgctcttcgatcagggtacctatgacaagctcctctctgaggcacccaaatacaagctcattactccttccattctctctgaccgtttgaggattaatggatcacttgcaaggaaggctattagggaattgatggctagaggttcaatcaggatggtgtctgcccatgcaagtcagcagatttacactagagctacaaacacctagatgtactggttataatttatgtagtattgatgcacctctgaagtgaaattttgntttttctgtttgagacgtacctcatgctagattgcatcagttcgacagttgctaaattcatggtttattcccttct

SEQ ID NO: 55042 - DNA, 395 bp, Glycine max
  Clone ID: LIB3109-055-Q1-K1-D10
cgtgttggctgcttgagactacagaagggatagtggaaacaacggggaaggtcaaccacttcaaaatctaatttcagaccatatgggatcgactttccattatgaccaactgggagatataccaatggccgaacagaaattgacataatcactcaatttctgggatttgagaaatttatcccaccctttgcaaacactagtggttcatacatacttaaaggtgttaactatgcatcatgtggatctggtatacacaacgaaactggctggcattatggttctgctatcggcttgggattacagttagcaaatcacagagtcatagtatttgaaattgctaccaaacttggaagtcctgacttagctcgacaataccctgaaaaatgcttgtatta

SEQ ID NO: 55043 - DNA, 366 bp, Glycine max
  Clone ID: LIB3109-055-Q1-K1-D11
ggtttcataggctcctttgtgattacgaaaatgtggaagagaacgggttttgaagaagaagcagttcaattgatcaactcagatttcagggacctaagtctagctgctaatagactcgcccatcatgccatcaaacttggtggcattggctttggagcctcttttttcggattgtttgctgccattgctgctatttatctgttgattttggatcgtacaaactggaaaacaaatattctcacagcactactcattccatacattttcttcagcttgccttcattaattttcgacgtcttcaggggagagcttggaaaatggattgctgcagttgctgttgtattacgccttttccttccaagacac

SEQ ID NO: 55044 - DNA, 393 bp, Glycine max
  Clone ID: LIB3109-055-Q1-K1-D2
ctagagtaaccggggctaagtattcataccagtggatggccttggcccagcagaacaactggcatgtcttactggatgctggatcattgggccccaaggacatggattctcttggcttgtccctatttcggccagattttatagttacatcattttacagggtttttggatatgatcccacaggttttggttgtcttctgatcaagaaatcagtgatgcaaagccttcaaaatcagtctggttgtactgggtctggaatggtgaagattaccccggagtttccaatgtatttgagtgattctgttgatggtttggataaattggttgggattgaagacgatgatgaaatcactgggatgggtgaaaagacttctgaaactcgtcaagggacac

SEQ ID NO: 55045 - DNA, 407 bp, Glycine max
  Clone ID: LIB3109-055-Q1-K1-D3
gaggaagagatgagggagaggtacgagatattctcgcaaaacctcaggttcatccgctcccacaacaagaaccgcttgccctacactctctctgttaatcattttgctgattggacttgggaggagttcaaaagacacagactaggcgctgcccaaaattgctctgccactcttaacggcaaccacaagctcactgatgctgttcttcctcccacgaaagactggaggaaagaaggaatagtgagtgatgttaaagatcaaggcagctgcggatcatgctggacattcagcacaactggggctttagaagcagcctatgcacaagcatttgggaagagtatctctctttctgagcagcagctagtggattgtgctggcccgttcaacaactttggctgtaatggtgg

SEQ ID NO: 55046 - DNA, 376 bp, Glycine max
  Clone ID: LIB3109-055-Q1-K1-D4
gaacacaaagaagtctaattgatggggtgttgttgcaccaaacagcgagtcgatcataaagatccagcagatcttgcttcccaaacctatgttaatatttctgaaattgaagctctgtatgatctgtacaagaaattaagcagctccatcatccacgactgagatatcagcaaagaagagtttcagcttggcttatttggaagcagcgagaaacggagcctctttgccgacaggggctctcaattatttgactcataaaaatgatggggtgatagaatttggagagttcgttaaagctctcaacgtcttccagccagcagcgccacaagcacaaagagcagattttgcatttcgactctatgatataagtcaaaga

SEQ ID NO: 55047 - DNA, 279 bp, Glycine max
  Clone ID: LIB3109-055-Q1-K1-D5
gaagaaaggaagaaacataccgtaggagagcatcaaactctgcttcttcgatttccattgcgaaacgttactttcctaacttctttctcttcatcttcttcgctcttcgatcttcgaccggggactgctcccaataccaccaccaccactcgtcgatggccacgatcggaagcttacacgactcccaaggctctcaaaacagcttcgaaaccgaaaccctcgctcgaatcgccgttgacgaactcatcatgatgcaggattcgcttcttgagtttgcta

SEQ ID NO: 55048 - DNA, 397 bp, Glycine max
  Clone ID: LIB3109-055-Q1-K1-D6
ggcgatctgagagtgaagttgaatgcaaagaaaaaatggcgtcgataactggaccacagattctactgcactctggttctccatggttgaaacagacgatgaaaccctcgtcatcaccctttctcctcttcccaaaacacactcctcgtcgcaccttctgctccatcaattccaattccaagggttcgagttccatcgttcccgacctcctccattacctgaaccactcctggacccaattccacgccacagccgaagctaaacgacaattactcgccgccggtttccacatgctcgacgagaaccacgactggcacctcaagcccggcggacgctacttcttcacccgcaacatgtcctgtttggttgctttcgccatcggagataagtacaatgt

SEQ ID NO: 55049 - DNA, 408 bp, Glycine max
  Clone ID: LIB3109-055-Q1-K1-D7
ggtgcacaagtgagtttgttgatcgagataactagaaacagtgtgatgaaaatgaaggtccttgttttcttcgttgctacaattttggtagcatggcaatgccatgcgtacgatatgttccctctccgaatgaacactggctatggtgcccgtactccggaggtgaaatgcgcaagttggaggcttgctgtggaagcacacaacatctttggctttgagaccattcctgaagagtgcgttgaagcaacaaaggaatacatccatggcgaacaatatagatcagactccaaaacagttaaccaacaagcttacttttatgccagagacctcgaagtccatcccaaggacacatttgtgttcagtatagatggcaccgtactctctaatattccatactacaaaaaacat

SEQ ID NO: 55050 - DNA, 400 bp, Glycine max
  Clone ID: LIB3109-055-Q1-K1-D8
gaggaaaatgagaggaaagagttggcaatcttcacagcacttgctttctctcagaagctgtctggtctcccaccagaaactgtgttccaaccacttcttaaagataaccttgtggccaaagggctagttctgtcatttatgactgactcctttaaggagtatctgattgacaacagccttgatgatcttatttcaattctaaaacggtgaaaagtagaggatgatcttttggacattttcccccctacaaacagatccattgaagctttctctgagcatttcaccaatgaatgattggtggccttggtggagtataatgaatagaatatttttgaggtgaaacttaaggaaatgaaagtcttcgttaacagcactgataacattagaagctgatacattt

SEQ ID NO: 55051 - DNA, 388 bp, Glycine max
  Clone ID: LIB3109-055-Q1-K1-D9
ggaagaagaagaagaaaccacgacgcaagtcgaaagtttgattccaaaatgcgatcctcaagcattcgcagcttcaccatcttcaccctctttctcattgcgatcctcccccacggacacgcaacaactccaacctccaaacttcgcctcaaacctctctcttctcccttttcaaccgccctcgaaaccctccagaaacaactcgggtacaccttcaagagcatcgatcttcttcgtcgcgccatgacacacgcttccttctccgaagaaaacaacaaagctttcgccattctcggcgccagcgtcatcgaaacctccgtctctttccatctgctctccagagacgttgatctttcttccaaagagctgaaccgtcgattgtcccaaa

SEQ ID NO: 55052 - DNA, 399 bp, Glycine max
  Clone ID: LIB3109-055-Q1-K1-E1
ggctctagaaaattcagtgctgaaacatggcttcggctactctctctgtagccaaaccagcccttcaggcaaatgggaaaggcttctctgaattctctggcctccgaagctcatcaggcttccttcccttttctagaaaatcttcagaggatttccattctgtcattgccttccagacctatgcagttggaagcagtggaggatacaagaagggtgtgacagaagcaaaactgaaggttgccataaacgggtttggaaggattggaaggaacttcttgaggtgctggcacggtcgcaaagactcccctcttgatgtcattgccatcaacgacaccggcggcgtgaaacaagcctctcaccttctcaaatacgattccatcctcggaaccttcgatgctg

SEQ ID NO: 55053 - DNA, 378 bp, Glycine max
  unsure (1)..(378): unsure at all n locations
  Clone ID: LIB3109-055-Q1-K1-E10
ggagacagagagaatgagtacggggggagaagggaaggtgagtagtaatggtcatggatgttgcaaatcagggccaggctatgcttccccactggaagccatttctggtcccagagagtctctcatttatgtaacctctgtctacacagggaccggaatagagaagccagactatttggcgacagtggatgtggatccaaactctccaacttattccaaagtcatccataggcttcctgttccttatttaggtgacgaattgcatcacacaggctggaattcatgcagctcttgccatggagacccctcagcagaccgacganttctcatcgtacctgcactcgtatcaggtcgagtatatgtggttgatgtgaaaac

SEQ ID NO: 55054 - DNA, 364 bp, Glycine max
  Clone ID: LIB3109-055-Q1-K1-E2
gaggaaaatgagaggaaaaagttggcaatcttcacagcacttgctttctctcagaagctgtctggtctcccaccagaaactgtgttccaaccacttcttaaagataaccttgtggccaaagggctagttctgtcatttatgactgacttctttaaggagtatctgattgacaacagccttgatgatcttatttcaattctaaaacggggaaaagtagaggaggatcttttggacattttcccccctacaaaaagatccattgaagctttctctgagcatttcaccaaagaaagattggtggccttggtggagtataatgaaaagaaaatttttgaggtgaaacttaaggaaatgaagtcttctt

SEQ ID NO: 55055 - DNA, 334 bp, Glycine max
  Clone ID: LIB3109-055-Q1-K1-E3
gcagcaagagtgaaaagcgaacagaatggctcccaagggtgtaatcttattggctgtgctatgcttctcagcactgacactgagtcgctgtcttgcggaagatcatcgacttgttatgaacttctacaaagaatcatgctctcaggctgaagacatcatcgaagaacaagtcaagctgctttacaagcgccacacgaacactgctttctcctggctcagacacatcttccatgactgtgctgttcacagttgagatgcttcactggtgctggactccacatgaaggagcttgtctgataaggtaacagatagaaactttgggttgagaaatttc

SEQ ID NO: 55056 - DNA, 391 bp, Glycine max
  Clone ID: LIB3109-055-Q1-K1-E4
ggaagaaggaagcatcataaccggccaaagcttctctctcttccatttatcccccataaataaaactaggtgaaaaaaatatactctgtgcttctcatgatgatagtgtagctgaagctgcttctgctgcagcattggtgatttggacacaaaaaaagtttcaaacttttcagttctctgagcttctggtttatcaattttgaaggagttcaatactttaccctattagttggttccctgaaatttgtattggtattgctgtatcagaaattcttctgaacaatctctttaatcaaccatgtcattattggctaaactacgctgtgtcaccatagatgttactggtaccctaatggcttacaaaggggagctcggtgactattattgcatg

SEQ ID NO: 55057 - DNA, 406 bp, Glycine max
  Clone ID: LIB3109-055-Q1-K1-E5
gacggacgagggtttcgtttcgggtttgacgttgttcacaatcactttctgcgcttcactcactcccttcgtgcggttttctttctttgtcgaactcgtgcgaaaatgcgtgagattcttcacatacagggagggcaatgcggaaaccagatcggagcgaagttctgggaggtggtgtgcgcggagcacgggatcgattccacggggaggtaccagggggacaacgagttgcaactcgagcgagtcaacgtctattacaatgaagcgagttgcggaaggttcgtgccgagggcggtgctcatggatctagagccagggaccatggacagcgtcagatctggtccctacggtcagattttccgacctgataacttcgtctttcgccagtccggcgccggaaacaact

SEQ ID NO: 55058 - DNA, 378 bp, Glycine max
  Clone ID: LIB3109-055-Q1-K1-E6
gggaaaaagaagtctagtagtagtagtagtaaatcaattttttacgaagctcccctcggatacagcattgaagacgttagaccaaacggtggaatcaagaaattcagatctgctgcttactctaactgttctcgcaaaccatcctgatacacatccggattgatagttcgttgcatgcaaccatagttttattaggattttttcttctttgttttcaattaggtttttttgttgctctccttcaaactccatctttccaaatcctctctttgcgattgtgttttgatctgcttcctactgcgatagtttctctactggtacatggccatggcggtttccgcaattggttttgaaggtttcgagaaaaggttggaaata

SEQ ID NO: 55059 - DNA, 190 bp, Glycine max
  Clone ID: LIB3109-055-Q1-K1-E7
ggagaaattcaggggtacgggatattccacatcgaatgggctttgttagatgtgtttagaccagattcaattgtttggagcaaatgctcagaatggtgatggcttattgtccttaggccaacatctgtatgcccaaatgatcttggatcatacttcatgaaattttttgtgaccttatgcaacatttctt

SEQ ID NO: 55060 - DNA, 409 bp, Glycine max
  Clone ID: LIB3109-055-Q1-K1-E8
ggtgcaaaggaggaagaggaaaaagaggattggagggtcgccacgtttagcaacaaccaaaccctctctactctttcttcttctcttcgctagggttttagcttcttcctcttcacttcgttcttctggcctctacaatgagcaacgacaaggacaccttcaacgtcgctgatctcacttccgctctcaacgaggacaatagagcagaccttgtcaatgctctcaagagcaagatacagagtttggctggacagcattctgatattctagagtctctgtcgcccaatgtcaggaagcgtgtggaggttcttagagagatccagggtcaacatgatgaattagaggcaaaattttttgaggagagagcagctcttgaggccaaataccaaaaattgtatcaaccacttta

SEQ ID NO: 55061 - DNA, 413 bp, Glycine max; identical to SEQ ID NO: 51826
  Clone ID: LIB3109-055-Q1-K1-F1

SEQ ID NO: 55062 - DNA, 204 bp, Glycine max
  Clone ID: LIB3109-055-Q1-K1-F10
cgacgggggtgtcgagttcacttaacatatacgagattctggtgtgttgtgtgtgcgtactctctgtttaatttgtgtttgttcgttgcttcgaaactttacagttgaacagagtaatgatgactgaagtcctgcctatgtgtcgcgattgagtgcttcgtgtgcacatggcttgtcggttagaagctgcggccccactggctg

SEQ ID NO: 55063 - DNA, 355 bp, Glycine max
  Clone ID: LIB3109-055-Q1-K1-F11
ggatgacagaagggaacggtgacagaactctgggaaagatcgcagacgcattcaatgaccttgcaaacgttttgaccgatttttagaccgcagaaacatacgtcaaagttgatccattctatcatgcctgctctctcgagtccaatctgttcggttgattgggcgtggtcttcaagttcagcgaaatggattacgttgacaagggttatgatctggcagaggcgtacatatctattcaaaatatgcagtctttgattgagctggatgtgcaagctaacactgttaagaaaggatgtagccatacgcggaatctgctcagagtgaagcgcagacttgacatggtcagagtgctctt

SEQ ID NO: 55064 - DNA, 271 bp, Glycine max
  Clone ID: LIB3109-055-Q1-K1-F12
cacgggggtacatcgacggactataagaggggccatattatttttcagaacgcggctctataattgatttgtcaccctcttctaacggacgaaacaggtttccatcctacaatgtcgagttcataactctgaatgcactcttgctggactcaaacttgacggactggcggcatttcattcataaactcactcaggactaacatagactattgttaaattacacatctaaacaccaatggaatataactgcacagaggacatgaaacataca

SEQ ID NO: 55065 - DNA, 415 bp, Glycine max
  Clone ID: LIB3109-055-Q1-K1-F2
caccgtgaggcgaagatgttcgctaaccctaaccctaacccctctttggatagtggtggcattttctctgagataggaaacttcaccagcctcatcaatttaaacaacaacgaagcgtttgggtttgggaacaataaaaataacaacagcatcctcgatgcgacgtcgtttcgtttcggtattagtgttactaatcaggtgcaggcggcagcaggtggaggccatggtcagtggcagcagcagaatcatcaggagttcggtacggcgtcgtttctcgatcacactgtgccgcttgagttttcttcgctgcagcataagactgggcatcagggagggtttggatcgttggattggcaacccggtgcggatcaaggtttgtttgatcttcctaacaccggtgatcagccttactgga

SEQ ID NO: 55066 - DNA, 376 bp, Glycine max
  Clone ID: LIB3109-055-Q1-K1-F4
ggacacatgaaaggaaacacaaaccagggaaaggaaatttcagtggccgggatcgatcataaggaggaagaaatacaaggttttgggacctcttctcttggcttataaaaagtccaaaacaggagccttcttggtgttttagaaaggaggaggcttgggggaaaagggtggagaaaaaagtggttaaagggacagcaacttattggatactggaggataagaagactattgctacaaggcaaagtaaaccaatgggggaaatatcttctagtgttgcagtaccttttacacttggtgttggaaatttgattcaaaaggagtccgcggtgacgactcacatggagataactgggctgaagctcatggcaaatacagc

SEQ ID NO: 55067 - DNA, 410 bp, Glycine max
  Clone ID: LIB3109-055-Q1-K1-F5
ggaagagaagaggaagaagacgaagaagaatccaaaagcaatcccatctgtgtgtttgcacatcagaagggagggctatcaaactcaaagatctaatctaatcaggcttttgggggtgtttcagacattgcatgcatatgggtggttgtgttggatgctataaaaggcctacactgagtgctactgtggatgtgccatcgaaagggttggcaacacaaggtaacggagtgaggaaaccaagttcatcagaggatttttggaccactagcacgcatgatatggacaacagcgctgtccagtcacaggggagcatctcttcagccagtctaacaaaccaagctgtggttcttcatgctggttcttccaaaagcagcaccaaccccactggaattgtaaatcacggtgtaatt

SEQ ID NO: 55068 - DNA, 405 bp, Glycine max
  unsure (1)..(405): unsure at all n locations
  Clone ID: LIB3109-055-Q1-K1-F6
gatgccatcgattgtggaagatctagaacgccgtacctttgtgtacaatcttatcacgccaatcataaatcagtacgtttctgatcttgacgagggcaaggcaatgtatctgtactttgtaaaagcagaaatgtgcactccatgtggcctaccagccagaacagtgttaacaagctactacaagagcaagcacttcaagtgccgcacacacgatccttggaacgactacacaagccctgaccaaaccattctatgcaatgacagcaaccaaagcatgcattgccagcttctctcaggtttggtccaccgncgccacgtcctacgcctcggtgccgtcttcgccttcgcacttctgagagccatttccttcctggaacgaaactggaggcacctttgtgaggacat

SEQ ID NO: 55069 - DNA, 286 bp, Glycine max
  Clone ID: LIB3109-055-Q1-K1-F7
caatatcacacataattaatggcaaagtcactcctattgctatagcagtatgatgggtgacactgagatcaaaccatcagttgaagtaatcatatgttcttccatgaacactaacaatagcgcaaacaaccacacccttccaacctacatcacctagtcatcacaatcacacttaccaatcttgatcaagctacatgctggatactttatcaaatgcctttccttttatgcacaaaatttgcatatggaactataggcattgctctgaatttgcaatccaaaaatg

SEQ ID NO: 55070 - DNA, 418 bp, Glycine max
  Clone ID: LIB3109-055-Q1-K1-G1
ggagtgagacaatatcacacataatataatgccaaaatcactcctattgctatagcaatatgatgggtgacactgagatcaaaccatcagttgaagtagtcatatgtgcttccatgaacaataacaatagcgcaaacaaccacacccttccaaccgacatcaccaagtcatcacaatcacacttaccaatcttgaccaagctccatgctggttactttttcatatgcctttcctttggtgcacaagctttgctctggaagagtttgagtaaacacaacaaggactcacaaactctctggcatggattcaatttgatgccttccattgcgtttctactactttggtgtgtggcactgctcactgccactactttgtctttactttacgtgctcaagtgcatctttcacttggacatggg

SEQ ID NO: 55071 - DNA, 332 bp, Glycine max
  Clone ID: LIB3109-055-Q1-K1-G2
ggagcagaggcagagcataaacgtcgttgggggtttccttacaaaagagagaaagaaataatgagccccatgggtgagagccagcaacggagcttgtttgggagtacaaaggcatcgtctatgccagtgtcaacgtcgcgttcagactctgaaggaggccttagcagacgtctttcttctctgtctctgaagatccaattagagagcccgaattccttctcatggtcattttccagatccaagttcctctcatccatggatgactatgcaaggacatttttggactggagctgggcctggatcctttccaggaagctcattttcgctacaga

SEQ ID NO: 55072 - DNA, 412 bp, Glycine max
  Clone ID: LIB3109-055-Q1-K1-G3
ggagcagaggcagagcataaacgttgttgtgtgtttccttagaaaagagagaaagaaataatgagccccatgggtgagagccagcagcggagcttgtttgggagtacaaaggcatcgtctctgccagtgtcaacgtcacgttcagactctgaaggaggccttcgcagacgtctttcttctctgtctctgaagatccaattagagagcccgaattcctgctcatggtcatttcccagatccaagtccctctcatccatgggtgactatgcaaggacatggtgggactggagctgggcctggatcctctccaggaagctcatcttcgctacagatctcgaaatgaacgaccaggataccaagctccttgcttatcataacaagggcacttggagacatgttttctataaactgc

SEQ ID NO: 55073 - DNA, 277 bp, Glycine max
  Clone ID: LIB3109-055-Q1-K1-G8
caaaaaaccccactaggggacacacaaatcgcctaattatctccagaggctatatcttatatgcggcgtgtgaagtcctatgccctaacttacaatgctacactttatacaccaattggtaagccaatggcctcatgtgaatcttctactacagtacctactccagccatgaaccctcattatactccaatcctacctatgccttatccatacatgccttgtgctcaaaattttgcttttccacatcggattcaagttcctttaaatcccaaaccta

SEQ ID NO: 55074 - DNA, 143 bp, Glycine max
  Clone ID: LIB3109-055-Q1-K1-H1
ggcaaaagttagtagtagtgaagaaaatgaaagtcctggttttctttgttgctatagttctagcagcatggcattgccatggctcagaccatgaccatgaccatggccacacctaccaaattttccctctgagaatgaaaact

SEQ ID NO: 55075 - DNA, 323 bp, Glycine max
  Clone ID: LIB3109-055-Q1-K1-H12
ggttctagtgtgtgattgtttgttgttgtaactcgctcttcttcttttgttgttctgtgtttgtgtttgctttttctctcacctgaaaatgtcttgctgcggtggtaactgtggttgcggaagctcctgcaagtgcggcaacggctgcggaggctgcaagatgtacccatacttgagctacactgagtcaaccaccaccgagaccttggtcatgggagtggcacctgttaaggctcaatttgagggtgctgaaatgggggtgcccgctgagaacgatggcttgcaatgtgggaccaaactgctcctgcaacccctggacttgc

SEQ ID NO: 55076 - DNA, 354 bp, Glycine max
  Clone ID: LIB3109-055-Q1-K1-H2
ggaacgtggtggacttgcagagaaggtggtcagagacaaagttttggtatttcgttttactgatgttgggaaacttccccctccagttctccagtttgttgaggtgtcatttggttatactcctgataatctcatctacaagaacattgactttggggttgatttagattctcgggttgcgctggttgggcccaatggtgctgggaagagtacactactgaagctaatgacaggtgacttgatgcctagtgatggcatggtccgacgtcataatcatcttcgaattgcacaatatcaccagcatttggccgaaaagctagacatggaaatgtctgctctccagtttattgatta

SEQ ID NO: 55077 - DNA, 118 bp, Glycine max
  Clone ID: LIB3109-055-Q1-K1-H3
gtggcaagggacatgatggaggaccttagggatcctctgaaagaaaacacggtgcctgtatgggctgttactttatatgcggttcttatgccaatgggcgttttccttctcttgtata

SEQ ID NO: 55078 - DNA, 403 bp, Glycine max
  unsure (1)..(403): unsure at all n locations
  Clone ID: LIB3109-055-Q1-K1-H4
gacactaaacaagttaaaagaagagcatcagtgaactaacaaagcaaccctatgtcgaaggtggtttgtgtcaccggagccagcggcgccatcggatcatgggtggtcctactcctcctccagcgtggttacaccgtccatgccaccgtccaagatatcaaggatgaaaatgagacgaaacatttggaggaaatggaaggagcaaagagtcatctccatttttttgaaatggatcttcttgacatcgactccattgccgctgccataaagggttgttccggcgtaatccaccttgcatgtcctaacatcattggtcaagtcgaagatcccgagaaacagatattggaaccggcgataaaaggaacggttaatgtgttgaaagcggcgaangaagcaggggtgg

SEQ ID NO: 55079 - DNA, 95 bp, Glycine max
  Clone ID: LIB3109-055-Q1-K1-H5
tgggatagcagcatggtacaaagcattggattcaataacttaagttcattccttgtgttttgctttctttctcaaaaccaaacatgtctaacaca

SEQ ID NO: 55080 - DNA, 337 bp, Glycine max
  Clone ID: LIB3109-055-Q1-K1-H6
agaagaccacacaaagggacatacatagagtcttcaatctttacccagataaatacataaaaatggttactcttccaattggcattaggaaaaattgtctaacatactttcagtatgaataagtaagggacacaccaagcgaaacatgaaacattcttctgataatcttcactttggttgcagcaatgacatttcaagctgcagtgaatcctcctgttggattttgacaagacgataacgatggacacgtctcatgaagagcaatctatgcttcagatacacattcttactatgtcttcctcatattcaatactttggcattttctaatcccatatt

SEQ ID NO: 55081 - DNA, 151 bp, Glycine max
  Clone ID: LIB3109-056-Q1-K1-A11
tctagaatagtttggggcaagagggtgtcatggaatgttactacttgcaaggcctcaacaacaagtgatgtgattgagaagagtgtgactgagaatagggtggtgagtattgaggatgaaaccagtttcacttatgtcatgaagtttggtg

SEQ ID NO: 55082 - DNA, 314 bp, Glycine max
  Clone ID: LIB3109-056-Q1-K1-A2
ggaacaaaacaagtgtttcgaatagattatcctaagtctttgggaatagtgctgcaatggcttcaagtcaggaggaggtgacccttttgggagctactggaagcccatttgtgtgcagggttcatattgccctcaagttgaagggagttcaatacaaatatgtcgaagaaaatttgaggaacaagagtgaactgcttctcaaatccaacccagttcacaagaaggttccagtgtttattcacaatgagaagcccatagcagagtctcttgtgattgttgaatacattgatgagacatggaagaacaaccccatc

SEQ ID NO: 55083 - DNA, 367 bp, Glycine max
  Clone ID: LIB3109-056-Q1-K1-A3
gaggacgagagtgacaacgaccatgatgacgatgaagggaagcatccacatcaaacaagcccacgtaaatttgatgacttcctcaccaaggtgcacaatgaagctaaccgtagtccaccaaggtcctccggtcacgtgacttcacctgattggcgccactcctcgcagccaaaaccttacaatggcggatatgctgactacggaaccaacaagccaattggaggtgccaataaacatgatggtcctggttatggcaacaacaaggaagggaacaagcctttatatggaggtaacactaagaattttgataaccatgatggttatacaaggtcctggccagaagaacaactttgatcatgcttatgat

SEQ ID NO: 55084 - DNA, 392 bp, Glycine max
  Clone ID: LIB3109-056-Q1-K1-A4
ggaagaaagagagagagagagagagagagaggtgtgaagtgggtgaaggtttttgagaagaaagatggaacgaagtggcggaatggtaactgggtcgcatgaaaggaacgaacttgttagagttagacacggctctgatagtaggtctaaacccttgaagaatttgaatggtcagagttgtcaaatatgtggtgataccattggattaacggctactggtgatgtctttgtcgcttgtcatgagtgtggcttcccactttgtcattcttgttacgagtatgagctgaaacatatgagccagtctttgtcccagtgcaagactgcatttacaagtcaccaagagggtgccttaagttgaaggagatgatgatgatgaaaaccatgcttatgat

SEQ ID NO: 55085 - DNA, 424 bp, Glycine max
  Clone ID: LIB3109-056-Q1-K1-A5
ggtagtagtggagagaaatcgcgatctggaatagggtttagctgaaagatcgagttgaaatgggtttctttggtaccattttggggtttttgggatttggggttgggatttcgattggtctcgtgtctgggtactttctcttcatctacttccaacccaccaatgttgaggatcctgaaatcaagccattgtcggagcaagagcaagagactctgcaacgaatgtttccagagattcctctttggataaaaaatccggattttgatcggcttgattggctgaacaagtttgtagaatatatgtggccgtatcttgataaggcaatttgtaagacttgcgaaaacattgcaaaacccataattgccgaacagaatcctaaatacaaaattgattctgttgagtttgaaacactcacattggggtc

SEQ ID NO: 55086 - DNA, 371 bp, Glycine max
  Clone ID: LIB3109-056-Q1-K1-A6
ggacaccaaattcaatcaaagattgattcaattgaatgggttcagtaatgctcagtggaactgaaaagctcaccctcagaaccctaaccgggaacggtttaggtttcactggttcggatttgcacggtaagaacttcccaagagtgagtttcgctgctaccactagtgctaaagttcccaactttagaagcatagtagtacccaagtgtagcgtctcggcttacaggccaagctcgcagccaaggttcattcagcacagaaaagagaccttttggttctataggtctctctcaattgggtatgaccatgtcattaaccctggccattggaccgaggacatgaaggatgatgcccttgaacccggtgatctc

SEQ ID NO: 55087 - DNA, 422 bp, Glycine max
  Clone ID: LIB3109-056-Q1-K1-A7
ggacccgacgatggcgagtgaaaagttggtgctggcagtgatcagggccgcgaggccaaccttccgcaaccaaaacgacaaaatcgcatttgccgttcactcctccttcctcacctccggctatgtcctcaccgctacaggtccccaggccctctccgacaatgcgttttctgacccatccaatgacgaggtatccgttgatcattggaacgagctgaacgatgagtacgcgttcgtttacgcgaatccagaaaagggttcggagaaagtgcttgtcaagtgcctcgtgatgaacgacaaattgctcgttcatgcttttactcaaggatcttcggagcctttgagccttgagattgatgttggggattatgctggagaggatggagtcagcaattattctcagcaggtcaagaatttggata

SEQ ID NO: 55088 - DNA, 357 bp, Glycine max
  Clone ID: LIB3109-056-Q1-K1-A8
gaaggcttgattgagattgctggcggatgtcaccggttagagaagcttgtcctatgcaagtgtcctaatatttctgactagactttaattgcagttgctaagaactgtccaaagctggctcgatttatcaatagagtcgtgtcctaacatatggcaatgaaggtctacaagctattgggaagtgtcccaatctaaggtctatctcaatcaaggattgctctggagttggtgatcagggagttgctggtgtgttgtcttcagcttctttagctctaacatacgtgaaacttgagtcgctgaatgtttctgatcactatctaacagcgattgggcattactgcattgcaggtaccgatc

SEQ ID NO: 55089 - DNA, 383 bp, Glycine max
  Clone ID: LIB3109-056-Q1-K1-B1
gtggtcaatgagtgaaaaaaagaaagaaagaggtgaggtagaataactaccaaaagtaattagtcaaagtgtcaaaccataattctattttacctgttaatgctacgacttatgggataagagataatgggggcagaaatctttttctatttcagtttttttaatattaattagtacaataatgttgtgaatagaaagcagtactgctataaatttaaattaatgttagtacagttttgaaataagaaagtcgcacctatatcatttagttgacttcaaacgaattttgaatattccaaacaactgcttgtgcttttatcttttttcaatttcatgattgatacattatcaataatttacgtccgtgtttctacttttcaatc

SEQ ID NO: 55090 - DNA, 242 bp, Glycine max
  Clone ID: LIB3109-056-Q1-K1-B11
ttattaccatttcctcgacctctttcgacaccatactgatacacacttaataatattatattataaattatccaccaaattacactaacccctttatatatacaacttaatatctttattttatcaatattaaattaaaatcatttgcaaccaatacctctttacatatttcattacaaatattaatttccaccgattatatatacttatccaaaatattcatcatcttaaattcttctttt

SEQ ID NO: 55091 - DNA, 401 bp, Glycine max
  unsure (1)..(401): unsure at all n locations
  Clone ID: LIB3109-056-Q1-K1-B12
gggccaagggaatagtggaaaatcctcgtaactatttgacattcttctgccttggtaatagggaggtgaagaaacaaggagagtacgagcctccagaaagaccagatcctgatacagattatatcagagctcaggaggcccggcgcttcatgatttatgttcatgccaagatgatgatagttgatgatgaatacataatcgttggatctgccaacataaaccagagatcaatggatggtgccagagattctgagattgccatgggtgcttatcaaccatttcatttggctgccaggcagcctgccaggggacagatccatggtttccgcatgtcgttgtggtatgagcaccttggcttgcttcatgactctntcctccaccctgaaaatgaagaatgtatt

SEQ ID NO: 55092 - DNA, 304 bp, Glycine max
  Clone ID: LIB3109-056-Q1-K1-B4
ggaagaaagatagagagagagagagagagaggtgtgaaggtggtgaaggtttttgagaagaaagatggaacgaagtggcggaatggtaactgggtcgcatgaaaggaacgaacttgttagagttagacacggctctgatagtaggtctaaacccttgaagaatttgaatggtcagagttgtcaaatatgtggtgataccattggattaacggctactggtgatgtctttgtcgcttgtcatgagtgtggcttcccactttgtcattcttgttacgagtatgagctgaaacatatgagccagtct

SEQ ID NO: 55093 - DNA, 400 bp, Glycine max
  Clone ID: LIB3109-056-Q1-K1-B5
ggggcggagaggccattgattggtcggtgcttgcctctttgggaggaggttagaaccaaggtggtgaaggagtggtgtgttaagtacagtgttgcggaagcacctgtggtggaaatacttgagaaacggttcaggaagaattatcaccctgcatggtctgctgcattcatacttgatccactttacttggttaaagatgcaagtggaaagtaccttcctccgttcaattgcttaactcgtgaacaagagaaagatgtagataagttattgacaaggctggcttcgcgagaagaagctcgtgttgtgttgatggagctcatgaagtggagatcagaagggcttgacccactttatgcacaggctgtgcagatgaaacaacgagacccggttaccgggaaga

SEQ ID NO: 55094 - DNA, 361 bp, Glycine max
  Clone ID: LIB3109-056-Q1-K1-B6
ggctcagataggccattgattggacagagcttggctctttgtgaggaggataaaaccactgtggtgaatgagtgctgcgataagtacagcattgcagtaccacgtgtactataaatactctataaacatgaacactggatatatcaccctgaatggtctgctgaattgatacttgatccagtttacttggttaacgatgcacatgtaaagttcctagatcatttcaatagattaacttgtgaacacgagagagatctagattagctatcgacatagatgactcttcgagacaaatctccagcagtgttacttgaactcatgatatctagatcatcatggcttgacaaatttatgcacaagc

SEQ ID NO: 55095 - DNA, 96 bp, Glycine max
  Clone ID: LIB3109-056-Q1-K1-B7
ttggggtttagagaagccattgattgtacggggctatcctctttgtgaagaagttataaccaaagttattaatgaatgctgtattaagtacagtat

SEQ ID NO: 55096 - DNA, 421 bp, Glycine max
  Clone ID: LIB3109-056-Q1-K1-B8
ggtggttatgcagaagaatgtgttggatatcaacagcatcaccagtgttgacgggatcgtcggcaccggcttagacttcttaggcagtgcactcgatacagttacttttttagcctcctccatctccatccaacttattagtgctaccaaggctgatggtgggaaaggaaaagttggaaaggctacaaatttgagaggaaagataacattaccaaccataggagctaaggaagaagcatacgatgctcaatttgattgggacagtgacttcggaattcccggtgcattttatattaagaacttcatgcaaaacgagttctacctcaagtctttaattctcgaagacattcaaaaccatggaaccattcacttcatatgtaactcctgggtttacaattcaaaacactacaagactgatcgc

SEQ ID NO: 55097 - DNA, 392 bp, Glycine max
  Clone ID: LIB3109-056-Q1-K1-C1
gtatgggaagattaggaaagggaagtcgaaggaggctgtgaagtttgtggaggatttgattgctgcggagccgaatgaggttgagtggaggctcttgctggcactttgttatgagactatggggcaattgagcaaggctaaaaaattgttcagggaaatcttgaagaagaggcctcttctagttagagctttgcatggtttggctatggcgatgcacaaaaatcatgaaggccctgctgtattcgaaatgctaaataatgctcaagagttagtttctcgtgaaaatagagttactgaggagagaaatataagaatcttaattgcacaaatgcatgttgtccagggtaattttgaggagggcttaaaaagatttcaagaattgattgatcaaa

SEQ ID NO: 55098 - DNA, 403 bp, Glycine max
  Clone ID: LIB3109-056-Q1-K1-C12
gacaacattgctatcaagaagcttttcactgctcttaaacccaaggacaatgcagtgatcaatggggattttgaagagggtccatggatgttcaggaacacttcactgggtgtgttgcttcccacaaatttggatgaagaaacttcatcactgccaggttggatagtcgaatccaaccgtgccgtccgttacattgattccgatcactactctgttccacaaggcaggagagccattgagttgctctcaggaaaggaaggaatcatatctcaaatggttgagaccaaaccagacatgctctacagcttgaccttctcattgggtcatgctgatgataagtgcaaggagcctcttgctgttatggcctttgctggggaccaggctcagaacattcactacactc

SEQ ID NO: 55099 - DNA, 425 bp, Glycine max
  Clone ID: LIB3109-056-Q1-K1-C3
ggcacaagtgagtttgttgatcgagataactaggaacagtgtgatgaaaatgaaggtccttgttttcttcgttgctacaattttggtagcatggcaatgccatgcgtacgatatgttccctctccgaatgaacactggctatggtgcccgtactccggaggtgaaatgcgcaagttggaggcttgctgtggaagcacacaacatctttggctttgagaccatttctgaagagtgcgttgaagcaacaaaggaatacatccatggcgaacaatatagatcagactccaaaacagttaaccaacaagcttacttttatgccagagaccttgaagtccattccaaggacacatttgtgttcagtatatatggcaccgtactttttaatattccatacttcaaaaaacatggatattgggtggagaaat

SEQ ID NO: 55100 - DNA, 347 bp, Glycine max
  Clone ID: LIB3109-056-Q1-K1-C4
ggaaggagaaaggggaagcagaatcagcgtgatggcaagagactgggtggttcgatccttggcgcttcgtcacgcaatgaagaatagggttctcacactctccttcaaccgaattcttccctcactcccatcaaaatcctctctcttagccaccaccgccgccgccactgcctcctctcagctctccctcctcccctccttccaccactctcgctccctctcctccgcctcagctccttccgacgttgtccttgttaattccgaggaagagttcaacaatatccttaccaaagtccgagatgactcgttgcacgcggtcttctatttcactgcggctttggtgtgga

SEQ ID NO: 55101 - DNA, 400 bp, Glycine max
  Clone ID: LIB3109-056-Q1-K1-C5
gagagaaagagagagaaagatgtcgaagcgtggtcgtggtggttcggcggggaacaagttccgcatgtcgctgggtcttccagtggcggcgacggtgaactgcgccgacaacacgggggcgaagaacctctacatcatttcggtgaaagggatcaaaggccgtttgaaccgtcttccctcggcctgcgttggcgacatggtgatggccaccgtgaagaagggaaaacccgatctgaggaagaaggtcttgccagctgtcatcgttcgccagcgcaagccatggcgccgaaaggacggcgtctacatgtacttcgaagataatgctggtgttattgtcaatcccaagggagaaatgaaaggttctgctatcactggtcccattggaaaagagtgtgctgat

SEQ ID NO: 55102 - DNA, 313 bp, Glycine max
  Clone ID: LIB3109-056-Q1-K1-C7
ggcagtggagagagagtgttagcaccagcaatgtggaagttaatcttcgtgtaccttgcactaattcctcttctctgcacctacttctcgccagagaaaccctcagatcggcgcatcctcgatctgctcgatgacttcgccatcaaatcctgtcactctctcttcttcaactccctcaaatctcgcggcttcgatctccaatttcacctcggcgacgaccccaaaattgcgctccagagatacggccagtacctctacgacgccctaattctcttttcccccaccattgaacgttttggaagatccattgacg

SEQ ID NO: 55103 - DNA, 222 bp, Glycine max
  Clone ID: LIB3109-056-Q1-K1-C8
ggcagtcgcgtctgataataaacatacacaatcgcctctctcttctagccctagggcgctcttactgattttctctcttccgattgagagaattgtgaacatgttactgcaagctactgacaaactcattaagcactggaaagttgtcagatgtaataatgttatgataataaggtgcaaagataacggctagactgggactattaaccgtgtcattcgctc

SEQ ID NO: 55104 - DNA, 203 bp, Glycine max
  Clone ID: LIB3109-056-Q1-K1-C9
accaaatacctggatggtatgtcactttgtatgatgatgttcttctagaatttggtgcttataatgatcattgggtagtggcaaaaaatgaagaggaagctcataaagaggctatccacatgtataatggaaagcattttcatttaagccaagatcctgacgttcttgatacatggttttcttctgattctgttcccattatc

SEQ ID NO: 55105 - DNA, 330 bp, Glycine max
  Clone ID: LIB3109-056-Q1-K1-D1
ggacgaccggcttgcccaatcgactgcgtgtctctctgaattgacacgcttaaagacaaagtcttaaatggctggtccaaggattgcccatgctaccttggctggtactaatgtggttaaagagataataatcggaataacacttgtcttatctgctggttgcgtgtggaagatgcaccactggaatgaacagaggagaaccatgaccttctacgatttactggaaaaggctgagatcagtgttgatgcacaggaacagtgaaaatgttcttgctttagacgactatgcgtctcattcatacgcttgtttgtgcatgctatattcaattg

SEQ ID NO: 55106 - DNA, 405 bp, Glycine max
  Clone ID: LIB3109-056-Q1-K1-D12
gatggcaatggggactatgtgaaactgagggcgaacgccgacgacggttctcctccgggtgcggcggcggagctttctccgccgacgctaagagccgccgtgtggtattgggtgaaattggtggtgttgtttctattcctggggtttttggctgtggttgtgctcgtctgggtcggaccctatttcatagacaaggagattattccgattataaattgggagacagagactttcagtactccagtgttaactgttttggtgtttgcatctgtggcaatattcccaaccctacttttgccatctacaccttccatgtgggtggctggaatgacatttggttatggctttgggttcttgctaattatatctgcagcagctattggtgtatcactcccttttgtcatc

SEQ ID NO: 55107 - DNA, 407 bp, Glycine max
  Clone ID: LIB3109-056-Q1-K1-D2
ggtgcacaagtgagtttgttgatcgagataactagaaacagtgtgatgaaaatgaaggtccttgttttcttcgttgctacaattttggtagcatggcaatgccatgcgtacgatatgttccctctccgaatgaacactggctatggtgcccgtactccggaggtgaaatgcgcaagttggaggcttgctgtggaagcacacaacatctttggctttgagaccattcctgaagagtgcgttgaagcaacaaaggaatacatccatggcgaacaatatagatcagactccaaaacagttaaccaacaagcttacttttatgccagagaccttcaagtccattccaaggacacatttgggttcagtatagatggcaccgtactctctaataattcatactacaaaaaaca

SEQ ID NO: 55108 - DNA, 365 bp, Glycine max
  Clone ID: LIB3109-056-Q1-K1-D3
ggggccgaaccgcgagcaatgatttgttggtgtgagagagagggagggcgaactaaagattcgattttggggtgaagcgaagcgaagccatgagacgaaaccattcgaactccggcaattatcggaatccatgtttaaccatgcaccagccttgggcttctctcctcgtttacgggatcaagcgcgtcgagggcaggtcatggcccgctccaatcacaggtcgtctttggattcattctgccagtaaagtcccggaggagtctacaatcaaagcaatggaatacttctacaaggagatttatgcactcaatggcatcagtgatatccaatttcctcaacactaccctgtctctaggcttttgggc

SEQ ID NO: 55109 - DNA, 355 bp, Glycine max
  unsure (1)..(355): unsure at all n locations
  Clone ID: LIB3109-056-Q1-K1-D4
ggagcaggggagttcaaagaagttgttttccaggccacacgcgtagcctacagtgctacaggtatagtgtctctcttgtctggtcaacccaaaggagaagtttcggttgaagcccggtcagagtcaaaaggctattttgaggaaactgtgacagattcatctggaaattatcgtctgagaggactactgcctgatactgactatgttgttaaagtggctaaaagggatgtgggcagttctaatatagagcgtgcatctccagattctattgctgtcaaggttggaactgangatatcaagggatcggattgtatagtttttgaggagccggaaatgacaattataagttgccacg

SEQ ID NO: 55110 - DNA, 381 bp, Glycine max
  Clone ID: LIB3109-056-Q1-K1-D5
cgccaccggagggggccgcaccggaaccaagcatggaacagtgagagatatggttctgtctaacgagtctacgctgaactttgtgctttcttgaagatgtcgttactcttcgatcttatcaaccttaacctatccgacatcaccgataaggagatcgccgagtacatatggtctgctggatctcgcatggatatgcggagcagagcacggactgtctggtgactgcataatgacccttacaagctattcaagcggaactatgatggttgcagctctggtcaagcttctggacaagatcttgaaggggacttatgtccacaatcaatttttcgggatccattttcgaggggtctacactgttctggatatgtttgatgctta

SEQ ID NO: 55111 - DNA, 426 bp, Glycine max
  Clone ID: LIB3109-056-Q1-K1-D6
ggtccacccgttcgttagatctaacaaccacttatcccctttctccttctaacgagtgaggaaaaatggcgcgtaagaagatcagagagtatgactcaaagaggttgttgaaggagcactttacgagactctctggcaaggagttgccgatcaagtctgcacaaattaccgcatcaactgatttcactgagctacaagagaaggaaccctggctttcatcttctaaattggttgttaaacctgacatgttatttggaaagcgtggcaaaagtggtttggttgccttgaatttggattttgcacaagttgtttcatttgtgaaggagcgtcttggaaaagaggttgagatgagtggatgcaaaggacccataacaactttcattgttgaacctttcatgccacacaatgaagaagtttacctttaca

SEQ ID NO: 55112 - DNA, 288 bp, Glycine max
  Clone ID: LIB3109-056-Q1-K1-D7
ggtacaccgaatcgaaggaaccaaccgtcattgagataattatttctgacacaattgtgtgtctattcatgcttcggatggcaatgttgtggcatttctatcacataatcaatgagtatagaactcgatgcttactcaatgctgtgcgtatggatgcacttcaatgcatgggctgtatgagcagattaccttactatccgagtgtgacaatcatgttacaggtgatgcacctatcaaatcgagccattcagactgcttgcatcgtcaagaatcatggaatcatcatga

SEQ ID NO: 55113 - DNA, 426 bp, Glycine max
  Clone ID: LIB3109-056-Q1-K1-D8
gggggcctgaacaatgctgtcaatagtccagtcaggcctggcgcttacttgggatctggaagtgggacttttggtgtttcaattggaaatgctggcaccaattggggtccatcagttccaacccagggtggaggggctgcctctgggtatagtacttggggctcttatgaaggtggagataacagcattggtttaggaggtggagggtatggaaggaacagcagcccaagtgtgcctcaatcctcaacatttactgcaccaactggtgattatgaaggatcctatggggacttgtaccgcaatggttcagtttacagtgactcaactttgcggtctgctgcttctgagatagatgcttctggttcgtttggttatggtggacttggtggtatagcttcagatgatctagttaagagttctgagggt

SEQ ID NO: 55114 - DNA, 421 bp, Glycine max
  Clone ID: LIB3109-056-Q1-K1-E1
aaggaaagacagtggagtctgcaaacatgatcaactgaataatgcttacccaaatggagctttgctgccaccttcagctagttgttccttgtcattatccatgacgatgggtaacaagcgtgcagttatatgtggagttacatacgggaaaaggaaattcaagctagaaggaaccattaatgatgttaataacatgaaaaatctacttcttgataactttaaattcccaattgggtgcatacgtgtccttacagaagaacagaaggatcccaatttaattccaacaaagaagaacatactggattccttaaattggctcgtgaaagactgccagtcagaggactcattagtcttctacttctcaagacatggtttgcaacaaccagaagatcgcataggagatgaaattgaccggcttgat

SEQ ID NO: 55115 - DNA, 406 bp, Glycine max
  Clone ID: LIB3109-056-Q1-K1-E12
ggaatgaccaagaacaacatgaattttctagccttcgttactgttctactcttcatactaccagcaacctcatcttcccagtatttggggaacaaccttctcactcatcgcaagatattcctaaaaaaagacaacattattacctcgtacgctgtcatctttgacggtggtagcacaggaacccgtgtgcatgccttccattttgaccagaatttggatctccttcccattggtgatagtcttgagcttaataaaaagatcacacccggtttaagtgcttacgaggatgatcccgagcaagctgcagaatctctgattccacttttggaggaagcagaaagtgtagttcctgaggacttgcgtcccaacacacccgttaggctaggggcaactgcaggcttaaagc

SEQ ID NO: 55116 - DNA, 373 bp, Glycine max
  Clone ID: LIB3109-056-Q1-K1-E4
ccatacaacattgaagaaaccctcacctcctttggcggctctcaatttttcgaaccccaaaccctagtttcatttcgatttcttctctaataattacactcacacatagtttcacgcgtagtgttatcattcatgaacgtattgtttgaaagaagttaagtaaagagagagtagtgggttgtggctcggtggagaaagtagtaaagtaatggaggaatcgttagggcagaaatggaagcagcgagagttcgctttggcatcagtttccgacctctcttcggctccttcttcggcttcgccgggaattgctcgcttcgactctgacggtctccaaattcatcatcaatcttaccagattccattcaatgtcgat

SEQ ID NO: 55117 - DNA, 386 bp, Glycine max
  Clone ID: LIB3109-056-Q1-K1-E5
ggatgaaagaaatataaatagaagcagcagcgggatttggtaaagctagaaattgcaatgaagaagaggagcagcagcagcagcagcagttcagtttttgaggcgaatggagtggaggaacctcaacaaccttcatcctgtgcagcagcagcacttgatgagttgcataaagagaaaaatgagaatggagaagaaaccctcgtgccttccaatccctatcccaatcttgacgatggcttctatgaaatcgaaaccatacgccgtaagaggctacgcaagggtcagctccagtacctaatcaaatggcgtggatggcctgagactgccaacacttgggaacctcttgaaaatctacagtccgttcctgatctcggtgatgcttttga

SEQ ID NO: 55118 - DNA, 288 bp, Glycine max
  Clone ID: LIB3109-056-Q1-K1-E6
ggttcaccggatcgaaggatctaacagtgagagggatagttttttctaacaacgggtcgcgtaaattggtgcttcagaggagaaggctgtactattccatatggttattcaatgagtattggactcgactctttatcatggaggtgcctatgtatggtctgcaggatatcggattcattggcagagctagattacggactgtctgatacaatcatatatccccttatgagctatgtcaaaccgagctattcaggctgcatgcatggtcaaggttctgggcaatgattt

SEQ ID NO: 55119 - DNA, 160 bp, Glycine max
  Clone ID: LIB3109-056-Q1-K1-E7
gcttcaccgaatccaaggatctaacagtgatagggataattttttctacctacagtattcgtaaattggtgcttcggatgagaatgctgacacattcccatatgttacatcaacgattataggactccatgcttaatcatacatcagcctatgtattctc

SEQ ID NO: 55120 - DNA, 341 bp, Glycine max
  Clone ID: LIB3109-056-Q1-K1-F1
acgcgtgagcagatgtgagaagacgacacagaggggactcgataatgtgatcgcaagggacagtggtttaggcaaagcaaccagacttgctgttgaggcatggggtctgaagaattgcacccaaaaggaatagtggtacagtgacactgtgactgctgttcttgttcctgcttacattgatagtactgaaatagttaggagggcatggaagagatacaattggagcttaagtattggactgaacaaagatgctgtgaaggttttaagaattggacatatctgccacttgaatgagttgcaactgttacgatgtctagctggtgtacagatgatactcaaag

SEQ ID NO: 55121 - DNA, 385 bp, Glycine max
  Clone ID: LIB3109-056-Q1-K1-F2
ccccaagagaatgagatataaaattcctagaaggaaaagggaaaggaactgagagagtaaagacaaaaatggaatccacacacgtaatagccattacaaatggagaagagaatatgattcgttcatcaaaagagaataaaacattccaatttcaacttccacccattatttcccatcttgggaaaaatgaagtccactgtgtctccattacttcttccaatcccagacacaagcaggtgcaaagtggtggccatgacacgaggaagataatccactgcatcaaaatgggaatctccttggttttggtttcactcctatacctcttgaaccctctctttaagcaagttggagaaaatgcaatgtgggctatcatgacagttgtagt

SEQ ID NO: 55122 - DNA, 215 bp, Glycine max
  Clone ID: LIB3109-056-Q1-K1-F3
gctactgagaatgaattatgatggaagtgaatcgggaagttagtaaggctgaaactgtttgcatgatgatggggatgatcacgatgaactacatgcaggcactgatgcgaatgaggatcaggcctaagatgatgatgaagatgcttacactgaggtggaccaggttgaagctgcattggatgaccatgctactgctggggcttcattacatgatg

SEQ ID NO: 55123 - DNA, 180 bp, Glycine max
  Clone ID: LIB3109-056-Q1-K1-F4
gaggacatccgacagtgacgaatccctgatctactttggcggcgctcaattattagaacggctgacactagtgccatctcgaattcgaccataatgattacactcacacatacatgcacgcgtctgggcataatccacgaacgaattgcatgcactaaggtgaaatgcgatagagccaag

SEQ ID NO: 55124 - DNA, 400 bp, Glycine max
  Clone ID: LIB3109-056-Q1-K1-F5
gccacagaaattcaatactaaacacaacagatcggagagagagtgtgtgaaaagtggaacacacaacagaacatcaatggcgacacttaatgctcctcagcctcttacccccgtatgcagatgattgtgagcagattctaaaagccttctcaggttggtgaactaacgaggagctgattgtatcgatcttgcctcatatgaatgctgctcacaggaagcttatcagataaacttatgcccagacctatggagaagatctcctcaaggccttggacaaagaactcacgagtgattttgataggctggatcatcattggacacttgattctgctgaacgtgatgcatttatggcaaacgaggcgactaaaaaacggactttaagcaatcagggtctggtgga

SEQ ID NO: 55125 - DNA, 359 bp, Glycine max
  Clone ID: LIB3109-056-Q1-K1-F6
gcttcaaaaatccattcctaatcaaacggaacggtaaaattatgtgtggaaaggggaaccaaaatcctaaccaccatggccaccattaaaggttcttaacctttttcccccgttgcatattattgttaacaatttcctaaagcctttttaagtttggggaattaccaagatgctattggatttaaccttgcttattataattcctcttaaaagaatcctattcataaaacctattccccaaactattgttaagaacttcttaatggccttgacaaagtacctaactatgaatttttcaaggttgttaatttttgaccccttattcctgttaaccgtataccattttttggcaaactagg

SEQ ID NO: 55126 - DNA, 69 bp, Glycine max
  Clone ID: LIB3109-056-Q1-K1-F7
gcttcaccgattcaaatgatctaacagtgattgggataattatttctataaacttgattctataaattt

SEQ ID NO: 55127 - DNA, 285 bp, Glycine max
  Clone ID: LIB3109-056-Q1-K1-F8
gattaagaggtcattcaaatacgcctgggtgcgggacaagcttgaggctgaacgtgagagaggaattaccattgatattgcattatggaagtttgagaccaccaaatactactgcactgttattgatgctccatgacatcgtgatttcatcaagatcatgattactggaacttcccaggcttgattgtgctgtccttatcattgatttcacaactggttgatctgaagctggtatttccaaagatggtcagactttcgagcatgctctacttgctctttactctt

SEQ ID NO: 55128 - DNA, 336 bp, Glycine max
  Clone ID: LIB3109-056-Q1-K1-G1
ggagtataaaattgcaatccctgggattggaaatggcagcggcaggttgcccgaagcttctggaattgagcacgaagatcgtcgctgttggcaaaaactacgctgctcatgccaaagaactaggcaacgccgttcccaaggagccggtgttgtttctgaaaccgacgtcggcttacttgactaacggcggtaccattcatatcccacacaacgagggctctctgcatcacgaggttgacctcgctgtggtcatctccaagaaagcccgtgacgtctacgaatcctgtgccatggattacctcgtcggttatgcactggctctggatatgactgcta

SEQ ID NO: 55129 - DNA, 279 bp, Glycine max
  Clone ID: LIB3109-056-Q1-K1-G12
ggatcttttgttggttattgggaaacgggttgtgacggatccttcaagggaagaaagtgggtgctcgagtggtgtggagtgcattctttgcattctaagggcccttaagatggggtcctgcttctgtgtggaaaagcacgagccctccctgcaatataccaaattcatcatgtttcaggaagagaaagagcctcttccagaaaaggctttgatcaaaagactctttatttgagtattggaggaatgagcctccttttatgatccctgtgaggatctttc

SEQ ID NO: 55130 - DNA, 335 bp, Glycine max
  Clone ID: LIB3109-056-Q1-K1-G2
gtttatagctatggtgatgtggtgttggaaatccttacaactagactaccagttgatgaggactttggtgaaggtgtagatttggtgaaatgggttcacagtgctccggtaagaggggaaactccagagcagatattggatgctaagcttagcacagtttcctttggttggaggaaagaaatgcttgccgctttgaagggcgcgttgctgtgcactgacaacacaccagccaaacgaccaaaaatgaagaatgtcgtggaaatgcttcgagagataaaagaaaatcgagaacagttagccacttaagtattctattctgtgctgtaatctactcc

SEQ ID NO: 55131 - DNA, 300 bp, Glycine max
  Clone ID: LIB3109-056-Q1-K1-G5
aggaccacagaaattgactactaatctctggagatcggcgagatagtgtgactaacatggctcacacgacagtcatctatagtcgacacataaatgcttctcaagccttttatacctgctcgagactattctgagcatattattaaagcctactcactgaggtggacttactagttgccaactgggttaatcttgcctcatatgagtgctcatcagaggaagctgatcagatgaccttatgctctcacgtatggatcatatcttgctgaggactctgtccatgaacttacttaatatttt

SEQ ID NO: 55132 - DNA, 279 bp, Glycine max
  Clone ID: LIB3109-056-Q1-K1-G6
ggctgttcaatgtggtcacgtctgtggggattattcttgtcaataaggccttgatggctacatatggttttagttttgctacaactttaactggtctccattttgccacgacaaccttgttgacactcattcttaaatcgttgggatatatccagacctctcatcttccattatctgatataatcaaatttgtcttgtttgcaaatttctccattgttgggatgaatgtgagtttaatgtggaactctgttggtttctatcagattgctaagctgagca

SEQ ID NO: 55133 - DNA, 400 bp, Glycine max
  Clone ID: LIB3109-056-Q1-K1-G7
ggaggaaaaggaaaggaaaggggagccaaagcgaaaccctaaccctaacggagagatggcggagcacttggcatcgatattcgggacggagaaggacagggtgaactgtccgttctacttcaagatcggcgcgtgcaggcacggcgaccggtgctcccggcttcacacgaagcccacaattagcccaacgttggttctgtcgaacatgtaccagaggcccgacatgaacatgaacatcatcaccaaccccgatcagccccagccccaatctctcgaccccgataaggtccaggatcacttcgacgacttctacgaagatctctttgaagagcttagcaagtacggccccattcagagcttgaatatttgcgacaaccttgccgatcataagggtggaaat

SEQ ID NO: 55134 - DNA, 367 bp, Glycine max
  Clone ID: LIB3109-056-Q1-K1-G8
gacgaggacgatgaagacgaggaggagttgaagaagaggccctttgggttctctcgctccagcaacaaggctgcttctaagcctctctctcgtggatcagcaactgtggaatcaaaggggcaagctgagaagtgtgccaagagaaagaggaagaaccagtatcgtggaatccgtcagcgtccatggggaaagtgggctgctgagatccgtgacccaagaaagggggttcgtgtttggcttggaactttcagcactgctgaagaagctgcaagagcttatgatgctgaagcaaggaggatccggggcaagaaagccaaggtgaatttcccggatgagccttcaagcgctgctgcttcctcaaaacgcc

SEQ ID NO: 55135 - DNA, 316 bp, Glycine max
  Clone ID: LIB3109-056-Q1-K1-H1
gggcatgaggtagagcagaggaatggcgcgacgggaaaggggatataacggggaagtggcactggcgaatgataatgagtgtcgaaaagaaagtccatggccatgagtgtgggcgtggcattgccatacaccaccaccagtctcagtttacttcgctaccgctctcgctctccaattcaaaataaaatccgttttccccgtcaaattgtttctaaattaaacagtgcagaggttcaggttcaaacctgggaattttgctttctgaatcacgtaattgtatttatattcttctgttttttgaaacagcttcaggcct

SEQ ID NO: 55136 - DNA, 221 bp, Glycine max
  Clone ID: LIB3109-056-Q1-K1-H10
gtcacaagtgagttatttggtggaaatatcgagaaacagtgtgttgaaaatgaatgtccttgttttcttcggtgctacaatttttgtagcatttcattaccatgctttcaattttttcccttttcaaatgaacactgtctatacttcccttactacaaatgtaaaatgctcaagttgtaggctttctacataagcacacaacatctttgacttttatacca

SEQ ID NO: 55137 - DNA, 383 bp, Glycine max
  Clone ID: LIB3109-056-Q1-K1-H11
gacactaaacaagttaaaaggggagcatcagtgaactaacaaagcaaccctatgtctaaggtggtttgtgtcaccggagccagcggcgccatcggatcatgggtggtcctactcctcctccagcgtggttacaccgtccatgccaccgtccaagatatcaaggatgaaaatgagacgaaacatttggaggaaatggaaggagcaaagagtcatctccatttttttgaaatggatcttcttgacatcgactccattgccgctgccataaagggttgttccggcgtaatccaccttgcatgtcctaacatcattggtcaagtcgaagatcccgagaaacagatattggaaccggcgataaaaggaacggttaatgtgttgaaggc

SEQ ID NO: 55138 - DNA, 358 bp, Glycine max
  Clone ID: LIB3109-056-Q1-K1-H12
gatgacgagtgtgacagaatagactaattctttgagaaatggaattctagaagcatactcagggatcttccaagggtttaaaggttccccaaagacccaacttctgatgccatatgctcctcatgtgctggaaaacttggataagtttgataatgagaaggacatcgatgatgatgtgactaatacaacagttgtcgtgcttctagatatatcagctcatactgtgggtactaacgctcccccgttgattcatcaatctgcgtccaacacagacttacttaaagagtgtttatcatctgatgatcatttgattaaggaatctgcggaatgggccaagttggcaatcagtcgagcattt

SEQ ID NO: 55139 - DNA, 387 bp, Glycine max
  Clone ID: LIB3109-056-Q1-K1-H2
gtcattagaattaatgcttactgactttattgtggccattgattctggcgttcctcgtcgaccccctgctggaaaacgtgcagatgaccaggttaattatcctaagttggtcgagttactactcaatagctcagagttttcctctaacctgttacatgatataaccggagggagactaggattccctcatccagaagacacaaatacaatcattgatgttcatactactgatgtaacatcagtagttcatgcgttccgtagtggttttcgtgctgctcttagggatctgcagggattccacatattcctactcacactgcatcaaaaacttgataatttgttaagatcatttatgaatactataggcaaaatatcatcaagggagtc

SEQ ID NO: 55140 - DNA, 359 bp, Glycine max
  Clone ID: LIB3109-056-Q1-K1-H3
agagtggtggagtgtgcaaaagagcgtcgtagtggcaacgggtaatcagaagaagcgcagcttcaagcgagtgacagccaccagccatgggtcgtatgcacagccgcggtaagggtatatcctcttctgctttgccctacaaaaggacacctgctagctggctcaagatctcttcgcaagatgtcgaagaaaatatctgcaagtttgcgaagaaaggtttgaccccgtctcagattggtgtcattctcagagattctcacggtattgctcaagtcaatagcgtcactggcagcaaaatccttcgcatcctcaaagctcacggacttgcgcctgaaatttcagaagaccctgaccatttg

SEQ ID NO: 55141 - DNA, 367 bp, Glycine max
  Clone ID: LIB3109-056-Q1-K1-H5
gacctaaaaatggcatcaaaactgaccctgattaggttggttgttgcggccctgtgcgccgttgatctaacccagagagcatcatcatcatcatcatcccctcacgcgccagcgccctccgtggactgctccaacctggttctcaccatggccgattgcttgtccttcgtcaccaacggcagcaccatcacaaagccagagggcacatgctgctctggtttgaagtctgttctcaaaaccgctccagcgtgtctctgcgaggctttcaagagcagcgctcaattctgcgtcgttttgaatgtcaccaaggcaaccactcttcctgctgacttcaaagtctctgcttcttttgccaccaactgtggat

SEQ ID NO: 55142 - DNA, 268 bp, Glycine max
  Clone ID: LIB3109-056-Q1-K1-H6
ggacccaaaaggttgtcacgaataaggcgatggggttctatgatggggacccgataacaggtaacataaccaattggaccacaccttaatctaggcttgctgatgacacgactaacattatgcctcctactggttgatacttgagcatcaacaaatacactttaatgctcaataactgatttcttgatccgaatctacgagagcagctacattcataggtcacacatatatcatgaaaccgatgaaccaatggattacatgactgaat

SEQ ID NO: 55143 - DNA, 254 bp, Glycine max
  Clone ID: LIB3109-056-Q1-K1-H7
ggctgtaaaatgtagtcacgtctgtgggaattaggctagtcaataaagccttgatggctacatatggatttaattttgctacatgctttaactgcactacatcattccacaacaaccttgttgacacttactcttaaatcaatctcatatatccatacctctcatctaccattatctgatatcatcaaatttgtctcgtttgcatatttcttcattgttgttattaatgtgattttaatgttgaactcttacat
